United States Patent Application Publication US 2004/0029129 A1 - sequence listing, part 6

SEQ ID NO: 16428 - DNA, 1386 bp, Clostridium botulinum
atggaaaatattaaactagaagaaataataaaagcagttaatggtgagttagtgataactggagaaaaagatgaatataattcagtaagcacagatacaagaaaaatagaaaagggagatatatttatagccttaaaaggagaaaattttaatggaaataactttgtagaaatggccatagaaaagggtgccgctttatgcatagtaagtgaaataaattttagcgaaggaaaagtgagcaaatcttcctatgtaataaaggtagagaatactaataaggctcttttagatttagctaaatactatagaagtaaactagatataaaagtggttgctattactggatctacaggaaaaacatctacaaaggatttagtggcagctgtgctttcagaaaaatataaggtatttaaaacagagggaaattttaataatgagataggacttcctcttatgatctttaaattagataaaagttatgatatagcagttttagaaatggggatgaatcattttaatgaaatacacaatatggcagaagcagcaaaaccagatatagctataataactaatataggtatatctcatatagaaaatttaggatctagggaaaatattttaaaagcaaaactagaaataacagatttcttctgtaaggatagtattttaataataaatggagacgatgatcttctatcaaattttgaaagtgataaatttaaggtatacaaaataggcacagataaaaaatttgattttaatggagataatttaaatttagaggcagaaagtataaaatttgatatattagaacgaggtaaaacagcttatagatgttttagcgtaaatgtacctggaaagcataatgtgcttaattctcttacagctatagcttgtggaagagttttagatataaattacagggatatacaaactgggataaaaaatttaaaagctacttctatgagattagatattgttaaggaaaagggatttactataataaatgattgttataatgcaagtcccgattctatgaaagcagctatagatgtaatgaaaaatataaagggaaaaaggactatagctttattaggttctatgagggaacttggatccgaagggtatagagctcatagggaagtttctgaatatgcaagagaaaagggaatagatctattattttctataggagaatttagtgaagcatatagagaagggtttgaagaaataaacaaagagaattataaaagctttttaaataatgaagaagcagcaaaatacataaaaaatataataaaagatggtgatataatattaattaaagcatctagagctatgaagctagaagaaatagtaaaagaactaaggataaaacaagaaaaa

SEQ ID NO: 16429 - DNA, 603 bp, Clostridium botulinum
gtgaaagatttggatttttatcctatagctatagaaaaattaatagaagagttcgctaaattaccgggtataggttataaaacagctcaaagacttactctatatgtactaaatttacctaaagaagaggtaaaggaattctcagaggccttagtaaaagctagaggtacaattaaatattgttctgtatgtggtaattttacagataaagatccttgtgctatatgtagtaatcctaataggaataaatctattatttgtgtaatagaacaacctaaagatataatgtctatggaaaaaataagagaatataatggagtatatcatgtattacatgggaatatatctcctatggcaggaagaggtcctgaagacataaaattaaaagaattaataagaagaatagatggtagtgtaaatgaagttatagttgctactaatcctaatgtagaaggagaagcaacagctatgtatatatctaaaatattaaaacctctaggagttaaagttacaagaattgcccacggagtaccagtaggtggggatttagaatatgcagatgaggttactttagctaaagctttagaaggaagaatagaatta

SEQ ID NO: 16430 - DNA, 1011 bp, Clostridium botulinum
atggctaaagatgataaattaacaggagttcaaaaagcagcaatactatttattactttaggtcctgaggcctctgctggtataataaaaaaattaccagactcagaaatacaaaaaataacctatgaaattgctaatataacttctgtaaaatcagagttaaaacaggacatattagaagaatttatacaaataaataaggctaaggactatatattagaaggtggatttgagtatgcaaaaaatcttctaggaaaggctttaggtagtcaaaaggcaatagaaatattagataaggttacggaggctacacaacaatttagaccttttgcaatagctagaaaagcagacccatctcagcttttaaatactatatctaatgagcatcctcaaactatagctttagttttatgctatatgcaatcagataaggcagggcaaatattgtcctcccttcctgaagatttgcaatcagaggttgcttatagaattgctacaatgagtgctacttcacctatggtggttaaagaaatagaaaaagtattagatagcaagctatcttcagtagttagatctgatgctacaacaataggaggagttcaaactattgtagaggtattaaaccaagtagacagaactacagaaaagaacattacagaaggactacaaagagaggatgcagaattagcagaaaagataaaggaatctatgttcgtattcgaagatataataactttagacgatgtagcaattcaaagagttctaagagaagtagaaacaaaggatttagctttagctttaaagggatcttcagaggaagttgccaatgttatatttagaaatcaatctaagagagccgcatcttctttaaaagaggatatagaattcctaggtcctgtaagaataatggatgtagagaaggcacaacagggcatagtaagtataataagacgtttagacgaagctggagagatagtaatatcaagaggtggcgaagatgcaatcattgta

SEQ ID NO: 16431 - DNA, 1899 bp, Clostridium botulinum
ttgtttaggaaagtaggtaattatatgaaatattcagctggagattttgatgtagtagttattggagcaggtcatgcgggatgcgaggctgcattagcttctgcaagaatgggatgtaaaacattaatatgtactatgaacctagatagtattgctcttatggcttgtaatcctaatataggtggaacagcaaaaggacatttagtaagagaaatagatgctttaggtggagaaatgggaataaatatagaccatacatttatacaatctagaatgcttaatacttctaagggtccagcagttcattctttaagagctcaagcagataaaaaaagatatagtgagagaatgaaacatctactagagaaggaagataatgttgttttaagacagctagaagttatagaaatagatgtagaggataatgaagttaaaggtgttttaactaaaaatggagcatattttactacaaaagctataatattatgtactggaacttatttaaagggtaaaataataataggagatataatatatagtagtggaccaagtggtttgtatcctgctaatgatttatctcaaagtttattagatttgggtataaatcttagaagatttaaaacaggaacccctgcaagaataaataaaagatcagtagatttttctaaaatgatagaacaaccaggagacgaaaaaatagttcctttttcatttattcataataaactagacaaagaccagatttcttgttatttaacttatacatctgaagaaactcataaaataatacatgaaaatatacatagatctccattatataatggatcaatagaaggggtaggtccaagatactgcccatctattgaagataagattgttagatttccagataaagataagcatcaaatattcatagaaccagaaggtgaaaatacagaagaattatatgttggcggtatgtctagttcattaccagaagatgttcaaataaaaatgtatagaagtgtaccaggtttagaaaatgcagaaatactaagaactgcctatgctatagagtatgattgtattgatcctcaacaactagatttaaccttagaattcaaaaatataaatgggttatatggggcaggtcaatttaatggaagttcaggttatgaggaagcagcagcacaggggcttatagctggaattaatgctgtgttaaaaataaaagaaaaaaacccattaatattgaaaagatcagatgcttatataggtgtacttatagatgatttagtaacaaagggcacaaatgagccttatagaatgatgacatcaagagcagaatatagattgctgttaagacaagataatgcagatttaagattaacagagttaggctataaagtcggacttgtaaaagaggataggtataataaatttctaaataggaaaaaaaatgtagaaaatgaaatagaaagattaagaaatatgcaaataacaggaaaaagagaaataaacgaatttttattagagaaagggtctactgaactaaaaaagcctattagtttatatgaattaataaaaagaccagaattagattattttaaagttgaatctttagatgataaaagaccaagtttaagtgatgatgaaaaagaagaaataaatataattgcaaaatatgagggatatataaacaaacagttagaacaagttgagcaatttaagaagtatgaagatagattaataccgaaaagtattaattatctagatataaaagggttgagattagaggctattcaaaaattggaaaaaataaagcctataaatatagggcaggcttctagaatttcaggtgtatctccagcagatatatcagtattacttatatatatggaaagaaaaaatagagaaaac

SEQ ID NO: 16432 - DNA, 960 bp, Clostridium botulinum
ttgatgttagataagcatggaaggaaaattaactatttaagagtatctgtaacagatagatgcaatttaagatgtgtttattgtatgccacctgaaggtattgtaaaaaaagaacatgataatataatgagatatgaagagatatttaaggtggttaagtcagctagtttattaggagtaaataaaattagatttacaggtggagaacctcttatacttaaagatatagataaattaatttataatacatcaaaaataaattccattaaagacattgccatgactaccaatgctatacttttagaagatatggtagaggaattaaaaaaggctggtcttaaaagagttaatataagtcttgattccttaaaggaagacaggtttaagagcattacaagaggtggggatattaataaagtttttaaaagcattgaaaaatctttatccattggtatgaaaccaataaaaattaatacagtaataatgaagggcataaatgatgatgaaatagatgattttatgaatttaacaaagaaatatcctatatctgtaagatttatagagcttatgcctataggagaaggtagaaaattatacaaagatggttatataagttcagaagaaataatatccaagcatagtgaccttatacctgtggaaactgagaaaagtagcactgctctattatataaatttaaagagtctaaagaaaatattggattcataagccctatgagttgtaaattttgcagcggctgtaatagagtaagattaacttcagagggcacattgaaaccttgccttcattctgaaaaggaagtaaatcttaaaaactatgtaggaaataaccaagcacttttatctaagataaatgaaactatttataacaaacccttagagcatcatatgatagaggaaaaagaaagtaaaagcaaaaaaatgatgtatcagattggaggt

SEQ ID NO: 16433 - DNA, 1245 bp, Clostridium botulinum
atgtcattgcaagcgccaaaaggtacaaaagatttattgcctacagaatcatataagtggcaatatttagagaataaatttagaaatatagcagcagattttggctgtagagaaataagaactccagtttttgaatatacagaattatttcaaagaggagtaggggaaactacagatgtagttcaaaaggaaatgtatacttttgaagataaagctggtagaagtataactttaaaaccagaaggaacatcaccagcagtaagagccttcgttgagggaagattattcaatgaaactcaacctactaagatgtattattttacacctgttatgagatatgagaatgttcaaaagggaagacttagacaacatcatcaatttggaatagaaatttttggagcaaaagatgcatctgtggatgcagaagttataagtatacctgttggaatatataaagaattaggtgtagagggtgtagaattaaatataaatagcataggttgccctaaatgtagaaaaacttataatgaagcactaaaaaaatatttatctaaaaattatgataaattatgctcaacttgtaaaactagatttgataaaaacccacttagaatattagattgcaaagttgatacttgtaaagaaatagtaaaggatgcaccaattatattagattatatatgtgatgaatgtaaggaccattttgaagcactaaaaagttatttagatgtattggatataaaatataaagtagatccatttatagttagaggattagattattatagtaaaactgtgtttgaatttataatagatgatataactatatgtgctgggggaagatatgattatcttatagaagaaataggtgggccttctatgccagcagtaggttttggtatgggaatagaaagattacttttaacattgcaagaaaaagcaatagaaattcctgaagaagcatatgtagatttatatttaggaaatatgggagataaagctaaattagaggttttaaaattagctaaagaattaagggatagacatataaagtgtgaaatagaccatatgggcaaaagtgttaaagcacaaatgaagtatgcaaataggataggtgctaaatattctatggtattaggtgaagaagaattaaatactggaaaggtatcccttaaaagaatggaagatgggcagcaaatagaagtcgatataaaagagatagatacattaattaaagtatttaaa

SEQ ID NO: 16434 - DNA, 465 bp, Clostridium botulinum
atgagaataggattgggatacgatgtacataaactagttgaaaatagaccactaataataggtggtgttacaattccccatgataaaggtttactaggtcattctgatgcagatgtattggtccatgcaattatggacgctttattaggagccgcggcattaggtgatataggtaagcattttcctgattcagataaaaattttaaaaatatatcaagtctattacttttatctaaagttaaagatttaataaacaaagaaggttataaaattgtaaatatagactgtactataatagctcaaaaacctaaaatgctttatcatatagatgctatgaaaaaaaatatttgtaagtgtttaaaattagataataatatgttaaatataaaagctactacagaagaaggtttaggttttacaggtaaagaagaaggaatctccgctaatgctatttgtcttttggat

SEQ ID NO: 16435 - DNA, 735 bp, Clostridium botulinum
atgataaaaataagtaatttacataaatcttttaatggagtagaagtattaaagggaataaatttagatataaaaaaaggtgaagtagttgctgttataggaccatcgggtacaggaaaatctacgcttttaagatgtatgaattttttagaaaaacctgaaaaaggtataatagaaatagaagatttaaaggtagatgtagagaaagctaccaaacaacaaatacatgaactaagactgaatacatctatggtttttcaaagctataatttatttaaaaataaaactgctttagaaaatataatggaacctttagtaattgtaaaaaaaatggagaaagataaggctaaagaaagggcattaaatatacttaaacaggtgggattggaagataaaaaggattattatccttccaagttatctggcggacaacaacaaagagtaggcataggtagagctatggcagtggatcctaaaataatgttgtttgatgaacctacttcagccttggatccggagcttgttggtgaagttttagaggttattaaaaaattagcggagcaggatacaacaatgattatagtaacccatgaaatgagatttgcagagagtgcagcggacaaagttatatttatggatggtggaaatatagtagaacagggtacaccagaggaagtatttaataatcctaaaaatgaaagaacaataaaattcttaaataaagttaaagataaa

SEQ ID NO: 16436 - DNA, 1824 bp, Clostridium botulinum
atgtgcggaatagtaggttacgtaggatttaggaaggcaagcgatgtaatcgtggatggattatcaaaactagagtatagaggatatgactctgcaggaatcgctgttaatgatggaaaggaaatagagttccaaaaatataaaggtagactaaatgttttaagtgaaaatttggaaagtaagcctatggagggaactataggaataggtcatacaagatgggctactcacggagtgccatctgatgtgaattcacatccacatttaaatatggatgaaacaattgcagtagttcacaatggtataattgaaaattatatggaaataaaagactggttgtcttctgaaggtgtaaaatttaaatcagaaacagatactgaagtaatagctcatttagttgaccattattatgaaggtgatttattacaagcagtatttaaggctataaaaaaattaagaggagcttatgctctaggagtagtttgtaaagataacccagaacaattagtagctgtaagaaaagatagtccattaatagtaggaattggagagaatgaaaacttcattgcatctgatgtaccagctattttaaaatatactagagatgtatatttcttagataatggagaagtagttactttagaaaaagacaaaataaaaatttacaacgaaaaggaagaaggaatcacaaaagaacctttccatgtaatgtgggatgtggaagcagcatctaagggtggatatgaccacttcatgataaaagaaataaatgaacaaccaaatggtataaaagaaactttagttagaagattagatgaaaatggtaaaataaaattagatgatataaaactaacaaaagaagacttagatgaaataaataaagtttatatagttgcttgtggaactgcatacaatgcaggaataacaggaagatatgctattgaaagatttgcaaaaatagctgtagaaacagatgtagcttcagagtttagatatagaaatccatttatagacgacaaaacattaattattgttgtaagtcaatctggagaaacagcagatactttagcagttgtaagagaaggaaaagaaaaaggagcgagagttttagctattactaatgttgtaggatcttctatagctagagaagcagatgatgtattttatacttgggcggggcctgaagtagcagttgcatcaactaaagcatatacaactcaacttgtagcattgtatatgatcgcattagatatgggtataaaaagaggaacaataactgaagaattttataatgatataataagtgaattaaaacttatacctgaaaaagtacaaaaaatactttatcaacatgatgatataaaagaaatagcaaaagaaataaaagacaatgaacatgcattttatataggaagaggattagattataatctttcattagaaggttcattaaagataaaagaaatatcttatatgcatgcagaagcttttgctgctggtgaattaaagcatggaactatagctcttattgaagaaaatacaccagtagtagctacaatgactcaaacagatttatttgaaaagagtatttctaatataaaagaagttaaatcaagaggagcacatgttattgctataactcaggaaggaaataaagaagcagagcaagtagcggataaagtaatttatataccaagaacaaatgatatattacaaagtattattgcagtagtgcctcatcaattattagcatactatgtagcaatactaaaagaccgtgatgtagataagccaagaaacttagctaaatccgttacagttgaa

SEQ ID NO: 16437 - DNA, 807 bp, Clostridium botulinum
atgaatttaaataatttagaaaatatacgatataatgaaataaaggaattctcagataaaattaaaaaagaatttacattttctcaaaaaaaacaggttatggacataatagaaaaattaaataaagactctcggaaaaacgttataaagttagggcaggctcttgaaaaatttttaaataagtatgaagaagagttgaaaagaacaaataatatgtataatttcgatagaagatatggcaataattatttaatagcaggagtagatgaggttggaagaggacctttagcaggacctattgtagccgctgcggtagttttagatttaaatgtggaggaaatgcaaaggatttttaatataaaggactcaaaaaagctttcagaaaaaaagagagaagaattagatataataataagagaaaaagctataagctacaatatagccttagtagataataaaacaatagatgaaagaggtatatcttggagtaataatgaagtgcttaaaagagcagtagaagggctaaaggtaaagcctgatttagttttatctgatggatatgcagttaaaaatttgaatataagaaatgaatttataataaaaggtgatagtaaaagtattagtatagcatcttcatccattatagctaaggtatatagagacagtatgatgaaggaatattctaaagggctaaatatgtatggtttcaatcataatgcaggttatggtacagaagaacatgtacaagcaataaaaaaacatggaccttctaaaatacatagaatgagttttttaacaaatatattg

SEQ ID NO: 16438 - DNA, 903 bp, Clostridium botulinum
atggatattttattagcagtattagagcaaggatttatattttccattgtttgctttggagtatatataacatataaaatattagatttcccagacctttctgtagatggaacctttcctttaggagcagctgttgcagcagctttcctagtaaaaggatatagtccagtcttaagttccttagcggctttagtagcaggtgctatagcaggaggaataacaggtatattgcatgttaagtttaaaataactaatttactttcaggaatattagttatggttgggttatattctattaatttgagaataatgggaaaatcaaatatacctttgtttaataaaatacatttattttcggatactatgaatcctataattataattacagtttttcttttaatatgtaaaattactttggatttatttttaaaaacaaaggcaggatttatattaaaagctacgggagataatgaacaattagtactttctcttggtgtaaataaggatttagtaaaaataatgggactaatgttatctaatgcgttagtagcattagggggagctttaatggctcaatatcaagggttttcagatgtaggtatgggcacaggtatagtagttatggggcttgcatctgtaataataggagaatctttatttggcagaataaaagctttaaatgccactacaagagtattattaggagctttagtatataagttatcagtatcaatagccttaactgtaggtttagctcctacagacttaaaacttgtaacagctataattgtagtaatagctttaagcttaaataagaaccctttaaaaataataacaaaacaaaaaactaaagagggagggattttaaatgcttcaaatacaaaatctgcacaaagtgttcaa

SEQ ID NO: 16439 - DNA, 747 bp, Clostridium botulinum
atggcaattattaaaacagaggatttaaatttatattatggtaatgtaaaagctttaaagaatataaacatagacatagaaaaaaataaagttactgctttaatagggccttcaggatgtgggaaatctacatttttaagaactttaaatagaatgaatgatttaatagattctgtaaaaatagaaggtagcgtatattatgaaggaaaagatatatataaagactatgatgtgatagatcttagaaagaaaataggaatggtatttcaaaatcctaatccttttcctatgtctatatatgataatatagcctatggccctagaattcatggtataaaaactaaagagaaattagatgaaatagtagaaaaaagtttaaaaggaggggccctttgggaagaagtgaaagataggcttaaaaaaaatgcattggggctatcaggaggacaacagcaaagactttgtatagctagaacgttggctgtagaaccggaaatattgttaatggatgaaccaacttcggcactagatcctatatctactcttaaaatagaagaacttatggatgaacttaaaaataaatatacagtaataatagtaacacataatatgcaacaagcagggagaatatctgataacacagcatttttcttaaatggagagataatagaagtaggaaaaactggagaattattttataaaccaaaagataaaaggacagaggattatataacaggtagatttggc

SEQ ID NO: 16440 - DNA, 789 bp, Clostridium botulinum
atgaaaaataaaaatgttatacaaaaaatgagagaaaaaactccacttattcactgcataactaactatgttactataaacgattgtgctaatatacttctttcctttggtgcttctcctgctatgtgtgaagcctatgacgaagtttatgattttgtatctatatcttctgctttatatataaatttaggaactttaactaaagagcaggagactgcagccgtacttgcttccatctctgccaagaatcataatgtgcctgtagttatagaccctgtaggatgccctgctataaaaagaaaagttgaagttataaatagaatcgctgaagttggaagaatagatattatcaaaggaaacataggagaaattaaatttttagcaggaatggattctgaaactagaggggtagattctctagataatggtgaaaatgctttagatgcttgcacacaattagcaaaaaaatataattgcattgtagccgctactggtgaaaaagattttgtatccgatgggaaaagaggttctgtaataaaaaatggtacagaaatgctaactaaagtaactggagctggttgtatgctaggtgccctatgtgccgctacctgcgcaaattttgaagataaattagtatctactacagctgccatattatctatgaacattgctggagaaaaagcatacgaagaagcacaactaccaggtagttttagaattgctttaatagataatatatatatgatatctgatgaagaaatttgggaaagaggtaatgtagaatggaaa

SEQ ID NO: 16441 - DNA, 1323 bp, Clostridium botulinum
gtgtgtatgttagaaaagaaatatgggctttggacaacagtttccatggttattggtatagtaattggatctggtgtattttttaaagctgataatattcttatggcttcaggtggaaatgtaaaaacagccttacttgcatggttagtaggagcaatttctatgatttttggagccttagtttttgcagagtgtgctaatagatttgaaagatctaacggtatagttgattatgccgagggtatgctttcagaaaaatttgcttatttaataggatggtttaatggaattatttattatccagcaatagctgcggtattagcttgggcagctggtaattatactgctattttatttaataaagatggtaattttgtatggattatggccgcaatatatatgataggtatatatattttgaactatatttcacctatactatcagggaaattccaaattgcttcaacagcaatcaaactagttcctttaatgctcatcgctatattgggtacatttcaaggactcaataatggaattttaattgaaaatttttctaaagtatctactataggtgacagtggaagtggttttgcagccgctgtattaggagcagcctttgcatatgaaggatggattattgcaacaacaattaatggtgaaattaaagatgccaaaaatactcttcctaaagctcttgtatttggctcattagtaatagttattatatatattttatattttctgggtattgtaggaatgatacctactgaaactattttaaaacaaggagacaatactgtaaatgtggctgctaggactgtatttggaaactttggcgcatctattcttacaacatttataatagtatcctgtttaggtactcttaatggacttatacttggaggttctcgttccttttattctttggctatccgtggtcaaggtattaaaccagaggctttttctaaattagatagtaaaactaatatacctactaattctactatagcaaactttattttaatctgcatttatttagtggtttggtatatgaattttaaaggactatttcctaataagatgtttgtagatatttcagaattaccaatagctttaatatatgggatttatattattatttatattgcatatatgatgaaaatgaaggacttatcatttataaaaagatttgttattccttcccttgctcttatgggagctttgattgttgtatacggtggactttctaagccttctgtaataattgatttaggtatttctgtttttgtattcctttccggtttactattttataacaaaaaa

SEQ ID NO: 16442 - DNA, 336 bp, Clostridium botulinum
atgcgaataatgtataaaactttaagtaggcaactacttaattttaaggaggtaacaaaagtgaataaatcagaattaattacaagcatggcagaaaaatcaaaattaactaaaaaggatgcagaaacagctttaaaggcatttatagaaagtgttgaagaagcattagaaggtggagaaaaagttcaattagttggctttggtacttttgaaactagggaaagagctgaaagagtaggtagaaatccaagaactaaagaagaaataactatacctgcatcaatagcacctgttttcaaagcaggaaaagaactaaaagaaaaagtaaacaaaaaa

SEQ ID NO: 16443 - DNA, 321 bp, Clostridium botulinum
atgagcttgaattatgatgataatgcaaaaattattaaagcactatcagatggtaatagattaaaaataattgatatattgtcctgtggagaaaagtgtgcttgtgatatattagaacactttcagtttacacaaccgacactgtcccatcatatgaaggttttaattgattgtggattggtgaagtctagaaaagagggattatggagtcactattcattaaatattactaattgtaataaattaattttattttttatgagcattataacggatacagatgactgtatctgtaagaataaatcaaaatgtgattgtgaa

SEQ ID NO: 16444 - DNA, 1383 bp, Clostridium botulinum
ttgatctgggtgtcatttgattttataaaagataaaaataaacatatacattttataggtataggtggaataagtatgagtgggttagcggaaatactactttataataacttttccatatctggctcagatatgaattcatcacctataactgaaaaattaaaagataaaggtgcaaaaatatatattggtcataaaaaagaaaatgtaaaagatgctgatttaatagtatatactgctgccattgcttctgataaccctgaaataacaaaagccaaagaaaaaaatattaaattaatggatagagcagactttttaggtaacttaatgaaaggctacaaatataatattgccatatctggaactcatggtaaaacaactacaacttccatgttatctcatgtagcattaaaggctaatgttgatccaactattttagtaggtggtaatttagatataataaatggtaatgtaagagtaggtgaaagtgacttctttataacagaagcttgtgagtataaatcctcattccttaaatttttcccatatatcggggtaattttaaacatagatgcagatcatttagattattataaagatttagatgatataaaaaatgctttttcaaaatttattaaattaattcctaaagatggctatcttgtagcttatggagaagataaaaatatacaaagcattataaaggaggctagctgtaacgttataacctatggtataaactcaggagatatacaagctcataatatagaatatgatgaaaaagcttgcggaaattttgatgtagttaaagataaccaaaaattattttcagtaaaactaaatgttcctggaaaacacaacatactaaattctctagctagtatatgtattggattggcttcaaatatgaaagataaagatataattgaaggtattgaaagcttttttggaacccatagaagatttgaactaaaaggctgtaagaataatattactgtaatagatgattatgctcatcatcctacagaaatatctgctacattagatgcagctaaaaaatatcctcacaataaattgttctgtgtttttcaaccacacacttattccagaacattaaccttatttgatgactttactaaatgctttgacaatgcagacgaaattattttagctgatatatatgctgctagggaaaaggacactggtattataagttcagatatgctgggagataaactaagagatcgaggattaaaatgtactaattttcataaatttgatgatataaaaaattatcttatagaaaatactaaagatggtgacttaatattaactgttggagctggagatatatataaagtaggagaaatgtatattaattta

SEQ ID NO: 16445 - DNA, 237 bp, Clostridium botulinum
atggatccaaaagcatttgtatcaggaatggcagctttaggagcaggaatagcagcattagcttgtataggagcaggaataggtacaggaaatgctacaggaaaggctgtagaaggagtttcaagacaaccagaagcaagtggtaaaataatgagtactcttgttataggtagtgccttttcagaagcaacagcaatttatggattaataatagcattatttttaatatttaagatt

SEQ ID NO: 16446 - DNA, 450 bp, Clostridium botulinum
gtgggaggagtttttatgcctaataagtttttaattatagataatagcatacttccggatatttttgaaaaggttgtaaaggtaaaagaacttttagctaatggaaaagtaaaagatataacagaaggtgtaaaaacagtaggaattagtagaagtacttattataaatataaagattttgtattttctgtatctgaaggtgtgaaaagtcaaaaggcaactataggattattactaggacatgaaaggggaactctttctaaaatattagatagaatagcagagtatcaggggaatatacttactataaatcaagacatacctataaacaatactgcaaatgtaagcattacctttgatatatcgcaaatgagtataggattaaaagaattagttgaggaaataaaaaatactaaaaatgtaataaaagtggatttgatagctatggaa

SEQ ID NO: 16447 - DNA, 1128 bp, Clostridium botulinum
atgtacaaattgttaaaaaaatcaggaaaggcaagacgaggagaatttacgactcctcatggggtgatacagactcctgtatttatgaatgtaggaacccttgcggctataaaaggggcagtatcatctatggatttaaaggaaataggatgccaagttgagttatctaatacataccatcttcatttaagaccaggagatgaagttgttaaaaaaatgggtggattacataaatttatgaattgggatagaccaatacttacagattcaggtggatttcaagtattttcattatcaaaaataagaaaaatacaagaagaaggagtttattttaattctcatatagatggaagaaaaatatttatgggaccggaagaaagtatgagaatacaaagcaatctagcctcaactatagctatggcttttgatgaatgtgtagaaaatccagcaccaagagagtatgtagaaaagtccgtagaaagaacaacaagatggttacatagatgtaaggatgaaatgaatagattaaattctttgccagatactataaataataagcaaatgttatttggtataaatcaaggtggaacttatgaagatataagaatagaacatgctaaaactatagctaaaatggatctagatggatatgctatagggggattagcagttggagaaagtcatgaagatatgtatagaataatagatgcagtggttccccaccttccagaagataaacccatatatcttatgggagttggaataccaagtaatatattagaagctgtagataggggtgtagatttctttgactgtgttcttcctgcaagaaatggaagacatgcacatgttttcacaaaagagggcaaaataaatttattgaatgccaaatttgaattagatgatagacctattgatgaaggttgtcaatgtccagcttgtaagcattatacaaggtcatatataagacatttatttaaagcaaaggaaatgctagctatgagattatgtgttttacataacttatatttttataataacttaatggaagaaataagagatgccattgatggaaattattttaaagaatacaaagaaagaaagcttaaagagtggggaggaagagca

SEQ ID NO: 16448 - DNA, 2901 bp, Clostridium botulinum
atgagaaataaaaaatataatttaatgcctaagattatttcattgttttttatattatttttattttctataagagtacaagctatatcaaatataagcattgatttaaaaacgccaatacataaaggcataataaatgataagaaattaaatattgatggagaaataaaatctattttaaagttaaaatcaatatatttatatatagataataaaaaaataggacaagccaatttaaatgaattagaatttaaagaaaatacatataaaactagattaaaatatacaaaagatatttcttctttgaaaaatggaatacataatttaagaattttagctatagatgaacagaataacaaaaaagaaaaagaaattagtataaatatacaagaaaatcaagaaaaatcagaaactgataaaaatattatacagaataatttagtagatactaatgtaaagatgggtaatatagaaaaagcattaactactgtatctaatgaagctaagctagaaaaagtagaagtttcatacaatggtaatgtgataaccaatggagaaataggagttggaaaaagttacgttataaaaggatatggaaattctgaaaatggggtactgtatcaattttgggtaaaagatctatccacaaatagttggacaatgataagagattatggagaaacaaatagttttaattacacaccaacaaaggctggaaagtatctgataggaatacatgtaaaagataagtatagtaaagaaaatttagatgattttatatatgagaattatacagtaactgtaagtaaagctaaattagaaaaagtggaagtttcatacgatggtaatgtaataactaatggagaaataggagttggaaaaagctacgttataaaaggatatggaaattctgaaaatggagtattgtatcaattttgggtaaaggatttatctacaaacagttggacaatgataagagattatggagaaacaaatagttttaattacacaccaacaaaggctggaaagtatctgataggaatacatgtaaaagataagtatagtaaagaaaatttagatgattttatatatgagaattatacagtaactgtaagtaaagctaaattagaaaaagtggaagtttcatacgatggtaatgtaataactaatggagaaataggagttggaaaaagctacgttataaaaggatatggaaattctgaaaatggagtactgtatcaattttgggtaaaggatctatccacaaatagttggacaatgataagagattatggagaaacaaatagttttaattatacaccagcaaaggctggaaagtatctgataggaatacatgtaaaagataagtatagtaaagagaatttagatgattttatatatgagaattatgatgtgtctataagtaaagctaaattagaaaaagtggaagtttcatacaatggtaatgtaataactgatggagaaataggagttggaaaaagctacgttataaaaggatatggaaattctgaaaatggagtactgtatcaattttgggtaaaggatctatctacaaatagttggacaatgataagagattatggagaaacaaatagttttaattatacaccagcaaaggctggaaagtatctgataggaatacatgtaaaagataagtatagtaaagagaatttagatgattttatatatgagaattatgatgtgtctataagtaaagctaagttggaaaaagtagaagtctcatacaatgggaatgcaataaccaatagtgaaatagagactggaaaaaattatactataaaaggatatggaaattctaaaaatgagatactgtatcaattctgggtaaaggatttatatacaaatagttggacaatgataaaagattatggagaagagaatagtataaattggaaacctactattggtggtaaatatttaataggaatacatgtaaaggataaatatagtgctgatacattagatgatcacatatatgagaattatacaatattgagtgataatgcaaggctagaaaaggtagaagttaaattagatggaaacctaataagtaataatttaaatgtaggaaagacatatacaatagaaggaagtgctacatctaaaaatggagtgctatatcaattttgggtaaaagacttgtctataaatagctgggcaatgttaagggattatggagaatcaaataatataacatatacaccaacaaagagtggacaatatttaataggggtacatgtaaaagataagaatagcaaggaaagcttagatgattttaaatacaatcaatatagcattataggttataataaaacagtaattgttgatgcaggacatggaggatatgatagtggcgctgtaggaccaaccggtattaaagaaaaggatgtcactttaaaagtagctttaaagttaggaaaaattttagaaaatagtggggtaaatgttatttatactagaactagtgataatgtatcttggccttcaaatgaatcacaagatttagcagctagagtggccattgcaaataacaataatacagatttatatgtaagtatacatgctaatagttttaatggatcagcgaatggaacagaaacatattactatgatgggagtgcaaaaggaaaagaaacagcagaaaaagttcaaaaggaacttgtaaattctattggcttatatgatagaggcgttaaaacagcaggatattatgttttaaaaaatactataagcccatctatattggttgaattaggattcatagataatagaaatgaagaaattcttttaaattctgattggtttcaacaaaagtgtgccgaagctattgctaaaggaatattatcaactagctttatg

SEQ ID NO: 16449 - DNA, 843 bp, Clostridium botulinum
atgaaaaatattggtataaatataaatacagataaggatataagtagaaacattttagacaaaatttttcagtatatacatgaggaatgtagtgaagctaaaataaaggttttttatgattctaaaggtttagataatgaagaaagtagagcattagatgcggtcatggtactaggaggagatggtactattttaggtactgctagagccttagccaaatatgatgtccctatatttggaataaatagagggcatttaggttttttagcagagatagagctagaagactgtaaaaaggctataaaaaatctatttaaaggtcaatataaaatagaggatagaataatgctaaaatgtgacttaaagggaatagacaagaaagatgattttttagcattaaatgatatagtgcttacaaaaggaaatttatcacgaatagtaaaatatagcatatatgtagatgatgtatggtatacaacttttgtagcagatggagtcattgtatctacgcctacgggatctacagcctactctttatctgcaggaggaccaatagtatatccagatctagatgtattagagattgcgccaatttgtcctcactctttaggaattagacccatattgctaaatggcaatagtaaaattaatataagggttttaaaaaaatatgaggatcctgtacttactatcgatggtcaaagatataagaaagtaacagtaaatgaggttaccataagtaaatctgaatataaatgtagacttataaaatttaaagataaggattattttaaaatattaagaactaaaatatcttatagatctagagaatgtgaaggtgaa

SEQ ID NO: 16450 - DNA, 615 bp, Clostridium botulinum
atggaaataaattatgaactttatttaattacagatagaagatttttaaaagggcgtcaattaaaaaaagtagtggaagacgctatcctaggaggagtaactatagtacaagttagagaaaaagatgtatctactagagaattttataatgtagctaaagaagtaaaggaagtaacagactattacaaggtgcctataattataaatgatagattagatattgctcaagctatagatgctagcggcgttcatctgggtcaaaaggatatgcatcttaatatagctagagaaattttaggcaaggataaaataataggcatatctgtaggaaatgttaaagaggccttgcaagcacaaaataatggagcagattatctaggaataggaactatatttcctacaggtagcaagaaagatgtagatgcaatcattggtattgatggactatcaaaaataaaagatagcatatctatcccttctgtagccataggtggcataaataaaactaactttaaagatgttttaaaaactggtatagaaggaatttctgtaatttcagctatattagatgaagatgatataaaacttgctgctaacaatcttttaataaataaa

SEQ ID NO: 16451 - DNA, 951 bp, Clostridium botulinum
atgaaattaggatttttgataccaaatcatccaaatgaaaaaagagttgctttattaccagaacatgttaaaggttttaacaatgagctagttatagaaacaggttttggtgaaactctagggatttcagatgcagaatatgtaaaggtaggttgcactatagcttctcgagaagaaatatttaaaacctgtgaaggtatattttcattaaaggttttaaagcctcaggactataagcatataagagaaggccaaattatagtgggctggacacatccagagggatcaggaaaaatatttatggaagaacagggcatacctaaaaatttaattatagtagatttagataatattcatccttcaatctattataaagattatgtaataccaatggagtggattccatctaactttgtaagaaaaaatagctatatagcaggttatgcatctactatgcatgcagttatgaattatggaagtataccaacttcagaaactaaagttgctatattaggatcaggtaacgtatctcaaggtgctttttcagcaatatctaaatttaatccagatataagaatgttttatagaaaaactatgaatcaattaaaagatgagttagaagaatttgatataataataaatggaatagaaatggataatcctaataagcatatactaactttagaagatcaaatgagattaaagaaaaattgtttaattatagatgcagcggctaaccttggaaaagctatagaaggtgcaagacatactacagcatccgatcctatatacaataaggatggaaaatactattatgcagttaataattctccatctatattttatagacaatccagtaaggctataagtgaagctttcagtaaacatgtatacagcaaagaattagaattttatttagatgttattgcagaagtagaggaaatgatagta

SEQ ID NO: 16452 - DNA, 375 bp, Clostridium botulinum
atgccaacaattagccaattagtaagaaaaggcagaaagacaatagcatcagcatcagactcaccagcattaaaagaatgcccacaaaaaagaggagtttgtacagtagtaaaaacaacaactcctaaaaaacctaactcagccttaagaaaagttgctaggattagacttacaaatggatatgaagttacagcttacataccaggagtaggccacaacttacaagagcacagtgttgttcttataagaggtggaagagttaaggacttaccaggtgtaagataccatatcgtaagaggggcattagatgcagctggagtagctaacagaatgcaatccagatcaaaatatggtgctaaaaaaccaaagcaaaaa

SEQ ID NO: 16453 - DNA, 1755 bp, Clostridium botulinum
atgcatataaagggaatatttatgttaaataaggaggttaatatgattagtcaagatattagaaaaattgctccagaaatggatccacttcgtaggggtatgggatggtcagttgaagatttatctaagcctcaaattatagttgaaagtacctttggagatagtcacccaggaagtgctcatttaataaaatttgcaaataatgcggtacagggtgtagcagaaagaggaggaaaggctgcaagatattttgcaacagatatatgtgacggtatggctcaaggtcatgatggaatcaattattcattagcctctagggatactataacatcacttatagaaattcatgcgaatgccactccttttgatggaggggtatttatatcaagttgtgataaggctgttccatctcacttaatggctataggaagacttaatataccatcaattgttgttacaggtggcgttatggaagcgggacctaaccttttaactttagagcaaattggtgcttatagtgctatgtatcaacgaaaagaaattacagaggaagaattaacttactataaacataatgcatgtccatcttgtggagcttgttcttttatgggaacagcttcaacaatgcaggttatggcagaagccttaggattaatgttacctggtagtgctttaatgcccgcaacttgcaaagatttagaagatgttgcagtagaggctgggaaacaagttgttgaactagcaaagatgaatcttaagccaaaggatatagttacagaaaaatcctttgaaaatgcaattataattcatgcagcaatttcgggatctactaattcattattacacattccagcaatagctcatgaatttggtataaaaattgatgaagaaagttttgatagaatacatcgatacgctccatatcttttaaatatacgtccagcaggaaaatggccggcagaatatttttattatgcaggcggagtaccagcaataatggaagaagtaaagcatttattacatttagatgtaatgactgttacaggtaaaactttaggtgagaatttagaggacttaaagaagaatggatattataagaattgtgataaatatcttaaaaaggttggacttacaagaagagatgttataaaaccaataagtgaacctataggtgaaaatggagctattgcgattttaaaaggaaatatcgcaccagaaggagcagtagttaaacattcagccgtaccagaagaaatgcataaaggaattttaaaggcaagaccttttgatagtgaagaagaagcaatatcagctattatatctaaaaaaataaatccaggagatgctgtatttataagatatgaaggaccaaaaggaagtggaatgcctgaaatgttttatacaacagaagcaatatcctcagataaagaattatctgcaagtattgcacttattacagatggaagattctcaggggcatccaaagggcctgcaataggacatgtttctcccgaagcagcaatgggagggccaattgccttagttgaagagaatgatttaattgaaatagatatagagaaaagaatattacaattagttggtgttaatggacaaaaattaagtgaagaagccatagataaggttttagtagaacgtaaagctaagtgggaaaaaagagaaaataaatataaatcaggaatattaaagatattttcagagagagcagtttcaccaatgaaaggtggatatatggaa

SEQ ID NO: 16454 - DNA, 591 bp, Clostridium botulinum
atggaaattagaatacatagaattttacctaaaactgaagtagaaggtccgggcacccgatgctgtatatgggtacaggggtgccctattcattgtaaagggtgcggtgctaaagagacctgggacttcaaaggaggagaacttttagataccaatgaggtatttgatattataaaaaattctaaggaaatagaaggagtaacctttttaggaggagaaccttttgtccaagcttcagcagtatatgatatagcattaagagctaaaagtataggtttaacggttttaacttttacgggatatacctatgatcatattttaaaatctaataaaaaagagtggaatgatcttttatctgttacagatttgctcatagatggccctttcgatgaggataaatttgatatttcaaggccttgggtaggttcttctaatcaaaattataggtttttaacaccttcttataaacatctagaaaataacttaacttctataaaaaataaaatagaagttagattacataaagatggagcaatttttctaaatggtatgggtgatttcaatagtataaaaagtaagcttaaaaatttg

SEQ ID NO: 16455 - DNA, 4296 bp, Clostridium botulinum
atggaaaatacttcagttggtgatttgcaaaaggaaataaataaagaaaggtttgatacagataaagaaataaaaatagtaagagttcagtattttagaaaaaaaaataaactaagaataatactaaaatccattggtaattttactaaagaaaaagaagaccatataaaaaatatattaaagaagagattttctatggtggaggattttgaaataatctgctataaagatctatccaatattaccctagaggaactttcaaaaaaatattgggtagatatagtgaatttagcttcttcttctgtacctattgcaagggattgtcttttaaaatctaaaagagaagtgctagaagatagtataaatataacctataacaatgaatttttatgtaggtttctttcaaaaaataaatttgaaggcaaactgaaatcctatataagagatatatttggaataaaatgcaatataaaattagaatatgataaatcttttaatgaagaagattattttaaaactatagaaactatggaaaagtctatgataaagaatgttttgagtgagattaagtctaaagaaaagaaagtcattagaaaagaaaattctccaaagactagggaagaggagaataaggatacttctgtcatattaggaagaagtataaaagaagatagtatattcatgaaggatttaaatgaaaattctggtatagtagtggtatgtggagatgtatttaaaaaagaagttatagaaacaaagactgggagaaaaatagtaacttttttcataacagattacaccaattctatgacagttaaacttttcccaaggcctagagatgcagatagaataatagaggaaataaaagaggggatttattgcaaagttagaggagaagtagtaaatgacccttacgcaagagaatgcgtaataatggctaaggatatagtaaaaactacaaaaatagaaaaaatggatatagcagaggaaaaaagagtagaacttcatatgcatagtcaaatgagtgccatggatggaatgactccagtatcagaattagtgaaaagagctgctaaatgggggcataaagcagtggctattacagatcatggtgtagttcaggcttatccagatgcaatgtctgcagctaaaaaaggtaatataaaagttatatacggaatagaagcttatcttgtagatgatggagtacctattgtatctaaagcaggggataaaaccatagaggatacttttgtagtttttgatttagaaactacaggcttttccagcaaaaacgataaaataatagaaataggtgcagtaaagatagaaaagggaaaaatagtagataggtttagtgaatttgtaaatccagaaaggagcataccagacaaaataacagaacttacaagcataacagatgatatggtagatgataaagaagctatagataaaatacttccaagatttatagattttataggagactctgtggtggttgctcataatgcaagctttgatgtgtcttttataaataaaaattgtaaagatttaaaaatagaatttgaaaatagtgtaatggatacggtgacactaagcagatttttatttcctgaattaaagagatataaattaaatgttatagcaaagcatttaggtatatccttagaaaatcatcatagagctgtagatgatgctaaagccacagcagatatcttattaaaatcttttgaaatgttaagagaaaaagaaataattaccttacatagtttaaataaagagtttttaggaaatataaatataaaaaaagagcccacccatcatttaataattttggctaaaaatgcagtaggtcttaaaaatttatataaattagtttctaaatctaatttggagtatttctttaaaagaccaagaatggctaaaagtcttataaatgagtataaagaaggacttataataggttctgcctgtgaggccggtcaaatatataaagaaatattaaagggaaaaacaaaagaagaattaaaaaatatgatagatttttatgattatttagaaatacaacctctaggtaataatgaattccttgtaaaaaacggttccgtaaaagatgagaaagagcttgaagaaataaataaaaagatatgtgaattaggtgagttttataataaacctgtagtagctacctgtgatgtgcattttttagatgaagaacatgaagtatttagaagaatattaatgtcaggtcaaggctttagtgatgcagataatcaaccaccactttattttagaaccacagaggaaatgcttaaagaatttgaatatttaggagaggaaaaggctaaagaagtagtaatttataatacaaataagatagcagatatgatagatgaaataaaaccaattccagaggaaacttttccgcctaagatagagggagcagaagaagatataagaagaatgactatagaaaaggctcattctatatatggagatccgcttcctgaaatagtagaaaaaagattaacaaaagaattaaattctataataaacaatggttatgctgtactttatttaatagctcataagctagtggccaaatcctatgaagatggatatttagtaggatccagaggatctgttggatcttcctttgcagctactatgtcagatattacagaagttaatggattaccacctcattatgtttgtcctaaatgtaaatatagtgaattctttacggatgggtctgtaggttcaggagcggatttagaggataaggattgcccaaattgcggaactaaattaataaaagatggtcatgatataccttttgaaacttttttaggtttcgaaggggataaagaaccagatatagatttaaatttttcaggagaatatcaaggagtagttcataaatatacagaagttctatttggaaaagggcatgtttttaaagcaggaactattggtactatagcagaaaagactgcctatggttttgtaaaaaagtatttagatgaaaagaatataaaagctaacaatgcagaaatagaaagattatctaaaggatgtacaggagttaaaaggacatcgggacaacatccaggaggaattatggttgtgcctgcagataatgaaatatttaactttacccctatacaacatccagcagatgatacagaaagtgacgttataactacccattttgattatcattctataagtggtagacttttaaaattagatatattaggccatgacgaccctacagtacttagaatgcttcaggatttgactcaggtagatcctaaatctgtacctctaggagatccaaaggttataagtttatttacatcaccagaggctttaggggttacagaggaggatatagattgtcctgtaggaacttatgggctcccagagtttggaactaaattcgtaagacaaatgttattagataccaaaccaaaaagttttgcagaattggtaagaatatcaggattatcccatggtacagatgtatggcttaataacgctcagtattttataaaagaggggtatactactataaaggattgtatatctacaagagatgatataatggtatatttacttcaaaaggaactgccaccaaagagcgcttttacaataatggaaaaagtgagaaagggtaaaggccttacagaggaacaggaagctttaatgaaagaacacgatgtgccagattggtatatagagtcctgtaagaagataaagtatatgttccctaaaggtcatgctgtagcctatgtaatgatggccatgagaatagcttattttaaagtttattatccaagggcttattatgctacttatttttctgttagagcggatgattttgatgcagatctaatagtaaagggagaagaaaaaataaaagaaaaaatgaatgaattatatgctatgggcaataatataactcaaaaggataaaggtcttttaactatacttgaaatatgttatgaaatgtataaaaggggaataaagtttttaaaggtagatttatataaatctaatgctactaaatttttaatagaaggagatagtataagaccacctttaagcgcccttcaaggtgtaggaaaaaatgcagctaaaagtatagaagaagctagattagagggcgaatttatatcaaaagaagatttaagattaagaactaaggctacaaaaactgttatagagactttagaaaatcatggttgcttaagaggaatgcaggaaactaaccaaatatccttatttagcctt

SEQ ID NO: 16456 - DNA, 2433 bp, Clostridium botulinum
atgaagaaattatcatttaatatagaaggaatgacttgtgcagcttgtgctaaagctgtggagagggtttctaaaaaattagaaggtgttcaagaggctaatgtgaacatagctacagaaaagttaagtataatttttgatgaaaaaaaatgtaatactttagatatagaaaaagccatagaaaaagcaggatacaaagcttttttagatgggcagcatatgaatttaaagatagaaggaatgacttgtgcagcttgtgccaaagctgtagaaagagtttcaagaaagttagagggtgttatagaagccaatgttaatatagcaacagaaaagcttgatataacttttgataaatcaaaagtaagtataaatgatataaaaagagctatagaaaaggcaggatataaggctttagaagaaaaaaatatagaagaagagaaaaagggaaaagaagatgcaataaaatctttgtggagaagatttataacttctttaatatttgcagtacctttgcttactatatctatgggaagtatgatgggattaaagttacctaaaattattgatccaatgcatagccctttaaattttggattaatacaacttattttagtaattccaattatattggtaggaaacaagttctttagggtagggtttaaatctttagttaaaggaagccctaatatggactctttaatttctattggtacatcagcagctgtagtatatggtattttcgctatattccaaatatctaaaggaaatatgcattatgctcatgacttgtattttgaatctggagctactattttaaccttaataactttaggaaaatatttagaatccgtatctaaaggtaaaacttctgaagctataaaaaaattgatggccttagctcctaaaaatgcaactataataagagacaataaggaaataataattcctatagaagaagttaaaataaatgatatagttttagttaaaccaggagaaaagcttcctgtggatggggaaattattgaaggttctacagctatagatgaatctatgcttacaggagaaagtttacctgtagaaaaacatataggagatatagcagtagcaggaagcataaataagcatggattaataaaatataaagctactaaagttgggaaagatactactttagcacaaattataaaacttgtagaagaggctcagggtagtaaagctcctattgcaaggctagcagataaaatttccgcttattttgtaccaacagtaatagctttagctataatttcttctttagcttggtatgttagtggaaaatctttaatattttcattaactatatttatttctgtattggtaatagcttgtccgtgtgctttaggattagcaacaccaacagctattatggtaggcacaggaaaaggagcagaaaatggggttcttataaaaagtggaggagctttagaaactgctcataaagttcagagtattatattcgataaaacaggaactattacagaaggaaaaccaaaagtaacagatattttggtttccgaaggagtagatgaaaaatatttacttcaagtagcagctactgcagaaaagggttcagaacatccattaggtgaagctatagtaaaaaaagcagaagaagaaaatttagaattatttcaaggtaaaaattttagagcaatacctggtaaaggcatagaggttattataggggataaaaaagtgcttcttggaaatttaagacttatggaagaatatgaggtagaaataaaggattttatggataaatctcataaactttcaaaggaaggtaagaccccaatgtttatagccatagaaaataaaattaaaggaataatagctgtagcagacactcttaaggaaaatagtaaaaaagctatagagaagcttcatgatatgggtgtggaagtagttatgataactggagataacaaaaataccgcagaggctataggaaaacaagtaggtatagataagatttttgcagaagttcttcctagtgataaggctaactgggtaaaaaaacttcagcaagaaggaaaaattgtagctatggtaggagatggaattaatgatgctccagcgttagctcaagcagatattggtatagccataggatctggaacagatgtagctatagaatctgcagatattgtgcttataaaaagtgatttaatggatgtaccaacagctcttaagttaagtagagctactataaaaaatattaaagaaaacctattttgggcttttgggtacaatactttggggattccagtagctatgggtgttttatatatttttggaggaccgcttttaaatccaatgattgcagcagcggctatgagttttagttcagtttcagtacttttaaatgccttaagattaagaagatttaaatct

SEQ ID NO: 16457 - DNA, 2271 bp, Clostridium botulinum
atgaaaaagataaagtttacaaaagagaatatagcgttatcgttaattttgatattatccttaatattaaatttagcgaatttgaacatagaaggatacgcaaatcaatattatgccgcaggtgtaaagagcatgactttaagtttaaagaattttttctttatatcctttgatccagccagttttgtaagtattgataagccacctttgggtttttggatacaagctatatttgctaaaatatttggttttagtggatggagtataatattacctcaggctattgctggggtagtatcagtaggattaatatatgttattgttaaaagaagctttggaactgctgcgggtcttatttctgcaatatgtcttgcagttacgcctgtttttgtagctgtaagtagaaataacacttgtgataatttacttgttttaacattactattagcttgcttagttctttctaaggcagcagaaaaagggaaactaaaatatcttttaataagtttagcaattatagggatcggatttaacataaaaatgcttcaagcatatatgataataccagctatatatataacttatcttctttctaatgcagtatccttcaaaaaaagaatagttcatcttatggctggtacaattattttaattttagtttcattgtcctgggcctttattgtagacttaatacctgaaggaaatagaccttatgtaggaagtagcactaataattcagttatggagcttataataggacataatggtcttgagagacttggtattggtagtaaatcaactcagggtggtggggcaccaggaggaatggatgggaaaaatcagcaaaaaactgatgggacctccagtgcaactaaaaacaaaaattcagagcaaacatcaaaggagaatgggcaaactggaggagagacaccatcaatagacaatgatcaaatgcaaggacaacctccatcaatggataatggagaaatgcaagggacacctcctaatactcaagatggaggaaaagggaatgctaatcctcctaatggtgatggaaaaggtcccggtggaatgcctccaggagataatggaatgcagaagcctaatggaggaggaatgggagaaacctttggaggccaagaagttgcaagtattactagattattctctaataatagcttatcagaccaaattatttggttatttcctcttgctgtgtttggatttatagcagcggcaataaaagaaaagctaaataagacttctgataataaaagaaagttgtcattagtactgtggagtatgtggttattacctgaatttatatacttcagttttataaaagggctattccacccttattatttaactatgctagctccaccaatttcagctttagtaggaattggagttgtatcaatgtggaagctatataatgagaatggctggaagtcttggattttaccagtagcacttatcgcagacggattaactcagatattaatattatcttattattataatatatcaaatacggctaaaattttaactacaatagtagcagttttatgtattgtatcttccattatactagctattgttaatttaagaaaaaataaaaaagatatattaaagtttaaaaatataaaatttaagaaatcactggttactattgctttaatggggcttttaataactcctttagtttgctctgctactacaattttttatccagtatctggtactttcccatccgctggattatcattaatgactaataaggaaaaagatggttttaatatgggtgatcctaatagtggtaatacaaaactaatagaatttctaaagagtcataaaacaaatgaaaaatatcttcttgttacttcatccactaatgggtatgcttcagatataattatcaatactggagaatccgtaatggcactcggaggtttctttggaacagataaagtaattaccttagatgaattcaaaaagttagttaataatggagaaattagatatgtaatggtaggtggtatgggaggcaactcaagtagtgatattatgaactgggttaaagaaaatggtaaagttgtttcagaaagtgaatggaaagattcaaatgagataaatagtgaaggagttaataaggataacaataataaagaaaactcaaactcaaatactaaacaattcggccaagaaggaaaagggaattctgaacagttatatgatttaaaaaattatactgatactacaacaaaaaaa

SEQ ID NO: 16458 - DNA, 2022 bp, Clostridium botulinum
gtggtacagcgaaatttacgcctctatataaaactaaaggttttatatagaggttttttatattataaaaatgaaggaggactaataatgtcaaaaggaacttattatgtaacaacacctatatattatccgtcagcgaaacttcatataggaaatacttatacaacggttgctgcagatactttagctagatttaaaagacttacaggttatgatgtaatgtttttaacaggtacagatgaacacggacaaaaaatacaaagattagcagaagctaaaaaagttacacctaaggtttatgtagatgaaatagtagcaggaataaaagaactatggaaaatgatgaatatagactatgataaatttataagaacaacagatgaatatcatgtagaattagtgcaaaaaatatttaaaacattgtatgataaaggtgatatatataaaagtgagtattcaggatggtattgtacaccttgtgaatcattttggacagaaactcaattagaagatggaaagtgcccagattgtggaagatctgtagaaaaagcaaaggaagaagcatatttctttaaaatgtcaaaatatgctcctaaacttatagaatatatagaatctcacccagaatttatacaaccagaatcaagaaaaaatgaaatgctaaataactttttgaaacctggccttcaagatttatgtgtatctagaacatcttttgattggggaataccagttacttttgatgaaaaacatgtaatttatgtttggatagatgcacttgctaattatataacagcattaggatatagtacagaaaaggatgaattatataaaaaatactggccagcagatgtacacttagttggtaaagatatattaagatttcatactatatattggccaattatgcttatggcattagatatacctcttccaaagcaagtatttggtcatggatggttattggtagatggaggaaaaatgtcaaaatccaaaggtaatgtggtagatccagtagttttagtaaatcattttggaacagatcccgtaagatactatcttcttcgagaaataccttttggcgcagacggaatatttaataatgagatttttataaagaaaataaattcagatttagcgaatgatttaggaaatttattatctagaacagtagctatgatagaaaaatattttgatggagaaataccagcaggaaattgcaaagaagatatagatgaagagttaataaaattagcccttgaaactccaaaaaaagtggaagaaaatatggaaaaactaagaataccagaagctttagaagaaatatggacatttataggaagagctaataagtatatagatgaaacaacaccatggattcttgcaaaagatgagtctaaaaaagagagattgggtacagttttatataatctagcagaaagtttaagaataatatcagtatgtatatcagcattcataccagaaacaagtataaaaataaatgagcaaataaatgcggatgttttaaattgggatagtttaagtaaatttaatggaactaaagtaggcacaaaggttaaaaaaggagaagcaatattcccaagaatagatgtagaaaagaaaatagaagagctaaataaacttaaagaggaacaattaaaacaaaacaaagctaaaaatatagcacctataaaagaagaaataactatagatgattttgaaaaaatagatttaagggtagctaaggttttagaatgtgaacctataaaaggagctaaaaaattattaaaactaaaagttagtttaggtggagaagaaagacaggtagtatcaggaatagctaaatactataaaccagaagacttaataggtaaaaaagtagtattagtagctaatttaaagcctgttaagctaagaggagaattgtcacaaggaatgattttagcagcatcaacagaagatgatagtgagctatttgtagcatctatagatggagacattgaagaaggaaatatagtaagg

SEQ ID NO: 16459 - DNA, 1047 bp, Clostridium botulinum
atgatgagaaaatcaactaaaaaagtaaaagtaggaagtatatatgtaggaggagattctcctatatctatacaatccatgacaaatacagatactagagatgttaaaagtacactaaatcaaataaataagttagaaaaaataggctgtgatataataagatgcgcagtaccagatatagaagctagtgaagctttaaaaataataaccaaggaatcaaaaattccagtggtggcagatatacattttgatcataaattagccttagaatctataaaaaatggagtagatgccttaagaataaacccaggaaatatagggtccatggaaagggttaagatggtagcagaagctgcaaagggaaaatctattcctataagggtaggagtaaactcaggttccttaaaaaaagatatattagataaatatggtagagtatgcccagaagcattagtagaaagtgcccttcagcatgtgaacatattagaaaaatgcaattttaatgatatagtaatatctataaagtcttctaatgttatacaaatgatagaaagttatagattaatatcagaaaaagtaaattatcctttgcatttaggagttacagaagcaggaactacctttagaggaactataaaatctagtgtaggtataggtaccctgctggcagaaggtataggagatactataagagtatctattacaggagatccgctagaagaaattaaaataggaaaagaaatattgagatccttagggtatgtaaatgaaggaatagaatttgtatcttgtccaacttgtggaagaacgaatatagatttaatatctatagctgaagaggtagaaaaaaggcttttaaactgtaataagaatattaaagtagcggtaatgggatgcgtagttaatgggcctggggaagcaagggaagcagatataggtatagcaggaggtaaaggagaagggcttatattcaaaaagggagaggttataaaaaaagttaaagaaaagaatataatagatgaacttataaaagaaatagaaaagatg

SEQ ID NO: 16460 - DNA, 366 bp, Clostridium botulinum; identical to SEQ ID NO: 16007

SEQ ID NO: 16461 - DNA, 1221 bp, Clostridium botulinum
gtgaattttatgtttgaacattctagacctgcatggattgaaataaatttagacaatttaattcataatatgaaggaaataagaagagttgctagaagcaaggaaataataagtgtagttaaagcagatgcatatggacatggtgctttagaaatagcctcccttttgctcgaaaacggagccaatagattggcagtagcagttctttcagaagcgctagaattaagaaatagtggtattacagcacctattattattttaggctacactccactacgatatgacgaaagaacaatatgcaataatgctgaaactataataaaaaatgacttagaggtatctgtaagttcatataaatatgcggagcaattatctaagaaagcacaacaattaggcaaagatgtaaaaattcatgtaaacattgatacaggtatgggaagattaggatttttgcccacagaagaaaatttagaaaaaatatatcaaataagtaaactaccaaatataatatttgaaggcttgttttctcatttttcaacagcagatgaaaagaataaagagtatactaatgaacaatttaaaaaattcttagatttttattataaacttagagataaaaatgtgaaagttaatataaagcatattgccaatagtgctgctttaatagatttaccttacactcatttagatgctgttcgacctggtatagctcaatatggttattatccttcatcagaagtcaatcataaagatataaatttaagaccaataatgacattaaaaacaaatattgttctagtgaaagacattaaatcaggacaatctatcagttatggaagaaaatttagaacaataagaaatagcaagatagctgttcttccaataggttatgccgatggatatgaaagagaattatctaatgaaaataatgtttataaggctcaagttattgtgaacggaaggcgggcacctatagtagggcgaataaccatggatatgtgtatgattgatgtaacagatataggtgatgttaaagttggtgacgaagttatattaataggggaatgtaatgatgaaaggatttcagtagaagacatagccaatttattgaataccataccttatgaagtaacaagcagaatcagtaaaagaattccaaggtattatataaaagatggaaagatagtgaagatatcacaaataaataaagaagtaaacaaa

SEQ ID NO: 16462 - DNA, 1068 bp, Clostridium botulinum
atgaaaaagaggaggaggcgtaaatatatgaacgaaaataaaaaaactcctttattaaatgataacatggttttaagtagtagaataagattggctagaaatgtagacaaggcaccctttccaaataaaatagataataagaatggtagagacatcatatataggatagaaaatgaattctataaggaagtgggaaaggatacctttaagactatatatttatggaatttagaaaaaaaagaaattaattcactcttagaaaaacacattattagctttaacttaattaataatatagataaggccgctataataatagatagttctgaagaaaatagtattatgataaatgaagaagatcatattagaatacaaagtataacaaagggttttaatttagaaaaggcatttgagaaagcaaatcaaattgataatatgattgaaaaaaatgtaaatttagcctttgataaagatttgggatatttaacatcctgcccaaccaatattggaacaggattaagagcttctgttatgatacacttgccagctctttctatgaataatagaatatcagcattattgaatgctataagtcaattaggaatgacagtaagaggtatttatggggaaggttctaaagctttaggaaatatatatcaaatatcaaatcaaattactttaggcttagatgaagtagagataatgaacaatttaaaggcagtaataaaacaaataataaatgaagagaatatagcaagagaaaaatttatagaaagttatgagtatgaaataaaagataaaatatatagatctttagcattgctcaaatcagcaatactattagataatttagagtgcttaaattatatatccaatgtaaagctaggtatagagatgtcaataataaaagatatagatgagaatataattaatcaattaataatagatactcaaccggctaacttaaataggatttatgataaagaaatgactgaaaaagaaagcaagcattatagggctatgttagttaaagaaagattaaaaaaacaaaagtttaaggagggtgat

SEQ ID NO: 16463 - DNA, 1200 bp, Clostridium botulinum
gtgagtcgagtttcatttaaaaaggaaaatgaggtatataatatgttagttaaatataagttgtgcgaattaggagatatattaactggtaatacacctagtaaaaaaaatggtgaattttatgatactaaagatatcatgtttataaagccagatgatattaataataatattacagaaatagaatgttcaaaagaatatatttctaataaagccgaaaaaaaagcaagaattatacctaaagatagtttattgattacatgtataggtagcattggaaaaatagcaattaataaagaaaaaagtgcatttaatcaacagataaattcaatagttcataatgaaaaaataatttgttctaagtatttagcatatgtgcttatgataaataaacaaagactagaatcaatatcaaatgcaccagtagttcctataataaataaaactcagttttcagagtttgaagtttatatacatgaggaaaaagaaatacaagaaaaaatagtaaatgtattagataaagctcgatctttaatagataaaagaaaagctcaaatagaagttttagatgaattagttaaatcgagatttatcgatatgtttgctgatttaaaaggagaaaaacatttaactttgggagaatgtacgaattttatagattatcgtggtaaaactccagttctttctgatagtggaattagaattataaacgcaaagtcagtaggcaatggattttttaagtatattgatgaatatatatcagaagagacatttaattcttggatgaaaaggggatttccagtacctggagatgtgctttttgttacagaaggtcatacttttggaaatatatgtagaataccaagcgatttgcaaaaattcgcaatggggcaaaggattataacaatacaaggaaataaagaaatattaaataatgcttttcttgcacaatatatgcaaactatatcttttcagatagatatagataaatataaaacaggtagttcagcacaaggtattagaagtaaagagcttaagaaaattttaatacctattccgcaaatagaacttcagaaccaattcacagactttgttaaccaagtcgacaaattgaaatttgaaatggagaagagtttaaaagaattagaagacaactttaattcattaatgcaaagggcatttaaaggagagttgtttaat

SEQ ID NO: 16464 - DNA, 1272 bp, Clostridium botulinum
ttgtttatagatacagccaaaatatttgtaaaatcaggaaagggaggagatggatccatctcttttagaagagaaaaatatatagcctttggaggaccagatggtggagatggtggtaaaggcggtaatgtagtactagtagtagatcctaatatgacaactctattagattttacttataaaagaaaatataaagcagaaccaggtggaaatggcgcaggatcaaaatgttttggtaaaaacggtaaagatctacatataaaagtacctatgggaactatagttaaagatgcagaaacagacaaaataatggcagatttatcaaagccagaggattcttatgtggttgctaaaggtggaagaggtggtaaaggtaattgcagatttacaacacctacaagacaggcaccagattttgcagaaccaggtatgccagaggaagaaagatggattaagcttgaattaaagcttttagcagatgtgggtcttataggatttcctaacgtgggaaaatctactttattatcagtcgtatctaaagctagacctaaaatagctaactatcattttactacattaaaacctaatttaggcgtggtaagtattgaaggtgtaaataattttgtaattgcagatataccaggaataattgaaggtgcttcagaaggagtaggattaggtttagattttttaagacatgtagagagaacaagagtattaattcatgtaatagatatatcttctgtagaaggaagagacccttatgatgattttttaaagataaacgaagaactaaaaagatatagtgtaaaactttatgatagacctcaaataatagctgctaataaatctgatatgttatttgatgaagaaaagtttgaagaatttaaaacaaaagtagaaaaacatggttataataaggtgtttaagatatcagcagctacaaagcaaggtgtagatgatcttatgaaagaagctgcaagacttttaagtactatacttgttacagatctagaaatatcagaagaagatagatttatagaggaagaaaagagatttacatactctataagaaaagaagataacacttatattgtggaaggaagttttgtagatagacttttgaatgcagttaatgtaaatgatccagatgatttaagatatttccataaagtacttaaaaataaaggggtaatggaagaattaatggaaatgggtattgaagatggtgatgttgtacgattaaatgactttgaatttgattttttatta

SEQ ID NO: 16465 - DNA, 930 bp, Clostridium botulinum
atgttacagaattgtatgtatggaagggagagtgctgctatgaacaaatctaaaaaaaatattataataggtgctactatattaattttaattacactagggggatttggaagttataaatatataaagtataaagattataaagctctattaaataaggcagaagcttatatggagatagaaaattatgataaggctatagaaaattatgaaaaaaccttagattataaaaataataaggatgttctagataaaataaatttagctaaagaaataaaagaatctaaagcaaattatgaaaaggctatggagtcatataataaaaaagattatgtaggtgctttagaattatttaaaaaagtatctaaaagagataataaaagattcaatttagcccaagataagataaaggaatgcataaagatttatgtaaatgaaaatttagataaagcgaaagctttagcaaaggataaaaaatataaagaagcctattcttacttagataaagtattatctatagataaagaaaatatagtggctaaaaatttaaaagatcaatatataaaagaagagaaagaactacaagaagaaataaaaaaggcaggagaagaagaaaaaaaagtagaagaggagcagaaaaagcaagctgaagaagagaagaaaataaaagaggaaaataaaaatttacaaggacaagtaactacaaagaagaaggcagaagaaatagtaaaaaataagataggaactagcaataataatatgaaaactatttgtgaaggagaagaagttagacaaggagtatcatattatttagtccatgtatatgaagttgttgaaaatcatacagcaacaataggttggtattatgtaagaaaagataacggacaagtgtttttatgggatttagcatctgatatattaaaaccaatc

SEQ ID NO: 16466 - DNA, 1317 bp, Clostridium botulinum
atgaaagatgctaaagaggaaaatttgcaaaaaaacctaggattatttgatgctatagctatagttataggtatggttataggatcaggtatattttttaagccagctatagtttttaaaaatgctggttcaccaatgttaggtatattggcttggttagttggaggtttaattactatagcttctggtcttacaatagcagaaattgctgcagctattcctaagactgggggaatatttgtttatattaaagaattatatggagaaaaatttgcatttttaataggatgggtccaatcaattgtatatataccagggtcagcggcagctttatccataatactttctatacagattactagttttatacctttaacagctattgaacaaaaagttttagctatagtgtttataatatttatcatgattttaaatattatatctactaaattagtaagtaaaatgcaagggataataagtattgctaaactaatacctatcatcgctataatagctttaggatttataaagggaacagcaaaaggggatatactaaatattagttcttcaagtactgtatctgggtttggagctgcacttttaggaactttatgggcttatgatggatggataagtgtaggtaatatggcaggagaacttaaaaatcctaaaaaagatttgccaagatctataataataggtttaggtactactatagtagtgtatgtacttataaatttagctctaattaatataatgccaatgagtgcaataataacatctgaaaaaccagcttcagatgcagcagtagtattattaggaagtacaggagcaaaaatcatttcagcaggaatattaatttctatatttggagccttaaatggatatttgatgacaggagttagaatacctttagccatgtctcaggataggagcataccttttagtaagtattttagtaaagttcatgaaaaatcagggacaccagttaatgcctttatatttgaaactgtattagcttgtttatatgtattatcaggatcatttaatgtactaacggacttagtgatgttcgtattatggctattctttactatggcagtagcaggcatatttgttttaagaactaaatttaaacatttggatagaccctacaaagtaccattatatccattagtacctcttataggtataataggaagtagctatataataataagtacattaataacaaatactttctatgctctttgtggtataggaataaccttattaggtttacccgtttatagctatataaaaaagcagaataaagta

SEQ ID NO: 16467 - DNA, 1383 bp, Clostridium botulinum
atggatagaatgaaaagggtgtcagtaaaagaacaagatcctaataagagaattacaaactttgatgaggtttgtttaggatatacagaagaagacgctatagaagaagccaaaagatgtcttcattgtaaaaagcctatgtgtgttggaaagtgtcctgtaagcgttaatataccagaatttatagaacatattaaagaaggagagtttgaaaaagcagctaaggcaatagcaaaagatagtgcattgccagcagtttgtggaagagtgtgtcctcaagaaactcaatgtgaaggtaaatgtgttcttggaataaagggagaaccagtagctataggcaaattggaaaggtttgtagcagattggtcaagaaaaaataacgtggatttaagtagtacagaagaaaagaaaaataaaaaagtagctgtaataggaagtggtcctgcagggcttacctgtgcaggagatttggctaaaaaaggatatgatgttactatatttgaagctttacacgaaccaggtggcgtattagtctatggtataccagaatttagattacccaaggatacagtagtaaagcatgaaatagacaatgttaaaaaattaggagttaaaatagaaactaatgtaatagttggaagaactgtaactattgatgatttagtagaagaagaagattttcaagctatatttataggttccggagcaggactcccaaaatttatggggataccaggagaaaatttaaacggagtattctctgctaatgaatttttaacaagaactaatcttatgaaagcctttaaagaagaatatgatacgcctattaaagtaggagaaaaagttgctgtagttggtggtggaaatgttgctatggatgctgcaagaactgccaaaagacttggagccgaagtatatatagtttatagaagatcagaatcagaactaccagctagagtagaagaggtacatcatgcaaaggaagaaggaataaaacttaatttgctaactaatcctgtagagattttaggggatgaaaatggttgggtaaaaggaatgaagtgtattaaaatggaactaggagagccagatcaatcaggaagaagaagacctattgaaataccaggttcagaatttactatagagttagatagtgttattatgtctttaggtacatctccaaatccacttatagcatccacaacagagggattagaaagtacaaagcgaggctgtatagtagctgaggaagaaacaggagctactacaaaggtaggagtatttgcaggtggagatgcagtaacaggtgctgctacagttatattggctatgggagcaggtaaaaaagctgctaaagctatagatgaatatttaagtgataaa

SEQ ID NO: 16468 - DNA, 1632 bp, Clostridium botulinum
gtggtaacagtgggttataccgcattatatagagagtggagaccaagaacatttaaagaggtagttggacaaaaacatataacagtaacacttaaaaatcaagttatagaaaaaagaatagctcatgcttatcttttttgtggaacaagaggtacaggtaagacatctacagcaaaaatactatcaaaagcagtaaattgtttaaatcctaaggatggtgaaccttgtaacgaatgtgaaatttgtaataaaataaatagtggaactttaatggatgtaatagaaatggatgctgcttctaaaaggaaattagaggacataaaggaagttatagaaaatgtaaaatatccaccacaggaagggaaaaataaggtttatataatggatgaggttcatatgttaactcaagaagcagtaaatgcttttttgaaaactttagaagaacctcccagcaatgtaatattcatattagcaactacagatcctcaaaaattacctataactatattatctagatgtcaacgatttgattttagaagaataagaaatgaggaaatatttgaaaggcttagagcaatagtgtcagaacagggcatatatgcagatgataaaagtcttaatcttatagctagaatgtcagatggggccatgagagatgctcttagtatattagatcaagttatatctactggagatgggaaggtagagtatgatcaagtcttagatatgctaggattagttactaatgaaaatcttctaagaattacaaacagtataatagaaaaagatgtagagaaatctatgaggataatagaagatatagtgctaagtggaaaagacatatataattttataaaagatatgataactcatcttagaaatatacttatggttaaagtaagcaaaaatccaaatgaaatattagatatgtccagtgaaaatattgatttagtaaaagagcagtctgaaaaaataagaatagaagaaataatgaggaatataaaaatacttcaagaagcagaacaacaatctaaatgggtaaagcaaaacagaatatatttagaattggctgtacttaaaatgtgtaaaatagaatatgatacatctaaagaagttatactttctaggcttaataaaatagaagagcttataaaatcaggtaatataaaattagcaataaatgaagaaaagaaaaaaatagagccaaaggaatttaatctaaaaagagaaaaagaaagtatgcaacatagtaaaatagaaaaaaattcattagaagattataataaggactctaaattaactgtagaaactgtcaaaaaaatgtggcacgatatattagaagcttttaaagcaagaagacttatggtattatatgcagctttagttactgcaaacataacagattgcaaagaaggcattattactttaaattataataagcagtattcttttaataaaaagagattagaaaagccagaaaataataaagtagttcaggaaattttttctgaggtactaaaagagaaaattagaataatatatattgtagaggaaaaggctaaagaagaaaatttaccagaagagattttaaaaaatacttttggagagaatatactagaaataattgatgaa

SEQ ID NO: 16469 - DNA, 903 bp, Clostridium botulinum
atggattttaaacaaattgaagcttttataagtgtagctaaatataaaagtttttctaaagcggctaattcagtatttttatcacaacctgccataagttctcatatagctactttagaaaaagaacttagtgtacaacttttcgatagaacttctaaagaagttttattaacccctgctggcaactccttcttaaaatatgcactagaaattttaaacgctagagataaagctgtgtgttgtttatctaactttaacaatactgtctgtggaaagctaactttaactgctagtagtacaccttgtaatactataataccggatttagttaaaggttttgaaaacaaatttccagatgtagcctttaatgtattagaacaaagttctggagaagtactagataatttattaaactttaactctgaaattggtattattggagatttaataagtgatgataagattaaaacctacaaattagtagaagataatttagttttgatatctaatcctagtttaaacattcctgacgaaatagatgcagggtccatattaaaatacaaatttgtacttaggaaaaaatcctctgccacaagaaaaacctttgaaagcaatttaaaaaaatctggtattgacccatcaactttagaagtttgttgtgaagttaataatttggatacaatttttcaatttgtaaaaactggtgtgggtatatctgttatttctgaaaaggtttataatggatacttaggattaaattctataaaaaaaagcaaaataacaaacctaaatttaaaaagaagtttatatttagcaatctgctctaaaagaactcttactcccacagctaaagcattttttgatttttgcttagattattttgatatacataaaagtaatcag

SEQ ID NO: 16470 - DNA, 981 bp, Clostridium botulinum
atgatgagtaatattagtgttattggaactggaagttatgtacctaataatattattactaatgattttttatcaactatagtagatactagcgatgaatggataagaactagaacaggtatattagagagaaggatttctaagggagaaaacactatttatatggcaacagaatctgcaaaagaagcaattaaaaatgctaatatagaggctaatgatttagatttaataattgtagctacattgactccagacaatttcatgccttctactgcctgtagtgttcaaaaggaaataggagctatgaacgctttatgctttgatatatctgcagcttgttcagggtttatatatggacttgagatagcctgttctatgttaaaaaatagctttagaaataaagctttaataataggtgctgagaatctatctaaaatagttgactgggaagatagaaatacctgtgtattgtttggagatggagcagggtcagctatattaagtaaaactaaggaagaaggaattttagagttccattctggatcaaatggattaaaaggagaacatcttacttgtggagttttaaaagctaataatactcccaataagaatgatagcttagaaaagaataattttataaagatgaatggtaaagaaatatttaggtttgcagtaggggcaatgaatgaaactatttacaatatacaagaaaagactaagtgggatttaaatgaagttaagtatattatatctcatcaagctaactctagaataatagagtatacagctaaaaagcttaatactgagaaagataaattttatatgaacctagacaaatatggaaacacatccgcagcaagtatacctatagcattagatgaaatgaacaaaagaggcctattaaataaacaagataaaattatattagtaggctttggtggtggtttaacctttgggggagttgccattgtatggagtatt

SEQ ID NO: 16471 - DNA, 1509 bp, Clostridium botulinum
atgggatttgaaactccatctgcaatacaagaaaaatcaattccagtagtattagaaggagcagatgttatagctcaagctcaaacaggaacaggtaaaactttagcttttggagctcctgtaataagcgctttgtgtgacaaggaaaagaaaaaaggcgtaaaagctttagtattaacacctacaagagaactagcccttcaaataaaagatgagctaaagagattatctaaatatagtaaaacaaaagtacttcctgtttatggaggagagtctatagaaagacaaataaaagatattaaaagtggagtagatatagtggttggaactccaggaagaatattagaccacattaatagaagaactttaaagcttggaggtattgatttcctaattttagacgaagcagatgaaatgcttaatatgggatttatagaagatatagaaactataatggaaagtacttctgaagaaaaacaaactatgcttttttcagctactatgccagcacctattaaaaaattagctttaaactacatgaaaaaagatgtagagcatatagctatattaaaaaaatctttaacagtagataaaatagcacaacattattttgcagtaaaaaataaagataaactagaagctatatgtagaataatagattcagaagaaccagaaagtgctataatattttgtagaacaaaaagaggcgttgatgaattagttgaagctatgcaatcaaagggatacaatgtagaaggtatgcatggagacatgagccaaaatcaaagaataaatactttgaaaaaatttaaaaaagctactttaaactttttagttgcaacagatgtagcggctagaggtatagacgtagaaaatatatctcatgttataaattatgatatacctcaagatgcggaatcctatgttcacagaataggaagaacaggaagagctgataaagaaggaacagcctattctttagttacccctagagaagtatcttctattagacaaatagaaagaataattaagagcaaaatcaccaaaaaagaattacctactttagaggatatattagaaaagaaatacgataatttattaaatgatataacttctaaaatagaagaaaacaaatatgaaaaatttatgccaatggtaaaaactttagaacaaaattttgatttatctcaagtttcagcagctttgatggaaatgttatttagtaaagaaatgagctttgattatacaaatgacaaactagaggcagaagttccagtaagattatttttaagcgtaggaagaaaagatagtataaatgtaaaaagtttattaacatttattcaagatgaagcctctgtaaaaaatcatgaaattggagatatagatatattagataaatttacttttatggatgtatcatcaagcactgcagaaaagataataaataaatgttcaggtaaaaaattaaatagaagaaaagttaatatcgaaatagctaaaagtaaaaaa

SEQ ID NO: 16472 - DNA, 450 bp, Clostridium botulinum
atgtcaggtaaaatattagataaaatggctggacttttaggcctagaggatgatttagaagaggatttagaagaggtagaagaagaaacagcagaggaagaagtaactccgcttatatcttcaaatacaaagagaaataataaagtggtaagtatacatacagcagtttccgctaaagttaaaataataaaaccctgtagttatgaagaagctgtagatatatgtgatgaattaaagaatagaaaaataataatagtaaatactactgatttagaaactaaaatagcccaaagattactagattttatgggaggagcaagttatgcattaggtggtagtttagaagaagtagaaaaatctgtatatatattagctccttcaacagtagaagttactaatgaacttaaaagtcaattaatatctagtaagggtatatttaattggaataaa

SEQ ID NO: 16473 - DNA, 726 bp, Clostridium botulinum
atggcaatgcgaatagatgtgctaacattatttccagaaatgttttctatatttaatcacagcataataggaagagctatagaaaaggaaattttaaaaataaacactgtaaatataagggactatacaatagataaacataaaaaagtagatgattatccttatggagggggagctggcatggtaatgtcagtacagcctatagttgattctataaaagcggtgaaaaaagaaaataaaggtaaagttatatttttaggacctaaagggaaaacttttaatcagaacttggctaaagaattggccaaagaggaagaactaatattcttatgtggccattatgaaggaatagatgaacgggcttatgaatatatagatatggaaatatctttaggagattttgttttaacaggaggagaaatggcttgcattcctatagtagattctatatgtagattggtagacggggtgctaggaagtagtgagagctacgaggatgaatctttttacaatggtcttttagaatatcctcaatatacaagaccagctatatatgaaggaaaatctgtgccggaggtgcttttatcaggtcaccatgaaaatataaaaaaatggcgaaaagctaaatcactcataattactgataaagtaagaccagatctatttaaaaaatataaattaacagaagaagataagaaaatattaaaagattttaataaaaaatta

SEQ ID NO: 16474 - DNA, 216 bp, Clostridium botulinum
atgagagaaggaatacatccagaatataaccatgacgttgtagttaaatgtgcatgcggtaatacttttacaactggatcaactaataaagagttaaaagtagaaatttgttcaaaatgtcatccattctttactggaaaacaaaaaatagttgatgctggcggaagagttgataaattcatgaaaaaattcaacctatctaacgaagacgttaaa

SEQ ID NO: 16475 - DNA, 507 bp, Clostridium botulinum
atgaaatatatatttgtagatgcttataatgtcataaatagttggaaagaattgaaaaagataaaagactataatttagaaatgtcaagagagcaactattagatatattaaacaattatgctacatataaccaatatcgtatttatgtggtttttgatgcacatcaaacagaaggggtagaaaatacagaaaaaataaatgacaatttaatagtggtgtttacaaaagaaggagaaactgcagatagctttattgaaagatctataaatgatttaggcagaaaaatagatgtatctgttgtaacatcagattctttagaacaacaattaatatttcaaagaggagctactagaatatcttcattagaattttattcacaggttaaagaaacagaaaaaaacataaaagatagaataaaaagggaattttctagaaaaggaaatagattagaagagatattgcaagaggatttattagaaaaattggaaaaaataagaagaagcaca

SEQ ID NO: 16476 - DNA, 2685 bp, Clostridium botulinum
gtgataatagtgaaattatataaaaagtccttggccataatattattgatttttttagtatccataattattactagtattttatcaaaaacttatatcatgaaaaagtttaataacatagagattaaatataatgtatataaaactgagcacttattgaaattaataaataaagatattcaaaatatctataacttaaataaagattatgctatgtgggatgacacttataaatttataaatgataaaaatgataattatatacaaactattttaaaaggaagtagcatttttaaaaaatttaatattgatttaatattatttgtaaataaaaataatgatgtagtatttgaacaatattataataaaaatgaaaaattaaataaaaaggatataaattatctttcttctattgctacttctaataaaaaaaatactcatcctattaaaggtttaacaaaatttgatgattcattatttttaataacatcttcacctattacagatagtttaaattctaaaacccctaatggtgccatgatatttattaaatttttgcccaaagaaaatattaataaaatttatggtaataatactaattttcaaattatagattttaaaaacttatatcctgttatttataaaaaaaataacatatttatgattgaacataatgatcatttacttgaaagctatggtctaataagagatatatttaataataatacctttatgttgaagctaaatataaatagagatatttactttactgcaaaagaaaatatcaaattttttatatttgttatatttattttaggtatttttatgagtatacttcttataaaaattttaaatgaattagtccttaaaaaagttcattcaatagaaaaaactttaaattatgtagctgaaactgctgatttgtctgtacgattagatactacaggaaatgatgaaataacaagtttaaataaaaactttaacaatatgtttgatatgttagaaacatcaaaagaaaaaattatagaaaatcacaaaaaatataattatcttttttctagtgttataactaacttctcctataacaaaataataaagaataaagattctgatattgtagactttaaagtagtagaaataaataactattttagtgaattattaaatacagataaggaaaatataattggagaaaatatatcttcttttattccctctattttaaatgaaaatccaattttaataaaatccataaaaaaaatctcttctataggggggaaagagactttggaagaaatttatatagaggagttaagaaaatggttttctgcagtagtttatagtatggaggtagattattttgctttacttctaacagatataactgaaaataaaaaggataaagaaaagattttaggactagcttattatgattctcttactggtctttcaaataggaaaaaaattatagaaactataaataaaactataaataactatgagaatgaaaagtttgctgttttatttatagatttagatcatttcaagtctataaatgatactttaggtcatgatgtaggcgattacgttttggaaaaagtttctgctagatttaagatgttactaagccctaaacataaaattggtagactaggtggagatgaatttataattgtacaaaatataacatccatcagtgatgctgaaaaattagcttgtaaaatatgtacaactctaaatcattcaataaaatataaagaagatgatttatttattggtgctagcattggtataagtatatatccggaggatgggaaagatacttctacactaatgaaaaatgcagatgctgcaatgtatgcggccaaaaaaaatggtggatacaaatatgaagtatattctagaagcatgaatgagagagccctagatgatttaattctagaaaatagattaagacgtgccttagaaaaaaatgaattactagtatattttcagcctatttatcacctaaaaacatctaaaattatagcaatggaatctttagttagatggaaatttgataacaaaattataagtcctaatcaatttattccactagctaaaaatattggcgaaatagctaatatagataattgggtactaaataaagcttgttctcagtgtaatttatggcaaaagcaaaataataaacccttatatgtatctgtaaatatatcttttaaacaaatgaaagataaaaattttgtagataatgttttaaatatacttagaactactaaattgaagcctagttacttatgtctggaaataacagaggatgaagctatggaagatgtagatttaagtattaaaactttagaagcattaaaaagacatggaataaaaatatccttagatgattttggtactggttattcatccttaagttatgttaccaaattacctatagataatattaaaatagataaaagtattataaaaaatattcataaagataataaaagtttacaaatagtaaaatctataatacttatgtctaaaagtttagatataaatattattgcagaaggtgttgaaacaattgaacaactagaaattcttcaagaactgggttgcgattttattcaaggtttttatatttctgaaccattacctataaaaacttttcaaagtaaatttatccga

SEQ ID NO: 16477 - DNA, 1431 bp, Clostridium botulinum
atggttaatagaactaaagaagaaactaatacatataaaaataattggataatacttgctatagtagttatgtcaccgtttatggcatgtcttgatagtagcatagtaaatgtagctttaccagttatggcaaaagaactttatacatctatggcaggtatccaacaggttgttacaagttatcttatagtaatttctgcagctatacttatatttggaagattaggagatataaaaggaaaaacaagtgtatttaaatatggatttataatatttgttttgggatcttttttatgtggaatatcaactacacttaattttttaatattttcaagaattgttcaagcgataggagcagcaatgactatgtctacaagtcaaggaattataacacatacatttccacctaatgaaagaggaagggcacttggaatttctggaacttctgttgcacttggaactttacttgggccacctttaggaggattaataatatcagtagtaagttgggaatatatattcttgataaatgttcctataggattagtagcatttatagcagcaatgaaatatttacctaaggataaggtaaaaagtgatcaatctctagatattaaaggagcaattctttttattatatgcatagttgctttattttgggcaatgcttaaaggtcagcaaataggatataatcatattagtataattatatcatttatagtatcagcaatatgtttcattgtatttattatattagaattaaaaattgaaaatcctatgttggacttggcgatatttaaaaatagagtattttctgttaatatatttagtgcttttgtaatgtttataggaataagttgcataaacattatacaaccattttatcttcaagatgtattaaaattatcaccaggcaaaacaggacttataatgatggcatatcctattgttttaagtattgtagctccaataagtggatatttatcagataaaatgggaagtaaaaaacttacattagcaggcattgtagtggcatctattggattattttgtatggcatttttaaatgaacaatcaacatttctaatgattacattattgttatctgtagtagcattaggaaatggattatttcaatctcctaataattcgttagttatgtcatcagttgaaaaaactaaattaggaatagcaggtggtgtaaatgctcttattagaaacttaggatttatttttggagtttcaatttcaaccaccatattgtataacagaatgagttataaaataggttatagagtattaaattatgtggaaggaagaggagacgtattcatctatggtatgagatgggtatattttatcgcagcagtggcatgtatttttggatttttagtatctttaattgataagacaaaattaaaatcaaataac

SEQ ID NO: 16478 - DNA, 1428 bp, Clostridium botulinum
atggatattttattaatctcaggtgtgattttgtttctatgtgtaatttcaagcaaagttttatataagtatggtgtacctacactcattatatttcttgcaatgggtatgataatgggttctgaaggtttaggtggaatttattttgataattctcaattagccggtaagttatgtaattttggactcttgtttattatgttttctggtggatttgaaacaaattggaagacagcaagacctgtggcctttgcatctacagttcttgctactattggagtagcgctaacggctcttcttgtaggtatttttgctcattattttcttggtatgacttttcttgaagggatgttacttggttccattatttcctctacagatgcagcttctgtattttctattttgcgttctaaaaatttaaatctgaaaaacagtttagctcctatgctagaaatggaaagtggttcaaatgatccaatggcatatatgttaactactatttttttaggccttataacaggtaatgagcagaatatagtaatgcttattacaacacaggtattaataggagttttggttggtttcttagtagggaaagtatctttatggttgattaataatataaatcttgatattgaaggcctttattctgttttggctattagtgttgctttgttatcttattctatagccagtgcaattatgggaaatggatttttagcagtttatattacagggttagttatgggaaatagtaagcttgtgcaaaaggtaagtttagttcgttattttgatggtatatcttggcttatgcaaattctactattctttactttaggattattagttttcccgtctcaattattaaaggtagcattaagtggaactgcaactgcagcttttattatatttatagcacgcccaatagcagtgtttcttgtgttgacactatttaaaaaatctacaaaagataagttacttgtatcttgggttggattccgtggtgtagcatctattgtttttgctacttatccattaatagcgggactttcagtagcagatgaaatatttaatatagtattctttgtggctttagtatctgttctagttcaaggaacactttttattcctatagctaagaagcttgatttagtgggagaagaagaaacagtacttaaaacttttaatgattatgaagagtttgcagcagaattattagaagttaatattgataaaaatagtaaaatggtaggtaaagctataggggatatgaatattccaagggatattttaataattatggttagaagaggggaaaaaattattactcctaatggagcaactgtaattaaagcaaatgatacaattgtattttcagcagaagataaaaataagttattaaagataaatgaaagattaaagcttgca

SEQ ID NO: 16479 - DNA, 408 bp, Clostridium botulinum
atggaaaaattaaaagttttagttccagtggattcatctgaaagaagcaattattctttaaatttattagaaaacatgtttgataaaaatcaggtggaagttactttaataaatgttaaagaagttcaagtaaataatatttttttaattcaacaacaaataaaaaaacttaaggacaaaagtgaaaagatcatgaaggaagcaaagcaaaagatcaaaaatcttggatatgaatatgaaatgtattcctgttttggtatgccagcggataaaatagtagaaaaagcagaaaaagataattttgatatgatagttatggctaaatctaataaaaaaggcctagaaaagataaaaggttctgtaacgactaaagtagttaaaacttctgaagtgccagtaattgtcgtt

SEQ ID NO: 16480 - DNA, 579 bp, Clostridium botulinum
atgaaatattgtattcttatgggaagcccacgtaaaaatggaaatacgtttaaattattaaagccgtttattgaagaacttggacttcagcaagttcagtatgatttgatttggctttatgataaacatattgaaccttgcacagcttgtcgaaactgtcaaaaagactggacaatttttggatgtcgatatttcgatgatgttcaggaaatttttgataaagtatatgacagtgatgtcattattttagctacacctatttattcatggtactgtacaccacctatgaaatcactgttagaccgcttggtgtatggaatgaataaatattatggtgatgaaaaagggccttccctttggagtggcaaaaaattagctatcataactacttgtggctatagaccagaaaatggagctgatttatttgaggaaggcataaaacggtattgcaaacattctaaattaaaatatattggaatgctcgcggaaagagactttgggtataaatctgtctttataacagatgataagattgagcattcaaggtcatttgctcgaaaactaataagcaataaagta

SEQ ID NO: 16481 - DNA, 336 bp, Clostridium botulinum
atgctttcagcgtttatccagtcccaacatagctacccagctgtgccactggcgtgacaactggtgcaccagaggttggtccatcccggtcctctcgtactaaggacagctcctctcaaatttcctacgcccgcgacggatagggaccgaactgtctcacgacgttctgaacccagctcgcgtgccgctttaatgggcgaacagcccaacccttgggacctacttcagccccaggatgcgacgagccgacatcgaggtgccaaacctccccgtcgatgtggactcttgggggagatcagcctgttatccccgaggtagcttttatccgttgagcga

SEQ ID NO: 16482 - DNA, 300 bp, Clostridium botulinum
atgttagtaatgaaccttcaactatttgctcataaaaaaggggtaggtagttcaaagaacggaagagatagtgaagctaaaagattaggagtgaaatgctctgacggacaattcgttttagctggaaatatattagttagacaaagaggaacaaaaatccatccaggtctaaacgttggaagaggtggagatgatacattatttgctaaaatcgacggtgtagtaaaatacgaaagacttggaagagataagaaaaaagctagtgtatatccagtagaagttgaagaagtagtagctgaa

SEQ ID NO: 16483 - DNA, 396 bp, Clostridium botulinum
atggtaatgtctgatccaatagcagatttattaacacgtataagaaacgcaaatgtagttagacatgaagtagtagaagttccttcatctaacataaaaaaagctatagcaaatataatgcttacagaaggttatataagagatttagaagaatatagagatggttctgtagatatgctaagaatcacaatgaaatacggacaaaacaaagaaagaataataactggtcttaaaagaatatcaaaaccaggtttaagagtttattgtagaaaagatgaaactcctaaagttttaaacggtctaggagtagctgtagtttctacttctaaaggaattgttacagatagagaagcaagaaaattaggcgttggcggagaagtactttgctacatatgg

SEQ ID NO: 16484 - DNA, 996 bp, Clostridium botulinum
atgaaaaaaaagagtttattcattgggttaataataattactatagtggcttctttagtttccataactattggagctgctagtataaccccttttaaagttatagaggttattttaaataaatttataggaaatataaatgattctatactccaaaagataatatgggatataagaatgccaagaataatacttgcagctttggtaggcataggtttatctgttacagggacatcttttcaagggatatttaaaaactctatggcagatccttatgttcttggaatatcttcaggagcagcacttggagcaactatatctatagtttataaattagagacaaaaggagctttggtaacaactttatgtgcatttataggagctattttaactatttttatagtttataatatagccagagtaggaaataaaattccaaccaccacattattattagcagggatagctttgaacttctttatgtcctctttaatttcaatgtcaatgatattacataaagaggctatagacagaattgtttattggacaatgggtagcttgggaaatgcttcttataaacaaatttattttttatctccgatagttgtaataataacgtttattttttattataactatagagcgttaaatataatggccgcaggagaagagagtgcatatatactagggatagatagtgaaaagtttaaaaagaaaatgatagttttaagttcaataatggtagcagcaatagtatctgttagtggaataataggatttgtaggactaattgttcctcacatagcaagacttatagtaggagctaaccatagagaagtgattcccttttcaatggttttaggagctttatttttaataatatgtgatgcattagcaagaggtataatgccacctatagaattaccagtaggtgctgttacaagttgctttggagcaccttattttatgtatttgctttggaagaagaaaagaggg

SEQ ID NO: 16485 - DNA, 825 bp, Clostridium botulinum
atgttaaaaacaagatttagaagctatcctgtagtagaccaaaacaacaaaatagtaggaactatttcaagatatcatttaatatcacctaaaaagaaaaaggttatattagtagaccacaatgaaattggtcaatctgtaccaggcttagaagaagctgaaataatggaaataatagatcatcatagaatcggtggagttaatactgcatcccctatattctttagaaatcaaccagtaggaagtacatctactataattgcaaatatgttctttgagaataatattacaccatcaaaagaaatagctggtttattagcctctgcaattatatctgatacattattatttaaatcaccaacttccacagaattagataaaacaatcttagacaaattagctaaaatagcagaaatagatcctaaaagctattccgtagagatgtttaaagcaggtacatccttaaaaggaaaaactgtagaaggattatttcatgaagattttaagaactttactataggtggagggaaaataggtgtatctcaagtatccactatggatccttcaagtttcgacccattaaaaaaagatatgttaaatttaatggaatcaaaagtaaaaaaggaaggctatgaaggattaattttagtattaactgacctactaaaggaaggttcttttatatatgttataggacctaaaaaagaaattatagcttcagcctttggaaaatccttagataaagatagttccttatatgctgagggagtattatcaagaaaaaaacaagtaataccaccaattaccaatgcaatagaaaataag

SEQ ID NO: 16486 - DNA, 1281 bp, Clostridium botulinum
atggttacattaaaaaggggtgaaaactacatggaggattacgtaataggagtggatatagggtcctcaaaagtttgtgcagcagcaggaaaacgtgataaatatggacaagcaaaaattataggagttacttctgctgaatgtcatggaatgaaaaatggtataataattgatatagatagtacagcagagtctattacaaactgtataactagattagaaagtatagtagacacaaatataaaaaatttttatatttccctgccaggaagaataggtacattaatatctagtcaaggtatggtagctatatcctctgatgataatgaaataacaaaaaaagatgtaaatagagttaaaagagctactcaaataattaatgttcctaacgataaagaaatagttgatataattcctaaagaatatattgtagatggatatagtaatataaaagagcctataggtatgagtggtaatagaatggaattagatgcttatttagtattagctgaaactactatagtgaataatttattaaaaacagttcaaaaggcaggttataatatattaggtgtagtttttgcacctatggcagatgctaaagcagcattaaaagaagaggagatgaatcagggatcagctctagtaaatgtaggagcagattctatggatatttctatatataaagatggtattttagcacaaactgatactgtatctataggaggaaatagtataacaaatgatatatccatatgcttaaaaatacctttttctgaagccgaaaaattaaaaataaaatatggagtaataggagaaaataatttagacttagagggtcaaataaaagtaaatataggttataataatgatataacaattaatgcggaaactttaacaaaagttgtagaagctagggtggaagaattattagttttaatacaaaaaaggttaaaagaaagtggtcaatttcaagatatatcaaatatagttatagtaggaggaggtctttcattaataaaaggtatagaagaactcgggaaatacatatttaataaaaatttcagagttggaagtccagagtatgttggggctgcaaatcctatatatgtatcttcagtaggggtagttaaaagtttatttactcccggaaaaattcaaaatgtcaatttaaaaaataaagaggctgctattactaaagaagatacatcacattataaagttgaaaacgaaggaaaaggtgtgttattaaaaataaaggaatttttaacagaatttttt

SEQ ID NO: 16487 - DNA, 1335 bp, Clostridium botulinum
atgaagcttatagactggttaaggcctggtataaaagttaaacgatgggtattgttagctattatgggtatacttttaatagtgtttggtatgttagaatttgttagaaacagattttatagcaattattatatagctttttatgtattcttaataggttctggagtattcgtactatatatatctgtaactcaaggcatgaaagcaataatagctttggtgaataaaggatatttaaacatatccttagattctaaaaaactagaaaatttaatatatgaaaaaagattattagttaagggtcctaaaatagttgctataggtggaggaactggcttatctactatgttaagaggacttaaatattatacctctaatataacagctattgttacagttgcagatgatggtgggggatctggtgaattaagagaagatttaggcatgttacctccaggagatataagaaactgtatattatctttatcagatacagaacctttaatggaagaacttttacaatatagatttacagatggaagacttaaaaaccaaagttttggtaatttatttttagctgctatggatggaatatctaataattttgaggaagcagttcaaaaagttagttcggttttggctgttacaggaaaagttgtaccagtaactttagagaatatagtgctaaaagctaggctgaaaaacaacatgatagtagagggagaatccaatataccagaaaagagtcttcagtataatagtaaaatagagaaggtatttatagagccagaaaatgctaaggcactatctgaggctgttacagctataaaagaagcagatgccatcatacttggccctggaagtctttataccagcgtaatacctaatttgttaataaaagatatcacagaagctttaaaaaagacaaaggctcctaaaatatatatatcaaatataatgactcaaccaggagaaacagataattttactgtttcagatcatataaaaactataaataaacattgtcatggaaaaatggtggactatgtaatagttaacgtaggtcaaatagataaagaattagaagaaaaatataagaagaaaaaatctaagttagtaaaaattgatgaagaaaagataagagaattaaatgtagatgtaataggaggcaatttcttgaaagttaaaaatgaattgataagacataattctgaaaaacttgcttccatattgatagaaactataatggaaaagaaattgttatatgataagaagaaaataatagagtacttctatttgtcagaaagattaaaggaaaataaaaataagcagagg

SEQ ID NO: 16488 - DNA, 1431 bp, Clostridium botulinum
ggagatggagtaatgagagatatttataataatcccttaaacaaaagatattcatctaaagaaatgagctatttattttcagaagaaatgaaatttaaaacttggagaaaattatgggtggccctagcagaaagcgaaaaggaattaggtcttaacattacagaagagcaaataaatgaattaaaaaagtatatagatgatataaattatgaagtagcagaagagagagaaaaggaagttcgacatgatgttatgagtcatgtatatgcttatggcgttcaatgccctaaagcgaagggtataatacatttaggagctactagttgttatgtaggtgataacacagatttaattataatgaaagaagctatgattttaataaagaagaagattataaatgttataaataatttgaaaaagtttgccttagaatataagcatgtaccaactttaggatttactcattttcaaccggctcaacttactacagtaggtaaaagagcaaccctttggatgcaagatttagtattagatttagaacaattagaatttgttatagatactttaagatttagaggggttaaaggaactacaggtacccaagccagctttatggaattgtttgatggagatgaaagtaaagtaaaagctttagataaaaaggtagcagaaaagatgggcttcccaaaggaatttatggtaacaggccaaacatatccaagaaaagttgattcaactatattaaatacattatcagaaatagctcaaagtgcatacaaatttagcaatgacttaagattacttcaaagtatgaaggagatggaagaacccttcgaaaaaaatcaaataggttcatcagctatggcctataagagaaatccaatgagatcagaaagaatgggagccttagcaagatacgttatagtagatgctttaaatccagctataacctcttctacacaatggtttgaaagaacattagatgattctgctaataagagaatatctatagcagaagctttcctagctttagatggagtgcttaaactatatatgaatatatcagagaatatggtagtatacgaaaaagttatagaaagtcatgtgaaaacagaacttccatttatggctacagaaaatataatgatggaagcagttaaaaagggtggagacagacaagagcttcacgaagttataagaactcattctatggaagctgcaagaagagttaagcaggaaggattatctaatgatctaatagaaagaataatagaagatgaatcctttgaattaaccaaagaagaaatattagctttaatagatcctaaaaaatttacaggaagagcagaaggtcaagtagtagattttatagaagaagtagtaaatccaatattagaacaaaacaaagcaatgataggagaaaaagcagaa

SEQ ID NO: 16489 - DNA, 1194 bp, Clostridium botulinum
gtgagtcggtacaagcaaaagattatttggttattaattaagattttatggctgaaaagaggtgaaattgtgaatatactaatacttgcaaattggtatcctaataagaataatcctatcaatggaatttttattaaggatcaagtaagggctttaatggaagctggcttaaaaccaatagtattttttccttatgataattccataaagagaggaaaattattatttaatatagaagagggcatatctacttatagatgtaatacagattatttacaaagtttcaaaaaatctaaaataaatagtttattattgtcttataaatggcttaaatatatagtaaaaaaagaaaaaataaatctaatacatgcgcatgtttgctatactgcaggaatattatgttcgatttttaaaagatttaataatataccatatataattactgaacatagatccgatattgtaaatttctctaagaagtcctacaatagacttatatctaaatatgcatataaaagagcagagaaagttataacagtaagtaaatttttagctaatgagttgaagaatttaggatataagtttaatgaagaaataataggaaatgaagttgatattaaggagtatagtttatctaatacaagaaataattcagatgtggtaaaaattttatttataggtagtatggctgaaaatgaaataaaaggattgcagtatttcattcctgccttagctaagtatatgaaaaaaaataataatattgaaatgacatttataggaaatggaataaacagagtaaaatatgaaaaaatgtgtgaagatttaaatataaaaaataaatgtaagtttctaggaactatagataaacaggacatacctatatatataaaaaggagtgattttttagtattaccaagtattaaagaaacttttggatgtgttcttattgaggctatggcttgtggtaaaccagttttggcaactaagtctggggggcctaatgaatttgtaaataataatgtaggaatattggtagaacctaaaaatgaaaaagctttagaagagggaatagacctaattataaaaagatatgatacctttgatccagaatatattagaaaatatgtagttgataattatagttataatataataggccaaaagataagaaaagtttatgatgacatattaaat

SEQ ID NO: 16490 - DNA, 3459 bp, Clostridium botulinum
gtgaaatttatgagtttaagatttatatatggaagggctggcagtggaaaaagccaatattgtttaaatagtataaaaaatagaatagaagaagatatagatagaccgcttatattattggtaccggaacaattttcttttcaagcggaaaaaaatttaatagaagtattagatgagaaaactgggtttaagacacaggtattaagttttaaaagaatggcttatagggtctttaatgaagtgggaggtataactgccaaacatatgaatgaatccggtaaaagcatgcttttatacaatataattgaagataataaaaataatctaaaagtattcaaaaaagctgctaaaaggcaagggttcattactacaatttcggatattataacagaatttaagagatataatataactcctgaaattatattaaataatttagagaatattgaaggagataatttgaaatataaaatggaagatttagctttgatattttctcagtttgaaacaagattacataaaaactatatagataatgaagatgatttaactatattggcggaaaaattaaataaaagtaagcaatttgataatgcagaaatatggatagatgaattttcaagtttttctcctcaagagtattctgtattagaaaaattacttttaaaatcctatagaataaatataactttatgtacagattatttaaaccaaggcagatttgttgatactacggatgtattttctcctattaaaaatacagaaaataaattgctacaaataatagaagacaacaatataaaattggataagcctatagcacttaattgtgacccttgtgctaggtttaagaatagtgcagaacttcagcatttagagaaaaatatgttttcttttccttataaagagtataaaaatgaaacaaaagatatctgcatgcttaaaactttaaatcaatttacagaaatagaaaacaccgcaaaggatattataaaactttgtatagataaaggttgtagatttaaggatatagcagtaattacaggagatttagaaggatatgaaaatataataagttctgtatttttgcaatataatattccattttttatagataaaaaaagagaaataaataataatccaataatagtattaatactttctgctctagaggttttatctaaaaattggacttatgaatcagtatttagatatttaaaaactggacttttagatattaataatgaagaaatggatattttagaaaactatgtgcttgctaacggtattaaaggatatcaatggactaatgataaaccttgggaacataaattctttagcaattatgaattagaagatcaagttgaaaaagagctactagctaaaataaatgatataagatataaagctatggaacctattgtaacccttaataaaaatttcaaaagtatagataaagcaaaagaattttgtgaagtattatatgaatttttatgtaacataaatctaccagataaaatacagaatatgatagaagattttaaagtagagggtgaaatagaaaaagctagtgagtacaatcaaatatggaatatagttatggaagttttagatcaaatagtggaggttataggtgaagaaaaaatatccttaaaagaattttttaagatacttcaaacaggactttcagaatatgaaatagggcttattccacctacattagatcaagtaatggtgggaagtataacaagacttagaagtcacaatataaatacattgtatatagtaggggtaaatgatggcatatttccatcaccattaaaggaggaaggaattttaagtgatgatgatagaaagtttttaggagataagggcttagaaatagctaaggacactaaaagtatagcctttgaggagcaatttttagtatattctacattaactactccaagtaaatatttgagattgagttatcctatagcagatggagagggaaaaactttaagaccatctataatcatatcaaggataaagaaaatatttactaatatatgtgaagaaaatgatatagtaaaactcaatggtgaagaagaagaactaaaaaacatatcctctgcaaaaccaacttttaattatttgatatctaatttaagaaaggatgtagagggggcaaaaatagataacatatggggagacacttataaatggtacttggaaaatgaattttggattgaaaaattaaatagattaataaaaggatttgattatacaaatcaaagtaaatatatagaaacaaaaaaaataaggaatttatatggcaaaccattgaaaataagtgtatctagagtagagaaattttctcaatgtccctttgcttattttgtacaatatggattaaaggctaaggatagaaaaatatttaatttaagttatccagatttagggatatttatgcatagcatattagaaaaattttcacatgagttagaaaagcaaggtctagagtgggatactatggacttaaattgggcagaagaagaaattgataaactaattaatgaggaattggataataaatctttagacatattaaatagttcaaaaagatatgaatatgtaaccaaaagtgtaaaaaagattttaaaaagatctatatggctaataggagaacatataaaaagaggaaattttaaaccaagttattatgaattatcctttgatatagatggagattatcctcctatagcaatggaacttcactctggagaagttgtgaatttaataggtagagtagatagagtagaccttttgcaaaaagatggagctacttatttaaaaataatagattataaatccggtgcaaaggagtttaaattatcagatgtttattatggattacaattacaacttttaatatatttagatgctatacttacagaattagcagaaagatctgggataaacggagaaccaggagcacttttatatttaaaattagatgatcctatagtaaaaaatactgtagatatgagtgatgaagaaattgaaaaaagtataataaaaaatttaaagatgaagggtttgattttaaatgaccctaatgttataagagatatggataatataatatctggtatatcagatattatacctgttatggttaaaaaggatggaggagtatcagaaggtagatcctctgtagctacaaaagaagagtttgaaacattaagaaaatatgtaagatatacaataattgaaatttgcgaggaaatgttagagggaaatatagaaataaaaccatataaaaagaaggatggatcttcttgtgactattgcatatattcttcagtttgtaaattcgatacaaatataaggggaaataaatataatatattaatagataaaaaagatgaagaagtatgggatgctattaaaaagaaattagaatataaaaatatt

SEQ ID NO: 16491 - DNA, 279 bp, Clostridium botulinum
atggataatgattatgcaaaatataatgatatagcagaacttctaaaagttttagctcacccagttaggatatgtatagtgaaggggcttttagaaaaaggagaatgtaatgtaagtcatatgcaaaattgcttagatatgcctcaatctactatatctcaacacttacagaaactaaaaagtgcagggataatagaaggggatagaaatgggcttcaaataaattatcatgtttctaataaaaaagcagagcaattgatagaaattttgcttaatgaa

SEQ ID NO: 16492 - DNA, 921 bp, Clostridium botulinum
ttggttagagtaaagaatttaataaaggatatggagctagaggtattagtagaaggattagagaataatattatagatgttagtgatattaatagaccaggtcttcaattttcaggcttttataattattttgctaatgaaagagtccaggtggttggaaaaacagaatggagttttttagatgtaatgaaaaaagaacttagaatcaaaagattaaataaattttttgagtttaaaactccatgtactataataacaaggaatttagcagctcatgacgaatttataaatagtgctaaagaaaaagggcagtgggttttaagaactggtgaaatatctactagatttgtaagttccttaatgtcttatttagatgaaaaattagctccagagactagaatgcatggtgtacttttagacgtatatggtattggtatacttataacaggagaaagtggtatagggaaaacagaaactgccttagaacttataaaaagaggtcatagattagtagcagatgatgcagtggatattaaagagataaatggaatattaaaaggtacatctccatctattacttcaggtatgatggaagttagagggatgggtataatagatgtagcagctctttatggattaagttctatattaaatgagaaagaaattgacttaatgatcaatttggaacaatggaaagcggaaaaaacttatgatagattaggggtagatagggaatatatagatatattgaatataccagttagaaagcttactgtacctataagaccaggaagaaatttagctgttataatagaggctgcagcagcaaattatagatataatttagttacaaaaaattgcccagcagatataataaatgaaagaattagtaaggaggctgttagctcaatagaagatgaa

SEQ ID NO: 16493 - DNA, 855 bp, Clostridium botulinum
atgttaaaacttgcttataatacaaatggattaagaaatatgccattagaagaagctataaaacaaatatcaaatcataactatgatggagtagaaatatctttgcataaacaacattttcatccattagatattaatatagaagaagtaaaaaaaataaaatcaacattaaaaagttctggcttagttttatctgatatagcaacaggttgtgatgatattttaagtgatgataagtttgaaccatctataatttgtaaggattctattgggagaaaaaaacgtattgaattacttattaaaacagctgaaattgctgaatatctaggtgttgatgtaattaattttgccgcaggattcaaatctgacaaagtttctaatagtgaagcatacgactatttgaaacaagggataaattatttattagtaaaatgcccaaacacaacatttgctttagaacctgaacctggtatgtttattgaaaaaacagaacaagctataaagttaattaatgaaataaataatccaagactaatgttaaacttagatattggacatgtatattgttgtgaagaaaatccaattttatctattagaagaagcattccctatgcaagacatattcatatagaagatattaaaaatggagttcattatcatcaaataccaggcacaggagatattgattttaatacaatttttaaagatttaattaaatataactataaatattacattagtgtagaactatatcatcatgctgatgactggaataatgctttagataagagtataaaatacttgaaacaaatagagcagtatataagagaatttcctagtataaaattagtacaa

SEQ ID NO: 16494 - DNA, 867 bp, Clostridium botulinum
atgaaatcatcatttaaatttgattttgatttatcaaaaggcggaataaaaataggagatttacctataaagtcagattctgtataccattttatatcagtagttattaatatagcgattatatgtgcaataatgtacttatctataaaaataggtaataaaataataaatagatttgttaaaaaacaaagcaatttgaaattttcattagatgataaaaaagctacaactgtaggaactatattaaatagtatattaagatacacagtttattttgtaggtatcttcgctataatagaaattttatttggaagaataggttctatatttgcaggacttggtggtgcagctataggtttaggagctaaagatcttataaaggatgtaataagcggattttttatattgtttgaagatcaattttcagtaggggattatataactgtagaagataaatctggaatagttgataccatagaacttagagtaactaaattaaaagattttaatggagatgttcatataatacctaatggtttaataaataaagtaactaatcatgctaaaaatgatatgagatttaagatagaaatcaatgtagcttacgaagtaaatatagaagaagcaataaataaaattaataaagtatgtttagagtattcgaaagaaagagaagacatagtagtagaacaaccagcagtgtatggaataacttcattagggtcaaatggaataagcatagctgtatatggaaaaacaactccaatgaatcaatggactgcagaaattgaattaagaaagaaaatattaatagaactaaaaaatgcaaatatagaaataccctataataaatttcaaattataaaa

SEQ ID NO: 16495 - DNA, 1041 bp, Clostridium botulinum
atgatgaaagaacaacaacaaataattgaagcatataaacgtaagatagctattagaaatacattaattgtaattggatgcattttattactagtaatttctttaattataagtatggatacaggatatattaaaatgtctccattggatgttttaaggacactatttggtagagggacagataaagaaaagctgattttatttgattttagattgcctcgtataattatttcaatgctggtaggatcaggtcttgctttatcaggatgcataatacagagtatatctagaaatcctctagctgatccaggaattttaggtatcaacgcgggtgctagtttaatggtgattttatatgtattgatctttagtgcagaatctttcctatccgtgtttactcttccatttttagccttaataggagccggtgctacagcagttatagtttatcttttttcttataagcgagatgaaggtatctcaactatgagacttgttttaactggtgtggcagtacaggcaggaatttcagcattaaccactttactagtggtgaaattggatgatacacagtataactttgtggttgcttggcaggcaggaagtatttgggggtccaactggaagtttgtgatgacgctgctaccttggctagctatattaattccatatatactaacaaaatcttctgttatggatatactgactcttagtgatgatatagcctatggtcttggtgcttcagtagaaaaggaacgtcgtaaattacttgcagcggcagtagctcttgctgcttcatgtgtagcagttagtggaagcattagttttgtaggtttaatagcaccacatttatcaagacgacttgtgggaccacgacatggtgtgcttttatccactagtatactgattggtgctgtattagtatctttggcagatactattggacgtgttattattcagccttctgagattccaacaggaattgtagtagctattattggagcaccatattttctttatcttatttctaatagtaagagt

SEQ ID NO: 16496 - DNA, 1134 bp, Clostridium botulinum
atgagggctatagtcaatggaaagattataataggtaatgaaatattagaaaataaagtcttgttatttgaaaaaaggatagttgatatattagatagaaagaatatttatttaagtaaagattaccagattattgatgctaaaggactatatgtttctccagggtttatagacgtccatatacacggttcaggtggaaaagatgttatggatggagagctagagtctataagagttataagcaatactataactaaaagaggtgtgacctcatttttaccaactactatgactatggctaaagaacatatatacaaggccttagatgttataaaacaggcaatgaacatggatttaggtggtgccaaggttttaggagcacacttagaaggtccttttattaatccaaaatataaaggggctcaaaaggaggactttataaagaatccaagctttgattttattaaaggttatgagaatgtaataaaaataattactttagccccagagaaagatgagaactttgagtttttaaaggatattaagaaaaatacagatatagttttatctataggacattcagatgcaacctatgagcaggctatggctgctatagataatggaataagtcgtgctacacatacttttaatgctatgactcctttaaatcatagaaaaccgggaataataggtgctattatgaatactgatatatcttgcgaacttatagcggataatattcatgttcataagggagctgttaatattcttactaaaattaaaggcaaagataagattattttaattacagattcaatgagagccggatgtatgaacaatggtgtgtgggaactaggaggacagaaagttattgtaaaaaatggttctgctagattagaggataatactttagcgggaagtattttgactttagataatgcggttaaaaatatgaaaaataatatagaagcttctctatgtgaagttatatctatggtaacagttaatcctgcaaaagatataaatatatatgacagaaaaggaagtattgaaaaaggaaaagatgctgatattgtcatttttgataaagatattaatattagtatgacaattgttgatggaaatattgtgact

SEQ ID NO: 16497 - DNA, 825 bp, Clostridium botulinum
atggaaactaaacaattcaaggccgaatctaagagacttttagatcttatgattaactcaatttatactcataaggagatttttttaagggaacttatctccaattctagtgatgctattgataaaatttattacaaaactttaacagatgattccttaaaattcgagagagataattactatattagagtagtttctgataaggaaaataggatattaaaaattgctgatactggtattggtatgacaaaggaagagcttgaaaataaccttggagttatagctaagagcggatcattacaatttaaaaaagaaaatgaagtaaaagaaggctatgacataataggccaatttggtgtaggattttattcagcctttttagtatctgatgatgttacagttataagtaaagcctttggaagtaatgaggcttacaaatggaattcaaagggagcagaggggtacactatagaaccttgtgaaaaggaaacttatggtacagagattatacttaaaattaaagataatacagaggaagaaaactatgatgaatttttagaggaatatacattaaaatctataatcaaaaaatactctgattttattagatatccaataaaaatggatttaacaaagacaaaacctaaagaggacaataaagaagagtttgaagaatataaagaagaagaaactataaatagtatggttcctatctggagaaaaaataagaatgagctaaaagcagaggattatgagaacttctatgctgaaaagcactatggatttgataaaccaataaaatatattcatgctagtgttgatggt

SEQ ID NO: 16498 - DNA, 687 bp, Clostridium botulinum
gtgttaattataaatgcattaaggaaaggcggaataatgttggatatatctatagccatagatggccctgcaggagcagggaaaagcaccatagcaaaaattattggaaacaaattaaatataatgtacataaatacaggttctatgtatagggcagtaacccttatggccttaaaaaataatatagaaccctatgatatagaaagtcttaaagctttaattaattccatgaatataagttttaatggtaataatataattgttaatggaaaagacttagaagaagatataagaatgcctataataaataataatgtatctaaatatgcagcagttgaagaagttagggaacttttggtttctatgcaacaaaatataagtaaaaaatataatgtagtaatggatgggcgagatataggtactgtagttcttaaggatgccccttacaaattttttattacagcaagtgcagaagttagggcaaaaagaaggttaaaagaattaaaagaaaaaggaataaatataaattttcgggatgtactaaaggaaattaaagaaagagattatatagacagcaatagaaaagttaatcccctaaaacaaagtaaagatgctattttaatagatacttctaattttactatagaagaagtagttgataaaatatgtaccataataaaaaaagat

SEQ ID NO: 16499 - DNA, 1824 bp, Clostridium botulinum
atgagtttatttgttagaaatgacattagaaatgtggccataattgctcacgttgaccacggtaagacaacacttgtagatgcacttttaagacagagccacgtttttagagacaacgaaaaagtagaggaaagagttatggactctaatgacatagaaaaagaaagaggaataactatattatctaaaaatactgcggtaaattataatggtattaaaataaatatagtagatactccaggacatgcagattttggaggagaagttgaacgtgtactaaaaatggtagatagtgttttattagtagtagactcctatgaaggggctatgccacaaacaaaatttgttactaaaaaggcattagaacttaaccttaagccaatagtagtaataaataaaattgacaaaccagatggtagaccagaagaagttttagacgaaatatttgacttgtttgtagaacttggagctaatgatgagcaattagatttcccagtaatatattgttcagccagagacggtatagctaaaaatgaaatggaagatgaatcagataatatggaagctttatttgaagctatagttaaaaatgttaaatcaccagaaggatatatagataaaccagtacaaatgttagtaactactatagattacaacgaatatgtaggtaaaataggtattggtaaaatagaaagaggaagtataaagaaaaaccaacaagtggctttaataagaaaagatggaaaagtggaaaatgtaaaaatatcttcattatatgtttacgatggattagcaagaatagaaacagaagaagctaaattaggggatatagtagcggtagcaggtataccagacattaatataggagaaactgtagcagatgttaatgaaccagaagctcttccttttgtagaaatagatgagcctacattaagcatgaactttatggttaatgattctcctttcgcaggacaagatggtaagtttgttacatcaagacatttaagagacagacttatgaaagagttagaaactaatgtaagcttaagggtggaagatacagatagagcagaatgcttcaaagtaagtggaagaggagaacttcacttatctgtattaatagaaactatgagaagagaaggttacgaattccaagtttcaaaaccaacagttatattcaaagaagagaatggtaaaaaattagagcctattgaaaaattaactatagatgtaccagaagaatttatgggcgtagttatggaaaaattaggaccaagaaaagctgagatgattaatatgacttcagctataaatggttatacaagattagaatttaaagttccagcaagaggattaataggatttagaaatgaatttatgactgatactaaaggtaacggtataatgaatcatgtattagaagattatgaagcatatagaggggaaatacctgaaagatcaagaggatcattagtagtatttgaatctggggaagctataacttatggattatttaatgcccaagaaagaggaatactatttttagaaccaggaactccagtatattcaggaatgatagcaggacaatgttctagaacaggggatatagatgttaatgtatgtaagaaaaaacatttatctaatactagatcttcaggcgctgatgactctttaaagttagttccagtgacaaaaatgtccttagaacaatgtcttgaatttgtagcatctgatgaattggtagaagttactccaaaaaatgtaagattgagaaagaaaatattagattcagaattaagaagaaaagctacaataagaaaaaaa

SEQ ID NO: 16500 - DNA, 1767 bp, Clostridium botulinum
atgaggaaaataaatttattagatttagaaactacaaataaaatagctgcaggagaagttatagaaagacccttttctgtagtaaaagaattagtagaaaatagtatagacgccggtgccaaaaatataaccatagaaatagaagatggaggacaaaagcttataaaaataatagatgatggagaaggtatttatcctattgatataaaaaatgcttttcttcctcatgctacaagtaaaataaattctatagaggatatatacaaaataagtactatgggctttagaggtgaagcactagctagcatttcttccgtatcaaaaactaaacttaaaagtagagttgactcttataattttggaaaagaaatatatatagagggtggcaaaatagagtacttaaaagatacaggttgcaatgttggcactactatagaagtttctgatttattttataatgtacctgcaagacttaaatttttgaaaagtgcaagaagtgatagtagttctatatcagatattgtgaataggtttatattatcccatccagatatatcttttaatttaataaataagggaaagcaaagtataaagagttatggtaccggaaatttaaaggactctatacgatgtgtatacaataaaacaataagtgaaaaccttataaacttcgaaagtcataaagatataatatctgtatatggatttataggtaagcctgaaataagccgtaaaagcagaacaaatcaaagtatatttgtaaacaagcgatatgttaaaagtaaatttataactgctgcagtagaaaatgcttttaaatcctttttaacagtaaatagctatcctttctttgtaatatttatagatatttttccggaatatattgatgtaaatgtacatcctactaaatcagaagttaaatttaaagatgagagagctatgtttaaaactatatttgatgcagttcatgaagccataaaaggagaattaaaagaatcctttacaaacttctttaataaagaagatattaatatatatgattctgaaaaatctataactgaacccataaaactagagaaagaagaagtacaaataccaatagatttaaatagtaataataaaattgatatttttggtaataatataaataaactacctaacaatacagaacttcttaaaaatataggtattaaagaaaaaaatacacttgaaaataataatgatttctatacttctaaacaaaatgaaatatactatgctaataaaaatgatgaatgtttaaattcatgtaataaagataactatagcaaaatagaaaagtcattacaaaaagataataaaaatccagatatcttatatctaaatgagcacaatagaaattcttcacctataaatattaaagaaaataaatctaataatttttatgtagatatgaaaataataggacagtttaataatacatatatattaatagaaaaggataaagaactttatataatagatcaacatgcggctcatgaaaaagtgttatttgagaaattcaaatgcgaaatagaaaagggatatgtaataagtcagattttattatctcctgtagttatagaactttcagaagatgaatttaatatatacgaagaaaacaaggatatttttaaattaatagaagacatgcttatattaaataatccatatacttgtccccatggaagacctactatgattaaatttacattaaaagatttagaaaaaaaatttaaaagaatacaa

SEQ ID NO: 16501 - DNA, 1470 bp, Clostridium botulinum
atgggagtgaaaacaatgacaaacaaagtcagaactagattcgcaccaagtccaacaggttatatgcatgttggtaacttaagaactgctttatatgcttatttaatagcaaagcatgataatggtgattttatattaagaattgaggatacagatcaagaaagattagtggaaggtgctttagatgttatatataatactctaaaaattactggtcttagtcatgatgaaggtccagatattggcggacctgttggtccatatgttcaaagtgaaagaagaaatatatacatagaatatgctgaaaagctaatagaaaaaggagaagcatactactgtttttgttcaaaagaaagattagatatgctaagagctaattcagaggctttaaaaagacctttcagatatgacaaacactgcatagatctttctaaagaagaaatcgataaaaaaatagctgaaggtgttccatacgttataagacaaaaaaatccaactactggatcaacttctttccatgatgaaatatatggagatatttccgtagataattcagaattagatgatatgattttaataaaatccgatggacttccaacatataattttgctaatgtagtagatgaccatcttatgggaataactcacgtagtacgtggaagtgaatatttgtcatcttctcctaaatataatagactatatgaagcttttggctgggatgttccgatatacgttcattgcccaccaataatgaaagatgagcatcacaaattaagtaagagaaatggagatgcttctttcgaagatttaatggctaaaggttacttaaaagaagctatcctaaactatatagctttactgggatggaacccaggtggagaaaaagaagtattttctatggaagaattaatagaagcctttaattatagaaatataaataaggctccagcagtttttgatacaaaaaaattaaaatggatgaacggagaatatataagagctttatctttagataaattccatgaaatggctcttccttattatgaagaagctttgactagagatttagatactaaaaaaataagtgaacttttacacactagagtagaggttttaaatgaaattcctgaacaattagatttctttaataatcttcttgaatactctccggaaatgtatattcataaaaaaatgaaaacaacttatgaaaattcattaaaaagcttagaagaagttcttcctaaactagaagctctagaaaattggacttttgaaaatattaaagaagtatgtatgaatttagttaaagaacttgaagttaaaaacggtgtagttttatggcctataaggacagcagtttctggaaaacaatttactcctggtggagcttttgaaatagctgatatattaggtaaggaagaaactctagaaagaataaaaataggaatagacaaacttaaagctttacaa

SEQ ID NO: 16502 - DNA, 708 bp, Clostridium botulinum
atgagttacaatctaacagatccgtatgaaatagctagatacataaaagaagccaaaaaatcgactcctatcaaagcttacatagaaggagatctttcaaactgtgattttacgaacatagaaaaatttaatagtggagatttatatatattatttggtgaatcagaagaaatattagttattatagaaaaaaataaagataaaataaaaaattgtagaatagaacaggatagaagaaagtctgcaattcctttacttgatatgcttaaaataaatgctagaatagagccaggtgctacaataagagataaagttataataggagaaaatgctgttattatgatgggcgccgttgtaaatataggtgctgaaatcggagaaggaactatggtagatatgaacgctgtagttggcgctagaggaaaacttggtaaaaatgtacatttaggtgctggtgctgtagttgctggtgttttagaaccacctagcagtgatccttgtactatagaggataatgttcttataggcgcaaatgctgttatattagaaggtgtaaaaattggtaaaggttctgtagtggcagcagggtctatagttactactgatgtaccagaaaacgtagtagtggctggtgctccagctaaaataataaaagaagtagatgtaaaaactaaagataaaactaagcttttagatgatttaagaaaa

SEQ ID NO: 16503 - DNA, 570 bp, Clostridium botulinum
atgaaaataatatgtattggagatagtttaacctttggatatggtattaataggaactattgctgggtaacacttttaaaaaatatattagaatatgaagttataaataaaggaataaatggtgatacaactacaggtattttaactagatcccatgaagatataataaaaaataaatctacccatactataattttaattggaacaaatgattttttgttaggccgttctttagaaaacgtagaacaaaatttaaatttaataattaaggaatgtgtagaaaacaatataactcctatcataggtattcccatggaaatagaaatagctatggcacaaaaaatctggacatctgatttagattatttaagtgtaaataataaactaactgaatatagaaaatatattttaaatatttctaaagaaaataactttaaatatatagattttttctcagctattaaagaacataaatcaaaatgtaaagcttctgaactattcgtagatgggattcatcctaccccattaggacataaaataatgtttaataaagcctatgagatatttaaa

SEQ ID NO: 16504 - DNA, 1404 bp, Clostridium botulinum
atgaaaaagaaaataggtctatgggacttagttttcatgaatgtatcagcgctttttggaattagatggatagcaaaatccacagcatctagttttgggctaggtcttggtgcaataccagcttgggtattatttgcatttatatttttcttaccaagtgcgcttatttgtgcagaacttgcagctacttatccaagagatggagggctctatgaatgggtaaaggaagcctatggagaaaaatggggatttatggtgtcttggttaaattggacagctaaattattttggtattcatcatttttaacattcttaatagtaaacgtttcttatacattagggaaaccagagcttgcaggaaataaaatgtttgtacttatatgttcattagttatattttggatactttcattaattagtactaaaggtatggcttttgctaaaatatttactaatgtaggggcattaggttcaactgtgccagcaattcttttaatagtaatggcatttgtatctgtattagtatttggacataaaccagcatcaacttataccgtggctacattaacgccaaaattaaatatggatactttagcagcaatttcatcagttatgtttggacttgcaggagcagaaactgctgcaaactttgttacagaaatagatgatgctaaaaaaactttcccaaaggcaattttaatatcagcagctatagttggagggctttatgtattaggttctattgctataaccatgattcttccagtagataaaataactgcatctgaaggtatattagcagccttaggaactgttgcagctaatttaggaataggaccatggtttataagaataatagctttaggtatttctttatcagtatttggagctataatactttatatagcatcaccaataaaaatgttatttggtagtgttaaaaaaggaatatttacagagaagtttacaaaggttaatgaacacaatatacctgtacaagcagttatactacaagcggttatagtaagtataatattattaactactacattgctaccatccgttgatgcaatatataatgtgcttgttacaatgacagcattaacatcattatttccatatgttttattattccgttcatatataaaattaagacaagatagaccaaatgaggtaaggccatatgaaatgtctaaaaataatagaaaagctatatttatagctaatatggtacttataatatcagtaataggaatagttttatcagcagcaccagttatgccgactttagctgaaaatatagtatatgaattagaaatgataggtggagcgattttagttataggcataggtttatggaaatggaataattttgctaaaaaaacaggatttagagaagaaaaa

SEQ ID NO: 16505 - DNA, 3015 bp, Clostridium botulinum
atgggtgataagatgcgaccaatttctttaaaaaaaatgattacatggactatggaagagttaaaggaaaaagaatctatttttggtatccataagaataaattttataaaaatgatactggaaaatatatagaactattcggtgaaagattggcatcgccacttggttcggcagcaggacctaattctcaattaacacaaaacatagttgcatcttacttaacaggaagccgttttattgaattaaaaacaatacaagttattgatggagaggatttacctgtagctaaaccatgtatccatgcacaagatgaatgctataatgtggaatggtctacagaattaacagtaccagaagcttatgatgaatacataaaggcctggtttttacttcatgttctaatgaaagaactaaatttaagtgaagaaagagactttatgtttaatatgagtgtaggttatgatttggatggaataaaatctcctaaagtagatacctatatagaaggaatgagaaatgcatctactacaaaaatttggaatgagtgcagggaaacattactttctaacatagatttgttctctaatttcagtatagaagatttggataaaatttcaccagtagtttgtccatctattaccctatctacacttcatggatgtcctccagaagaaattgaaaagattgcaaagtatcttttagaagaaaaaaatcttcatacttttataaagatgaatccaactcttttaggagaaaagtttgttagagatacatttgacaaaatgggatatgattatatagttcttaatcctaatcactttataaatgatttgcaatataaagatggagtatccatgcttaaacgtctaaaatatgttgcccaaaaattaaaattagaaataggagtaaagcttacaaataccttgccagttaaaattgaaaatggtgagttacctggggaagaaatgtatatgtcagggcgttctcttttcccactaacaatatctttagcaaataaattagcttcagaatttgatggtgatctacagatatcttattcaggtggtgcagatttctttaatatagaaaagattttaaaagcaggcattcaaccaattacctttgcaactactattttgaaaccaggtggttatgaaagaataactcaaatggcccaaaaggtagaagagtatcttaaaggtgcatttaaaggtattgatatacaatatttaaatgaacttgccaattcagctgtaagtgataaataccatcttaaagatcttagacccgtaaatagcagaaagatttctttagaactgcctatttatgattgtgcagtagcaccttgtactataggatgtcctataaatcaacaaatacctgaatatgtatctttagttggtgagaaaaaatatgatgaagcttttgaagtaatagctaaggataatacttctccggcaataacaggtactatatgtaatcataattgtcaatataaatgtacaagacttgattatgatgaatcagttctaattagagatatgaaaaaagtggctgttttaaatgctgaagacaaatatattgaagacattaaagagtctaatataagaagtgacaaaaaagtagcagttataggagctggtccagcaggattatcagtagcgctattcttaagaagaaatggcatagatgtaactgtaatggatataaaagaaaaaccttatggagtaatagaatatgttattccagagtttagaatttcttctgaaatgattaaaaaagactttgaacttgttaaaaagcagggagttaaatttaaatttggtattgatgaaaatttagatttagatgctttaaagaaagaatatgattatgtggtattagcaataggtgcttggaaaccaggtaagctaacattaaaagagggcggagaaaaagctattgatgctatttcattccttgaaaaccacaaaaagtctaaaggagatattaatttaggaaaacatgtctgtattattggcggcggcgatgtagctatggatgcagcacgtgcagctaaaagaactaatggggtggaggaagtttccatagtttacagaagaactaaaaaatatatgccagctagcctagaagaaatagagttggttcaaactgaaggtatattatttaaagagttactttcaccaatgtctataaaagattcaaaattaatttgtgaagagatgaaattagggaaaaaagatgcttcaggaagaagaaaacctgttggcaccggtaatactgtggaattagaagctgatacagttattttagctgtaggacaacaagtagatagtgatctacttaagaagaacaaaatagaattagatgctaaggaattccctaagataaacgaagcgcgtgaaacaaatattactaatgtatatgtggccggagatatgaaaaaaggaccagctactattgttaaagctatggctgatggtaaggcagtatctaaggacattttatcaaaggaaggcttaagtaatgattttgataagaaagtctttcctataaatgagaaaaaagtatacagtaaaaagggtatattaagagatcataattgtttagaaaatgaatcagaaagatgtctatcttgtagcaacatatgtgaattatgtgtagatgtctgtcctaacagagctaatgtagttattaatgtagatgcagaatttaattcttcacatcaaatagtacatttagatggaatgtgtaatgaatgtggtaattgtggtatcttctgtccttatgaaggaaatccatacaaagataaattaacacttttctggactaaggaagattttgaaaatagtacaaataaaggattcttagttatagataaagataagggaatctgtaaggttagaagagaagatactgaaattatagattatactattggaaaagaaaatgatgtttcaaaagaaatggacagtatgattaaaactttcgtaaatgaatatagttatatgtta

SEQ ID NO: 16506 - DNA, 1083 bp, Clostridium botulinum
atgaaagaaaagaagaataatgctaaagataaaaatgaaaaaatgaagttagttagacgcttaatagataaaggtaaaaaaagtggatcattaagttataaagaaattatggatgaattagaagaaatagatttaagtccagaacaaatcgaaaaaatatacgatgtattagagtctatgggtgtggaagttacaggtgatatgaatgatatagacgtaaaggaagaggatattgatttatcagttccggaaggtattgctatagatgatcctgttagaatgtatttaaaagaaatagggaaagtagcattattaacttcagaagaagaaatagaattagcacaaagaatagaagcaggagatatggttgctaagaagaaattagcagaggctaatttaagacttgttgtaagcattgcaaagagatatgtaggaagaggaatgttatttttagatcttatacaagaaggtaacctaggattaataaaagctgtagaaaaatttgactatagaaaaggttacaaatttagtacctatgctacttggtggataaggcaggccattacaagggctatagcagatcaagcaagaaccataagaataccagttcacatggtagaaactataaataagcttataagagtatcaagacaactattacaagaactaggtagggagccacagccagaggaagtggctaagattatggaaatgcctgtggataaagtaagggaaataatgaaaatagctcaagagcctgtttctttagaaactccgattggtgaagaggaagatagtcatttaggagactttattccagatgatgaagcaccggcgccggcagaagcagcagcctttacaatgttaaaagagcaacttattaatgttttagatacattaacaccaagagaagaaaaggtattgagattaagatttggtttggatgatggaagagccagaactttagaggaagttggaaaagaatttaatgtaacaagagaaagaataagacagatagaagcaaaagccctaagaaaattaagacacccaagtagaagtaaaaaattaaaagattatttagat

SEQ ID NO: 16507 - DNA, 864 bp, Clostridium botulinum
atgtcaattaaaatagaaaatttaacacatgtatatatggaaggaacaccttttgagaaaaaggcaatagataatataaatataacaatagaaaatggagaatttgttgctttaattgggcatactggttcaggtaagtctacattaattcaacatataaatgggttgctaaaacctaaatcaggaaatattataatagataatgtaaatatagcagataaaggggtaaaattaagttctataagaaaaaaagttggacttgtatttcaataccctgagtatcaactatttgaagaaacgatagagaaagatattgcttttggacctattaatttaggtttaaatcaagaagaaattttgaatagagtaaaaagagcaatgaatatagtaggattagattatgaagtgtataaagataaatctccatttgaattaagtggaggtcaaaagagaagagtagccatagcaggagtagtagctatggaacctaaaatattaatattagatgaacctacagcgggtttagaccctaaagccagagatgatatatatagtaaaattcaagcattaagaaaagaatataatatgactataattcttgtttcacatagcatggaggatgttgctaagtttgcggataaaatattagttatgcataaaggaagatgtgtactacaaggagagccttgtgaagtatttaaagagattgatgctcttgaaagtataggattagcagcaccagaggttacctatttagtacaaaaattaagaaaaaaaggttttaatttaccagataatatttatactatagaaaaagctaaaaaagaattattaaaatcacttaaaagtgagggaattattaaa

SEQ ID NO: 16508 - DNA, 1656 bp, Clostridium botulinum
atgttaaaaccagaaattttagacatattaaaatgcaaaaagggaggattaaccaaagaaggattaataaaagattttatagctggtattatagtagcaataatagctttaccattatctgtggctttaggtatagcctcgggagtatccccagaaaagggacttattacagccataatagcaggatttttaatctcatttttaggaggcagtagagttcaaataggaggacctacaggagcctttgttgttattatatatggtatcatagagaaatatggcatagatggacttgtaatagccacattgatggcagggataatacttgttatctttgggttgttaaaattcggctctttaattaaatacatatcttatccaataacagttggatttacagcagggatagctgttaccctattttctactcaagttaaggatttcttagggttagcaataaataaagtaccatcagaatttttaccaaaatggtcaatgtacatatctaacataggaacattaagttggcaaactttaagtttaggcattttttctttattagttttaataatatggcctaaatttagtaagaaagtaccaggagcgttagtcgcactaatactatctactcttatagcttattttttaaagctaaatgtggcaactataggaagtcaatttggagaaatatcatctaaaatagaactacctaaattaccaggagtagatatcattacgttacaaaagttaattaagccagcctttactatagctattttagcagctatagaatctctattatctgcggtggtagcagatagtatgataggtgaaaaacataattcaaatatggagctaatagcccaaggaattgggaatattgcatcagctttgtttggtggaataccagctacaggagctattgcaagaacagcagctaatgttaaaaatgggggaagaactcctatagcaggaatggtacatgctataacattattattaataatgaaaatttttatgcccttagcaaagtatattccgttgactactttagcagctatattaatagttgtatcttataatatgagtggatggagaatttttaaagctatgctaaaagcaccaaaaagtgatgtaataatattattagcaacattttttctaacagttatatttgatttagtaatagctatagaagtagggatattcatatccatgtgtttatttatgagaagaatggccttagctatagaggttaatgaattggatgaaaattattgttctaaaagattaagcttagaaagtatacatacaaataaaataggtaatgaaatattaatatatgatataaatggtccattattttttgcaggtatagatagttttctatcttcaatagaaagcttagacacagaatcaaaggtagtaatattaagaatgaaaaatatgcctgtactagatgttacagcctatagtgagttaaagaaaatagaaaagttatgtatagaagaggaaataaaattaattatgtccgaagtacaagctcaacctatgggagttatgaaaaatatggggatggtttcaagattaggggaaaatagatttataaaaactttagaggaagctataaaaacagctaataactgttgcattaat

SEQ ID NO: 16509 - DNA, 1056 bp, Clostridium botulinum
atgaagatattaacagtagttggtgcacgtccacaatttataaaagcagcagcagtttcaaatataataagaaaagagcatacggaaatattagttcatactggacaacattatgatgaaaatatgtctaaaatattttttgaagaattaagaatacctaagccagattataatttagaaataggttcaggtaatcatggtgaacagacaggtaaaatgcttatagaattagaaaaaatatatttaaaagaaaaaccggatttagtattagtgtatggagatacaaattctacgttagcaggggctttgtgtgcaagtaaattgttaatacctgtagcccatgtagaagctggtcttagaagctttaatatgaatatgccagaagaacaaaatagaattcttacagatcatatatcaaagttattatttgtacctacagttacagcagaaaaaaatcttcatactgagggagttaataatggtgttcataatgtaggagatgtaatgtttgatgctgtattacattttaagaaattagcagaagaaaaggaaagtatactagataaaatctctataaaatctggagaatatattttaacaacaatacatagagcagaaaacactaatgatataaatagattgaaaaatataatagaggcattaaatgaaagtggaaagtcaatagtattaccacttcatccaagaactaaaaaatatatagaagattataatttacaatttaatgataatataaaattaatagagccagtaggatatcttgatatgattactttagaaatgaattcacaaaagatagttactgatagtggtggagttcaaaaagaagctttctttatggaaaaaccttgtgttactatgagagatgaaacagagtgggtagagaccgtagaaaatggatggaatgtaatagtaggtacagataaagaaaaaatattaaatgctgtagtgaattttaagcctgaaaaagaacaacaagaaatatttggaaatggtcatgcagcggaaaaaatattagatataataaacaaaatgaag

SEQ ID NO: 16510 - DNA, 1740 bp, Clostridium botulinum
gtgaataaaatgagtttagtaactttaaatataaatggtaaagatcttaaagtagaaaatggaactactatattagatgcagcaaaacttttaaatataaatataccaactctatgtaattttcatcttaatgataataaaacagaaaataaacctggttcctgtagggtctgtgtagtagaagtagaagggagaaaaaacttagcgccagcatgttgtacccctgtaggggaaggaatgatagtaaaaactaattccataagggctataaaagctagaagagctatagtagaattacttttatctgatcatccaaaagactgtttgctttgtgagaaaaatacaaaatgtgagctacaaaaattagctgcagatatgggtataagagaaatgaaatatcaaggtgatgtttcaatgtatcctatagatatttctagctattccatagttagggatatggataaatgtatactttgtagaagatgcataactatatgtaatgaagttcaaactgtaggaaccctatctgctattggaagaggttttgaaactgtagtagcaccagccttttctgaagctataaaaaatactaattgtactttctgtggacaatgtgtttctgtctgtccaactggggctttaacagaagtaaataatacaagtaaagtttgggatgctctatcacaaaaggataaaattgttattgtacaaacagctccagctattagagctgctttaggtgaagaatttggattagaacctggaacaactgttacaggaaaaatggtagcggctcttcgtcaattaggattcagtaaagtttttgatacagattttgcagcagacttgactattatggaggaagcttcagaatttattcatagattagaacatggcggaacacttccaatgcttacaagttgttgtccaggatggataaaattctttgaacacaactttaatgatttaatggatataccatctagttgtaaatcacctcagcaaatgtttggagctatagctaaaagttatttagcagaaaaaatgaaggtagatcctaaagatattatagtagtatctgtaatgccttgtcttgctaaaaagtatgaggcaaaaagagaagaaatgaagagaaatggaatccctgatgttgatattgttataagtacaagagaattagctaaaatgatagtagaagcgggtatagattttaattctctacaggaggaagaatttgataatcccctaggtgaatctacaggggcttcagtaatttttggaactaccggcggtgttatggaagcggctttaagaactgcctatgaatgggttactaaaggtactttaaaagatgtagaatttatagaagttcgcggtgaagatggtataagagaagctacagtaaacataaaggatacagaggttaaagtagctatagctagtggattaggtaatgctagaaagcttttaaatgatataagaaatggaaagtctaaatatcatatgatcgaaatcatggcgtgtccatcaggatgtgtagatggtggtggtcaaccttatatctatggagatacaaatatattgaaaaaaagaacagaagccctatataaagaagatagtaataaagaaataaggaagtctcacgaaaatccatatataaagaaactttatgaagaatatttaggtaaaccttatggtgaaaaagctcatgaacttcttcatactaaatatagagttaga

SEQ ID NO: 16511 - DNA, 1827 bp, Clostridium botulinum
ttgataagtgcagcctatgctacagccataattttaatttcttttaggctttttattttttttagtatggtacctatatttttcccaaagggaacccctgtaataggaaaagtttcgttagctttaattatagcttatatgttagttggttctatagatattagaagtataaatactataaataattcaaccgcactaatatttaatattgttaatgaaattttagcaggagccattttaggatatataactaatgctgcttttgtctgtgcaaggtatgctggcaacatgatggatcttcaggtaggattctctatgatgactatgtttgatcctagcactaatagtaatgtaacctttttagagagaatattatactggtttagtaccattgtatttttcttaatagatggtcatcatatgcttataagggctttagtagaaagttttaatgttataaaattaggggcctttttcctaaatcaagagggtataaaacatgttctaaatgtttttatacaatatttttacataagtattaaaatagcagtacctattgtattcattatacttataacagatttaactttgggattagtagctagaacagtgcctcaattaaatataatgattttaggacttcctattaaaatactagtgggccttactgcttttgtatttgcattacctttgtttttgaaagttttaaactctgcttttgggatgttaccagatgctataagaggtttttataaaactatacctgttttaattatttttgcatcagaagaaaaaacagaggaagcaacccctcgtaaaaaaatggatgcaagaaaaaaagggcaagtagctaaaagtaaagaattagcccttgcatttactctcttggcctgtactctagtgttagtagcactgggggagtatggagctaatgaacttaaagaaactatggcaggatttttaaataattatcttaatatggaattaaattacaataatttgaattccttagctatattaacggttttacgggtaggtaaaatagttttacctgtggctctaccaattatgtgctttggtatagctgctaattatttgcaaacaggatttttatttacaaaagaacccttaaaaccagattttaaaaaattaaatcctataaatggttttaaaagaatgttttcactaagaactgtaatggaacttctaaaagatttaactataataactgttgttgggattgtaggttataaatttttacaggataattatttaaaaatattaaatttaggaaccttaagaccttggtatatgataacaggacttttatctcttgcaatatctatattttttaggataactttgattatgctttttatagctgtagcagattatgtgtatcaaaaataccaatataataaggatttaaaaatgacaaagcaagaggttaaagaagaatataaacaagatgagggagatcctcaaattaaatcaaaaataaaacaaaaacaaagagaaatggctatgcaaagaatgatgcaggaagttcctaaagctacagtggtggttacaaaccctacccacatagcagtagcactaaggtatgaaaaaggagatactgcacctaaggttgtggctaagggggcagattatgttgctataaaaataaaagatatagccaaaaataatgaagttcctgtaatagaaaacaagcctttagcaaggctaatatatgaaaaggtagaaattgattcagaagtaccacaggatatgtatgaagcagtagcggaaatattagctatagtttatactttaaaaaagaaaaaa

SEQ ID NO: 16512 - DNA, 237 bp, Clostridium botulinum
ttgcgcttagataaatttcttaaagtttcaagaataataaaaagaagaactgtagctaaagaggcttgtgaaaatgaaagagtttttgttaattctaaaatagctaaaccaggtactgaagttaaagagggagatatcttagaaatacaatatgctaataaaactatgaagtatgaaataatatctgttttagagcatgtaaaaaaagaagatgctgaaaatatgtacaaaattata

SEQ ID NO: 16513 - DNA, 435 bp, Clostridium botulinum
atgatgaaatcatatatagctaaaccacatgaagttgaaagaaaatggtatatagtggacgctgctgataaaccattaggaagagtagctagccaagttgcatcaatattaagaggtaaacataaacctacatatacaccacatgttgatacaggtgataatgtaatagttataaatgttgaaaaagtagtattaacaggtaaaaaactagatcaaaaattattaagacatcattcattatatccaggtggattaaaggaaataccatacagagaagcgatagctaaaaaacctgagttcgtatttgaagaagcagttagaagaatgcttccaagcggagttttaggaagaaaaatgttaaagaaattaaaggtttataaaggagcagaacataatcaagaagctcaaaaaccagaagtattagaattaagatac

SEQ ID NO: 16514 - DNA, 2643 bp, Clostridium botulinum
atgataaataagagaaaagtgaatgtgcaaagtatagaacaagaaaatacaaaaaaactttttaaccttagcaaaatgaacttacaagaagtatataaagaattgaatactgatataaaagggctaacaatcaatgaggtagaaaacagaattgaacaatatggattaaaccaagtggaacatgaaaaaccaataccatggtatgtacagttatttaaagcctttattaatccttttatattagtcttattagttcttgccggtgtatctttaataacggatgttattttagtagccccagaaaatagaagtttcacaaccgtaattgtggtgggtgtaatggtaacaataagtgggcttttaaagttttctgaagagcttaaatcaaataaggctgctgaaaaactaaagcaattagtaagaacaactgctgcggtatatagaaaagaatcagatattaaagagatagatatgtctgaaattgtaccaggagatatagtctatcttgcagcaggagatatgatacctgctgatgtaagaataataacaagcaaagatttatttgtaagtcaatcctctttaacaggagaatctgagcctgttgaaaagtattcaattttaaagaatagaaatgaagatttaagtgtaagcgaacttgataatatatgtttattgggtactaatattataagtggaagcgctactgcagtagttatatcaacaggaaatgacacatatcttggaactatggcatcaacacttacagaaactaaaaacttgacgagttttgaaaaaggcataaatagtgttagtatgcttcttataaaatttatgtttgttatggttcccatagtattttttataaatggtattacaaaaggaaattggctagaagctttgctttttgcaatatccatagctgttggattaacaccagaaatgcttccaatgattgttacaactaatcttgctaaaggtgccgtggttatggcaaaacgcaaaactgtggttaaaaagcttgatgctatacaaaattttggagcaatggatgttctttgtactgataaaacaggaactttgactttggataaaattgttgttgaaagatacctaaatatacatggagaacaagatcagagagttttgaggcatgcctatttaaatagtttttatcagacagggcttcgtaatttaatggatatagctatattagaacatggaaacgaaaaaggttttaaggaactcgaaaaaaattatttgaaagtagatgaaattccctttgattttgtaagaagaagaatgtctgttgtattgaaaaataatgaaggtaagagacagcttataacaaaaggcgctgtggaagaaatgctttcagcttgcactttagcagaatataaaggagaagttgtagaacttactgaagatataaaaaataaagtgcttcgtatggttacaagattaaataatgagggcatgagagttattgcaatagcacaaaaaaataatattgcagatgagaataactttactgtaaaagacgaaagtaatatggttcttatgggatatgtaggattcttagatccaccaaaagattctgcaaaagatgcaataaaagcacttaatgaaaatggtgtagctgtaaaaatattaactggtgataatgatgcagtaaccttaaaaatatgtgaagaagtaggattaaaaattactaatgtacttttaggaaatgaagtagaaaagatgggtgacgataagttagctgagattgttgagaatactaatgtttttgcaaaactttctccacttcagaaatcaagaataataaaaatacttcaaaataaagggcatacagtgggttttatgggcgatggtataaatgatgctgctgcactgcgtcaagcagatgtcggtatttctgttgatactgcagtagatattgcaaaagaatctgcagatataatcttattagaaaaaaatcttatggtgctagaagaaggcgttatagaaggaagaaaggttttcggaaacattataaagtatataaagatgactgctagctctaattttggtaatgtatttagtgtattggttgctagtatgtttctaccatttttgcctatgttaccaattcatcttttaatacagaatttattttatgatatatctcagatctctattccatgggatacaatggataaagagtatttaagaaagcctagaaaatggaatgctagtgatattggaagatttatgatttttattggaccagtaagttctatatttgatataataacttatttagtaatgtggtttgtatttaaagctaatactccagcaatgcaatcattattccaatcaggttggtttatagaaggacttttatctcaaactcttattgtacacatgataagaactaaaaagataccttttatccaaagtagagctacggctcctgtgcttttattaacaggaattataatggcagcaggtatttgcctaccttttacatcttttggagcctctgttggattacaaccattaccatttttgtatttcccatggcttataggaattttattagcttattgtgtactaacacaatttataaaaagactatatattaaaaagtttaatagctggtta

SEQ ID NO: 16515 - DNA, 708 bp, Clostridium botulinum
atggaaagcaaatatttgactatttataatgagatttcaaataaaatagaaaataataaaattcaatccggcgaaaaactttcttctgaaaatgaaatgatgaaagaatataatgtatctagagataccataagaaaagcattaaatttgctggaaagtaatggttatattcaaaaagtgaaaggtaaaggttcctttgtactagatattaataaatttgattttcctgtttcaggacttacaagttttaaagaattatctactagaatgggagtagaatctaataccctagttaaagaattaaagttaataaagccagataactttttaatgaaacaactaaacctatcaaaaaacgatgacgtgtggaaagttataagagtaagagaaatagataataaaaaaattatcttagataaagacttttttaataagaaatatgttcctttattaactaaagatatttgtgaaaattctatatatgaatatcttgaaaatgaactaggacttaaaattagctttgctaaaaaggaaattacagtgcagcaagctacacaggaagacaaatcatatttagattttgaaaattataatatgatagtggtggtaaaaaactatatatatctagatgatatgagtctatttcagtacactgaatctagacatagaccggatagatttaaatttgtagaatttgcaagaagaaaa

SEQ ID NO: 16516 - DNA, 1131 bp, Clostridium botulinum
ttgttgttatatatttttttaactatgatattagtagcagtttgtgatagtacaagagggatctttatccccatatttaaaaatgagtttaatataaataatactaaaataggattgatgattactataagtacattgggatacacagtatttacatacttaggtggcatattgtgccaaaagaaaggtcagaagagagtttattctataggacttttaataataagtatatctttcttactattaaattttacgcctaattatataattcttattattttaatgtttttaataaacggaggccaagctttcttagctatatctagtaatacaataatacctataatttttataagttttcaggctataataatgaatttagctcattttaattatggaatgggattagctttatcacaaaggatttctggtatgcttttgtatagaggtataacttggagaaggatatacctttatttatcaattataactttcatagtgtatctattgttattttttattaatatacctgtgattaataagtcaaaagacgataataaattaaagtcgaaagaaatttttaaagataagttattatatttttatatatttgcattaggattttatgtatttagcgaaatagctacaggaaattggttcgttaatttaatggagaatggatacagatataataaaaatcaaagttcatattatatatttttattttcagctttatttgccttagggagattattagggggatttttagtagaaaaattcaactatataaaggccgtatgcacatctttggctgtggctttaatgatgtatactataggtataacattagggcaaaaggggctaattttaatatcattatctggaatatttttttctatagtatatcctacagtagtattaactattagcaaagtatattccactaatagttcttatgtgacgggaatagtagtaaccttatcttcttttgtaaatatgattataagttttttaatgggatatttaaatgatttaataggtatttatacatcatattatcttattcctataagtttatttatttctttaatgtttatgtttttaatacacaaaaatataaaaaaattagct

SEQ ID NO: 16517 - DNA, 1071 bp, Clostridium botulinum
atgaaagcagcattatggtatgaaaaaaaagatgtaagagtggaagaaattgaagaaccaaaggtagtagaaggatctgtaaaaattaaagtaaaatggtgtggaatatgtggttccgatttacatgaatatttaggaggccctatatttattccagtaggacaacctcatgcgttaagtggaacaacagcaccagtagttttaggacacgaattttcaggagaaatagtagaattaggacaaggtgtaacaaaatttaatattggagatagggtaattgttgaacctatagtagcttgtggaaaatgtccagcctgtatggaagggaaatataatctttgttcatctttaggttttcatggactttgtggaagtggcggtggacttgcagaatatactgtatttccagaggaatttgttcataaaattccagatgaaatgtcctatgaagatgcggctttagtagaaccaatggcagtagcacttcattctgcaagaatagctaattttaatacaggagatacagctttagtattaggtgcaggaccaataggtcttgctacaatagaatgcttaaaagcagctggagcaagactcatagtagttttacaaagaaaatctataagacaaaaatatgcaaaaagagcaggggcagatgtagttttagatcctaatgaagttaatataccagaagaagttaaaaaacttacagatgggttaggtgtagatgtagcctttgaaaccacaggagctaagataggatttgatactggtattgaaagcttaaaatttgaaggtacaatggttataactagtatatgggaaaaggatacaagctttaatccgaatgtattagtatttactgaaaagaaaattgtaggaactttagcatatagacatgaattcccagccactatggcgttaatgaaggatggaagaataaaaacagatggatatattacaaagaaaatagctttagatgatatagtagaagaaggatttggggctttaactggaccggaaaagaaaaaacatgtaaaaattattgtaactccagataaatcactttta

SEQ ID NO: 16518 - DNA, 468 bp, Clostridium botulinum
atgagtaaaaagaagggaagcaatactcttgcagaaaatagaaaagcaaggcatgattattttatagaagaaacttacgaagctggtatagaattagtagggacagaggttaaatctataagacaaggaaaagcaaacttaaaagatagttatgctgagattagaaatggagaagtttttgttagaaacatgcatataagtccctatgaacaaggaaacatatataataaagatccactaagagatagaaaattgttacttcataagagtgaaatatataaattagtaggctttacaactcaacaggggtataccctgattcctttatcattatatcttaaacatggaagagtaaaagttagtttagctgtagctaagggtaagaaaaattatgataagagagatgcaatgctagaaaaggcagcaaaaagagaaatggacagacaaattaaagaaagaagtagatat

SEQ ID NO: 16519 - DNA, 720 bp, Clostridium botulinum
atgaaatcacttattttttatttaggttttgcactttatatgctgctgtctcttttgcgaataataaaattgaaacatttaaaaagaaaaggtaataaagaagaaatagatagatatattaataaaagtgttgtaggttgggcaaaattcatagtcaatggtataggaataaaaataaataaaaaaggattagagaatgtacctgatgggccttgtctgtttgtaggaaaccatcaaggattgttagatgtgccggttatagtttcatccttagatagatatgtaggttttgtagctaaaaaggaaatgctaaaacttaaaatattaacttattggatgaaagaaatgaaatgtgtttttatggatagacaaaatgttagagcagcagtcaagaccataaatgaaggtgtagaaaatttaaaaaatggatatagtatgctgatatttccagaaggtacaagaagtaggggagaaaatttaggggaatttaaaaagggaagtatgaaattaggtataaaagcaggggtaccaatagtgcctatagctattgatggtacctataatgtactggaggccaatgggaaaaagataaaagctgcggatgtagatttaataatatgtccaccaatatatcctaatgaactctctaaagaggaacaaaataatttatctgtaactattaaagatgttatacaaaaagaattggaaaaaacaagaaat

SEQ ID NO: 16520 - DNA, 3516 bp, Clostridium botulinum
gtggttgttaatatgagactagaaggtttagtatcacctttgagtttaagtgaagattttaaaagtttattaaataatataaatttaaataaatttcctataggtgcatatggtttgtcggattctggtaaaaattactttatcagcaatatatttgctaacgtggatgaatctttagtgatttttactcatagtgatgtggaagctagaaaaatatatgaagatttaagtttatatacaacggaagtatattatttacctactaaagaagtcgtattttataatatttatgctatatcaggagatttaagatgggaaagacttaaagttataaatgaaattttaagtcctaagaagaaaataatagttacttgtatagaatctttagaatctgcatatatacctaaagaattatatacaaagtatacatttaaattgtctgttggagatattatagaaataaagttattagaagaaaagttgataaaaagcggatatgaaagagtagatatagtagaaaataaaggagagttctctgcaagaggaggaataatagatatatatcctcctatttcatcagaaccctatagactggaattttttgatgacgaaatagattctataagaaactttaatgtgaattctcaaagaagtattgaaaaagttaataatataaatatatttccagctaaagaaattatacttgaagaagaaaatataagcttaggattaaaaaatataaaaactgatttagataaattggttctgaaattaaataaaaaggaagataaagagaaaatacaaagcataataaatagcaatttggaacagttaaatgaaagctggtcttttgaaaatatagatacttttcttccttatttttacaacaaaactaacagtttattagattatatagaaggttctttaattattatagatgatgttaaacggtgcttaggtaagttagatagtacttatttagagtttaatgaagactatgataaatttttagaaaagggatgcatattacctaaacaggcggaaattgttcatgataaagaaagaatgatagagcagttagaatttaaaaaaataattaacatagaaaatataaaaaaaactatagatagattaaagcccaagtctgttttaacatttaatcaaacaaccttacaggggtataatggtaaaattgaatttttgatagaggatataaaagaaaagaaaaaagagaaatataaaatattaattttatcaggaactagaagtagaggagaaagattagtaaaccatcttagagatatgggagtagagagttcctataaagatatagtaagagaaattaaaccaggagaagtagttataacttttgggaatcaagggaatggctttcagtattatgatataaaattaagtgttatatctgataaggatatatttggacaattcaaaaagaagggcaaaaagaagcagaataaaaagggaacaggaaaaattaaaagtttcactgagcttaaaccgggagatttcgtagtccatgctaaccatggtattggggtatttaaaggtataaagcaattagaattacaaggtaacaaaaaggattatttggaattaatatatcattcagatgataagctttatgtaccagtagaacagttagatatggtgcaaagatatataggcagtgagggtaaaaaacctaaagtaagtaagctaggaagttcagaatggactaaaactaaaaataaggttaaaaaatctatagaagaaattgcagaggatttagtaaaattatatgctataagagctaccctaaaaggctataaatattctgatgatacagtatggcaaaagcaatttgaagaagaatttccttatgaggaaacaccagatcaattgttagctatagaagatataaaaagggatatggagtcaccaaagcctatggatagacttttatgtggagacgtgggttatggtaaaactgaggttgctataagagcggcctttaaggcagttatggatgggaagcaggtagcatttctagttcctactaccatattagctcaacaacattataataattttaaacaaagattttcggatttccctataacagttgatgtcataagtagatttagaactttatccgaacaaaaggctactataaagtctattaaagaaggaaatgtagatatactaataggaactcatagaattctccaaaaagatataaaatttaaggatttaggattattaataatagatgaggaacaaagattcggagtaaagcataaagaaaagatgaaaaatttaaagaaaaatgtagatgttttaactctaagtgccacccctatacctagaactttgcatatgtcattagtaggtgttagggatataagtgttatagaaactcctccagaggaaagatatcctgttcaaacttatgtagtagagtataatgatcaactgataagagattccatattaagagaaattagtagaggtggacaaatttattttgtatacaatagagttgagagtattcatgagatggcgtcatatatatcaaaactagtaccagaaggaagagttcagatagctcatggacaaatgaaagaaaaagagctagaaaacgtagtattggactttacagaaaataaatttgatatattaatagccacaacaataatagaaacaggtatggatataaaaaatgttaacactatgattatatatgacgcagataaaatgggattatctcagctatatcaattaagaggaagagtaggtagaacaaatagaatggcatattgttacttaacctataaaagggataagatacttacagaagtagcagaaaaacgattgaaagccataaaggattttacggaattaggctcaggttttaagatagctttaaaggatttagaaataagaggagcaggtaatatgatgggatctgcgcaacatggccatatggcttctataggctatgacctttattgcaggatgctcgaggatactataaagttagttagaggtgatatagataaagagccagtagaaacttcagtagaattaaagatagatgcttatataccaaatacttatataaaagatgaaacacaaaagatagaagtgtataaaaagattgcatctatagattctaaagaagagtttatggatatagaagaggaattagaagatagattttcagatataccaatatccgtttataatttaatgaatatatcttatataagaagcttaggtaagaaggttgatatagaagaaataaaagaaatttcaaatgaagttgtttttcaatttgaagacaagagtagtttaagagaaaaaattgtaaagattataatggataagtattcaaaagaagtagcatttaaattaaatgaaaagcctgctataggatataatataaagaatataaaaaaagaacaattattaccaattataagaaattttttagaacatatagtaaacaacaatcaa

SEQ ID NO: 16521 - DNA, 333 bp, Clostridium botulinum
atgaaagaaaataaaataagaaagaataaagaatttagacatgtatatagaagaggcaagtcttattctaataggcttttagtattatacatatgtaaaaataggtgtaatataaatagattaggtgtatctgtcagtaaaaaagttgggaaaagtgtaattagaaatagagtaaaaagattaataaaagaaagctatagattgaatttagatgaaaacatgaaaaaaggttatgatttagtttttatagctagaaatagttctaatgatagggattacaaggatatagaaagtgcattaataaatttattaaaaaaggcaggcatatataat

SEQ ID NO: 16522 - DNA, 882 bp, Clostridium botulinum
ttggtgaactttatggatagaataaaaaaaatgggagaagaaatagagttatggttaaaggaatatttagataataaaggtaattatgataaaaacatatatgaagctatggcctatagtttagaggctggtggaaaaagaataagaccagtactatttttaaatacgtatagtttatataaagaagattataaaaaggctatgcctatagctgctgccatagaaatgatacatacctattctttaatacatgatgatctgccagctatggataatgatgacttaaggagaggaaaacctaccaatcataaaatctttggagaagctatagctatactggcaggagatgcacttttaaatgaagctatgaatataatgtttgagtattcattaaaaaatggagaaaaggcattagaggcgtgttatgccatagctaaagcagcaggagtagatgggatgattgggggccaggtagtagatatattaagtgaagataaatctatacctctcgatgagttatattatatgcacaaaaaaaagactggtgctttaataaaagcatctatattggctggagctattttaggatctgatacatatacagatatagaacttttaggggaatatggagataatttaggattggcatttcaaataaaagacgatatattagatgtggaaggtgatactactactttaggaaaaaagacaaagagtgatgaagataatcataaaactacttttgttaaagtttatggtatagaaaaatgtaatgaactttgtactgaaatgacaaataaatgttttgatatattaaataaaataaagaaaaacacagataagttaaaagaaattactatgtttttattaaacagaaactat

SEQ ID NO: 16523 - DNA, 1263 bp, Clostridium botulinum
atggatgcggggatgagtaaattaaaaataacaggaggtaaccccctctttggaaaagttgaaattagtggagcaaaaaatgcagcagtagctatattaccagctactattatggctagcaaaggagtttgtactatagagaatactccaaatattgaagatgtacattgtattgaaagaattttaaatggattgggttgtgaaattaaaagacaaagcaattctattttacaaatagatagtactaatataacaaaaacagatgctaatactgaagatgtaagaaaaatgagagcttcttattatcttatcggagctttattaggaaggtttaaaaaagccagagtagaattacctggtggatgtcctataggtgttagacctatagatcaacacattaaaggttttgaagctttaggagctcatgtcgaaatagaacatggtgctgtaattgtcaaagcagataaattaataggaactaatatattttttgacgttgttagcgtaggcgctactataaatgtgatgttagctgccacacttgctgaaggcaatactgtgctagaaaatgtagcaaaggaacctcacgtagtagatgtagctaattttttaaatagtatgggagctaatatcaaaggtgctggaacagacattataagagttactggtgttaaagaattaaaaggctgtacttatagtgtaatacctgatcaaattgaagctggtacatatatgatagcaacagctgcctgcggtggagaagttacaataaataacgtaatacctaaacacttagaatctataacagcaaaacttatagaaatgggagtagatgttatagaaaatggagattctgttacagtaaaatctaaaggtaattttaaaggcgctaatataaaaactcaaccttacccaggatttccaacggatgtgcaacaaccaatgagcacacttttaactattgcaaaaggaagaagtattgtaaatgaaagcatttgggaaagtagatttaaacatgtagatgaattgaagaaaatgggagcaaatattaaggtagaaggtagaacagccattatagatggtgtacctaaacttacaggagctatagtaaaagctacggatttgagagctggggctgctatggtaattgctggattattagctgaaggtgataccgaaattcttggtgtggagcatatagatagaggatacccaaatattgaaaataaatttagatctttaggggctactatagttagacta

SEQ ID NO: 16524 - DNA, 2100 bp, Clostridium botulinum
atgatagccaagagcattagttcgggggtgaataatttggcaaaaataagagtatatgaattagctaaagaattaaacatatcaagtaaagaacttataacattattagaagaagaatttagtgtagaagttaaaaaccatatgagcgctatagaagatgaggatgcaaatcttataaaagaactattatcaggtaaagaaaagtcagaaaaaacaaaggaagaagatgatgaaatagaaactacagcgaaaaacccaataaaagaatcaatgaataataaaaaatctaataaaagagatgacaaaaatgaaaaagtaaatactgaaaatgcagaagatatgggtataataacaatgacttctgatactattacagtaaaagaaatatcagataaattggaaaaatcctatgcagaagttataaaagaactaatgcttatgggtgttatggcttctgtgaatcaagagataaactttgaaatggctgaaaaattagcagcaaaatttgatatggaaattctaaaagaagatgaagatgagaaagaggatctagaagatatattaaaagataatgaagaagaagaatatttacaaaaaagatcccctatcataactgttatgggtcacgttgaccacggaaaaacttctttattagatgctataagaaaatcaaaggtaacttctacagaggcaggaggaataacccaacatataggtgcttatactgtggaattaaatggagaagctataactttcttagatactccaggccacgcagcttttacagctatgagagcaagaggagcgcaagttacagatatagttatattagtagtagcagcagatgacggaattatgcctcaaactcaagaagctataagtcactgtaaggcagctaatgttccattaatagttgctataaataaaatagatagacctggtgctaatatagataaagtaaaacaagaattaacagaatatggattagtagcagaggactggggtggagatactatatgtgttccagtttcagctcatacaaaagaaggtatagatgatctactagaaatgatacttttatcatcagaaatacttgaattgaaagcaaacccaaatagaaaagcaaagggaacagtagtagaagctaaacttgataaaggaagaggaccagtagctacattacttattcaaaatggtactttaagagtaggagattctatagtagtgggatctacatatggaagaataagagctatgtttaatgataaaggtagaaatatagaatcagcaggcccttctacaccagtagaaatactaggtttatcagaagttcctgaagcaggagataaattctaccaagttaaagaggaaaaaactgccagaggtattgcagataagagaaaagaaaaaataagagatgaatatctacaatctacccataaagtttctctagaagatttatacaatcaaatacaagaaggaacagtaaaggaattaggattaattgtaaaagctgatgttcagggttctgtagaggctttaaaacaatccttagaaaagctttcaacagaagaagtaaaggttagagttattcatggaggtgttggagctataaatgaaacagatgttacattagcaacagcttctaatggtattatattaggctttaatgtaagaccggataacaatgctattatagcttctgaaagagacggagtagatattaaaacatacagggttatatatgatgctatagaagatataaaatcagctatgctaggtatgttagaaccagaatttaaagaagtagttataggtactgcagaggttagacaggtttataaaatatctagtgtaggaactatagcaggagcttatattcaaacaggtaaattagctagaaacgcaggagcaagagtaataagagatggtatagtaatatttgaatcagaacttgcatctctaaagagatttaaagatgatgctaaagaagttgctcaaggatatgaatgtggacttagcatagaaaagtttaatgatataaaagaaggcgacataattgaatgctttatcatggaagagattaaaaagaaaacacta

SEQ ID NO: 16525 - DNA, 699 bp, Clostridium botulinum
atgtcagttatatcaatgaaacaattattagaagcaggtgttcattttggacatcaaacaagaagatggaaccctaaaatggctccatacatattcacagaaagaaatggaatttacattatcgatttacaaaaaacagttaagaaggtagaagaagcttataacttcttaagatcagttgcagaagaaggaaaagatgtattatttgtaggaactaaaaaacaagctcaagaagctatagaagaagaagctaaaagatcagaaatgcactttgttaacaacagatggttaggtggaatgttaacaaactttacaactataacagctagaataaataaattagaagaattagataaaatggaagaagatggaacatttgaagttcttcctaaaaaagaagttataaaattaaaaaatgaaagagaaaaattagaaaagaacttaggtggaataagaaaattagatgcaaacaatgtaggagctatgttcattgttgacccaagaaaagaaaagaatgctatattagaagctaaaagacttggaattccagttgtagctatagtagatacaaactgtgatccagacgaagtagatttcgtaattccaggaaatgacgatgctataagagctgtaagattaatagcagcaaaaatggctgatgctgttcttgaaggaagacaaggtgaacaattagcagaa

SEQ ID NO: 16526 - DNA, 2868 bp, Clostridium botulinum
atggctaaaaaaatagtaatacctaaagataacaatataatatcttttccgttagaagaggctatgccagagaattatttaccttacgcagtagaggtatccaaggaaagagcactgccagatgtcagagatggattaaaaccagtacaaagaagaatagtttatggttcatatatgttaaaagcctttccagataaaccttattacaaatctgctagaatagtaggtgatatattaggtaaatatcaccctcatggagactcttctgtttatgatgcaatggtaatattagctcaagattttaccacaagaatgccacttatagatgggcatggaaactggggaagtcaagatggagatagtgcagcagccatgcgttatacagaagcaagacttacacctattgccatggaaatgataagagacatagataaagatgtagtaaatatggtagataactattcaaattcagaaaaagaaccagaagtattgccagcaaagttcccaaatatccttgtaaatggtgcctttggaatagcagtagggttagccactaatataccacctcataatttagaagaagttatagatggaactttagcttatatagataaaaatgaaataactactaaagagttattaaattacataaagggaccggatcttccaacaggaggagttataataggtaaaaaatccatgttatcagcctatgaaacaggagaaggaagagtaaccttaagagctaagacaaccatagaaaaattggaaaatggaaggctagctattgtaattacagaatttccttttagaaaaaacaaggcaaaacttcttcaatttatatcagaaatgactgcagacaaaaaacattctaaagctttagagaatatcacggatataagagatgaatctgatagaaatggaataagagcagtaatagaatttaaaaaaatagctactcaagatgtgatagaaaaaactttaaaatatttatataaaaagacagatctacagagtaatatatcttttaatatggtggccttagcagatggcaaacctaaaactttagggttaaaagctatgttagaatattatgtagaacatcaaaaggaagtaattacaagaagaactaaaagggaattagaaatagcagaaaaaagattccatatagtagaaggatttataaaagctataggaataatggatgagataataaaaactataagagaatcgaaatctaaaaaaaatgctagagaaaatttaatggaaaagttttcttttacagatgttcaagcagaggctatattagagcttatgctatataaacttacaggtcttgaaatagtagcctttgaaaaagaatataaagaattagaaaaattaataaataagcttaaaaaaatattaaatagtgaaaaggaacttttaaaagttataaagaaagaattaattgaagttaaagaaacttataatgacaaaagaagaacatcaataatagaagatgacgaaaaagcaaaaatagatatagaagaaataatagtggaagaagatgtagtattaactttatctaatgaaggctttgcaaagagaatatctcttaagtcctacaatagatcaagtgctaatgtagaggatatagagtatagagaaggggactttaataggttcctaattcagtgtaatacaaaggatacattatgtttggtaacaaaagaggggaatatgtatcaaataaaagttataaatataccagaatttaagtggaaagaaaaaggtgttaggctagatgaaataattaaaactatagatttatctgaaactataatggaagccttttcaatagaagactttacagctcaaaaggatatgttatttataacagatagtgggtatattaagaaaactacattagataaatttaatacaaattatacaaaaataatggctttaaagcttaaaaaaggagaattccttgttaaggctgatttagtagatcgaactagagaagaaaaatttttcaatataaaaacccagaaaggattaagttttaatatagaggagcctagcttagagccagtagatagaaatataatagggtataaattatttgatatcttacctaacgatagtatagaaaaggtagacttttgtgataactatgaatataagagcttttatgtaaatatatctaaagagggattaataactatatcagatttaaaagataataaatcacatataagtttatttacggattcttctaaaattctagttttatttgatgatgagggtaaagcttattacataccagcatttatgcttcaaagcataaaagaagaggggataaatatttcagcctttactggggataaaataagtttgctaaatgcaatatccacctttagatttgaagaagatattagtatctatttttcatcagaaaaaggattaataaaaagaactttattgagtgaattaaagatagagggcaattcaactcaagtttataaatttaaacataaggaggataaattagtaagtatacttataaaggaacatggagagcaaaaaaatatactaataataacagaaaaagcaatggtaataagatttaaaagtgaggctgtaaatcctatgggaaaaatggcatcaggagttacaggtataagtttaaaagatttagataaagtaattttagcatcaataatagatgaaaatgatacaagaaaaataaaaataaaaacaaaggcaaaggataaaggaactatagaaataaataaaataaaagttcaaaatagagcaggtataggaaatagcttgatgcctcttttgttaaatgattttgtagaggtagtagaattaaaaaaa

SEQ ID NO: 16527 - DNA, 2091 bp, Clostridium botulinum
gtgttaaataaaagatgctcaaatatcttgcagatgatagtaaataacgaaaaacctataactataaaggaaatttctaaaaaagttaataaaagtcctagaactgtaagatatgatttagataaaatagatgattatttaactgagattgaatttcctaaacttgaaagaaaatctaatttaggcatcagtttagatttaaaggatgaagaaataaaaaaactttttaagattataggcaaaattaataattatgactatgttctttctcaaaaagagagagtattttatataatttatgagcttttaaataagagtgaatttgtaactataaatatgctttcagataggatgatggtaagccgcagtactataataaatgatttaatagaggttaaaaaatggctatcagaaaataaaataactcttgaaagttcaaaaggacaaggcataaaaatattgggaagggaaagagatcttagacgggctgcagtaaagctcttctttcagagcatggattctataaactttttcaatgtaaccactcttaagctttttaatgatatagatatagactttataagaaatactattaaaattgcagaggagcagatggaaacttcattttcagatgatgcttttaataatcttgttattcatatagctatagccattaaaagaatagaattatcaaaggatataataatggatagcgaagaacttaagaatctaaggaaaactgcggaatatgccattgcatcaggtatagctaaaatgcttgaggatagatttaaaatatccataccagaggacgaaataggctatataacaattcatattttaggcagcaatacttctacccttgaaaatattgtaaaggatgattggatttatctacatcttatagtatttaaactaatagaaaatgtagaaaacataacaggaattaattttagtaaggataataagctttttgatagtcttgctcagcatattcgtccagctatatacaggcttaaacatgatattaaagtaaaaaatccattgatagaagaaataaaagaaaaatattcctatatatttgaaagtatagaggaaggtgtaaagttcatagaagaggatataggtgatagtgtaaatcaagaggaaataggatatcttacactacactttatggcttccatagaaagaagcaaaaataaaaaacatagaaaaccaaatgtacttatagtatgcgccacaggcataggtacatcaaagtttatttctaataaattaaaatctatatttgatataaatataatagataccatatccagccatactatggaaaagatccttaaatataataaaaacatagatttaattgtaaccacaattccattaaaggttaaggggataaagtgtatagaagtaaatacatttttaacagaaaaaaacatcagtgaattaggtttatactttgcaaaatttattagaaataacagtgaagaatgcaatggttcctgtaaatatgaagaaagagataaggtgcaagagattttaaatattgtaaaagaaaattgtactatacacgattattataaattaagaaataaattagcattatacttgaatataaaagatcctacccttactgaagatcataaaccttctttaaaagaactactaaaacctgattttattaaactaaatgaagaagccgaaaattgggaagatgcagtaagaaaaagtggggagatattaatgaataatggatgtgtaaaggaatcctatatagatgctatggtaaacacagtaaagaatatgggcccttatattgttatagctcctggaatagctatgccccatgcagcaccagaggatggagttctaaaaactggtataagtatgctaaccttaaaagatccgatttcctttggaaattctgaacatgatccagtaagcgttataatttcaatatgttctatagataaagtaaaccatatgaaggcactaaaagagttaatgagtattatggatcaggaagatttcatctcaaaggttaaaaatataaaagcttcttctgaaatagattccattttatatagc

SEQ ID NO: 16528 - DNA, 435 bp, Clostridium botulinum
atgaaaatagctttaggaagcgatcatgcaggattacctttgaaaaatgaaataataaaacatttagaaggtaaaggaatagagataaaagattttggtacatatacagaagaatcctgtgattatccagactatgcacaaaaagttgcagaaaaagttgtagctaaagaatttgattttggaatattagtatgtggaacaggtataggtataagtatagctgctaataaagtcaaaggagttagagcggctttatgtagtgatacttttagtgcgcatgcatgtagagaacataataatgctaatatactagccctaggacaaagagttgtaggagtgggattagcactagatatagtggataatttcttaaatgctgaattccaaggtggaagacatgaaaacagaatcaataaaatgatgagaatagaaaaa

SEQ ID NO: 16529 - DNA, 1116 bp, Clostridium botulinum
atgttacaaacaggaaaagtaggagtagcagaatccaatgcagagaattatggatgtacttttaaaaaacattctctgtttactacaataattattggtttagttactatccttatattatctatcataatttcagtatcaataggacaagtatctattccatttagccaatcttatagaatattaatctataaattaactggattacaaactggtaatttagatcaatttatgaatggaatgtttgaggagattatttggcaaattcgttttcctagagtgttattggctatgattgcaggaattgggcttacattatgcggtgtagttatgcaggcttctgtgcaaaatcctttagctgatccttatatattaggaatttcttctggtgcttcattaggagcaacattttcaattatgattggatttggtgctgcaggtactttaagtgagcttggagttgctttctgggcatttattggcgcctttggtgctggggctttagttatggggcttgccagtattggtggaaaaatgtcctctgtaaaattagtactcgctggaactgttatcaatgctttatgcaatgcaatttcaagttttattgtttattttgctaaggatgcagaaggaattcgttctgtaacattttggactatgggaagtctaacctctgcacagtggggaaagcttcctattattactaccattgtaatgttagctgtggtgctatttttatctcaggcaagaataatgaatactatgatgatgggagaagagacggcggttactttgggaataaaccttaatttttataggagactttatatggtgatttcagttgcggtaacgggtgttatagtagcaacttgtgggattataggatttgtgggattaattgttcctcatattgttagaagcattgttggctcggataacaaacgacttttaccaacaagtatcctatttagtgcaatatttttaatttgggcagatatttttgctagaacaattattccaaatggagaactaccaattggcattattacatctcttcttggagcacctgtgtttatgtacatgctcgtaaagagaagttatggatttggaggtaag

SEQ ID NO: 16530 - DNA, 1275 bp, Clostridium botulinum
atgctatcaaccctacgtaatgcttggaaagttcccgatttaaggaaaagattaatttttactttatttatgatagcaattttcaggatgggaaactatatcccagttcctggaattgatacatctaaattagctaacctcacgcaaaatggatcattatttggattttatgatttaatatctggaggagcttttagcaggtttagtatatttgctatgggtgttgtaccgtatattaactcttcaattataatgcagttacttacaattgcgttaccttctttggaaagtctttcaaaagagggagaagagggaagaaaaaaaattcaacaatatactaggtatggtgcagttatacttgcggttattcaagcattcagtacatatgcgataattgctcgtgctggggcacttagagatggatcaaagttaaatttattcataattataataacagtgactactgcatcaacctttttaatgtggttcggtgataaaataacagaaaaaggtataggtaacggaatatcattaataatatttgttaacatagtatctagatttccatcaactatatatagtatagtaggacttcaaaaggctgaaacagtaaattttgtggaagttatagtgtttatagtaatagccttagcattgttcttattagttgtaataatgaatttaggtgagagaagaatacctgtccaatatgctggaagagcagtaggaaataaaatttataaaggtcaatctacacacataccaataaatgttaattcttctgcggttataggtattatatttgctatatcagtaatgcaatttccaattactattggtcaattttggccagaatcggctttttataagtttattaccttaaatcaatatagcccttttagagataaaagtattgcttatattgtgttatattttctattaacagtattctttacttggttttatacagtggtaacttttaaacctgatgaaatggcagaaaatatgcataagtcatctggatttataccaggaataagaccaggggagcctacagcagaatatatagaaagagtaataacaaagagttctataattgggggaacttttgcagctattatagcagtattcccaataattatggcagcatatagtaaattccaaggtatatcctttgggggaacaagtatgctaattatggttggatttgcattggatactataagacaaatagaatctcaattagttatgcgtcactatcaaggtttcttaaaa

SEQ ID NO: 16531 - DNA, 645 bp, Clostridium botulinum
gtgattacattgaaaaatgtaaaaatagcgttaaccaaaggtagacttgaaaagaaagctattgaaatatttaaaactattaatattaatactagagaattagaggataaaggaagaaaactcatttttaattgtgaaaatgaggaatataatatagagctttttttagttaaagctaaagatgtagaaacctatgtagaatatggagctgcggatatcggtattgtaggaaaagatactttaatggaaacaaataaggagttttatgaagttttagatctgaatgtaggaaagtgtaaatttgctttagcggctttgcctagttttaagttagatcaaggatataataggaaaaagatagcaactaaatatccgaatatagcaagggaatattttagaaaaaagggcatggatgtggaattaatcaaaatagaaggctccgtagaattaggacctattgtagggcttgcagatgccatagtagatattgtagaaacaggaaacactttaagagaaaatggcttagtagttgtggaggatatatgtgaaataagtgcaagaatgatagtaaataaggccagtatgaaaacgaaaaaggatgaaatcataaaaataattgaaaatgtaagtgaggtaataaggcaa

SEQ ID NO: 16532 - DNA, 687 bp, Clostridium botulinum
atgggggaagttaaattgatacacaaaattaaagaaaatattgtgccactaagcttaatgttaataataccagtagtaaatgttttttatgctattttaaataactcaaataggggagtatacactttagttacggatttggataaatctatgccttttatacctgcattttctgttccttatatggtttggtatccatttataattatatctttaatatatatgtgttttaaaaatagaaaattatattataaatctttatcaagtataataataagtttaattacaagttatattatatttttcttttttcaaactacggtaccaagaccaaaagtaataggtaatgatatatttagtgacattgttaaatttatatatagtacggatattgcttataattgttttccaagtattcatgttataactacttatattattatgaggtatatgttaaatcatgaaatgaaaaatagtaaaataattaatattactgttataatattggggatacttattatattatctactcaatttataaaacaacatgttttattagacgcaatatttgctataatcttaggtgaaggaatttacaatatgataaattattatggtttggagatgattaagaaatgtcagcagaaaaaatccttattgttgatgatgaaaaagaaatcagagatt

SEQ ID NO: 16533 - DNA, 873 bp, Clostridium botulinum
atgaaaaatattatagagaattatataaaagatttacaaaagaagaacttaagtaaaaatactttagaggcttatagaagagatgtggagaagtttagtgagtttgttagaaacagagaggaaagaatactttctgttgatacagttactataatggcttttgttcaatatttgcaaagagaaggacgagctacatcttcaatagtaagaaatatagtatctgtaagaaatttttataaatatttaataaaaaaaaacatggtatctgaggaccctacactaggatatgaaatacctaagatagaaagaactattcctaaaatactttctgtagaagaagtagataaacttttaaattccccaaattcttcaaaaaagggattaagagataaagcaatgctagaacttatgtatgctacgggagttaagattacagaacttttaaatctaaatatatatgatataaatttgaagtttaattatataaaatgtagaggcagtaaaaaaagagagagaattatacctataggctcctatgcgataaagtgtttaaagaattatttagaagtaagaccagctataaatgtatataatttagattatttgtttttaaatttaaagggaactcaaatgactaggcaaggtttttggaaaataataaaattttatgcaaaagaagcatctatagataaagaaatagattcttatacactaagacattcctttgcagtacatttacttcaaaatggagcagatataaaatctgtacaggaacttttaggtcataaggatctagctgcaactcaaatttattctagtatatcaaagaagagtaaaatagcagaagtatataaaaatgctcatccaagggca

SEQ ID NO: 16534 - DNA, 330 bp, Clostridium botulinum
atggaagagatagtggaaatgtccttactactagatttttatggtagtttacttacagaaaagcaaaataaaattatggacttatactacaacaatgattattcattaaaagaaatatcagaactaactaacaccagtaggcaagcagttcatgacatagtaaaaagatgccataaagctcttctacagtatgaagaaaaacttcatatgatggagaggtttataaacttagaaaattctaaagaaaaactattaaatatgttaaataaagtgacaaaagaaaatataaaagaaattgatcatataaaaaaatatataattgataatatt

SEQ ID NO: 16535 - DNA, 567 bp, Clostridium botulinum
atggtaacaattgtatttgcacatccatggcatggaagttttaataaggctatactggatacagtaacaactgttttagaacaaaggaacaatgaataccaggtaattgatctaaataaagagaactttaatcctattatgaccgaaggggaattggctttgtactcaaaaggacaacataaggatcctttagtaacaaaatatcaaaacatgttaaaaaaaacagatgaaattatttttatatttcccctttggtggtacgatacccctgctatctttaaaggttttcttgataaagttatgttaaaaaattttgcatatacagaatcaaatacaggtttaaagggaaagctaactcatattaaatctgccaaagtgataacaacgggccaatctccccgttggtatttaaagtattttgctggcaatctgattcagaaaacatttatcaatactacattaaaaggtattggaattaaaaatgctaagtggctccactgcggggatgtttctaagggcgctcaggtgaagagggagaaatttttgcaaaggttggcaattgatatt

SEQ ID NO: 16536 - DNA, 294 bp, Clostridium botulinum
atggaagagatgatacttaatattataacgcatagtggagaagccagaacttatgcaatggaagcaatacaatatgcaaaaaagagtgagtttgataaagctaaaaaatctatagaaaagtctaacgaggaattaggttttgcccacagttaccagactaatttaatccaggaagaagctgccggtaataaggctgaaatatcactattgttaatccatgctcaggatcatttaatgactactatgacattaaaagatcttgcaattgaattagttgaagtttatatgagatta

SEQ ID NO: 16537 - DNA, 1524 bp, Clostridium botulinum
atgaataaaaaagggaaggtggagtttataatggaaaagtatataatgtctttagatcaaggaactactagttcaagatgtataatatttaataaaaaaggtgaaatagtaagtgttgctcaaaaggaatttacacaaatatatcctaaagcaggatgggtagaacatgatccactagaaatatggggaaaacaagcaggggtagcaggagaggcattaaatatagctagaatttctccagaacaaatagcaggtataggtataactaatcaaagagaaactacagtagtttggaataaaagaacaggaatgcccgtatataatgctatagtatggcaatgtagaagaacagctggttattgtgatgaattaagagaaaaaggtatagataaaactataaaagaaaaaacaggtctaatgctagatgcctatttttcagcaacaaaaataaaatggatattagataatgtagagggagctagagaattagcagaaaaaggtgatttgttatttggaaatatagatacttggttaatctggaatatgacaaaggggaaaattcatgtaacagattatactaatgcttcaagaactatgttatttaacatacatgaattaaaatgggatgaagaattattagaaatacttgatattcctaaatctatgcttccagaagtaaaaccatctagttgtgtatatggtgaaacagatgaaatattgttcggtgtatcaattccaatagccggagatgcaggagatcaacaagcagctttgtttggtcaaacttgctttaatgcgggtatggctaaaaatacttatggtacaggttgtttcttgttgatgaatacaggagaaaaagcagtagattctaaaaatggattattaactactatagctgtgggtatagatggaaaagttgaatatgctttagaaggaagtatatttataggtggagcagtaattcaatggctaagagatgaacttagaatggtaaaaactgctcaagaaacagaaaaatatgccacagaagtagaagataataatggagtttaccttgtgccagcttttgtcggaataggtgcaccatactgggattcttatgcaaggggaactatattaggccttacaagaggagctaaaaaagaacacataataagagctgcattagaatctatggcataccaaactcatgatgttttaaaagctatggaagaggactcaggtatagaactaaaagcattaaaagtagatgggggagcctgtcaaaataatttcttaatgcaatttcaatctgatatattaggtgtagaagtagatagaccagaagtagtagagactacagcattaggagcagcttatcttgcaggacttgcagtaggatattggaaggatagaaatgaaatatcacaaaactgggcaatttcaagaagctttgctccagcgatggaagatgaaaagaaagaaaaacttataaaaggatggcataaggcagtaacaaaagcaatggattgggaagaaagagaa

SEQ ID NO: 16538 - DNA, 1107 bp, Clostridium botulinum
gtgctagatttcgatgttgatgtacagcaatttgctcaaataaaggttattggatgtggtggcggaggaaacaatgctgtaaatagaatgataatagatggattaaaaaatgtagagtttatagctataaatacagataaacaagctctaatgctttcacaggcgtctcagaagatacaaataggtgataaattaacaaagggattaggagcaggggctaatccagaaataggtaagaaagctgcagaagaaagtaaggaagagatttctcaagcaataaagggagccgatatggtatttataacagcaggtatgggcggaggaactggtactggtgcagctccagtaattgcagaaatagctaaatctatgggaatacttactgtaggtgtggtaactaaacctttcccttttgaaggaagaaaaagattgcttcatgcagaaatgggaataaatactttaaaagagagagtagacactttagttacaatcccaaatgaaagattattaagtatagtagataaaaaaacaagcttaatggactcttttaaactagcagatgatgttctaagacaaggtgtacaaggtatatcagatttgattactataccaggacttgttaatttagattttgcagatgttagaactataatggtagataaaggattggctcatatgggtgtaggtaaaggaacaggagacaatagatcacaggaagcagctaaacaagctatatcaagccctttattagaaacatctattgttggagctacaggagtacttcttaatataactggaggaaatgatctaggtttattagaaataaatgaggcagcagaaattgtacaagaagctgcagacccagatgctaatatcatatttggagcagttatagatgaaaacttgaaagatgagttaagaataactgtaattgctacaggttttgaaagtgatagattagaaaaggataatattgaaaaggaagaaaacaatataccaaaggaagctagtaaaagcgaggatagagaagagcaatcatctacatatgagcagcatatagatgaaaatgatttagagatacctgccttcttaagaagacaaagaaag

SEQ ID NO: 16539 - DNA, 972 bp, Clostridium botulinum
atgctaaatacagatattgctatgggacttgctagagtaacagaagcagcagcgttaagtgcatcaaaatttatgggtagaggagacaaaaatgcggcggatcaagcagcagtggatggcatgcacaaagcttttcaaataatgcccataagaggtaaggttgttataggagaaggagaattagatgaggctcctatgctatatataggtgaagaagttggaattggtgcagaggatatggtagaaatggatatagctgtagatccagtagatggaactaaacttatagcaaagggtttagaaaatgctatagctgtggtagctatgggacctaaaggaagtttatttcatgcaccagatatgtatatgaagaaaatagctgtaggagcaggggctaagggagctatagatataaataaatcccctaaagagaatatattaaatgtagctagagctctaaataaagatgtaacagaacttacagttatagttcaagaaagagatagacatgattatatagtaaaagatgcaagagaagtaggcgctagagttaagctttttggagaaggagatgtagcagcagtattagcctgtggatttgaagatactggagtagatataatgatgggaaccggtggagctccagaaggtgttatagcagcagctgccataaaatgtatgggcggtgaaatgcaagcacaactttgtccaactagtcaagaagaaatagaaagatgtaagactatgggaataaaagatcatgaagctatactttatatagatgatttagtaaaaagtgatgatgtttattttgcagctacagctataacagattgtgatttgttaaagggagtagtttacaatagaaatgaaaaggctattacaaattctatagttatgagatctaaaactggtactattagatttgttaaagcttgtcataacttagctaaaagcgctatagtagttgaa

SEQ ID NO: 16540 - DNA, 621 bp, Clostridium botulinum
atgaaaaataaaaaagttaagaagccattctataaaaaatggtggttttggatattgattcttatagttggaataggaataggagctggtgcaggaacaattatagatgaacctcaaaaagtaggacaaacaaatgcaaaagtccaggataaaagcacagaaacaaatgcaaaagtccaggataaaagcgcagaagccaatacagaagcaaataaatcaacaaataaatctaaaattttcaaaattggagatgttgtaaaattaaaagattttaaagttacagttaataaggtttataaagccaagggagatgaatttacacaacctcaaccaggtaatgaatttattgcggtagattgttcagtggaaaacatatcaaatgaacaacaggtagtatcttcagtaatgatgtttaaagttgtagataaagatggtagagaatgtgaagagtcaataggaggttcgacatccgctaatgcaggacaaatggatggagaagttgggccaggtagaaaaataacaggagtttatgttgtagaggttccaaaaggaactaatggattagaactagaatttaatggttctttacttttgggtgaacaagtaatagtaaaattaaat

SEQ ID NO: 16541 - DNA, 1413 bp, Clostridium botulinum
gtgaagggatatttaatatttataataatatatgccataatacttatattagcaggattttttgtaaaaaaatatgtaaaaggtgctgcagatttttttgtggcaggaagaaaacttaactctaaattattatgtactactttaatagcagcaaatataggggcagggtccactgtaggcataacggggattgcatataagtatggagtatcttcttattggtggatatttatgtctgctataggaacagctgtactagcttttttggtagggcctaaaatatgggaaaaatctatgaaatacaatttgtataccttaggagattatttggatataagatattctaaatatttcaaaggagctatatctataatgatgaccataggtacattagcattatttgcaggtcaacttatgggaattgcatggatattagatgtaacttcaggtattgataaaaatataggaattttaattggggcagtagttgtggttctttatttttcatccggtgggcttttgtcctcagctatagtaaacgtattggaattagtaataataatactaggttttataattgcagtaccattttgtataaaaagcgtaaatggatttagtggattacatacagccatattaaataatttaccagcaaatgaaggtgtaaattattttagtttaaaagggataggtataagtactatagtaggatggtttttaatgcttacaccatcattttttatatcaccaggattaatagggaaagtttacggagcaaaagatatgaaaactataaaaaagggagcaggaatatgtgcagtagttcaaggattatttgcatttttgcccactatattaggaatgtgtgcctttgcagtgttccctaatcttaatcaacaggaattagcattacctatggttatgaaaaacctaatgcctttttcagtatcggctttagcattagcggctatatttgcagcggaggttagtacagcagatgcagttttgtatatgttaacaaccacctttacagaagatatatataaaacttttataaatcccaaaatagaagataaaaagttattaaaagcagggagaatagtcacaattgtaggaggaatattaggagtagctatggcttttatattacctaatataataacagcattgtctatattttatacactaatgtcagtttctttaacagtaccactattatttgggctattttcagaaaaaccaaatacgaaaatcgcttttacatcatccataataggaataatagtaacattatatttacaatttcaaaacaatgacaaaggcatatggatactaaatgcacaatctacaggcatattatgttctttgattgtaatgatgatttttctagccctaaaaaagaaaattacgact

SEQ ID NO: 16542 - DNA, 1533 bp, Clostridium botulinum
atgaaaaatactcctatagaaatattaggtgttacttctgaagagaaaataagtaaatataatatacaatatccatataaggagttttgcaaatcttatattataagccttacaaagaataaaccaaagataggacaaatattaaaggtatttttaaaacctaaaataaatgaatggaaatatatatttactcagggacaatttaaaatttttatagaaggttctataaaaataagaatattgtttttagaaaaccaaagtgatcagaatatttattctactgaaattaacaaaattatttcaggatttttgccagtagaaagtgactgtatggacaatttgaagccaactttatttattgaagaagcttttattgatgctttaaatgaaaataaattttcagtatccttattaattgctatgggtacaatttcagaagaaaaatgtaaaaataaagaagtcatagataaagaagaaaattttgaacaagatggagattttaaagaagaagtacaatatgaaaatatagaagatagtgatttaaaagaaaaagcacaatataaggatatagaagatggtgatttaaaagaagaagcacaatataaggatatagaagatggagatttaaaagaagaagcacaatataaggatatagaagatggagattttgaagaagagatacaatatagggatatacaggatgcaagcttcaaagaagaagtacaatatgaaaatatagaagatacagatttaaaagaagaagtacaatatgaaaatatagaagatggagatttaaaagaagaaatacaatatgaaaatatagaagatacagatttaaaagaagaagtacaatatgaaaatatagaagatacagatttaaaagaagaagtacaatatgaaaatatagaagatggagatttaaaagaagaagtacaatatgaaaatatagaagatggagatttaaaagaagaagtacaatatgaaaatatagaagatacagatttaaaagaagaagtacaatatgaaaatatagaggatacagattttaaagaagaagtacaatatgaaaatatagaggatggagatttaaaagaagaagtacaatatgagaatatagaagatggtgatttaaaagaagaggtacaatatgaaattgtaaaggacgtagattttaaggaagaagtacaatatggggacataaaagatgcagatttaaaagaagaggtacaatacgaaaatataaaggatgtggattttaaggaagaagtacaatatggggatacaaaagatagagatttcaaagaaaaaggacaatatgagaatacagaaagagtagaaaataaaaatatagaagaaagagatttctcgaaagatatatataaaataaatttacaagaaataaatttagaagaaaatgattttaatgaaattgatatggaaaagttaaagaaaaactctataaatatagatgtggagtatgatatgaattcgaaagaaaatgatttttatgaaattgatatggaaaagttaaag

SEQ ID NO: 16543 - DNA, 1269 bp, Clostridium botulinum
gtgataaacatggaaagcttaaattgggtagattatttgtttattttttctttagtttcaatatggatgctgctgtttgtaaatataattttatctttagctggatatagatattatttaaagactttaaacagtgaacttaaaggattagagaatgaaaaatatcctaaggtatctatattagtacctgctcataatgaggaaaaggtaataggaagaacggtaaaatctatcttgcttttaaattatcctaaagataaaatggagcttattgttataaatgataattcctcagataacactaaagaaatactaaaacaaattcaaaaagaatacagatcttataattttaaaataataaatacagataatataacaggaggaaggggtaagtctaatgctttaaatataggctataaacattcaagtggagactttatagccgtatatgatgcagataatactccagataaaaatgcattaaaatatcttatgaaaactataattgaggacgaaggtttaggagcagttataggaaagtttagaactagaaataaagacagaaatatgttaacaagatttataaatatagagaccttaagttttcaatggatgtgccaagcaggaagatggaagttattaaatttatgtactatacctggcactaattttgtagtaagaaagaatataatacaagagttgaatggatgggatccaaaagctatagcagaagatacagagataagttttagaatatatgagttaggatataaaataaaatttgtaccatactctgtaacttgggaacaggagccagagaatttaaaggtttggtttaaacaaagaactagatgggctaaaggtaatatttatgtgcttttaaaatattttaaaaacatgtttaaaggaactagtaaagatataatatttgatattttttattttttttcagtgtactttttatttttatcctctgtaataatatctgatattttatttattgttggtatttttttaaatataaatttacatgttacaggaaattttaatgttctttggatattagcctatgtgctttttgttttagaagtaagtttaactctaacattagaaaaaggggaaagcaataaggaaaatttaatacttgtacctattatgtattttacatattgtcaaatgtggatgatagttgcccttagaggaataattcaatatattctggataaattgtttaaaaaagaaattaaatggtacaagacagaaagattt

SEQ ID NO: 16544 - DNA, 1074 bp, Clostridium botulinum
atggtattaaaggaggacgataaattgaaacaattaaaagaattattggaaaaaactattaactttggtgcttcagatttacatttatcggtaggggtagaaccaactataagaataaatggacaattaagtaaaatatttaaagaaaagcttacaccagaagatactaataattatgccaaagaaatattaggtgaagaatttgaagatttattgaaaaaaggagaaatagatacatcctattctatatcgggcctaggtagattcagagtaagcgtgtttaaacaaaggggaagtatagctatttctttaagggttgtaagtttgaagatccctaacttaaatgaactaaaattgcctgatatagtaaaggaattaaccaataaaaaaagaggccttattttagtaacgggtcctacaggttcaggcaaaagcactactttagcagctatgattaatgaaattaataatactaggtctaatcatataataactttagaagatccaatagaatttttacataaacataacaaatgtataataaatcaaagagagataggtagggatacttttagttataaaagtgctttaaaagcagcattaagagaagatccggatgtaatattaataggagagcttagagatttagaagatatttctatagctttaacagctgcagaaacaggacatttagtattttctactttgcatactataggaggggctaaaactatagatagaattgttaatgtatttccgccacatcaacaggagcagataagaatacaagtagcaagtgtgttagaaggaataataagtcaacaattagtacataaaattgatggaggaagaatagcagccttagagactatggtaactacaaatgccataagaaatatgataagggaaggaaaaacttatcaaatagaatcttccatacaaactggatctaaatatggaatgaaaactatggatatgtccttagcagagctatataaaagagaaattataagctacgatactgcattaaattattcagtagataaggatttaattacaaaaataattaattta

SEQ ID NO: 16545 - DNA, 1707 bp, Clostridium botulinum
ttgcgagtggacaaagaaaaagataaagcaaaagatagagtaaaagataaggagaaggataaaataaagattattcctttaggcggcttaaatgaaattggcaaaaatttaactgctatagaatacaaaaatgatatagtagttatagattgtggccttaaatttccagacgacgatatgttaggaatagatgtagttattcctgacataacttatcttaaaaagaatattaataaagtaaaaggtatatttttaactcatggtcatgaagatcacataggagcattaccctatgttctgagagcagtaaatgtaccagtatacggaactaagcttacattaggtatagtagaaaccaagttaaaagaacatggactactaagttctgtggagttaaaatgcataaagccaagggaaataattagacttcaaaatgtttctgtggaatttataagaactagccacagtatagcagacacagtagctatagctatacatacacctttaggggttgttcttcatacaggagactttaaaatagactacactcctatagatggtcatgttacagatttagctagatttgctgaaataggtaagcgtggagttattgctatgatggcagatagtacaaatgtagaaagaccaggctataccatgtcagaaagtactgtaggggaagcttttctaaatatattctcaggagtcaagggaagaataattgttgctacttttgcatctcatatccatagaatccaacaaataataagggctgctgaaaaatttaaaagaaaagtagcggtttctggtagaagtatggaaaatattatggaagtagctatgaagcttggatatataaaagcagaaaaaaatatatttataagcatagatgctataaataaatatccagatgaccaagtagttataataactacaggaagtcaaggagagcctatgtcagctctttctaggatggcagcttcagagcataaaaaagtaaatataaagcccggtgataaggtaattatatctgcaacacctatcccaggtaatgaaaaattagtatctagggtgataaatcagttatttaaaaagggtgcagatgttatatatgaaacacttgcagatatccatgtatctggtcatgcatgccaggaagaacttaaacttatgcatacattagtaagacctaaatattttatacctgttcatggagaatatagacacttaaaacaacatggagaacttgcctgtcaattaggattgccagagaatcatgttatggtttcagatataggtgatgttatagaagtaagtagagaatgtattagaaaaaatggctctgtagtgtcaggtcaagtctttgtagatggactaggtgtaggagatgtagggaatatagtattaagagatagaaagcatttatctcaagatggtatattaacagtagttgttactatagaaaaggtttcaggctctgttattgcaggtcctgatataatatcaagaggttttgtttatgtaagagaatcagaggatttaatggaagaagctaaagatttagtaaaaaaagctctagaagaatgtgaaagaaatcatattacagaatgggctgcaattaaaacaaatataaaagatgttttaagaggattcttatatgaaaaaacaaaaagaaaacctatgatattaccaattataatggaaata

SEQ ID NO: 16546 - DNA, 555 bp, Clostridium botulinum
atgaaagggagtaagtatatgagtaatattgctttactagtagtggatgttcaaaatgcattgattaatgtacatcctcataatgaacaaagagtaattgaaaatattaaaaaacttattttaactgcaagagataataaaaaagaagttgtgtatgtacgtcacgatgatggaaagggtacagagcttgaaaatggcacatatggatggcagatttatgataaaatatcacctaatagtaataaattaatctttgaaaaacagtataatagtgcttttcataaaactgatttaaaggaatatttagatatcaagaatatagatacaataatattggttgggcttcaaacagaatattgtattgatgctacttgtaaaagtgctttcgattatggttataaaataattattccagaagaaacaaatacaacttttgctaatgattatctatctggtgaaaaactttatgagttttataactataagatttggaataaacgttttgccgatgttatatcagttgaggaagttataaaaattctagaaaatgatttt

SEQ ID NO: 16547 - DNA, 618 bp, Clostridium botulinum
atgcctaaagtagatttatttaaccaaaacggagaaaaagttggagatttacaattagcagatagcgtatttggtgtagaggtaaatacatatgctatgcatcaagtagtaaaagcattgctagcaaataaaagacaaggaactcaatcagctaaaacaagagctgaagtttcaggaggcggaataaagccttggagacaaaagggaacaggtagagcaagacaaggttcaataagagcaccacaatggatacatggtggagttgtttttgcaccaaagccaagagactacagaatgtcaatccctaaatcaatgaagaaagttgctataaagtcagcattaacttcaaaagttaatgaaaacttaatggtagttgttgatgaaataaaattagaaacaccaaaaactaaagaagtagttaaaatgcttaattcatttaatgcaaagaaaactttaattataacaaataatgctgaagaaaatgtttataaatcagcaagaaacattgaaggagtacagattattccggtaaacaacattaacgtatatgatgtattaaaatatgataaagttgttataactaaggatgctgtatccaaaattgaggaggtgtatgca

SEQ ID NO: 16548 - DNA, 1599 bp, Clostridium botulinum
atgagcactaaatatatatttgtaacaggtggtgttgtttcttcattagggaaaggaataacagcagcttctttaggaagacttttaaaaaatagaggacttaaagtttcaatacaaaaatttgatccatatataaatatagatccaggaacaatgagtccttatcaacatggtgaagtatttgtaacagaggatggtgcagaaacagatttagatttaggccattatgaaaggtttatagatgaaaatttaagtcaaaataataatgtaactacaggaaagatttactggtctgttatatctaaagaaagaaaaggtgattatttaggtgctacagtgcaggtaatacctcatataactacagaaataaaatctagagtatatagagtcgctaaagaaaaagaagtagatgtagttataactgaaataggtggaactataggagatatagaatctctaccttttttagaatcaataaggcaaatcaaatatgaggttggaagagaaaatgtatgttttattcatgtaaccttactaccctttctaggaaaagcaggtgaattaaagacaaagcctacacaacactcagttaaagaacttagaggaatagggatacagccagatatcatagtttgtcgatcagaaaaacagataccagaggaattaaagggcaaaataggattattttgtaatgtagataaagaagatgtcatacaaaatttagacgcagaaaatctttatgaagtaccattaatgctacataaggaaaatttagatactttagtatgtaagaaattaggcctaaattatagtaaaatagataacacggaatggatatcaatggtaaataatgcaaaaaacctttctaagaatactaccatagctttggtagggaagtatgtagaattacatgatgcttatatatcaatagtggaagctttaaaccatggtggttatgctaatgatactaaagtaaatataaaatggataaattctgaagaggtaaatgaaaataactttgaacaatatttaaaagatgtggatggtatattggtaccaggtggatttggtgatagaggaatagaaggtaaaatatgggctgctaaatgggcaagagaaaataagataccttttttagggatatgtcttggaatgcaatgtgcagtaatagagtttgccagaaatgtattaaattataaaggagctcatagtgcagagatagatccaaatacaaaatatccagtaatagatttaatgccagagcagaaggatatagataatatgggtggaactatgagattgggagcttatccttgtaaattacttaagggtacaaattcagaaaaagcttatggtcaggagattgtatatgaaagacataggcatagatatgaatttaataatgaatataggagtaaactaacagaagcgggtttaatattgtcaggaacaagtccagacgataggttagtggagatagtagagataaataatcatccttggtatgtggctgttcaatttcacccagaattaaaatcaagacccaataagccacatccattatttaaagactttgtaaaggccactttggataaaaaa

SEQ ID NO: 16549 - DNA, 1754 bp, Clostridium botulinum
aaaaatatgaagaagaacatagaagagctacaagatatagctaaagttattagaaaagatatagtttcaatgttaactgaatctgcttctggacatccaggaggttctttatcagcagtagagatattgactgctttatattttaatgagatgaatatagaccctactaatactagggatttaaatagggacagatttgttctttctaaagggcatgctgctccagtattatatagtactttagcaagaagaggattttttaatccagaagagctaaagactttaagaaaaattggatcaatattacaaggtcatccaaatatgaatgacgttccaggtatagatatgtcaacaggctctttaggtcaaggaatatcaacagcagtaggtatggctgtagccggaaaacttgatgaaaaagattacagagtatatacactacttggagatggagaattagaggaaggacaagtttgggaagcagctatggcagcagctcattacaaattagataatttgactgcctttgtagattacaatggattacaaatagatggaccttgtagtgaagttatgtcagcggaacctatagcggataaatttagagcttttaattggaatgttatagaaatagatggacatgatttcaattctatattaaatgctatagaaagttcaaaaaatattaaagaaagaccaactatgatagtatgtaaaactataaaaggtaagggtgtttcttttatggaaaatgaagctggatggcatggtaaagcaccaagtgcagaagaatgtgaaaaagctatatgtgaaatcggaggtgacaaataatgggagttaaaatagctacaagagaagcatacggaaaaacattagctaaattagcagaagaaaattcaaagatagtggttttagatgcagacctttcaaaatctactaaaactgccgactttaaaaaagtttgtccagaaagatttataaatgtaggaatagcggaaggtaatatgatgggaatagctgcaggactatcaacttgtggtaagattccttttgctagtacttttgcaatgtttgctacaggaagagcttttgaacaaataagaaattcaatatgttatccaaacttaaatgttaaagtatgtgcaacacatgcaggagttacagtaggagaagatggagcttctcaccaatctgttgaagatatatcactaatgagaagtataccaaatatgaccgttatttgtcccagtgatgcagtagaaacagaagcagctataagagctgtagcagaatataatggaccatgttatgtaagattaggaagatcaggagttccagttataaatgataacaaagagtataaatttgagataggaaaaggaataaagttaagagaaggaaaggaagctactataatagctacaggaataatgatagatgcagcattagaagcttataatatgttggctgtagaggggataaaggtaaatgttataaacatacataccataaaacctatagataaagatattattatagacgctgcaagaaaaactggagtagtaattacagcagaagaacatagcataataggcgggttaggatcagctgtatgtgaagttttaagtgaaaaccatccagtaccagttctaagagtaggaataaaggatacctttggtgaaagtggtaaacctgcagagttattaaaaaaatatgaattaacatcagaagatatagtaaaggctgtaaaaaag

SEQ ID NO: 16550 - DNA, 2379 bp, Clostridium botulinum
atgaaagttccagttaaatggttaaatgattatatagatatagatatttctccaaaggaattaggggatagacttacgttatcaggttcaaaggtagaagaagttgttactacaggtgatgaaatacaaaatgtagttacagggaaaatagtggaaataagaaaacatcttgatgcggataaactttccatttgtcaagtagacataggtaaggaagaaaatattcaaatagttacagctgctacaaatatgaaagaaatggatataatacctgtagctcttcatggatctacattacatggtggattaaagattaaaaaaggtaaattaagaggagaagtatctaatggtatgttctgttctgaagaagaactaggtctagcaggagatgaacctgtatatggacttatgattttggatcaggatacacctataggagaggatataaaaaaggtattaaaaatggaaagctctattatagagtttgaaattacatctaatagaccagattgtttaagtgtaataggtatagcaagggaaactgctgctactttaaacaaaaaatatactattccggtggtagaattttctcccaaatgcagtgaaagtatagaagactctttaaaagtagaagtaaaagatgcactttgtagaagatatatggcaagaggtattaaaaatgttaaagtagaacaatcaccgggttggatgcaagaaagattattagaggcaggagttagacctataaacaatatagtagatataacaaactttgtaatgttagaattaggtcaaccaatgcatgcttttgataggaaagaaataaaaaccaatactatagtggtggaaagagcaaaagagggagaaaagtttactacattagatgaaacagaaagagaattggatgtagatatacttaacataaaagatggagatagaactgtagctattgctggtataatgggtggtttaaactcagaagtaaaagaagatacgaaggaaataatattagaatgtgctaattttgatgggactaatataagaatatcttctaaaaaattgggcttaagaacagaggcctcttctaggtttgagaaagatttagatcctaatttagtggaattagctatggatagagcttgtaaactaattcaagaactaggtgcaggagaggtaatggaaggttctgtagatgtatatgaaaataaattagagcctcatatgttagaagtagacagcaattggataaataaatttttaggtaccaatatatccaaagaagaaatgcaagaatttttagatagattagatcttaacacagaaataaagggagaaattttagaaatacatgtgccaacttttagatgcgatttaaatataaaagaagatatagcagaagaaatagcaagaatatatggatacaataatattccgataactacaataaaaagtgttactatgcaagcaggaaaaaatgaaaagcaacatttagatgacaaggttatagaaacactaatggctagtggattaaatcaatctataagttattccttcgtaagtccaaaagtatttgaaaagattaatttaaaagaagatagtaatttaagaaaagtagttaagataaaaaatcctctaggagaagattttagtataatgagaactactacaataccttctatggtggaggctttaagtagaaattactcaagaaacaatgattatgcttctctgtttgaaatcggaaagatatatattccaaaggaagatcctacagaacttccagatgaaaagaatattcttactttaggtttatatggtgatgtggattactttaatttaaaaggtatagtagaaaatatactagatggattaggaatagataattataaattaaaaagacaagaggaaaatcctacttttcatcctggaagaacagcagaactatatataaagaaagattatgtagggatattaggagaaatacatccagatgtacaagataattatgatatagaagaaagatgctatgtagcagaactaaatttagatgttttatataaacattctaatgttaaaaaggagtatagtcagttaccaaaattcccagcagtaactagagacatagcagtaattgtggatgatacagtgctagtacaagaaatagaaaatataattaagaatggtggaggaaacatacttgaaagtattcacctatttgatgtttataaaggaaagcaaataccagaaggaaagaaaagtatagcatattctatagtgtatagaaatgctcaaagaacccttaaagattcagaagtaaataaagttcatgataaaatagtaagaactttagaacataaattaggagcacaacttagagat

SEQ ID NO: 16551 - DNA, 1455 bp, Clostridium botulinum
gtgaattattacatgataaacattataggattaggtccagggtcaaaagaatcaattactttaggaactatagatagtttaaaaactgttgataaagtttttttaaggacagaaaaacatcctacagtagaatacataaataaattaggaataacttacgaaacttttgatggagaatatgaagtaggagaaagttttgatgatgtatataactccatagcaaaatcactaatagaagctagtaaaaattattcagatataatatatgcagtaccaggacatccattagttgcagaaaagtctgtggatatacttataaaactttgcaggcaaaatgatataaaattcaaaatattaccagcagtaagttttgtagatgccttaatggaaagcttacttttagatccagtggaaggattaaaaataatagatgcctttgatataaaaaaacaagcaatggataagagaataggtactataattacacaagtatatgataaatttatagcttcagaggttaaattaaatcttatgaactattataaagatgatacagagatattttttgtaagagcggctggaatagaaggccttgaagaaataagaaagatacctttatatgaattagataggcaacataatatagaccatctaacatcagtatatataccaaaggttccaaataataattatgattttatggatttattagatataatggataagctaagaggagaagatggctgtccttgggatagggaacaaactcatgtgtcattaaagaaatacttaatagaagaaagttatgaagtcatagaggctatagataataaagatgtggatatgttaatcgaagaattaggagatgtgctcttacaagtagtttttcattctcaaattggaaaagaagatggtttttttgaaataaaagatgtaatacagtctatatgtgataaaatgattaatagacatcctcatgtttttggcgacttagagataaataattcaattgaagttttagagaattgggataagataaagagtaaagaacaaggaactgaaacttacacggatagcataaggcacattgctaaaacattaccagctttaatgagagcagataaagtgcaaaagaaagcttcaaaagtaggttttgattgggataatatagaagatgctatgaaaaaaattatagaggaatataaagagatagaagatgtatataaaagcaaaaataaggtaaaaatattagaagaaataggtgatttattattttcagtggtaaatgtagcaagatttcttgacattgaccctgaaaatgctttaaattatagtatagataaatttataaatcgctttcaatacatagaagatgaagcaatctctatgggcagacaattagataatatgtctttagaggagatggataaattatggaaggaagcgaaaaataaa

SEQ ID NO: 16552 - DNA, 684 bp, Clostridium botulinum
atggacaataactttaaaataaaggatttacctaaaaatgaaagaccacaggaaagacttataagatatggagcagaagttctttcaaattcagaacttttagctgttattttaaggactggtactaaaaatcaaaatataatgatgcttgcaagtagtttaattaaagaaactggtggcttggatcaactttttaatcaatctatagaagagttaactaaaattaaaggaataggtgtaacaaaagcagttcaaatattagcattatcagagctttctaagaggtttaaaacttataaatctggcaatgaatataagataagtacacctttagatgtatctaatttagttatggaagatatgaagtatttaaaacaagaaaaattaaaaatattaattttaaatactaaaaatatagttacatatataagagatgtttttataggaactcttaattcatctatagtacatccaagagaaatattctgtgaagctataaagaaaaatggtgcatccataattatatgtcataatcatccatcaggggatccaacccctagcaaagaagatataaatataactttgagattaaaagaatgtggtaaattaataggaatagatttattagatcatataataattggtgaaaataagtatgtaagtatgaaagaaaaaggtacaata

SEQ ID NO: 16553 - DNA, 3588 bp, Clostridium botulinum
ttgtactacatgtttttaaaatcaattgaaataaggggttttaaatcttttgcagataaaactgaattagtatttaaacaaggagtcacagcaatagtaggtcctaatgggagcggaaaaagtaatatatctgatgcagtaagatgggtgttaggagaacaaagtgtaaaatccttaagaggaagcaaaatggaggatgttatatttgctggtacacaatatagaaaaccagtagggctttgtcaagtttcattgatattagataacagtgataaggatttatccatagaatatgcagaagtaactataactagacgtttatatagatctggtgaaagtgagtattatataaataatactcaatgtagacttaaagatatacaagagttatttatggatacaggtataggtaaagaaggctattctataataggacaaggaaaaatagaggcagttttaagtggaaagccggaggagagaagaagtcttttagaagaagccgcaggtatagttaaatttaaatggagaaaagaagaggcagacaaaaaactttctaatacagaacaaaatcttataagaataaaagatatactaaatacttatgaagaaagaatggaaccacttaaagaagaaagtgaaaaagcaaaaaagtttctaaatttatcagaggaattaaagcgtaaagaagttaatgttatgatatattctatagataagatagaaaaagacttaaaaaatataagtagcaatatgctttctttaggtgaaaatatagataacttaaaaaatgaaaaatcacagtacaaagaaataatttcaaagtttaatgaaaaattagaacttttagacaaaaataatagtagaaataaagaagaatattattataataaagataaaaataaagatatagagaatgaaaatgcattattaaaagaaaaaataaaaaacttaaaagataatataaaagtaaaagaaaatacattaaaaactaatgaagaaagattacaaaaatatttaaaagaaaaagaagctttagaaaaaaaaataaataaattaaaagaagaagaaagctatttaagagaagaaataggtaaaaaggaagacaacgtaaataattttaataaagaactaaaagaaaaagaagaaaaattaaagatactaaaatctgaagaaatagaaatactaagcaatacctctaaccttagaaatgaaatatctgtaatggaaaatgagatagtaaatttggaaaataaattggataatataaaaaattcttgtgatagctatataagttctataaatataaatataaaaactaaggaagacatagaaaaagaaataaaaaatataaaagaaaatatactcttattagaaaataatttaaaagaaaatagtagaaatataagttctttaaaaatatctcttaataataaagaaaaaaaattaaaggagaaaaatgcagcctacagtagattagaggcaaattatcatatgctttcaaatttagagaaacactatgaaggatataatagaagtgtaaaaactttgatggagcatgtgagttatggaaaagtagataacattaagggaggctgtgaagttttaggagacataataaaggtaaaaaaagaactagaaacagcaatggaaatagctctagggggagctatatctaatgttataacagaggatgaaaataaagctaagatattaataaattatttaaagaaaaaaagcttagggagggctacctttttacccttaaccacaatacagggtagaaaagctaaaataaataatgtcacaagagaagatggatttttaggtatagctagtgatcttatagattatgatgtgaaattttctaatataatagattatgttttaggtagaaccttagtagcaaaggatatggacagtgcccttaaaattgctaagaaattaaattactcttttaaaatagtaacactagagggtgaggttataaatccgggaggctctttaacaggtggtagtataaagcacagagcaggaagcagtataataagccgaaaaagagagatagaagaaactaagaaagaattagaagaaacaaagaatactatagaagaatttatgggtaatatattagaaaataaaaataaaataaaaactttagacgaggaaaatctaaatataaaggatgaaatctactataataatatagaaataactaaatttatggggaaattaaatgctataaaggaagatacagaaagactcagaagttctttaaatatatcaagagaagaaattaagttaacaaaggataaaataaaagacattgaagagaatataaatgaatcacaaaaacaattagaagaacttaaattaaaaaaggatttaaatcataatgatataaaagaatgcgaagattttcttcaaaatgaagaggaaaatgtaaaaaatataaaggataaattaatagaatataaaatagaaaaagctaaattagatgaaatgttagttagtataaaaaaagaattgtattctatggatactaatattacaaatttaaataatgaaaataaaaatataaataaaggtaaccaggaagatagaagcaatatagaaaaatttgaaactaatataaaagaaaatgaaaataatataaaagatataaaaatttatttagaaaatttagaagaaaaatttaaaaagtatgaagtagaaagaataaaattaaaggaagaactagaaaagaataaaaataaggaagaaaatttaatattaattttaagtaaaaaagaagaggaagtccatagacaagatatacaaaaaactaggtacataacagaaagggacaatttgtataacaaattaaatgaagaattttccttaacttatgcagaatcacttagttataaagaagatgatataaatgttatgaaatataaagagcatgcacaaaatttgaaaatagagatatctaatttaggcacagtaaatgtaggatcaatagaggaatataaggaattaaatgaaaaaataacatttatgaataatcaaaaggaagatttagtaaagtcaaaagaagaacttttgaatgttattgaagaaatgactaataaaatgagaactgtatttagtgagaattttaataaattaagaaaaaactttaatgaaacatttatagagctatttaagggtggtagtgcagacctaatactgtctaatggagatgaacttacagctaatatagaaataaatgttcagccaccgggaaaaaagcttcagaatataaatcttatgtctggtggagaaaagggattatctgctatagcattattatttgctattttaaaaatgaaacctactcccttttgtatattggatgaaattgaagctgcattagatgatgctaatgtaactagatatgcaggctttttaaaggaattttcagaaagcagtcagtttatagttataactcatagaaagggtactatggaagcctgtgatgctctatatggaattaccatggaagaaaagggtgtttcaaagattatatctgtagatttgacttcaaaagatcaagtggcagctacttta

SEQ ID NO: 16554 - DNA, 852 bp, Clostridium botulinum
atgcttaatatagaggaaggaaaattatatgtagttcctactcctataggaaatttaagagatataacaataagagcattagatgtactagaagatgttgatattatagcagcagaggatacaaggcaaactttaaaattattaaatcattttaatataaaaaaaacattaataagttatcataaatttaatgaagaagataaaagtataaatataataaataatttaaaagaaggtaaaaaaatagcattagtttctgatgcagggatgccaggaatatcggacccaggatatgtacttataaaaaaatgtatagaagagcaaataatatttgaagttttacctggagctacagcatttactacagccttagtttattctggaatggatactacaaagttcatttttaagggttttataccaagagaaaataaaaatagacaaaagttaatacaggatataaaggataggatggaaacattaatattttatgaatctcctcacagattaaaggaatgtttaaaatttttaagggattccttaggaaacagaaatatatctatatgtagagaacttactaagctacatgaagaaattataagagatagtttagaagaggttataaaatattatgaaaataagcaacctaaaggtgaatatgttttagttttacaaggaaaatctatagaagaaatagaaaaagaaaaggaaatggaatggtctagtataaatatacaggatcatataaaaaagtatataaatgaagggtatagtaaaaaagagtctataaaattagtagctaaagatagaaaaataactaagtcagaagtatataagtattctatagatata

SEQ ID NO: 16555 - DNA, 1458 bp, Clostridium botulinum
atgtttaaaaatttatacgtagaaaacaatttatataaaaattttataggaggacaatgggtaaatagtaaaacaaataactttatagaaataagctctcctatagatggctctttggtaggtaaagttccctccatgagtaaagaggaagtggacttagctataaaaaatgccaagaaagctcaatcccattggaatgaaatacctataaacgaaaaagcaactatcctattaaaagctgctaatatattagatgaaaaagctgaggaaatcgctgatataatgactaaagaaattgctaaggataaaaaaagttctatttcagaggtccgtagaactgctgattatataagattttctgcagataccgcaaaaaatatggtaggagaaacattacctggagattcttttccaggaaattccaaagggaaaatatctatagtcaatagagtacccttaggtgtagttttagctatttctccctttaactatcccgttaacttatctggctctaaaatagctccagctttaatggctggaaatagtgtagttttaaaacctgctactcagggtagcataagtgctcttcatttggtaaaagtttttgaagaggctggtctgccttctggagttttaaatacaattacaggtaaaggtagtgaaataggtgattatatagtttctcatcctatgattgattttataaattttactggaagcacagaggtaggaaaaagaatatcccatatttctgttatgaaacctatgctaatggaattaggaggaaaagatgctgctatagttttagaagatgcggatctagatttagcagctaaaaatatagtatctggtgcctactcttattctggtcaaagatgtactgctgtaaaaagaatactagttttagaggaaatagcagatacactagttgaaaaagtaaaagaaagagtagaatctctaaaaattggaaatcctttaaaagaacaggtagatattgttcctttaatagatgataaggctgcagattacgttgaagctttaatggaagaagctaataataaaggggctacattattagtaggtggaaaaagagaaggtaatttaatttatcctactttatttgataatgttacattagatatgagattagcttgggaggaaccctttgctccaatacttccaataataagagttaaagatgtagatgaagctataagaatagctaatgaatccgaatatggtctccaagcctctatatttacaaaagaaataaataaagccttttatgtagcagaaaagttagaagtaggtacagttcaaattaataataaaccagaaagaggaccagaccatttcccattctcaggtattaaagcctccggtcttggtactcaaggtataaaatattccatagaagctatgtctagacctaaagctatagttctgaatataaattta

SEQ ID NO: 16556 - DNA, 147 bp, Clostridium botulinum
atgagagtaaaagtaacactagcttgtacagagtgcaaacgaagaaattataatacaatgaaaaacaagaaaaatgatccagatagattagaaatgaacaaatactgcccacattgccataaacatgcagctcataaggaaacaaaa

SEQ ID NO: 16557 - DNA, 432 bp, Clostridium botulinum
atggagaaatttttagatataaatgaaataaaaaaaattattccgcacagatatccatttttattagtagataaaataactgaattagaagagggaaaaagtgcagttggatataaaaatgttacagctaatgaatacttttttaatgggcattttcccgaagaaccagtaatgcctggggttctgattatagaagctttagcacaggtcggagctgttgctattttaagtaaagaagagtttaaaggaaaaatagcttattttggaggtataaataaagctaagttcagaaaaaaggtagtaccaggagatgttttaaaacttagtatagatcttactaaaataaaaggcgttgcaggagtaggtaaggccgtagctactgtagatgggaaagtagctgcagaagcagaattattatttgtaataggaaaa

SEQ ID NO: 16558 - DNA, 635 bp, Clostridium botulinum
acaactttgatgaaacaaataattcttcctagtttatggcaaaccatatatatgataataatatcgactattttatcttttgtaattggctttatattagctatagtattagcagtaacagatgaaagaggcattaagccaaataaaataatttatggcatattaagcactataatcaatgtattaagatcagtaccatttattattcttgcagtagctataataccttttacaagaagcattgtaggaacatctataggagaaaatgcagccatagttcctttaactatagcttcagcaccttttatagctagattaatagaaagtagtctaaaagaagtaaaccctagtttaatagaagctgctaaatcctttggagcctcaaatattcaaataatatttaaagtaatggtaaaggaagcaattccatctataaacctggatttaactttagctacaataacaatattaggattaacagctatggcaggagcagtaggagctggaggtttaggagctgttggacttacttatggatatcaaagttttaatgatactataatgtatactactttaatttattagtaataatagttggcattatacaatttgtgggaaatattatatataaaaaa

SEQ ID NO: 16559 - DNA, 1455 bp, Clostridium botulinum
atgattacaggtgagttaaaaagtaagatagatagaatttgggaaaccttttggactggtggcatcactaatccattagaggttatagaacaatttacatattttttatttataaaagatttagatgataacgaaatattagctgaaagtgatgctgaattacttggcataccctttgagggaatgtttccaagtgataagcagtatttaagatggagtaaatttaaaaatgaaccagcaggggaaatgtataggatagtatcagaagaagtatttccctttataaaagatattcatggagatgagcaatctgcatactcaaaatatatgtcagatgctatgtttaagataccaactccacttatgttatctaagatagttgattcaatagataatattaatatgaatgataaagatactaagggagatttatatgaatatcttttatctaaaatagctcaagcaggtacaaatggtcagtttagaactccaagacacataataaaaatgatggcagaattaatgaagccaacaccagaggatattatagtagatccagctatgggtacagcaggttttctagttggagcagaggaatatttaagagaaaatcacaatgatctattttttgttcaaggattaaaagaacattttaataataagatgtttaatggatttgatatggacagaactatgcttagaattggtgctatgaacatgatgcttcatggagtggacaatcctaatattgagtataaagattcactttcggaaactaataaggacagtgaaaaatatactctagtacttgcaaatcccccatttaaagggagcctagactacgaagcggtttcagcagatcttttaaaagttagtaagacaaagaaaacagaattattgttcttagcattatttttaagaatattaaaaactggtggaagatgtgcatccattgttccagatggagtattatttggttcaactaaaggacataaggatataagacgtgaaatagttgataacaataagctcgaagctataataagtatgccaagtggagtgtttaagccatacgcaggagtatctacagctattatgatattcactaaaactggtactggtggaacagataaagtttggttctatgatatgaaagcagatggatattccctagatgataaaagaaatcctatagaagataacgatatgccggatataatagaaagattcagtaatttagacaaagaagaagatagaaatagaacagaacaatccttctttgtaccagtagaagaaataagagaaaatgattatgacttatccattaataaatacaaagaaatagaatatgaagaagtagtttatgatgaacctaaggttattttagagagagttaagaaactagaaaaagaaataactgaggggatagatgaattagaaaaaatgatagagggg

SEQ ID NO: 16560 - DNA, 696 bp, Clostridium botulinum
atgaaaaacactattaatataaatcaaaagcttggggaggttgtttccatattcccaggatcaagtagaatattcaatgatgtaaaaatagattattgctgtggtggacatgatactttaggagaagccttaaaggaaaaaggaataaattcagatgaattcatagaaaaacttaatgaagaatatgaaaagtttgtagaatctaatgaagagtatatagattggagaaaagaaaaaccagtaaatcttatggaaaatatagtagatactcatcatgattatacaaaaagagagcttaaagaaatagatgcactactatcaaaaatattaaaagttcattttggacatcatggagaagaattattaaaagttcatagattatttggacttttaaagatagaattagaagaacatttaataaaggaagaagaaaatttatttccattaataaaagaatatgaagtgactaaagatgaaaatgtaaaaagagaaatagacaaatttataaaagaaacagaagatgaacatgataaagccggagatatattaaaagaattagaaaaaataacaagagatttcaaagcaccagaggatgcatgtacaagctatagattaacttatgataagattcatagcttagagaaggatttatttatccatatatacaaagaaaacagcgtattatttgagatgatt

SEQ ID NO: 16561 - DNA, 792 bp, Clostridium botulinum
atgataaaatttatagctacagatttagatggaacactagtaaatagtgaaggtaaaatatataataaggtgtttaatttaataaacgatttacataaaaatggggtaaagtttgcagcagctagtggaagattttattctcaattaaatgaaaatttcaatagtgtaaaggaagatatgatacttatagctcataatggagctcttataaaatatagtaaaaatggacagactctttatgctaattatatagataaagaatatataaaatcagtagaaaaattaaaaagaaattttggagaagaattaattttagcgggagaaaatgaagcttttgttgtaaatccttctcaaagtattaaagaagaatttaatttttataatgtaccttatatagaatacaaatcctttgatgaagtggataagcctgttcaaaagataagttattatgttaaagatggtattaaagcatctatgatcgattatttaaaagaaaatttaaataagaatcttcaatttgttgcttcaggggataaatggatagatatgatgaataaagaagtaagtaaaggacatgccataaaaatacttcagaaaaaatttaatatagaaaaagataatactatggtttttggagattattataatgatataaccatgtttaagcaagcttattatagttatgctatggaaaatgctccagaagatgtaaaagaaaaggccaattttatagctggtaacaataacgaaaatgcagtttataaaactataagtaaacatatgggatttatt

SEQ ID NO: 16562 - DNA, 306 bp, Clostridium botulinum
atgtttacagaaaaattcttagaagtattgaaacacgagctggtaaaaatagatggctttattcactctgagggattttcaagtttagtaaatgagagaaaaatacttagcctatccgtttgggaagatgatgatgcagtaagcaaatggcgtaatattgttgaacaccgcatggctcaacaacaagggcgtgattctatttttgaaagctacaccatcacggtagtgtcatcccttcgcagctataccgataaagagcgagctgaagctccgaactactctaatattttttcccaacaagcccga

SEQ ID NO: 16563 - DNA, 702 bp, Clostridium botulinum
atgtcaatttatatggcggagtttttgggtactatgatgttaatttggttaggggatggcgttgtagccagtgtagctcttaacaaaagtaagggaaaggatggtggctggattgttgtaacagcggcctggggattagctgttgctatacctgcatatatttttggaggtataagtggagctcatatgaatccagcagttacaattggtaatgcaattgcaggaaatttcccttgggcaaatgtagcaggttatattacagctcaaatgttaggggggtttgcaggagcagttttagtttggcttacttaccttccacattggaaagcaacagaagataaagctactaagctgggagtattttgtacagctccagcaataagagacacaaaagctaactttgtaactgaatttatagtaactgcccttttagtatttggactaatgggtcttggacaagttaaaatggtagatggctttggaccattaactgcaggtgcacttatatttgttttgggactttctttaggtggaccaacaggatatgctattaatcccgcaagagatttagcaccaagaatagctcatgcaattttaccaatagcgggtaaaggagattcagattggaaatatgcatggataccagtgctaggtccaatattaggaggaatattaggagcattattatttatgttagttttt

SEQ ID NO: 16564 - DNA, 336 bp, Clostridium botulinum
atgaatagagttatgctcataggcagattaactaaagacgcagaacttaagcagatagaggatagagatgtttctttattaagatttgtaatagctgtaaatagatattacaacaaagaaaattctaagactgattatatacctattgttgtttggggaagacatgctgaagctatacataagtatatgaaaaagggtaaattaattagtgttgtgggaagaatacaggctagaaattatgaagataaaaatggtaataaaaagtatggaatagaaatagtctctaatgagataaaattcttggaccctaaaaaaatagataaagttgttagtaac

SEQ ID NO: 16565 - DNA, 855 bp, Clostridium botulinum
atgaataaaatattagaagtaaaaaatttaaaaaaagagtataaagatttttcagtagaaaatataagttttcagttggatagaggatacattatggggtttatagggcctaatggggcaggtaaaagtactaccataaagttaattatgaatttaataaaaaaagatgctggagatataaaaatatttggcatggataatgtaagatatgaaaaagaagtgaaggaaaaagtaggctttgtatatgatgaaaattatttttatgaccatgtaaatatagaaactatgaaaaagataatagctcctttttataaagaatggagtgatgaaacttttagtaaatatttaagaacttttgatttagatcctaagaaaaaaataaaaaatctttctaagggtatgaaaatgaaattttcattagctttagctctttctcacaatgcggagcttataataatggacgagcctactgcaggattagatcctgtattcagaagagaaattttagatatattatatgatttaatacaggatgaaaataaaagtgtatttttttctacacatataactacagatttagaaaaaatagcagattatataacttttataaataaagggaaattagttttttcagaaaataaggatgaaataatgggaaagtataatctagtaaaaggtggattagattttttaaatgaagaaacaaaaaaatattttgtgggtataaataaaaattcttttgggtttgaaggattaactacttcagctaatattataagagaaataacccaaaaaggagaaattataatagaaaagccaagtttggaggatattatggtttatacagtaaggggg

SEQ ID NO: 16566 - DNA, 783 bp, Clostridium botulinum
gtgaattttaaagaaaaaactgttataataacaggaggagctcaaagtttaggagaatatattgcttatagctttgctgaaaaaggtgctaatatagtaattgcagatataaattatgaacaggctaataaagtatctcaaaatataataaacaaatataaagtaagatctatagcagttaaagttgatgtttgtaaagaagaggaagttaaaaatcttataaaaaatacaatagataattttagtaaaatagatattttaatttgtaatgctggagtagtttatagtacaaaggttactgagctgcctaaagaaaaatgggacaatatattaaatgtaaatttaacaggatattttttatgtgcaaaagaggctgcaaaggagatggtgaagagaaaacaaggagttattatcgatataaattctaaatcaggtaaaaaaggaagtttgcataactgtgcttattctgcatcaaaatttggagctataggtttaactcaaagtttagcattggatttagcggaggatggaataagagttaatgcagtttgttcaggtaatttattagactcgcctatgtggaaaaatggcttatatgaacaatatgctaaaaaattaaatatacctaaagaaaaagttagacaagcatatatagataaggtacctttaaaaagaggctgtacttatgaggatgtaagtaatctagtattatttttaagttcaaaagaagcttcatatatgactggacaggctgtaaacgttacgggtggtcaagaaatgaga

SEQ ID NO: 16567 - DNA, 714 bp, Clostridium botulinum
atgaatgaaccaaagtataagcgcgttatgttaaagctatcaggagaagctttgtcaggggagaagggttttggatttgattttgattttaccaaggaaatatcagaacaaataaaaaaattagttgacatgggaatagaagtaggcgcagtagttggtggaggaaacatttggagaggcagaagtggttcagaaatggatagaactaccgcagattatatgggaatgttagctacttgtataaatgctttagcccttcaagattcattagaacaacttggagttaatactagagttcaaactgctatagaaatgaaagaaattgcagaaccatttataagaagaagagctatgagacacttagaaaaagaaagagtggtaatatttgcatctggaacaggtaatccatatttttcaactgatacagcagctgcattaagagctgcagaaatagaagcagatgttatattacttgctaaaaaagtagatggggtttatgataaggaccctcataagtatgatgatgctaaaaaatataataaattatcttatatagaagtattagaacaaggattacaagtgatggattctacagctacttctttatgtatggataatgatattcctatattagtttttggattagatgaaccttgcaatataataaaagctgtaactggagaagaaataggtactctagtttcaaattcaaaa

SEQ ID NO: 16568 - DNA, 1578 bp, Clostridium botulinum
ttgattacagtaacaaatttaagtttaagatatggggacaaaaaactttttgaagatgtaaaccttaaatttacacctggtaactgctatggtgttataggtgctaatggcgccggcaagagtacctttttaaaaattttatctggagaaatagaagctaatactggagatgtatctatacagccgggagttagaatgtctattttaaaacaagatcactttaaatacgatgaatttcctgttttagaaacagttataatgggaaatgaaagactttatgaaataatgaaagaaaaagatgctatatatgctaaaactccttttacagatgaagatggcataaaagcctctgaactagagggagaatttgcagacttaaacggttgggaagcggaagcagaagcttcatccttacttcaaggcttaggaataggcacagagcttcacgaaaaaaatatgaaggatttatccggtagcgaaaaggtaaaagtattactagctcaggcattattcggtaatcccggagttcttatactagatgagcctactaaccacttagatataaaatctgtgaactggcttgaagaatttttaataaattttgaaggaacagttattgtagtatcccatgatagacatttcttaaataaagtatgtactcacatggcagatgttgactttggtaaaattaaattatatgtaggaaactatgatttttggtatgaatctagccaattagcgcttcaaatggctaaagatcaaaacaagaaaaaagaagaaaaaataaaagagctacaggaattcattgctcgttttagtgctaatgcatctaaatctaagcaagccacttcccgtaaaaaattattagataaaatcgatttagataacatacaaccttctagtagaaagtatccttacatagcctttaaacccgaaagaaaagttggtaatgatatattaagagtagagggtttaactaaaactatagacggaacaaaaatattagataatataagctttataataggtaaagatgataaaatagcttttgtaggagatgaattatctataactactctatttaaaataatatctggtgaattagagccagatagtggtgaatataaatggggaataactataacaaatgcttatttcccaaaggataattccgaatactttaatgatgtagatttaaatttagtagattggttaagacaatactccgaagaaaaatctgaaagctatctacgtggattcttaggaaggatgctattctctggtgaagaggctttaaaagaggttaaagttctatctggtggagaaaaagttagatgtatgctatcaaaaatgatgctaaataatgctaatgtaattatattagatcaaccaactaaccacttagacctagaatctataactgcactaaataatggtttaatggactataagagtaacatattatttacttctcatgaccatcaatttatacaaactatagccaatagaattatagaagtatctgaagcaaaatttgttgataaaaaggttacttatgatgaatatttagaaagcaaa

SEQ ID NO: 16569 - DNA, 885 bp, Clostridium botulinum
atggaggtatggattttgaattttgtaatagccacacgaagaagtaagcttgctcaggtgcaaacagaaataataatagatttattaaataaaaagcatgatatagaatgtgaaaaattattaatagaaactgtaggagataaaatattagaagtatctttagataagataggtggaaaagggctatttgttaaagacatagaagtagctatgttagaacaaagggcagatgcagcagtacatagcatgaaggatgtaccctatgaaatgccaaaaggttttgagataatagctattccagagcgagaagatgtaagagatgcctttatatccttagacaatataaaatttaaggatttaagaaagggagctaaaattggtacaagtagtaggagaagggcagcccaattaaaacttctaaggccagatttagatattgtacccataagaggaaatgttcaaactagaatagaaaaaataaaaaaagaaaatctagatggagtaatattagcagtagcaggccttaaaagggtaaatttagatcatttaattacagactattttgatacaaaagaaatggtacccgcaattggtcaaggtgccttaggtatagaagttatggaggagcatcctaaaaaggagttatttaaggatttagatcattataattcaaaaatatgtgttttggcagaaagagcttttatgagggaactagatggagattgccactcaactataggagcttatgcatctataaaggataatataatgcatataataggcatatttgaaagaaaaaataaaattattaaaaaagaaatcacaggaacaaaagatcagtatgaaaaattaggcatatccctagcagaacatatactaaaagac

SEQ ID NO: 16570 - DNA, 561 bp, Clostridium botulinum
gtgattttaatgaaaataaaaataaatactccattaactgaagataaaatcaaaagcttaaaagcaggtgatatggttttaattacaggtacgatatatacagctagagatgcagcacataaaaggttaattgatgctttagaaaaaggaaggaatttaccatttgaagtgaaaaattcaataatatattatgttggacctactccggctaagcctggcatggaaataggagcagcagggccaactacaagttataggatggatacatatacacccaaactattgaatttaggattaaagggaatgataggtaaaggtagaagatctaaagaggttatagaatctatagtaaaaaataaagcagtatattttggggcaataggtggagcagcagctttaatatctaaaagtataaaaaaatcagaagttatagcttatgaggacttagattcagaagctatcagaaagttagaagtagaagatctgcccgttactgttataatagattctaaaggaaataatttatatgaggatggattggaagattatttgaaaagttta

SEQ ID NO: 16571 - DNA, 651 bp, Clostridium botulinum
atgagtatcagtaatccacgaattccagcggatctgataatggtagacgatttttcatcatatgcgcagggatatttatatgaggaaataccaataacccagataaagatttacggagaacatattgaacattttgatttttccaaaagcgaaatcaatacaagcattttcgaaaactgtacattccttgattgcagttttgaaggagcaagctttgttgacgttgtgttccaaaattgtaatctatcaaacagtaattttacagatgcatattttgaaagatgccagtttattgcctgtaaatgcgtaggagtgaatatgatcgatactatttttaagcagacatctatgcaaagatcaaattttcagtattcctatttcgataaagctaaaatgacagatattgcttttgaggatatagattttactgaggtatctataactgaggccaaattgaagaggttcaaagcaaaaaactcccacttcattaaaaacaatttttttaagacaatgttgacaggtgttgattttacaaaaaatgagctagttgctccgacggtatcttcacctcccattgaatttcaaggagccaaaattagtatggttcaggcggctgacttaattggtatttggggaatcattgttgatcag

SEQ ID NO: 16572 - DNA, 972 bp, Clostridium botulinum
ttaagagctttatctaccatagcagttatattgattcatgtaacaggcactatattatataatagcaataataaaagtttaacttataattcttctcttgttttaaaccagttagcaagattttcagtacctgcttttatatttttatctggttttggactagccctaagctataaaaaggaaagtaaatacctagcctatttaggccatagactaaaaaaagtagttccagactactttgtatggtatattgtatatatttttctattagaagatataaatctaagttatcatgataaaataattagcatttttcatggaacactatactatcacttttattttgttcctataataattatattatatttaatatttcctatattttataattttttcagaactaaattagcattatttattaccttttttctaaatatgggcatatatatattacttagataccctaatataccgaaaagtattagtgaaaatttaactagagaaagtgtagttagttggatattttattttgttttaggggtttatttttgtagtaattatgataaaatacatatctttataaaaaaacatagaaacaaattactttttctattgttattatctacatatatattattaaaggatacatttttatgtttaagagcaaataatgatttagattatggaacaacttttataagaccttctgttatgttatttagtatatttttcatattatacataatgagttttaattttaataatttaagttttaaaaaaatattctatatgatatcaaaacattcctatacaatatatttatctcatcctttactgctctattggttaaaaaaatattatattgaaaataaatatataataggaagctataaattctttataattgttttttttacttgttttattggcggtctcttaatatcaatattaataaataaatttaaaaaa

SEQ ID NO: 16573 - DNA, 390 bp, Clostridium botulinum
atggctaaagtacagtattttggaactggaagaagaaaaaaatcagtagcaagagtaagacttgtagctggagatggaaaagtaataataaataacagagatatagaaaactatttcccaatagaaacattaagagtgatagttaaccaaccattagtgttaacagaaacaaaggataaatatgacgtattagtaaatgttcacggcggtggatttacaggtcaagcaggagcggtaagacatggtatatctagagctcttgtaaaagctgatgaaaacatgaaatcatcattaaaaaaagctggtttcttaacaagagatccaagaatgaaagaaagaaagaaatatggattaaagaaagcaagaagatctccacaattctcaaagaga

SEQ ID NO: 16574 - DNA, 695 bp, Clostridium botulinum
gggtctttccgtccaatcgcgggtagcaagcatcttcacttgcactacaatttcgccggatttgctgttgagacagtgcccaaatcattacgccattcgtgcgggtcggaacttacccgacaaggaatttcgctaccttaggaccgttatagttacggccgccgtttactggggcttaagttcacaccttcgcttacgctaagtgttccccttaaccttccagcaccgggcaggcgtcagcccctatacatcagctttcgctttagcagagacctgtgtttttgctaaacagttgcttgggcctattctctgcggcctactttcgtaggcaccccttctcccgaagttacggggtcaatttgccgagttccttaacagcaattcttccgatggccttaggattctctcctcacctacctgtgtcggtttgcggtacgggcacctattcactcgatagaggcttttcttggcagtgtggaatcagatacttcgccataaatggctccccatcacacctcagcttagctcgacggatttgcctatcaagcatgcctaagtgcttagacgcacatccaatagtgcgcacatcttatcctactgcgtcaccccatttctcaaacgtaaataggtggtatcggaatatcaaccgattgtccatcacctacgcctttcggcctcggcttaggtcccgacta

SEQ ID NO: 16575 - DNA, 1623 bp, Clostridium botulinum
atggcaaaaagtttattgtttggggaacaagctagaagatcaatggaagctggtgttgataagttagctgatacagtaagagtaacacttggaccaaaaggaagaaatgttgttttagataaaaaatttggatcaccattaataacaaatgatggtgttacaatagcaagagaaatagaactagaagatccatatgaaaatatgggagcacaacttgtaaaagaagttgcaactaaaacaaatgatgtagcaggagacggtactactacggctacattattagctcaagctataataagagaaggattaaaaaatgttacagcaggggctaacccaatccaaataagaacagggataagaaaagctgtagaaaaggctgtagaagaaataaaagttatttctaaacctgtaaatggaaaagaagatattgctagagttgctgctatatcagctgcaagtgaagaagtaggaaaacttattgcagatgctatggaaagagtaggaaatgacggagttataactgtagaagaatcaaaatctatgggaactgacctagaagtagttgaaggtatgcaatttgatagaggatatgtaagtgcatatatggtaactgacactgaaaaaatggaagcagtattagatgacgtatatatcttaataactgataagaaaatatccaacatacaagaaatattacctatcttagaacaaatagttcaacaaggtaaaaaattattaataataagtgaagacatagaaggagaagccttaagtacattagtacttaacaagttaagaggaacatttacttgtgtaggtgtaaaagcaccaggatttggagatagaagaaaagaaatgcttcaagatatagctattttaacaggtggtgaagttatttctgaagaattaggaagagatttaaaagatgttactatagatatgttaggaacagcagacagtgtgaaagttactaaagaaaatactacaatagttaatggtaaaggcgataaagtagctataaaagaaagagtatctcaaataagagtacaaattgaagatacaacttcagagtttgataaggaaaagcttcaagaaagacttgctaaattagcaggtggagttgctgttataagagttggagcagctacagaaactgaattaaaagaagaaaaattaagaatagaagatgctcttgcagctacaaaagcagcagtagaagaaggaatagttccaggtggcggaacagcatatatagatattatacctaaaattgctgatttaacttctgatattatagatgttaaattaggaatagatataataagaaaagctctagaagaaccagtaagacaaatagctaataatgcaggtgctgagggatcagtaataattgaaaaagttaaagctactgaagcaggcgttggatatgatgctttaaatgataaatatgtagatatgctaaagactggtatagttgatccgactaaggttacaagatcagcattacaaaatgcagcttcaattgcatctactttcttaacaacagaagctgcagtagcagatattccagaaaaagaaaatacaccaccaatggcgccaggaatgggaatggatggaatgtat

SEQ ID NO: 16576 - DNA, 1293 bp, Clostridium botulinum
atgaaaaattatattgaaatagtagatgtatacgcaagacaaatcttagattcaagatgcaaccctacagtagaagtagaagtagaattagaagacggaacagtaggagtagcagcagttccatcaggagcttctacaggagcctttgaagcagttgaattaagagatggagataaatctaaatacttaggtaaaggcgttttaaaagctgtagataatgtaaacactataatagcagatgaacttgttggaatgaatgttttagatcaagtagctattgataaaactatgatagaattagatggaacagacaataaagcaaaattaggtgcaaatgcaatgctaggagtatctttagcttgtgcaaaagctgcagctaactctttaggaataagtttataccaatacataggaggagtaaatggaaaagttttaccagtacctatgatgaacataataaatggtggaaaacatgcggacaacaatgttgatcttcaagaattcatgataatgccagcaggagctccttctttcagtgaagctttaagaatgtgttcagaagtatatcatgcattaaaatcaacattaaaagcacaaggatatgatacaggggtaggcgacgaaggtggatttgctccaaacttaaaatcaaatgaagaagctatagtagttataatagaagctataaaaaaagctggatatactccaggagaagatatattcatagctttagatccagcttcatcagaaatatttgaagatggaaaatacaatctagcaggagaaggaagagtattaactccagaagaaatggcaaactactatgtagaattagcagaaaaatacccaataatctctatagaagacggtatggcagaagaagattgggatggttggaaaatccttactgaaaaaataggaaacaaagttcaattagtaggagacgatttattcgttacaaatactgaaagattatctaaaggaataaaattaggagttgcaaactcaattcttataaaacttaaccaaataggaacattaacagaaacattaaatgctatagaaatggcagaaagagctggatatacagcagtagtatctcatagatcaggagaaactgaagatacaacaatagctgacttagttgttgcagtaaatgcaggacaaataaaaacaggtgctccagcaagatcagaaagagttgctaaatacaatcaattattaagaatagaagaagaacttaatgatatgggagaatacagaggattaaaagcattctacaatatcaataaa

SEQ ID NO: 16577 - DNA, 1851 bp, Clostridium botulinum
atgtataaaaatatacaaagagaaatctataaaaatacaaaaggagacggggatatgtttaataaatttgatacaaagcctctttgggaggtaagtaaaactttatcaagtgtagcacaggggcttgaaccggctgatatggttattataaattcaaggcttataaatgtctgtacaagagaagtcatagaaaacacagatgtagcaattagctgtggaagaattgctttagtaggtgatgcaaaacattgcataggggaaaacacagaggtaattgatgcaaaaggacaatatattgcaccaggttttttagatggtcatattcatgttgaatcatcaatgttaagtgtaagcgaatatgctcgttcagtagttccacatggtactgtcggaatatatatggatccacatgaaatttgtaatgtactcggattaaatggtgtacgttatatgattgaagatggcaagggtactccacttaaaaatatggtgaccacaccatcctgtgtaccagcagttccaggttttgaagatacaggagcggctgtaggaccagaagatgttagagaaacaatgaagtgggatgaaatagttggattaggagaaatgatgaacttcccaggtatactttattctacagatcatgctcatggagtagtaggagaaactttaaaagctagtaaaacagtaacaggacattattctttacctgaaacaggaaaaggattaaatggatatattgcatcaggtgtaagatgttgtcatgaatccacaagagcggaagatgctcttgctaaaatgcgccttggaatgtatgcaatgtttagagaaggatctgcatggcatgacttaaaggaagtaagtaaagccattacagaaaataaggtagatagtagatttgctgttttaatatctgatgatactcacccacacacattgcttaaggatggacatttagatcatattataaaacgtgctatagaagaagggatagagccattaactgcaattcaaatggtaacaataaattgtgcacaatgtttccaaatggatcatgaattaggttctataactccaggaaaatgtgcagatattgtatttatagaagatttaaaagatgtaaaaataacaaaggttattatagatggaaatttagttgcaaagggtggactattaactacttcaatagctaaatatgattatcctgaagatgctatgaattcaatgcatattaagaataaaataacaccagattcctttaatattatggctcctaataaagaaaaaataactgcaagggttattgaaattatacctgaaagagttggtacatatgagagacatgttgaacttaatgttaaagatgataaagttcaatgtgatccaagtaaagatgttttaaaagcagttgtatttgaaagacaccatgaaacaggaacagcaggatatggttttgttaaaggttttggtattaagagaggagctatggctgcaacagttgcccatgatgctcacaacttattagttataggaacaaatgatgaagatatggcattagctgctaatacattaatagaatgtggtggaggaatggtagccgtacaagatggtaaagtattaggcttagttccattaccaatagcaggacttatgagtaataagcctttagaagaaatggcagaaatggtagaaaaactagatagtgcatggaaagaaataggatgtgatatagtttcaccatttatgacaatagcacttattccacttgcctgcctaccagaattaagactaactaatagagggttagttgattgtaataagtttgaatttgtatcattatttgtagaagaa

SEQ ID NO: 16578 - DNA, 1335 bp, Clostridium botulinum
atggatgcacccataaaaagtatgccacagagtatagatgcagagcaaaatgtattaggggcaatgattatagataaaacttccatagcagaggctgtagaagttttaagtagtgaagatttttacaaagattcccataaaattatatttagtggaattatagaactttatcaaaaggatatagcagtagatatgttaactcttacggaaaatcttaaatcacgagataaattagaggcagtagggggagttacttatataacagagctttgtaactctatagtttctacagctaatattcagtcttatatagatataataaaggataaatctacattaagaaggcttataaagtcatctactgaaataatagagaactgttataacagacaagataatgtagaagaaataatagattctgcagagaaaaaaatatttcatatatctaaccaaaatactacaactgattttgaaccattaagtaatgttttggaaagaggatttattcaaattgaaaacctatttaaaaataaaggtgaaactacgggagttgcctctgggtttagagagttagatgctaaaacctcaggttttcaaaaatctgatatgatattaatagcagcaagaccatcaatgggtaaaactacatttgccctaaacatagcagaatatgcagctcttagagaggggaaaagtgtagcaatcttttccctggaaatgtcaaaagagcaactttcttataaattgctttgttcccaagctaatattgatatgttgaggcttagaaccggtaacttagaggataaagactgggagaatatagctagggtttcagggcctttagcagcagcaaagatatttatagatgatactgcaggtatgtctgtaatggaaatgcgttctaaatgtaggagattaaaaatagaacatggaatagatatggttttaatagattatcttcagcttatgagtggaggtaaagggtctactgaaagtagacaacaagaagtttcagaaatatctagatctataaaagctctagctaaagaaatggattgtccagttatagccttatctcaattatctcgtgctccggaggctagatcggatcatagaccaatgctttcagatcttagagaatctggatctatagaacaggatgctgacgtagttatgtttttatatagagatgaatactatgacaaagaaacagaagataaaaacatggcagaatgcattatagccaagcaaagaaatggtcctacgggtacagttaaaatggcatggcttggacaatacagtaaatttggtaatttagatgtgatacatcaagaa

SEQ ID NO: 16579 - DNA, 687 bp, Clostridium botulinum
atgggaaaaaaatacactgaaagtgtaaaattagttgataaaaacacattatatacagttcaagaagctatagagcttgttacaaaaacatcaaaagctaaatttgatgaaactgtagaattagctgttagacttggagtagatccaagacatgcagaccaacaagttagaggagctgttgtacttcctcatggaactggtaaaacagttagagttttagtttttgctaaaggtgataaagttaatgaggcacaagaagcaggagctgactttgttggagcagaagaattagtagaaaaaatacaaaaagaaaactggtttgattttgatgtagttgttgctacaccagatatgatgggagtagtaggaagactaggaagagtattaggacctaaaggtttaatgccaaatccaaaatcaggtacagtaacatttgatgttgctaaagctatagcagatatcaaagcaggtaaagttgaatatagagtagataaaactgctataattcacgttccaataggaaaatcttcttttggagaagaaaaattatcagataacttccatgtattaatggaagctgttgtaaaggctaaaccagcagcagcaaaaggacaatatataaaatcagttgcaatatcaagtactatgggaccaggaataaaaattaatccaggtaaagtattagaa

SEQ ID NO: 16580 - DNA, 1002 bp, Clostridium botulinum
atgtctgagcacagtgtttcaaagaaagagcttattttatttttggtagtaacctttggttttactgcaattatgggaattgctatggcatttacatatcctaaatataaggtagatacttttccactggcacagatgtgttatccagctacaggtgttatgatggctttattgctaaacaagaagagacgtaaagagttgccaataaaattttatggagcttatttgttttttactattactttagttttatatattttggtacagatatttatatttcataaaaatccaggttggtatgtgcaatactggactattataggaagctttgctttaataattatgtatttttcagatgaaaaagacaagatatatgcttttggattgaaggtcggtaaaaattctagagaatctattaggtatactttgctatttgttattttgtatctatgtgcaatttttttaggtcaacttattttcggtaacgttaaagattttattgctcctttcaaggatccaaaaaaattggtaggaatgtttttattaccactttcatttccacttacctttattgtatttttcggagaagaatatggatggagatattttctccaaacagcctttcaggagcgattaggtaaacgaaaaggaataatttttctagggattatttgggggatatggcatttgccattgaacttattttattatagtccaaaaacttctttttattctgttataaatcagcttattgtttgcattggttatagtgtattctttggatttgtatatatgaagacgaaaaacatatgggctgtttctatgattcattttataaataataatcttggtgctattctttatggtggtacaggggcagatgttgttcttagcggaaaagcagtcttaggaaatttgttttgtatttttgtaatctatttacctttcttgtttagtaaagaatatagtaaaaaagaagccgaagtttctaattatagtgct

SEQ ID NO: 16581 - DNA, 978 bp, Clostridium botulinum
atgtaccctttaaaatttgaaaacatatatttaaataaggtgtggggaggaagaggcttaaaaaaatttagagataatcttcctaaaggtgatataggtgaaagttgggatatagcatttcaccaagatttaataagtgtaatcaaaaatgggaaacttaaggggaagacattaaaagatgctatagaattatataaaaataaattaatgggagactgcatatttgataaatataaagattttccattacttttaaaaataataagtgcagaaaaaaaattgtccatacaggtacacccaggtgaaaaagactttttagatttaaaggaaagccctaaaaaagaagcctggtatgttatggaagctaaagtgggttcctatataattttaggtagtaaaataaaagataaaactgtacttaaacaggttatagacgatggcacagttgaagattatttatataaagtaccagtaaagaagggggatatattttatatagatagtggaatgattcatgctataggtaaaggagttacattaattgaaattcaacagaacagcgatacaacttatagattatatgattataatagaggaagaaaactagatttagaaaaaggaatgaattgtgtaaatttagatattaaacctaataaaaaatcaggcttaaaagtgcaattgaaaaattgcaataaaacttattgctttttgtcagaggcttttgctatggaaaaatatgaagtatattattttttaaaagaaaaaagtgataaagaaagattttttatttttacctgtgtagatggacaaggacaaattaattatggtgaaggacgacaaaatctaagtaggggagatagtatactcatacctgcttatatgggagattatacattaagaggtaacatgaacttattgaaattttatataccagatatagaaaagtccattaatagtattgtaaatataataaaatgt

SEQ ID NO: 16582 - DNA, 2385 bp, Clostridium botulinum
gtgagatatgtgaatattaaggattatataaaagaaaatgtattaatatttgatggtgccatgggaacaatgcttcaaaaattagggttaaagatttcagatttgccagaagaattaaatatattagaacctgaaaaaataataaacatacatagaaaatatatagaagcaggagcaaaggttataacaaccaatacctttggagcaaatgaaataaagcttaaacaaagtaagttttctttagaaagcattatagataaagcaatagataacgtgaaaaaagcagggaaaaacaaagaaatacttatagcattagatataggtccaataggacagcttttagaacctatgggaacattaaaatttgaagaagcctatgaaatttttaaaagacaaattgtacaaggacaaaaaagtggggcagatataattttaatagaaacaatgacggatctttatgaagctaaagctgctattttggcagcaaaagaaaatacaaatctccctgtattttgcactatgacctttgaaaaaaataagagaacttttacaggatgcactccattatctatggttcttactttagagggactaggggtagatgctttaggtgtcaattgttccctagggccaaatgaattaggagatattgtagatgaaataataaaatattcaagtatacctataatggttcagcctaatgcaggtcttccaactattaaagcgggtagaactatttataatattgagcctaaagaatttgcagattttcaaaggagtattgtagaaaagggagtaaggatagtaggaggctgttgtggaactacagatgaatttataagagaaattgtatatagtctaaaggatataaagataaaaaagttaaaagaaaacaatatttatggagtatgttcttctacaaaatcagttttaatagaaggagttaagataataggagaaagaattaatccaacgggtaaaaaattatttaaagaagcccttagaaataatgatacagattatatattaaaagaagcaataagtcaggttgaatgtggtgcagatatattagatgtaaatgtgggacttccagaaatagatgaagaagaaacaatgaaaaaagttataaaagagattcaatctataattgatacacctcttcaaatagattctaataatcctaaggttatagaaaaagcattaagagtatataatggaaaggctatagttaattctgtaaatggagaagagaaaatactagacagcgtattaccattaataaaaaaatatggagcttctgttgttggattaactctagatgataaaggtatacctaaaaaagctgaagaaagattaaaaatagctgagaaaatagttaataaagcattagattatggtataaaaagaaaagatatatttatagattgtttagttttaactgcatcagcacaacaagaagatgttagagaaactcttaaagcggtgactttagttaaagaaaaactaaatgtgaaaacaatactaggagtatctaatatatcctttggattacctaatagagaacttataaataaaacttttttagctatgagtcttcaatcaggattagatttacctatattaaatcctaataataaagaaatgataaatattataaatgcctataaggttttaaataatgaggacaagagagctgcaaattatatagaaaggtataccaatgaaatatcaaatagtagagaagtaaaaatcccaaaaaacgatttaactttaaaggaaatagttatgaaaggaataaaagaggaatcatatagtaagacaaaggatcttcttaaagatagaggtgaactttcaataataaatgaagaactaattcctgctctagatgaagttggtgataaatatgaaaaaggtataatatttttaccacagctaattcaatctgcggaaacggttaaaaaagcttttacagctataaaagaaaaacttagagaagataattcaccaaaaataaataaaggtaaaatattaatggcaactgttaaaggagatattcatgatataggaaaaaatatagtgaaggttatactagaaaactatggatttgatattatagatttaggtaaggatgttgaagcagaaaaaatagtagaagaagtaaagaaaaacaatataaaattagtaggactaagtgcgttgatgactactacagtaaatagtatgagagataccataaagattttaaaagaaagtggtatggattgtaaagtttttgttggtggagcagtgcttaatgaggaatatgcaaaaatgataaatgcggattattatgctaaagatgcaaaggaagcagtggatatagctaaaggattctttggaggattt

SEQ ID NO: 16583 - DNA, 996 bp, Clostridium botulinum
atggaagataataaaaaggttatatttagtggaattcaaccttccggaaatttaactttaggtaattatttaggtgcattgaaaaactgggttaagctacaagatgaatatgattgttactattgcgtagtagacttacatgctataacagtaagacaagaacctaaagatttaagaagaagaactttagaggtattagcaatatatatagcttcaggtatagatcctgataaaaatactatatttatacaatcacatgtacctactcattgtgaagctgggtggcttttaaactgtaacacatatataggagaattatttagaatgactcagtataaagataaatctcaacgctatggggaatctgtaagtgcagggttattaacttatccagttctaatggctgcggatatattattatataatacagatttggtaccagtaggtaaagaccaaaaacaacatttagaaataacaagagacttagctcaaagatttaataatttatatagtccaacttttaaaatgccagatccatatataccagaagctggagctaaaataatggatcttcaagatccaactaaaaaaatgtctaagtcatcagataatgaaaattcatatatattaattatggatccaccagatgctataagaagaaaaattaataggtgtgtaacagatagtttaggaatagttaaatatacagatgatcagccaggaattaaaaatttaatgacaatattaagtacaataactggtatggctatggaagatatagaaaagaaatatgaaggaaaaggatatgctcaattcaagaatgatgtagcagaagctataatttcagaattggaaccaattcaaaacaaggtaaatgaattattaactaataaagaatacttggaatctatatataaagaaggagcggaaaaagcttataaagtatcctataaaatgctaagaaaaatgcaaaaaaagataggatttataccaagg

SEQ ID NO: 16584 - DNA, 1314 bp, Clostridium botulinum
atgaaaaaaacatcatcaaaagatttcatagttattgggtttgcacttttcgcaatgttctttggggcaggaaacttaatattcccgccttttattggaaatttagtaggggacaaggccccaatagccattattggttttttgattactggagtaggtctaccattgagcgctataatagcctgtgctaaaatcaatggtacattttcagatatatcaggaagagtaggaaaatactttagcgttatatctacaacagctttgatattagctataggacctatgctttgtataccaagaacagcagctacaacttacgaattaacagtacagccattatttccatcaataggtccattagtatcagctataatttactttgctatttgtttggcttttgtattaagaccatcaggaatagttgacagtataggtaaagttttaacaccctgtttattgcttatgttagcaattataataataaagggattaatttcaccactaggtcctgttgttagtactaattttaaaggagtattttcaacatctttacttgaaggttatcaaacaatggatactatgggttcagtaatatatgcatcaataattttagcatctgtaagaagtaaggggtatacagatgaaaaggatgtaataagtgttactataaaatcaggcatagttgctatagcaggtttgggattggtttatggtggacttatggttttaggaagtcaaacttcacaaataatttctggtgaagaaataggaagaactgctttagttattgaaatagttaaaagagatttaggtaatataggaatagttatattaggaatagctgttggacttgcatgtcttactacagctattggacttttatctacaggagcagaataccttagcaaattaactaaaggtaaagtatcctataatgcttttgcaattattataagtgtggtaagtggaatacttggaataggtggagttgataagataatcaaattttcagttccaatattacaaattttatatccaatagtaattgtattaatagtaataactttattaggtaaagttgttaaaaatgatagtgtagtaaaatttactgtttatatcacattaatagtaagtatgatagatacaatgaatacattaacaggtgagaaagtagcttttataaaaagtattttaggaatcatacctctttctagtgttggttttgcatggctaattccagcaattatagcattcataatagggacaatagcttttggaaataaacaagaaaaaaatccacaagcagcggatttt

SEQ ID NO: 16585 - DNA, 882 bp, Clostridium botulinum
atgaggtttgttatagttacaggactatcaggagcaggaaaaactcaggccataagaagtttagaggatttaggttttttttgtgtagataatttaccaccaacattaataccaaagtttgcggaagcctgttatcaaacagagggtaagattaaaaaaatagctttagttatagatataagaggtggaaaatttttcgatgatttattcgaaagtttaaaatatttaaaagaagagggatataaatacgaaattttattcttagatgcttctgacgaagttcttataaaaaggtttaaagaatctagaagaaaacatcccttatcaccagatggaagaattttaaatggtatatctatggaaagaaataggttgcgtgaagtaaaggatagggcggataatataataaatacttcagaacttgcaactagagaacttagagaagctataaatgaaatatatggagaacatgatcaaatagaaaatcaacttattataactgtattgtcttttggatttaagcatggaattcctttagattctgatttagtatttgacgtaagatttttacctaatccttactatataaaggaacttaaacaatattcaggtaaagacaaaaaagtaagtgattatgtaatgagctttgatgtaacaaataagtttgtaaatagattagagaatatgttggactttttaataccaaattattttaaagaaggtaaaagacaattaataatttctataggttgcactggaggtagacatcgttcagtagctattgctaatgccatatatgaaggattaaaatcaaagggacataaagtaaacatagatcatagagatataaatgaagatattcataaaggcggtaagaagcta

SEQ ID NO: 16586 - DNA, 114 bp, Clostridium botulinum
ttgatgaaagtaagaccatcagttaaacctatatgcgaaaaatgcaaggttataagaagaaaaggtaaagtaatggttatttgtgaaaatcctaagcataaacaaaaacaaggc

SEQ ID NO: 16587 - DNA, 813 bp, Clostridium botulinum
ttgggatttggaggcaattctatgaaaaaatatagaatatttgatgctcatgcccattatgatgatgaagcttttgatgaagatagaagtgaagttataaaagaacttgaagattttggtatattaggagtattaaattgtggttcttctttagatacttctaaaacatcagtagaattgagcaacaaatataatttcttttatgcagcagtaggcgtgcatccagaaaatgcagaagaaattaatgaaaaaaccttaaataaaatagaagcactatcagaaaataaaaaagtaaaagctataggagaaatagggctagattattattatgaagaaaatcctaagcgggatattcaaataaaagcttttaaaaagcaaatggaattagcagaaaagttaaacttgcctgtagttatacacgatagagatgcacataaagatacattagatattataaaacaatttcctaatataaaaggagaagtgcattgtttttcagggagtgtagagtttgctaagcaatgtgtagatttaggatattatataggggttacaggagtggtcacttttaaaaatgctaaaaaaatagtagaagttataaaaagtgttccaatggatagaatcttagttgaaactgattgcccatatatggctcctactcctttaagaggtaaaaggaacagatctgagtatataaaatatatggtagataagatagcagaaataaaagaaataagttctgaagaagtaacttcacaaatactaattaatataaaagatctatttaatatagatgttataaaaaataaagat

SEQ ID NO: 16588 - DNA, 900 bp, Clostridium botulinum
gtgttaagtaattatgaaaagatagctttaaaaatcatacttataaggagtgatttaatgcaagatataaagagttatacaattttaaataacggagtaaagatgccttggcttggatttggtacttataaggtggaaaatggggacacggttattcaatcagtaaaggaagcccttaaaattggatatggtcatatagatactgcttcttattatggaaacgaagaaggagttggcactgcaataaaagaaagcagaattcctagaaaagatatatttttagtaagcaaagtttggaattcagagcagggttatgataaaactttaaaatcctttgaagattctataaaaaaacttggcacagattatcttgatttatatttaattcattggcctcaacctttaagcaaagaaacgtggaaggccttagaaaaactttataaagaaggacgtgtaaaagctattggagtaagcaattttttagttgatcacttaaagtggttattagaagatgccgaaatcatgccaatagtaaatcaggtggaatttcatcctcaacttattcaaaaggacttaatagagttctgcagcaaaaataatatacaattagaagcatggtctccattaatgagaggtaaagtattcgaaatcgaacttttacaggatattgctcgaaaatacggaaaaacaatatctcaaatcgttttaagatgggatctacaaatgggtgtggttactattcctaaatcaataaacccatcaagaataaaagaaaatgcagatatattcgactttgaaataagtaaagaagatatggataaaattcagcaactagataaaggtttaagggtgggctcagaccctaataaagtttatccatgtcaaagtatatctaataaa

SEQ ID NO: 16589 - DNA, 1755 bp, Clostridium botulinum
atgcaaaagactaaaatgatatttacaataggtcctgcaagctcgacagaagaaattgtatcaaaattaatagaagctggaatgagtgtatcaagacacaatttttctcacggatcacatccagaacacaaagaaagaatgatgatgattaagaaattaagagaaaaacataacaaacacatagctattatgttagacaccaaaggaccagaaataagaacaggtaatttttcagtggataaagtggaattaaaagaaggggcagagtttacaatatattgtagagaagacatagtaggtgatgaaacaaaatgttctattacttatgatgaactatataaagatgtagttaaaggaaataaaatactgatagatgatggattagtagagctagaggttcagtcagtagaagataataaaatccatacagtagttaaaaattcaggaactgtttcaaatcataagggagtaaatgttccaggagtttcagtatcacttccagcagttactgaaaaagatatagaagatttaaaatttggatgtgaagtaggagtagatttaataagtgcatcttttataagaaaagcctctgatgtattagctataagaaaaatattggaagaaaatggtggaaatgaaatacagataatctctaagatagaaaatcaagagggcgttgacaatatagatgaaataataaaattttctgatggaataatggtagctagaggagatatgggagtcgaaattcctatagaagaagttccaatagtacaaaaaagaataatagaaaaatgtaataaagcaggtaagcctgtaattacagcaactcaaatgttagattctatgatgagaaaccctagaccaacaagagctgaagcctcagacatagccaatgcaatatttgatggaacagacgccataatgttaagcggagaatcagcaaatggaaaatatccggtagaagctgcaagaactatgtctagaatagctaaaacagcagaagcaaaattaaattatgatgctatattaaataaaatgagagaaagtcatatattaaatgttcctaatgctataagcttatcagcgtgtactacagcatcagaattaaatgctacagctataatcacagcaactcaaagtgggcatactgcaaaaatggtatcaaaatatagaccacaatgccctattatagcagtaacaccaaatgaaatagttgctagaaagttagcattaaattgtggagtagtaccactattaacggaaacatttaattctacagatgagcttatagataaatcagttaataaatctttagaagaaggatatgttaaaaatggcgacttagttgttatagcaggaggaataccagtgtcttactcaggaacaactaatatgttaaaagttcacatagtaggagatatcttagcccaaggaagaggttcaggaactagaccaacttatgggaatgtaaagatagtaaacaatccttcagaagcagaaaatatagttgaaagagatgacatattagtagttaaaaatttagatagaagatatatgactattttagatagagtatcaggcatagtggctgaagaaggtggaataacatcacacttagctatagaatgcatagcaagggatattccatttatatgtaatgcaggtggagctatggatattttaaaaacaggaacatatgtaacacttgatacagtaagaggaatagtatacaacggaagagctaatatagtt

SEQ ID NO: 16590 - DNA, 666 bp, Clostridium botulinum
gtgtgttctatgaagataacatcaatggatattacgaataagcaattcaaaaaatccatgcgaggatataattgtgatgaagtagatgaatttttggataaaatatcagatgattatgaagagttatataaagataattcatctttaagagaaagagtaaatacattagaagaaaggttaaaccattatgataaaatggaagaaactatacagaacactcttttgctagcacaaaatgcggcagagcaagcaaaggaaacagctcaaaaagaagcagatttaataataaaaaatgctaatgattctgctaaaagagttatagaaaaatctcaagaagatgttatgaaaataaatgatgaattccaatatacaaaacaagaatttaataaatttagaaatagatataaaacatttatgaaaactcaaatggacatgttttatgaaatggaaaaagaatttatgaagaactataatcttggtactggtatagaagaaaagtttgtacctgaaaaagaaatcgaagttcaggatagtagagctttagcaaatgagatagataattcagaaactagagaacatagttttaaagtttcagatattactatagataattcttctttaaacaaaaataacaatgaaataaagagtttttatataaaagaggat

SEQ ID NO: 16591 - DNA, 999 bp, Clostridium botulinum
atgatgaaacacaatataactttaataccaggagatggtataggaccagaagtaactgaagctgcaaggaaagttatagatgcagtaggagcagatattaattggcatgtagtagaggcgggggaaaaagttttagacaaatataaaaccccccttccaaactatgttttagatagtataaaggagactaaagtagcattgaagggtccagtaactactcctgtaggaaagggatttagaagtgttaatgttactttaagaaaaagcttaaatttatatgcaaatataagacctgtaaagagttataaaggaataaaatctagatatgaaaatgtggatttaataattgtacgggaaaacacagaagatttatatgcaggaattgagcatatgataggtgatgatatagcagaaagtataaaggtaattactaaaaaggctagtgatagaatagtagattatgcttttgatatggcaagaaaagaaaatagaaataaggtaactgcagtgcataaagctaacataatgaaattatcagatggattatttttaaattgtgcaaaggaagttgctagtaaaaataaggatattgattttgaagatgtaatagtagatgctatggccatgaaattagttttaaatccagaaaaatatgatgttttagtaatgcctaatttatatggtgatattttatcagacatggcagcaggtttagttgggggattaggattacttccaggagctaatataggatatgaaggagctgtgtttgaagcagcccatggtgcagcacctgatattgcaggaaaaaataaagctaatccaacagcttgtatattaagtggtgccatgatgctaaactatattggtgaaaatgaaaaagctaaaaaaatagaaaatgctatagaaaaagtatttgtagaaggaaaatgtcttacagaggatttaggcggaagttctacaacagaagaatttacaaaggcaattatagagaatctt

SEQ ID NO: 16592 - DNA, 1395 bp, Clostridium botulinum
atgaaaaagattattgctgttacgggatgtcctacaggaatagctcatacatttatggcagaagaagcattaaagaaagcagctaaagaattaggagtagacataaaagtagaaactaatggtgctgttggagtagaaaatgaattaacagaaaaggatatagaagaagcaattggagtaatagtcgcatcagataaagatgttagagctgatagatttacaggaagaccaactatagaaacttcagtagcagatggaattcgtaaacctaaagagttaattcaagctatattagatggaaaggctcctataaaaggaggagcagcagctaaaaaaactataaagaaaagcttagaagaagttccaggtaaaaaatctgtaactagagatatatataaacacttaatgaatggtgtatctcatatgttacctttcgttgtagcaggtggtgtacttatagctatatctttcctatggggaatatattcttttgagccaaaatcagcacaatataatcctatagcagctatgattaagggaataggtggagaagcatttgcaataatagttccaatatttacagcttatattgcagattctatttctggaagaccaggtatggtagcgggatttgttggtggacttatagcaaatactacaggatcaggatttttaggaggtatcattgcaggtttcttcgctggatatttgatgctttattctaaaaaactactttcaggattaccaaaacaatttgaaggtttaaaatcaatatttatattaccaataatcggaatattaataacaggcgtattaatgacactattaggtgaaccagtggcagctttaaataagggtgttatggcatggcttgcatcgcttgaacaagcaaatccaattttattaggaataattataggttgtatgtctgcctttgactttggtggaccagtaaataaagctgcttatttaacaggtacaatgctacttgcacaaggaaattattacttcatggctggtgtttcagcagcttgtataacaccgccacttataatcgccttagcaacaacattcttcaaaaatagatttgacgaagaagaaagagcagcaggtttagttaattacatcttaggctgcactcatataacagagggagcaattccttttgcagctaaagatccattaagggttattccaatattaatggttggttcttctgtatcttctgtattaacttatttaatgaagattcaagtaccagctcctcatggtggatttttaatactaccattagttagtaaaccattactatgggtagctgcgatattagtagggtcaacagtaggcgcaatattatatggaatatatagaggacatacacaaaagaaagctcaa

SEQ ID NO: 16593 - DNA, 3432 bp, Clostridium botulinum
atgaacaagtttaaaagagtattagtggcaaatagaggtgaaatcgcaataagagtgtttagagcatgtcatgaattaggcattagaactgttgcgatatattcagaagaagataaattctcactatttagaaccaaggcagatgaagcatatcttataggaaaaaataaaggtcctatagatgcttatttgaatatcgaggaaataatacaattggctttaaaaaaaggggtagatgcgatacatccaggttatggcttcttggcagagaattctgaatttgcaagaaaatgtagagaagcagggatagagtttatagggcctacagcggaaatgatggaaaagctaggagataaaataaagtctaaaatagttgcagaaaaagcaggggtacctactatacctggagttcaaaaaccaattaaatcagagaaagaagctttagaatttgcaagatactgtggatatccaataatgctcaaggcagctgctggtggtggcggtagagggatgagaatagttagaacagaagaagaattaatatcttcctttaaaagtgcaaaaaatgaagctaaaaaggcttttggtatagatgatatatttatagaaaaatatttagaaaatcctaaacatatagaagttcaaatattaggagataagcatggaaatatagtgcatctatatgaaagggactgttctatacaaagaagacatcaaaaggttatagaatttacaccagcttttgccctaccaaagaaaaagagagaagaaatatgtaatgatgctttaaaaatagctaaaactgtagggtatagaagtgcaggtacattagaatttttagtagatactacaggaaatcactattttatagaaatgaatccaagaatacaggtagaacatactgttacagaaatgattacaggaattgatattgttcaaagtcaaattttaatagcagagggatacaaattagattcagaagaagtaggcataaaatctcaagaatccatacaaacaagaggatatgctattcagtgtagggtaactacagaagatccatctaataattttgcaccagatacagggaaaatagaagattatagaacaggttcaggatttggtattagattagatggtgggaatggttttacaggttctgttataagcccatattatgatagtttattagttaaaactacatcctggtctagaacatttaacgatgctataagaaagtccataagagctataaaagaatttaaaatagatggtgttaaaactaacataggatttttaataaatgttttaaatcatgaacaatttagaaaaggacaatgtgatactaattttatagaaaagaatccagaattatttgatataacatcaaaaaccgatgatgaagttagaatattaaaattcataggtgaaaaggtagtaaatgaaacccatggtataaagaaagattttgatgtgcctacaataccaatagtagatgaaggattaagtttaaaaggaactaaacaaatattagacgaaaaaggtccagaggggttagtgagttggataaaaactcaaaataagcttcttttgacagacacaactatgagagatgctcatcaatctcttatggccacaagaatgagaagtgtagatatgtttaaaatagctaaggctcaatcagtgcttggaaaagatttattttccatggaaatgtggggaggagcaacctttgatgtagcttatagatttttaaaagaatctccttggactagactggaagagctaagaaaatctataccgaatgtattgtttcaaatgctaataagaggggctaacgcggttggctataaaaattatccagacaatgttataagaaaatttataaagcagtctgcagattcaggtatagatgtatttagaatatttgattccttaaactggttaaagggaatggaagtagccacagatgaggttttaaaacaaaataaagtagcagaaacttgtatgtgttatacaggagatatattagaagaatatagagataaatatagcttgcaatattatgtggatttagcaaaagatatagaaaaaacaggagcacatatacttggaataaaagatatgtcagctttattaaaaccatatgctgcagttaagcttataaaggcattaaaaaatgaaatatctatcccaatacatcttcatactcatgatactacaggtaatggtgtggctacagtacttatggcagcccatgcaggagttgatattgtagatactgcgtttaatagtatgtcaggccttacaagtcaaccagccttaaattccatagtagcagcattagaaaacacagatagggaaacaggactagatttaacagatatgcagaaattatcagactattggagtgctgtaagaccggtatatagtcaattcgagtcaggattaaaatcaggttctgcagaaatatataaatacgaaatacctggaggacaatattctaatttaaaaccacaggtagaaagctttggattaggtcataaatttgaagaagtaaaagaaatgtataaaaaagttaatgaaatgcttggtgatattataaaggttactccatcttcaaaggtggttggagacttggctatctttatggtaaaaaatgatctaacacctgaaaatatatatgaaaaagctgaaaaaatggctttcccagattcagctgtatcatattttaaaggaatgatgggtcaaccaatgggtggtttcccagaaaaattgcagaagttagttttaaaaggggaagaccctataacttgtagaccaggagagatgttgcctccagaagattttgaaaaaataagagaacatttaaaggaaaagcatgatttagatgcaacagaaaatgatattataagttatgcattatatccagaggtttttgataagtatttagactttttaaaggaatacggggatttaagtcatatgggtagtgatgtattcttccatggattatatgaaggagaaacagctgaaatagagctacaagaaggaaaaacatttatagttcaattatctgaaataggaaaagtagattcagaggggaatagagcagtagtttttgaaataaatgggaatagaagagaaataagaataaaagataaatctagtttaatggcgcaaaatataacttctaatagcacaaagatggcagatcctgcaaataaaaaacatataggatctagtataccaggtacagtaataaaagttttagtaaataagggagatgaaataaaagaaggagatagcttgattgtaatagaagctatgaaaatggaaactaatatagtggctagtttgtcaggggtagtaggaagtttgttagtaaaagaaggagatcaagttaagtcagggcaactacttttagaattagaa

SEQ ID NO: 16594 - DNA, 438 bp, Clostridium botulinum
atgaaacttcacgaattgaaagcagctgaaggtgcaaataaagcatcaaaaagagtaggtagaggaacaggttctggattaggcaaaacaagcggaagaggtcaaaacgggcaaaactctagaagcggtggtggagtaagaccaggctttgaaggtggtcaaatgccgttatatagaagacttccaaaaagaggtttcaaaaatatattcgctaaagaatatgcagcaataaatcttgatagattaaattgttttgaagatggaacagttgtaactccagaacttctagttgaaaaaagagtagtaaaaaaagttaaagacggagttaaaattttaggaaatggtaatatagaaaaaaaattaactgttaaagcagcaaaattctctaaatcagctattgaaaagatcgaagcagcaggaggaaaagttgaggtgata

SEQ ID NO: 16595 - DNA, 951 bp, Clostridium botulinum
atgagtactattatatatgctgtattattcagttttttattatctacaattactagtttgtttcttatcccattatttaaaaaattaaatttaggacaaagcattaaaaatggaattccgataagccataaaaagaaggctggaactcctacatttggtggtattatttttattttttcatcaataataacaatgttatttatcataaaaaattataataaagaactcttgcttgtaatatcttcacttattgcttttggactgataggttttattgatgatactttaaagaaaatacataaaaaaaatgaaggattaacttcaaaaggaaaaatgattttattactttttgtatcaagtatttttgccatttactcatactataatccttcgattggttcaataattatgtttccatttactaaaaaactatttgacttaagaattttatacataccctttattattttttattatgtatcaacaactaatgcattaaacttaacagacggtttggacggacttgctacttctataacactacttgtagtaacattttttatttttctatcttttggaatggggcattatacattatcaattagttgcggttgtatagcaggggctttattaggattcttacgatataattgttatcccgctaaaataattatgggggatactggttctttagcccttggtggtgctattgcaacaatagctatgatactcaaaaacccatttattgttattattgttggaggaatttatgttattgaagcattatcatcattaattcaaatagtattttttaaactatttggtaaacgtatttttaaaatggctcctattcatcactcacttgaattacatggctggcatgaaaccaagatagtttcagtattttctataataacaacaattttatgtcttattggatttctatctatg

SEQ ID NO: 16596 - DNA, 1206 bp, Clostridium botulinum
atgtatattcaaaatcaatatcaaaacttatgcaatctacttatgtccggatgtataccacagcctataagagacggagctggtgacactgatataggaccacgcgatattcttcgagatctcgaaaatcctgacatgcttgttccgccttccacggataccggcttgattcctaatctaaaattttctttttctgatactaatatgacaataagaccgggtggatggtctcgagagattactgttagggaactaccagtagcgaccacaatggcaggagttaatatgcgattgacgccaggtggcgtgcgtgaggttcactggcatcagcagtcagaatggtcctatatgctgaaagggcgtgcccgtataacagcggtagatgatcgtgggcgaaattttattgccgatattggtcctggtgatctttggttctttcccccacttttcccacattccattcaaggtttggaagagggctgcgaatttttgcttcttttcgacgatggaaacttttctgatctgcgaacattctctctctccgaatttttcgcccattatcccaaggatgtgctggcggctaattttggtgtgaccaagaactgcttcaacagtcttccagaaggtcaagtatatatttatcaggatactatcccgggtcctttggaaagtgaagcaatcgaatccccatatgggactattccccaaagctacaaacatagcttattagcgcaaaaaccaatgacaacatctggtgggagcgtacgtattgcagatacttctaactttccagttgccaaaaccaccgctgcggctttggtggagattaaacccggtggaatgagagaaattcattggcatcctaacgacgagtttcaatatttccttaccggacagtcacgcatgacagtattcgcggataccggtgcttctcgtacatttgattatagagctggtgatgtgggttatgtaccaactggctatgggcattatgttcaaaatatcggtaatgaaacggtgtggtttttagaagcatttaggagcgatcgatttaggagcatatcactaagccaaatgatggctattacacctaagcagcttattacaagtaatttgaatgtgggacctggatttttaaatgcgttgagtaggagtaagttccaatgctcagttggtccatgtttccaccagacagaatgttcaaac

SEQ ID NO: 16597 - DNA, 1017 bp, Clostridium botulinum
atgcgacaaaaattagaagagattaaaaatagtgcaataaatgaattaaaaacaactttaagtaaagatcaattagaagctataagagtaaaatatttaggaaaaaagggtgaactcacacaaatattaagaggtatgggagctttatctcaagaggaaagacctattgtaggtaaagttgctaatgaagtaagatcatatatagaagaaactataaaagaagctttctctgatataaaaaataaagaaaaatctataagattagaaaatgaaactatagacataactatgccaggaaaaaaacaagcagtaggaaaaagacatcctctagatttaacattagaaagtatgaaagatatatttatatccatgggatttacaattgaggaaggtccagaagttgaacttgataagtataattttgaagcattgaatataccaaagaatcatccagcaagaggagaacaagatactttttatataaatgataatttggtcttgagaactcaaacatctccaatacaaataagaaccatggaaaatcaaaaacctcctattaagatgatagctccgggaaaagtttatcgttctgattcagtggatgctactcattcacctatattttatcaaatggaagggttagtagtagataagggaataactttttcagatttaaaaggtacattagagttatttgcaaaaagaatgttcggggataaggttaaaactaagtttagaccacatcatttcccatttacagaaccttcagcagaaatggatgctacatgctttgtatgcaatggagagggctgtaaagtgtgtaaaggtagtggttggattgaacttttaggttgtggaatggttcatccacaagttcttagaaactgtaatatagatccagaagtttatagtggatttgcatttggattcggagtagatagaatggttatgatgaaatatggcatagatgatataaggcttttatatgaaagtgatatgagatttttaaatcaattt

SEQ ID NO: 16598 - DNA, 513 bp, Clostridium botulinum
atgaacttaagattagctaaggaaaaagatttaaattttataatagaaatgataacaatcgtaaaaaagcatatgatagaaaacgataatgatcaatgggatgaagaatatccagatatggagaccttaagaagggatataataaatgaagatttatatactataatagaagaaaatgactgtatggctattatagcaataaataaagatcaagctcctgaatataaaaatgttcagtggaaactagatgataaatctcctttggtagtacatagattagcggtgaacccaaaatttcaaggaaagggtgtagccaaaaccattatgagttttgtagatgaaaaggccaaagaacaaaattgtaaatctataaggttagatacctattcaaaaaataaagtagcaataaacctttatgaaagattaggttactcaatagtaggagaagtttattttagaggtaaagaattgccctttaaatgttttgaaaaaattgtagaaaattttgtgtgc

SEQ ID NO: 16599 - DNA, 900 bp, Clostridium botulinum
atggaggaatggaaaatgaataaattagaaataaaaaatttaaataaaagatttggagtaaaaaaggctactaatgatataacaataactttagaaaatggagtttatggattattaggacctaatggagcaggaaaaactactttgatgaaacaaataacaactttattaacaccagatagcggagaaataattttcaatgggaaaaatgttaaagaaaatgaagatgaatatagaggatatataggatacctaccacaggatttcgaagcatataagaatttttcagctaaagaatttttaagttatatggctgcattaaaaggattagataaaggacaagctaaggacaaaattgatgaacttttacacttagttggattatatgatgttagaaataaaaaagtaggaaaattctcaggaggtatgaaaagaagagttggaattgcacaggttttattaaatgatcccaaaataatggtattagatgaacctacagcagggttggatccacaagaaagaagcagatttagaaatcttatagcagatatatcaagagataaaataataattttatctactcacataatttcagatattgaatctgtagctaaagaaacaataatgataaaaaatggtgcacttttaatgcaaggaactcatgaagatatattaggaggtatgaaaaatagggtatatttaataagaactaaagatgaaagagaaattgcacaaatacaacaaaaatataaaatagttaatttccaaaggggaatagaccatactgaagttagagttgtgtcagaaacaatacctagttttaaggatgtagatattgctactccaaaatttgaggatgtatatatgttctactttgatttagaagatactaaggaggtt

SEQ ID NO: 16600 - DNA, 894 bp, Clostridium botulinum
atgaaaggaatatacataaaagaggcaaagcatggtgaaaaaatagattctcaatttatgatactaaagaaaatatataaagatggagatagcattatagcttatatgggagatagaactggagacatcaaagttaaaattttagataaaaaagacgttttagatgcaggggatgttatagaatgtagttttatattttctaataacagtgaaatattaaattttaaaaaaatagatgaatttttattggaagattttttacctactgtagatagacctatagaagaaataatgaatgaaatagaacaaatatcaaaagatgaattcaagagcaaagagtgtatagaactaaataattatttttttaaagatcaaaaatttttagataaatttaaaaaaggaataggcggggtaagtcagcatcataattatataggcggattagcagaacatacattgaatgtaatgtatttagctaaaatgttatgttatagatataatgttaaaaatagggaattaactatattatcagccaaacttcatgatatagggaaaacagaggaactaagtactaatggtccctttacttacacactgaagggagagatggaaggacatatagttataggtgcagaaatgcttcagagagcattcaatgataatatagaagcatatagtgaagatttcaaacaaagagtaaaagcctgcataattcagcatcatggaaaagtagaatatggctctccaagatctccaaagttagaagaaagttatgtggttcattatgcggattatatagatgctaatatgaataaaatagctatagtaaaaaaggatgtagaggaaaatacttggagtcaatatgacaggagaattgaaggaaagatttatgta

SEQ ID NO: 16601 - DNA, 870 bp, Clostridium botulinum
gtgaaaattttgtataagttttgggataaagttttttattacataataaaattttttacatttctatctatagtaattttgtctttaatacttatatttatattaaaggagagtctaggtatatttaaaaatatatcctttatagattttataactaaaagtacatgggaacctttaggggagtcacctaagttatctatattgagctttataatgtctactatatatgtaacttttttagcagtaataatagctctccctatagccataggtacttctatatttttagctaatatagcttcagaaagattgagaaatattttaaaacctataatagatatgttgtcaggtattccatctgtaatatatggtttcattggtctttctgtagttgtaaaattttttgagagaaaacttggtgtttcatctggagaatgtattttaagtgcagctatagtattagccattatgatacttccctttataatatctaattgtactgatactatgataaaagtttatgataaatattttatttattcaaaatctctaggtatatcaaaatggtatatgatgaataatttaataattcctgcatctaaaaaagctatattagcctctgtaattttagcagtaggaagaggtatgggtgagactatggcagttatgatggttataggaaatagtccgttaatgccaaagctattaggtaaaggagaaacaataccttccttaatagccttagagatgggctcggctcaggtaggtagcatgcattataatggactttttgcatcaggattaatacttatgataatgctctttattataaattttatattttatatgctaaagaaaaatatgcagcaa

SEQ ID NO: 16602 - DNA, 1011 bp, Clostridium botulinum
atgaagaaaaagggttattcagtttcacgtggtctaactattattttgctacttaccattattttgttagttgtggcagtaataagtgtaaactcaggtaagatgaatctctctccttcggaggtttttaatgttcttattggaagaggtacagataaacaaaatcttatagtatataattttcgtcttccccgtattgtattaaccatgcttgtaggcattggtatgggaacagctggctgtgtaatgcagagtttacttcgcaatgatatggctagtcctggaactttgggaataagttctgggtcagggttatttgtattattgttcatagttatttttaaggtagacagtgtatcttcagctattgctctcccgcttctggcctttgtaggtggaatgacagcagctatattgatatttttactttcctatagaagaggaaaaagtatatcacctacaggattaattttgacaggggtggccgttggaagtggatatagtgctgttactatgatgcttactttaaagctagatgaaaaacagatggattttgttcaaagatggagtgcaggaagtctttggggagacaattggacatatatttctattcttgcaccgtgggtgttgattctatttttatatgtattttataaatctcgtattttaaataccttaaatcttgggaatcaaactgcaaaaggattaggagtagcagtaaagcgtgaatttatagggttaactgtagcagctgttgctctatcatcaggtagtgtagctttaggtggaaacttcttttttgtaggaatgatttctccacatatggcaagaaagtttgtagggtcaaatcataaactattaattcctacagcatctttagtaggttcaataattattctattatcagacactattactagaaccataagttttggaagtgatattcctacaggaattgttattactgtattaagtacaccttacttcttatacctattagtaaagtcaaat

SEQ ID NO: 16603 - DNA, 1719 bp, Clostridium botulinum
atggattacaaaaaagtatataaagaatggttagataatgattatattgatgaagatataaaaaaagaattgaaggagataataaataatgaaaaggaaatagaagatagattttataaagaattagaatttggaactgcaggccttagaggaaaaatcggagcaggtacaaatagaatgaatatatacaatatatctaaggttactcagggattagcagattatataacagaaaaaggtgaagaatatataaataggggtgttgctatagcttttgattgcagacattattcaaaagaatttgctaaaactgcagccttagttttggctggtaatggaataaagagttatttatttgaagatttaagaccaaccccagaattatcttttgcagttagaaaattgaatacggctgcaggtatagttataactgcaagtcataatccaaaggattataatggttataaagtatattgggaagatggtgctcaggttttatctaaaatagcaaatggtattactgagaaaataaaatctattggtaaatttagtgatataaaaactataagtgaggaaaaagctttaaaaagtgggttattaaatatattaggagaagatatagattttgaatatatagaaagggttaaatctttaagtataagagaagatatcgataaggatataaaagttatttatacacctttaaatggaacaggaaatattcctgttagacgtgttttaaaagaaagagggtttactaatattatagtagttccagagcaggaaaaccctgatccagactttacaacagtaggatatccaaacccagaggatacaaaagcatttagatatgcagaaaacttaggaaaaaaagtagatgcagaattacttatagcaacagatcccgattgtgatagattagctatagaggttaaagataaaaatggtgagtatttagcctttaatggtaatcaaacaggagctattcttataaattatatagtatcaaatatgaaagagatgggtaaattacctaagggtgctgctatagttaaatccatagttactggggatttaggtaaagttattggagaagaatacggagtagaaacctatgaagcattaactggatttaaaaacatatgtggtaaaatacctaatttaaaagaagaaggtaaagaatttatattcggatatgaagaaagtataggttatgttacaggtacatttgttagagataaagatggagtaagttcaagtatgcttttatgtgaggcagcagcttattataaaactaagggtaaaacattaatagatgtgcttaatgaaatatatgaaaagcatggatattatagagaaaaacaaatatcactaatattagaagggatagagggtaaaaagagaatagatagaatgatggaatcatataggaaaagtttcccgaaggaaatagcaggagcaaagcttttaacttatatagattatcaagatagaatagaatacgatattataaaaaatgatagaaaaccatgtaaaatacctagatcaaatgtattaagatttttcttagatgatggcagttggtatgcagtaaggccatctggtacagaacctaaaataaaattatatgtatatacaaaaggtaaaagtattaaagctgctgaagaaaaaataaaagctatagaaaaggaagttttagataaacttaattcagtaaaa

SEQ ID NO: 16604 - DNA, 627 bp, Clostridium botulinum
aaaactatagttctagatgcaggtcatggaggcaaggactcaggtgcagtatcttctagggcaactggaaatatacacgaagcagatatagttcaaaaaattaccatcaagttgggaaacctgctaaaaaaagcaggatataatgttatttatactagagataaggtagataattataattatacctcagtaacacaaaatttagaagatagaataaatgtggctaatagtataaatgctgatttgtttatgagtatacatgctgattcttttgatataccatcagctaatggatatagcgctcattatagtagttatagacctaagctagataattcaggtgtatatatagaggatgatgtgtattatgatagaactccttgtgatgcagcattaaagagtaaagttttatcacaacttatagtaaatgagatgtcttctttaggaggatcaaatagaggaataagtgatcataatttatatgttacaaaaaatgctctaatgccttctgtacttgtagaatgtggatttgtttctaatgatgcagaagttagaaagttaaatggtgacacttatcaaaatcaaatagctcaaaaactttacaatgcagtaacaaaattgtttagt

SEQ ID NO: 16605 - DNA, 441 bp, Clostridium botulinum
atgttaatgcctaaaagagttaagcgtcgtaaagtacaacgtggcagaatgaagggtaaagctacaagaggtaacttcatagcatacggtgatttcggaatacaagcaactgaatgtggttggattacaagcaaccaaatagaagctgccagaatagctatcaacagatacgttaaaagaggaggaaaggtttggataaaaatcttcccagataagcctgtaacagaaaagccagcagaaacacgtatgggttctggtaaaggttcaccagaatactgggtagctgttgtaaaaccaggtagagttttatttgaaatctctggtgtaagtgaaacagttgcaagagaagctatgagacttgcttcacacaaactaccagttaaaactaagtttgtaacaagaagagattttgaagaaatgggtggtgaagtaaatgaaggc

SEQ ID NO: 16606 - DNA, 576 bp, Clostridium botulinum
atgaatagtaatatatattacagaaaaaagcactcatataagaatagaccctattattgtcctataaacaacatgtggttttacccatatatgtatatgaatccatatacatcttatatgcttaacccttttatgactccatatacggatccttatatgaatgcatattacggaaatatgtgctcttataaggataaagctcaatgtagggccactagagcttatggtgcagataattatgggttcacaaaggaaaatatatatccaaagcaatatgaaaaagaagtttatatgaaagaagaaaataagaaaagattttacgaggaagattctttagatgatatggtaatatttaatgaagatgataaaaatgaacatattaaaaaagaaaaaaaattagatagggcacaagagaaaatttatgattcagatttagaatctgcttttacagaaaaaaaggagattcagctagagaaaattaataaagaggcagaagtagatgaatcaaaagaaaaagaaccatatagaggaataaaaataaatatgagaaaggttcctttaaaggaaataacagat

SEQ ID NO: 16607 - DNA, 498 bp, Clostridium botulinum
gtggcaaaaaatagacaaataaaagaagctaaagttaaagaaatacaagaaaaaatggaaaaagctcaagctatagtatttgttaaatatcaaggtttaactgttgaagaagatactatgttaagaaaagagttaagagaagcaggtgttgaatataaagtttataaaaatactttatcaactatagctgctaaaaatttaggttacgaaagttgcgtaaatttattagaaggacctgtttcagtagcttttggctatgatgatgtaacagctccagctagagttcttaatgattttgctaagaaaaataagaacttagaactaaaaggtggaataatagatggagaattatatgatgtagataaaattaaaaaaatcgcatcaataccatcaaaagatattcttatcgcaaaactacttggaagtttcaaagctccagtatcaaattttgcatatttaattaatgctattaaagataagaaagaatcagaagaagct

SEQ ID NO: 16608 - DNA, 297 bp, Clostridium botulinum
gtgagggataaaatgtcagtttcaaaaaaagatgtagaatatgtagcagaacttgcaaggttagaatttaaagaggaagaaaaagatagttttgtaaatgacttaaacaaaatattaaactatatggaaaaattggatgaattaaataccgatgatgtggatatagtagtaaacccatattatattgaaaacaaatatagagaagataatgtagaaaagtctatggaattaaaagaagttatagataatgcaccagaaagcttagaagaatatgtaattgttcctaaagttatagat

SEQ ID NO: 16609 - DNA, 1362 bp, Clostridium botulinum
ttgtttgtggtgcctaaaggaggagccacaatggaaataatactagaacttataaatgagaaaaaatattcagaagctagagaagaacttttaaaactaaatagtgtagatatagctactttattagaagaagtagataataaaaaaaatatgttagttttatttagattactacctaaagatatagaaatagatgtattttcttatatgtccaatgacatgcaacaatatataatacaatctataactcatgaagaaatgactactataatagatcaattatattttgatgatgttattgatttattagaagaaatgcctgctaatatagttaaaaagatcttattaaatacagatgagaaaaaaagaaagcttataaaccagttcttgaaatatgaagaagattcagctggaagcataatgactatagagtttgtagatttgaaaaaagaaatgactgtagaacaggctatagaacgtataagaaaaatcggtgtagataagcaaactataaatacttgttatgttattgatagaaacagaaaattagagggaattatttccataagaagacttatattaagcaataaagacgtattaataaaagatattatgaaagaaaattatgtttctataaatacttttgatgatcaagaatatgttgctagtcaatttaaaaaatatgatttagtttctatgccagtagttgataaggagcatagattagttggtattataaccatagatgatatagttgatataatagatcaagaaaacacagaagattttcataagatggcagctatggaaccttcagaagaagaatatttaaaaacaggagtttttgaattagcaaaacataggataatttggcttttagtacttatgatatcagccacatttacaggaaatattattagaaaatctgaagatgtacttcaatctgtagttatacttgcatccttcataccaatgttgatggataccggtggaaactcaggctcacaatcttcaactttagttataagaggtttagcattaggagaaataaagcttaaagatatatttaaagttatgtggaaagagtttagggtgagtgtagttgtaggtatagctttatcagtagttaatttttttagagtatactttatagaaaaagtaagttttatggtatctatgacagtatgcataagtttatttttcacagtagtattggcaaaagttgtaggtggaatattacctatagttgctaagaaattaaggttagatccagctataatggctagcccattaattacaactatagtagatgcagtagcacttttaatttactttggtatagctaaaatattacttggaata

SEQ ID NO: 16610 - DNA, 189 bp, Clostridium botulinum
gtgtcaagaaaatgcgaaatatgtggtaaaggcgttgtttacggtgttcaatacagccattcacatcgtcaatctaaaagatcctttgctcctaacataaagagagttaaagcaatagttaatggaactccaaaaagagttcatgtttgtactagatgcctacgttcaggaaaggtacaacgtgctata

SEQ ID NO: 16611 - DNA, 442 bp, Clostridium botulinum
acactatctatggcaagagagggtgaaataaatcaaataaagaaaataacagggcgagataacattcggcagtttcttgcaaagttaggttttgtagagggagaaagtgttactgtcatatcagagatatcaggaaatatgataataaacgtaaaagattcaagaatagctattggtaaaagcatggctaatagaataattatttagagaggagaaattatttatgatgacgttaaaagatgttgaatgtggacaaaaagtaactgtagtaaaactccatggaaaaggagttgtaaagagaagaattatggatatgggaataaccaaaggtgttgaaatttttgttcgtaaattggcaccgttaggagacccaatagaagtaaatattagaaattatgaattaacacttcgtaaagccgatgcagaaatgatagaagtaaaa

SEQ ID NO: 16612 - DNA, 2499 bp, Clostridium botulinum
ttgaaaaataagggaggattgccagtgaaaaagttaaaaaaatctaatttgaaaaacaaaatgaaattaagggtattgtcatatataatgatcttaatgttcttaacaataaatactgaaatagtatttgctaaaactagttccaatttaaaaacagagaatataaaaattttattaaatgcccatagaaatttgggtataactgaattaaaatggaatacaatagaaggagcaaattatcagttaaaaagaggagaaaataaagacaagctacaagtaatagaagataatattactgaaaatacttttatagatgttaatagtatacaagataaagaatattattattgtatcattgccaaaaaggatgataaggagttatataaatcaaatgtaattcaagttaaggcttttatagatagtgataaagatggattatcagatgacgaggagaagctttataaaacagatcctaataatccagacactgatggagataaattatctgatggacaagaagttcttttatatcatacaaatccattattaaaggatactgatggagatagattgacagattcagaagagttatacttatgtgatacagatcctttgaagaaagattctgatggaaatggaattactgatgatttagaagatcaagataaagatacaattactaattatgatgaaatttcattaggaagtaatccaaagttagctgattcagattttgataatttaactgatgataaagaattactttataaaactagtctaacagatgaagatacagataatgatggacttacagatgggaatgaaattaagtatggaacagatcctttaaatccagatagtgatggtgatgggataaaagatggagatgaagtatttacttctaatgtaggagtaggatcattagataaagatgaaaaagttgagccatctgttaaaatgaatttaaaaggaagaaacattggtacagtatcaatttctaatgtaggaaaagtaaatccttatttaaataaaaatataccaggatatataggggcaccatttgaatttgcttcaccagaaagatttaatagtgcaaaaataacttttactatagataaggatttatttaataaacaagatatgaaaccttctatatattactttaatgaaaatactaaattattagagttattgccaaatcagacagtagatgcttcaagtggtacaatctctactaatgtaagaagctttggaacttatatagtattaaataaaaatgaagtagataaagcttggaataaagaaatgaaagcacctcagattgaagaaactagtaatgctggattaaatagaggagttgctattaaatataaaggaaatatacaatattataattctaataatgtaaaaaaagatatagtaaagaatttagataaaaatgtagctgaatctaagctaactttagaggaaacaatagaacttactactgacagtgatggcgatggattatcagattaccatgagaaaaaaggtttcaagacaaatataggatggatatatacagatcctaataatccagatactgatggagatggattaaaagatggagaagagattcaatattgtagtgataatggtggatacttcatagtaaaatctaatccattgttatatgatagtgatggggacggttcatcagataaatatgatgctaatcctatgaaatatgaattaagcgatagacaacttgcaatatttagccgacttgcatatagtgatttagaatcatcaataggaaaaaccgtaaaagaaattaaagatccaaaagacatttttaatacagttgaactgcaagattggggcaatactgaagaaattggagattggaaattaattgatgctaaagatgatacaagttatagtaaagctggctttgctgctagtacatataaacttggaaataatattatagttgcttatagagggtctgaaagcaatttagaattattatctgatatagcaatattattgaatacacatcacgaagcgggacaagcatatgcatatactaaggatgcttttaagtctaatgttaatagcaaaatgcatcttactggacattcattaggcggttttttagcattaaaaacaactcaaaatagtgttaaagagcgtgattcagaggaaagaaatctatatgatagtattgaaagaactgtaagatttaatgctcctaattatggcattgtatttggagaagattctaaaaatttagaaacaataaaggataaaattataaattatagaactaaggaggataaagtatcattgcttccatggtcttcatttgttggtgtaaaatatgaatatgcaacccgtgatgaattgtataaaacaaaatatgataaaagctcaatgctagatagatatattttagctcctcatgatatggctaactttttatattatttagaaccaaaaccaaatatatttaaaaat

SEQ ID NO: 16613 - DNA, 606 bp, Clostridium botulinum
ttggataaaaagaagattataaaagagattaaaggttggattttttctattttaggagctattcttattgcaggtttagttaatagtaaggtttttgcaaaggttagagtacagcaaagctctatggagaatactttacttactaatgaacaattagtagtagataaattaagctataactttgtagaacctaaaaaaggagatataattatttttcatgaaaataaagaaaagggaactatagctgaggatactttagaaatggtagataatataatatccatatttaataataacaataattctatagaaaaagatgatagattaattaaaagagtaattggtattccaggggatgaaattcatattaaagatggacatttatatttaaatggtaaaagacttgaagaaccctatgtaaaaggggagactattgaaagagaatttaaacttcctattcagattccagaaaacaaattgtttgttttaggtgataacagaatgataagtaaggatagtaggatgtttgggcttattgattataagcaagttgaaggtaaggcaatatacagggtatatcctttcgatcacataggaaatataaag

SEQ ID NO: 16614 - DNA, 693 bp, Clostridium botulinum
atggaggaaagtcttaagatgaatgaagaagtaaccttagatttacaggagattcttaatgtattaaaaaagaaaaaaaagatgattttaataacaactctattatttggaataatatccgcagccttaagcttttttattattccacctatctatgaaataaaggctagtgtagttataggtaagactttagatgaaaaaaatgaaaataaaaatgattataatgatgttatgatgtatcaaaagttagttaaaacctatgccaaaatagctagttctagaactttagcagaaaatgtagcagctaaaactggagaattaaaaccggaggatctacaagaagaattagaagtaacacctcaacaagatacccaaattttagatttaaaaatagaacataaagatgcagcatatgcacaaaaaatacttaccatagtttgtgatgaatttatagctgaaagtaaaaaaatatatcctaataacactatagaattattagataagcctgtaataccagaaaagcctataaaaccaagaaaactattaaatatagctatagctttatttatgggacttttattgtctgcaggtagggcttttatacaagaatatatggataaaactataaaaacagaaaacgatatagataaatatttagaacttccagtaatagctgtaatacctaaaataaaa

SEQ ID NO: 16615 - DNA, 828 bp, Clostridium botulinum
atgaaagtatttattttaggtggcggaacaatgggagcaggcatcgttgaagtttttgctaaagccggccatgaagttgttttaaaaagattcgttggtaagggaatggataaaataataaaaagctttgataagcaagttaaaaaaggaaaaatgacagaagaagaaaaaaatgattgcataaatagaataacagttacaacagatatggatttagccaaagatgctgatctagttgttgaagcatctaaagaagaaatggaaatgaagaaggatatatttagtcaattggataagatttgtaaaccagaaactatatttgcaacaaatacatcttctttatcaataacgacaattgctagtagcacaaatagaccagataaagtaataggaatgcatttctttaatccagctcctgtaatgaaattaatagaagtaataaaaggtatagcgacttcagaagaaactaaaaacactgtaattgaaatatcaaagaaattaggaaaagaaccagtagaagtagaggaagcgccaggatttgtagttaatagaatgcttatacctatgataaatgaagctattggtatatatgcagaaggaattgctactgttgaagatatagatttagctatgaaattaggagctaatcatcctattggaccattagctttagcagatttaattggtaatgatgtatgtttggctataatggatgtattacactctgaatttggggattcaaaatatagacctcatccattattaataaaaatggttagaggaaatttattaggaagaaaaacaggaaaaggattttatgaatataaa

SEQ ID NO: 16616 - DNA, 1527 bp, Clostridium botulinum
atgtgtatgagcaaaaaaaataaaataatggatttcttctctgccttaggtagaagtttaatgttaccaattgctactttagctgctgcaggtttaatattaggtctaagttctgcactacttaaaccacaaattcaagcagcattaccttttttacaaaattcagtgggtgtatatgttttaactttaattaaaacgattactgctacagtttttggaatgattccagtattatttgctatatgtattgcttttggattagcaaaagaagaaaaagagattgcggcatttgcaggattcattggttattatacatttttattaagtgcatcaattattattaattccggagcatttaactttgcttcacttaaaatgtcaaatattttaggcattgagaaaaccatagaaatgggagcttttgcaggtatccttacaggtatattaacatcaatgcttcataataaattttataaaattgacttccctatagctattgctttttatggtggaaagagatttgtagcaattgtagttataggagccatgacccttcttggacaagttatgccatttgtttgggttccaatttcatcaggaataaattctttaggaagtttaattgcaagttcaggacatacaggtgtatttttgtttggattcttagaaagaattttgattcctaccggactacaccatgttttaaatggtgtatttcgtacaacatctgtaggtggagtatatcaaggagtggaaggatgtttaaacatattccttcaattctttgataaggtagatatttctcaattaaaacaatttacagccttcttaggacaaggcaaaatgccatttatgatgtttggacttccagcagcagcctatgctatatataagacatcccctgataataagaagcctaaagtaaaggctctaatggttgcaggagttgctgcatctattgtatcaggaattacagaaccattagaattctcatttatgtttattgctccacaactattcttattccatgctataatgggaggtatttcttttggtatattaagtttactaggtgttgcaattggaaatactggtggaggaattattgatttcttgatttatggagttttagtacctggatcaagatggtatattgtaatattagtaggtatagtatttgcagttatttattatatggtatttaagtggtatttcacaaataagaatatttctattgatgtaaatgaagatgttgaagaagaagatttttccaaagattcatctggaaaaactaatttagctgtcaaaattattaatggattaggtggaattgataatatagtagcagttaacaattgtatctcaagacttagagtagatattaaagatatgtcattagtaaatgaagatttattaaagaaaactggcagtatgggaattgtgaaaccttcttcaactcatatacatgttatttatggacctaaagttgaaaaagtagcaaagcaagtaaaagaagctatgaaatat

SEQ ID NO: 16617 - DNA, 516 bp, Clostridium botulinum
gtgaattatatagttaaagccataattcctattattatacttttaatcatagcctatggaatgattaaaagagttaaagtatatgaatgttttgttgagggggccaaagatggtataagcatatgcattaaaatatttccatatcttcttgctatgatggtagctatagctgtgttcagagaatctaaagctttagactgtttaatcaatattctaagaccagtatcaaatttaatagggttgccaggagaattagtacccttagttttaataaaacctttatcaggaagcggtgctttgggggtatttgcagatatattaaaacagtttggtccagatagtaatgtagggaagatggcatccattataatgggatctacagaaactattttttatacaataacagtttattttggagctgttggaataaaaaaaataagacatacattatgggctgctatttttgcagatatggtggctataataatggctgtattagtaactaatataatacta

SEQ ID NO: 16618 - DNA, 477 bp, Clostridium botulinum
atgtgttccaatgagttagcaaataccaaattcaaagaactagaagaatatataaacaatatctccaataagaaaggatcccttatagaagtgcttcataaggctcaacatatttttggatatcttccaaatgaagtgcaggaatttgtagctaaaaagctagacatttctgtttcaaaggtttacggagttattactttttactcttattttactacagaaccaaagggtgaaaatgttataaatgtctgtatgggcacagcttgctttgtaaagggagctggggatgtactttcagaatttgaaaataaattaaatataaaagttggagaaaccactaaagatggtaaatttacattacaagttttaagatgtgtaggggcctgtggattagctccggtggttacaattaatgataaggtatatggacattttactaaaaatgaagtagataaagtattggaagaatatggggcg

SEQ ID NO: 16619 - DNA, 444 bp, Clostridium botulinum
atgaataaagttgttttgataggtagattaaccaaagatcctgagttaaaatttactccaggaaacgggacagcagttgccacctttactttggctgtagatagaagattttcaaaagatggtcagagagaagcagatttcatccctatagtagtatggggaaaacaagcagaatctacagctaactacatgagtaaaggaaaacttatgggggttagtggtagaattcaaacaagaagctatgaagctaaagatggtacaagaagatatgtaacagaagtcatagcggaagaagttaaatttcttgagtggggcaataagcctacaacggattcaacatataataatgggtcagaaccaagttatcaatcaggccaaggctttggaaatggaaacagttttgacgacgatataattccagtggatgatggagacatcccattt

SEQ ID NO: 16620 - DNA, 1062 bp, Clostridium botulinum
ttgaaaaagattataatgacaggtggaggaacagcaggccatgttacaccaaatttagctttagttccagaattgaaaaaattaggctatgaaataaagtatatagggagcatagaaggaatagaaagaaaaattatagaaaaagaagggatagaatatttccccatctctagtggaaaattaagaagatactttgatttgaaaaatttctctgatccatttaaagtgctaaagggagtgtttcaagcaaaaaaaataattaaaagagaaaaaccagatatagttttttcaaagggcgggtttgtaactgtgccagtagttatagcagctcatttaaataaaataccagttatagctcatgagtcagatataactccaggtcttgcaaataaattagctactccttattgtacaagggtatgcgttacttttccagagtcagtaaaacatataaaaggagataaagctgtattaacaggtacacctataagaagagaattattagaaggaaataagcttgaaggtataaagttatgtggatttaaagataataaacctattcttttaataattggaggaagtttaggttcgaaaattataaacgaaatagtcagaaaaaatctggacaatatactttcaaaattcaatataatacacatttgcggaaagtctaacttagatgaaaatttagaaaatagaaagggatatgctcaatttgagtatgtaaatgaagagctaccagatttaatgaaagcgtcagatttagtaatatcaagagcaggagcaaatgtaatatatgaacttttagcacttaaaaagccaaatcttttaatacctttatctaaaaaatctagtagaggggaccaaattttaaatgcagcttcctttgaaaaaagtggctatagtttagttttaaaggaggaagagcttgaagataaaaccttaataaaaaagttaaattatttgtatgaaaacagaaatgtatatataaataatatgtccaaaagtaaaatggataatggcgttaaaaatataacagaattgataaaaaaatatacaaaa

SEQ ID NO: 16621 - DNA, 1422 bp, Clostridium botulinum
ttgaaaatgggaacacaagataaaaaattaggtcttggacttttgattactctcggtataggctctatgataggcggtgggatttttaatagtcccacggacttaataacaaaagctaatccacaagcagctctaattgcttggataataggtggatttggaattatatgcttagcactagtattccaatttcttgctaataaaaaaccagatttaaaaggtggaatttattcctattcacaggatggatttggagactttatgggtttcaactcagcttggggatattggctttctgcttggcttggaaatattgcttttatagtattaatgtttaaaaccataaacagtttattaggaccaggacgtgaattaaagccaatagtgtcttttatagcagcatctttattattatggtctgtacattacatccaaacaaagggaacaaaaaatgcaggaatcataaatgcagttgtaactataggtaagttattaccgttaacattagttgttatattgggtatattcatatttaagccagagctatttacagtttcaaactggagtacaatacttgcaagttctggaaaagcaacatctacgtttaaacaagttaatggtgccatggggactataatttggtgctttatcggtgtagaagcatctgtagttctttcagaaaaggcagaatcacaggctatagttggaaaagcaacagtaattagtttgttaattacattacttatttatgtttcaatatcattacttgcaatgggcattattccagctaaggatcttgtagtatcaggtactcctttagcagatgtcttatcaaaaacggtctttggaggagcaggatctgtaatagttaaattaggtcttataatatcattgttcggagcattaataagttgggtaatgcttgcagcagagataccatatgtagcagctaaagatggagttatgccaaaatggtttgctaaagagaacgcagcaggagttgcaataaattcattaacatttacaaatattataactcaagtatttttatgtacattactttcagataaattacaatcagcttatagtttagtatttgctatagcaactacttgtatgttaattccttatactttatcatcattttatgctataaaggtatgtaatgaagaaaagataaatggaaaagataagataatagcaatcttagcttccatatatacaatatatggtatatatgcaggtggaattaaatactttgctcttgcatttataatgtacgcctttggagtaatagttttcaataaagccaagaaagaaaagaaacaaaagtatacatcaattgagaagatcggtacagccgtagttgtatttgtagggggagttatgatagttttactttcaataggaaaaatatcacta

SEQ ID NO: 16622 - DNA, 1863 bp, Clostridium botulinum
atgagaaaagatagagaattgattctttatgatatattattaataattttatcattatatttagcaattttattaagattcgatttcggtatggcttctatggcttcggaatttaaaaaatatatgatattttttaagttatcagtaattccagttataataataatcttattttttaataaaatatttaatttatatagtagtatatggaaatatgcttcagtagaagaacttatgtctataatttattcagtttctatatctaatattatattcataatttatagttattttattaattataaagttctagaaagtaattattatagattcccatttactgtacatataatattttggattctatctatagtatccctaggaggtacaagatttatatatagagttatagaagataaggaatgtaataagaacaaatgtaactgtgattctaaagaaaagaagttacttataataggggcaggggatgcagcagctctcattataaaagaaataaaaagaaataaggaattaaattatagtataataggtcttgtagatgatgatatagagaagttaggaaagagaataaatggtatacctgttttagggggaagagaaagtattataaagatatctaaaaataaaaaaatagatgaaataatattagctataccttcagcagcatcttcaacaaaaagtgaaatagtatctatatgtaaagaaactagttgtaaattaaaaactttaccaagcatggataaggtaatacagggtaaatttaatatgagcaagttaagagatgtaagtattgaggatttgcttgggagagaggaagttaaactagatgatagtggaataaatagatatataaaggataaagtagttttagttactggtggaggagggtctataggttcagaactttgtagacaaatagttaaattttcacctaaaaaacttttaatattagatatatatgaaaacaatgcatatgatgtccaaatggaactaaattataaatatccagaactggacaaagctgttataatagcttctataagggatgaaaagaggctaagaaatatattttcattatataaaccagatgtagtttttcatgcagcagcccataagcatgttccactaatggaagagaatccagcagaatctattaaaaataacgtaataggtacctataatctaataaaatgtgcccatgaatttgggattgagcgttttgtacaaataagtacagataaagctgttaatccaactaatataatgggagctacaaaaagattttgtgaaataatgattcaagcttttgataaaataagtaaaactgaatttgtagctgttagatttgggaatgttttaggaagtaatggatctgttattccattatttaaaaaacaaatatctcatggaggacctgtcactgtaactcatccagaaataaatagatattttatgactataccagaagcagctcaattagttatacaagcaggagctatggcaaaaggtggagaaatatttgttctggatatgggaaaaccagttaaaattgtagatttagctaaagatttaataactttatctggatataagccagaggaagatattaagattgaatacacaggattaagacctggggaaaaattatatgaagaactattaatggatgaaatagctttaacatcaacaggacataataaaatatttgtagaaaaacctatggaaaataatatagactttgtagaaaaatccatagaagaatttaaaaaagttgtttataatgatgaagaagaaatatttgcattgatagaaaagaaggttccaacatatataagaaaaaaa

SEQ ID NO: 16623 - DNA, 2625 bp, Clostridium botulinum
ttgttaaaaaataaactattattaaaagaggtgttattaatgaaaattaccactactgaggaactaataagaaaaattgaaaaaatcaaagaggcacaaaagatttattccacatattctcaagataaggtagacaaaatatttaaagcagcagctatagcagctaacaaagaaagaataaaacttgcaaaaatggcagtagaagaaactggcatgggtattgtagaagataaagttataaaaaatcattttgcatctgaatatatttataacaaatataaagatgaaaaaacctgtggtgtaatagaaaaggatgaagcctttgggttaacaaaaattgcagaaccaataggtgttattgcggcaatagttccaacaactaatccaacctcaacagctattttcaaagctttaatagctttaaaaactagaaatggtataattttttcacctcatccaagagctaagaaatctacaataatggcagctaagattgttttagatgcagcagtacaagcaggggcaccaaaagaaataataggttggatagatgaacctaccttagaattgtctaatgcagtaatgagtaattcaaatctagttcttgcaacaggtggaccaggtatggttaaagcggcatactcttcaggaaagccagctataggagtaggacctggaaatgtaccagctataatacacgaaacagcagatattaaaatggctgtaagctcagtggtactttctaaaacttttgataatggtatgatttgtgcatcagaacaatcagtaattgtgatgaatagcatatatgaagaagtaaaaaaagaatttgtaattagaggagcctatgtattaaataaagaagagatagaaaaagttaagaaaataattttagttaatggaaatgtaaatgctaaaattgttggtcaaacaccacaaaagataggtgaaatggcaggaatacaagttccagattgggctaaacttttagttggagaagttcaatctgtagaattagaagaaccattctctcacgaaaaactatcaccagttttagcaatgtataaagttaaaacttatgaagaggctttaactaaagctgaaagattagtagaattaggaggatttggacatacatcttcattgtatataaacacagtaaaatgcaaagaagaagtagaaaagttctcaaataatatgaaaacaggaagaacaattataaatatgccatcagcccaaggtggtataggtgatatatataactttaaattggcaccatctctaactcttggttgcggatcctggggtggaaactcagtatcagagaatgtaggaccaaaacacttattaaatatcaaaaatgtagctgagaggagagagaatatgctttggtttagagtaccagaaaaagtttactttaaatatggatgtcttccaatagctttaaaagaattaaaaagaatgaataagaaaaaggcatttatagttacagataaagtattatatgaattaggagttgctaaaaaagcaacagatgtgttagatgagataggaataaattataaggtattctttgatgtagcgccagatccaactttagaaacagcaaaaaaaggtgcaaaagaaatggtagattttaatcctgatacaataatagctataggcggaggatctgctatggatgctgctaaaataatgtgggtaatgtatgaacatccagaagtagaattcgaagatttagctatgagatttatggatataagaaaaagagtatatgagttcccacatatgggagataaagcaatgatgatatcagtagctacttcagcaggtactggttcagaagtaactccttttgctgttataactgatgaaaaaacaggtgtgaaatatccactagcagattatgaattaactccagatatggctatagtagatgcagatttaatgcttaatatgccaaagggattaactgctgcatcaggaattgatgcattaactcatgcagtagaagcttatgtatcagttatggcatcagagtatacagatggactatgtttagaggctataaaaactatatttgaatatctaccaaaagcttataaagaaggagcccaagatatagaagcaagagaaaaaatggctcatgcatcaactatagcaggtatggcttttgcaaatgccttcttaggagtatgccactctatggctcataaattaggatctatgcatcatgtaccacatggtatagctaatgctttattaataaatgaaacaattaaatttaattctgaggatatgccaagaaagcaaactgctttcccacaatacaaatatccaaatgctaaggctaaatatgctaatatagcagattatttatcattaggtggaaaaactccagaagaaaaagttgagctattaataaaagctatagataaattaaaagcagaagtaaatattccaacctctatagaagaggcaggggtatcaaaggataaattctttaaaactttagatgagatgtccgaacaagcttttgatgatcaatgtacaggagctaatccaagatacccattaataagtgaaataaaagaaatgtatactaatgtttttagtaccaaaaaa

SEQ ID NO: 16624 - DNA, 909 bp, Clostridium botulinum
atgtttggaaaattttttgacaaattaaaagaaggattaacaaaaactaaggatggatttacagataagataagtagtgtattaaatttagctgtaactatagatgaagatttatatgaagaattagaagaaatacttgttactgctgatataggagtagatacttccataaaaatcatagatagattgagagaaagagtaaaggaagaaaaaataaaggatccagcagaaataaaaccttgtcttaaaagagtaatattagaaatactaggagaagaaaaaggttctataacaccagacactactccaaaagttatgcttataattggagttaacggtgtaggaaaaactacctccataggaaaagtttcagcaaagttaaaaaatcaaggctataaggttataatggctgcagcagatacctttagagcagcagctatagatcaattagaagtatggagcagtagagctaaagtagatataataaaacaccaggaaggatcagatccaggggcagtagtttttgatgcagttcaagcagctaaatcaagaaaagctgatgtattaatatgtgatactgcaggaagattgcataacaaaaagaatttgatgaatgagctttcaaagataaacaaaattttagaaagagaatatggtgatgcctctaaagaaaccttattagttttagatgctaccacaggccaaaatgctgttatacaagctaaagaatttatgtcagcttgtcctatagatggtataatacttactaagttagatggtacagcaaaaggtggggtagtaatatctataaaagaccaactggatataccagtaaaacttataggagttggagaaggcatagaggatctacaggagtttaattcggaagaatttgtagaagcattattt

SEQ ID NO: 16625 - DNA, 1209 bp, Clostridium botulinum
atgtttatgcatattaaaactcttacagtttctcagttaaatagatatgtaaaaaataccttagatgctgattttatattaaataatgcttccgtaaaaggtgaaatatcaaatcttaaaattcacagtagcggtcatatttatttttctttaaaggatggaggaagtaaaataaattgtgtaatgtttaaaagctatgcatataatttaaagtttgcaccagaaaatggtatggacgtagtagctctaggaaatgtatctgtatatgagaaggaaggctcttatcaattatatgttaaagatatgaaaagagagggcataggagacctttatgtagcctttgaaaagttaaaagaaaaacttaaagaagaaggactttttgatgatgtacataaaaaagaaatacctaaattttctaaaaaagtaggggtaataacctcacctacaggagcagccctaaaagatatcataaatgtaactaaaagaagaaataaagggatagaactattaatatatcctgccctagtacaaggaacagatgctagtagaactcttatagagggtataaaaatattaaataaagttgaagatgtagatataataatattagctcgtggaggaggatctatagaagaattatgggcttttaataatgaagagttagcttatgcagtgtataattctaaaaagcctataataaccggagtaggtcatgaaacggatttcactattgtagactttgtaagtgatagaagagcacctacgccctctgcggctgcagaaatagctgtttttgatagagaagttctaataaacgagattttaaattataaatataatataaaaaattatatggaaaatataataaaagaaaaaagaaattatttaaatttatacaaacagaaaatagaagctaacagtcctactaatataatagtaaatgaatataaaaatatagataatttaaaagaattattaaatatgaaaatagaaggtaaattaaataaagaaaaaaacaatctatccagactatcctctttactagaagcgcataatccactaaatgtattaaaaaaaggctatacgttaatagaggatgaagggaataatttaataacagaaaaagaagccttaaaggaattaaataaaataaacataatctttaaagatggtagggcaaaattatctattgagtatatagaagaattt

SEQ ID NO: 16626 - DNA, 1533 bp, Clostridium botulinum
atgggggggattgttgtgacaaaaaagaaaaagaaaataagctttccgacagcttttacggtattgtttattgtattaattattgcagctatacttacttatgtagttccagctggatcttattcaaaattaagttatgataacgatagtaaagtttttgttgtaactaaaccagatgaatcgacaaatgaattaccagcaacacaaaagactttggataaacttaagattaaagtaagtgtagaaaaatttaaagatggtagtattaataagcctgtagctattccagatacttatgaacaggtagaacagaaacctcaagggttttttgaagtaattgaagcacctattaaaggggtgtatgatactatcgatattataatgtttgtacttattttaggaggagttattggtgtagtaaatagtagtggagcatttgatgcaggtattgccaaactttctgtagctactaagggtaaagaatacctattaatagttattatcactacattaattgctttaggtggaactacttttggactagcagaagaaaccattgcattatatccaatactggttccagtttttatagcagcaggatatgatgctttagtttgtattgcagccttgtatatgggatcatctataggtactatgttcgctacggtaaatcctttttctgttgttatagcatctaatacttcaggaatatctattgcttcaggatttatatttagaattgtaggacttattttagcagtagctataactattgtttacattgtaaaatatggagttaaggttaaaaaagatccaagcaaatctataatatatgaacaaaggaaagaaatacaagagaagtttttaaaagattatagtaaggatgatgttactctaaaattttctttaggtcgtaagctaatgttaataatattcgcattaacattcgtagttatgatttggggtgtagcttataaaaaatggtggtttactgagatgacagctctgttccttgttgtagggattattttaggtgtaatctcacgaatgggagaaaagaattttgtagataagtttgtagctggttcagctgatttggtaggagttgcattagtaattggagttgcaagatctattaatcttgttatggaaaatggaatgatttctgatacaattttgtatcattcttcaaatatgatatcagggatgaattctagtgtatttataatatttatgttaattgtatttataggacttggattttttataccatcatcttcaggacttgcagtgctttcaatgcctattatggcacctctagcagacagtgtaggattgccaagagagactatagtaaatgcttatatgtttggccagggattaatttcattcataactccaacagggcttatattagctacattagctatggtagatgttacttatgataaatggattaaatttataatgccacttatgggatatatagcagccttatcagctataatgttattaatacaaagctttgttgct

SEQ ID NO: 16627 - DNA, 2064 bp, Clostridium botulinum
atgccaagagaatttgtagagtatacaaatgatttgcccataaaagtttctatgcaaaatataaagaaaagtcctattcattggcacaatgctatggaagttatatatgttttagaaggtagcataaaaataactatagagacagaaagccatagggtaaacaaacaggaaataggtataataaatccagaggaagcccatagcataaaaagtataactaacaacaataaagttcttatatttcaaatagatactagtttttttaataaatattatgatatagagaatatgtttttttatacagatttttctgcaccagaggctcaaaagcatgaaaagtatgatgtattaagaaaatatctttctacattactttgtgaaatagctcaaaagggtgataattatgaagatgtagtagaggaaatcttagtagatcttttatatcatcttataaataattttcattatttaatatatgatgaagaggaattaaaagaaaatgaggtacagtttgaaagatatgatagaataataaaatatatatattctaattataataacaaaataagtattcaagatatagctagactagaattcttaagttctcattatttatctaatgaaatgaaaaataaggtaggatatagttttaatgattttgtaaatttaactagagtagaagaagctataaaattacttttagatacagataaaaccatatctgaaatatctgaagaactaggcttttcacatacccggtattttaataaacattttaagaaacattataaatgtactccaatgcaatatagaaaaaagtataaagtagatgaagaaacctatgaaagtctgaaagtttatgaaaaattaaaattaaaggatgcatatgagtatttaatgcattatttagaagattacccacgattcaattatgaagggaaaattataaaaattcatgtggatttgtctaaggatacagaggaattggatgaaaattggcatgatattattaacctaggtagtgctaaagaagtattaaaaggtaatcatggaaaacttataaaggaacttcaaaagcatgtagaatgtgaatatgcaattatacaaaatatattttcaaaggatatgaatgtcttttcaacagaaaaggatagattctttaattggtatgagataagacaagtgtttgaatttatatatgatttagatttaaaacctgctatactaatagattttcataagtataaagtggaatttttcttggcactttttaaggattttatagattactttacagatttttttggagataaagaaattaagaaatggagattttatttaaaaaattccttagatgaaaataaaaagagtttagaaaactttctaaaagaatatgaagatatagaatttataaattgggatttagactataaggaagtgaataatatttatgatactgcctacatggtcccctacatattaaatcaatacttaaataaaaattcaaatgtaatctttttaactacttttgatgaaatatatggaggagagtatataaataatgaattgttttatggtggttctggaataataaatcgccaaggaataaaaaagccttcttactatgcttattatcttttatctaaattgggcaatgaggtaatagaaaagggagatggatatatagttactaaagaagatgatgatattcaaattcttgtttattcccatagtgaagaattagagtctttgatttctttagatgatttgtataaaagaagaggtttaaaagaaaccgcagagaagaaattttctataaatatagcagcgctaccttataattataaaatagttacttataaaatagatgaagggaaaggatcttcttataataattggttatctatgggtaaaccaaagagaatagatgaatatgagagagatttattaataaaaagttctgtacccaatataaaattagggtttgctaaaaaatctcctatatataatatagtttccaagatagaaggatatggagcatttttatttatactccaaagagta

SEQ ID NO: 16628 - DNA, 747 bp, Clostridium botulinum
atgaggtgtgtttttatgagaattatagtagtggataattatgaagaaatgagtaaaaaagcggcagctatggtagctagccaagttattttaaaaccagatagtgttcttggattggcaactggagatacccctataggaatgtataaagaaatcataaatatttataaaaatcaaaagatggatttctctaaagctagaacctttaatttagatgaatactatgggttaaacagagaaaatcctcagagttattattattacatgatgaataatttatttaatcatgtgaatattgataaaaataatattaatattcctaatggaatggctgataatatagaaatagagtgtaaggaatatgaaagaaaaatagataaagcaggtggtattgatttacaaattcttggtatcggtgtcaatgggcatattgggtttaatgaacccaatataagttttgaatcagaaactcatctagttaatctaaatgaaaaaactatagagtctaattcaagattttttagctcgaaagaggaagttccaacaaaagctattagtgtgggaattaaaagtataatacattccaaaaagataatcctattagcttgtggtagtgcaaaatctgacgctgtttctaaaactataaatggtaaaattaaccctaatatacctgcatctattcttcaattacacagagatgttgttgttattatagataaggaagctgctagcaagttaaatttaaag

SEQ ID NO: 16629 - DNA, 1512 bp, Clostridium botulinum
atgaatataaagccagaagaaataacatcaataataaggcagcaaatagaaaattttaatactaatatagaaactatagattctggaacaataattcagataggagatggaatcgctagggtttatggattagaagattgcatggaaggagaacttatagaattcccaaatgatgtttatggaatggcattaaacttagaacaagataatgtaggctgtgttttattaggatctgaagaaggtataaaagaaggaaatgtagtaaaaagaactaaaaaggtagttgaagtacctgtgggagaagctctagtaggaagggtagtaaattctttaggtatgcctatagatgggaaaggaccagtcttaactactgaaactagagacgttgaagtgccagcacctggagttatagatagacagtctgtaaaagagccattacaaacaggaataaaagctatagattctatgatacctataggaaaaggacaaagagaactaattataggtgatagacaaacaggaaaaacagctatagcaatggataccatacttaatcaaaagggaaaagatgtaatatgtatatatgttgctataggacaaaagcaatctacagtagcacatatagttaatgacttaactaaaatgggagctatggattatactatagtggtttcatctacagcatcagattcagcgccattgcaatatctagcaccttatgctggatgtagcatgggtgagtactttatgcataaaggaaaagatgttttaatagtatatgatgacttatctaagcatgcagtagcttatagaacaatgtctctattacttagaagaccgccaggaagagaagcttatccaggagatgtattttatttacattcaagattactagaaagatctgctagattgtcagagaagctaggtggaggttcattaactgctttacctatagtagaaactttagcaggagatgtcactgcatatataccaactaatgttatatcaataacagatggtcagatattcttagaatcggaattatttaatgcaggacaaagaccagcagttaacgcaggaatatcagtatcaagagtaggcgggaatgctcaaattaaagctatgaaacaagtagctggtacattaagattagagctagcacaatatagagaattagctgctttttcacagtttggatctgatttagacaaagaatccgtgaaaaggctagaaaagggtaaaaggttagttgaaatattaaaacaacctcagtatagccctatgcctgtggaaaaagaaataataattctttatgcagcagttagtaatcatcttatagatatacctgtaaataagataaaagagtttgaaaaagaactatttaattatattgatactcattatagagatataggaaaagacatattagaacataaacaattaactgatgagcttaaaagcaagctagataaggctataaatgattttaaaaatgtatttttatcagagatt

SEQ ID NO: 16630 - DNA, 540 bp, Clostridium botulinum
atgatgccaagattacaagaaaagtatgaaaaagaagtagtatcagctttaatggataagttcggatataaaaatataatggaagtgccaaaacttgaaaaaatagttatcaatatgggtgttggtgaagctaaagagaatcaaaagtctcttgaagcggcagtagaagatttagctaaaataactggtcaaaaaccaatattaactaaagctaaaaaatcagtagctaattttaaaataagagaagatatgccactaggttgtaaggttacattaagaaaacaaaacatgtatgaatttgcagataagttaataaatgtggctttacctagagttagagatttcagcggagtttcaagtaaatcatttgatggaagaggaaactatgctataggaataaaagaacaattaatattcccagaaatagaatttgataagattgataaaattagaggtatggatataatttttgtaacaactgcaaagactgacgaggaagcaagagaactattaagattccttggaatgccatttgctcgt

SEQ ID NO: 16631 - DNA, 744 bp, Clostridium botulinum
atgaaaatgaattatatatcctcaaagtctaaattaggcaataatgttgaagtagggaaatttgctgttatagaagatgatgtagttataggagaaaattgtattatagggcacaatgtaattatacataaaggaacaatcataggtaacaatgtaagaatagatgataacactgtaataggaaaagagcccatgagatcagtaaacagtatatttaaagatgataaagagtttgaaccatgtaaaattaatgatgaatgtttaataggagcaggtgtaatagtatatataggttctaaaataggtaataaaactttagtagctgacctagctgttataagagaagacgtaactataggagaaagaacaataataggcaaaggtgcaactatagaaaacttttgcaaagtgggctcaaattgtaaaattcagactaatgtatatttaacagcatattcagaagtagaggattatgttttcatagcaccttgtgtagtaacatctaatgataactatgctgctcgatcaaaagaaagatttggtaaatttaaaggtgttacaattaaaaaaggtggaagaataggggcaggtgcagttatattgccaggaaaaataatacatgaagatggatttgcagcagcaggaagtttagtaactagggatatagaaaaagctaagatagttgcaggagtaccagctaaaatatttaatgatgtaccaaaagaacagttgttagaaaatcaa

SEQ ID NO: 16632 - DNA, 1386 bp, Clostridium botulinum
atgaaggatattatagttataggtggaggtcctggtggatatgtagcggccataagggctgcacatttaggtgctgatgtagcagttgtcgagatggatagctttggtggaacatgccttaataaaggctgtataccaacaaagactttatatagaacagcagaaatgatgaatatattaaaacatatagaggactttggaatagaggctgaaaactataatctaaatgtagagaaggttcaggaaagaaaaaataatgtaataaaagaattagtaggtggagttgagaaattactaaaaggaaataatgttgaaattataaaaggtaaggctttcttaaaagataaaaatactgttttagtagaaacgaaagatgggcaagttacattagaaggaaaaaacataattatagcaacgggctcaaatgctgaaatgccagatataaaaggtataaagaataaaaacataataataagtgacgatattttagaatttgatagaattcctagacatttggtagtttcaggtggcggtgttgttggaatggaatttgctaatatctttaaagctatgggaagtgaagtaacagtaatagtcgctagggattctatattatatgatattgatagagaaataagtaaaaggtataaagttatagcgaaaaagtcaggaataaatatattaacatcaactaaaatattggagtttgctcaggatgataataatgtaactataaaatgtgaaagcaaaaaaggtgagtttgagttaaattctgatatggttcttatggctaaaggtagaagaggaaactttacaggtatgaacttagaagaactagggatcgaacatgataaaaagaaaataattgtagatgataattataaaactaatatagatggaatatacgcaattggagatgtaaatggaatttgtcttttagctcatgcagcatcacatcaaggaatagaggttgtagagcatataatggaaaataaagaatgccataaatctgtgattccaaactgtatatttacattccctgaaatagctactgtaggcatgacggaggaagaaattaaggaaaaaggtatagagtatataaaaaataaattcctatttggagcaaatggaaaagccttggcattaggtgaaggtgaaggtgttgtaaaagttatatgtgaaaaggaaagtaaaaagattttaggtattcatataatgggtccacatgcttcagatttaatacatgaaggtgtggtagcaattgaaaagggtatgacagtaaatgattttaaagaagtagtacatgctcacccaacattaggtgaagcattctatgaagcaataatgggattaaataaggaggccattcacagtataaacaaaaaa

SEQ ID NO: 16633 - DNA, 648 bp, Clostridium botulinum
atgcgtataattttgttaggtcctccaggagcaggtaaaggaactcaagcaaaattaataagtgaagaattttctattcctcatatatcaacaggtgatatatttagggcaaacataaaggagaaaactcctttaggaatagaagcaaaaagatatatagataatggtcaattagtaccagatgaggtaactataggaatagttaaagatagattaacaaaagatgattgtgataatggtttccttttagatggttttccaagaacagttgctcaagcagaagctttagatgaatttctaaagggtataaataaggagctagatgtagcactattaattaaagtgcctgaagaatttatcttggaaagaatgactggtagaagagtttgcacatcttgtggtgcaagttatcacataagatttaatcctcctaaaatagaaggaaaatgtgatatatgtgataatgaattaattcaaagaaaagatgatacagaagcaacagtaaaagaaagattagaagtttacagcaaacaaacttatccgcttataaattattataaagacaatggtataatctcagaggttaatgggactgaatcaattaatgaggtatttggaaatatttcaaatatcttagggagagataaa

SEQ ID NO: 16634 - DNA, 1098 bp, Clostridium botulinum
atgtatgattatcttatagtaggagctggattatttggctctatatttgcctatgaggcaacaaaaagaggaaaaagatgtttggttattgataaaagaaatcatattggtggaaatatatattgtgacaatatagaagaaataaatattcataaatatggagctcatatatttcatactagtgataaagatatttggaattatataaacagatttatagaatttaatagatttactaattctcctatagcaaattataaaggagaattatataatcttccttttaatatgaatacctttaataaattatggggtgttattacccctaaagaggcaaaagaagaaatagaaaaacaaaaaaaagaagcaggaataaaagaacctaaaaatttagaagaacaagcgatttcgctagtaggtacagatatatatgaaaagttaattaaaggatatacagaaaagcaatggggtagatctgcaacagaattacctgattttattataaaaaggttaccagttagatttacttatgataataactactttaatgatacatatcagggaattccaatgggtggatataatcttattatcgaaaaaatgctagagaattgtgaagtaagattaaatgtagatttctttaaacatagaaaagagttagaaactatagcagaaaaaatagtttatacaggaatgattgatgaattttatgattataaatatggagttttagaatatagaagtttaatatttgaaacagaagttttagatttagagaactaccaagggaatgctgttgtaaattatacagataaagaaacatcatatacaagggttatagaacataaacatttcgaattcggaacacaacaaaagacaatagtaactaaagaatatcctagtgaatggaaaaaaggcgatgagccttattatccaataaatgataaaaaaaatatagggttatatgaaaaatataaggatttagctatgaaagaggataagattttatttggtggaagattggcagattataaatattatgatatgcaccacatagtttacaaagctcttaaaaaagtaaaagaggagtttagagat

SEQ ID NO: 16635 - DNA, 1273 bp, Clostridium botulinum
atgagaatgtatgatttgatcctaaagaaaagaaatggaggagagctaagcaaagaagaaatagattattttattttagaatatactaatggtaatgtcccagattatcaagcttcagctcttttaatggctatatactttcaaaaaatgaaaagaagagaaactgtagatttgactatggctatggttaactctggagatatattggatttatcaaaaatacagggtataaaagttgataaacatagtactggtggagttggagatactactaccttagttttggcgcctatggtagcagccttaggtatacctgtagctaaaatgtctggtagaggtttaggtcatactggtggaactatagataaattagaatcttttaaaggtttttcagtaaatatgacagaggataaatttataaataacgttaacaatattaaaatagctgtaggagctcaaacagcagatttagctccagcggataaaaaattatatgcattaagagatgttactgctacagtagacaatatttctttaatagcttctagtataatgagcaaaaaaatagctgcaggagctaatgccataattttagatgtaaaggttggagaaggagccttcatgaaaactccggaaactgcaaaagagttagcggaagaaatggttaatataggtaaaagtgtaggcagaaatactgtggctatattatcagatatggatcaacctttaggttatgctataggaaatgctttagaagtaaaagaagctatagatacactaaaaggtaaaggtcctaaggatttattagaattatgtttaaccttaggaagtaatatggttattttatcacaaaaagcaaatactatagaggaagcaagaaagatgcttttaagtactatagaaaaaggattagctatagaaaaattaaaagaatttattagatctcaaggcggagatggtactttagtagacaatacagaaaaattacctaaggcagaatatataattcctgtaatttgtgatagaaatggatatataaataaaattcatgcccaaaatatagggataatagcatcagagttaggagcaggaagggttacaaaggatagcattatagatttagcagtaggtatagttttgaacaagaagagatcagataaagttaaaaaaggagatataatagcttatattcatgctaatgataaaataaaaggagaaaaggctgcaaaagatatattaaataattatgttatagaagaagagttaaaagaag

SEQ ID NO: 16636 - DNA, 1077 bp, Clostridium botulinum
ttggtgataagaatgaataataataaacaaattttaaagtgcaaaaataattgcactttaaaatttattctattaattatagccttgtttgtaataactacggtttgcataacctttggttctgtaaaaatagatgtaggtgtaacctttaaatcccttataaataacatattaaacaaagaaatttttgctaaagattggccaaataatattgataatatagtttttaaattaagacttccaagattgcttttagccatagtttctggtggtgctttagcccttgtgggaattttaatgcaaactttaactagaaactcattagcagacccatacatattaggcatatcctctggtgcatctgcaggggctaccctatccatagtattaggtgttttaagttcttttggacattttggaatagccttgggagcatttttaggtgctatgattgcatctattatggtatttaaaatatccggagtaagtaaagtgtattctaaaactaaattaatactaactggagttgctgtatcctctatatttactgcagtaacaaattttataataacatttgccagaaatgatagcttagttaaaagtgcagtattttggactattggtagtttagcaggagcaaattataatcaagtaaagttttctcttgtaataatggttataaccgccattttaagcatgttattatataaagatttagatgctatgctgttaggtgaggccgtagcaaaaaatataggtataaatactaaatttataattagatttataatgatagcttctacgcttttaacaggtactatagtggcttttacaggcataattggatttgtaggcctcatagttcctcatatagcaaggcaaatggtaggctcttctcataaaaaattaataccctttggtattgttattggatcaatattaatggtaattacagatactatagctagaactatattatctccacaggaagttcctataggagtaataactgcatttttaggaggtcctttcttcctatatttaatgcaaaaaagcacctatagatttggaggtaag

SEQ ID NO: 16637 - DNA, 312 bp, Clostridium botulinum
atgctttcagcgtttatccagtcccaacatagctacccagctgtgccactggcgtgacaactggtgcaccagaggtcggtccatcccggtcctctcgtactaaggacagctcctctcaaatttcctacgcccgcgacggatagggaccgaactgtctcacgacgttctgaacccagctcgcgtgccgctttaatgggcgaacagcccaacccttgggacctacttcagccccaggatgcgacgagccgacatcgaggtgccaaacctccccgtcgatgtggactcttgggggagatcagcctgttatccccg

SEQ ID NO: 16638 - DNA, 1071 bp, Clostridium botulinum
atgcataaaagattatttattccaggaccggtagaagtagaaagagatgtattagaaaaaatgagtgcagctatgataggtcatagaagcaaagaagcatcagttcttcagaaagatattagtgataaattaagaaaagtttttaatacaaaagaggaaattttgttatctacatcttctggtagtggacttatggaaggtgctataagatgtactacagttaaaagagcagcagtatttgctataggtgctttcggtaagagatggtatgacatggctgtagcaaataatgttccagcagatttatatgaagtaccatggggtgaagctataaaaccagaattagtagaggaagtattagccacaggaaaatatgattctatttttataactcataatgaaacttctacaggtattatgaatccagtagaagaaataagtaaagtcataagaaaatatccggaggtaatctggtcattagattgtgttagttctatggcaggaacaaaaatagatgtagataaactagggatagatgtatgtataacctctactcaaaaggcattagcattaccaccaggaatggctatctgctcattctctcaaagagctgtagaaagagcagaaaaagttactaacagaggatattatttagatttactttctctttataaatatatacaaaagaaaaactatcaatatccatcaacaccttctttatctcatatgtttgctatggactatagactagataaaattttagaggaaggtcttgaagaaagatatgaaagacatatagaaatggcagagtatgtaagagattgggctagaaaatactttaaaatttatggagatgaaaaatatttatcaaatactttaactaatatagaaaatacaagaaatatagatattaaaaaattaaatgaagaattaggtaaaagaggttttcaaatatctaatggctatggaaaactaaaagacaaaggatttagaatagctcatatgggacaatgcactttaaaagatataaaggaattattagaaaatataaacaatattttggatttaaaa

SEQ ID NO: 16639 - DNA, 2127 bp, Clostridium botulinum
atgttagaggacgctaaaaatttactaaaaaaacattttggatataatgaatttagaaaagctcaagaaaaggtaatagaaagtattctaaaaaaagaagatacagtagctattatgcctacaggagcaggaaaatcaatatgttatcaaatacctgcattgatctttgaaggggtaacggtagtaatatctcctcttatttctcttatgaaagaccaagtagattctttaaaagaagttggaatagaggctacatacataaatagttctctaaataatttagaaatagaggaaagaatatttaatgcaagggaagggctttataagcttatttatatagctccagaaagattagaatctgatagttttgtaagaagtttaaataatttaaatatagctttagtagcggtagatgaggcacattgtgtatctcagtggggacatgactttagacccagttatacaaaaataagtaattttataagaaaattatctaaaagacctattgtaacagcatttacagctacagccacagaaactgttagaagggatatattaaatagtttagaacttcaaaaccctaaggtatttgtaacaggctttgatagagaaaatttaagcttttctgttataaagggagaagacaaagaaaaatttatatttggttatttggaaagtaatataggtaaggtaggtataatatatacatctacaagaaaagaagcggaaagtttatataacaagataaacaaaaaaggttataaagtaggagtatatcatgcagggctaaatgacgaggaaagaaagaaaacacaagaagatttttcttttgataatatagaaataatagtagccactaatgcatttggcatgggaatagataaatctaatgtaagatttgttatacatcataacatacctaaaaatatggaagcttactatcaagaagcaggacgtgctggaagggatggagaagaaagtgaatgtatattattattctctcctaatgatattcgtcttcaaaaatattttatagatgaaagctttttatcaccggaaagaaaaaataatgaatataacaaattaagagctatggtagattattgctatacctcaaaatgtttaagatcttatatattagaatattttggggaagatgctttagaagaaaaatgtaataattgtagtacttgtaatgacaatagagaagagaaggatataaccttagaagcacaaaagatattttcctgtgtttatagaatgaaggaacgttttggtgtaaacatggtagcagatgtgcttagaggatcaaaaaataaaaagcttttatccttagatttagatggattatctacttatggcattatggaggaatctactcaaaaggatatagtagctttgatgaataaactaatagcagatgattacatggtaactacagatgataaatttcccgttgtaagattaaggcaaaaatcctatgatgtgttaaaagggaaagaaattgtatctataaaggttagcaaaatagagaaaaaagtaaaagcagataatgaattatttgagattttaaaacagttaagaaaaacaatatctcaagaggagtctgtaccaccatttatgatattcccagatgctactttaaaggagcttagtgaatatatgcctacaaaagaggaagatttattaaaaattaaaggtataggtgaaagaaaagctaaggtttatggagaaaggtttatagaagctattacagaatatatgaatgaaaagggaatagatattaataatatggatagttatggaagtgcaaaaagtaataaggagtctaaaataaagacccatgtattaagctataacctatacaaagaaggaaaaacaataaaagaaatttcagaggagcgaaacctaaaagctataactatacaggagcatttatttaagtgtttgtcagaaggcatggaagttgacttagataattttataaaaaaagattatgagaagctcatattagatactataaaaaaagttggcggaacaaagctaaagccagtaaaggatgaattaccaccagaagtggattatatgtgtataaaatccgtatggtataaatataaagatataatt

SEQ ID NO: 16640 - DNA, 1215 bp, Clostridium botulinum
ttgttatcttatgaattcttattagatcttgcgattatattgttaagtacaaaagtcttaggtatggttactaaaaaattacacatgcctaaggttgtaggtgcattattagcgggtcttatactaggaccatgtgtactgaatatagtacatgaaactgactttctagcgaaaatggcccaactaggagtaattattttaatgttttcagcaggcttacaaacagatcttaaggaattaaaaaaatgtggtagggcttccttgattattgctatattaggaacagttgtccctttattaggaggatactttgtatcagcactattctttgattctaatgggatctttgatataacttcaaaagcatttattaagaatttttttattggggtaatattaactgctacttctgttagtattactgttgaaactttacaagaactaggcagattgaaaacacgttctggaacagctatattaggggcagcaattattgatgatattttaggaataatcattttaactatggttacaagttctacaaataattcaacaagtattaatttagtgcttctaaaaattgtagcattctttatattatctactatctgtggagtagtgttgcatcacattttcaatagaatttataaacgttatggtaatataagtggaatttcagctgttacattttctttttgtctaattatggcctttattgcagagcacttttttggtgtagcagatataacaggtgcttttatagctggagttattatttcaaatacgtcttttcgtgagcatgtagaaaaaaatttcgaagtaatttcctatatgcttttatctcccgtattttttgccagtataggtttaaatacaacaatgaaacatatgaataataaaatgaggctgtttacaattgcattattactaatggcgatattagcaaaagtcatagggtgttttataggaggaagaatttgcaaatacacatatgctgaatctcttagaatcggaattggaatgatatcacgtggagaagttgccctaataattgcaaagaaaggtgccgcattaggtttgatagaagcacaattcttcggatcgatagtttttgtagttatagcaactacccttataacacctatattattaaagatggtgtatagtactaaattcaatgatattaaagcatatgattccttgcatagtgctgct

SEQ ID NO: 16641 - DNA, 1167 bp, Clostridium botulinum
atggattatataaagactgaagaaattatttcggaaaaagttaaaaatatagaaatttccggtataaggaggttttttaacaaagtttcaaattataaagatgttatttccttaactttagggcaaccagactttaagcttccaagtagaataaaagatgaattaataaattctatacaagaagataaaacaacctatacatctaatgcaggactaaaagagttaagattagagatagcaagatatcttaaaactatgaatattaattataattcagaagaaatatgcataaccgtaggtggtagtgaagggttgatgtgtgtattttccacattactaaatgagggagacaaagttttaataccaacacctgcatatcctgcttatgaaagctgtgtaaaattattaggtggacaaatattaaattataaattaaaaaatgatttttctatagatttttcagatttagaaaatataatagaaaaagaaaagcctaaggttatggtattatcttatccatctaatccaacaggggctatactttctaaagaagaaagttgtaagttacataaaataataaaagaaaataatattatagtaataagtgatgaaatgtatgcctctttatgttttgaagaaaaatattattctatagctcaatttgaagatataaaagataaggttatattagttagtggattttcaaagatgttttcaatgactggacttagaatagggtatgtttgtgcaaatgatgagttcataaattctataataaaagttcatcaatataatgtatcttgtgcgccttctatatgtcagtggggagcatatgcagggttaaaatactgcatgaaagatgtagattgtatgaaagaagagtttataaaaagaagagactttgtatatgatagattaaagtacatgagtatagatacatatctccctaatggagctttttatatgtttccttccataaaaaaatataatatgactagtgaagaattttgtgaaagacttttgaaggaagctaaagtggctatagttcctggctcagcctttggggaaatgggagagggatatattagaatatcttatgcctatagcatggaagaattaaatgaagcactaaatagaatggaagcatggctaagtaaaatcacaatg

SEQ ID NO: 16642 - DNA, 339 bp, Clostridium botulinum
atggcaagaggtggattccctaacatgggtggagcaaatatgaataacttaatgaaacaggctcaaaagcttcaacaagatatggaaaaaatgcagggagaaatggaaaagaaagaattttcagctacagttggaggaggagcagttacagctgttgctaatgggaaaaaacaaatagtagatataaaaattgaaccagaagttgtagatgaagatgacatagaaatgcttgaagatttaataatgagtgcatgcaacgaagctttaaagaaagctgaagaagacacttcaagcgaagtgaaaagattaactggaggaatgaacttaccaggaatgttc

SEQ ID NO: 16643 - DNA, 2169 bp, Clostridium botulinum
atgctagaagatttaatgataaaaataaaatatagtttcactgaaaaagaaatagagtttatcaaaaaagcatataattttgcttgcaatgcccacaaggaacaaaagagaatatctggtgaaccttatataacccatccagaagaggtggctataatattatttgaaatgggtatggatgttaacaccatgatagcagggcttatgcatgatgttgttgaagatactcaatatacatatgaagatgtagctaaagaatttggaaatgaagtagcagatttagtaaatggagttactaaattaggtaaaattgaatacaaaacaaaagaagaacaacaagctgataatgtaagaaaaatgttattagcaatgacaaaggatataagagttatacttataaagttagcggatagattacataatatgagaacattaagatttatgcctgtagaaaaacaaaaggagaaagcccaggaaactttagacatctatgctccattagctcatagattaggaatatctaaaataaaatgggagctagaagacttatcttttagatatataaatcccaatgaatactattttttggtacgtaaaattgcagagaaaagagcagagagagaagaacatataaaagaaataatttcaaatttacaacaaaacctaaaaagatcaggtattgaatcagaaatagatggaagaccaaaacatttctatagtatatataaaaaaatgcataacaaaaataaaaatttagatcaaatatttgatttgacagcagttagaatattagtagatacagttaaggattgttatgcggccttaggtatagcgcatactgtatataagcctataccagggagatttaaagattatatagcaatgcctaaacctaatatgtatcaatcattacattccacggtaatgggagtgggtggtagaccttttgaaatccaaataagaacttatgaaatgcataaaactgcagaatatggtatagcagctcactggaaatataaagaaggcgtagagaattctaacaatatagatttaaaattaacatggcttagggaaatgttagattggcaaaaggaaactacagacccagaagagtttatgcaaggatttaaaatagacttattttctgatgaagtttttgtatttactccaaagggaaaagttataagcttgcctaacaaagctacaccagtagattttgcatataaaatacatacagatataggccacaggtgcataggtgccaaggtgaatggtaaaatggtgcctttagattatgaacttaaaactggagagataatagaagttttaacttctactacacctaaaggaccaaatttagattggcttagtatggtaaaaagcaatcaagctaaaagcaaaataagagcctggtttaagaaagaagataaagaagaaaatataactaaaggtaaagatatattagaaaaagaaactaaaaaacaaggctataactttggggaacttgcaaagggtgaagttttggaaactgtattaaaaagatacaatatgagcagtatagaagatatgtttgctgctgttggtataggggctttagctgcttcagcggtagtattaagatttagagaacagtatttaaaaaagaataaaccagagcttaattggaatgaagttagggaccaaataaataaatcaaataaacaaaagaaaaagaagagtagttcaccaggaataatagtaaaaggtgaggataatttattggttaggtttgccaaatgttgtaatcctgtgcctggagataatataatagggtatataacaaaggggagaggaatatccatacatagaactgattgcgaaaatatggaacaattggtagaagaagatccaacaaaaatagtagaggttagttggggaaaacccaagggcggagagtatatttcagaattagaagttatagctgaaaatacagatggtctattagcagatattatgctgactataaatgggagtaagacaaatctttatgctgtaaatgcaaaacctattagaaatgactcagtagttgtaaatataaaattaaaaataagtaatatagaagatttaaaatcagtaatgaaagatataagaaaactaaagggtgtattagaagtatataggactaaaaaa

SEQ ID NO: 16644 - DNA, 1617 bp, Clostridium botulinum
atgatgaaaaaaggtatagctgcttcaaagggatatgctataggaaagatttttattaaggaagacataaatatagaagttgtagaaaagagtatagataacatagaggaagaaaaagaaagatttaaaagtgcattaagtaatactagagatcaacttgaaagaataaaggacaaagcacagaaagaagtaggagcggaaaaagcggcagtttttgatagtcatattatgttattagatgatccagaatttgctggagctgtagaaatgaatatagaatctaataaagttaattcagaaaaagcacttcaagaagttattgatatgtatagttctatatttgcttctatggaagacgaatacatgagagaaagaggagcagacataaaggacgtaggtaagagaataatgctaaatcttatgggaaaatcagtaaatagtatggacgatttggataaagatactataatagtagctcaagatttgactccatctgatactgctcaattagataaagaaaaagtaatagcttttttaactaatataggtggaaggacttctcatagtgctataatggctagaacattagaaataccagctatagttggtatgaaagatataactgaatctgttaaaaatggtgatgtagtaatagttgatggaattgaaggtatagtaataataaatccagataaggaaactatagaaaagtatgaagaaagtaaaagaacttttctaaaagaaaaagaagaattaaagaaacttataaatgttgaaaccattactagagaaggaaaaagagtagaagtttgtggaaatatagggaaaccccaagatgttcatcaagtattagaaaatggtggagaaggtgtaggtctttttagaacagaatttttatatatggatagggataatatgccatcagaagatgaacagtttgaatcctataaatatgcagtagaaaaaatggaaggaagacctgtagtcataagaactttagatataggtggagataaaaaacttccatatttagaaatgccagaagaaatgaaccctttcctaggatacagagctataagattatgtcttgatagaaaagaattatttaaagttcaattaagagcattgcttagagcatcagcttttggaaatttaaaaataatgtttccaatgatatcatctttatctgaatttagggctgctaaagaattattaaaagaatgcatgagcgagttaaaatcagaaggaaaagaatttaatgaaaatttagaaacaggtataatggtagaaataccagcagctgccatatgtgcagatgaacttgctaaatatgtagatttctttagtataggtactaatgatttaatacaatatacattagctgcagatagaatgaatgaaaaaatatcatatctttatgatccaatgcacccagcagtattaagattaataaagatgactatagatgcagcacataaagaaggaaaatggtgtggaatgtgtggagaaatggctggggatgaaaatgctatagaaactcttgtagaatatggattagatgagtattctatgagtgcatcttctattttaacagcaaaaaaaataattatgaattct

SEQ ID NO: 16645 - DNA, 537 bp, Clostridium botulinum
atgtatgaatatttagatagaagatatgctttagccctctatgaagtagcagaagagaacaataaagtagatgaatacttaagagacttaaaagaagttgtaaatataataaaaaatagtgaagatatttgcaaaatactaaaacatccagaaataaatacttctagaaagaaagagatatttactgaattatttaaagacaaagtagatgataaaattttatcatttttattagtattaatagaaaaggatagaattttatatttagaagaaaagctaaaagaaatggaaaaaatctatttagagaaaaataacatgattttagctaatattaaaactgtaattccactattaaaagaagaaagagaagaattgatagaaaaattaggaaataaatataataaaaaaataatattagaagaagaaatagataaaagcataattggtggagtatatgtaagagttggagatgacgttttagacggtactctaagtacaagattaaaagacataaaaaaaatgatgctcaaaagagaa

SEQ ID NO: 16646 - DNA, 1683 bp, Clostridium botulinum
ttggcagaaaaattctatactttacttacagaaataggcaaagctaaaatagctaatagtgctggatttggaagtaaagttaactttgtaaaaatgaaagttggagatggaggaggatcttattacaatccaagagaagatcaagaagatttaatcaatacagtatgggaaggtaatataactcatgtggctatagatgagaaaaatcctaattggataaacgtagaaatgatgattcctgcaaatgttggcggttttatgattagggaatatggggtatttgatgaagataataatatgttagctatagccaaatgtgcagaaagctataaaccacttgctgaagatggcagtacaaaagaactgataatgaaaatggtattaacagtttctaatacagaaaatataactcttaaaatagatccaactataatttttgctaaaaaatctgaaattgaagtacttgaaaataaaataaaaaatattaaagttccagtgacaaaagttaatgaaaaaataggagatgtagtattaacggccagcgatataaaaacagaagatggaaagacagttgagtcacaattggctgatattacgaaacaaatagataatatagatttaagtgcagataaagttacattaaatagttctaatataaaatctaaaaatgttaaaggtgctttagaggaactttttacatctgccagtaatggaaaaaataaaatagctactgctattactggcaaaggtatacaatcaagtggtaatgattcatttgatactttatcaaataaaattaaacaaattccagcatactctccagctaatttattaattgaggtcaaacgttcctctccaataacaattcctgattatgatacaatagaaaaaatagcattagatgtttatggtaagatatattgtaaatctactaaaatattatcaaaaatagatgaagatggatatatatattggcaatatacacatgatagaattataacatccgtaacagtaaaaaatggttatgtttatattgcagattgggaaggtaatcgtataattaaaattaattcatcatctggtgagataatatggaataatcgttattctagtaaatacggtacagaatctatagtaatagatgataataatattatttatgctgggactgacaatggaaaggtaataaaaatagattctacaggtgaagttatttggacgtatgataaacataaaagcagggtagatgcaatatcaatagataaaaatggttatatttatagtggtggtggtaatagattagtaaaactttgttcaaatggcggtgaagaatggatacgtgatttcggtagaagtatagcttcaatagcaatagatagcaatggttatatttatattggatttattaattacggtattgttaaaataaatccagataatggagaacaaatttggcatgttgatcttggtcttaatataagtgcaaattcaatatttgtagatgattatgtttacgttgcaagttccgataaaattataagaaagataagtttagacggtcttcaaatatggaaatattattgtgattataatcttaggtcaataataaaaagatatagctatatatatattggacatgataaaattgtaagaaaactaacagatgaaatatatgtgaaaaaa

SEQ ID NO: 16647 - DNA, 525 bp, Clostridium botulinum
atgaattttatacaaaatatggatatatatttattggattttattcataaaagtattgcaaatgattttttagataagataatgatatttataacgtccataggtaatttgggattaatttggatagcaatatctgtacttttattaataagtaagaaatatagaagagtaggaatgttatgtatagctacgttaatactaagttccttaataggtgaggttgtacttaaaaatttagtacaaagaggacgaccttttacagctatagagggaataaatctgttggttaaagcacctaaaagtttttccttcccatcaggtcatacagcctcatcctttgctgtggctacagttataggaagaaaaataaaaagctttaaattaccaatatatatattagcctttgctatagctttttcaagattatatttatatgttcattatccatcagatgtattagtaggagctttaataggtataattagtgctaacataatactttatatttataataaacagaatttt

SEQ ID NO: 16648 - DNA, 522 bp, Clostridium botulinum
atgtcagaagaaaaagcgaaatggtatgtggttcatacatattcaggatatgaaaataaagttaaagttaatcttcaaaagactgtggataacagaaatttacatcactggatttttgatatacaagttcctatggaggaacaggttgaagttaaagatggtaaaaagaagataacattaaagaaaacttttccaggatatgtattagttaaaatgttaatgacagatgattcatggtacatagttagaaatactagaggggtaacaggatttgtaggtccaggatctaaaccagtacctcttacagaagaagaagtattgtctatgggaataaaagaaaaacaaccagaggtagatgttgaggttggagaaaatgttaaggtagtatcaggacctttagaaggattcccagcgactatacaggaaattaatgtagaaaaaggtaaaataaaagctttagttaatatgtttggcagggaaacccctgttgaacttgattttaatcagatagaaaaacttgat

SEQ ID NO: 16649 - DNA, 1032 bp, Clostridium botulinum
gtggaagacgtgaaagtaaaagattttgatttttatttaccagaggaattaatagcacaacatcctatagagaaaagagatgaagccagactacttgtattagataaggaaacaggtgaaatagaacataaaatatttaaggatattttagactatttaacaccaaatgattgtttagttctaaataatactagagttttacctgcaagacttataggagcaaaagaagaaaccggtgggaaaatggaattcttgcttttaaaaagaaaagaaaaagatgtatgggaaactttagttaaaccaggaaagagagctcagattggagcaagatttatatttggcaacggagagcttaaagcagaagttataggaatgggagaagagggaagtagaatagtaaaattttattatgaaggtattttcgaggaaatattagatcaactaggacaaatgccgctacctccatatataaaggaaaaactagatgataaagaaatgtatcaaacagtttattcaaaggaagagggatcggcagcagctcctacagcaggacttcattttacagaggaacttttgaaaaaaatagaagaaaagggtgtgaaattagcctttttaaccttacatgtaggattaggaacttttagaccagttaaagtagaggatattcaagaacatgttatgcattcagaatactataaaatggataaaaaaactgctgaaataataaatgatacaaaagaaaatggtggaagagttatagcagtaggaactacttcttgtagaacattggaaactataggagccatagaaggtaaagtaggagaacaatcaggatggacagatatatttatttatcccggatataaatacaaagtagtggatgctttaattactaatttccatcttccacaatctacattattgatgttagtatctgcattagcaggaagagacaatataatgaatgcatataatgttgcagtagaaaaggaatatagattcttctcttttggagatgctatgtttattaaa

SEQ ID NO: 16650 - DNA, 1344 bp, Clostridium botulinum
gtgtttaagaaaatacttgtggctaatagaggtgagattgcggttagaataattagagcttgtagagaaatgggaatagaaactgtagctatatattcagaggcagataaagatgctctacatgttcaattggcagatgaggcagtttgtatagggcctccttcttcaaaggatagttatttaaatatgtataatataataagtgctactgtattaacaggatcacaggctattcatcctggttttgggttcctatctgagaatagtaagtttgctaatatgtgtaaagattgtaatatagtttttataggaccagacagcgaaacaatagataaagtgggaaataagtccaatgctagagatataatgataagggcaggagtgccagttattccgggttctaatggagtaatacataatgaagaagaagctttaaatatagcagaagaaataggttacccagtagttgttaaagcttcagcaggcggtggaggacgtggaataagaatagttcattccaaggaaaatatgataaaagcttttaacactgcaaaatctgaagctaaaggtgcttttggtgatgatagtatgtatgtagaaaaattcataaaaaatccaaggcatatagaatttcaaatactaggagataactatggtaatataatacacctaggagaaagagattgttctcttcaaagaaggaatcaaaaggtgttagaagaagctccatctcctcgtatgaatgaagaattaagaaaaagaatgggggatgttgctataaaggcagcaaaggctgttgagtataaaaatgctggtactatagaattcttactagatgaagatgaaagtttttattttatggaaatgaatacaagaatacaagtagaacatccaataacagaaatggtaacaggtgtagatattttaaaagaacaaataaaaatagcttatggagaaaaattaaatataaaacaaaaagatataaaaatacaagggcatgctattgaatgcagaataaatgcagaagactataaaaatggatttagaccttgtcctggtaaaatagagaatttatacatcccaggaggtttgggagtaagattagatagttcagtatattcaggatatactatacctccatactatgactctatgataggtaaacttatagcttatgggaggaatagagaagaaactatacaaattatgaaaagagcattaggagaattgattatagaaggtgtaaacaccaatatagattttcaatttattatattagaggatgaaaattttataaagggagaatacactacaaaatatatagaaaaaatgctaactgacaat

SEQ ID NO: 16651 - DNA, 486 bp, Clostridium botulinum
atgataaagactgctattgttacaataagcgataagggttcaaagggcgagagaaaagacgaaacaggaaaggtactacaggatattttagaaaaagaaggatataaagtagagtattataaaataataccagatgaaattaatattataagtggagagcttataaagttatgtgatgaagataaagtaaatcttattattactaatggaggtacaggcttttctaaaagggatgtaactccagaggctacagaaaaggttattgaaaaacatgtaccaggctttggtgaagctatgagagccagttccctttctataacgccaaaggctatactttctagaggaattgctggaattagaaaagattctcttataataaaccttccaggaagcccaaaagctgcagcagaaaatttacaggcagtattaggtgctatacctcatggaatagagattctattaggtgaggcatcagaatgtgctaga

SEQ ID NO: 16652 - DNA, 1452 bp, Clostridium botulinum
atgaaagattataataaagttatatttgagctgtcatcagaaggtagaaaaggctatagacttcctaatttagatgtaccagaagtagaactttcagaattactacctaaaaacttattaagagaagatgaaatagagcttcctgaggtaagtgaagttgatgttgtaagacactatacagctctttcaaataaaaattatactgttgataacggattttatccattaggatcatgcactatgaaatataatcctaaaataaatgaagatatagttgcattgagcggattttcaaaaatacatccacttcaagatgaaaatatttcacagggtgcattagaattaatgtatgatttaaaaggtaaattatgtgaaattacaggattggatgattttactcttcaaccagcagcaggtgcacatggggagtatactggtcttttgattataaaagcttaccatgaaaaaagaggagatacaaaaagaacaaaaattatagttcctgattcagcacatggtacaaatcctgctagtgcatcagtagccggatttgacattgtagaaataaaatctggtgaagatggtagggtttctattgaagaacttaaaaaagttttaaatgatgaaatagcagggctaatgcttacaaatccaagtacattaggattatttgaaaaagacataaagctcataagtgagttagttcatgaagccggtggattattatattatgatggagctaatctaaatgcaataatgggaattgcaaggccaggggatatgggattcgatgtatgccacttaaatatgcataaaacattctcaactccacatggtggtggtggaccaggatcaggccctgtgggagttaaaaagcatttagctaaattccttccagtaccaacagttgaaaaagaaaatgataaatttatattagattataatagaccagattcccttggaaaaattagaagtttatatggaaactttggtgttatggttaaggcatacacttatattttaacaatgggtaaggaaggattaaaatcagcttcccacaatgctgttttaaatgcaaattatataaaagaatctttaagagattattataatattggaaaagatgatatttgtaaacatgaggtgattttaagtacccttaaggaaaatccacatcatatagctacattagatattgcaaagagattaatagattatggtgtacatccacctacagtttatttcccattaataattgaagaggcacttatgatagagcctactgaaagtgaaagtaaagagactgttgatgaatttatagatgctatgaaaaaaatagctgtagaagctaaagaaaatccagaacttttacatgaggcaccagtaaaagcaccggtaagaagattagaccaagtaaaagcagctagaaaacctatattaagatggcaaaaa

SEQ ID NO: 16653 - DNA, 1389 bp, Clostridium botulinum
atgaagctagtagttattggaggaggaccaggaggatatgtggcagctattcgtggagcgcaattaggagcagaggttactcttattgaaaaagaaaagttaggcggaacttgtttaaatattggttgtatacctactaaagttttattacattcttcagaattattaaatgaaataaaagaagctagaactttaggaatagaggtgaataatgaagtaaaaatcaattggactcagcttcaaaatagaaaaaatactgtagtaaatacattagtttcaggggtatcatcattacttgaacataataaagttaaagtaattaatggaactgcagcctttgaaggaaaaaatagtataaaagtaacaaaggatcaaggagaaagtggaaatatccaatttgataatgtgataatttcatctggctccgttccatttatacctcctatagaaggaagagaattagagggagtaattgatagtactggagccttaagcttagattctattcctaaaagtatggtgataattggtggaggcgttataggaatagaatttgcaaatatttttaattcccttgggtgcaaagtaacagttattgaaatgttaccatatatattgcctccagtggatagagaaatttctgagattcttaaggaaaagcttaaaaaggacggaattgatatatataataactgtaaggtaactaaaattgaaaataacaatgaaaatttaaatgtaagttttgaagaagataatgacaagttaaatatagaggcacaaaaagttttaatagcagtaggaagaagagcaaatatagggaatttaaatttagaaagtactggagtatccacagaaaagggctgcattttggtaaatgataatatggaaacaaatataaagggaatttatgctataggtgactgcacaggaaagaatatgcttgctcatgtggcttcagaccaagggataatagctgtagaaaatattatgggtaaaaataagaaaatggattataaaactgtaccagcttgtgtgtatactaaaccagagttagcttctgtaggattaacggaagaacaagcaaaacaaaaaggagttgattacaaagtaggaaagttccctctaatttataatggcaaatcacttataatgaatgatacagagggatttataaaaataatagcggataaaaaatatgaagagatattaggagttcatatacttggacctagggcaacggatttaataacagaggcagccttagctctaagactagaagctaccctagaggaaataattacaacagtacatgctcatccaacaataggagaagcaatgaaggaggcagctcttgcagtaaacaaagaagcaattcatatggtgaataaa

SEQ ID NO: 16654 - DNA, 810 bp, Clostridium botulinum
atgaataaaaaaagattattaggaataacattatcagttttcttaacattaggagtggtaggttgctcttcaaaagaaagtaaagaaacagttaatgataaaaaaactattgtagttggtgcaactccagtaccagcaggagaaattttaaaagtggctcagcctttattagagaaaaaaggctataaattagaaataaaagagtttactgattatgttactccaaatactgctttaaatgatagagaaatagatgcaaacttttttcaacatacaccttatttagataactttaatgtagaaaagaaaacagagttagaggctgtaaaaaagatttatatatcacctttagctttatattcaaataaaacaaaaaaattagaggggttaaaagatggagctactattgcagttcctaatgatcctactaatgaaacaagagcactgagattattagaaaaatcaggacttataaaacttaaaaaaggagatactttaactaagggtgatatagctgaaaataaaaagaatataaaaatcgaggaaatagatgcaccacaattaccaagaatattaaatgatgtagatgctgtggtaataaatacaaactatgctatagaggcaaaattaaatcctttaaaggattctatattaattgaagataaagattctccttatgcaaatgtaatagctgttaaaaaagaagataaggacaaagctcacataaaagcactttcagaggctttaacatctaaagaagtaaaggactttataaatgaaaaatacaaaggtgttgtaattccaacattt

SEQ ID NO: 16655 - DNA, 1443 bp, Clostridium botulinum
ttgataaataaggattatgaaagtatgaccgttaaagagttaagagaaatagctaaaaagcttgatataaaaaatatttctaagttcaaaaaaaatgaattaatagaagaaataaaaacttcaaagtcaacagccatagagaaagatgggaaaattttagttgaaaaaatatcacctaaaatcataaaaagtgaaaataatatacatagcaaaataactaaagaaaatggtattaatgaagaaaaaaccagttcacttatgaagaataacgaagaaaataaagctgaaaggctaaaagagatgataaatgaatctcaaagagctaagggtgttttagagattatagaaaataataattatggatttctaagaggacaaaattatttgtcaggcccagaagatatatatatatctccatcgcaaataagaagatttaatttaagaacaggtgatgaagttgaaggaaaggttagaataccaaaggatggagaaaaatttaaagccttaatatatgtagaaagggtaaatggagaaaatcctgagaaagcagtaggaagaaaaccttttgaaagcttagtacctatatatcctaatgaaaggattaaacttgaaacaaattcacaagatttatctacacggctaatggatataatatcacctataggtaagggacaaagaggaatgatagtagcccctcctaaagcaggtaaaactactcttctaaaaaagatagcccaaagcatttcccgaaataatccattatgtaaacttatagtacttttaattgatgagagaccagaagaagtaacagatatgcaaagatctattaaaggagaagtaatatactcaacctttgatgaagagccagaacatcatacaaaggttacttatatggttttagaaagagctaaaagaatggtagagcaaggacaggatgttgttatattattagatagtataacaagattgtctagagcatataatttaactattacaccaacaggtaggacattatcaggcgggttagatcctggtgcattagtaatgccaaagaaattcttcggtgctgctagaaacattgaaaatggtgggagtttaaccatattagctacagctttaactgaaacaggaagcagaatggatgatatgatatttgaggagtttaagggtactggaaatatggaagtacatcttaatagaaaacttcaagaaagaagaatattccctgctttagatatttataaatcaggtacaagaagggatgatttattgtttacagattctttagaaaaagaaactgcatttaacataagaaagcttctttatgaggaaaataatgtagagaatgtaactgaacaagttttaagtatattatctaaaactaagactaatgaggaatttgtaaacataataagcaaaatggatatgaataaaaataataga

SEQ ID NO: 16656 - DNA, 1211 bp, Clostridium botulinum
tcaaatgtaaaagatatagctcaaagtatatatgacataattggtggtagtagcaatatagtttcatttacgcattgtatgacaagattgagacttgtgcttaaggatcaaaataatctagagatgaaggctataaaaaaaattgatggagttataggcgtagtacagcaacaaaatcaacttcaaataattcttggaccaggtagagtaaataaagttacagaggaatttgaaaagctttgtggaattcagatagaagcagtaacaaaagaggttgagtttggaaatggaagtaagttaagagaagaaataaaggaaaagaatgcaacgccatttaaattatttttaaagaaattatctaatatattcataccattaattccagcatttatagcttgtggattagttactgcaatattaaatatagtgcttaaattagatccagcatttgcagaaacaacaattggaggattattaaaaatagcaggtaatgcagtgttttgggggttaaatctatttgtaggtgttaatgcagctaaagaattcggtggttctccaatgcttggaggtactatggcggctataatatctcatccagaattagctaaggtaacattgaatggtcaaaagcttttacctggtagaggcggtattattgcagtattattagttgttgcattttcaagttttttagaaaagaaagtaagaaaaataatgccagatgcattagatttatttatgactccattaatagtaatattggtatcaacttttgtttcaatatttgcattacaaccagctggtggatttatttcagatgctataggtaatggaactaaagcagcaatttcaggtggtggagccgtaacagggtttatattaggaggatttttcctaccattagtaatgacagggttacatcaaggactaacgccaatccatgcggatctattaaaaactacaggtttaaatccacttcttccaatattagctatggcaggagcaggacaagtaggagcagctatagcagttttactcagaaccaaaaataagagattaaaaaagacaataatctcagcattaccagtgggaattatgggagttggagaacctcttatatatggtgtaacattgccgttaggaaagccatttataggagcatgtataggaggagcagtaggtggtgcagttcaagctttgtttaaagtctc

SEQ ID NO: 16657 - DNA, 1359 bp, Clostridium botulinum
gtgtgtaaaattaatataaaatcttttttcagcataataatttcaaaaatggttctaaagctgtctaaaacactttttaaaggtggaaccaacttcccggggaaagttgctttaaaattagataaaaaaatattaaaaacagtagctaaggattacaaagtaatccttgtaacaggaactaatggtaaaaccaccacaactagtatgatatacaatatgattaaagacagtaataaatttgtaatatccaacagtactggtgcaaacatgtttccaggcatagtagcttgttttgtagaaaacttttctttcaataataaagaagaaaaatatgcggttatagaagtagatgaagccaatgtaaaatttattacagaatatgtatctccagaaataataactataacaaacttatttagagatcaactagataggtatggagaagtttatactactttgaaaaaaatattagagggtattgaaaaatctccaaattcaaaacttatattaaatggggacgagtcacttttaggtgatttaaataattctcttcctaataaagttctatattatggattttcacattttaagaatgctgatactgtaatagatgtaaatgcagattcaaaattttgtaaaaagtgtaagcatccttattcttatgagtttttaacttataatcatttaggaagctactactgtgaaaactgtggatataaaagacctaacataaccttctctttagatgaagtagaagatttaacccctgagggttctttagttataatagacaatcaagaatattacataaatcaacctggactatacaatgtttataatgccctatgtgcttattctatggctaaaacattaggtatagaaaaatctatcatatttaattcattaaagagtcaaaagagtagttttggtagacaagaaagtataaatatagaaggtaaagatgttaaaataatactagttaaaaatcctgctggatatgaccaagctataaatactatagttttagacaagaaaaaattaaatttagccctacttttaaatgataactatgcagatggtagagatgtatcttggatatgggatgtaaagtttgaaaaattaaaatctctagatatagataatatattaatctctggtgtaagattatacgacatggctataagattaaaaatagcaggtcttccaaatgaaaaatttaaaatttctcaaaatcatgatgatttattagaggatataaaaagttgcagagaagagaccgtatatattttggctacatatactgctatgacatcttttagaaaatttctaaattctaaaggatatattaaaaaattgtgg

SEQ ID NO: 16658 - DNA, 603 bp, Clostridium botulinum
gtgaattatatgaaaaatccttttaaagttttaatatacgatttaaaaaatgctaaggagaaagatccagcagctagaaacattttagaagtttttatattgtatccatttattcatgctctaataggttataggatagcccatttattttataaagcccatttatttttcttagctagacttatttctcaaatatcaagattttttacaggtatagaaattcatccaggagcaactataggaaaaggtctttttatagatcatggtatgggtgttgttattggtgaaactgcggaggttggagataatgtaactttatatcatggagtaactttaggcggaacgggaaaagataaaggaaagagacaccctactgtaggtaataatgttataataggaagtggggcaaaagtactaggacctataaatataggggataatgtaaaaataggcgctaatgcagtggtactgcgtcatgtaccagctaatgctacagcagtaggtataccagctaaggtagtaagatatgaaaaaaagtcatccgttatagaaataagagactacaatggtgttaaaaaagtaatatacaatgatatgataata

SEQ ID NO: 16659 - DNA, 195 bp, Clostridium botulinum
atgactaagacttttgatttaggggatatagtggaaatgaaaaaatctcatccttgtggtcataataggtgggaaataataaggatgggtgcagatataaaaataaaatgcttaggctgtagtagaataataatgataccaagaagcacctttgaaaaaagattaaaaaatgtattagaacataaacaaaaggat

SEQ ID NO: 16660 - DNA, 1134 bp, Clostridium botulinum
ttgagattaaacaatagctttaaaggcggtgtatttaaaatggaagattataatttttatatggaaaaagccttgaaactagctgaaagaggtgagggtaaagttaatcctaatcctaaagtaggagctatagtagttaataacaacaaaataattggagaaggttatcacaaatattttggaggacctcatgcagaagtttatgctcttaaagaagcaggagaaaaggctaaaggggctactatatatgttacattagagccctgctcacattatggtaaaactcctccctgtgcagagtctatagtaaagatgggaatatctaaggctattatagctatgaaagatcccaatcctttagttgagggtagagggatagatattttaaagcaaaatggaatagaagttataacagggattatggaaaaagaaagtaaaaaattaaatgaagtatttataaaatacataactaaaaagaaaccttttgtagttttaaaaactgcttctaccttagatggcaagattgctacaaaaacaggagaatcaaaatggataacaggagaagaggcaagatataaagtacatcaaataagaaatgatttgtcaggaataatggtaggaatagggacaattataaaagataatcctcttttaaatacaagaatagaaagaggaagaagtccaaaagcaataatagtagattctagtcttagaattccattagagtctaaaatattagaaactcttaatgaaagaactatttatatagcaacaactaaaaaacataacaatttttcaaaaaagaatgctttagaaaatttaggggctaaggttttagagtttgaggaaaatgaagagggaaaagttccattgaatgaattaatgcaatatttaggatcagaaggagtggatagcattcttttagagggaggcagcacattaaatttttctgcactaaaagaagggatagtagataaagttatgtgttttatagcacccaagataatgggaggacaggattcaaaaaatatgataggtggaaatggggtagaaagtttaaaagatatatttaatctacaaaacttaaaatttgaaaaaatagggcaggatatacttattgaaggctatgtatat

SEQ ID NO: 16661 - DNA, 1503 bp, Clostridium botulinum
atgagagttttggataacactttaaatataataaaaaataaaactttaacttatgaacaaaaggttttatctcttgctcgcgaagctgaaaattcattagatgtccttaaccttccttcagacgtgcaaagtttaagggatgagggcgttatatgtgatttaaatgaaggtaatgcaccttatagacctagatatatttgtcctgattatgaaaaatttatgaaacaaggtagtgaatttcttaacttaaatcctccaaaggatatttgggaagccacaaataacttacttattttgtataaacatgttccttctataacctctatgcctgtttatataggaaatattgatactcttttagatccttttatatcagatgaaaatgaggcttataatgcaataaagctatttttacttcatatagatagaaccataacggattctttttgtcacgctaatataggtcctaaagaaactaaagccggaagacttatattaaaagctcaaagagaacttcaaactgctataccaaacataactttaaaatatggaaaagaaacttcaaaagaatttgctattgactctataaatacagctctgattacagctaaacctagttttgcaaatcatgaaatattttcaaaggactttccttacaacaattatggtatagctagttgctataatggcttgtatataggtggtggtagctttactcttgtaagacttaatctttatggtgctgctaaaaaagcttcatctatagaagatttcttggataatgttttacctaatgttatgacaaaaatgagtaattatatagataaaagaataaattttatagtaaatgaaagtaattttttcgaaagtagctttttagtaagagaaaaattaatacacaaggatagatttacagctatgtttggtatgtttggattagctgaatgcgttaatcatttattaaaaaccagtgagctaaaagatagatttggtcatagcgaaaaagctaatgaactaggtataaaaataatagagaaaatgtacaacatagtaaatagcaatgtaaatgagtattgttcagctacagatggtcactttttactacatgcacaagtaggtatagaaacagacaaaggaacaagtccaggttgcagaatacctattggcgaggaaccaaatttacctattcatctgctacaaagtgctaaatttcatagatactttccatctggtataggtgatatattcccatttgaatctactgcaaagaaaaatcctgaatctatattagacataataaatggagcttttaatgaaggaatgagatacttctctctttacgcctctgatagcgatgtaataagaataacaggttatcttgttaaattatctgatattaaaaaattagataaaggcgagcaagttcttcaagacacagtagctttaggtttaggtgcagttaaaaattctagaatactggaaagaaaggtaagagatgatgct

SEQ ID NO: 16662 - DNA, 498 bp, Clostridium botulinum
gtgatgcatatgaaaaaaaaattaatattaggagctattttaatattacttgccatattggataattctttaatgccttttgtagcaataaaaggtgtatatcctagtcttttattcgtttttatagtaagctactctataataaaggataaatgggaggctatttggattggtattttcgcaggtatgcttcaagatttatactttgctaatgtatttgggataaattctttaataaatatgtttgtttgtttaatagcagccgaaataggtgtaaatataataaaaagtaaaatattaataccagtgatatcttcttttgcactaagcatatttaaaggagttttcatatgggttatagcttattttttaaagattaatataagttatagtttaatagcttttaatagtatatataatggggtaataacaattatagtttataaattagtatataatttatgtagaaaaaaatatatggataaaaagtgggaattc

SEQ ID NO: 16663 - DNA, 792 bp, Clostridium botulinum
gtggttagattgtataattctcaatatgaagaatattataattcattaaaaaatagaaaaaataataatttaagaaatagtaattatatgtatggagaaagaaataatagaagagaaaattttaatagtaatttttttcagaaacgtattattagagatctaataggggtatttttattatcggtatttgttttaggtttaaaagctttttctaattcccaaactcagatggtgtataattactctaaaaaaatagttaatgaaaattatgattataaaaaagtaattaataaggctaaaaacttagatgtaaattttttagaagataaaattttaaaatatatagacacttttaaatcgaaggttacaggggaaaagactatagaagaattaataagtaatgattttgtactacctttagatggcaaagtaacttccacctacggagaaagagaagatcctataaataagaaaaaagcttttcataaagggatagatatagatgctaaagaaaacacagaagtactagcaagttttggtggcacagtaaaggagtgtggagaagataaagagttaggtaaatatatacttttagatcatggacaaggcatagaaactaaatatgctcatttaaataaaataaaggtaaagaaaggggaagaagtgaaaaaaggaaaagatatagctgaaagtggtaatacagggaaaagtacaggagcccatcttcattttgaaataatttatatgggagagaataaaaatccacaagattatttttcaaatataaaagaa

SEQ ID NO: 16664 - DNA, 552 bp, Clostridium botulinum
ttgaaaaagattaaattacaaaacagaccttttggcccgtttcctactatacttgtaggagcaaatgtgaatggaaagcctaattatgtcactgtaggtgcatgcggagtagtaagccttaagccagtgctatatgtatcgcttaaggatagtcactacacaactttaggtattaaggaaaatggttatttcagtgtcaacataccttctgcggacttggttcaaaagaccgattattgtggtatagtatcggggcataaaacagacaagtctaatttatttacatcattttatgatgaacttggaaaagcaccaatggctgaagaatgcacgatgaattttctatgtaaagttatccaaatcattcctgtctttgattttcaaatgtttttaggagaaatagaagctgtatacgttaatgaggaatgtatgacagatggcaaacctgacccattaaaaattaacccactaatgatgatgggctcaaattattatgatttaagcaaaaccgtaggtactttatttaaaacaggtctagaaatactacctaaa

SEQ ID NO: 16665 - DNA, 981 bp, Clostridium botulinum
gtgaaaaaattaaatgaaaattctattgttgaaatgtataaaactatgctaaaaataagaaagtttgagcaagtggcaatgaatacctttgcagaagggaaaattcctggctttgttcatctttatataggagaagaagcggtggctacaggagtgtgtgctaatttaaaggatagtgattatataacaagtactcacaggggtcatggacatatacttgcaaagggtggagatttgaaatttatgatggcagagctttttggaaaggctacaggatattgcaaaggaaaaggaggttctatgcatattgcagatgcaactaaaggtattttaggggcaaatggtatagtaggtgccggtcataatattgcagtgggagctggattaagtgcacaatacagaggaactgatcaagtgtgtgtatgcttctttggagatgcgtcaactaaccaaggtacatttcatgaatctttaaatatggcaagtgtatggaaattaccagtggtttttgtatgcgaaaataacctttatggaatatctatgagtcaaaatagacatcaagcaataaaggatgttgcagatagaggtgttgcttataatgtaccaggtattgtagtagatggtaatgatgtatttgctgtgtatgaagcagctaaagaagctattaaaagagcaagagaaggcaagggaccaacacttatagaatgcaaaacttatcgacatagaggacattttgaaggagatccttgtgtttacaaaccaacagaggaacaggaagaatggctagctaaagatcctataccaagatttgaaaaatatttagtagaaaatgaaattttgacagaagaaaagcttaaagaagttcaaaataaggtagagagtcaaattgatgaagcagtagattttgcaaataatagtccatatccagaattagagtcagtattagaagatgtttatactgacattaaagaggaggttaga

SEQ ID NO: 16666 - DNA, 1278 bp, Clostridium botulinum
atgttagatttaaaaagaataagaaataattcaaatgaaataaaagaatcattaaacaatagaggagaaaagtttgatgtaactgtaattgatgaagtcttaaaattagatgaagaaagaagaaatattttagttaaagttgaggttttaaaaagtaagagaaatcaagtttcttctgaagttcctaaactaaaaaaagaaggaaaagatgtatctaatatagtagctgaaatgaaaaatttatcagaagaaataaaagggtttgatactactttagctaaaatagatgaaaaaatacaatatataatgcttagaatacctaatataccaaacccacaagttccagatggagacacagatgaggataatatagaaataagaaattggtcagaaccaacaaaatttgattttgagcctaaagcacattgggatataggttcaaatttaaatattcttgattttgaaagagctggaaaagtaacaggatcaagatttactttttataaaggattaggagctagattagaaagatcattaatatcttattttctagatactcatacagagaagcatggctacactgaaatattaccaccttatatggtgaatagaacaagtatgataggaacaggacaattacctaaatttgaagaagatgcttttaaaatttcagaggatgattacttcttaataccaactgcagaggttcctgtaactaatttatacagagatgaaatcttaaaaggtgatgaattaccattaaaacatgtagcttatagtgcttgttttagatcagaagccggttcagcaggtagagatacaagaggtcttgttagacagcatcaattcaataaagtagagcttgttaaatttacaaaaccagaacagtcttatgaagaattagaaaaattaactaatgatgctgaaacagtattaaaagagttaggtattccatatagggttgtaagaatatgtaaaggtgatttaggatttacagctgcattaaaatatgatttagaagtttggatgccaagttacaatagatatgttgaaatatcaagctgtagtaactttgaagacttccaagcaagacgtgctaatataagatataaagaagatgcaaaagcaaaaccacaatatgttcatacattaaatggatcaggagttgctattggaagaactgttgcagctatacttgaaaactatcaaaatgaagatggatcagttacaataccagaagtgttaagaccttatatgggaggaaaagaagcaataaaa

SEQ ID NO: 16667 - DNA, 337 bp, Clostridium difficile
tttgaaggatattcatttatagactttttaactggtgcagattgggttccttctgccaataaatttggaatatcatctatgatagtagcatcaatatttgcaacacttggagcacttgttataggaagtacctgttggtatattaacctctgtatttatagcagaagtagcacctaaaagattagcaaaaataatgtcaccagcagttgaacttttagcaggtataccttcagtattatatggtgtatttggtcttgcagtgatagttccaactatacaaagtatatttaatcttccaaaaggtcaaagtttgttagcaatagtaatagtattagca

SEQ ID NO: 16668 - DNA, 909 bp, Clostridium difficile
ataagtctaatgggtggattaggtctgttcttatatggtatgaaccttatgggagaaggtcttcaaaaatctgctgggacaaagctaaaaaagataataaaactacttactagtaacctatttatgggagttttggtaggtacaggagttacagcagtaatacaaagttcaagtgctactactgtaatggttgttggtttcgtaaatgcaggaataatgactttaaaacaggcaataggagttataatgggtgctaatatagggactactgttacagcccaattggtatctttcgacttaactggtatggccccagtagcattaggtgtaggtattatactttatttatttggaaataagcctagaataaaaaatatagccgaaatacttataggttttggtatattatttacaggtatggattttatgaagatggcagtggagccactaagagactatcaaggatttactgacttacttgttacatttggtagatatccactacttggattattattgggatttgggattacagcaataatacaaagttcaagtgcatctatgggtatgttggttgcactggcagcagaaggtctagtgccattatcagcagcactgccaattctttatggccaaaatattggtacatgtgtaacttcactgttatcaagtattggtgctaacaaaaatgcacgaagagcagctatgatgcatctaatcttcaatgttttaggaacggtgatattcttaatattcttgaataaaccagtagtaagcatggttacaagttgggacccaagcaatgttgcaagacaaatagccaatacacatacattgtttaatataatatctgtattgatacttttaccatttacaaatcttattataaaactagctataaagcttgtt

SEQ ID NO: 16669 - DNA, 366 bp, Clostridium difficile
atgctttcagcgcttatccattccgtacatagctacccagccatgcccttggcaggacaactggtacaccagaggtacgtccatcccggtcctctcgtactaaggacaggtcttctcaaatttcctacgcctgcgacggatagggaccgaactgtctcacgacgttctgaacccagctcgcgtaccactttaatgggcgaacagcccaacccttgggacctactacagccccaggatgtgatgagccgacatcgaggtgccaaacctccccgtcgatgtggactcttgggggagataagcctgttatccccagggtagcttttatccgttgagcgatggcccttccacgcagaaccaccggatcac

SEQ ID NO: 16670 - DNA, 288 bp, Clostridium difficile
atgctttcagcgcttatccattccgtacatagctacccagccatgcccttggcagaacaactggtacaccagaggtacgtccatcccggtcctctcgtactaaggacaggtcttctcaaatttcctacgcctgcgacggatagggaccgaactgtctcacgacgttctgaacccagctcgcgtaccactttaatgggcgaacagcccaacccttgggacctactacagccccaggatgtgatgagccgacatcgaggtgccaaacctccccgtcgatgtggactcttg

SEQ ID NO: 16671 - DNA, 363 bp, Clostridium difficile
atgttaaatatagatgaaataaaaaaattaataccacatagatatccatttttattagtagacaagattacagagctagaagttgggaaaagagctgttggtataaagaatgtaacagttaatgaaccatttttccaaggtcactttccagaatatcctttgatgccaggagtactaatagtagaagctctagcacaagtatgtggagtggcaatgatgtctgtagaggaaaacaaaggaaaactaggtgtatttgcaggtatagataaagttagaatcaagagagaagtaagaccaggagatacattaactatggaagttgaaatgacaactcttagaaaaaatatagctaaggcagatgcc

SEQ ID NO: 16672 - DNA, 305 bp, Clostridium difficile
aaaaaaggaataaactttttagaggaagttagtagagtactagagttagataatattacatttatacatggaagagctgaagattgtggtaaaatgaagactatagcgaaaaatatgatgttgctacggcaagagctgttgctggattaccgattcttatggaattttgtgtaccatttgtaaaagttggagggtattttatttgcttaaaaggtccgaatgctaatttagagctagaagaatcacaaaaggctattgatgttttaggattggagtatattgaaaaaatagatgtagagttaccc

SEQ ID NO: 16673 - DNA, 693 bp, Clostridium difficile
atggttaaacctagattatatggagaagatgcaaatgctaaatctgcagcattatatacattaacttatgttcttgaaaaaatattaaaattattacatccatacatgccatttataacagaggaaatatatactcatcttcctactgttgaaggatgtataatagtatctgaatggccaaaatataatgaagaagataacatggctgaagaagaagatatgatgaacttattgatggaaggtataagaagtataagaaatgtgagagcagaaatgaatgtaccaccttctaagaaagctaaattgataataatcccaagtgaagaaaaaatagaagctattgagcttggtaaagactattttataactttagcatctgcttcaaatgtagagatagcaaaagataaatctaatgttccagaagatgcagttggagtagttattgatggtgttgaaatatttatacctcttaatgaattagttgattttgaaaaagaaattgagagattgtctaaagaaaagaaaaagttagaaggcgaaataaagagagttaatggaaagcttgcaaatcaaggtttcttagcaaaagctcctgaaagtttaattgaagaagaaaaagcaaaaaaagaaaaatttgaagagatgattaaatctgttgaggaaagattaacaaatttagaatctaaaataaaa

SEQ ID NO: 16674 - DNA, 480 bp, Clostridium difficile
atggtacgagggggaaaagacatgaaattagaggataaagtaataacaggattagctactagtgatgatgacagttctataacaataaaagattttaaagctgaaaatatatctagcttatttgaagatatagcaactataggtataagtgtagatatgataagccaaactgcacctattttagataagataagtgtatcatttacagttccaaaagaagagttgggagaatgtaaaaagatagtatctaaatatacagatgaagaacatgtagtgattgataataatatcactaaattttctttagtaggtcttggtatgaaaaatacttctggagttgctgctaaagtatttaagatattcaatgaaaatggtataatgataaaacttataactacatcagagattcgtataacttgtgctataaattctgatgataagcaagtagctatagaaaaaatagcagaagtatttaatata

SEQ ID NO: 16675 - DNA, 318 bp, Clostridium difficile
  misc_feature (13)..(13): n=g, a, t or c
  misc_feature (16)..(16): n=g, a, t or c
  misc_feature (89)..(89): n=g, a, t or c
atgaatgtctttntanatactcatacagctaagcatggctatacggaagtcttacctccatttatgaccaatagaaatagttttatagngactggtcaacttcctaaatttgaagaagatatgtttaaaatagaaggattagagtatttcttaataccaacagctgaagttcctgttactaatatacatgctaatgaaatattagatgttgcagagcttccaattaaatactgtgcatatactccttgttttagatctgaagcaggttcagcaggaagagaggtactaccgttatgcaatttggaagaggtgaaggta

SEQ ID NO: 16676 - DNA, 897 bp, Clostridium difficile
atgaaaaaagtaaaacttatatacaatcctaattcaggtgaaaaaaagatattatcaaatttagacactatcatagaattatatcaagaaaaaaattatttattgataccctatagattaactattaaagaacctgtaaagaatgcatttaaggaagttgatagttcttatgaacacatattgatagctggtggtgatggtactgtagatttagtagtaaatgcaatgaaagaattagacataaaaattccaattggaattttgcctacaggaactgcaaatgatttttcaaatgctcttcaaatttcatttgatataaaagaagctataaatgaaatcataaattcaaaaccaaagaaaatagacatagggaaagtcaataataagtactttataaatgttgcaagtgctggtatgtttacggatgtatcacaaaggataaacacagacttaaaaaattcatttggaagaatttcttattatataaagggaatagaagaagcattgtatatgaggaaatttaagataaaagtatcttctgaggaaatgtattatgatggagatatgtatcttatgttgatttttaatggcaaaacagcaggaaatataaatctagcatataaggctgaaatagatgatggatatttggatgtaattatttttaaaggaatgccaataccaaaatcaataccagttttgataagtgtgcttagaggtgattatttagatcaatataatggaaatgaaatactatactttaaaactaaaaaggtgcatatagaatgtgaagattcacttataacagatattgacggagaaaaaggaccagattttcctcttaacatagaatgcataaaagatggaatagaagtcatgggaatctgtagtgaaaaaagt

SEQ ID NO: 16677 - DNA, 1662 bp, Clostridium difficile
atgtcaaatgaaacgaactcatctaactttataaagaatattattataaacgacttagaaacaggaaaacatgacagtatcataactcgttttccacctgagccaaacggatatttacatattggtcatgcaaaaagtatatgtcttaattttggattagctaaggagtttaatggaaaagctaatttaagatttgatgatacaaacccattaaaagaggatgttgaatatgtagagtccataaaagaagatgtaaagtggttaggatttgattggaacgagttaaattttgcatctaactactttgatgaaatgtataagagagctttaatactaataaaaaagggtaaagcttatgtatgtgatttgacacaagaggaaatgagagaatatcgtggtactctaactgaaccaggaaaagaaagtcctcatagaaacagaactattgaagaaaaccttgatttatttgaaagaatgaaaaatggtgaatttaaagatggtgaaaaaacattaagagccaaaatagatatgtcttctccaaatataaaccttagagacccaattatatatagaatatctcattcaacacaccataatacaggagataaatggtgcatatatcctatgtatgcttttgctcatccaattgaagatgcaattgaaggaataactcactctatatgtactttagagtttgaagaccaaagacctctttatgattggtttgttaaagaatgtgagatggaaaatatacctagacaaatagaatttgctagacttaatataaataatactgtcatgagtaaaaggaaattaaaacaacttgtagatgagggtattgttgatggttgggatgaccctcgtgttcctacaatatccggaatcagacgtaagggatatactgcagaagcattgcgcaatttctgtagtgaaataggggtatcaaaagttaactctacggtagatagtcaaatgcttgattatttcctaagagaaaacttacaaccaaaggctcctcttactatgggagttttaagacctttaaaacttattataactaattacccagaagataagattgagatgcttgaaatagagaataatgctaaagatgaatctcaaggaaagagattagttcctttctctagagaattgtatatagaacaagatgattttatggaagaacctgttaagaaatattttagatttttcccaggaaatgaagtccgtttaaaaggtgcttattttgtaaaatgtactgatgtaattaaggatgaaaatggaaatgtagttgaaatacatggtacttatgaccctgaaactaagagtggctctggctttacaggacgtaaggtaaaatctacaatacattgggttgatgctaaatcagctataccatgtgaatttagattatttgaaccattaattcttgatgatatacctgaaaatgaaggtaaacatttcttagaacaaataaatcctaattcattggaaatattacaaggttttgttgaacctacacagataaaagatgctaaaccttttgataaattccaatttgttagaaatggattctttagtatagataataaatatacaactgatgaaaaatttgtatttaatagaatagttcctctaaaaagttcttttaaaccaggtaaa

SEQ ID NO: 16678 - DNA, 363 bp, Clostridium difficile
atgaggtttttctttcaaagtcaagctaaagaagaagctgataagaaatcaagagaaattataggatatgcaattcaaaaatgtgcagcagatcacgtagccgaaactactgtaacagtagtaagcttgcctaatgatgaaatgaaaggtagaataataggtagggaaggtagaaatataaggactttagaaaccttaacaggtatagaccttataatagatgacactccagaagccgtaattttatcaggatttgatccaataagaagagaaattgcaagaattgctctagaaaaattaatagcagatggaagaatacatccagctagaattgaagaaatggttgaaaaggcgacacctaaa

SEQ ID NO: 16679 - DNA, 351 bp, Clostridium difficile
ttgttatataaacagtatggaggttatgttatgaacaataacaaaaataaagactcctttctaaaaggagcccttatacttgggctagcaggtgtaatcgtaaaaataatgggtggattttttaggattccccttggaaacatgattggttcagaaggaatgggatactatcaggctgcttatcctgtgtatactctatttttaacattagctactgctggatttccaacagctgtggcaaaattggtttcggaaaaagttgcaattggaaattttaaaggtgcaaacataatttttattggatttgttattaagtcatttatacataaaaaacatcacaagataagatta

SEQ ID NO: 16680 - DNA, 1482 bp, Clostridium difficile
ttagaaggattaggtagtaagaccttagttgagctacgagagatagctaaagaattaaaaataaaatcaattactacatataagaaaaatgagttaattgagattataaattccaaaagtaaaaatgaggaaaaagtaaacgaagagactaaagaaaaaaatgaagatattaaagaagacataaagaatagaaaagaaaatatagagcgtgaaagtatagaaaaagaagttgaatataagagccctaccaaatcatacaacaagaaagaaatagatacccaaaatatttcccaaaaccaagaacatagaaatcaaagaaatgactataataagacaacgagtgtaaatgatagtaataagtcatcaaatatatctaatagaatggtcagaaataataataaaaactattatatgcctaaacaagttgatgaatctaagatagtagatgaatttaacacatcaaaagaggatgaagtagtaggtgtacttgaaattctaccagatggatttggttttttaagaggttcaaattatttgtctactgaaggagatgtttacgtttcaccatctcaaataagaagatttaatatgaaaacaggagacaagattaagggaataactagacatccaaaaagtggagagaaatttagagcacttttatatgttcaaaaaataaatgatgaaaaccctgacacagctatacaaagaaatgcgtttgagacattaacaccaatatttccagaagaacgacttacactggaaactaatagaaatgaaatagctacaagaattatagatttaatttcacctataggaaaaggacaaagaggattgatagtagcacctccaaaagctgggaaaacagttcttttaaaaagcgttgcaaatagcatagctaaaaatcatccaaatgttgaacttatagtactccttatagatgaaagaccagaggaagttactgatatgaaagaatctattgaaggagacgttatatattccacttttgaccaagtatcaagtcatcatgtcaaggttgcagagatggtgttaaatagagctcaaagattagttgaacatggtaaagatgtagtaattttactagatagtataactagattggcaagggcatataaccttacaatatctcctacaggtagaactttatctggaggtattgaccctggtgcacttcatggacctaaaaagttctttggtgcagcaaggaatattagacagggtggttctttgacaatattaggaacagcattggttgaaactggttctaggatggatgatgtaatatttgaggaatttaaaggtacaggaaatatggagctacatttagatagaaaattagcagaaaaaagaatattccctgcaatagatatttacaagtctggtacaagaagagatgatttattgcttgatgatgaagaaaagactgctctttggagattaagaagagaaatgagtaataattca

SEQ ID NO: 16681 - DNA, 978 bp, Clostridium difficile
gtgggagatgattctatgcaagttaaagttaaaaaggctgtaataccagcagcaggtttaggaactagatttttgccagctacaaaggcacaaccaaaagagatgttaccaatagttgataagccaactctacaatacataatagaagaagctgtggcctcaggaatagaggaaatactaataataacaggtagaaataaaaaatctattgaagaccactttgataaatctgtagaattggaacttgatttagagaaaaaaggtaagaaagaattgttggaggtagtacaaaacatatctaacatgattaacatacattatataagacaaaaagagccaaaagggttgggagatgcaatttattgtgcgaggcattttataggtgatgagccgtttgcagtaatgttaggggatgatattgtagataatgatgtaccttgtctaaaacaactaacagatgcatatgaggaatatagaactacaatattgggtgttcaaaaggtaaatcaagaagatactaataaatatgggataatagaagcaaaaaatatagaaggtagagtttacaaggtaaaagacatggtagaaaagccagagtcaggaaaagctccttcaaatattgctattttaggtagatatataataactcctgaaatctttgatattcttaaggatttaccaccaggtaaaggtggagaggtacaacttacagatgctttaaaaatattatctaagaaagaagctatgtatgcatacaattttgaaggcaagagatatgatgttggggacaagctaggatttttagaagctactgttgactttgctctaaagaaagaagaccttaaggaagattttataaaatatttgaaacatgtatgtagtgaatttgataaaaataacaatgtgttatacaataatacagatgaaaaaatagatttaattgaagtcaatgaagctagagaacttgaaattcaaaaa

SEQ ID NO: 16682 - DNA, 429 bp, Clostridium difficile
atgaaaagttatatagctaagccagctgatgtacaaagaaaatggtacttagttgatgctgaaggaaaaacattaggtcgtttagcaacagaaattgcgacagtattgagaggtaaacataaaccaacatttactcctcacgttgatggtggagattttgttgttgtagtaaatgcagaaaaaatagttttaagtggtaagaaattagatcaaaaatattacagataccatactggttatgtaggtggattaaaagaaatatcttacagagatatgatggataagaaaccagaagaagttatatcacatgctgtaagcggtatgttacctaaaaataaattaagaagcagaatgatgactagattaagagtatttgcaggtgctgagcacactcatgcagctcaaaatccagaagttttaaactttaaa

SEQ ID NO: 16683 - DNA, 390 bp, Clostridium difficile
atggctaacgttcaatattatggaactggaagaagaaaaagttctgttgctagagtaagactagttgcaggtgaaggaaatatattagtaaatggaagagcattagaaaattattttaattatgagacattaataagagatgttaaacaaccattagttttaactggtaatgaaaataaatatgatgttatagtaaaagttgaaggtggaggattcactggacaagctggagctataagacatggaatatctagagctttattaaaagctgatttagatttaagacctgctttaaagaaagaaggtttcttaactagagatgcaagaatgaaggaaagaaagaaatacggattaaaagcagcaagaagagctccacaattctcaaaaaga

SEQ ID NO: 16684 - DNA, 403 bp, Clostridium difficile
ggaatatcaacctgttgtccatcacctacgcctttcggcctcagcttaggtcccgactaacccagggcggacgaaccttcccctggaaaccttgggtttacggcctgtgggattcccacccacatctcgctactcatgccaacattctcactcccatactgtccacatgtccttacggtcatgcttcaacccgtatgggaagctcccctacccatcattactgatgccgtagcttcggtagtaagttttagccccggaaatcttcggcgcaggatcactcgaccagtgagctattacgcactctttgaatgagtggctgcttctaagccaacatcctggttgtctgtgcaatcccacatcctttaccacttaacttacatttagggaccttagctgacgatct

SEQ ID NO: 16685 - DNA, 513 bp, Clostridium difficile
gtagcagtaacaagtgaagtaaaggaaatgaaatagcagcacaaaagattaatgtaggagaccagtgagtgaacaactcaaagataacaagagtttagatggcagtttgtagatgaaaaaactgctcttgaaggtgttagaagaggtacttattatgcatcacttaagattccaaaaaattttacaaaagatttgacatctttaattacagatgatattaaaaaaggcgaaattatctatactgttaatgaaaaaataaatgcagttgcaccagagattacagataaaggtgcttctacaatacaactacaggttaatcagactatagtaaaaacagttagtgaaatcgttcttggtatatcaaacggagttggtgcaggaattgaacacagtcttccaaaattgacaaaagttgaaaattcccttattgaccttcaaaagagatttgaccatataaataagactgttgatttagcttctgatgctacttcaaaattatctgatacagttaaa

SEQ ID NO: 16686 - DNA, 360 bp, Clostridium difficile
atgaaaaaaatagaattacttgcaccagtaggctcttttgattcattaaaagcagcagttcaaaacggagcaaatgctgtgtatttaggtggtaaagactttagtgtagagatctgcaaataactttgatagaaatgagctgattgaggctgttaaatactctcatataaggggagtgcaagtctttgttactgtaaatacattgataaaacagtatgaaatagaagattttgtagagtatgtaaaatttttatacgatatagatattgatgctttaatagtacaggatataggaatggcaagacttataaaaaaactattacctgactttgaactacatgaagcactcaaatggtagaa

SEQ ID NO: 16687 - DNA, 646 bp, Clostridium difficile
gaagaagtattatcagaatccgaacatgcagatatttataagataaaagaagaattgatgacttcatatattcatatggtagaaaaaggtatggaaagtattgaagttgctaacttctatgatgagaattgtaatgatgtaataatagaattgaatacaaacttggctccatctgaaaatgctcaaggatactttaaaaagtataacaaaatgccacatgctaaagtggagatatctcatctaatttccttaaataaggaagacatagattacttagaaaacatagattttaagtattgagaactgtgaaaatttaggtgaattacaagatatgaaagaagaacttgctaaaggtggatacatcaagactcaaaagaaagacagtaaaaaggatactatcccatctacacagcctcatgaatttgtttcttctgatgcatttaaaatattggttggtaaaagcaataagcagaatgactatcttacactaagacttgctgataatgatgacttatggatgcatacaaagaatattcctggttctcatgtaataataaagtgtgctggtaaggaagtccctgataatactgtatttgaaggagctatgctagcagcattctttagtaagtcaaaactttcttctgga

SEQ ID NO: 16688 - DNA, 349 bp, Clostridium difficile
ttatatgcaaatgatttagtagaagatgcaaagaaatggataaaagttatgggaaaaagaaagtccagacataatagttgcagttgtacactcaggggaagaacctaaaacagatagaaatccaggaaatagaataaaagagttagcaactacagtggatggaatagatgcaattgtagctggtcatactcatgaaaaaatagatgaacacaaatataaaaataaatctggagatgaagtaattgttacacaaccaggttggcatggagatagagtatcagagattaatttcaaattaaataaagagaatggaaagtgggacataaaggaaaagtctagtaaattaaaa

SEQ ID NO: 16689 - DNA, 264 bp, Clostridium difficile
atggaaagtatcggaagtcatcttacaaataagtatgcagaaggttactcaggcaaaagatattatggtggatgtgaatacatagatgaagttgaaactcttgcaatagatagaatcaaaaaaatatttggagcagaacatgctaatgttcaacctcactctggagcaaatgcaaatattggtgtatattttgctatgttaaaaccaggtgatgttgtctataattattggtatatcacaaggtatgcaaccaattatagggta

SEQ ID NO: 16690 - DNA, 441 bp, Clostridium difficile
ataagtattgtaggtcttggaccaggagactattctcttataagccaaggtgtgttagaatctttaataaatagccctaaagttttttttagaacagagaaacatccaataattgataaacttaaagaaactatacaatacacttctttagactacttttatgaaaaagaggaaaattttgataatgtttatttgaaaatatctgaatttatcatagaagaatcagcaaagggtgacctagtgtatgctgttcctggtcatccaagagttgcagagaagactgtaagtataatagagagattagccaatgaaaagcacatagcagtagaaatattgccttctatgagctttgtagacgctatgtttaactatttggctatagacccatccgagggatttaaactggtagatgcttttgaaatagaaaattcatatatagac

SEQ ID NO: 16691 - DNA, 573 bp, Clostridium difficile
atgatttttccgtatttttctctgtttggcagtgtgccagaggactttgattccctgactgttgtaatcattttaacaatggtattcatttccggtacgcttcgttttgtacaggaatccagaagcggaaatgcagcagagaaattgttagccatgattacgaccacttgtacagttactcgtagaaactatgaaaaaaaagaacttcctatggatgatttggtggtgggagatattgtacatctttctgctggagatatgattccggcggatgttcgtattttggatgcgaaggatttgtttgtcagtcaggcaagtcttactggtgagagtgaacctattgaaaaaacacccaatgtaagtgctcagaaagaaagcgtgactgattacacaaacattgcttttatggggagtaatgtaatttctggtagcgcaacagctgttgttgtttgtgttggcgatcatactctgtttggctctatggcgtccgcagttgctggagaagcggttgaaacaagctttaccaagggtgtcaatgccgtctcttgggtattgccattgaaacacctaata

SEQ ID NO: 16692 - DNA, 290 bp, Clostridium difficile
gtagaagttgaagtagtattagaagatggagcaatggcgaagagcaatagttccatcaggagcatctacaggagcttttgaagctgttgaattaagagatggagataagggaagatacttaggagaaggtgtagaaacagctgttgctaacgtaaatgaaataatagcacgtgacatagaaggaatggatgcatttgaccaaccagctatagatgcaatcatgatagaattagatggaactccatacaaaggtaaattaggagctaatgctatattaggtgtttcaatgg

SEQ ID NO: 16693 - DNA, 594 bp, Clostridium difficile
gtgaatttttatagatttgtaataaatatttttaagggtttttctaaaatattttttaaatatgaagttataggtgcagagaatattccagatagaggaaatatagtaatagcatcaaatcataaatcgaatcttgaccctatattcttggctgctgccatagaaaatagagaaatagctgcaattgcaaagaaagaattgtttaaagtaaaaccattgggatttatattaaaaaaattgcatgttatgcctataaatagagaaaaaccagatgtatctacaataaaaactattttaaggtcagttagagacggttatgtattaggaatatttccagagggtactagaataaaaggagattcttttggtaaggctaaggcaggtctttctgtatttacaataaaaagtaaatctaaagttgttccagtatcaataatatctaaatataaactttttagtaaagtaattgtatatattggagaaccaatatcatttgaagaacattttaaggaaaaattgagtaatgatgaccatgaaaggatatcacaagagattttagaagtgataaaacaaaattactttaaatattcaaaa

SEQ ID NO: 16694 - DNA, 648 bp, Clostridium difficile
atgggtaatttagttatagctgtagatggtccagcaggagctggaaaaagtacaatagccaagatagtagcaaaaaagctaaatataaattatatagatacaggtgctatgtacagagcagttacttataagtgtttaaaaagtggtattgatgtcaataatgaaaaagaagttattcaaatagctgaaaattcggatatagattttaaagataacaatatatatttggacaaagaagttataaatgaagaaataagaacaatagaagtaagcaataatgtttctaatgtagcaaaaataaaagaagtaagacagttgatggttgaagttcaacgaaaaataggaatgaaaaattcagtaatactagatggtagagatataggttcatatgttttcccagatgcagattacaaattctttttagtagctactccagaagaaagaggaaatagacgctataaagaactttgtaataaaggatataatactactttagaagaagtaattgaggatataataagacgagatgaaattgattcaaatagagaatttgcaccattggtaaaagctaatgatgcactagaaatagatactacaggaaaaactatagaagaagttgtagaagaagttgtatctaaaataaatctt

SEQ ID NO: 16695 - DNA, 868 bp, Clostridium difficile
atgttagatgcatttataacaattgtttcttctattatagaaatatggtcatgtaaaaaagtttttgattatactagtcagtcaaagaccgacttaaaaaaactaaatatgtattttctcttttctgtttttctcattatttcttctttatatataaatataggagctaatagtagaatattgatatgtatatttgtaatgttcgttttctataagtctaactataaggttaatatatataaatgtctggtaatctcatttttttattggttaatattaataggtataaatggattaagtatgttattagtagcaacagtaagcaatttggataatatgaatgttttacttagtggcagtttatatagatatgaagcaatattcttgggaaagataatgttaggtatattactttatgtttataaggcttcttttaaaaattttaaaataagtaaaaaagagatatacatatgtattcctatgatagcaaatttattgtcattttttgtactttatgattatattattaatcttgtaaaaatctctcctgaaagaagaactgcttttttagtaatagttttactattaatattatctaacatttcaatctttgtattaatacatataatacttaagattaaaattaggaaaataagataaattttaatacgattcatttaaattaaaagttaataattacttttttatgtataattttacatgaatttctataaaagttattttattaaagatagatatacttatatatacggatataattaaaaaaagtctttttaactttaaaaattaatgttaaaaaataaacttatacattaatattaataataattatttaaatatcttaagt

SEQ ID NO: 16696 - DNA, 338 bp, Clostridium difficile
atgtcccttaagcataagttacaagaggatttgaaatcttcgatgataaacaaagatacagtgagaaaatctgtagtaactttaataagagcttctataaagcagtatgaggttgataatatggtcgagcttgatgaagatggaattatcgatgtaatagcaaaacaattagagcaacgtagagatgcattagttgaatttgaaaaagctggaagagaagacttatagaagacacagaatgtgaagatgaagtgttagaagagtacttacttcaacatctaggcgaagaagagtgagaggatattgtcgaatctactattcctgaagtaggggcattt

SEQ ID NO: 16697 - DNA, 534 bp, Clostridium difficile
ctatcatcaaattcaagtacatatagagtattagatataataggagatgtagcattttactttatgcctataatacttgcaataaatgcagctaaaaaatttaatgttaatacgtcaatagcagttatagtagtaggtgtgtttttacatccaaatttctctgcatgggtatcaagtggggaccctatatcatttataggagtaccaattcaaggtgttatatatgcagcatctgttatccctgcacttttaacagtatggatgatgtcatatatagaaaaattcattgataaattaacacctagcatgttaaaaacaattttaaatccaactttagtattattaataagtgcgccaatagcattaatagtaattggaccaataggaaatttcttaggagagggattagctagtataataaatttactacaaggaaggttaggatttataatggtttgtttattagcagctgcaatgccatttatcgttatgacagggatgcatcatgcattgactcctatattcatatcagca

SEQ ID NO: 16698 - DNA, 96 bp, Clostridium difficile
aatccccatctgaacctgtgggggaatgtgagagttcaagttggtgataaagggtataacgacacctcagccatgctgggtgtgaagtatacattc

SEQ ID NO: 16699 - DNA, 558 bp, Clostridium difficile
ttggccagagataaagtacaaaaagaagctttcagaaatgctatgtttgtaaataaatctatgaataaagatgcagtaggtcaatcagttcatacaattgcaaaaattgcaggtgttgagataccagaagatacaaaaataatagtaatagaagctgatggaccaggagaagaggatattattgcaaaagaaaaaatgtgtccagttatatctgcatacaagtataaaagttttgaagaaggtgtagctattgcaaaagcaaatttaaatgtagaaggaaaaggacatagtgtatctatacattcaaatacagttaaaaatatagaatatgcaggagaaaatatagaagtatcaagatttgttattaatcaatgttgtgctactagtgctggaggaagtttctttaatggtcttgcacctactaatactctaggttgtggttcttggggaaataacagcatctctgaaaatcttgattataagcatctaattaatatttctagaattgcttattatatgccagaaaatgaagtccctacagatgaagaactttgggga

SEQ ID NO: 16700 - DNA, 366 bp, Clostridium difficile
atgctttcagcgcttatccattccgcacatagctacccagccatgcccttggcaggacaactggtacaccagaggtacgtccatcccggtcctctcgtactaaggacaggtcttctcaaatttcctacgcctgcgacggatagggaccgaactgtctcacgacgttctgaacccagctcgcgtaccactttaatgggcgaacagcccaacccttgggacctactacagccccaggatgtgatgagccgacatcgaggtgccaaacctccccgtcgatgtggactcttgggggagataagcctgttatccccagggtagcttttatccgttgagcgatggcccttccacgcagaaccaccggatcac

SEQ ID NO: 16701 - DNA, 879 bp, Clostridium difficile
atgaattttttatcattggctaagactgcctcaacaaatagcaatataactaagagaactttagaaaatatgctcgataattttagtgataatataccaaatattatatatgcaataattgtatttgtgataggtatttatatatctaaaatagtaagaaggatggtttcaaagtttctaatcaaatatggaatgagtaaaggtgtaaataattttattgtatatggaatatatatatctatgttatctattatatcattgataagcttaggtattatagggatacaaactacatcagttgtagctgtgttaggagctgctggatttagtataggtttagcttttaaagaaatattatcaaatttaggctctggtatgattattttattttttaagccatttaatataggtgattatattcaaggttcaggtgtagaaggtacagtttctgacatacaaatatttagcactgttcttaagacgccagataataaaactataattatacctaattttcaactgacaagtaataatataattaattacacacatcaaaacaaaagaagaatagatttttcatataatatttcatatgatagtgatatagatgtagttaagtctacattaaatgaaatttttacaaacgaaaaaagaatattaaatgatccaaagcctataataggtttaaactctataggaaataacaccatgcaaatagttgctagaccttgggtaaaaactgatgattactgggatgtatattttgatgtaatggaaaaggtaaaaaataaatttgatgagaatgatataaaagttccatttgttccttcttcattattatttaataatacaggtaatctaaatacaatggataaaaga

SEQ ID NO: 16702 - DNA, 1269 bp, Clostridium difficile
atgttagatattaaaagaataagagaaaatctagatgatatcaaaaaagctatggaaagaagaggtgaaagagaatttgaccttgatgctgtagtggaattagataataaaagaagagaaatacttcaagaagttgaagttatgaaaaatgagttaaatgtaaattctaaaaaaatacctcaattaataaaagaaggaaaagatgtaacagaagaaaaggcaagattgaaagagttatcagataagataaaaggtattgatgagaaagtaaaagaagtagaagcaaaaatggaatatacattaatgagaataccaaatgttcctcatccagaggtaccacaaggtgaaacagatgaagacaatgttcaaataagaacttggggagaacctactaaatttgattttgagcataaagcgcattgggatataggtacaggtctaggtattttagattttgaaagagcagggaaaataactgggtcaaggtttactttatataggggattaggagctagattagaaagatctttaatgaatttctttttaaatactcatacagctaagcatggctatacggaagtcttacctccatttatggccaatagaaatagttttatagggactggtcaacttcctaaatttgaagaagatatgtttaaaatagaaggattagagtatttcttaataccaacagctgaagttcctgttactaatatacatgctaatgaaatattagatgttgcagagcttccaattaaatactgtgcatatactccttgttttagatctgaagcaggttcagcaggaagagatacaagaggtttagttagacaacatcaatttaataaagttgaattagttaaatttgttaaaccagaagattcttataatgaattagaatcattaactcatgatgctgaaactatgttacaaatgttaggtcttccatatagagttgtaaaaatatgtacaggagatttgggatttacagctgcatttaaatatgatttagaagtttggatgccaagctacaatagatatgtagaaatatcttcttgttcaaattttgaagatttccaagcaagaagagcaggaataagatttaaaagggataaaaaatcaaaagcagaatatgttcatacattaaatggttctggattagcgataggaagatgtttggctgctatattagaaaattatcagcaggcagatggttctgtagtagttccagaagaattaagaccttatatgggtgttgatgttataaaa

SEQ ID NO: 16703 - DNA, 1656 bp, Clostridium difficile
ttgctaaagagaggtaaaaagatgcataaagcattatatagagcatatagaccacaaaaatttgaagatgttattggtcaagatcatattattaagactttaaagaatcaaatatatagtgataatataggacatgcttatttgttttgtggaacaagaggtactggtaaaacatctactgcaaagattttttcaagagcagtaaactgtttgaataaaataaatgaagaaccgtgtaatgagtgtgagatatgcgaatctgtattaaaagataatacaatggatgttgtagaaatagatgcagcttcaaataatagtgtagatgatataagagagcttagagaaagtgtgaaatattctccagccaatgctaaatataaagtatatataatagatgaagttcatatgttgtctcaaggagcttttaatgcattattaaagaccttagaggaacctccatcatatgtaatttttatattagcaactacagagcctcacaaaatacctgcaaccattttatcaagatgccaaagatacgattttaaaagagttacagttaaagatatgacccttagaatgaaaaagatttgtgaagatgaaggaattgatatagatgataaagctcttaatttaatagctagaaattctcaaggagctcttagagatgcacttagtatattagaccaatgtatgtcttttggagaaagtaagatagattataaagatgttgttgaattaatgggaagcgtaaatatagaacaattatttgaattgtctcaatgtattgtagagcaggacactaaaaagtctcttgagatattaaatgaatttgtcttatggggcaaagatataagaaatcttataaatgacttaattgatcattttagaaatttaatggtatgtaaggtttcatcagaattggatgaaataatttcattaccagaagaaactatagaacaacttaaaattcagtctaaaaatatagatataaatgatttaataaggattttaaatatattatcaataactcaggatgatataaagtcatcttcaaatccaagggttttagtggaaataaccataatgaaaattgctcaaccaatgtttgatgaaagtaaagaagctcttataaaaagagttgagaacttagaaaaaatgattgaactggggaactttaagtctgaaaaaattgggaataataaagaaaaagagtatgaggtcgatagagaaatagatgtaaaacaagaaaatgtagtttatgaagatgtaaaaaatgaggatgttatacttatagagtcatcttggaagaatatacttaaacaaattaaaaaagataaaaaaatgccaatatacgcactcttaagtgaagtaaaaagttttaatgtatattctaatatgttgtatgttatatttgatgataaatttgattttgcaaaaactagactgagctctcaagatacaataaattatttagaaaaaacaataagagatgttttaaatagaagttttaatgtaaaaatagtactgacatcagaagttaaagatataaatcttgaagttaaagagaaaaaggacattggtgaggaaatattaaagaacatagtgagtgaagagatattagaaataaaagatagtattgatgaaaatgagagtaaa

SEQ ID NO: 16704 - DNA, 378 bp, Clostridium difficile
atgaaaataagtttaggaggaatagtgtttatggctaaaaaaggttttggaggcggaatgatgcctggtggtggaaatatgaacaacttgttaaagcaggctcaaaaaatgcaagaaaatatgcaaaaagctcaacaagagttagaaagtaaagaagtagaagcttcagttggtggaggagcagttactgtaaaagttaatggtaaaaaagaagttatagatataactatcaagccagaagtagttgatccagatgatatagaaatgctacaagatttagttttaagtgcagtaaatcaagcattgagaaatattgatgatatacaagcaagtcaaatgagtaaggtaactggaggtatgaatatacctgggttattc

SEQ ID NO: 16705 - DNA, 606 bp, Clostridium difficile
gtggtatttatgcaagtttatacaggtcccataacgagacttatagaggaattttcaaagcttcctggagtaggaagaaaaactgctcaaagattggcttttcatattattaatatgaatactaatgatgtggaagctttatctaaagcgattatagatgcaaaaagagaaataagatattgctcaatttgttgtaatataacagatacagacccatgtagcatgtgttcaaataaaagtagagattcaagtgttatatgtgttgtggaagatccaagagatgtagcagctatggagagaacgagagagtttaaaggacagtatcatgtattaaatggagtaatttctccaatggatggaattggaccagatatgttaaaaataaaggaacttatccaaagacttggcaatcaggaagtcaaagaaataataatggcaacaaatcctactattgaaggtgaagctacagccatgtatattgctaggttagtaaaaccaatgggaatcaaagtcactcggatagctcatggtcttcctgttggaggcgatttagagtatgcagatgaggtcacaatatcaaaagcactagaaggcagaagagaaata

SEQ ID NO: 16706 - DNA, 1203 bp, Clostridium difficile
atgagcaaaaaagtattaataatgtctgcttccactggtggtgggcataatagggctgctctagctattaaagaagaacttacttccaaaacacttgatggagagccaattgaatgtgaaataatagatagtttgaaattagttaataatacaatggataaaataatttcaagaggatacgaaaaatctgctatatatactcccaaagcctatggaagtgtatatagattatctgaaacaaatcttttgtcaaaaaatgaatttaaagataatctactaataacattcatggctaaaaaatttaaaaagcttattagaagcgaaaaaccagacttgattataggaacgcatccttttccaatgattgctctaagtacattgaaaaaaaactttaatttacataataatgaatcaaatgcttacacagagcatttttataaacattatacaaataccattaatgttcctccgcttatttctgtattaaccgattatactactcattctacatggatacaaaatgaaattgattactatattgttggtcatgaatatgtaaaagaattattggtgtttgatggagttgaaccgagtaaaattagaacatttggaatccctgttgaaaaatcttttctctctcacagagataaagatattgttctttctgagttgaatttatctcctgataaattaactgttttacttatggggggtagctttggggctggaaatataaaagagacacttgatgaattactggatactgatagagactttcaaatacttgtaattactggtaagaatgaaagcctaaaagaaaaaatcgaaaaaaaacttatgtctcgttatcatgataaaaatgtatgtgttcttggatacactgataagatgaatgatattttagcttctatagatgtattagtaagcaaacctggtggacttactacaactgaggctcttttaaaagatgtacctatgatagttccttattatataccaggtcaggaagaagagaatcttgatttcttatctaattgtggtgcagcacttagaactacaaaaaaatataacttgtcaatattactaaaagttttaatagatgaccctagcagattagaaatgctaaaaagaaatattaaatcaataagaaagtcaaattcagcccaaaatatagctaatttaattttaaatataatttctggt

SEQ ID NO: 16707 - DNA, 623 bp, Clostridium difficile
cttagaaagttaagacccaagatgcagatgttatatcaggacccatatagttcattacatccaagattatatgtgaacacataatatcagagctagttatagtacataatttagtgccaaagaatgaaataatagatcatatattaaatgttgtagaaacttgtggtcttgataagtaccaactaaatagtaaaccgggtgagttttctggaggtcaaagacagagaacaggtatagcaagagcattagcattaaatccagcatttatagtttgtgatgaacctgtttctgcactagatgtttctattcaatctcaaattataaatttacttatggatttacaggataaatataaactttcatatttatttatatctcatgatttgagtgtagtaaatcatattgcacatagagtttgtgttatgtatctaggttctataatagaaattgcaactaaaggagaactttacttacattctcaacatccatatacaaaagcgcttatgagcgcagtaccaatacaagaccctacaattaagaaaaatagaattatattaaaaggagacataccatctccaacaaatccaccaagtggatgtaagtttcatacaagatgcccttaa

SEQ ID NO: 16708 - DNA, 276 bp, Clostridium difficile
atgatagataataaatatactacttactcaaacccacttacagacagatattgtagcaaggacatgagttatatattttctccacaatttaaattctctacatggagaaggttatgggttgcacttgcagaaggtgaacatgagttaggaatcaatataactgaagaacaattagatgagctaagagctaatatagattatatatattttgatgaagctagaagaatagagaaagaggtaacacatgatctactgttttatgtattaagttattgt

SEQ ID NO: 16709 - DNA, 1008 bp, Clostridium difficile
gtgaccgatttagttaacaccattaatggaattgtttggtcacccgtattagttgcaatgtgtttgtgtataggattatatttttcattgaaattaaaattttttcaaataagagatgtaaaagaaatgtttactctcttgcttgagggagatagttctcatgttggtatatcatcatttcaaggttttgctacatctatggctggaagaatagggactggaaatatagctggtgtagctgtagcaatagcaatgggaggtccaggagcattagtatggatgtgtataatggctacattaggttcagcaactgcatttgtagaatctactttagctcaaatatataaagatgagcatgatgggcagtatagaggaggacctccatattattttgaaaaaggtcttgggtggaaaaagtgttcagttttattttcaatagttgcaataataagttatacattttttatgcctggtacacaatcaaacactttatatctagcaatgaatcaagcatttggattttcaaaaatgacaatagcagtagcatcttctattgcattagcgataataatttttggaggaattaaaaggattggtttatttgctgaaaaagtagtacctataatgggtggagcatatcttattatgacattagtaataattataacaaatattagtttagttccagaggctattgtaacaatgtttaaatctgcatttggatttggttcagtttttggaggaatgctaggttcagcaatatcttggggagtaaaaagaggtatatactcaaatgaagcaggagaaggttctgggacttatggtgcggcagcagcagaagtaagtcatccagccaaacaaggattagttcaagcattttctgtttatgtagacacattattaatatgtatggctacaggtattatgattgtaataacaggaatgtataatgttacaggtgtttgcacagcactaccaggtgtagaaccgggaccacaatatgtacag

SEQ ID NO: 16710 - DNA, 357 bp, Clostridium difficile
  misc_feature (128)..(129): n=g, a, t or c
  misc_feature (136)..(136): n=g, a, t or c
  misc_feature (151)..(151): n=g, a, t or c
  misc_feature (197)..(197): n=g, a, t or c
atggctgatgatattgaaaaagagtgtatgaactatgaagcttctatagatgcagctggtggtatagatgtacaagtacttggaataggtcgtaatgctcatataggttgtaatgaacctgatactannattgcanagagaactcatgtangtgaacttacagagtctacaatagaagctaatgcaagattctttanatcaagagaagatgttcctaaaaaagctgtaagtatgggaataggttcaatattgaagtctaagaaaatattgcttttagcttcaggagaagaaaaagctgatgcagtatataatactgtttatggagatataactccagaagttcctggttctctttta

SEQ ID NO: 16711 - DNA, 360 bp, Clostridium difficile
atgttagaaggttttgatattgaaatcatagaaaaacatcacaatagaaaagaagatgcccctagtggaactgctactatgatagctaatgcaattagagaagtcttgcctgaaagtgaaaatacacatggtagatatggtagagattgtaaaagaaaaccaaatgaaattggaatacactctataagaggtggcaatataatcagcgaccatgatgttatatttgcaggtgataatgaagttcttacattaagccatcattctcaatctgatgaagtatttgcaaacggttctatagttgcagctaaatttttaattggtaagcaatctggactttataaaatgtcagatatactagga

SEQ ID NO: 16712 - DNA, 987 bp, Clostridium difficile
atgctacttttaaaaaaagacgacataaaaaaagtatttacaatgagagatgcaattgaagctgataaggaagcttttagaatttattgtgaaggaaagagtgtaaatcctttgagaaccaatatatctgttccaagtcaagatgctagtatgttatttatgccaggatatgtagaagaattaggctgtgggggaataaaaattgtatctgtatttcctaaaaatgctcaaaaaggcaaaccagtaattccagcaacagtactattattagatggagaaactggagaagttagtgcagtattggatggtacttatgtaactcagattcgtactggagcagcctctggagcagctatagatgtattggctaaaaaagattctaagattggagctttgataggtctaggaggacaaggtgagccacaacttgaagccatgatagaagctagaaatttggatgaggtaagagtttttagtagaaacaaggaaagtagagaaaaatttgcagaagaaatgaacttaaaattaagtaaatataatactaaaatagttgcagttgaatcatctgatgaagccatagataacgcagatgtgatagttttagctactccatcaaaacaaccagtacttaatggaaacttagtgaaaaaaggagctttaataagtgcagtaggttcatatatgccagatatgcaagagttgtgcccaaactgtttaactagagcgtctaagatattttttgaatcaacagatgcagttttatctgagtcaggagatatattaattccattaaaagaaggtaagataagtaaagatgattttagtggtgatttaggaaatgttataaacggaactattcctggaagagaagatgatgatgagataattgtatttaaaactgttgggataggtgtacaagatgtcgtaacagcaaaaagaatatacgataaagcaaaagaaaacggtattggaatagactggaagtgg

SEQ ID NO: 16713 - DNA, 516 bp, Clostridium difficile
atgagatttccagatgacccatatttagattatggactaattgatgaaggaattaagtatctaaagtttaaagtagatgagcaagattttggggttgaacttgaaaagataatagaaattactggaaatcaagaaattatatttattccagaactacctacatattctaaaggcataataaatctaagaggaaaaatcattccgataatagatatgcgtttgagacttaaaaaagatgaattaatgactacaaattgcatgtatatagtagtaactgaaataaaggacttggtagttggatttgtggttgatagagttgatgatatagtaagcttagaaaaaagtaaaatatcacctccaccaagagttactatagaatattcggattattttgtaagtggagttggagaattagaaggtaaaataattactttactagatttagagaaacttttgacagataaagatgaagttttaatagatgaattaatcaatgggtttgattgcactatcatg

SEQ ID NO: 16714 - DNA, 978 bp, Clostridium difficile
atgtttaagagaggtttgtatatgaaaaataagcaacagggaacaattttagtcgttgatgatagtgttctgatgtgtgacttaatagataaaacacttacaaaagataattttaaggttaaaaaagcatttaatgcaatagaggcaaaagaatttattgaagaatttataccagacattattttgcttgatataattttaccagataattctggttttgagttttgtaaggaagtaaaatctaatgctcgtacagcagatatacctataatttttataacttcaaaaaatacagatacagacatagtaaaaggatttggtgtaggagcaattgactatatggtgaaaccttttagtatgacagaattaaaagctcgtgttatagctcatcttgaagtaaagaaatctcaagataaactaaaaaagataaatgatgaactggaatcttctcttgaaaaattgaatagactcgttgtaagagattatcttacaggtctttacaataggcgacatataattaatcagcttatggagcaaagaagaattaataaatatagtgaaacatcaatatcccttatccttggtgatattgatgactttaaggttatcaatgatacttatgggcatgaagcaggggatttcgtgttaacagtaatatcaagtataataaaaaagaattgtagacaaattgatactgtatcaagatggggtggagaagagtttttgataatgctcacaaatactccaatagaaggtgctaagatactttcagaaagaatccgtaaagagataaaggagtttgatttcaactataaagaacataaaataaagtgcactattacattaggagtagtagaagtaaactcaaatatatcattagaagaaaacatatccttagcagataaagcaatgtatgagggtaaaaacttaggaaaagattgtagcgtagtgagtacaatgaaaggattaaaaaagata

SEQ ID NO: 16715 - DNA, 915 bp, Clostridium difficile
gattatacagcagtaggaaatagatcagcaaatacaataacaattacagtatcaggaacagcaagccaatcaatacaaaatgatttaaataatgtaagtgtgctagttaaagcaggagcagtatctggaacaggagctacagattcaattgcaaatacaacatttgaaattaaaaaatatgtggcgccagcaataggtcaattaacttttgatgcaacagataaacaaataaaaatggcatcaggagataagacagtagatccatcagatgacacatatgtactaacattaacaaaaggaacagcaaaagatggagatgtaaaggctaatgttgaagtaacaggattaccatcagggttagattatacagcagaaggagattcatcaacaaatacaataacaataacagtatcaagaacagcaagccaagcagtacaaactgatttagataatgtaagtgtgttagttaaagcaggagcagtatctgaaacaactgccacagattcagcagcaaatgcaacatttgaagttaaaaaatatgtggcagcgccagcagtaggtcaattaacttttgatgcaacagataaacaaataaaaatggcatcaggagataagacagtagacccatcagatgacacatatgtactaacattaacaaaaggaacagcaaaagatggagatataaaggctaatgttgaagtaacaggattaccatcagggttagattatacagcagaaggagattcatcagcaaatacaataacaataacagtatcaggaacagcaagccaagcagtacaaactgatttagataatgtaagtgtgctagttaaagcaggagcagtatctgaaacaactgctacagattcagcagcaaatgcaacatttgaagttaaaaaatatgtggcagcgcca

SEQ ID NO: 16716 - DNA, 1398 bp, Clostridium difficile
atggaaacccaaagtaacaataaaaaaggaaatttaataatagcaattgtaatgactggtgcttttataagttctctcagtcaaacactattgtcaacagcattacctaatataatgtcagattttaaaattactgctgatattggtcagtggttaacaacaatttatctacttattgcaggtattattgtacccacaacagcttatttaataaatcgatttagtactagaaagttatttattacatcaatgtctatcttttctataggatgtattattgcacttttttctaataatttttcaactatgttgattgctcgtgtgttgcaggcaatgggttctggttctctaatgccacttttacaagttattatactctatttatgccctgaggaaaaacgtggtgcagctatgagtttagttggtattacagtaggatttgctccagcaataggtccaactttatcaggatggttagtagattcatttggttggcatagtttatttctgtttctttcccctattgctatattagatgttatactatcatttattctattaagaaatgttggggaaactcaaaaactaaaattagatataccttcaatagtactatcatctctaggttttggtggtttattaattggatttactaatcaaggtaattatgggtggactaatattgccacatatttaccaatattaataggaattatgtcattaattttatttacattgcgtcaattaaaatctaaagaaccttttttagaattgagggtttttaaaaataaaccatttcttatttctacaatattaattatgattgtatatgcctcaatgatgtctgctacattaatgattcctctgtacgttcaatctgtaagaggattttctgcattatcttcaggttcattaatgttacctggtgctatattgatggttgtactcaatccaattgcaggacgtcatttagataaatatggacctcatgctctatcaatattaggaacaggatgtttgcttttaggaactttatccttcgcttttttaggcagagatacatctttaattcatgtgtcattgatgtattgtattcgtatgattggtatttcaatggttttaatgccattaactacatggggaattaaaacattagatagagaacttatatctcatgccacagcaattaataacacactccgtcagatatctggagctataggttctgctatacttattactataatgacaagtgctactaagaaagctcatatgagttcaaacatgctgtctaacattcatggaatagatgttgcattttcaatagcagctactcttgcatttactggtttaattgtatctatatgttttataaaaagacatcaaattattagaagt

SEQ ID NO: 16717 - DNA, 1824 bp, Clostridium difficile
atgttaacacaaaaaattacaccagaaggtgataatatgaatgatataaaagacattattgaagaaataaaagctagatgcgatatagcaagtataatatctgaatatatgaatataaaacaatctggagctaattacaaaggattatgtccatttcatggcgaaaagacaccttctttttatataaatacgtcaaaacagatttataagtgttttggttgtggtgaaggtggagacgtaataaattttgtcatgaaaatggaaaatttggattttatggatgctgtaaaaattttagcaaataaatgcggtatagaaattaacactaacatgaatgaagaaactaggattaaaatagaaaaatctaagaaatttcaagatattcatacggaagcagctagattttatctttcaaacttattgggaagcaaaaatcttgggtatgaatatttaagaataagaggactagatgataaaattattaagaaatttggtttaggattttctttggattcatggaattcacttatgaatactctaatcagtaaaggatataaaaaacaagacttattggagtgcggtctaattgcaaaaaatagagatggaactaattgctatgataaatttagaaatagagttatgtttcctatattcgattatagaggaaatataataggatttgggggaagagtattagacgattctttgccaaaatacttaaattctccagacacattaatttttaataaaaaacagaacttatacggattaaattttgctagaaaaaatttagaaagtaaaactatagtcttagttgaaggatatatggatttaatttcactttatcagtatggtataaaaaatgtagtagcaacccttggaacagccttgactgaacaacaaggcattttaataaagagatatgcggacactgctattatatcttatgattctgatgaagcaggaataaaagcgactttaagagctatagatatacttactaaattaggtatcaatgtaaaagtgttagacttaaaagatgctaaagacccagatgaatttgtaagaaaatacggacttagtgattataaaaaagctatggatgtttctactcactacataaaatataaaatagatcatcttaaaaaagaatttaatattcaaaaagatgaagaacgagtgaagttcgcaaaagaagcttctaaaattataaaacaattgacaagtcctgttgaaattgatttttatacaaagtatttaagcaatcaaatagatattaatgtcgagtctataaagagagaagtttatggtaaaaattacaataagccatataataacaaaaatcaaaagaaaatagaagaaaaagtaattgaaaaagtcgaagtcagacaagacggaaaacaattagttgaagaaactctaataaaaataatgttagaagacaaaaaaattagagaaatagcattacttaaagtagaagaaagtgattttttattgaaagaaagtaaagaaattttaaattacatgattaaaaatcaagaattggacaaaataactattgacaaattgaaaagtttaaacatatccgaagaatacttaaaagaattaaattcaatttctttgaatagtataaacttagagaacacaaaagaaatagaaggaataataacaaatatcagaaaaaactcattagaagagcaaattaatagcttgttgagagaacaacaagaattagaaaataataatgatatgaaagaggtagatggtagagttatggaaattgctttaaaaatagttgagataaataaaattttaaagagcttg

SEQ ID NO: 16718 - DNA, 1083 bp, Clostridium difficile
ttgagcgaaaaagaggttgctgatttaaattctgatagcacagatttaaattatagagttctttaccccaatctaaatccaaaatacacatttgatacattcgttattggtaatagcaatagatttgcacatgctgcatgcgttgcagttgcagaatctccagctaaagcttataacccactttttttgtatggaggagttggattaggtaagactcacctaatgcatgctataggtcatcatattgttagtcaaaaaaaagactcaaaagtagtttacgtttcttcagaaaaatttactaatgaacttataaactctataaaagacgataaaaacgaagaatttaggaataaatatagaaacgtagatgtattactaatcgacgatattcaatttatagcaggaaaagaaagaactcaagaagagtttttccatacattcaatactcttcatgaagcaaacaaacaaataattatatctagtgatagaccgccaaaagacatacctacactagaagataggctaagatcgagatttgaaatgggacttataactgatattcaagcacctgactttgagacaagaattgctatacttagaaaaaaggctcaactagaacgtatagatgtgccaaatgaggttatgtcatatatagcaaaaaatattaagtcaaacataagggaactagaaggtgcattaactagagtggttgcttattcttctcttagcaatagggtaatatcttttgatcttgctacagaagctttaaaagatattataacaacttctaaaaatgaagaaataaatgttctcagaataaaagaaaaagtatcttctgtattcaatttaaagatggaagattttaattctaaaaaaagaacacgttcaatagcttatccaagacagatagctatgtatttaacgcgcgagcttactgatttatcccttcctaaaataggtgaagagtttgggggtagagaccatacaacagtaattcatgctcatgacaaagtatctaaggatatagaagaaagtgaagaaattaagactaaaatagacaaaattatatcagatttgaaggga

SEQ ID NO: 16719 - DNA, 1899 bp, Clostridium difficile
atgaaacaagaatacggtgcaagtcagatacaagtattagagggattagaagccgttagaaaaagaccaggtatgtatattggtagtacaagccctagaggtttacatcacttagtttatgaagttgtagataatagtatagatgaggctttacaaggatattgttcagacatatatgtatctattaatgaagatggcagtgttttagtaaaagataacggaagaggtatacctgttgaaatacatcctaaaactggtaaatcaactttagaaacagtattaactaatcttcatgcaggaggaaagtttggaggcggaggatataaagtatctggaggtcttcatggagttggtgtttctgtagttaatgcattgtcaaaatggatggtagcagaggtttatttaaacggaaagatatataagcagacatatgagaaaggattaccaacatctaagcttgaagtagttggagaatctcaagataaaggaacaatgattcaatttatgccagatgagacaatatttgatgaaatagagtttaaatatgaaacattggagtataggcttagagaactttctttcttgaataaaggaataaaaatagtatttgaagataaaagagaaggacaagaaaaaagaaaagaatttcactatacaggtggtttggtagaatatattaagtatttaaataaatctagaactggtatacatgatgacatagtttatatagataaaaaggttgatgattgttttgttgaactagctatgcaatatacagatggttatacagagaacatatattcttttgcaaacaatataaatacacacgaaggtggttctcatttaagtggatttaaagcagctcttactaaaactgtaaatgattatgctaagagaaataaatttttaaaggaaaatgatgttaacctacttggtgaagacataagagaaggtcttacagcagtagtatcagttaaattaccagaacctcaatttgaaggtcaaactaaaacaaagctaggtaatagctttatgagaggtatagttgatagtgtaacagttgatgaactggggtctttcctagaagaaaacccatcaacagcaagaatcatagttgataaagctttaagagcacaaagagctagagaagctgcaaaaaaagcaagagaattaacaaggagaaaaagtgtattagaaagtacatctttacctggaaaacttgcagattgtgcagaaaaagatccatctaaaagtgaaatattcttagtcgaaggggattcagcgggaggttcagctaaacaaggtagagatagaaatagtcaagctatacttccattaagagggaaaatacttaatgttgagaaatcaagactagataggatactatcttcagatgaaataaaaaatatgataacagcttatggttgtggtattggagaagattttgatatagataaagctaggtatcataaaattataattatgaccgatgctgatgtagatggagcccatataagaactttattattaacattcttctttagatatatgagacctcttatagatgaggggtatgtttatgcagcacagccacctttatataaagtgacaaagcaaaagaaggaacattatgtttactcagataaagagttaaatatcttattagatgaaattggaagaaatggtgttgaacttcaaaggtacaaaggtcttggagagatgaatgcagagcaattatgggaaacaactatgaatcctgagacaagaactttattacaagttactgtagaagatgctgcaattgcagatgaagtattttcaatgcttatgggtgataaggttgctccaagaaaagaatttatagaagaaaatgcaagatttgttagaaacttagatata

SEQ ID NO: 16720 - DNA, 2424 bp, Clostridium difficile
atggaagaaaataacaaaatactccctattgaaatagcggaagaaatgaaaaaatcgtatattgattattcaatgagtgttatagctggacgtgctcttcctgatgttagagatggtttaaagccagttcatagaagaatattatattcaatgagtgagttaaatttaactccagataaaccatacaggaagtcagctcgtattgttggggacgttttaggtaagtaccatcctcatggagatactgctgtttattatgctatggtaagaatggcacaagatttttcaactagagcacttttagtagatggtcatggtaactttggttctgttgatggggattcaccagctgctatgcgttatacagaagctaaaatgagtaaattatcattagaactactgagagatattgaaaaggaaactgtagactttaaaccaaactttgatgagtcgttaaaagagccttcagtattgccagctagatatcctaatttattagtaaatggctcaaatggtatagctgttggtatggcaacttcaatacctccacataatttagcagaagtaattgatgcaactgtatatttgatagataatccagagtgtagtgtagatgatttaataaaatttgttcaaggaccagatttccctacagctgcaattataatgggaaaagaaagtatagcagaagcatacagaactggaagaggaaaagttaaagttaggtctagagcttttatagaagagctaccaaaaggaaaacagcaaataatagttacagaaataccttatcaagtaaataaggctaaactggttgaaagaatagcagagttagttaaagaaaagagaatagaaggtatatcagacctaagagacgaaagtaatagaaatggtatgagaattgttatagaattaaagagggatgctaatgctaatatagtattaaataatttgtataaacattctcaaatggaagatacttttagtataataatgcttgcacttgtagatggtcagccaagagttttaaatcttaaacaaatattatatcattatattaaacatcaagaagatgttgttacaagaagaactaaatttgaactaaataaagctgaagcaagagcacatattttagaaggattaaagattgctttagataatatagatgctgttataagcttgataagagcttcaaagactgggcaagaagctaagctaggtttaatagaaaaattcaaattaactgaaatccaagcacaagctatattagatatgagacttcaaagacttacaggtttagaaagagataagatagaagctgaatatgaagatttaatcaagaagataaatagattaaaagagattttagctgatgaaagattacttttaaatgtaataaaggatgaaattacaataataaaagaaaattactctgatgagagaagaacagaaataagacatgctgaaggcgaaatagatatgagagatcttataagtgatgaagaaatagcaataactcttactcactttggatatataaaaaggcttccatctgatacttataagagtcaaaaaaggggtggaagaggtatttcagcacttacaactagagaagaagattttgtaaggcacttggtaactacaactactcatagtagactattattctttacaaataaaggtagagtatttaaattaaatgcatatgaaataccagaaggtaagagacaggctaaaggtactgctatagtgaatttacttcaattgtcagcagatgagaaaattgctactctaatacctattgatggtaatgatgaaaatgaatatttattacttgcaacgaaaaaaggtattgttaaaaagactaagagagaagagttcaaaaatataaataaatctggtcttattgcaataggtttaagagatgatgatgagcttattggagtagaacttacagatggaaaacaagaagtacttttagtaactaaagaaggtatgtctataagatttgatgaaaatgatataagatatatgggtagaacagcaatgggtgtaaaaggtataactttaagtaaagaagattttgttgtgtctatgaacctttgtagtaaaggtacagatgtgttagttgtaagtaagaatggttttggaaagagaacaaatatagaagagtatagaagtcaaataagagctggtaaaggaattaaaacttataatatatctgaaaaaactggtacaattgtaggtgcagatatggtcaacgaagatgatgagataatgattataaattctgatggagttcttattagaataagagtcaatgaaatatcactgtttggaagagttacaagtggtgttaaattaatgaagacgaatgatgaagtcaatgtagtttcgattgccaaaataaatattgaagaagaa

SEQ ID NO: 16721 - DNA, 1023 bp, Clostridium difficile
ttgaaaacacgtgattttaaatttgacttaccacaggaacttatagctcaagttcctatagaagatagagctagttcaagattgatggtattagataaagagacaggtaatattgaacataaagtatttagagatataatagaatatttaaatccaggagattgcttagtattaaataatactagagttataccagctagattaataggagagaagcttgaaactggaggtaaaatagagtttttattattaaaaagaacagaggaagatacttggcaggctttagtaaaaccaggaaaaagagcaaaagtagggactaaattttcttttggaaatggaaagctaattggagaagttgtagatttatcagatgaaggttcaagaattataaaattccattatgatggaatttttgaagaaatattggatgaacttggaaatatgccactacctccatatatcactgctagactagatgaaaaagaaagataccagactgtttattcaaagcataatggttcagcagcagcacctacagcaggattacattttacagaagaattgttaaataaaataaaagaaaaaggtgtagatatagcctttgtaactctacatgttggcttaggaacttttagaccagtaaaagtagaggatgttttaaatcacaagatgcattcagaatattatatggttagccaagaagcagctgacaaaataaatagagcaaaggaaaatggaaaaaatgtaatatgtgttggtactactagttgtagaactatagaatcagcttgtaatgaggatggaaagatgaaagaaactagtggatggacagaaatatttatatatccaggttataaatttaaagttttagataaacttattactaattttcacttaccagagtctacactaataatgttagtaagtgctatttgtggaaaggataatgttttaaatgcatataatgaggcagtaaaagaaagatatagattcttcagttttggagatgctatgattataaag

SEQ ID NO: 16722 - DNA, 903 bp, Clostridium difficile
atggagggttataaaatgaaattgggatttattggattaggaataatgggaaagccaatggcaaaaaatttattaaaagatggatgtaatcttttggtgtatgacattaataaatctgctgtggatgaacttatatcatgtggagcaaaatacgcaagtgttttagaaatgggtcaagaatgtgatattgtatttacaatccttccaaatggaactattgtgcaggatatattgtttgggatggatggattggcaaaaactttaaaagaaggaagtatagtagtcgatatgagttcagttactcctacagaatccatattgtgtgcaaataaattaaaagatatgggcttagaatttatagactcaccagtaagtggaggggagccaaaagcgattgatggtacacttgcttttatggctggtggtaaggaagaaatttataagaaagtagaaccattttttaatataatgggaagctcatctattttaattggagataatggtagtggaagtgttacaaaacttacaaaccaagtaattgttaatttgacgatagcagcagtttctgaggcatttgtacttgcagcaaaagcaggtgcagacccagaaaaagtatataaggcaataagaggaggcctagctggtagtacaatattggatgcgaagataccaatgattatgaatcgtgattttaaaccaggtgggaaaatatctattaatttgaaagatattaagaatgtaatgcaaacagcacacaatttagatgtaccgctacctatgacaagtcaattattagaaattatgcagacattaaaagtacatggacatttggaagatgaccatagtggaatagcacagtattttgaaaagttggcaggtgttgaaataaaaaaacacgataat

SEQ ID NO: 16723 - DNA, 726 bp, Clostridium difficile
ttgaaaggagataaaaaattgacttcgatttgtatttgtgatgatgaaaaacaacaaagaaacatgctgaataaaatcattacaagagaaatggatttgtggggctacccctaccaaataaaagaatattcaaatggagaaagtctagtatacaatctagaacacgaaaattattacatagatattatttttttagatattgaacttggaaaaagtaatggcgttgacatagcaaaaactatacgaaaacattcaaaggatactataatcatctttgtcacaggtttttctgactatgtatttcatggatatgatgtaggagctttgaactacatcttaaaaccttataaaactgaaaaaatatgtaaagtattaaaagaagcactaaaaaaattagaacaatggaaagaaaactttattacagttcagattggaactaatctttgtaaaattaatacaaaagatatcctctactttaaaagtgagctaagaaaattaactgtagttacctttgataaaacattagaatactacggaaaattaaatgatatggaaactgttcttccctctaattttatacgtacgcatcaaaggtatattgtcaatctaaaccatgtagatagtataactcaaacttatgccaaagttcagaatgaaaaaattcctataagccgtaaaaaatatcaagaggttgtaggaaaatttacaaggtatatgttagaatct

SEQ ID NO: 16724 - DNA, 531 bp, Clostridium difficile
atgcaatatattagctattaccatagtccaattggaaatattcttttagcatcagataatattgggttaactggtctttggtttgagaatcaaaagtattatgcttataatcttgaccaagaacatcaagaaaaagaattgccaattttcgagcagacaaagaaatggttagatatttatttttcgggaaaagaacctaattttacaccatcactccatatggtaggtactccttttcagactacagtgtggaaaattttacaacaaataccatatggtaaaacaatcacttatggagaaattgcatataaagttgctcaacaaaaaggaatatctaaaatgtcagcacaagcaatcggtggtgcagtagggcataatggaatctctattattattccatgtcatcgtgttgtaggaacaaatgggagtttgactgggtatgctggtggaattgatagaaaaataaaattgttatctttagaaaaagtatctgtgcaacattattttattccaaagaaagggagcgcatta

SEQ ID NO: 16725 - DNA, 459 bp, Clostridium difficile
ttgaaagaactggctaaagaggacttagaagattctcgagaaaagcttattgatgacattatagaattttctgagtttatgggttataagactataatagtttttgatgcttataatgttaaaaattctcgagaaaaagttgaaaaaagaaaacacataacaatagtttatacaagagaacaccaaacagcagatagttatatagagaaatttataacttctttatcaaagtatgatgatgtaaaagtagccactaatgactatgcagaacagcaaatgattttaggaaaaggtgctactagaatgtctgcaagagaattaaagttagagttagatcgttccaagaataaaatgaaggaaaaaaatatcggtttgaggaaaaaaattcagcgaaattggttggaggaaaggttagataaagaaacattgtcgaaacttgagaacattcgtagaaagcgt

SEQ ID NO: 16726 - DNA, 1713 bp, Clostridium difficile
atgaaaatgtcaaaaatgtttatgccgacattaaaagaaatcccagcagatgctgagattacaagccatcaattaatggttaggtcaggcatgataaaaaaaatgacttcaggtgtttataaccaattaccaatggggttaagagtgttcaaaaaaattgaacaaataattagagaagaattaaataaaaaagattgtcaagaaatactttgtgcagccttacttccttctgaattatggaaagagtctggaaggtggactgctatgggtgaagaaatgtttagactaaaagacagaacagaaagagagtactgtcttgggccaacacatgaagaagcattcactgatataataagacaagaaattacttcatataaacaattgccactaaacttgtatcaaatacaagtaaaatatagagacgagagaagaccaagatttggtgttatgagaactaagacttttacaatgaaggatgcatatagttttgatgtagatgataaaggtttagataagtcatatcaagatatgtttgatgcatatgtaagtatatttgatagatgtggattggagaatagccctgtacaggcagattcaggagctataggaggttctacatcagccgaatttatggttaagtcagaagttggtgaagatgaagttgtattttgtagtggatgtgattatgcagccaatgtagaaagagcagaatcttgtaatctagcatcacaaaaagaagaaatgaaagaattagaagaggttcatacaccaggagcagctacaataaaagagttagaagaatttttaaaaacttctccagataagtttgctaaaactttagtatatgaggcagatggaaaaacagttgtagtcgttgtaagaggagatagagaagttaatgaaatcaaagtatctaatgccataggttctgttatagaatttgctcttgctacagatgatgtagtgagaaaagtaactaatgcagaagtaggatttgcaggtccaataggtataaatgctgactatgtatttatagataaagaaattgttgaacaaagaaacatagttgttggggctaataaaactgagtaccatataaaaaatgctaactatggaagagattttgaaggaatagttggagactttagaaatgttcaagaaggcgacaagtgtatagtatgtggtaagccacttgaaatagctagaggtgttgaagtaggacatatatttaaactaggaactaagtactcagaatctatgaatgcaaacttcatagacaaagatggaaaatcaaagcctatagtaatgggatgttatggaataggtgttgaaagaacagcagcagctataattgaacaacataatgatgagaaaggtataatatggcctttgtcagtagctccataccatgttgtgatagttccagcaaatatgaaaaatgaagaacaaatatcaatagctgaaaatatatataatgatttgcaagctatgggtgtagaagttttattagatgacagagatgaaagaataggtgtcaaattcaatgattcagaattaataggaatacctatgaggattacagtaggtaaaaatattaatgaaggtaaagtagaatttaaacttagacataaagaagataaagagataattgacatagaagaaataaatgaaaaagtaaaggcagagtttatcaggaataatgttaggttagga

SEQ ID NO: 16727 - DNA, 1479 bp, Clostridium difficile
atgaatgtaagagtaaggtttgcaccaagtccaacaggatttgtacatataggtagtttgagaactgctttatataactatttatttgcaaaaaaaatgggcggagaatatatattaagagtggaagatacagaccaaagtagattagtagaaggtgctatagagaatatgcttaatgctatgaaatgggctggggtcaaccatagtgaaggtgttatattagatgatagtggaaaagtagtacaaaaaggagaatatggtccatatattcaatctcaaagattagatatataccaagaatatataaagcaacttttagatagtggaaaagcttattactgtttctgtacaaaagaaagactggatgaagtaagagatgctcaaagagcagcaggagaaacagctaaatatgatggtcattgtaagaatctttctaaagaagaagtagaagcgaatataaaagcaggaataccatatgttataagattaagattgccagagaatcatacaattaagtttacagacttagttagaggagatatggaatttaatactaatgacttagatgaccaagtattaatgaaaacagatggatttccaacttatcattttgcagtagttgttgatgactatttgatgaaaattacacatgttataagaggagaagaatgggtatcatctactccaaaacatgtttatttatatgaagcttttggatgggaagcacctgtatttgtgcatttaccaaatatacttaataaagaaaagaaaaaattaagtaaaagacaaggtgatgtagctgttgaagactttaagaaaaaaggatatttaccagagggattagtaaactatgtagcattagttggttggtctcctgaagataatcaagaattgtttacaatggaggaattagaaaaagccttctctgtagaaagagtctctaaaagtggtggagtatttgatactgaaaaattaaattgggttaatcagcattatataaaagatggtgatgatgcttatctaacagacttagcaataccatttttaatagaagatggatttataacagaagaagaagctactaataaatatgatttcttaaagagtatgatatcagtacttaaagagaaattacaatatgtaaaagaagttactgaacatgcaagtatattttttggagataaaatagaggtagaaactgaagaaggaagagagttcttaaggttagaacatatacctactttaatagatgctttgagagaaaaaatagaaaaaacagaggtattaaatgctgagtttgttcaagctatgcttaaagaaatacaaaaagagtacaaaataaaagggaaaaatttatttatgggctcaagaataattttgacagggcaaatgcatggtccagatttaccaaaagtaatggaagttttaggaaaagaaacttgcttaaatagaatagcttatgtaaaaaataatatatta

SEQ ID NO: 16728 - DNA, 966 bp, Clostridium difficile
atgtatatgtcaatatcaaaagaaacattgcttgaaatgtataagagaatgaatcaggctagaaaatttgaagagaaagttagttggttttttgcaagaggtatggttcatggaacaactcacttatctgtaggtcaagaagcgtcaagtgtggcggctgtaatggctttagaaaaaggagatttagtatcattaactcatagaggacatagtcaatttataggaatgggaatagacctaaataaaatgatggctgaacttatgggtaaagaaactggattttgtaagggaaaaggaggctcaatgcatatagcagatattgagtcaggtaacttaggagcaaatggagttgtaggtggaggtcttacaatagctccaggagctgcacttacacaacagtataaaaaaacaggcaaaatagttttatgtagttttggtgatggagcatcaaatgaaggtacttttcatgaaggaataaatttatcttcaatatggaaattgccaataatattttactgtgagaataatttatacggtatgtcaacaagcataaaacgtcatatgaatatagaaagtattgccactagagcagcttcttatggaatagaaggaatatcaatagatggatataacccaatagaagtatacgaaacagtacaaaaagctgctgagaagtgtagaagaggagaaggacctgtattaattgaaagtagaacttatagatggttaggtcattcaaaatcagatgcaaatgtatatagaacaaaagaagaaatagaatcatggaaagcaaaagaccctattgaatttttaaaaaattatcttatagaaaataatctatctaatgaagatgaattagataagattcaagaatttgcaaagcaatcaatagaagatgcagtagagtttgctcaaaatagcccaaatccaaaaatagagtctttattagaggatgtatatgcagac

SEQ ID NO: 16729 - DNA, 939 bp, Clostridium difficile
atgtcagaagaaatgagaagagatgaaaatgtaatatttatgggagaagatataggaatatatggaggagcatttggtgtatcagttggtatgatagatgaatttggaccagaaagagtaagggatactcctatatcagaagcagctatagcaggagcggcagcaggtgcagcagcaactggcttaagacctattatggaagtaatgtttatggactttgtaacaatttctatggatgcaattgtaaatcaagcggcaaaaatgagatatatgtttggaggaaaagcacaagttccaatggttgttagatgtccaggaggttctggaactggttcagcagagcaacattcacaaagtttagaagcttggttttgtcatgtaccaggagtaaaagtagttgcaccttctacaccagcagatgctaagggattgttgaaagcagctataagagataataatccagtcatatttgttgagaataaattgttatacagaaaaaaaggttttgtgccagaagatgattatgtaattgaaattggaaaggcagatattaaaagagagggtactgatgttacagtaattacttatggaagaatgttacaaagtgttgaagaagcagcagagactctatcaaaagaaaatataaatgttgaaattatagatttaagaactttatatccattagataaagagactatagtaaagagtgtatgtaaaactgggagagttttaatttgccatgaagcagctaagactggtgggctaggtggagaaatatcagccctgataacagaaagtgaatcatttgattatttagatgctccagtaaaaagaatttgtggaaaagatgtgccaataccatataatccagagttagaaaaagcagttgtcccaagagttgatgaaatagaagaagcaataaaatctttaattgttaga

SEQ ID NO: 16730 - DNA, 1044 bp, Clostridium difficile
atggtggcaaataaaataaaagccacaccagcagctagaagtcaggcaagaaaagacaatataaaattagataggctgattggaagtggagaaaatggaaggattcatttagtagatgtgttaaattatttaaaagataataaagcaaatactactcctttagctagaagaatagcagaagatttaaatatagatttagaaactattgtaggtactggatataatggaaagataagaaagtgtgatgtggaaaaattaactgcaaaagaaactattgtatcaactaatacatctaaatctagtgagaaaaaagagctgaaaattgaaaatgaaaattcaagcatgtttaacacagtagaaggaatatttgaaaagccaaatccaatgagagctactgtagcaaaacgaatgtcagaaagttattttagtgctcctgtatttacattcaatatagaagtagatgctacagaattgaaggtacttagagcaaagttaatcgacacagtaaaagaatcaactggagtaaaattaactatgacagatttaatagtaatggcagtatctaaaatacttccaaatcatcaagccttaaattcagcatggacagatgagggtatatttagatataaagatgtaaatatagctattgcagttggtttagatgaaggcttatatgttccggtagtaaaaaatgcaaacaaaaagtctttaaaagaaatagcaaaagaaagcaaagaacttgcggaaaaagtaaagacagggaaacttatgccagcagaccaagaaggtaatacatttacaataagtaatgttggaatgtatggtataactacatttacacctataataaatatgccttcaagtgcaatcttaggggtaggtgctacacaagataagtttgttccagtaaatggagaggctaaaataaaacctataatgaacttatcattaacatcagaccatagagtaatagatggaacagtagctgcaaaattcttaaaagatttaaaagaattgttagaaaatcctttatcaatgcttgta

SEQ ID NO: 16731 - DNA, 1023 bp, Clostridium difficile
atgaaagagaacatagtcatgaaatcaagagttaggctagctagaaatttaaataactatccatttccaaataaattagataaagaatgtgccatggaaataatagaaaaagtaaaaaatgcgtttattaattctaacttagaacaaaaagaagaatttgatttctataaaattgaagatttagaccaatctaaaaaaatgcttatggttgaagaacatataataagcccagatttagcagaaaatgataaaagtgcagttatagtaaaaaaagataaaactataagtataatgataaatgaagaagaccatataaggatacaaactatatgtgatgatttaaacttagaatatgcatatagtgtagcaaatgaaatagatgatttgttagaatcaagtttagaatatgcctttaacacaaagctaggttatctaacatcttgtccaactaatacaggaacaggaatgagagcttctgtaatgatgcatttaccagcattaagtcaactaggctatatggatgaactttataaaatttcatcacaaataggtatagcaattagagggatatatggagaacgaacagaagcattgggaaatatatatcaaatatctaatcaacttacacttggaagaacagagtctaatattatagaaaatgtaagtggacttacaaaagatgcaatttcaaaagaaataaaagctagagaaatattgcaaaaaaaattaggtataaaactagaagataaaatatttagatcgatagggacacttgaaaattcaagagtaatgagtagcgcagaggcaatgagccatctatcaaatataaaaatgggaatagaaatgaactatatagataaactagatttaagggctatagaacaacttatgataggtatacaaccagcgcatcagtcaataatgtataagagtgatgatgttgagaatagagatataaatagagcaacatatattagagaaactttggaaaaattaagaggagggatgaattgtgaacttcaa

SEQ ID NO: 16732 - DNA, 492 bp, Clostridium difficile
atgctatgtcaaaaatgcaataagaataaagcatctgtatattataataagatagtcaatggagaaaaaacagagatgtatttatgtagtgagtgtgcaaaagagaatacagaaatgaattttaacttagatatgcctttttcaatgatggatatattttctaatttaggttttcaacctaaaaaagaacttgaggaaaagctagtttgtcctaaatgcaatacaacatatagtgagtttaagaataatgggagatttggatgtagtgaatgttataatgcatttagtagtcaagtaaatccaatgcttcaaaatatacatgggcatatagaacatacaggaaaagcacctaaaaaatctttttataagataagtgtagaaaatgagattaaagaactaaaagaagatttagatagagctataaaaaatgaagagtatgaattagcagctcaatttagagataaaattaaatatttaaaaggttctattgac

SEQ ID NO: 16733 - DNA, 3429 bp, Clostridium difficile
atgcttaaaaagtttaataaaatactagtggctaatagaggcgaaatagctataagaatatttagagcctgttcagaattggggataaaaagtgttggtatatacagtaaggaagataagtatggattgtttagaacaaaagcggatgaatcatatttgataggagaaggtaaagggccaatagatgcatatttagatatggatggaataatagacctagcaaagagaaaaaaagttgatgctatacatccaggatatggttttctagcggagaatgcagaatttgctcgtaaatgtgaagagaatggaattacttttataggaccatcatctaaggtaatgaatatgatgggggataagattaactctaaaaaaatcgcaaaagaagttaatgttcaaactataccaggagtagaaaaagcaataagaagtactgaagaagcaaaggaagttgcaaacaaaataggatatcctgttatgataaaagcatctaatggcggtggcggtagaggtatgagaattgtacatcgcgaagaagacttagagcttgaatatgaaactgcttgtagtgaatcaagaaaagcttttggagaagatattatatttatagaaaaatatatagctgatccaaaacatatagaagttcaaatattaggtgataattatggaaatatagttcacttatatgaaagagattgttcagttcaaagaagacatcaaaaaataatagaatatgcaccagctttttcgttagatgataaagtaagaaaagagatatgtgaagatgcagttaagttatcaaaacatgtgggttattctaatgcgggaacattagaatttttagtagatgcaaatggtgggcattattttatagagatgaacacaagagtacaggttgaacatactgtaacagagatggttacaggaatagatatagttcaaagtcaaatactaatagcccaaggttacagcttagatagtgaagaaattaatataaaatcacaagatgatgtggaaataagaggttactctatccaatgtagaataactacagaagaccctaagaataaattcatgcctgatacaggtaaaattcaagtttatagaactggttcaggatttggtataagactagatggaggaaatggatttacaggggcaaacataagtcctcattatgatagtttattggttaagacaatatcttgggatagaacattccaaggagcaataaataaaactataagatctataaaagaacttagagttagaggtgttaaaactaatgtaggattcctagttaatgttttaaataatcctatattctcaaatggtaaatgtagtactaagtttatagatgaaaatccagatttatttgaaataacagaaagtaaagacagaggaacaaaattacttcaatttataggagatgtaattgtaaatgataatgcttgtaaagaaaaaccattatttgatgcattacatgacccaagaatggataaggatggttcaaaatcagaaggaagtaaaatacttttcgataagttaggtaaatctgcatatatagaaaagataaaaaatgataagaaattactattaacagatacaacaatgagagatgcacatcaatcattattagcaacaagaataagaacatatgacttattaaaagctgctaagccaacagaaaaatatcaaaaggatttattctcacttgaaatgtggggaggagctacttatgatgttgcatatagatttttaaaagaatctccttggcgtagattacaaaagctaagagaagaaataccaagcataatgttccaaatgttgcttagagcatcaaatggagttggatataaaaactatccagataatgtaatagaagaatttacaaaagaatctgctagacaaggtatagatgtatttagaatatttgattcattaaactgggttgaaaatatgaaaccatctattaatacagctttagaaactggaaaaattgttgaagcaactatgtgttatacaggtgatatactagataagactaaaactaaatacaatctagaatattatattaaaatggcacaagaattagaaagcttgggagcagatataatagcaataaaagatatgtcaggtcttcttaaaccatattcagcttacacactagttaaagagttaaagaaaaatgtaaaagcaccaatacatttacacactcatgatacaagtggaaatggtgtagcaacttgtttaatggcgtcagaagctggagtagacataattgatgctgcattagaatctatggcaggacttacaagtcagccatcacttaatgctatagtagaggcacttaagaatacagagagagatacaggaatagatttatttggatatgatgagttaggaaaatattataaggatttaagaaaagtttataataaatttgaaagtgatttaactaattcttgtgcagaaatatataattttgaaataccaggaggccaatatacaaacttaaaacctcaagctgatagtttaggattagttaatagatttgatgaagttaaagaaaaatataaagaagctaatgaagttgtaggagatataataaaagtaactccatcttcaaaagttgtaggagacttagctatctttatgactaaaaataaattagataaagataatataatagaagaaggtaaaaatttatcattcccagattctgttgtggattactgtaaaggtatgattggtcaaccagaaggtggaataccaaaagatttacaagaggtagttctaaaaggtgaagaagctataacagtaagaccaggttcattattaccagcagaagattttgatgaaatagctaaatatctaaatgaaaagtatgatataaatgctaatataagaaatgttataagttatgctttatatccaaaagtatatgaagattatatcaaacatctacaacattataatgatatatctaaacttgaaagtgatgtattcttctatggattaaataaaaatgaagaatgtgaagtagaaatagaagaaggtaaggtattaacaataagattagttgaaattggtgaagttaaggaaaatggatttagaactataggatttgagttaaatggaatggttagagaagtagaaataaaagataagaatttctctggaaaaattaataatgttgaaaaagctgatatgaatgaccctcttcaaattggagcaagcataccaggaaaagttataaaaataatggttaaagaagaagatgaagtaaaagcaaatcaaccattaatcgttatagaggctatgaagatggaaactataatagttgctaagactgatggagtaattaagtcaatcaaagtaaaagaagatgatatggttgaagataaacaattattaatgataatgaag

SEQ ID NO: 16734 - DNA, 366 bp, Clostridium difficile
atgctttcagcgcttatccattccgtacatagctacccagccatgcccttggcaggacaactggtacaccagaggtatgtccatcccggtcctctcgtactaaggacaggtcttctcaaatttcctacgcctgcgacggatagggaccgaactgtctcacgacgttctgaacccagctcgcgtaccactttaatgggcgaacagcccaacccttgggacctactacagccccaggatgtgatgagccgacatcgaggtgccaaacctccccgtcgatgtggactcttgggggagataagcctgttatccccagggtagcttttatccgttgagcgatggcccttccacgcagaaccaccggatcac

SEQ ID NO: 16735 - DNA, 454 bp, Clostridium difficile
atggggtctttccgtcctgtcgcaggtatccggcatcttcaccggaattacaatttcaccgagtctgttgttgagacagtgcccaaatcgttacgcctttcgtgcgggtcggaacttacccgacaaggaatttcgctaccttaggaccgttatagttacggccgccgtttactggggcttaagttcactgcttcgattgctctaacagatccccttaaccttccagcaccgggcaggcgtcagctcctatacatcgtcttgcgacttagcagaaacctatgtttttggtaaacagtcgcttgggcctattctctgcggccacctgatggtggcaccccttatccctaagttacggggtcattttgccgagttccttaacaacagttctctcgctggccttaggatactctcctcacccacctgtgtcggtttgcggtacgggtacctttaacct

SEQ ID NO: 16736 - DNA, 403 bp, Clostridium difficile
ggaatatcaacctgttgtccatcacctacgcctttcggcctcagcttaggtcccgactaacccagggcggacgaaccttcccctggaaaccttgggtttacggcctgtgggattctcacccacatctcgctactcatgccaacattctcactcccatactgtccacatgtccttacggtcatgcttcaacccgtatgggaagctcccctacccatcattactgatgccgtagcttcggtagtaagttttagccccggaaatcttcggcgcaggatcactcgaccagtgagctattacgcactctttgaatgagtggctgcttctaagccaacatcctggttgtctgtgcaatcccacatcctttaccacttaacttacatttagggaccttagctgacgatct

SEQ ID NO: 16737 - DNA, 1371 bp, Clostridium difficile
atggcaaaaataaaaacaaaatatgtatgtcaatcttgcggatatgaaacagctaaatggcttggtaaatgtccagaatgtacaaaatggaatacatttgtagaagaaatagaccaaaaaagcaccaaaaaagaggtctttataatagataaatcttcatctaaaccagtcagtataaactcaatagagagtaaagaagaagagcggtttacaacagatataaatgaattagatagagtgcttggaggaggtatagttaaaggctctttagtgcttgttggtggtgaccctggtataggtaaatcaacacttttaatccaagtatctagtaatgttgccaacttaggaaaaactgttttatatataactggagaagaatcagaatctcaaataaaaatgagagctaaaagattaggtattaactcagaaaatttatatatatttgctgaaaataatttaagtataattgaatcttatttagaaagtgtaaatccagaattaataattctagactcaattcaaactgtcttcagtccagaaatatcctcggcaccaggaactgtcagccaaattaaagaaggtacttcaaaattcatgaaaatttctaaaaaaatgggaatttcaacgttcatagttgggcatgttacaaaagaaggttcactagcaggaccaaaattattagagcatatggttgatactgttctatattttgaaggagaaagatataatacttatagattagtaagagctgttaaaaatcgatttggttcaactaatgaacttggagtgtttgaaatgagggatttaggattagtagaacttgataatccatctaaaattttaatctctgaaaaaccaaaagatgtagcaggttcagtaataatatctactgtagaaggtacgagaccaatgttacttgaattgcaagcattagtttctcctacaagttttggtataccaaaaagaacatctacaggagtcgattacaatagagtaggtatgttattagcagtattagaaaaacgtgttggtttgcaaatacaaaatcaagatgtctatataaacatagttggaggaataaagataaatgaaccctcaattgatttagggatagccatttctgtagcatctagttttagaaatataccgatagatgaagatatagctgttacaggagaagtgggacttacaggagaagttagagcagtaagctttatagaaaaaagaatagctgagtgtaaaaaacttggatttaaaaagatagtagttcctagaagtaattatgatgttgtaaaagagaccaaaggcatagaaatatggccagtagataacttaagacaagctataaatatagtacttgggaggaatcaa

SEQ ID NO: 16738 - DNA, 2445 bp, Clostridium difficile
gtgaacttcaatagatttacacaaagagctaaaaaggcaattgatttagcgtttgaatctgctaaaagtctaggacacaatattgtcggaagtgaacatatacttttaggtcttttaagagaagaagaaggtatagctgctaaagttctaagtaaagttggatttacagaagcttatttagaaggcaaaatagttgatatggaaggtaagggagaagaaatctcagaagatatagtattaagtccaagaagtaaacaaatacttgaattatcaggaatgtttgcaaataaattaaaaacaaattatattgggactgagcatatattattagcaattattcaagaaggtgaaggaatagctaataagattttaaattatgctggagtaaatgataggactttagcccaattaacaattgatatgatgggtattagtgataaaaatcaatacaaagcagaaaatagttacacgggcaaccagaatcaagcagaatctaaagtacttgataagtatggaagaaatcttacactatatgcaaaacagaataaaatagaccctgtaataggtagagaaaaagaaatacaaagagtaatacaaatattaagtagaagaactaaaaacaatccagtgttgataggagacccaggtgtagggaaaacagccatagctgaaggtctggctacaaatatagccttaggaaatgttccagaaacactaaaaaacaaaactttatactctttagagatgggttcattattggctggagctaagtatagaggagaatttgaagaaagaattaaagaagttgtagatgaagttgttaaaaatggaaacataatcttatttatagatgagatgcacacaataataggggctgggtctactggagaaggctctatagatgcttcaaatatattaaagccagccttagcaagaggagaaatacaagttataggtgcaactacaattgatgaatatagaaagcatgttgaaaaagattctgctctagaaagaagattccaaccagttatggtagatgaaccaactaaagaggactcaataaaaatattagaaggattaagagataaatatgaagctcatcataaagttaaaataactgatgatgctataaaggcagctgtagaattatcaactagatatatatcagacagatatctgccagataaagctatagacttgattgatgaagctgcatcaaaagtaagattaaaagaaaatacacctccttcagaaataaaaaaattagaactagaaatagaaaatatagataaagaaaaagaagaagcagtaagatgtcaagactttgagaaagcagccaaaataagagatgaacaaggtctacttaaaaaacaattagaagatgttagagaaagatggaacaagtcatctaaacattcagatttagttgatggagaagttattgctgaagtagtgggcttatggacaggaataccagttaataaaattcttgaagaagaggctgatagacttttgagacttgaggaaatactgcacaatagagttataggtcaagaacaagcagtaaaatctatttcaaaggcaatcagaaggtcaagagcaggtcttaaagaccctaatagaccaattggttcatttttatttttaggtccaacaggagtaggtaaaacagaattatctaaggcattagcagaagtgcaatttggagatgaaaatcaaataattagaatagatatgtctgaatatatggaaaaacatgctgtgtcaagaatgataggttcacctccaggttatgtaggtcatgatgaaggtggtcaattaactgaaaaagtaagaagaaatccatattcagttatcttatttgatgagatagaaaaagctcatccagatgtatttaatattctgttacaaattctagatgatggtagactaactgattcaaaaggaagaactgtagattttaagaatactattgtaataatgacatcaaatgttggagcatctacaattggtagacaaaaaactttaggatttagtatagctaaaggagacgaagaagaaaaatctcaatatgaaaaaatgaaagaaaatataatgggtgaattaaaacaaagattcagaccagagtttttaaacagaatagatgatataattgttttccactcactaaatgaaaatcatatatcaaaaatagtacttttaatggcagcgaaactacaagagagattaaaagaaatggatataaaattagaaatgagtgatgaggctgttaaattaatttctaaatctggatttgacttagaatatggagcaagacctcttaaaagagctttacaaaaagagttggaagatgagctatctgaagcaatcttaaaaggtaatgtgaaaaagggaagtaatgtagtagcaaaagtcaaagatgaaaaaatagtttttgaaactaaa

SEQ ID NO: 16739 - DNA, 1830 bp, Clostridium difficile
atgtgtggaatagttggatatttaggaagtagaaaggcagcagaagttatagtagaagggctttctaagctagagtacagaggttatgactcagcaggagtagcagttaatagttctaatgaaaaagaacttaatattagaaagtttaaaggtagactttctgtacttgcagaagacttagaaaagaatcctattgatggaaatttaggtatagggcatacgagatgggcaactcatggagaaccatctgatgtaaactcacatcctcattttaatcaagccaaaacaatagcagttgttcataatgggataatagaaaactatatggaaataaaagaagaattaatttctgaaggtgttaagtttgaatctcaaacagatacagaggtaatagcacatttagtagataaatactatgagggtaatttattagatgctgtatacaaaactatatcaaaattaagaggagcttatgcattaggtgttatatgtaaagaacatggaaatgaattagttgcagtaagaaaagatagtcctcttgtagttggtgttggtgaaggtgaaaactttatagcatcagatatacctgcattattaaaatatactagagatgtttatttcttagaaaatggagaagtagttcatctaaaagacgaaaatgtaacagtttatgactctaatagaaatcttgttgaaaaagaagtatttcatgtaacttgggatgtagaagctgcgtctaaaggtggatatgactactttatgtcaaaagaaattcatgagcaaccaacaggagtaagagaaactttagaaagaagacttgatgataatggaaatataattctagacagtataaatatttctaaagaagacttagaaaaaataaataaagtttatatagtggcttgtggaacagcatataatgctggattacttggtaagtatgccatagaaaaatttgtaaatataccagtaataactgatatagcatcagaatttagatatagcgacccatttgtagatgaaaattcattagtaatattagttagtcaatctggtgagacagcagatactctagcagtattaagagattcaaaggctaaaggagcaagaatactttcaataactaatgttgtaggttcatctatagcaagagaatcagatgatgtattctatacttgggcaggacctgaagtagcagttgcatcaactaaggcatatactactcaaataacttctttatacatgatagctttagactttgctatcaaaaaaggaacaataactagagaattttatgatagtatgatttctaagatgaaagaaataccatcaaaaatacaagaaatactagacaatgaagaatatataaaagaagttgctaaaacagttgttagttctgaacatgcattctatttaggaagaggtatagactatagcttagcaatggaaggttcattgaaattaaaagagatttcatatatacatgcagaagcttttgcagcaggagagctaaagcatggaacaatagctttaatagaaaaaggaactcctgtaattgccatagctactcaagaaaagttatttgaaaaaatggtttctaatatggaagaagtaagagcaagaggagcttatgtagtagcaatagctcaaagccataataaggatgttgagaaagctgctgataaaataatctatataccaaattcagatgatattttatcaccaatattagcagttgtaccaatgcaattacttgcttatcatgtctctgtactaagaggatgcgatgtagataagccaagaaatctagctaaatcagtaacagttgaa

SEQ ID NO: 16740 - DNA, 1404 bp, Clostridium difficile
atgaactataaaaatataatacaaattacaagcttttcaattatgaaaggagaatctttagtgagaaagtattttggaacagatggagttagaggagtagcaaatacagaactaacatgtgatttagcatataaacttggtagagctggtggatttgtcttagctcaaggagaccacagagtaaaagtagtagtaggtaaggatactagaatatcaggtgatatgttggaagcatctttaatagcaggacttatgtctgttggatgtgatgttattactgttggaataataccaacacctgcagtggcatatttaactagaaaatatggtgctgattgtggtgtggttatatctgcatctcacaatcctgttgaatataatggaatcaaattctttaataagaatggatataaattagatgatgaaattgaattgaaaatagaagaatatatagacgatatagacaaaattgattgtcttccaattggtgaaaatgtaggaagaaaattacatgaacattgtgcacaaagagactatgtagactacctaaaatcaataataagcactgactttaagggattaaaagtagttttggactgtgctaatggtgcgtcatataaagtggcaccaatagtgtttgatgaactaggagcaagtgtaatttcaataaatagttcaccagatggaaataatataaactataaatgtggctctacacatccagaacaacttcaaagggctgttttggaacataatgctgacttaggtcttgcatatgatggagatgctgatagattaattgcagtaaatgaaaagggtcaaattgttgatggagaccatataatgatattgagtgccttaaatttaaagaaaaataataaattggcacaagatactttggtagttacagttatgagtaatatagggttgacaatagctgctaaggaaaatggaataaatttatctactacagcagttggagacagatatgttttagaagatatggttaaaaatggatataatcttggtggagagcaatctggacatatgatatttttagattacaacactactggagatggagtgcttagttctctaatacttgcaaatataatcttgcaagaaaagaaacctttatcagaaattgcatcaataatgagccaatacccacaagtattagtaaatgcaacaataaaaaatgaaaataagaacaaatatatggaatatccagaaataaaaactgagatagaaagaatagaatctattttagacggaaatggtagagttttgataagaccatcaggaactgagccattagttagagttatgttagagggtaaagaggaaggtcaaataaaagaattagcaacaaacttagctaatcttatacaagaaaaattatcg

SEQ ID NO: 16741 - DNA, 1344 bp, Clostridium difficile
atgtttacagtaaatgaaaatttaactaatagaaaatcgaagggagatatacaaatgtcagttattgaattagtatatgctagagaagtattagactcaagaggaaatccaactgtagaagttgaagtagtattagaagatggagcaatgggaagagcaatagttccatcaggagcatctacaggagcttttgaagctgttgaattaagagatggagataagggaagatacttaggaaaaggtgtagaaacagctgttgctaacgtaaatgaaataatagcacctgaaatagaaggaatggatgcatttgaccaaccagctatagatgcaatcatgatagaattagatggaactccaaacaaaggtaaattaggagctaatgctatattaggtgtttcaatggcagtagctagagcagctgctgatgaaataggtttaccattattccaatacctaggtggagtaaatgctaaacaattacctgttccaatgatgaacatattaaacggtggagagcatgctgataacaacgttgatgttcaagaatttatgatattaccagtaggagcttgttgtttcaaagaaggtttaagaatgggagcagaagtattccattcgttaaagaaagttttaggagaaaaaggattagcttgtggtgtaggtgacgaaggtggatttgctccaaacttaggttcaaacagagaagctttagaattaatagttgaagctataacaaaagctggatataagccaggtgaagacgttatgttaggtcttgacgttgctgctacagaaatgtacaacaaagaaactaaaaaatacgttttagcaggagaaggaaaagagttaactgctgctgaaatggttgctttatatgaagattggtcaaacaacttcccaataataactatagaagatggtttagacgaagaagattgggatggatggaaattattaactgaaaaattaggaaataaattacaattagttggtgacgacttatttgttactaacacagagagattagaaaaaggaattgaaaatggagtagctaactctatattagttaaagttaatcaaataggtacaataactgaaactttagatgctatagaaatggctaagagagcaggatatactgctgttatatctcacagatcaggagaaactgaagattctactatagcagatttagctgttgcagtaaatgctggtcaaataaaaactggtgctccatcaagaactgatagagttgctaagtacaaccaattattaagaatagaagaaatggttggagagcaagctagatattgtggattaaaatctttctataacttaaaaaaa

SEQ ID NO: 16742 - DNA, 657 bp, Clostridium difficile
atgaaacatatattaaaaacagtagaccatactattttaaaagctacaactacatgggaagatattaaaattttatgtgatgaagctgtagatatgagtgtagcatcagtttgcataccaccatcatatgtgaaaagagcatcagaatatctaaaaggtaaaataaagatatgtacagtgatagggttccctttgggatatcaaactactgctacaaaagtatttgaagcaaaagatgctattgaaaatggagcagatgaagttgatatggttgtaaacatttcagatataaaaaataaagattatgataatataggaaaagaaataaaagaaataaaaaaagctataggagataaagtattaaaagtcattatagagacatgttatttagatgaagatgaaaaaataaaaatgtgtgaaatagtaacaatgtcaggttcagattttataaaaacatctactggaatgggaacaggtggagctactttagaagatataaagcttatgaaagagcatgttggaaaaaatgtaaaaataaaagctgcagggggagttaaatcaatttctgatgcagaaaaatttatagaggcaggagcagaaaggttaggaactagctcaatatgtaaaatattaaaaaatgaagatacaacagattat

SEQ ID NO: 16743 - DNA, 1197 bp, Clostridium difficile
atgcaaaattctatgaagcaggaaccctgtgactttagtcatgggaggttcagaacaggaataatattcataggtattacaagtgttatgtcagcatttttacaaattaaagagaactttattgtagttggatttggaagtataccctataatatagtaataattatttcaataatgttaagtaccatatttggaccatacatacttccaattggtgctgtggttgctatggtagttcaactgctcttttacatgttttttgttaaaaaaacgaactacaaatacttatactacttaaactttaaagatgatagccttattaaattactagcattactttcaccagtatttataggtgttgctgttaatcaagtgaactcattggtagatacaactttagcctcaacattagttaaaggaagcattccagcacttacttatgcagatagattaaatggttttgttacaggaacatttacagcttcaatagtatctgttatgtatcctatgttatctaagttaagtgcagaaaataatcaaaagaagtttactagttcagttaaatctagtataaatatgataataatttctatgattcctatttcagttgcttctattttttttgcaactcctgttgttagaatcatttttgagagaggtgcttttgatgcgagggcaacccaaatgacagcaactgccttaattttttatgcagttggtatgactgcatttggattaagagatattttgggaaaggttttttattcattacaagacacaaaaacacctatggtaaatgggattatatctgtaggggtaaatatagtattggacttagttttaataaaaccaatggctcatggtggtcttgctcttgcaactagttcatcatcaattgcatgtatattgttactcttcttgaacctaaaaagaaaagttggatattttggacaagataaaataataaaagcaactttgaaatcggtagttgcatctttaattatgggtgttttatcatactttacgtataaatttatatttggaattttgggagtaggaacatttaatgagtttgtatcactagctatttcagttatagttggaggtggaatttatacactactaatgactatttttaaagttgaagaggttgatatgatactgaatattgcaaaaagaaaattgcatttaaaaaag

SEQ ID NO: 16744 - DNA, 1116 bp, Clostridium difficile
gtgatagcagtgaaaaaagcttataagtttagaatatatcctaataaaaaacagcaagagttaattaacaaaacttttggatgttgtaggtttgtatataataaatatcttgctaaaagaatagatgtttataaaaacgataaagaaacttttacttataaacagtgtagttctgatttgaccaatttaaaaaaagaattaaattggcttaaagaacctgataaattttcactacaaaacgccttaaaagatttagataatgcatataaaaaattctttaaagaaaaggcaggatttcctaaatttaaatcaaagaaaattaatagattttcatataaaactaactttacaaatggaaacattatgtattgtggtcaacatataaaactacctaaacttggtatggttaaggtaagggataaacaagtacctaaagggagaatacttaatgctactatatctaaagaaccaagtggtagatattatgtatcattatgctgtactgatgtagatattgaagtatttgaaaatactaataatcatataggtttagatttaggaattaaagaattttgtatctcaagttgtggagaatttatagaaaatcctaagtatcttaagaagtcattaaacaaacttgctaaattacaaagagaattatcgagaaaaacaatcggtagtttaaatagaaataaaacaagattaaaagttgcaagacttcaagaacatatagctaatcaaagaaatgattttctacaaaaactatctactaaattaataaaagagaacgatattatttgcatagaagatttacaagtaaagaatatgattagaaatcgtaaactatctcgcttaatttctgatgtatcatggtcagagtttattcgtcaattagaatacaaggctaattggcatggtagacaaattgtaaaggtaggtaaattctttgcaagttcacaaatatgtaataaatgtgggtataaaaacgaggaagtgaaggacttaaatataagagaatggatttgtcctagttgtaatgaaactcacgatagagatataaatgcaagtagaaatatattaaaagaaggattaagattaataacgattcaaaataaa

SEQ ID NO: 16745 - DNA, 405 bp, Clostridium difficile
atgagcaaggtagctaaagcaactttttatttgatgatagttactataatctctaagattcttggaatgggtagagaattagtattatcatcaatttatggtacaggcttatatacagagagttatttaacagctatgaatataccaaatattatatttgcagcaataggtactgctatagttactacttttattccaatgtatcaagatataagtagtaaacaaggtgaaaagcaagcactaaagtttttaaacaatgttttaaatataatagttggtatatgcatagttgtagctatattaggagttattttctcaaagcaacttgtaagtatatttgctataggatttgaaggagagaggtttttacttaccgtaaaatttactaaaatattgattaaaaaa

SEQ ID NO: 16746 - DNA, 1185 bp, Clostridium difficile
atgcgaataattatgaaaggtgtagatgatttaatagatgagaaagagttaagggaaaagcttattaaatcagaaaaagaaggaaaacctatgatagtaaaattgggtctagacccaagtgctccagatatacatttagggcatacagtagttcttagaaagatgaaacaattacaagatttaggtcatcaaatagtaataataattggagattttacaggaaaaattggagacccaactggaaaatctaaagctagaaaagctttaacaacagagcaagttcttgcaaatgcaaaaacttatgaagaacaaattttcaaagttttagataaagaaaaaactattgtaagatttaatagcgagtggttagctaagttaaattttgaagatgtaataaaattagcagcaactattactgttgcgagaatgttagaaagagaagattttaaaaagagatatgaaggacaaatgccaatatcagtacatgagttcttctacccattaatgcaagcatatgactctatagcattagaagctgatatagaacttggtggaactgaccaaagattcaatttactaatgggaagatcattacaaagagaatttggtatggagtctcaaatagtaataatgatgcctttaatagaaggattagatggtaaagaaaaaatgagtaagagtttaggtaactatattggaatagatgaagaagcgggaataatgtaccaaaaatctatggaaattcctgatgaacttataattaaatactacaatttagtgacagatgttcatcctgatgaagttaataaaatagaatctcagttgaaagagggttcagtaaacccaagagatataaagatgaacttagcaagagaaatagtaacattataccatggagaagaatctgctaaagaagctgaagaaagatttaaatctgtattccaaaaaggtcaaatacctgaagatatacaaacaattcaagttaaggaagatggatttgacttaatcgaagtactagtttctaatgagattgttaagagtaagagtgaagttagaagattagcttctcaaggtggagtaaaggtaaatggtgaaaaagtagaggatttaagcactattgtaaaagagagtgaattagttgttcaaataggaaagaaaaaatttgtaaaaatcgagctagtaaaa

SEQ ID NO: 16747 - DNA, 825 bp, Clostridium difficile
atgaaaaataccatacagacttttaagaatgctaaatatgaaggaaaaaaactatctatgcttactgcttatgactactcaattgcaaaaataatggatgagtgtgatataaatggtattttaataggagattcattaggaatggtcataaaaggtgaagaaaacactctatctgttaccatagacgaaattatatatcatacaaaagctgtaaaaaatggtgtaaaaaatgccttaatcgtaagtgatatgccttttctatcttaccatgtttctatagaagatgcagttaaaaacgctggtagacttataaaggaaggaggagctcatgctgtaaagttagaaggtggctcaaacgttataaagcaaatagaaagcattgtaaatgctcaaatacctgtaatggggcatttaggattaactcctcaatcagtaaattcatttggtgggtttaaggttcaaggaaataccagtgaaacagcaagacaacttattgaagatgctaaattaatagaaaaagcaggtgcattctctattgtccttgaaggagtgcctacgaaaatagctgagatggtaactaattctatttcaattcctacaataggtataggggcaggaattaactgtgatggacaaattttagtttatcaagatatgttgggaatgtttggagattttgttcctaagtttgtaaagcagtatgcaaatataggagatataatgaaagattcaattaaaaattacatcctagaagttaatacaggtgcatttccacaagaaaaacacagcttttcaataaatgaatctgagttagaaaaattatac

SEQ ID NO: 16748 - DNA, 1821 bp, Clostridium difficile
  misc_feature (1372)..(1372): n=g, a, t or c
  misc_feature (1409)..(1409): n=g, a, t or c
atgtcacaaaaacataaaattataaatatcgcagttatagcccacgttgacgctggaaaatcaacattggttgatgctttcctttctcaaagcggtgtttttagaaagaacgaagtagttaaagactgcgttatggacagtaacgaccttgaaaaagaaagaggcataactatatattcaaaaaactgtgcaataaactatgaagattacaaaataaacatagttgatactccaggacacagtgacttttcttctgaagttgaacgtgttatgaaaactgttgacacagttattctattagttgatgctagtgaaggcccaatgcctcaaactagattcgttttacaaaaatctttagagttcggtttaaaaccaatattatttataaacaagattgataaaaaagaccagagagcggaagaagtagttaatgaagttttcgatttatttgtagacttaaatgcaacagatgagcaatgcgaatttcctataatatatggtattgctaaacaaggtattgctaaacttgaaatggatgatgatagtgaagacctttctcctctatttaaaactattgtaaatcacgttgaagcttatcctaattacgataatgaacctctacagttccaaatatcagctcttgcatatgatgattatgtaggtagacttggtataggtagaatttacaaaggtactcttaaaaacaatacacaagttgctatatgtagagaagattctgttgtatctaaaggaaaagtatcaaaactttctgtgtatgaaggtttaaaacaagttgaagttgatgaagctactagtggagaaatagttgttatagctggtattcctgatatatctataggtgaaactatatgcgatttagatagtccactacctatggaaatgataaaaatagaagagcctactctttctatgaacttcttagtaaacgactctccattcgttggaaaaagtggaaaattcgttacaactagacatttgaaagatagacttgaaaaagaacttgaagtaaatgttggtcttaaagttgaacctcttgatactactgatggatacaaagtttctggacgtggagagcttcacttatctatactacttgaaaatatgagacgtgaaggttatgaagttggtgtttctaaacctgaagttttaatgcataaagaagatggaaaactaatggaaccaatagaaagagttgttgtaaactgtcctgaagtttactctggtactattataaatgaattaaacatgagaaaaggtatgatggagtctatgtcaatagaaggagactatgtaaaaatagagttcttagcacctactcgtggtcttttaggatatcgaagtgaatttatanacgctactcgtggagaaggtactttagttcgttcatntgaaaaatttgaagaatttaaaggagaaataccttcaagaggaaatggtgttttaatagcacaaggacctggtgttactatggggtattctcttaatgccttaagtgatagagctgtaatgtttgtagaccctggtgtagaagtttacgaaggtatgataattggtatgaattccagaaaagatgatatggtagtcaacccttgtaaaaacaagaaaatgagtaacgtacgtgcttctggttcagatgatgctataaaattatctcctcctagaatatttactcttgaagaagcactagagtttatagaagatgatgaattagttgaaattacacctgattctataagacttagaaaaagattcttaaatgaacatgatagattaagatataacaaatctagacaaggtaaa

SEQ ID NO: 16749 - DNA, 714 bp, Clostridium difficile
atggtaaatttaaacgatgcttatgaaatagcaaggtatataaaagaagttaaaaagaaaacacctgttaaggtatatgtaaatactaactctttacacttccaatcaactgataaatttaaggtatttggaagtaatggttcttatatatttgtaggtgactatgaggatataatggaagtattagataaacatggaaatgatataacagatactcatgtagaatatgatagaagaaattctgctattcctctaaaaaatactttaagtgaacatgcaagaattgagccaggtgcaataataagagacatggttactatagaaaaaaatgctgttgtaatgatgggagctgttataaatataggagctgttattggtgaaggttctatggtagatatgaatgctgttattggagctagaggaactcttggtaaaaatgttcacttaggtgctggtgctgttgttgctggtgttttagagccaccttctgctactcctgttatagttgaagatgatgttttaataggagctaatgcagttattcttgaaggtgttagaatcggtaaaggtgctgttgttgcagctggtgctgttgtaactactgatgtagaagctggtgccgttgttgctggttctcctgctaaagttataaaaatgaaagatgaaaaaacggctgacaaaactaagcttatggaagaccttagaaatttagat

SEQ ID NO: 16750 - DNA, 543 bp, Clostridium difficile
atgataaatgtaatagcaaatagatatgccgaagccctatttcaattaggagaagaagaaaattcaactgatgtcttattcaaagaactagaaaaagtagtagatatgatgactaaagttagtaaagatttctacaaagttttaaaatcaccattagtttcaaaatcagaaaagaaaaacttggtagaaattatttttagtaaggaagtaagttctaacataaaaaactttttaaaagttttagtagataaagatagaatatcatatttagaagatatcgaattagcttataaagaattattaaataagaaaaacaatgtaattgatggagtagcaataagtgctattccaatgagtgaaacagatattaaagaacttgaagtcaaactttcaaataaatacaacaaaaatgttactatagaaaatgttgttgacaagactatactagggggagttctagttagaattggaaatgaacaaatagatggcactgtgaaaactcgtcttgataagatgaaagaaaagctatctgaagtaatatct

SEQ ID NO: 16751 - DNA, 216 bp, Clostridium difficile
gtgaaggagaattgtatgaataaaatttgcaaaatattaaatataaaatacccagttatccaagggggaatggcatgggtagctactgcatcattagcaagtgctgtatctaatgcaggaggacttggcataatagcagcaggaaacgcaccaaaagaagctataaagaaagaaattgttgagtgtaaaaaattaacagataaaccttttggagga

SEQ ID NO: 16752 - DNA, 633 bp, Clostridium difficile
ggtgtaaatactgctgaaattgcaggcatgttacgtacagcaataaatggtgactccgtaaccactgctactattgatgattacaaagtggatgtaaacctaaaatttaaagcagatactattgatagcttagaagatataaagcaactaaaagtaaactctgcaactggaaaagaagttcctcttggtgctttttcagatataaaaatggcagatggtctacaatctatatctaggactgatggagatttttctgtaaatataactgctacacttgacaatttagatgctggtactgctacaaaactagcactagaaaaaacgaataaaatggtaattcctaaagattactctataggtgttggtggtgaaacagaaatgatgaatgaatctatggcaagtcttggattttcaatggtcatagctatagcattagtttatatggtaatggtagctcagtttgaatcatttagtaaaccatttataatcatgttctgtgttccatttgcattcgttggagttgtgctttcgcttctagttagtggtcaaagtttaagtactgtcggtatgctaggtataatcttacttattggtattgttgttaataatggtatagttcttattgactacata

SEQ ID NO: 16753 - DNA, 403 bp, Clostridium difficile
ggaatatcaacctgttgtccatcacctacgcctttcggcctcagcttaggtcccgactaacccagggcagacgaaccttcccctggaaaccttgggtttacggcctgtgggattctcacccacatctcgctactcatgccaacattctcactcccatactgtccacatgtccttacggtcatgcttcaacccgtatgggaagctcccctacccatcattactgatgccgtagcttcggtagtaagttttagccccggaaatcttcggcgcaggatcactcgaccagtgagctattacgcactctttgaatgagtggctgcttctaagccaacatcctggttgtctgtgcaatcccacatcctttaccacttaacttacatttagggaccttagctgacgatct

SEQ ID NO: 16754 - DNA, 454 bp, Clostridium difficile; identical to SEQ ID NO: 16735

SEQ ID NO: 16755 - DNA, 366 bp, Clostridium difficile
atgctttcagcgcttatccattccgtacatagctacccagccatgcccttggcagaacaactggtacaccagaggtacgtccatcccggtcctctcgtactaaggacaggtcttctcaaatttcctacgcctgcgacggatagggaccgaactgtctcacgacgttctgaacccagctcgcgtaccactttaatgggcgaacagcccaacccttgggacctactacagccccaggatgtgatgagccgacatcgaggtgccaaacctccccgtcgatgtggactcttgggggagataagcctgttatccccagggtagcttttatccgttgagcgatggcccttccacgcagaaccaccggatcac

SEQ ID NO: 16756 - DNA, 675 bp, Clostridium difficile
ttgaaaaaattatatagaatagtaattaacattatactagtattagtaatactttacagtggatttaatatatactcaaaacttaccaaatacaatcatgatactaaaatatcctcagaacttcaaaaaaaagaatataaaaaagaggatttatcaaagattaacagtgattttaaattttggctttctgttgagaatacaaatataaattatccagttgtacaatctaaagataattcttactatcttgacaaagatttttataaaaaagattctatttctggtacactgtttatggattatagaaataaatctattgatgacaaaaatatcataatatatggacataatatgaaaaataaaactatgttcaacaacctaaataagtttaaagatgctgacttctttaaaaaaaataataaaataaaaataaccttgaatggaaaagaatttttatatgatgttttttctgcttatattgtagaatctgattatgattatctaaaaacaaattttaataatgaatctgattatcaaaattacataaatgatattacttctaaatcattgtataaatctcctattaaggtaaatagcaatgataaaatagttacactttctacatgtacctatgaatttgatgatgccagaatggtgattcatggtagattgatt

SEQ ID NO: 16757 - DNA, 861 bp, Clostridium difficile
atggaaatttcaggtagaacaggattatttgcattaataggtacaccagttggtcactctaaatcaccagtgatgtataattatagttttaagaaattagatttagattatagatatttagcctttgatatcacagtagataaggtaaaagaggcacttttagcaataaaaacttttaatataaaaggagccaatgttactatgccatgcaaatctgctgttacagaatatatggatgaactttctccagcagctcgtataattggagcatgtaatacaattgtaaatgacaatggaaagttagttggtcatataacagatggagtaggctatgttcgtaatttaaaagaaaatggggtagaagttaaaggtaaaaagattacaattatgggtgctggtggtgcagcaactgctatacaagtacaatgtgctttagatggagcaagagaaatatctatctttaatcctaaggatgatttttataaaagagcagagcaaacagttgagaatataaaaaaagatgtaccagaatgtgttgttaatctatatgatttagaagatacaaacaaactttatgaggagatagaatcaagtgatatattgacaaatgcaactcttattggtatgaagccctatgacaatgaaacaaatataaaagatactagtgttttaagaaaagacttagtagtaacagatgtcgtttataatcctaagaaaacaaaaatgattgaagatgctgaagctaatggatgtaaggctattggtggattaggaatgttattataccaaggagcagaggcttttaatctatatactggattagaaatgcctgtagaagaagttaatgaattatgctttaaa

SEQ ID NO: 16758 - DNA, 2135 bp, Clostridium difficile
atttgtaaatttgtctaatctacttttaaaattttgaggaatattgtaatataagttagtacagatattaaaaatggtataatataagatagatataaaaagaaaaagtaaaatgatgtaaataatatgatatgatataagatgtagcaaatttagtaaataattatttagatatcataatcaaattagcaactttgcacaatgtaaatattacaataaaataattgatttaaggagtgaaggttttgagtgaaaataatataataagaaacactgttttaaatgtcacagcaagttttttaaaacaagagtctaaaataaatgaaaagctagatggtgttttggaaaagaaatttgaaaaagtagaatttaatgaagcaaaatatgcagagcttttaaaatttaatatattgttttataagacattagcaagaaatacagaaccacttattggcaaatggatagtagataagtacatacctgaaatagatgaattagaaaaagatttagaattaactacagcaaaatgtagaaagtatgtaaataaggctatgaaagagggattagactctctaaaagccaatgatttaaatagttttttagcttatgataaaatggaactatcagagagaagaagacgcttagaaaaggattataaggttttaaacctatataaagaccttcttaatatatctcttagaaaaataagtttagaaaagaaagaatgtggagatttatttcttaaaaatcaagcagatgcgaaaagagaattaaaaagagaaattatattctgtgtaaacaaaatattagctagcaataaagatgtggtacctaataatgtggaagagaataacgaacaagacaaagtagaaataaaagcaactgaaattgaggatttgcaattaggtaaagataattcagaaaatgacatgctactaaatgaaattaaaaattcaaaagtaaaacatgaatcaaaatcaaatgatatagaatcgaagtttatagataagttaaatagcttaaataatgaaagtgtatctcaaacaatacacaatgaatataagaagttatgtggattagaagaacttcattctgttgaaggatatggttttggcaaagaaattattaaagattttgcttgtgcaacggttgtattagaatttttaaagagaagaaatagagaccttatagaaggtgcaatgagactgactataattggagaatttggtcctgaaaattttaaggaatttgtggactatgtaattaaaaataaaacagaaattagtgaagatacatggaataaagcacagaatctaataaaagataactatagtgaattagaaaatcatgaaattgcatcaaaaagaactagaagaaataaagatatcgatattgaagaatacatttacatgataaaaaatgcagataaagatatttgctttagaagtagtatttcaatagaagatgatgctgaagaaggggttaaagaagaaatagatagtaataatcaagatataggtgacgttgtagaagataaagatactacagataaagagtacgacagcaataaagaagatataattgaaccagaaaataaaaagagtaaaaagaaggctaaattatttggatttattaaaaaagacaatgaagaagttgaacaagaagaagagaatttaaatgatatttctcctgatataattttagataaaccagttgaaaataatcaagtgaaatcagaagaaatagagcaaaatgaattaaaagaaataaaacaggaagaaccaagtcaacatatagaagaagaacgtagtgtaaaaatagaaaaaccaataaataataacttagatgaaaaagtatcttcaaataatgaatcgaagcttgaaaaagaaagtaaaaacttagaagataaaaaagcaaaagaaataaaagaagaaaaattagaaaatgaaaaatcagtagtaatacctattaaaaagaaagaaaatagtaataaaaaatctaaaaattcttctaaggacaaatatagagaaaacaagaaagaaatgaaaaattatgtatcagataaagaagattctttagatgatgaagaggttgtttctaagaagagtagattaaaagaaactattatagcagta

SEQ ID NO: 16759 - DNA, 942 bp, Clostridium difficile
ttgaagaaaaagtataaatatggtatattaatttggtacaatagaaaatttacgaagaagggtgaaaaaatgcagatgacagttaaaaaagcaataataccagcagcagggctaggaactagatttttaccagcaacaaaatcacagcccaaagaaatgcttcctatagtagataaaccaactttacagtatataatagaagaagctatagaatcgggaattgaagaaattcttataataacaggtagaaataaaaaatctatagaagatcattttgataaatcagttgaattagagttagaactagagcaaaaaggtaagacagagatgttagaaatggtaagagacatatcaaatatggtaaatattcattatataagacaaaaagagccaaaaggtcttggacatgcaatttactgtgcaaaaagttttataggtgatgaaccttttgccgtattattaggtgatgatatagtagattcagatgttccgtgcttaaaacaattaatagatacttataatgagtataaaacaactgtattaggtgttcaaaagatagctaaagaagatactaataaatatggtatattggatgtaaaacatatcgaagatagagtatataaagttaaagatatggttgaaaaacctgcaattgaagaagctccatctgatatagctatacttggaagatatataataactcctgcaatatttagcatattagagaaacagacacctggtaaaggtggagagatacaactgacagatgcacttcaaactcttggaaaacaagaggctatttatgcttataactttgaaggtagaagatatgatgtgggagataagattggttttttagaggcaacaatagactttgctctaaagagagaaaatttaaaagatgatttaatggactatatgagaaaaaaagtaagtgaaaaa

SEQ ID NO: 16760 - DNA, 321 bp, Clostridium difficile
ttggatgcaaaaaataatatagtatcaaaagaattttttgaatttggagatgttgaagctaagcttaaagaaagtgattttgtggttgaatcttcatacaaaacccaaagtcaatcgcattgcatgatggaaactcataggtcatattcatataaagatataaatgatagaattgttgtagtttcatcattacaatcaccacacaatgtaaagagaatacttagaaaagtattgggtataccgtcttcaaaaataagagtaattaaacctagagctggtggtggatttggaggagagtgcacgagaggagagtggaattcc

SEQ ID NO: 16761 - DNA, 403 bp, Clostridium difficile
ggaatatcaacctgttgtccatcacctacgcctttcggcctcagcttaggtcccgactaacccagggcggacgaaccttcccctggaaaccttgggtttacggcctgtgggattctcacccacatctcgctactcatgccaacattctcactcccatactgtccacatgtccttacggtcatgcttcaacccgtatgggaagctcccctacccatcattactgatgccgtagcttcggtagtaagttttagccccggaaatcttcggcgcaggatcactcgaccagtgagctattacgcactctatgtatgagtggctgcttctaagccaacataatggttgtgtgtgcaatcccacatcctttaccacttaacttacatttagggacggtagctgacgatct

SEQ ID NO: 16762 - DNA, 454 bp, Clostridium difficile; identical to SEQ ID NO: 16735

SEQ ID NO: 16763 - DNA, 1020 bp, Clostridium difficile
atgaagaacttattagaaattcaaaagaaattgattccacaggcaattgaacttatggaaagaagatactctattttaagacaaatatctttaagtgaaccaataggtaggagaacattatcaaatgtattagagattagtgaaagaataatcaggtcagaaactgagtttttaaaagaacaaggacttatagacgtagctgtatctgggatgactatcactaaagaaggttctgatttgttagataaacttaaggacatcatgagtgacatcatgggattgtctaagttacaagatagagtcagagaaaagcttggaataaaaagggtaatattagttcctggaagctgtgatgaaaatggaagtttactaaaagatgtaactagatatggatgcgaatatttcttaggtattttaaaagatggagatatcgtttcaataacaggaggaagcactatgttggagttttcaaacgttattaaaactgataagagatatccaaactctacaatagttccagctagaggaagtatgggaactgatgtagagatgcaatctaacaatatagttgcttcaataagtaagaaattacattctaattgcaaacttttacatataccagatgagttggatgaaagtgcaatgaaaactcttagccaagtgccagagattaagacaactttggagtatattaaaagaacagacattttagtttttagtataggtagagcagatgtcatggcaaagagaagaaaacttccagaagacaaggttgatgagatattatctaaaaatgcagttggagaagcatttggatattatttcaacaaagatggagaaatagtttacaaactgaacactgttggaattgatttagaaacagttaaacaagtaaaagaaactattgcaatctttgcagggactgaaaaagtagaagccttattagctatatcaaatatgcataaaaacatggttcttgtaacagatgaagaaagtgcttataagatattgtcattatta

SEQ ID NO: 16764 - DNA, 567 bp, Clostridium difficile
atgaaaaaagaatttagaaaaaaagttattgaatcaagaaaaaataagagtgcaaactttgtacttagtaattcaaatttaataactgaaaaattacttcaaatggaagatataagaaatgcaactaatataatgctttatctaaattttaacaatgaagttcaaacagataatttaatcaaaaaacttttgtctctaaagaaaatagtatcaagtcccatcacaataaaagaaaatcatacattaatccctactcaaataacagatttaaaagagggattgagaattggagcatatggaataagagaacctaacgaaaaatcacctacaattgatattaaggccttagatgttgtaattgtaccagctgtagcatatgatatacattgctatagattaggatatggtggaggattttatgatagatttttagaaaacttaagaaaagatgctataactatcggcatagcatttgacttccagatattcgattctattccaaaagaaactcatgatgcacaattagactacatagttactgaaactagaattatcactccaaatagt

SEQ ID NO: 16765 - DNA, 501 bp, Clostridium difficile
gtgcaagaaaaattacttgctttacgtgaagcagctttggctgaaataaaagaagcacaaagcatagaaagtgtagaaagtttaagagttaagtacttaggaaaaaaaggtgagataactgccatacttaaagaaatgggtaaattatctgctgaagaaagaccagtagttggtaaggttgccaatgaggtaagagaaaacattgaacttagcataaattctaaaaaagaagaaataaatgctattgaaaaagaaagaaaattaaaagaggaagtgatagatgttactcaaccaggaaaagttttaaaggttgggaagaagcatccaataactcaaattatagatgaagtaacagatatatttatcggaatgggattctctatagcagaagggccagaagttgagactgttgaaaacaactttgacgcattaaacgctcctaaagaccatccatcaagagatatgagcgatacattctatatcaatgatggggtattactt

SEQ ID NO: 16766 - DNA, 282 bp, Clostridium difficile
atgaaaaatgaagaacaaatatcaatagctgaaaatatatataatgatttgcaagctatgggtgtagaagttttattagatgacagagatgaaagaataggtgtcaaattcaatgattcagaattaataggaatacctatgaggattacagtaggtaaaaatattaatgaaggtaaagtagaatttaaacttagacataaagaagataaagagataattgacatagaagaaataaatgaaaaagtaaaggcagagtttatcaggaataatgttaggttagga

SEQ ID NO: 16767 - DNA, 1653 bp, Clostridium difficile
atgagaagtgatataaaaaaaggaatagaaggagctccaaagagagcgttaatgtatggaatgggtcttactaaagaagaaattgaaagaccattaataggtatagtaaatgcacaaaatgaggtgattcctggtcatctgcatcttgatgaaatagcagaagctgcaaaaaatggagtaagaatgagtggtggtttgccattagaatttcctgctataggggtatgtgatggtatagctatggggcatgtcggaatgaattattccctggcttcaagagaattaatagcagattcaatagaagctatggctatggcacatggttttgatgctttggtacttatacctaattgtgacaagatagtgccaggtatgttaatggctgctgcaagacttaatataccaagtattgttgtgagtggagggcctatgcttccaggtaaaaaaaatggaaaagtatatgattttaactctgcaatggagggtgttggagcatgtaaagatggaacagtaagtgaagaagaattagaagcgttagccatgaactcttgtcctggatgtggttcatgttctggtcttttcacagcaaatagcatgaattgtttaacagaagctttaggcatggggataccatataatggtactgctgcgtcacattctggagaaagaaaaaggatagcaaaatatgcaggtatgtatgttatggagttacttaagaacgacataaaacctagagatattttaacaatagatgcttttaaaaatgctatagctgtggatatggcaatggctggttctacaaatacagtacttcacttacctgcaatagcttatgaatcaggaatagagcttaacttagatttttttgatgaaataagtgaaaaaactccttgtttaacaaaattaagtccaagtggaaaacatcatattgaagatttacatatggcaggaggaataccagctataatgaacgagctttcaaagataaatggaataaatttagattgcaaaaccgtaacaggcaagactataagggaaaatataagaaattgtgaaatagaaaatgaagaagtaatacatacattaaagaatccatatagtaaccaaggtgggcttgcaatattgaaaggaaatcttgctctaaatggagctgttgtaaaaaagtcagcagttgcagaagaaatgttagttcatgaaggaccagcaagagtttttaattcagaagaagaagctgtaaatgctatttttggtaaaaaaataaacaaaggtgatgttatagttataagatatgaaggtccaaagggtggtccaggaatgaaagaaatgctatctcctacatcagcagttgcaggaatgggacttgataagcatgtagcacttcttactgatggtcgtttttcaggggcaactagaggagcatctataggccatatttctccagaagctatggaaggtggtttaatcggactagttgaagaaggagatataatttctataaacataccagacaaaaaattagagttaaaagtagatgaagttgaaatagaaaatagaaaattaaaatttaaacctttagaaccgaaaataaagcatggatacttaagtagatatgctaaattggtaacatcagcaaatacaggagcagttttaaaa

SEQ ID NO: 16768 - DNA, 849 bp, Clostridium difficile
gtggcattagtaacaacaacatcaatgcttaaaaaggcacaagatgaagggtatgcagtaggagcatttaatgtagaaaatatggaaatggtaattgctgttatagaagctgctgaggagttaaattctccagtaatattacaaactactccatctactgtaaaatatgcaggtcttgattattatctagcaaatgcaaaggttgctgcagaaagagtaaatatacctgtagcaatgcatctggaccatggttcaagttttgaccttgcaatgaaagctttaagaagtggatatacatcaataatgatagatggttctcatgaaagctttgaaaataatatatctatatctaaatcagtagtaaaagcatgtagtccttctcttataccagtggaagcagaacttgggaaagttggtggaaaagaagatgatttagatggcgggaatagtaatgattatacaaatccaaaagaggcaaaagagtttgtcgatagaacaggaatatcttcattggctattgctataggtactgcacatggattgtataagggtgaacctaaaatagatttagataggttatcagaaattaaaaatgtagtttcaatacctttagtattgcatggaggttcaggaatacatgatgatattataaaagaagctataaaaagaggtattgcaaaagttaactatgcaactgaattaagaattgcatatagtaaaggggttaaaaaagttttagatgaagattctgaggttatagaccctaaaaagtatggattagcagggcttcaatcagtaaaggattttgtgaaagaaaagattaaagtgtgtgggtctgtaaatagagta

SEQ ID NO: 16769 - DNA, 183 bp, Clostridium difficile
atgccaatggatttaaaaataggtgatattgttgaattaaaaaagcaacatgcatgtgggtgtaaagagtttgaaatcataagaacgggaatggatataaagataaaatgtactaaatgttcaaggctaataatgcttgatagagagaccttagaaaagagagtaaaaaagctaataaaaaag

SEQ ID NO: 16770 - DNA, 909 bp, Clostridium difficile
ttgataaaaaaattagatgatattttagaacaacttaagggaggagagaaaattgtactctctgtagcagcagctcatgataaagaagttttaatggcaataaaggatgctgtagaaagaaatataattactcctatattggttggaaatgaaggcaaaataagagaaatatcaaaagaaataggatttgatttaagtggtatcaaaatagtggataaggatgatatcaaagagtgtgcagaaatagcagttaaattagtatcaagtaaagaagccgactttgtaatgaaaggattattagatacatctgtcatattaaaagaagtgttaaataaagactatggtcttagaactgatagtttattaagtcatgttatggtatatgagttagaaaaataccataaattacttataactacagatggaggtatgaatatagctcctgattatgaacaaaaggcaaagatattaaaaaattctataaaagctgcaaaagctttaggaatggaaactgtaaaagttgcatgtttggcagctaaagagaaagtaaatcctaagatgcaagcaactgtagatgcagatatgttagcaaaagcttgtaaagaaggagaatttggtgaaaatgtaattgtagaaggtcctctggcttttgatttagctgtttcaaaagaagctagtgagataaaagggtttaaaagtgaagtatctggagatgtagatatcatattggttccaacaatagaggttggtaatggaatagggaaagcctttacatatatggcagactctaaatcagcaggtataattatgggtgcaaaagctcctatagttttagtgtcaagagctgattcacatgaatctaaattatattctattgcatatggggctattgtagctaaaaatatgaaa

SEQ ID NO: 16771 - DNA, 879 bp, Clostridium difficile
atggctataagtatgactggttttggaagaggagaatacaaggatgataattattactttttagtagagtgtaaaacgataaatcataagtattcagatataaacatacgtcttccaagaaaaatttcatttttagaggataaagttagaaatttagtaaaaaattatgtaaaaagaggaagagtagatttatacataaagtttgacttattaggcaaagaagatgtaaacttaaattttgatgagggattagcatctcagtatatagacatactaaaagaaataaaaaataaatttgatattatagatgatattagcgttatgaatgttgcaaagtttcctgatattgtgaaaatagaagaaaaggaagaagatgaagatttattgtggtcaatgttgaatcaagcagttgaagatgcattaatcaaattaagagaaatgagaagtgaagaaggtaaaaaattagctgaagatattgccatgagatgtgatttattaaaaaatcatatagaagagattgaaaaatattcaagtagtgttgtagaagattatagagaaaaattgaatttgagaataagtgaattactggatgacccaagtataatagatgagaatagattagcacaagaagttgcaatatatgcagataaaagcagtataacagaagaaatagttagatttaaaagtcatatagggcaacttaaaaatactatatttaaagacgactctataggtagaaaaatagatttcttaatacaagagatgaatagagaaactaacactataggttcgaagtcatctgatataaatataactaatttagtagtagaagtaaaaagcgaattggaaaaaataagagaacaaatacaaaatatagag

SEQ ID NO: 16772 - DNA, 714 bp, Clostridium difficile
atgttgttaatagcagtcaaaaaggggttgaaatttgtggagaatttaactaaactgaacttggataattacaagccattaagagatgtagtctttgagaatttaagagaagcaatcttagaaggaaaattaaagcctggtcaaaggctaatggaagtgcaactagcagaacaattaggagtaagtaggactccagtgagagaggcaataagaaagcttgaattagaaggtttagtcgttatgttgcctagaaaaggtgcgtatgtggcaaatatgtcattaaaggatattatggatgtattagaagtaagagcaagcctagaaggcttagcagcatatcttgccgctgaaagaattagtgatgaagatattaaaaagcttaaagatatatcagaagaatttaaaaaaagcactttggaatccgatgtagatgcgttattaaaacttgatgtagaatttcatgaatgtatatttaaagcaactaataataaaaaattaatccaattaataaactcattgtgggaacaagtatatagatttagagttacctatatgtctgcttatgatacatcacataatattgttgaagagcataaatacttacttgatgctataattaaaggtgatagtgagctatccaagaagtatgctacagagcatatagaaaaagcagagcagtttatgatagataaggctatgattagtaaagactta

SEQ ID NO: 16773 - DNA, 781 bp, Clostridium difficile
atattattatttttccaaaatttaagaaatccaattttgaactttatatttcttgtctttacaataagcacagaagcaccgttattaatattaattacaacaattatatactggtgtataaataaaaaatgtggacagaaaatactgtttgctataattggaaattttgttgtaaatttaggcatcaaagagtttgtaaaagctcccagaccaataggaataaaaggtcttgaatcattgagagtttctactgctggtggttattcttttccaagtgctcatactcaaactgcaacaacattttgggttagtattctgactatatttaaaaagagatatcttcatttaataggtgcagttatggttttaggagtaggattgtctaggctgtatttagctgttcattggccaatagatgtgatagcgggttggatattaggaatattttttacagttgtatttgtaaaaatatttgactatattgatgataataaaaattatattttacttgtagttttacttataccatttataatagtggctatatttctaaatagccctgaatattttgaaaaatttggtataatagtaggatttgtatttggatatatggttgaggatagatttgttaaatttaatacagataataataacaaaaaaataaattttagtaataaaaataaggggagtaaaaatataattttttcaagaatatgtaggtttttggttgggatagtaacaataggaatgttatatattggcattaagttgtttatttcaa

SEQ ID NO: 16774 - DNA, 843 bp, Clostridium difficile
atgaaattagctgtaataggtagtggaactatgggaagtggtattgtacaaacttttgcaagttgtggacatgatgtatgtttaaagagtagaactcaaggtgctatagataaatgtttagctttattagataaaaatttaactaagttagttactaagggaaaaatggatgaagctacaaaagcagaaatattaagtcatgttagttcaactactaattatgaagatttaaaagatatggatttaataatagaagcatctgtagaagacatgaatataaagaaagatgttttcaagttactagatgaattatgtaaagaagatactatcttggcaacaaatacttcatcattatctataacagaaatagcttcttctactaagagaccagataaagttataggaatgcatttctttaatccagttcctatgatgaaattagttgaagttataagtggtcagttaacatcaaaagttacttttgatacagtatttgaattatctaagagtatcaataaagtaccagtagatgtatctgaatctcctggatttgtagtaaatagaatacttatacctatgataaatgaagctgttggtatatatgcagatggtgttgcaagtaaagaagaaatagatgaagctatgaaattaggagcaaaccatccaatgggaccactagcattaggtgatttaattggattagatgttgttttagctataatgaacgttttatatactgaatttggagatactaaatatagacctcatccacttttagctaaaatggttagagctaatcaattaggaagaaaaactaagataggattctatgattataataaa

SEQ ID NO: 16775 - DNA, 1692 bp, Clostridium difficile
gtgcgtatgaatggagcaaaggtaattttagaatgtttaaagaaagagggaattgacacaatatttggatatcctggtggagccgtgatacctctttatgatgctctatacgattattcagatgattttaaacatataaggacatcccatgaacaaggtttagttcatgctgcagatgggtacgcaagaagtactaatacagtaggagtttgttttacaacatctggtccaggagcaacaaatgccataactggaatagcaacagcttttatggattcttcacctatggttgtaatttcagggcaggtgccaactagtttattaggaaaagattcttttcaagaaattgacataactggagcaacattatctatgacaaaacataattatttagttagaaacactaaagaattagttcctacaataaaagaagcttttagagttgcaaattcaggtagaaaaggacctgtacttgtagatgttccaaaagatttatttttagcagaaatggattttagtggtgaggactatgatttatgtcaaatagatgattatatggattataagagtgattttgatctagatgatgaaactaatattaagcttttaaatgaagcaatagatatcataaaagaatctaaaaagcctgtaatatatgcaggtggaggtgttaaatcttcagacagtgaggaaattcttgaaaaatttgcaactaagatagatacacctgtactaaatacacttatggggcttggaaatatagatagaaagaatgaactatctcttggaatggttggaatgcatggaagtagagaaagtaatttagcactttctaattcagatttagtgatagcgataggtgcgagatttagtgatagagtgataagtaaaagttctgaatttgctaaaaatgcaaaaataatacacatagacatagacccatctgaaataagtaaaaatatagaatctaatgtatctttggttggagatgtaaagctagtccttagtttattaattgaaagggttgaaagtaagaataatagcaattggaaagaagagataaagagatttagaaagagtgagggtgtacaaacatatgaatttcatccacaaaatatacttaaaaaaataaatgaaaaatatgaaacattaaagaaacccactgtggtagtaactgatgtcggtcaacatcaaatgtgggctgctaagtactggaattttaaaggtaataaaagttttataacatcagcagggttaggaactatgggatttggtttaggtgcagctattggaactaaagttggtaatgtagataaaaatgtagttttagtcactggtgatggaagttttagaatgaactgtaatgaactagctacagttgcaaattataatgtacctatgcttattttactactcaataatagaacattaggaatggtaaggcaatggcaaaagttattttccaatcaaagatactctcaaactgacattaatgaaaatgtggattatgttaaactcgtaaatgcatataatattgatggatataaggtatccagtatggaagaattaggaaaggcgctagatatgatagattttaataaacctgtatttttgcaatgtgatatagataaggattatgatgtttatcctattgtagcacctaatgatgcattggaaaatttgatatgtaac

SEQ ID NO: 16776 - DNA, 948 bp, Clostridium difficile
atgaatactagcggaagcgagattaaaattattgcaggtaattcatcgaaagagttagcacaaaaaatagctgactatataggtgtatcagtactagattgtgaagtaggtacatttagtgatggtgaaatatgtgtaaacatgaatgagacagtaagaggttgtgatgtgtttgtagtgcaatctactaacagcccagtaaatgataacttaatggagttattaatcttaattgatgcgttaaagagagcatcagcaggtagaataacagcagttattccttactatggatatgcaagacaagacagaaaggctaaggcaagagatccaatcactgctaaattagttgcaaatttaataactgctgctggagcagatagagtattaacaatggatttacatgcagctcaaatacaaggatattttgatataccattagaccacttactaggtggaacaatattagcaaattattttaatgaaaagaaaatagaagatttagtagtagtatctcctgacttaggaagtgttactagatcaagaaaatttgctaatactttaaatggagaagttccaatagctataatagataaaagaagaccgaaagctaatgtatgcgaagttatgaacttaataggtgatgttaaaggtaaaaatgttatactattagacgatatgatagatacagcaggaacaatagttaatgctgcaaatgcacttaaagagtttggagcaaaagatgtttatgcttgttgtactcatggtgtgttatcaggtccagctattgaaagaattgctaattcagaaataagtgagttaatagttcttgatactatacaacttcctgaagagaaaagaatagataagataaagataaaaacagtagctcctctatttggagatgctataagaatgatattctctaatgaatcagtaagtaaattattc

SEQ ID NO: 16777 - DNA, 1269 bp, Clostridium difficile
atgcttgatataaaaagaataagagaaaatttagattgtataaaaaaagcaatggaaagaaggggcgaaaaagactttaaccttgatgaagtagttaagttagatgatgaaagaagaaagattcttcaagaagttgaagttatgaaaaatgaattaaatacagcatctaaaaatataccaaatcttataaaagaaggtaaagatgtagaaaatgaaaagattaaactaaaagagttatctgataaaattaaggtaatagaccaaaatcttaaagaagtagaagataagatggaatacctattaatgagaataccaaatgtaccacatccagaagtaccacaaggtgaaactgatgaagataatgttgaagtaagaacttggggaaagactactacctttgattttgaatctaaggctcattgggaaattggaacagaattaggtatacttgattttgaaacagctagtaaaataactggttcaagatttactctttacaaaggattaggtgctagattagagagagcattattaaatttttacttagacacgaatacaaaagtaaatggatatacagaagttattccaccatttatggcaaatagaaatagttttttaggtacaggacagttacctaagtttgaagaagatatgtttaaaatagaaggtctggactattttatgattccaacatcagaagttcctttaactaatatacatgctaatgaaatacttaaatttgaacaattaccaataaattatacagcttatactccatgttttaggtcagaagctggttctgctggaagagatacaagaggtttagtaagacagcatcagtttaacaaagtagaaatggttaaaatagttgcaccagaagaatcttacaatgagttagaaaagcttactaacaatgcggaaactatgctacaattattgaatctgccttatagagtagtaaagatatgtacaggtgatttaggatttacggcttcttttaaatatgatgtagaagtttggatgccaagttacaataggtatgttgagatttcatcttgttcaaactgcgaagatttccaagctagaagagcaggaataagatttaaaagagataaagattctaaaactgaatatgtacacacattaaatggctctgggttagctattggaagaagtgttgcagttatattagaaaattatcaacaagaagatggttctgtggttgttcctgaagttttaagagcatatatgggagtttctgttattaaa

SEQ ID NO: 16778 - DNA, 399 bp, Clostridium difficile
atgttccatcagatagaagggcttgttgttggaaaagatgttactatggcagaatttaaaggaactatggatatcttcgttgaaaaattgtttggttctgatatcaaaactaagtttagacctcacaacttcccatttacagaaccaagtgcagaggttgatgttacttgtttcaaatgtggtggtaaaggttgcccaatgtgtaaatatgaaggttggatagaaatattaggttcaggtatggttcatccaaatgtgcttagaaattgtggaatagacccagaagtttacagtggatttgcatttggagttggggttgaaagacttgcaatgcttaaatacgaaatagatgatattagattattattcgaaaatgatatgagattcttaaatcaattt

SEQ ID NO: 16779 - DNA, 786 bp, Clostridium difficile
atgttagtatctttaaaatggcttagagactatgttgatatagacatagatgtaaaagagttcgctgataaaatgacaatgacaggaactaaagttgaaacaatagattattatggtgaagaaatagaaaatatattggttggaaagattttagaaataaaacaacatccaaatgctgataagttggttgtaaccaaagtagatattggagataaagttgttcaaatagttacaggagctacaaatatatcagaaggagattatattccagtagctgtaaatggttctaagttacctggaggagttgaaatcaaacagactgatttcagaggtgaattatcagatggtatgatgtgttcagcagctgaactaggtatagatgaacattacattgaggagtataaaagaggtggtatatatattttagaccacgaagattcttatgaattaggaaaagatataaaagatgttttaggattaaaagatgctttaatagattttgaattaacttcaaacagacctgattgtaaatgcatgatgggtatagctagagaagcagctgcaactataggaacaaaagtaaaatatcctgaaatcgaagtaaaagaaagtgatgaagagatagatttcaaagttgagatagataatccagatttatgtagaagatatgttgctagaatggttacagatgtaaaaatagaaccttctccatattggatgcaaagaagacttacagaagcaggagtaagacctataagtaacatagtcgatataacaaacttcgta

SEQ ID NO: 16780 - DNA, 390 bp, Clostridium difficile
atggctaagataatagtaaaaaagagtaatccacttaaaggtagtgttaaaatagatggtgcaaaaaatgcagttttaccaataatagcagcgactttattagcaaacggaaaatcaacattaaatggagtaccaaatttaagagatgttcatgttatatcagatttattaagacatgtaggagcagaagttgaatataaagaaaatacacttactgttgatgcaagcaatataaaaacttgtgaagctccatatgagcttgtaagaaagatgagagcttcttttttggttatgggaccattgcttgctagatttaatagtacgaaaatttctatgccaggaggatgtgctataggaacaagacctatagatttacatttaaaaggattt

SEQ ID NO: 16781 - DNA, 2205 bp, Clostridium difficile
atgcatgataaagaattacaagaaataattgaaaaaataaaagtttatgcacctaatgcaaattttgaaatggttgaaaaagcctataatcttgcaaaaaaagcgcatgaaggacaatatagaaaatctggggaaccatactttattcatccattagcagttgcaaatattttaatagagatggaattagatattgaaactataacagcaggtttacttcatgatgttgtagaagatacagaatatacctatgaagacataaaaaaagaatttggcaaagaagtagcggatttggttgatggagtaactaaacttggtcaaataaaatatcgttcgaaagaagaaactcaatctgaaaatttaagaaaaatgtttttggcaatggcgaaggatataagggttatacttataaaacttgctgatagattgcacaacatgagaacattaaaatacatgcctccagaaaaagcaaagtataaagcaaaagagacacttgaaatttatggtggtatagctcatagattaggaatttccaagataaagtgggaactagaagacagagcattaagatttatggacccagaagggtattatgatttagttagtagagtatcaatgaagagaagtcaaagagaggattatattcaaggaattgttgaacttcttaaagataagtttaaagatttaagtataccatgtgatgtatatggtagaccaaagcatttttacagtatatatagaaagatgcaaaaaaaacataagacttttgaagagatttttgatttaacagcagtaaggatattggttgataatgtaaaggattgctatgcagtacttggtatagttcatacattatggagacctattccaggaagatttaaagattatatagcaatgccaaaacccaatatgtatcaatcattacacaccactgttgtaggtcctgatggagaacctttagagatacaaataagaactcatgagatgcataatatagctgaaaatggtatagcagcccattggaaatataaagaaggtatctctagcaaagagtcaaaggttgaagaaaaacttcaatggttgagacagatgatggagtgggaaaaagatttaaaagacccacaagagtttatggatgcacttaaagaagatgtatttaatagtcaagtttatgtatttacgccaaaaggagacgtaattgaattaccagcagaatcaacacctatagattttgcctatagagttcatacaaatgtaggtaataaatgtgtaggagctaaaattgatggaagaatagttcctattgattataagcttcaaaatggtaatattgtcgaggtacttacatcatctaattctaatggaccaagtagggattggcttaatatagtgaagaccccaaatgcaaaaagtagaattagacaatttttcaagaaggaaagaagagaagaaaatgttgaccgtggaaatacaatattagaaagagaatttaagaagcatgatataccacaaaaagaccctcttgttgaaaaatatatggcattagttgctaagaaatttaatcagccaagtgttgaggacttaattgccactgtaggttatggtggtataatgtcatctcaagtggtatctaaggtaaaagacctatatttaaaagaggttaaaaaagctaaaaaggaacaacagatacaagaagaagatttaaataaacacaatataagtgaaacagaatacagtaaaaagagaaagaaaaacgcatcacaaggaattatagtaaaaggacttgacaatatcttagtaagatttgctaagtgttgtaatcctcttccaggagatgaaattgtaggatatattactaagggtaggggagtagccatacacagagctgattgcccaaatgcaaacaataatggtgatttcttccaaaatagattggtggaggtttcatggagttcagcaggaaaaggtaagtttgaagcggaaattcaaataaaagctattgacagaagaggaattgttaatgaaataactcatattgttgcaatggataaacttagtttaaacggaataaatgcaagaaaaggtaaggatagtattgtaagtataaacttacttgtagaggttaatgacacagaggaattaaaaattctaatgaaaaaattaaaagcaattcctggtgtagaaagtatttatagaatgacaaat

SEQ ID NO: 16782 - DNA, 1503 bp, Clostridium difficile
atgatgttacttaaattattatgttatactattttaaataggaaacatttagatactataattttagggggagtcaagatgaaattaactaaatcaatatcatcaatgctgtgcttatctctagttttaagcttatcaccagtagcatatgcaaatgaaataagtagaacaacagttgagaatactttagtaggtcaggatagatatcaaactgctgttgaagtaagtaaaaaaggatggagtagtgcaaatgaggctgtagttgtaaatagtgaatctattgtagatgcattagctgtaacaccatttgctaaattaaaaaatgctcctatattattgacagaaaaaaataatctaaattcacaaactgagaaagaattaaaaagattaggagttaaaaaagtttatataattggtctatctagttctgtatcaaatgatgtgcaaaaacagttagaatctaataatttaactactgatagagttggtggtagtgatagataccaaacagctttgagtatagctaaaaaaatagaaggattaaaagatatatcagaaatagctgtagtaaatgggtacacaggtcttgcagatgcagttagtatagcttctgtagctgctactaatggaatggttatacttccagtatctgatgcatctggtatatctagctttaaagattttatagaatctaagaatataaataaatcatacataataggctctactaatgctgtatcagataaaataaaacaaagtttacctaattcagaaagaataggtggagcagatagaaatgaaactaatggtaaagtaatagaaaagttttatacgtctaataaattaaacaatgtatttgtggctaaggatggaatgaaaaatcaaaatcaacttatagacgctctagcagtaggtgtactagcatcaaaagaaaattctcctgtactaatcgtaggagaacaattaagtgcaacacaaaagagtgtattttcgaataaaaatgctacctctataactcaagttggtagtggaggaaatgaaaatgcatttaaagaattaaaagatttacaggcaaatagtaacaataagagagtaatgtatgtaactaatacagataaggtaaatataagaaatgatgctacaatagaagcttctgttataggatatctaaataatggtgatgaagtagaagttttagatgtgttaaaaactggatgggtaaaaataaaatacaatgaaggtattggatatgttagtgggtcttatttgacaaataataagcctgataatagtaatgaaaatataaaaataaagtatgtaaaagaaaaagatggtctaaatgttaggaaaggaccaagtacagaagatgaaaagataggtcacctttcatatggaagcaaagtagaaacaatagaaatgtttgctactggatgggtaaaaataaagtataatggtggatatggttatgtaagtaatgattacttatctgatacaccagttatt

SEQ ID NO: 16783 - DNA, 2448 bp, Clostridium difficile
ttgaaaaaatggatattgaagtataaaggtaagatagaggaaagtgaatttagcaaaaaacttaatatttccccggaaatctgccaaattttaaaaaatagagggatatgtactgaaaaagattcagagatatttatgaatccatctttagattatttaagagacccttttttaatgaaagatatgcaaaaagctgttgatagaataaagttagcagttgagaagaacgaaaaaatttggatttacggagattatgatgttgatggtgtatcatctacatctatcttgtgcttatattttaagagtataggttacaatgttgattactatattcctaatagattagaagaagggtatggtataaatgaagatgctattaagcttataagctctaggggctgtgacttgattataagtgttgactgtggaattacatcagtgtctgaggtcaatacagcgaatgatttgggcatagatgttataattacagaccatcatgaatgtcaaagtgaaattccatcagcctttgcagtaataaatccaaaacaagaagattgtaattatccatttgattcactatgtggatgtggtgtagcatttaaaatgattcaagccttgactccaaaagaagaatttaaaactagtatgtataattatttagaaatagtaacactagcaactatttgtgatattgttccacttatagatgaaaatagaataattgtaaaaaatggtttaaaatcaatgaaagaaggcaaaaatattggattaagggagcttataaaagtttgtggtgtagaaagtgataagataggttcttctcatataggttttgcaataggtcctaggataaatgcttcaggtcgattgggatattcttacttaggagtagagctatttactactcaatcacaagaagaggcagtagaaatagctagtatattggaagaaaaaaataatgaaagacagatgatagaagctaagatgtatcatgaagctgaagaaatgctaaagtctaatagcagatacaatgatgacaaggtgttggttttagctaaagagggttggcaacatggaataataggaattgtagcatcaaagttaactgaaaaatactacaaaccaacaattcttctaggtatagaaaatggggaggctactggttcagcgaggtcaataaaaggatttaatatatttgaagctctcataaagtgcaaagacttgatgactaagtttggtggtcatgaacaagcagcagggttatccttggattcagacaatgtagaaattttagcaaatgaaataaataaatttgcagattataatttaactgaagatgatatgatagagaatgtaaatgtcgagtttgaattacaagaaaatgtaataaatttaaatcttgtagaagaattacataagttagaaccctttggattaaataatcctaatcctagatttatagttagaaattatattttaaaagatttgaaagttataggtaagaatcaacaacatctgaaattgagtatagaaaaagagaaaagctatgaatgtataggatttaatatgagtcatttaaaatcaatgtataaagtaggagacaaagtagatgtactattccaattagatgaaaataactatatgggaaataggaaagtacaatttttacttaaagatatacgattagctcgacctaaaagtgcaagtaatgacaaactttcattgaaattaatgtcaaaaataataccaaaagatactcaaagcctgtataatatatctgtgtctgattttgaattatttgatggaaatacagatataaatatatttgattattttgaaaaagatacactaataatatctaattctataaatggattttatagagcaatgtcagatatatcacttatagatttggattttaacataaattacaatattattgaagatgatagcaaaaatactgataaattagagcttatattttctcctaatattgataaaatagacttaaaaagatataataatattattctttatgattatttatacaataaaggcgaatattcgtatatatatgagaataaaagagaagaaagtgaaattataaaatattataataaaacagacctattatatttaaagaatgtagttagtaatatagttccatcaagagatgaatttataacaatttataaacaagcactcataaaaaaagaaattgatttggatatggtaaatataagggaaacttttaatgtaattccattaaagttttttacgatattaaatgtatttagagaattaaatttacttgactttaatttaaattatgaaaaaaattctgtactcataagaatattgccaaaaccacagaaaaaattagacttaaatgagagtttaatactcaataatctaaaaaatttagaaaaacaatacaatagcagttat

SEQ ID NO: 16784 - DNA, 1785 bp, Clostridium difficile
ttggaaactttaaagggtttaaagagaactcactactgtggagagttgagagaaaaaaacataaatgaagaagttgtacttatgggatgggtacagaaaaaaagaaatttaggtggtcttgtatttgttgatttaagagatacaagtggattatgtcaaatagtttttgatacagatgtagataaagaagcttttgaaaaagctgaaaaattaggggctgaatttgtaatagctgtaaaaggaaaagtatgcgaaagacaatctaaaaaccctaatatgccaactggtgatatagaaatatttgcaactgaacttagacttttaaacaagtcagaaactccgcctatttatataaaagatgatgatgatgtttctgaagcactaagattaaaatatagatacttagatttaagaaaaccatctatgcaaagaaatttaaaattaagacataaagtaatgaatattacaagaaattacttatcaaacaatagattttgcgaaatagaaacaccatttttaatagctccaacaccagaaggagcaagagattatctagtaccaagtagagttaatccaggaaaattttacgcattaccacaatcaccacaattatataaacaattattgatggtaagtggtatggatagatatttccaaatagttaaatgctttagagatgaagacttaagagcagatagacaaccagagtttacacaaatagactgcgaaatgtcttttgttgagcaagaagatgttatgagtatgattgaaggtttgcttgaagcgatatttaaagaagttttagatgtagaattggcacttccacttcctaagatgacttatgcagaagctatgtctaaatatggttcagataaaccagatactagatttggatatgagttaacagatatatctgatgttgtttgtaactgtggatttaaagtgtttgctgatgctacacaaccaggaaaaagtgttagaggtataaacgtaaaaggcaaagctgacgactttactagaaaacaaatatcatcactagaagaacatgctaagacatatagagcaaaaggtcttgcttggatgaaagtaggacaagaaggagtaacttctccaatagcaaaattcttcaatgaagaagaaatgaacgctatacttacaagaatgaatgctgaagtaggagatttacttttatttgtagctgataaaaactcaatagtatttgatgctttaggacaagttagacttgaagtagcaaataggcttaatctattggataaaaatgtatataacttactatgggtaactgagttcccagtttttgaagaagatgaagaaacaggcacattctcagcaatgcatcacccatttacatcacctatggatgaagatttagacaagttagaagaaggtgataagtcatctttaagagcgaaagcttatgatattgtattgaatggttatgaaataggtggaggaagtgttagaatatcaaattctgatgttcaatcaagaatgtttaaagcacttggttttacagaggaaagagctaatgaaaagtttggttatttattagaagcatttaaatatggtactcctcctcatgctggtctagcttttggtcttgatagacttgttatgttacttgcaggaactgataatataagagaagttattgcattccctaaaaatcaaaatgctgtttgccctatgacaaatgctcctacattggcggaagatgagcaattagaagaattaagtataaaagttgatataaaagataatgaa

SEQ ID NO: 16785 - DNA, 1377 bp, Clostridium difficile
atgagtatgatacataaattttctatgaatggatataatatcgttttagatgtgaatggtggagctgttcatgtgttagatgatgttgcatacgatttgttagatttttataaagaaaaaagtaaagaagaaatattagagatattaaaatcaaaatatcaagaagaaaaaataaatgaagcatatgaagaaatattaaatttggaaaaagaaggtcttttatatacagaagatacatatcaatatcatccaagctttgtacatagagagcctgtagtaaaagctttatgtttaaatgtagctcatgattgtaacttaaaatgtaaatactgttttgcagctcaaggtgattttggaggagaaaaagaacttatgagctttgaagttggtaaggcagcaattgactatttgattgctaattcaggaagtagaaagaacctagagatagatttctttggtggagagcctttgatgaactttgaagttgtaaaacaactggttgactatggaagaagtgtagaaaaagattataataaaaatataagatttacaataactacaaatggtgtactgttaaatgatgagattatagattatataaatgaaaatatgcataatgtagttttaagtttagatggaagaaaagaagttaatgataatatgagaccaactttaaatgataaaggaagttatgatattacattaccacgatttaagaaacttgtggaaaaaagatcaaaagataagtattattatataagaggtacttttacaagggataatttagatttttcaaaagatgttatgcattttgcagatttaggatttaaattaacctctgtagagccagtcgttggagatgagagtaatccatatgcacttagagaagaagatttacctaagatatttgaagagtacgaaaaatttgctgtagagtatgcagatagacaattacaaggagatggatttaaatttttccattttatgatagacctaaatcaaggtccatgtgtaataaagagaataactggatgtggagctggaaatgagtatctttctgtaactccaaatggagatatctatccatgtcatcaatttgttggaaatgaagaatttaaaatggcaaatatatttgatgaagaaatagtacttccagaaaatttaaaaaatatgtttagagaagctcatgtatatactaaagaagagtgtaaacaatgttggaataagttttactgttcaggtggatgtcatgcaaatgcgataaactttaatagtgacatatcaaaaccatatgaattaggctgtgaaatgcaaagaaaacgtacagagtgctctataatgatacaagctaagttaatgttagaaggagcaaccaac

SEQ ID NO: 16786 - DNA, 1260 bp, Clostridium difficile
atgttgactaaagctcctagaggaactaaagacataactccaaaagaggcttacaaatggcgttatgtagaaaataaatttagagaaatatgtgctttatatggatatgaagaaatggtaacacctatatttgaacatacagaacttttcaagagaagtgttggagatactacagatatagttcaaaaagaaatgtattcttttaaagataaaggtgatagagaaattaccctaaagccagaaggtacagcaggtgtagtaagagcatttatagaaaataaattatatgcagatactcaaccaacaaaattattttatgtgacaccttgttttagatatgaaagaccacaagctggtagacaaagacaatttcaccaatttggaatagaagcacttggaagtgatactccttcaatggatgctgaaataatcgcactagctgttcaattttttaatgaagttggattaaatgatttggtagtgagtataaattcagttggctgtccagtttgtagaaaagagtacaatgctttattaaaagagtatcttgactcaaaagctgatatattgtgtgatacttgcaatgagagaagagaaaaaaatccaatgagggttatagactgtaaaaatcctacatgtaaagaaaatatcaaagatataccatttattgcagaccatttgtgtgatgattgtaaatctcactttgataaacttcaagaatacttaaaggaaatgaatataaactttgtaattgataaaacaatagttagaggcttagattactatagaaaaactgcttttgaaattatatctaatgatataggagctcaaagtactgtatgtggtggaggaagatatgatggtcttgttgaacaattaggaggaccaaaaggtataagtggaattgggtttggactaggaattgaaagacttttacttacacttgaaggtaatggaattgaaatagaaaaccctcaatctacggatatatttatagtaactataggtgaagaagcaaatacaagaagctttaaattgttaaaagacttgagacaaaatcatataagtgcagataaagaccatatagagagaagtgttaaagcacaatttaaatattcagataaaataaattcaaaatttacaatagtaattggagatgatgaacttaaaaatgacactgctacattaaaaaatatgaaaacatcagagcaaactactgtaaaattaagtacattagttgaagaattaaagcaaaagctg

SEQ ID NO: 16787 - DNA, 1242 bp, Clostridium difficile
atgtttgagaacttgaaaaaagcggaccctgagatttatgaaagtatgaaaagagagttaaaaagacaacaaagaaatattgaattaatagcatctgaaaacatagtatcagttccagtaatggaaactatgggaagtcatcttacaaataagtatgcagaaggttactcaggcaaaagatattatggtggatgtgaatacatagatgaagttgaaactcttgcaatagatagaatcaaaaaaatatttggagcagaacatgctaatgttcaacctcactctggagcaaatgcaaatattggtgtatattttgctatgttaaaaccaggtgatgttgttatgggaatgaatttatctcaaggtggacatttaactcatggtgctccagttaatatttctggtcaatattataaattttatgaatatggtatagataaagacagtggacttatagattttgatgaagttagaaagatagcacatgaagtaaaacctaaaatgatagttgcaggagcaagtgcatatcctagagaaatagattttaaaaagtttagagagatagctgatgaggttggagcattgcttatggtagatatggctcatatagcaggtcttgtggctgctggtcttcaccaaaatccatgtgaagtggctgattttgttacaacaacaactcacaaaactttaagaggacctcgtgggggtgttattctttgtaaagaaaaatatgctaaagacatagacaaagcaatattccctggtattcaaggtggacctcttgaacatataattgcttctaaggcagtttgctttaaagaagctttaagtgatgagtttaaagaatatcaggtacaagttgctaaaaatgcaaaagccttagctgaagaacttattaaaagagattttaaattgatttctggaggtacagataatcatttaatactattagatttgactaataaaaatataactggtaaagcagcagaaaagagattggatgatgcttatataacagctaataaaaatacaattccatttgacccaaatggtgctcttgttacaagtggaataagacttggtactccagctgtaactactagaggtatgaaagaagaagatatggcaataatcgctgaggctatagacctatgtttaacttatgatgaagaatctaaggctagaacattggttgttggtttaactgaaaaatatcctttatatgaagaatataatgttatggat

SEQ ID NO: 16788 - DNA, 291 bp, Clostridium difficile
atggaagaaagaaaattagcaccaaacaatgagagggaagctctcataaaaagattaaaaagaatagaaggtcaagttaagggtatacaaaagatggtggaacaagaacgttattgtgttgatatattggttcaaatatctgctataaggtctgctataaatagagtaggcacaattatcttagagaatcatataaaaggatgtgtagcagaaagcattaaacatgatgatgctgataaaactgaagagatgataaaagagcttatggatactataaataaatttacaaaa

SEQ ID NO: 16789 - DNA, 966 bp, Clostridium difficile
gatacaattgcagcaatagctacagcacctggagaaggtggtataggtatacttagaataagtggagaaaaagctttgaaggttgcagaagaaatctttaaatctatgtctggaaagagtattgaagaatacaataagagaacattaatatatggaaatatagtggataatgaaaatataattgatgaagttttattagcatatatgaaaggaccaaattcctatacaggagaagatgttatagaaattaattgccatggtggatttatttcggtaaagaagatattagaattaatactatcaaaagatgttagattagcagaggctggtgagtttactaaaagagcattcttaaatggaagaatagatttatctcaagcagaggctgtaattgatgttataaaagccaaaactgatatagctcatgaagttgctcaaaatcaattagagggttctttatcaaagaagataagagaattgagagataaagtcactgagatattagctcatgtagaagttgctatagattatcctgaggaagatattgagcatataacatatcaaactcttaaagaaaaaactgatgaacttaaaaaagacattaaaaaattatatgatacagctgaaagtggaaaaatacttagagaaggcttaaagacggtaattgttgggaaaccaaatgtaggtaaatcttcactacttaattctattttaggagagaatagagcaatagttactgatataccaggaactactagagatgttatagaagagtttgtaaacataaaaggtatacctttaaaaattgttgacacagcaggtataagagatactgatgatattgttgaaaaaataggtgttgaaaagtctaaagaatcatttactagtgcagacttgatagtaatggttttagatgcatctagaaagttgtcagaagaagatatagagatattagaaaaacttaag

SEQ ID NO: 16790 - DNA, 519 bp, Clostridium difficile
atggaatttatagcttatgctaaacctgattttgtaactattgatggtcgtggtggagctactggagcaagtccaaagttacttaaagatgcaacttcaattccaacaatatttgctctttatcgtgctagaaaatacatagatacacatggattagatatagatttggttataacaggtggacttcgtatatctactgattttgctaaggcaattgctatgggggctgatgcagttgctattgcaagttctgctcttatggcagcggcgtgtcaacaatatcgtatatgtggttctggtaagtgtcctgtaggagtagctactcaggatgaggaattgagaaaaagattacatatagaaaatagtgctaatagagtggcaaactttttaaatgtaagtttagaagaacttaagacttttgctagaatttctggtcataaagatatacatgatttaagtgttgatgatttatatactgttaactctgaaatatcaaattatacaaacatacagcatgta

SEQ ID NO: 16791 - DNA, 858 bp, Clostridium difficile
atggctatgaagtggagagattatgctgctgatgtaaatttatttgaggattttgataaaactatcaagcctctaactgacgaacaaagaagaaaaaatataaacactttaattgcatatttttcaaaagaagttccttctaaaatatacaatttatcaaatgatgaaattaagcctagagatatacttagaggacttttgaatgtatatccaccaaaagaaattgctccagagatacttaatatgttacataatttattgttgattgaatgtgaagaaagagagttagtagatgtaaatgatatagaagaaatagaggaagggattgccatatggagaggtaatataacgaatttaagagcagatgcaatagtaaatgctgcaaataacaagttattagggtgtttacaaccattacatctatgcgtggataatgaaatacattcatgcgcaggtcctagacttagagaagattgtgacaaaataataaaaaaacaagggcatttagaatatactggagatgctaagataactagaggttattgtttacctgcaaaatttgtagtacatactgttggacctattgtatctggtggtcagccaagtaaagagcaagaaaagcaactgcttcattgttataaatcatgtttaaatacaataaaagaaattgatgaaataaaaaatattgttttttgtggaatttctacaggtgtatttggttatccaaaaaaagaggcagctaatcttgctgtaagtagagttagactatggctaaaagaaaatcctgaaaaaaatttaaaagttgtatttaatgtgtttactgaagaagaagaagagaaatatagaagaatatttaaa

SEQ ID NO: 16792 - DNA, 789 bp, Clostridium difficile
atgaaattaaagaaattattatcagtagcattggtgtcagcaatagcaatatcagcagtaggttgttcaaacaaagaggataaaaaaatactagtaggagcttcatcaaatccacatgcaaagatattggaagttgcaaaacctttgttaaaagaaaaaggatatgatttagaagtaaaaatatttgatgattatgtacttccaaatacagctttagatgaagggtctttggatgctaacttctttcaacatattccatttttagaggaaactgtgaaggagaaaggatataaacttacttatacatctaaagttcatatagagccaatgggattctattcagaaaaagttaagtcattagatgaattaaaagatggagctgttatagctgtgccaaatgatgcaactaatggagctagagcacttaaattattagcaaaaaataaattgatagaagtaaaagatggagagcttataactaaaaaagatataactaaaaatcctaaaaatatagtaataaaagaaatgaatgcagagcaattaccaacagtattaaaagatgttgacggagcagtaataaattctaattatgctttaacagctaacttaaatcctactaaggatgcaatagtaatagaatcaagtgattctccatatgtaaatataatagcttgtagagaaaataataaagatagtgataagattaaggctttatcagaggctatgaatagtaaagaagttaaaaaatttatacaagatgaatataaaggaagtatagttccagctttt

SEQ ID NO: 16793 - DNA, 654 bp, Clostridium difficile
atgaatagtttaattgactttttaacaacactatttccaaatgcattgttacaaactttgtatatggttatagtaccaactatagtggcaacaatattaggatttatattagcaatcatattagtagttacaaaaccagatggattaaaaccaaatagcacaataaatagtgcattaggatttatagtaaatatatttagaagtttcccatttatgatacttatagttgcaatgattccaataactagattaatcgttggaacaagtataggggaaactgctgcaatagtgccaataactattggggcagcaccgtttatcgctagaattatagaaagctcattaaatgaagttgataaaggattgatagaagcagcaaaatcttttggagctacaaaaagacaaatagtatttaaagttatgataaaggaagctatgccttcaatagtatctggaattacattatcaataatatctatacttggttatacagctatggcaggtgcagtaggagctggaggattaggtaatatagcacttatttatggatatcaaagatttgatacagcagtaatggtatatactgtaatagcacttataatattagttcagataatccagggagtaggaaatctggcttataagaaactaaaa

SEQ ID NO: 16794 - DNA, 1845 bp, Clostridium difficile
ttgcaaattatatatattacaaatgaggtaacaataatgaagaaaaaatatgattttttaatttattctgctatttggctagttattattattctttttatattttctctatatcacagtatagagcatattaaaattataagtcacactggtactattcgcagtgaaactcaaaaggttgttaagcaagaattgaataatgaaagaaatgatgacttgataaaacgactggataatattctgataaagctaagaacaggtaatggagaaaatggatttcaaagatgtgataataaagaatttcaacaaaaactaaatcaaatggattctatgtgggaatctatgaagaaagaaattataaaagttagaaatggtgcttcaggtgataaattatataaattgagtgaagagtattctgtgttgtctaatcaaattgtttttatatctgaaaaacactctaatgcaaaattgtattcttttgctactgcactatttatttatcttatattctcaacaataagtcttttaatttgggaatattataataaaaaaaggtttaaaagaatattttatactgataatttaacaaaaataaaaaatcaggttgcatttgaaaacagagcgattgaaattttgcacaatgcatctaacaaagagtatgtactgctaaatattgatattgacaattttaaatatattaatgatacacatggatatgaatatggagataaagttctaataatagttgcagctgcactttctaaaacttttaatatcaaagaaacttgtgcaagaattggttcagataattttgtaatacttgcaaaatatagagattctcttttagaggatattcgggaaatgctaactaatgctataatctctgaattagatatgaatgtaactcaaactatatcttattgtataggagcgtacttagttgaaattgataatttaggttataaatctatcaattctatgatggataaggcaaatattgcacacaaggtaagtaaaacaagaggaatttcctccacagtatggtataatgaaaatctgttaaaacagttacaaatggaaaatagtatttataattatatgtataaagcgatagaaaatgaagaatttcatatgtatttgcaacctaaatttcaaatatcttctttaaatgttgtgagcgcagaagctcttgtaagatggttttctccagaacttggttttttatcaccagatgaatttattccattgtttgaaaaaagtggatttattattgaattggacttttatatgttaaaaaaagcgtgttcatttgtaaaaaaaacgtttatgaaaaaaaatcaatatacatatccgattgcagttaatttttcaagggttactatttaccaaaatagtttttatcaaaggtttttagatactgttaaagaatatgaaattccttttaagtatatagagatagaggtaactgaaagtgcttttaatgaaatatctcaaccagttatttcgattttagaggagcttaaaaagttaggatttttaatttcgatggatgattttggatcaggatactcttcattaagtcttttatgttctctatctattaatggattgaagttagataaaagcttacttaaagaaacatttaaccgggagaaagtatatagtattattcagtgtattattgaaatgtcacatcgtataggcatgtctgttgtatgtgaaggtattgaaactaaaaaagacttggaatttttaaatacagttaaatgtgatgtaggacaagggttttatttttctaaaccgatagaagaaaaagaattttttaacaaatatgtaactaaaaaa

SEQ ID NO: 16795 - DNA, 1053 bp, Clostridium difficile
atgagttacgagagaagaaagacgagagaagtaagtgtaggaactgtaaaaataggaggagaaaatcctataagtatacaatctatgacaaatactgatacaagagatgcagatgctacaatagctcaaataaagagattagaggaagctggttgtgatatagttagagttgctgttcctgatattaaagctgctaaaaatatagcaaagataaagtctagtgtaaatataccaattattgcagatatacatttcgattataagctagcccttgaagctataaaacaaggtgtggatggaataagaataaatcctggtaatatcggaagtatagagagagttaagatggtagttgagaaatgcaaggaaagaaatttaaaaattagaattggagttaatggaggttctttagagaaagaacttttaaaaaagtatggctctgcaactgctgaagcattagttgaaagtgcaatgggacatattaagattcttgaagacttagattttcataatatagttatatctctaaaatcatccgatatttataaaactgttgatgcatatgaattaatatcaaaaaaagttgattatcctcttcatattggaattacagaatctggaagtgttcacaaaggaacaataaagtcttctataggggtaggagcacttcttcttaaaggaattggagatactgttagaatatctttaacaggcgaccctgttgaagaggttattgttggtaaacagattttaagaagtttgggacttttaaatgataagattaaagttatatcatgccctacatgtggtagatgtaatatagacttaattagtgttgtaaatgaggttgaagaaaagattggtagtatggaaaaaaatatcactgttgcaattatgggctgtgctgtaaatggacctggtgaagccagagaagcagatataggtattgctgggggtaaaggtgaaggtcttttatttaaaaagggtgaaatagttagaatgattgatggtaacaaattagttgatgagttgctagaagagattgaaaaatta

SEQ ID NO: 16796 - DNA, 807 bp, Clostridium difficile
gacaatagcaatacattgaatcagataaaaaaagcagaatacagtgagacgtataaacaatatctaaatgatgctaaaaatggacgtacagaaaaatataatgggattataccaaatccatatcagttggaaggtactcaaatccaaagtaaaggaagaacagctccaacatcttatgaccctagaaaattaggtcttatgacatcaataaaaaatcaagaggatttaggaatctgttgggattttgctgcaatggcaaccttagaaagtttcttaaagttaaataattatggagactatgatttatcagaagaacacttaagatggtgggcttcagatggtgaatatggatggtctgtagatgatatgaatggtgctttaaattatgaagctatgggatatttaacatcttggtcaggtcctaaattagaaaaagatatcccatacaatggtagagtatctaaagcacaaggagcaaaaaaaccaactaatatgaatacagcacctactgtttttaatgtgacagatgctgtgtgtgtaagtaatgacataaattctacaaaaaatgctatattacagtatggagcagtaacatctggttattatgaagatattaaatatcaaagtgatgaccaaaattcatattattgtccaacaaaaagttttaatacaaatcatgctatttcaattgtaggttgggatgataactattctaaagataattttaatgcaaatattagaccatcaaaaaatggtgcttggttaataaaaaatagctggggagattataattctgagggtggatat

SEQ ID NO: 16797 - DNA, 528 bp, Clostridium difficile
ttggtgaaggaggtgcacatctatatgagaaaagctatagaaattaaatcagaagttgtttctgagatagttgaaaagttacaaaaatcttctgctgctgttgttgtagattacaaaggattaacagttgaagaagtaactgagttaagaaaacaaatgagagaagctggtgtagattacaaagtatacaaaaatactttagttagaagagcagctaaagaagttggtatagagcaatttaatgatgaattattagttggaactaatgccatagcatttggatatgatgatccagttgctccagctagaatattaaaaggattcatggattctcatccaaaaatgaaattaaagatgggtattgtggaaggtgcattctatgatgaatctaagattgttgaaatggctaacataccatcaagagaagttcttatcgctaaattacttggtagcttaaaagctccagtatcaaacttcgcatacttaatagatgcaatagcgaaaaaggcagaaggtcaagaagaagct

SEQ ID NO: 16798 - DNA, 696 bp, Clostridium difficile
atggctaaaaaaggtaaaagatatgcaggtgcattacaaaaagtagatagaactaaattttatgatgcatcagaagcattaacattagtttcagatatagctggagctaaatttgatgagacagtagaagcacacattaaattaggtgttgactcaagacatgctgaccaacaagtaagaggtgcagttgtattacctcatggaactggtaaaacaaaaagagttttagtttttgctaaaggtgaaaaagctaaagaagctgaacaagctggtgctgactttgtaggagctgaagaattagttcaaaaaatacaaggtgaaaactggtttgactttgatatagtagttgctactccagatatgatgggtgtagtaggtagattaggtagagtattaggacctaaaggtttaatgccaaaccctaaatcaggaacagttacatttgatgtagctaaagctatagatgaaataaaagctggtaaagttgaatacagattagacaaaactaacataatacacgttccagtaggaaaagtatcatttggtggagaaaaattaactgaaaactttactgcattaatggatgctataataaaagctaaaccagctgctgctaaaggacaatatttaagaagtataacagtagcttcttcaatgggacctggagttaaaataaacccagcaagaacagctgaa

SEQ ID NO: 16799 - DNA, 1239 bp, Clostridium difficile
atgagagatatctctcatctagcacaagataaagggaggaaattcaaaatggctaaagctaaatacgaaagaacaaaacctcatgttaatatagggacaataggacacgtagaccacggtaaaactacattaacagcagcaataacaaaaacattatatgacagatatcaattaggagaagcagtagatttcgcaaacatagataaagctccagaagaaagagaaagaggaatcacaatatcaacagcacacgttgagtatgaaacaccaaatagacactatgcacacgttgactgcccaggacatgctgactacgttaagaacatgataacaggagcagcacaaatggacggagcaatattagtttgttcagcaacagatggaccaatgccacaaacaagagagcatatactattatcaagacaagttggagtaccatatatagtagtattcttaaacaaatgtgacatggtagatgatgaagagttattagagttagtagagatggaagtaagagatttattaacagaatatgatttcccaggagatgacactccaatagtaagaggttcagcattaatggcattagaagatccaaagagcgagtggggagataagatagtagaattattcgagcaaatagatgagtatataccagctccagagagagatacagataaaccattcttaatgccagtagaggacgtattctcaatcacaggaagaggaacagttgcaacaggaagagtggaaagaggagtactaaaagtacaagacgaagtagaattagtaggattaacagaagcaccaagaaaagtagtagtaacaggagtagagatgttcagaaaattattagaccaagcacaagcaggggataatataggagcattattaagaggagtacaaagaaacgagatagaaagaggacaagtactagcaaagactggatcagtaaaggcacacacaaagtttacagcagaagtatatgtacttaaaaaagaagagggtggaagacatacaccattctttgatggatatagaccacaattctatttcagaacaacagacgtaacaggagcttgtaagttaccagaaggaatagagatggtaatgcctggagataacgtaacaatggaagtagacttaataaactcaatagttgtagaagagggattaagattctcaataagagaaggtggaagaacagtagcttcaggagttgttgctacaataatagag

SEQ ID NO: 16800 - DNA, 2064 bp, Clostridium difficile
atggctagaaagtttcctttggaaagaactaggaatataggaatcatggctcatatagatgcaggaaaaactactactacagaaagaatcctgttttatactgggcaaactcataaaataggagaaactcatgaaggagcttctcaaatggactggatggagcaagaaaaggaaagaggtataacaataacttctgccgctactactgcttcatggaaagaccatagaataaacataatagatactcctggacacgtggacttcacagttgaggttgaaagatctctaagagttcttgacggttcagttgctgtattctgtgcaaaaggtggggttgagcctcaatcagaaaatgtatggagacaagctgaaacttatggagtacctagaatagcttttgtaaataaaatggatatattaggtgcagatttctacaatgttgtaagcatgatgaaatctagattaaattctaatgcagttcctatgcaattaccaataggtaaagaagattcatttataggtataatagacttattaaaaatggatgctgttatatacaaagacgacctaggggttgaaatggaagaaacagatataccagaagatatgaaagaattagctgctgagtggagagaaaaattagttgaatcagtagctgaaactgatgaagaattaatgatgaaataccttgaaggtgaagaacttactatagatgaattaaaagttgctataagaaaagctactatagcttgtgaaatgaacccagttttctgtggtacagcttatagaaacaaaggtgttcagttagtaatagatgcagttttagattacttaccagcgccaactgatataccagctataaaaggtatattagcagatggagaagaagctgaaagacattcttctgatgaagagccattctctgcattagcattcaaaataatgactgacccattcgttggaaaactagcgttcttcagagtttattctggaacattagaatcaggttcttatgttttaaatgcaactaagaataagagagaaagaattggtcgtatattacaaatgcatgctaatacaagagaagaaataactaaagtgtatgctggagatatagcagcagcagtaggattaaaagatactactactggagacacattatgtgaccctgctaatccaataatacttgaatctatggaattccctgagccagttatatctgttgctatagaaccaagttctaaagcagctcaagaaaaaatgggtatagctcttcaaaaattagctgaagaagacccaactttcacagttaagactgaccaagaaacaggacaaactataatatctggtatgggtgaattacacttagagataatagtagatagattattaagagaatttaaagtagaagctaaagttggtgcaccacaagttgcatatagagagactataactcaaccagttgatgttgaatacaagtactctaagcaatcaggtggtagaggacaatacggtcacgttaagattagagttgctcctcaagagccaggtgaaggatacaaattcacaaacaaaactgttggtggatcagtaccaaaagaatatgttggtccagttgacatgggtatacaaggagctatgcaatctggtatagttgctggatatccagttgtagacgttgctgttgagttatatgatggttcttaccatgaggttgactcttctgagatggcgtttaagatggctggttcaatggcattcaaagatgctatgaagaaaggtaatgcagttcttttagagccttacttcaaagtagaagttgttactccagaagattacatgggagatgttatgggtgacttaaactcaagaagaggattaatccaaggtatggaagctagaagtggtgcacaagttataaatgcattcgttccactttcagaaatgtttggatactcaacagacctaagatcttcaactcaaggtcgtgcaacttacacaatgatattcgatcactatgagcaagttccagcttcagttgctaagaaaatagctgaaggaaaa

SEQ ID NO: 16801 - DNA, 468 bp, Clostridium difficile
atgccaagaaaaggtaatattccaaaaagagaagttttaccagatcctatgtatgggagtaaggtagttactaaattaataaataatctaatggtagacggaaaaaaaggaaagtctcaaagaatagtttatgatgctttcgcaattgttgctgaaaagacaggagaagaagctttagaagtatttaataaagcaatggataatataatgcctgttttagaagtaaaagcaagaagagttggtggggcaaactaccaagtgccaatcgaagttagacctgaaagaagacaaacattaggtttaagatggctagtaaaatatactagagctcgtggagaaaaaggaatggttgaaaagctagctaaagagataatggacgcagctaacaacactggagcttcagttaagaaaaaagaagatactcataaaatggcagaagctaataaagcatttgctcattacagatgg

SEQ ID NO: 16802 - DNA, 3483 bp, Clostridium difficile
ttgtttgaattaaacaatttcgagtcgataaaaatagcattggcttctccagaaaaaataagacaatggtctaggggagaagttaaaaagccagaaactataaattaccgtactttaaaaccagaaaaagatggtcttttctgtgaaagaatatttggaccacaaaaagactgggagtgccactgtggtaaatatagaagagttagatataaaggtgtagtttgtgatagatgtggagtagaagtaactaaatcaaaagtaagaagagagagaatgggacatatagagctagctgctcctatgtctcacatctggtacttcaaaggtataccaagtagaatgggacttttacttgatatgtcaccaagatcgttagaaaaaatattatactttgcctcatatgtggtagttgatccaggagagactggattaaacgaaaaacaattgcttacagaaaaagaatacagaactgctcttgaaaagtatggatatacttttactgtaggaatgggtgctgaagctgtaaagacattactacaaaatatagatttagagcaacaaagtaaagacctaagagcggagttaaaagatagtacagggcaaaagaaagttagaacaataagaagattagaagttgtagaggcatttaaaaagtctggaaataaaccagaatggatgattttagatgcaataccagtaataccaccagatttaagaccaatggtacaacttgatggtggaagatttgcgacttcagacctaaatgatttatatagaagagttataaatagaaacaatagacttaaaagattattagagcttggagctccagatataattgtaagaaatgaaaaaagaatgcttcaagaagctgttgatgcattgatagataatggtagaagaggtagacctgtaacaggacctggaaatagaccacttaaatctttatcagatatgttaaaaggtaagcaaggtcgtttccgtcaaaacttacttggtaagcgtgttgactactcaggacgttctgttatagttgttggaccagaacttaaattttatcaatgtggacttccaaagaagatggcattagaattattcaagccatttgttatggataaattagttaaagaaggttatgcacataatataaaaagtgcgaaatctatagtagaaaaagttaagccagaagtttgggatgttttagaagatgttataaaaagtcatccagttcttcttaaccgtgcaccgactctacatagattaggtatacaagcatttgaaccaatcttagttgaaggtaaggctataaaactacatcctcttgtatgtacagcttataatgcagactttgatggtgaccaaatggcagtccatgtacctttatcagtagaagcacaagcagaagcaagattcttaatgctttctgtaaataatatacttgctcctaaagatggttcacctataactactccatctcaggatatggttttaggttgctattatctaacaatagaagcccaagatggagctaaaggaacaggtatggtatttaaagactttaatgaactattacttgcttattacaataaatcagttcatctacatgcattagtgaaactgaaggtaacacttgaagatggaagaagttcattggttgaaagtactgttggtagatttatatttaatgaaaatatacctcaagacttaggttttgtagatagaaaagaaaatccatttgcacttgaagttgatttcttagcagataaaaaatctcttggtaaaataatagataaatgctttagaaaacacggaaatacagaaacagctgaattactagattatataaaagctctaggatttaaatattctacattaggtggtataacagttgctgttgatgatatgagtgtcccagaagaaaagaaagtatttatagctgaggcagaagctaaagttgataagtatgaaaaagcatacagaagaggtctaatctctgatgaagaaagatatgaaaaagttatagagacatggacagaaacaactgataaagttactgatgctcttatgggtggactagatagattaaataatatatatataatggcacattcaggagccagaggttctaaaaaccaaattagacagctggcaggtatgcgtggtcttatggcaaatgcatctggtaaaacagttgagataccagttaaatctaatttccgtgaaggtttatcagtactagaatactttacatcttcacatggagccagaaaaggtcttgccgatacagctatacgtacagctgaatctggatatttaacaagaagacttgttgatgtaagtcaagatgttattgtaagggaaatagattgtggaacagaagatactacagagatttatgctataaaagaaggaaatgaagttatagaagagatatatgatagaattgtaggaagatatactatagaccctatattaaatcctgaaactggagaagttatagttgaggctgattcaatgatacaagaagatgaagcagaaactatagtagctttaggaattgaaaaaattaggataagaacagttcttaactgtaaaactaatcatggagtttgttctaagtgttatggtagaaacttggcaacaggaaaagaagttaatataggtgaagcagttggtataatagcagctcaatctatcggtgagccgggtactcagcttacaatgcgtacattccatactggaggagttgcaggagctgatataactcaaggtctaccaagggttgaagaattatttgaagctagaaaaccaaaaggattagctgtaataactgaagtatctggtagagttgaaattgatgaaacaggaaagagaaaagaagtaaatgtaataccagaagaaggcgagactcaaacatatgtaattccatatggttctagattaaaagttaagcaaggtcaaatgctagaggctggagaccctctaacacaaggatttataaatcctcatgatatagtaagagtaaatggtgttaagggagttcaagaatatatagttaaagaagttcaaagagtgtatagacttcaaggggttgacgttaatgataagcatatagaagttatagtaagacaaatgctatctaaagtaaaagttgaagacccaggagatacagatttattgccaggtggatatgaagatgtattaacattcaatgaatgtaataaagatgctatagataaaggtctaagaccagcagttgctaaaagagttttacttggtataactaaagcatctcttgcaactgattcattcttatcagcagcttctttccaagaaacaacaagagtattaacagaggcagcaataaaaggtaaagaagaccacttaataggacttaaagaaaatgttatattaggtaagttaataccagcaggaacaggaatgaagaaatatagaaatatagctgttgaaaaaattgaagat

SEQ ID NO: 16803 - DNA, 3714 bp, Clostridium difficile
atgccacatcctgtcacgataggtaaaagaactagaatgagcttttctaaaattaaggaaatagctgatgtgccaaatcttatagaaattcaagtagattcctatgagtggtttttaaaagaaggtttaaaagaagtgtttgatgatatttcaccaatagaagattatactggtaatcttatattggaatttgtcgactattctctagatgataaaccaaagtacgatatagaagagtgtaaagagagagatgctacatattgtgcacctctaaaggttaaggtaagacttataaataaagaaacaggtgagataaaagaacaagaagtgtttatgggtgacttccctttaatgacagaaagaggaactttcgttataaatggagcagaaagagttatagtaagtcaattagttagatctcctggtgtttactatgcggaagaaagagataaaacaggtaagagattgatttcatctactgtaattcctaatagaggagcatggttagaatatgaaacagattctaatgatgtaatatctgtaagagttgatagaacaagaaaacaaccagttacagttttacttagagctttaggaataggaacagatgcagagataattgaccttttaggagaagatgagagattatctgctacattagaaaaagataatactaagacagtagaagaaggtcttgtagagatatacaaaaaattaagaccaggtgaacctcctactgtagaaagtgcatcatctttattaaatgctttattctttgacccaaaaagatatgacctagcaaaagttggtagatataaattcaataagaaacttgctttatgttatagaataatgaataaaatttcagcagaagacataataaatccagaaactggagaagtatttgtaaaagctggagaaaaaataagctatgatttggctaaagccatacaaaatgcaggtataaatgtagtaaatctactaatggatgatgataaaaaagttagagttataggaaataattttgtggatattaagtctcacattgattttgacatagatgatttaaacataaaagaaaaagtacattatccaactttaaaagaaattttagatggatatagtgatgaagaagaaataaaagaggctataaaatcaagaattaaagaacttataccaaaacatatattattagatgatataatagcttcaataagttatgagttcaatatattctataatataggaaatattgatgatatagatcacctaggaaacagaagaataagatctgtaggtgaattgttacaaaatcaagttagaattggtctttcaagaatggaaagagttataaaagaaagaatgacggttcaagatatggaagctataacgcctcaagcgttagttaacataagaccagtttcagctgcaataaaagaattttttggtagttctcagttatctcagttcatggatcaaacaaatcctctatctgagttaacgcataagagaagattatcagcccttgggcctggaggtctttcaagagaaagagctggattcgaagtgcgtgacgttcaccattcacactatggtagaatgtgtccaatagagactccagagggaccaaatatcggtcttataaactctctaggaacttatgcaaaaataaatgaatttggatttatagaatcaccatatagaaaatttgataaagaaacatcaacagttactgatgaaatacattatttaactgctgacgaagaagatttattcgtaagagctcaggcaaatgagccattaacagaagatggtaaattcgtaaaccatagagttgtttgtagaactgtaaatggtgctgttgaaatggttcctgaaagtagagtagattacatggatatatctcctaagcaggttgtatctgttgccactgctatgatacctttcttagaaaatgatgatgccaaccgtgcccttatgggagcgaacatgcagcgtcaggcagtgcctctagttagaagagaagcaccaattataggaactggtatagaatacagagcagcaaaagactctggagcagttgttgttgctagaaattctggtatagcagaaagagtaacagcagatgaaataattataaaaagagaagatggaaacagagatagatataatctacttaagtttaaacgttcaaactcaggtacttgtataaatcaaacacctataataaataagggtgaccagataataaaaggtgatgttatagcagatggtccagcaactgatttaggagaagttgcacttggaagaaactgtcttatagcattcatgacttgggaaggttataactacgaggatgctatattaataaatgaaagattagttaaagaagatagattatcaacaattcatatagaagaatatgaatgtgaagctagagatacaaaactagggccagaggaaataactagagatatacctaatgttggagatagtgcaattaagaacttagatgacagaggtataataagaataggtgcagaagtagactcaggtgatatattagttggtaaagtaactccaaaaggagaaactgaacttactgctgaggaaagattacttcgtgcaatatttggagaaaaggctagagaagttagagatacttcacttaaagtgcctcatggtgaatctggtataatagttgatgtaaaagtatttactagagaaaatggagatgatttatctccaggagtaaatgaattagtaagatgctatatagctaaaaagagaaaaataaaagttggagataaaatggctggtcgtcatggtaataaaggggttatctcaagagtattacctgaagaagatatgccattcatggaaaatggaacaccactagacataatacttaacccacaaggtataccatcacgtatgaacattggtcaggttttagaagttcatttaggacttgctgctaagacattaggatggtatgtagcaacatcagtattcgatggtgctaatgagtatgacataatggatgctcttgaagaagctgggtatcctagagatggtaaattaactttatatgatggtagaacaggtgagtcttttgacaacagaataactgttggatatatgtactacttgaaactacatcacttagtagatgaaaaactacatgcaagaagtactggaccatactcattagttactcaacagccactaggtggtaaagcacaatttggtggacaaagatttggagagatggaggtttgggctctggaagcatatggagctgctcacatacttcaagaaatacttactgttaagtctgatgacgttgtaggtcgtgttagaacatatgaagctatagttaaaggtgaaaatatacctgaaccaggaatcccagaatcatttaaggttcttataaaagaacttcaaagtttatgcttagatgtaaaagtattgacagatgaagaccaagaaatagaagtaagagaatctgtggatgaagatgatacaataggtgaatttgagctagatgttgtaaatcatatgggagaagttgaagaaagtaatataatagaagaaattgaagatgattttgcagaaaatgcagaagatgaggatatagagaatttagaagaattcactgaagatgatttatttgaagaagaaatagattttgatagtgatgactttgatatg

SEQ ID NO: 16804 - DNA, 786 bp, Clostridium difficile
atggaaaaattacaaggaaaaattgcagtagttactgcagcaacaaaaggtattggattagcatcagcagagatattagcaaaaaatggagcaactgtgtacttagcagctcgttcagaagaattagctcatgaagttataaataaaataagtgcagaaggtggttgtgctaagtttgtttactttaatgctcgtgaagaagagacctttacctcaatgatagaagaggtagttaaaaaagaaggtaagatagatatacttgtaaacaattttggttcaacaaacccttctcttgacaaagaccttgtaactggggatacagataatttctttgacacagtaaatactaatttaaaaagtgtgtatttaccatgtaaagcagcaattcctcatatgataaagaatggaaaaggaagtatagtaaatatatcaagtataggttcagtattacctgatttatctagaatagcttactgtgtatcaaaagcagcaatcaactcattaactcaaaacatagctacacaatatgctaaagacaatgttagatgtaatgctgtacttccagggcttattgcaactaaagcagcattagacaatatgtctccagagttcataaaagaatttttaaagcatgttcctttaaatcgtataggggaaccagatgatatagcaaaagctgttctattctatgctagtgatgactcatcatttataacaggggatttacttgaagttgcaggaggatttggtttacctactccacaatttgcagataatatattagga

SEQ ID NO: 16805 - DNA, 372 bp, Clostridium difficile
gtgctaaaaatgacaatagaacaaatattagaagctatagaaaatatgaaagttttagaattaaatgaattagttaaagctgctgaagaaaaattcggtgtatcagcttcagctccagtaatggtagctggtgcagctgctggtggaccagctgctgaagaaaaaactgagtttgatgtagtattaactgacgttggttcttcaaaagttggagttataaaagcagttagagaaataacaggattaggattaaaagaagctaaagaagtagttgacaatgctcctaagacagttaaagaaggagcttctaaagaagaagctgatcaaataaaagagaaattagaagctgctggagctaaagtagaagttaag

SEQ ID NO: 16806 - DNA, 630 bp, Clostridium difficile
atgactattccaagttcaaataaggtatatccaagaagtaatgattatcaaactgtatatcttaaaaatgtaataacaagggaaaatatagaagttggagattacacaatatataatgacttttataatgacccaagagattttgagaaaaacaatgtattgtatcattaccctataaacaatgataaattaataattggtaagttttgctcaatagcatgtaatgcaaaatttctaatgactagtggaaatcactcaatgaaatcaaaatccacatatacttttcccatcttttatgaagaatggaaactcgatatcaaccatataacggacgcttgggacaataagggtaacattataattggaaatgatgtgtggataggttatgattctataattatgtcaggtgtaaatattggtgatggtgcaattattggaacaagagcagtagttactaatgacgttccaccgtattctattgttggaggagtacctgcaaaaattataaaaaagagatttaataatgatacaatttcaaaattattagaaattaaatggtgggattggccatataaaaaaattcaatcaaacattaagcatattcaatcaggaaatattgataaattagtt

SEQ ID NO: 16807 - DNA, 906 bp, Clostridium difficile
atggagaatagcgagatgagtaataaaatagttagtaagagacaattaacagatagtatttatttaatggaaatagaggcacctagagttgcaaaatcttctcaaccaggtcaatttataataattaaaaatgatgaaaaaggagagaggattcctcttacaatagctgactatgatagagaaaaaggaacagtaactattgtattccaaacagttggtgcttcaactaaaaagttagcaatgtttgaagaaaacgattttgtaatggattttgtagggccattaggacaagcaagtgaatttatacatgaagatatagaagaattaagaaataaaaagatattatttgtagctggtggagttggttctgctccagtttatccacaagttaaatggtttaaagagcatggattagatgtagatgtaataattggtgcaagaactaaagaattaattatattagaagatgatatgaaaaaagtagctaaaaatgtatatgtatcaacagatgatggtacatatggatttaatggaagagttacagacctattaaaagatttagttgataatcaaggtaaaaaatacgaccaagcaatagtaattggaccaatgataatgatgaaatttatgtgccaattaactaaagaactaaatatacctactatagtaagtttaaatacaataatgatagatggaacaggtatgtgtggtggctgtagagttagtgttggaaatgaaactaagtttgcatgtgtagatggtcctgaatttgatggtcatttagttgattttgatcaagcaatgagaagacagtctatgtacaagactcaagagggaagagctatgctaaaacttgaagaaggcgatagtcatcatcatagtaattgtggatgtggaggtaacaaa

SEQ ID NO: 16808 - DNA, 1116 bp, Clostridium difficile
gtggcagtagtggaaaaagcttataagtttagaatgtatccaaataaaaaacaacaagagttaattaacaaaacttttggatgttgtagatttgtatataataagtatcttgctaaaagaatagaagtttataaaaacaataaagaaacttttacttataaacagtgtagttctgatttgaccaatttaaaaaaagaattaaaatggcttaaggaacctgacaaattttcactacaaaacgccttaaaagatttagataatgcatataaaaaattctttaaagaaaaatcaggatttcctaaatttaaatcaaagaaaattaatagattttcatataaaactaactttacaaatggaaacattatgtactttagtcaacatataaaactacctaaacttggtatggttaagataagggataaacaagtacctcaaggtagaatacttaatgctactatatctaaagaaccaagtggtagatattatgtatcattatgctgtactgatgtagacattgaagcatttgaaaatactaacaatcagataggtttagatttaggaattaaagaattttgtatctcaagttgtggagactttatagaaaatcctaagtatcttaagaagtcattaagcaaacttgctaaattacaaagagaattatcgagaaaaacaatcggtagtttaaatagaaataaagcaagattaaaagttgcaagacttcaagaacatatagctaatcaaagaaatgattttctacaaaaactatctactaaattaataaaagagaatgatattatttgcatagaagatttacaagtaaagaatatgattagaaatcgtaaactatctcgcttaatttctgatgtgtcatggtcagaatttattcgtcaattaaaatacaaggctaattggcatggtagacaaattgtaaaggtaggtaaattctttgcaagttcacaaatatgcaataaatgtgggtataaaaacgaggaagttaaggacttaaatgtaagagaatggatttgtcctagttgtaatgaaactcacgatagagatataaatgcaagtataaatatattaaaagaaggattaagactaataacgattcaaaataaa

SEQ ID NO: 16809 - DNA, 1263 bp, Clostridium difficile
atgattttaattaaaaatggtagagtaatagaccctaaaagtcaaagagatgagaatattgacttaattataaaagaaaataaaatttataaaataggcaagtttgatgaaagtgatgaatatgaaaaaataatagatgctagtggtaatgtagttgctccaggtttagtggatgtacatgtacactttagagaccctgggtttacatataaagaagatatagaaagtggagctaaatctgctgctagaggtggatttacaactgttatatgtatggcaaatactaatcctattgtagataatgaagatacttttaattatgttaaagaaaagtcaaaaaatgcatgtataaatgttttacaagcagcagctataactaaaggttttgaaggtaaagagttagttgatatggaagctcttaaaaaagctggtgtaccagggtttactgatgatggattacctttaatggatagcaatctaattatggaggcaatgattaaggcaaaagagttggatgtaccacttagttttcatgaagaagacccttctttagttggaaatccaggtgtaaatgcaggaaaggtagcttcagaactaggattaaaaggtgcatcaagtgtagcagaagatgttatggtagccagagattgtatgttggcactaaagactggtgctaaagttgatatacaacatataagttcaggtgtatctgttgatatggttagatttgcaaaatacttaggtgcaactgtagttgcagaagcttcaccacatcactttacattgactgaggaagatgtattggagtttggaacaaatgcaaaaatgaatccacctctaagaagtaaatgggacagagataagattatagagggattaaatgatggtactattgaaataatagcaacggaccatgcacctcatagtaaagaagaaaaagatagagagtttataaaagctccaagtggaattattgggcttgaaacttctttagctcttggaataacaaatttggtgcataaaaatcatcttagtatgatgcagttaatagaaaaaatgtctataaatcctgcaaagttgtacaatttaaatattggatttatagaagaaggggctgtagcagacattgttatattcaatccagaagaagaatggacagttgaaagctttgtttctaaagctgataattcaccatttaaaggtaaatctttatatggaaaggttaattatacaatatgtaatggggagattgtatataacgcc

SEQ ID NO: 16810 - DNA, 1611 bp, Clostridium difficile
atgaagtttaatgcctaccaacataaatactcatcaataagaaatgtcgtgtatgctaaaaatggagcagttgcaacatcaacaccactagcatctcaagctggacttgaaatactaaaaaagggtggaaatgctgttgatgcagcagttgcaacagccgccacattagcagtagtagaacctacaagcaatgggattggaggagatgcatatgcccttgtttggatagaggaagaaaaacgattgtatggtttaaattctagtggctttgctccagaaaatatggaattaaaaaattataataatatgaaagaaatgccaaaatatgggtttggagcagtaactgtacctggaataccagcagcttggtcagaattaaataaaaaatatggtaaacttagcttaatggaatgcttatctccagcgataaactatgcaagagagggatacgtagtatctcctaatgtagctaaggtatggaaaaaatcatatgaactctatgaaaaagaacttattggagaagagttcaaaccatggtttgatacattttctaaagatggtaaagctccagaggctggagatatatttatatgtgaagaacaggcaagtacattagaagagatagcaaatactcaggctgaaagcttttatagaggaagacttgctgataaaatagatgaatattctaaaaaatttaatggggctataagaaagagtgacttagagtgtttttatccaacatgggtagaacctataagtacagaatataagggatataaaatatttgaaatcccaccaaatggtcatggaataacagttttaatggcacttaacatattaaaagaactggaattagaaggaaatatagaaaatgtagaagacatacataaaattatagagagtttaaaattagcttttgcagattctaaaacatatgtaactgatatagagcatatgaaggtaaagattcaggaattactaagccaagagtatgccaaaaaaagaagtttattgattgacaataaagaggctttgtatccaactgcaggagagccatattgtggtggtacagtatacctttgtactgcagataaggatggaaatatggtttcatatatacagagcaattacataaattttggttcaggaattgtgataccaagaactgggattgctttacatagtagaggaaataattttaatttagaccctaaacaccacaatgtagtaaaaccatttaaaaaaccttatcatactataatacctggatttttaggtaaagaagataaagcaataggtccatttggtgtaatgggagcttttatgcaaccacaaggacatattcaagtgttaacaaatatgattgattttggattaaatccacaagaggcgctagatgctccaagatggcagtggataaaaggaaaagaaatagaagttgaaccagagatgccaaagcatataatagattcattaattgaaaagggtcatgaaataaaagtaattcatgatactgttgacatgggacgaggtcaaataatatttaaaacagaacaggaaagttatatttgtgggacggaatcaagatgtgatggtcatattgcagtttat

SEQ ID NO: 16811 - DNA, 198 bp, Clostridium difficile
atgaataatggaatagtaaaatggtttaataatgaaaaaggatttggatttatatcaatggaaagtggagatgacgtatttgctcatttctcagctatacaaacttcaggatttaaatcattagaagaaggtcaaaaagtaagctttgatatagttaaaggcgctagaggtcctcaagcagaaaatataactatatta

SEQ ID NO: 16812 - DNA, 1152 bp, Clostridium difficile
gtgggaggtaagattggtatgaaagaaagaataatacaagtggctgattcaaagaaagaaaaaattctagggctatgtcaatctttatatgatgaaccagaaattgctttgcaagaatataaatctgctaaaaaaatatcagaatttctaagagaagagggttttgatgttgaggaaaacttggcgggtatggctacagcttttaaagcaaccaagaaaaatggagatggtcctaaaatagcatttatagcagaatatgatgctcttccaggcaatggacatgcatgtggacatcatttaattgcatctatgggagttggagctggaatagctctttcaagtatactggatacttacaagggagaagtaagtataattggaacacctgctgaagaaactggagatggaaagccttacttgatagaacatggtgtatttgatggctatgatgcagcaatgatgatacatccaaattcaaaaacttgtgtaacacctgaaattatagcaataggaggtctagatttcatatttactggaaaagcatctcatgcaggagctaagccatataacggaataaatgctttagatgcagtagtactactatataataatataaatgcactaagacaacaattagtagatggaacgagaatacatggtattatactagaagcaggaactgctgcaaatgtaatacctgatatgggaaaagtaagattagagataagggcaaaagaacaaaattactttgatgaagtagtagaaaaagtgaaaaattgtgctagaggtgctgcaatagccactggatgtgaacttgaattttatcactttgaaccaacttgccaaggattaaatgaaaataaagttttggtagacatatttacaaagattatggaggaatttggaatatatgaagatgaacaagtaatgttaggttcaacagatatgggaaatttaagtcaaataatgccatgtatacatcctttgatgaagttttctgaaaatggagaagaactacatacaaaagagtttttggaggcttctataaattcatatgcaaaagatagagtaattgatggtataaaaatattagctttaacaggatttaatttatttgaaaatccagagttattgaaaaaaatgaaggaagag

SEQ ID NO: 16813 - DNA, 840 bp, Clostridium difficile
atgctggtgaaaaacctaattatatatgcagtatcagattcagtaggggagactgcacaacaagttgcaaaggcatgtatgtctcagttttatgtgaatgaaacttatgaaataaaaagatttccatacatgattaataaaggagtactacttgaaactttggagaatgcaaaagctgaaaacgctttaattgtatatacattagttgatgaagaattatgcagtattgttgaaagatattgcgaaagagaaggtcttagttgtatagatttaatgacagatatactaagagaaataagcaagagaacaggaagaaaacctaaaagagaagctggtataattagaaaattagatgaatcttactttaagagagttgaagctatagaatttgcagtgaaatatgatgatggaaaagaccctagaggtgttcttcaagcagacataattttagtgggaatatcaagaacatctaaaactcctttgagtatgtatttagctaataaaaatataaaagtagctaatgttccattagttccagaaataccaattcctaaagaagtgtttgagatagatactaaaaagataataggtcttactaattcacctgaaaagctgaatgagataagaacccaaagattaaaagctttaggattgtccagtaaagcaaactatgctaatttagaaagaatacttcaggagttagattattcagaagagataatgaaaagaattggatgcccagtaataaacgtttcaaataaggcaatagaagaaacagcaggtataattttagacataatgaaagaaaatggtctaaagatatacaaagaaatagaaatt

SEQ ID NO: 16814 - DNA, 750 bp, Clostridium difficile
atgtcatattttcagtatcaaggtaattcttgtttttataaagaatatggacaaggtaaaccgataattttcctgcatggtaatactggttcttctaatatgtttaaagcacttgtgccattatatgtagaaaattttagatgtatcttaattgattttttaggtaatggacagtcggatagagtttctcaattttctcctgacatatggcatgatgaagccttacagacaatagcactgattgaacatttgaattgtggtaaagttggcttaattggaacaagtggaggagcatgggcagctgttaatactggattagaacgtcccgatttagttgaagcaattatagcagatagctttgatggacgtactcttaatgataacttcatagataatctaatcactggaagggaaaaatcaaagcaagatattcaagcacgaaaattctatgaatggtgtcagggaaaagattgggagaatgttgttaatcttgatacaaaagctctattgcaatgtgcaaacgagaaacgccctttgtttcataaagaattgtgtaaattagaaatgccaattttatttacaggaagtaaggaagacgaaatgtgtcgtcataatcttgaagaagagtacaaacaaatggcaacttttatttcaaaagcaagtattcacatttttagtcagggaggacaccctgctatattgacaaatgcagatgaatttgcacagttagcaaaagtttttttcaactat

SEQ ID NO: 16815 - DNA, 1026 bp, Clostridium difficile
gtgatatgtgtgcaagaaaaattacttgctttacgtgaagcagctttggctgaaataaaagaagcacaaagcatagaaagtgtagaaagtttaagagttaagtacttaggaaaaaaaggtgagataactgccatacttaaagaaatgggtaaattatctgctgaagaaagaccagtagttggtaaggttgccaatgaggtaagagaaaacattgaacttagcataaattctaaaaaagaagaaataaatgctattgaaaaagaaagaaaattaaaagaggaagtgatagatgttactcaaccaggaaaagttttaaaggttgggaagaagcatccaataactcaaattatagatgaagtaacagatatatttatcggaatgggattctctatagcagaagggccagaagttgagactgttgaaaacaactttgacgcattaaacgctcctaaagaccatccatcaagagatatgagcgatacattctatatcaatgatggggtattacttagaactcaaacatctccagttcaagtaagaactatgagaagtcaagagttaccaataaaagtaattgcaccaggtagatgttttaggtcagactcgccagatgctacacactcaccaatgttccatcagatagaagggcttgttgttggaaaagatgttactatggcagaatttaaaggaactatggatatcttcgttgaaaaattgtttggttctgatatcaaaactaagtttagacctcacaacttcccatttacagaaccaagtgcagaggttgatgttacttgtttcaaatgtggtggtaaaggttgcccaatgtgtaaatatgaaggttggatagaaatattaggttcaggtatggttcatccaaatgtgcttagaaattgtggaatagacccagaagtttacagtggatttgcatttggagttggggttgaaagacttgcaatgcttaaatacgaaatagatgatattagattattattcgaaaatgatatgagattcttaaatcaattt

SEQ ID NO: 16816 - DNA, 1245 bp, Clostridium difficile
gtgcaatatataataggaggagatatgaaaagatatttaatagttttcttaatgtgtagttcactgtttttagttggatgtggaaaaacagaagaatctgaacctgagaaaccaatagcagtttctgttcaaaaagcaataggtggagaaattgaaaacacaaattctttctcaggaactacaaaggttaaagatgaaacagctgttactgcacagactgttggcacagttcaagaagtgtatgtaaaacttgggcaaaatgtaagaaaaggagatgaattattgagtataagcagtccagagctagaaaatagtgtaaagcaaagtaaagcctcactagatttagcaaaagcaagttattcaagtgccactggtggttcattagaggcacaagtaaatcaggcaaaaacagctcttgacaatgcaaagattcaatatgaggagtctcaaagaaattatgacaataataagattctttatgaacaggaagtcattagtttagaccaatttaaaaaaatagaattttctttagagcaaacaaaacaacagttagattctgctcaaagagcatacgatacagcaacttcaaaaagtatacctcaagctaaagcacttgctaaaaaacagcttgaccaagctcaagtatcatataatttagcaatgagtaatttagacaaattaacattaacatctccagtagatggtacaataacagctaaaaactttgattcaaaggaaatgataacacaatcacaaccagcttttattatttctaatcctaatatactagaagttgatttaaatgtagcagaatcagatataggtaaatttaagaaagatggaaatgtagatgttataattgaagaccaaaggattttaggaaaaatagattatgtaccttcagtagttgaccctcagacatctttatatcctgttaaagtacttgtaaataatacaaacaacaaatttaaggcaggtatgtctgctcaagtaaacttaagtgttgaaaaagaaaatggtgctgttacagtacctaaaaaagcaatatttgaagaaaatggtaaaaaatatgtatacatagcaacaaaagacaatatagcaaagaaacacttggttcaaactggaattgtaacagaggataaaatagaaattaaaagtggtgtaagtgataaagatacagtgattatcggagggataagtcttatttctgacggaactaagatatttcctgtagaaaaggagaag

SEQ ID NO: 16817 - DNA, 891 bp, Clostridium difficile
atgttaaaagattttaataatttattagaagaggctaaaaagcttgaacctgttattgtaagtgttgctgttgcagaagacaaagaagtattaaaggctgtgaaatcagcaacagatttaaacattataaagccaattcttgtaggagacaaggataaaatagaaagtatatcaagagaaattggattaaaaggtcatgaaataataggttgtcaaaatcccgatgaatcagttaaaaaagctgtagagatagttaaaaataaggaagctaaagttcttatgaagggattagtaaatacaagtgtctatatgagagctatattaaataaagaaacgggtcttagaacaggaagattattaagtttgcttgcagtatatgaattacctcaatatcataaacttctttattgtactgatagtggaataaatgtatcgccaaacttaaatcaaaaaaaagatataatgacaaatgcacttcttactatgaaaagtataggcatggaaaatcctaaaactgcgatacttactgcaaatgaaatggtagaccctaagatacaatctacagtggatgccaacctacttgtagagatggaaaaatcgggagaaataccaaagtgtatagtggaaggtccaatagcatttgatgtagcatttgatgcacatgcagcagaacataaaggtattaaaagtaatattgctggtgatgttgatttattagtatttccaaatatagaagcagggaatatattaggaaagtcatggcttagatttaataaagctaagtgggcaggtatagttttaggagcaacaaatccgataattttaggttcacgttctgacacagctgaaataaaaataaattcaatagcattagcgtgtctagcatcacaa

SEQ ID NO: 16818 - DNA, 1257 bp, Clostridium difficile
atgggagaaaaagaaaacggtataaagtttggaaagttaatgtttcaacttgttattatagcaatatcttgggaattagtttatattataccatttatccaatatacattatatgatccaatcctaaaagcattagaatgtacaaacactcaactaggttttctacttacaatttatgggttaggtaatatatttggagctcctataggaggctggttagcagatagatttgattatagaaagataattttaggttctgtatttcttaatggagtagtatcatttttatttgcatttaatatgaactatccatttgcagttgctacttgggtaggttgtgcaatcacatcattagttatgaactatccttctatggtaaaaatacttagagttataggaaaagataatcaaggtaaggtttatggatttaatgaagctatggttggagtttctggagtagtaatgggagcaatattcttatatatttatacatgctttgcaactcctacattgggtatgagatgggtaatgatatctttaggaatattatcaatagcaatgtgtccagtattatggtttgtaattaaagatgtagatattaaagaagaaagagaagaagcaggtgaaaaaatgtctgctggtgattttataacagtactaaaatcaccaaatacttggctagtaggaataagtatattctgtgtatattcattcacagttacaatgtcttattttacaccatatataacatctgtacttggaggttctgtagcattatctggtgcattagcaataataagacagcatggtctaaaattatttggagcaccatttggaggatattgtgcagacaaattaaaatctcctacaaaagtacttttaccaatatatgtatttggtatagcagtaatagttttattcctagtattacctgcatcaactccaatgactatattcatagctttaacatttgtagtaggtatattaggttacatgggaaaaggtatatattatgcagtacaagatgaagtaaaagttccagttaaatattcagcaactactataggtatagctgcagctttaggattttcaccagatgtattccaatttgcattaataggacactggatagatacttatggcaataaaggttacacatatacatttatattccaaatagcaattctagttattggaatactatcttgtttatatatattaaaggttaaaaagagaagagcaagtaaattagaagct

SEQ ID NO: 16819 - DNA, 1575 bp, Clostridium difficile
atgaaacaaaaaatgaaagaattctttttacagttaggaaaatcatttttattgccaatagcattaatatctgcagcaggtatatttttaggaataagttcagcattttcaaatcctaatatagttagtgatatgccttttttagcaaataattttattcaaggaatattgggttttacaaaagctataacaggagtactttttggaaacttagcaatattctttgctatatcaatatctgttggtcttgctaaagaagaaaaagcagtttctgcattttctggttttgttggttatttagtattacacactagtataaattatatgttagggtgtagggggattcttgctgaacctgacatgatgagagaaatgggtcaagctgtaactttaggcatacaaacattagaattaggagtatttggtggaattgtagttggtataataacagcatcattacataataaatactataatataaaactgccagattatttaggattctttggtggaactaggtttgttccaataataacaacagtagtattctctattttggggataataataccatatatatggccatatgtaaatacaattattcagagtgtaggtattggtatagctagtttaggatatttaggaacatttgtatttgggtttcttgaaagacttttaataccatttggattacatcatatattaaatgctatgtttagatttactgaagtaggaggttctttagttgtgggagggcaagaagtatttggagcattaaacatattcttagctcaactaagtgaccctgaaacaatcagtttttcaacagaagcaactagatttttagctcaagggaaaatacctataatggtatttggtcttcctgctgctgcatatgccatgtataaaactgcaaagcctgaaaataggtcgaaggttaaaggtatattactagctggtgctttagcaacatttgtaacaggaattacggaaccattggaattttcattcttatttgtatcaccaatattatttgttatacatgcatttttatcaggtatatcatttatgatgatgcatatatttggagtagcaataggaaatactcaaggtggcataatagatttagtagtatttggagttatgcaaccaaatacaaagtggatttattctataatacttggtttggtgtatgcaatagtttattataatgtatttaagattttgatacttagatttaacttacaaactccaggacgagaagaaataacagatataaattttgatttagaacctttatcaaataaagtagaaatagctcaaagtggagaaactactaagagagcattatctataattaaatatttaggtggtaaggacaatatagaagatataacaaactgtataactcgcttaagagtagtagttaaagatatgagtaaagtagatgaaaatgcttttaaaaaatatacaggtgcaatgggagttataaaagtatctgataaagatatccaaataatttatgggccatctgtatctcaagtaagagacgaagtttcttttgcaatgtctatt

SEQ ID NO: 16820 - DNA, 1896 bp, Clostridium difficile
atggatagtctattatacgtaatagagaaagataaacacactaatgaagaattaagagaaatcctaaaaagcaataaaaatataagatttgtttccttaatgggggttgatttaggaggaaatgcaacagatgaaaagattcctgtagaattatttttggaggatatagataaatttttggaatcagctatacagactgatggttcaagtgttgagctttataatatagctacattaaataatgcgaaagtagatttaatgccagataaaagttgtcattggtatgtagattacaatatggaatatatagacgaagaagtaggtctacctgttggaacattaaagatacctgcatttttaatacatgataataaaaaagtatgttctagaggagtacttcaaaaagcagataagtactttaaaaagtcaatgtatgaaatatttagagaatatccacatgtaataaataacataggaatagattcagtagatgatatagaggaaataatgttaacagcagctacagaacttgagttctgggttaatactcctgaggataaagctgacttagagaaattatatgtatcacaaagcctaaaagagcaatactggaaaagaactcatggtattataagaacttgtttagagaaaagtttaattatacttcaaaagctaggtgtaaaccctgaaatggctcacaaagaggtcggaggaatacaaagttctattagtatagatggaagaacaaaccatgctatggagcaattagaggtttcttggaagttttctacaccattacaagcagcagacaatgaattattagtaagagatgttatagaggatgtatttacatcacatggactagaagttacatttaaagcaaaaccaattcatggagtagcaggaagtggtggacatacacatgtaggagtaagtgcgaagttaaaggatggaagtataaaaaatctatttgctccaaaagatttaaaagaagattatctaagtgaactaggatatggggctcttatgggacttctttacaattatgaagtattaaacccaattgtaacagcttctaatgatggatttaatagattagttcctggatttgaagctcctgtatgcatagttacatctttagggcatagttatgagattccatcaagaaataggtcagtgcttgttggattaataagagatatgaaaaatccaaagactgtaagatttgaattaaggtcaccaagccctctatctaacacgtatttagtaatagcaggatgttatcaaacaatgttggatggtataaaagcagcagctaagagtggtcttagtacaaaagaacttgaaaaagagttatctaaaaatgtaggtgaagaaagtttctatttagaaaaagatagagcatatagagatgaaaatgatgtatttgaacattatagtttggaagaaagaaatgcaagatttggaataccaccagctacagtttatgaaaatatgaaaaacttagaaatatatgcttcaaaattaaaatctttaaaacaaggtgatgtatttactgatagtataatagaatcatttaagattggagctatagataagtggcaaaagaaattaaaaactagaataatagaggctgggattcaaaaaataagaagtattgtcaagatacacacaaaagaaaatatggatgcgcttgatgaggtagtttggaactcaatatcggatttaaagttcaatattatgaaggatactttaactagagaatcactattcactagagtgagagaagctatagaaaataaggattaccagactgcttcagatttacaaatagaattaaagagaagtatggaagaaatacaacaactgtatatgcagtacaagaaaaatatatac

SEQ ID NO: 16821 - DNA, 951 bp, Clostridium difficile
atgaagaaaaggtatttagtcataggaataataattttgtcttatttttctttatttataggagctgaagatataaatataatgcatatatttgccaaaaatcagcataaacttatgatatttatcatgagtagaataccaagattaataagtatattgattgctggtgtaggaatgagcatagcaggtcttataatgcaacagataagtaagaataaatttgtatcacctacaacaggtgctacaatagatgcagcacaatttgggatagtaatatgtatgcttttagtaccaactgcctctatttttacaaagacaataatagcatttgtattttctcttgtagggacttttacgtttatgaaaataatagggaagttacaatttaaaaatataatctttgtaccattagtaggtataatgtttggaaatataataggttctatgacggattttatcgcgtataaatacgatttgagtcaaaatgttagttcttggatgcaaggtgacttttctatgatacttaaaggaaattatgagatattatatatcacaataccccttataatattagcatatatttatgcaaataaatttactgttgttggtatgggtatggattttgcgacaaatttaggtcttagttacaaaagaattgtcaatataggtctgataatagtagcacttgttacagtatgtgtagtcgttacagctggtaatatcccttttataggtctaatagttccaaatatcgtatccttgtacatgggtgataatataagagcaagcatatggtatactggtttacttggagcgatatttgtacttatatgtgatatttttggaagaattattatttatccatatgaaatatctatagggcttacagttggagttataggaagtatactattcctttatttaatattaaggaggaatgtgaatgaagct

SEQ ID NO: 16822 - DNA, 489 bp, Clostridium difficile
gtgttaaaaatggatactaaaaaatataaagataaattattgaaagaaagagaaaatttaactaatttagtagaggatatgaaagataatactttatttggagatacaactaaacatacaagtgaaaagtattcatcaggagaattatctagttatgataatcatataggagatatgggaacagatttatatatgcaaaatatgcaaaacagtctaataaatcatgaagagggaagattgtatcaaatagacttagcattatctaaaatagagaatggaacatatgggatttgtgatttatgtcataatcaaatagatttagaaagattggatatattgccagatacaagtttatgtaatgattgtgcaaagaaagaaaataatttattaggtgatgcaatgcaaaaccctgatgtagaagattctaacttttattcagaagacctaacaaatttaactgatttaaataaaaatggaatattgagagat

SEQ ID NO: 16823 - DNA, 1191 bp, Clostridium difficile
atgagtataattgttcaaaaatatggtggaagttcagtagcagatactgaaaaaataaaatcaatagcagaaaatataatagaacgaagaaaagaaaatccacaaatggtaatagttgtgtctgccatgggaaaatccactgatgaatatataactttagcaaaggaattgagtaatgaacctagtaagagggaattagatgctttaatgtctactggtgaaatgatttcagcatctttattatcaatagcattaaatgcacttggatgtaaagctataagttataatgcttatcagttaaatataaaaacgagtggtcttcatggaaagtctcaaattgatgatataaacgtaaacagaattaaaaatagtttagatgaaggaaatgtcgtgatagtaactggatttcagggaatcaacgaagatggtgatgtaaccactcttggaagaggtggttcagatacatctgctgtagctcttgcggttaaattaaatggaaaatgtgagatatatacagatgttgatggaatttattttacagacccaagaaaatattcaaaggctagtaaacttgatgagattgaatatgaagaaatgcttgagttagcgagtttaggagcacaagtaatgcattcaagaagtatagagcttgcacaaaaatatggtgttgaaatctatgtcggacgtacatgtggtacagaaaaaggaacatatataagagggggaaaagacatgaaattagaggataaagtaataacaggattagctactagtgatgatgacagttctataacaataaaagattttaaagctgaaaatatatctagcttatttgaagatatagcaactataggtataagtgtagatatgataagccaaactgcacctattttagataagataagtgtatcatttacagttccaaaagaagagttgggagaatgtaaaaagatagtatctaaatatacagatgaagaacatgtagtgattgataataatatcactaaattttctttagtaggtcttggtatgaaaaatacttctggagttgctgctaaagtatttaagatattcaatgaaaatggtataatgataaaacttataactacatcagagattcgtataacttgtgctataaattctgatgataagcaagtagctatagaaaaaatagcagaagtatttaatata

SEQ ID NO: 16824 - DNA, 984 bp, Clostridium difficile
atgaaaaaaataacaataaatgatattgctaacttggcaggagtatctaaaagtactgtatcaagatatctaaataataaagatatcagtgattctactaaagagaaaataaagacaataatagatgaatatggatatgagccgaatgcatttgctcaaagtttgagagctaaaaaaacatactttattggtattataacaccgtgtttagattcttttgtaaaatctaaaattatgatggcaatagatgaagaactcaaagaattaaaatatacatcactaattattaatactaatagaaaaataaggtcagaaatagatagtatatcaaaattagctagtctaaaagttgatggaataatactaattggtaccgaaataactaaagaacataagaatgaaattgaaaagttagatataccgatagttgtagttggacaaaaagttgatggtatcaatagtatagtgaatgatgattatggagcaggatataaaatgggtcaatatattgctaataaaggttacaaaaacattgtatatttaggtgttgatgaaagtgatatatcagttggtttaaatagaaaaaatggagtacttaatgggttaaaagataaagggtatgatgcaaaagtattttatactgactttgaccaagaaacgtctatacaaagaagtggagaaatgctagaaagtgaaaatccagatataataatatgtgcaactgataatatagcaatagcaacaatgaaagaaatcaataagagaggtaaaagtataccacaagatatatctgtagctggatttgggggatatgatgtattgtctattataagccctaaacttacaacaataaagtttgaaaataaaaatgcaggtaaagtagcagcaaatacgatagtaaacttaatacaagaaagaaaagaaccactattaaaggagattaaatttgaattaatagaaggtgaaagtacaataaataaaaat

SEQ ID NO: 16825 - DNA, 1323 bp, Clostridium difficile
gtgaaagttatgaaattatggggcggacgctttagaaaagcggaaaatcaacttatggaagaatttaataaatcttttggctatgattgtgtactgtacaaaaaagatatcgaaggaagtgtagcacatgttcatatgcaagtaaaatgtggacttttaacagaagaagaaggaaagtctataacagaaggtttaaaagggatacttgaagatgtagaaaatggaaagttagtattggatggagagtatgaagatatacatagttttactgagataaatttaattcaaagaattggagatgttggcaagaagcttcatacagcacgtagtagaaatgaccaagttgcagttgatatgagattgtatgctaaagaaaaagcaaatgatttggtgggtttaatatctgaatttaaagctactataaaagatgttgctgacaaaaacccagtgatgatgccgggctatactcatcttcaaagggcacaagtagtgacatttaagcatcacttaatggcatattatagtatgtttgatagagatgagaaaagaataaaaaatgctatagaaatattagatgaatcacctttaggctgtggagctttagcaggaactacgcatgatatagatagaagtataacttgtgaacaattaggatttaaaaaagtagtagataattttatggatggagtaagtgatagagattatttactagagctaatgagtgatttttcaattataatgatgcacttaagtagattaagtgaagagttgatactttggagttctcaagaatttggatttgttgagatagatgatttatatacaactggaagtagtataatgcctcagaagaaaaatccagatggtgcagagcttataagaggtaagactggtagagtatatggaaacttatttggtctttttacagtaatgaaaggaataccattagcatataataaagacatgcaagaagataaagaaggttttttcgatagtgtacatactcttgaaatgtgtatacaaataatggatagaatgatagccacactaaaggtaaatgaggataaaatgaaacaagcagtaaaaaatggttttttaaatgcaacagaagttgcggattatttggttaaaaataatgttgcttttagagatgcacatggtatagtaggaagtatcgttatatattgtgaagataataaaaaagcaatagaagatttaacattagaagaattacataagttttcagatgcttttaaggaagatatttatgattttatcgactatgagagtatattaaataagggaataaaaaagaatttaaaa

SEQ ID NO: 16826 - DNA, 837 bp, Clostridium difficile
atgaattttaaaaaattgagtaatgctaaagtctcggtaatggcagttgttttatcagttggaatattatcgggatactctgcgcttaataaacaagtaacattagtagtaaggggagaagaaagaactatatcaacatttagttctaatgtaggagaccttttagaatctcaaaacattagctatgatgcaaatgatatagtaactttagatgaaaatacaaagttatctaatggagataaaatagaagtaattgatgtaaaggaaaaaacagttgtagaaactaaagacattccatttgaagttacagttgttgaagatggctctttattaaagggtgattctaaggttaaagaagaaggaaagtctggtaaaagtgaattaatatataaagaaacttatcacaatggaaagaaagtagaaaaggaatttgtgaaaaaggttgttaaagctgagccagtaaataaggttgtaagcaaagggacaaaggtagaaatgcaagtagcctcatcaaggggagaaagttcaagaagaatggcttcatcatcatctagtagcagtagtagtaacaatggtaaaaatatgagagtggtagcaactgcatatactggtcacagtataactgcaacaggaacaaaacctaagtggggaacaatagctgtagaccctaaggttataccatatggaactaaagtttatatacctcaatttgacatggtgtttactgcagaagactgtggtggagcaataaaaggaaataaaattgatatctacatgaatgattcaaaaacagtttataactggggaagaaaaactatagatatacgtatattaaaa

SEQ ID NO: 16827 - DNA, 942 bp, Clostridium difficile
atggaaccattatttttaaaacctatttttatggatagaatatggggtggtactgcacttaaagataaatttaattatgaaatagattcgccaacaactggtgaatgttgggctataagctctcataaaaatggagattgcttaatagaaaatggaaaatataaaggtaaaaaactatctgaattgtggaataaaaatagagaattatttggaaacacacctggtgataagtttcctttacttacaaaaatattggatgcaaatgataatttatcagttcaagttcatccaaatgatgaatatgctaaaaaaaatgaaaatggagagttaggtaagacagagtgttggtatgtaatagattgttctgatgatgcagaaattataataggtcataatgcaaaatctcataaagaatttgtaaatatggtaaataataatgaatgggacaaactacttagaaaggttaacataaaaaagggagactttttctatgttccaagtggtactatacatgctatatgcaaaggaacattgattttagaaactcaacaaaactcagatactacttatagagtctatgattatgatagaactgacaattcaggtaataagcgtgaacttcatgttcaaaaatcaatagatgttacgaatgttcctcatataaatttcgatactgactataaaatcgtatcaacatcagactttaaatgcacaacatttgtgtcaaacgaattttttagtgtttataaattagatgtttttggaaaatgtaattttacacacaatacacctttttctttatacagtgtgttggatggaaatggaaaacttatacacaattctgtagaatataatttaaaaaagggtatgcattttatactaccaaacgactttggagattttagttttgaaggtaatttagagattatatgttctcacata

SEQ ID NO: 16828 - DNA, 1845 bp, Clostridium difficile
atgggaaaaataataggaatagatttaggaacaacaaattcatgtgttgcagtgttagaaggtggagaagcacaaataatagcaaatagtgaaggtatgagaactactccatcagtagtagcatttacaaaagatggtgaaagaatagttggagaacctgcaaaaagacaagcagttacaaatgcagataaaacaataacttctataaaaactcatatgggaactgattataaagtaaatatagatggaaaatcatatactccacaagaaatatcagcaataatattacaaaaattaaaatcagatgcagaaagttacttaggacaaacagtaacagaagcagttataacagtaccagcttactttacagatgctcaaagacaagcaactaaagatgctggtagaatagcagggcttgatgttaagagaataataaatgagccaacagcagcagctcttgcttatggtatggataaattagaccaagaaaagaaaatattagtatttgacttaggtggaggaacttttgacgtatctatacttgaaataggagatggaacttttgaagttttagctacagctggtaacaatagattaggtggagatgactttgaccaaatagtaatagattatttagcagaggaatttaaaaaagctgaaggtgtagatttaagaaatgataaaatggctcttcaaagattaaaagaagcagcagaaaaggctaagaaagaattatcatcaacaatgagttcaaacataaacttacctttcataactgctacagcagaaggaccaaaacacttaaatatagatttatcaagagctaaatttgaagaattaactagaggtttagttgaaaaaactatggaaccaactaagacagctttacaagatgcaggactttctacaggtgatatagatgatgtattattagtaggtggttctacaagaataccagcagtacaagaagctgttaagaagtttataggaaaagaacctcataaaggtataaacccagatgagtgtgttgcagcaggtgcttctatacaagctggagttttagcaggggatgttaaagacttattattactagatgttactccattatctcttggtatagaaactatgggtaatgtaatgactaagataatagaaagaaatactacaataccaactaagaagtctcaaatattctcaactgctgctgataaccaaacagctgttgatatacatgttcttcaaggtgaaagaagtatggcttatgacaatacaactttaggaagattccaattaacagatataccaccagcacaaagaggaatacctcaaatagaagttacttttgatatagatgcaaatggtatagttaatgtttcagctaaagatttaggtacaggaaaagagcaaaaaataactataacatcaaacactaatttatcagaagcagaaatagagcaaaagataaaagaagcagaaatgaatgcagaagctgacaaacaaaagaaagaaaaaatagaagcattcaatcaagctgaatctactatatatcaaactgaaaaaactttaaatgaacttggagataaaataagttcaggtgaaaaagaggatatagaaaaagctatagcagacttaaaagctgtaaaagataatcaagatgctacagcagaagaacttaagaaagctacagatgaagtaatgactaagttccaaaaagtatctcaagaaatgtaccaaaaagcagctcaagaacaacaagcggcacaaggtgcagaacaagcacaagacaatggacctaaagatgacaatgtagtagatgctgactttaaagaagtagatgaagataaa

SEQ ID NO: 16829 - DNA, 1326 bp, Clostridium difficile
gtgaggagggacagtatgcatactcaactacaaaagactattggtctttcagcagctctttctactgttgtaggtatggttataggttcgggagttttttttaagccacaagcaatatacactacaactaatggagctccaggtctaggtattatagcgtggcttttaggtggttttataacaataactgctgggcttacagctacagaaatttcagctgctataccaaaaactggtggtatgatgatttatatcgaagaaatatatggagaaaagttaggttttttaactggatggatgcaaactgtattatttttcccaggtacatcagcggcattaggagtaatatttgctcaacaagcatctgaacttttaggaatgagcccaaataatatggcaaatgtacttcctatagcaattggagttatactatttttagcgttattaaatataataggttcatccttaggaggaaaagttcagacagtagccactattggaaagatgatacctttaattttaataatagtctttggatttattaaaggtcaaagtagtgaagtattaaatccatttgtaggagatggtgtaaatgcatcaaatgcacttggacaagtattaatagctactttgtttgcatatgatggttggataaatgttggagctatatcaggagaaatgaagtctccagagaaagatttaccaagagcaatagttggtggtttatcattagttatggcagtttatattataataaatatagcttatctttgggtagtaccagcaagtgaattagcaacagttacttccccagctacattagtagcaacaagattgtttggaaatataggtggaaaagtaataactgtgggtatattaatatcagtatttgggacattgaatggatatttattaacaggttcaaggataccttatacattagctgaaatgggaactttaccagcatctaaaactcttttaaaagtaaattctggaggttctcctgtaaattcaatactacttataactgtgttagcctgtgtatatgcattatctggtcaatttaatcttttgacagacttaacaatattttcaatatgggtattttatgtattgacttttataggtgttatgaggcttagaagacaaaagccagatttacacagaccatataaagtccctttatatccaataataccaattatagctatattaggtggactgtttgtaataataaatcaaatattgacttcaacagtcatatctttaggcggaatatttataacactattaggtttaccagtttattattatatgaaaaaaaga

SEQ ID NO: 16830 - DNA, 1017 bp, Clostridium difficile
atgtttaaaaaatgcattaaagtagtaaccttgacttttatattagtatgcattttaccaggaaaatcattagctttgaatcaagatgattttttaaagtttttagtaaattcatcttatccagaagctaaagtcgaaggaaatgatacagaaaataaaaagaataataaaaataaagaaacaagtaaggaaaataaggaagaaagtaaagaagaaaacactaaatctaaagatgcaagtaaagttgataataaaaaagagagtgaaaaagaatatataaaactttatgttggtaaagaaaatgttccagatattgagtcaaaaaattcagacacaactgaaactaacacaacatctagttcagattataaggatgatttaagagtaaccaaagaaaatccaagaattttgatatatcatactcatggatgtgagacttattcaaattcacctgatggaaattatcattcaagagataagaaaaattcagtaatggaagtaggaagtgcattaactagtgctttagatagcaaaggatggggtgtagttcatactactaaataccatgactatccatcttataataactcttatgcaagtagcttaaaaacaatacaaagtatattacctaaatataactcagtggatatagcgatagacttacatagagatgctagggatttaactaatccagccactaaggaaaaagaccatttaaaatatacaactatgataaatggagagagagtatcaaagtttttctttgttgtaggaggtaaaaatacaaatagaaaacaacttagagctttagcagaagatataactgcttttgctgagaaaaagtatcctggtctagtatctccaatagtagaaaaagactatgctagattcaatcagtttgcagttaagaatcatatgttagtagaaatagggaataacgcaacaagtgtagaagaatctaaggctactacaaagtatttagccgagattttggatgaatattttaaacaaaaaaat

SEQ ID NO: 16831 - DNA, 774 bp, Clostridium difficile
atgaaatttcatgagtttggaaataaaaacagaccacatattatgttgattcatgggggagggaatgcatggtggaactatttgcgacaagcagaagttttgtctaacaaatatcatgtgatacttcctacattggatggtcatggagaagaatatgaaacaacatacatttctacagaggatacagcagataagttgatatcatatatagatgaaaattgcagtggacatcttttcgctttgtgtggggtatcacttggtggtcaaattgtcatggaacttttatctcgaaaacctaatattactaaaaaagcaattattgatggtagtatttgctacccaagacctcttatggcaaggttttgtattgctggtattcgattttttggaggacttttgtttagtgataaggcttgtcgctttcaaattgctatgatgccaaaattgttacctgaaaatatgcaatatccagatgaaataaaagcgtattatatgacagatatgccacatgtaagaaaagaaacattctataatatgtatcgcacttacatgatgaactatacacttaaagagaatgttaaaaaaaccacagcacaagtaatgtactggtatggagaaaaagaaatgaaatgtgttaaaaaatctgcaaaaatgtttcagtcttatgtgccctcttgtgagatttatgaagctaagagctataatcatgggtatttatcactttatcttccaaatgaatggttggaaattgcagaaccatttttccaaaaggaa

SEQ ID NO: 16832 - DNA, 507 bp, Clostridium difficile
atgctacgtcgtaagccgatagatgcaggacaacttgacttacaagaaaaagttgttgaagtaagacgtgttactaaggttgtaaaaggtggtagaaatttcagatttgcagcattagtagttgttggagatgaaaacggacacgttggtataggtgctgggaaagcaatggaagtaccagacgctataaaaaaagcagttgaagatgctaagaaaaatctaatagtagtgccaatagttgggactacaattcctcacgaagtacgcggacactttggtgctggaaatatattaataatgcctgctgtagaaggtacaggagtaatagctgggggacctgctagagccgtacttgagctagctggactaaaagacgttagagctaaatctttagggtctaacaatccaagaaatatggtaaatgctacaatagaaggacttaattctctaaaaacagttgaagatatagctaaacttagaggtaaaaaagttgaagaacttctaggg

SEQ ID NO: 16833 - DNA, 450 bp, Clostridium difficile
gtgcaatccatgaagttacatgagttaaaacctgctgaaggtgcagtaagagctaagagaagattaggtagaggtactgcaactggacaaggtaaaactgcaggacgtggacaaaaaggtcaatggtctcgttctggtggtggagtaagagtaggatttgaaggtggacaaatgccactagctagaagacttcctaagagaggtttcaataacatatttaagaaagtttacacagaagttaatgttgaagttttaaacagatttgaaaatggaacagaaataactgcagaattattaaaatctactaaaactataagcaaaataggtaaagacggaattaaaatcttaggtgaaggtaatttagagaaagctttaactgttaaagctgctaaatttacagcttcagctcaagaaaaaatagaaaaagctggtggaaaagcagagttagta

SEQ ID NO: 16834 - DNA, 684 bp, Clostridium difficile
gtgttagaaaatttaaaagaagaagtattaaaagcaaacttagaattacctaagaaaaagctaattacttatacttggggaaatgtaagtgggatagatagagaaaaaggattagtggtgataaagccaagtggtgtagagtatagtaatatgactgtagaagatatggttgtagttgatttagagggaaatatagttgatggcaaattaagaccttcttcagataccccgactcatctagttttatataaagagtttgaagaattggggggaatagtacatacacattcaagttgggcaacaatttgggctcaaataggaaaatctataccatcttgtggtactactcatgcagattatttttatggaagtataccatgtaccagaaaaatgactagagaagaaatttgtaatgaatacgaaaaggaaactggaaatgtaatcattgaagaatttatgggaagaaatccaattcattgtccaggaataattgtaaatgaccatggaccttttacatggggaaaagatgcaaatgaggctgtgcacaatgcagtagttttagaagaagttgcaaagatggcttattatacagagttaatgagtcctgataatattatggataaggttcttatgaataaacatttttcaagaaaacatggaaaaaatgcatactatggtcaaaaa

SEQ ID NO: 16835 - DNA, 627 bp, Clostridium difficile
atgaaaggaatattaggcaaaaaagttggtatgactcaaatattcactgataaaggtgtagttatacctgtaacagctgttgaagcagggcctatggtcgttactcaaataaaaacagttgataaagatggatacaatgctatacaaataggttttgaagatgctaaagaaaaagctttaaacaaacctaaaaaaggacatttagctgctgctaatgttttaaagaaacatttaaaagaatttagagtagattctgtagaaggatacacagtaggacaagaaataaaagctgatgtatttgaagcaggtgcaaaaatagatgttactggaataagtaaaggtaagggattccaaggtccaataaaaagacatggacaaagtagaggtcctgaaactcacggttctagataccacagaagaccaggttcaatgggagcttgttcttacccaggtagagtatttaaaaacaaaaaattagctggacatatgggaagcgtaaaggtaacagttcaaaacttagaggttgttaaagtagatgctgacaagaaccttatattagttaaaggagctataccaggagctaaaggttcagtagtaactataaaagaagctataaaggtttctaaa

SEQ ID NO: 16836 - DNA, 651 bp, Clostridium difficile
atgactaacctagagaaaggaggaataacaatgccaaaattaaatgtactaaatgttagtggacaaaacgttggagaaatagaattatcagattctatatttggcgtagaagttaatggacatgttttatacgaagttgtaaaaaatcaattagcaaataagagacaaggaactcaatctgctaaaactagagcagaagttagaggtggcggaagaaaaccttggaaacaaaaaggaacaggtagagcaagacaaggttctacaagatctgtacaatgggtaggtggaggagttgcttttgcacctaaaccaagaagctacaaatatacattacctaagaaggtaagaagattagctatgaagagtgctttatcttcaaaagttcaaaatagtgaagttatagtattagatgcattaaacatggatgctcctaagactaaagaatttgctcaaatattaaacaatataaatgctgctaaaaaagctttagtagttatagctgacaaaaacgataacgtaataaaatcagctagaaatatagaaggtgttcaaactgcattagttaatactatgaatgtatatgatatattaaaatacgattcatttataataactacagatgctgttaaaaaagtggaggaggtgtacgca

SEQ ID NO: 16837 - DNA, 828 bp, Clostridium difficile
atggctataaaaaagtttagaccaacttctcctgccttaagacaaatgacagttttagtttctgatgaaataacatgtaatcaaccagaaaaatctcttttagttaacttaaagaaaaatgctggtagaaacgtacatggtagaataactgttcgtcatagaggtggaggacaaaaaagaaaatatagaataatagattttaaaagagataaagatggtatacctgctaaggttgctactatagaatatgatccaaacagaactgcaaatatcgcattattaaactatgctgatggagaaaaaagatatatattagctccagttggaattaacgttggagatactatattatcaggattaggtgctgatataaaaccaggaaactgtttagcattaaaagatatgccagttggtactatcattcataatatagaattaaagccaggaaaaggagctcaattagttagatctgctggagtttctgcacaattaatggctaaagaaggaaaaaatgctttattaagattaccatcaggtgagatgagattagtaagcataaactgtaaagctactataggtcaagttggaaatatagagcatggtaacgtagttatcggtaaagcaggtagaaaaagacatatgggaataagacctactgtaagaggttctgtaatgaaccctaatgaccatccacacggtggaggggaaggtagatctccaataggtagaccatctcctgttactccatggggtaaaccagctcttggatacaaaactagaaagaaaaataaagcttcaaataaactaatagtatcaagaagaactaag

SEQ ID NO: 16838 - DNA, 813 bp, Clostridium difficile
atgggtcaaaaggttaatccacacggcttaagggtcggtgttataaaagattgggactcaagatggttcgctactgataaaaaagagttcggaaacttattattagaagaccataatatacgtaaattcttaaagaaaagattatactcagctggagttgctaagatagaaatagaaagatcagctaacaaaataaaaatggacttacacgttgctaagcctggtgtagttataggaagagctggtgcaggaatcgaagcattaaaagctgaattagaaaaaatgacaaagaaaactataatagttaatatagtagaagtaagaagtacagataaaaatgctcaattagtagctgagaatatagctttagctatagagagaagggttgctttcagaagagcaatgaaacaagctatacaaagagcaatgaaatctggtgctaaagggataaaagtttctgcttcaggaagattaggtggagctgaaatggctagaactgaaggttatagtgaaggaaatgtgccactacaaactttaagagcagatatagattatggtttcgctgaagctgatacaacttatggaaaaatcggtataaaagtttggatatgtaatggtgaagttttaccaactagagacggtgtaaatccaagagaagaaagcagaaagagcgatagaagagacaacaagagagataatagaagaaacgatagaagaggaaatgacagaagaggaaatgataacagaggaaactacagaggacaaagacctcaaggtggatcaagacctcaaagaactgaaaacaaaggaaat

SEQ ID NO: 16839 - DNA, 429 bp, Clostridium difficile
atgttaatgccaaaaagagtaaagcgtcgtagagttcatagaggaagcatggctgggcaagctcataagggtaataaagttacttatggtgagtttggattagtagcattagaagcttcttggataacttctaatcaaatagaagctgccagaatcgcgatgactagatatataaaaagagggggaaaggtttggataaaaatattccctcataaaccagtaacaagaaaaccagcagagactcgtatgggtgcagggaaaggttctccagaatattgggtagctgtagttaagccaggaagagttatgtttgaattagcaggtgtttctgaagataaagcaagagaagctatgagacttgctgcacataaattaccaatcaaatgtaaatttgttaaaaaagaagatttagaagtaaagggtggtgaa

SEQ ID NO: 16840 - DNA, 846 bp, Clostridium difficile
atgacgataaaagatataattattaaatattcagataaactaaaagatataagtgatactccaagattagatacagagttattgttacaaaaaacattgggtgttgatagattatatattcacttaaatctgaataaagagctaactgaagaacaaaaaacaaaatttatgggttttgcagaagaaagattaaatggaagaccaatagcatatatagttgaaaatagggagtttatgggattagatttttttgttaaggaaggcgtattgattccaagaccagatacagaaactttagtagaagaaataattgaaatatgtagagaaaaaaaagatgtaagtatattagatataggaactggttctggagctattacaataagtttagcaaagtacattgaaaattctaaaatcatgtcttttgatatatcagagacagcattagaaatagctaaaaaaaatgctattataaatgaagttggtgaaaaaataaagtatattaattctgatttatttacagcaataagtgatagtaacataaaattcgatatcatagtttcaaatccaccatatattaaaaaacaagatatagaaactctgcacaaacaagttaaagattatgaaccatataatgctcttgaaggtggagaagatggattagacttttatagaagaataacagaacaaggtaagaaatatttaaataagtgtggaatattagcatatgaagttggtcataatcaagctgaagatgtaataaatattatgaaaagtaatggatataaaaaaatatacacaaagaaggatattcaaggcattgatagagttgttataggttacaatata

SEQ ID NO: 16841 - DNA, 540 bp, Clostridium difficile
atggcttctagattacaagaaaaatacatgaaagaagttgctcctgctttaatggagaaatttggatacaaaaacgtaatggagatacctaagttaaataaaatagttattaacatgggtataggtgacgctagagaaaatccaaaaggattagaaaaaggcgttgaagaattagaaatgatatcaggacaaaagcctgttataactaaagctagaaaatctgttgctaacttcaaattaagagaaggaatgccaataggaacaaaagttacattaagagctgacaaaatgttctacttcatggacaaattagtttcagtttctttaccaagagttagagactttagaggagttaaccctaatgcttttgatggtagaggaaattatgctttaggagttaaagaacaattaatattccctgaaatagaatatgataaaatagataaagtaagaggaatggatataatatttgttactacagcaaaaactgacgaagaagctcgtgaattattaaaattattaggaatgccattttctaag

SEQ ID NO: 16842 - DNA, 396 bp, Clostridium difficile
atgacaatgacagatccaattgcagatatgcttactcgtataagaaatgctaatgttgttaagcatgaaactgtagatgttccagcttctaatatgaagaaagaattagctagaatcttattagaagaaggtttcataagaggttatgatgttatagaagatggaaaacaaggtatcataagaatacaattaaagtacggacaagaaggcgaaagagttataacaggtcttaagaaaatatctaagcctggaatgagagtttacgctgctaaccatgagataccaaaagtattaaacggattaggaatatcagttatatctacttcaaaaggaatattaactgacaagcaagctagaaaagaaaatgttggtggagaagtaatctgctacgtttgg

SEQ ID NO: 16843 - DNA, 540 bp, Clostridium difficile
atgtcaagaataggtgttaagccaataataataccagcaggtgttgaagttactatagctgaaggaaatttagttacagtaaaaggtccaaaaggaactttaactaaacaattaagtgctgagttaaacataaaaaaagaagaaaatacaataatggttgaaagaccaactgataataaaaaacatagatctttacacggactaactagaactttattagataatatggttgtaggtgtaaatactggtttcgaaaagaaattagaattaaaaggtgttggatatagagctcaaaaacaaggaaagaaattagttatgaacttaggtttctctcatccagttgagatggaagatccagaaggaataactgttgaagctccaaaccaaacagagttaatagtaaaaggtatagacaagcaattagtagggaattatgctgctaagataagagcttggagaaagccagagccatacaaaggtaaaggtataaaatacgttgatgaagtaatcagacgtaaagaaggaaaaactggtaaaaaa

SEQ ID NO: 16844 - DNA, 774 bp, Clostridium difficile
ttgctatataaggagagtaaaaatatgaatgagcctttagtatcgataattactcctgtttataattcagaagagtttttatcagagacgataaagtcaatccaaaatcaaacttataaaaattggcagcttttattagtggatgattgttctaaggacaattcaagtgaaattataaaaagttttcgaaaagaagatgctagaataaaatatataaagcttgaaaaaaattctggagctgcagtatctagaaatgttggtattaagaatgcggaaggtcgatttattgcatttgtagatagtgatgatttatgggatagtagaaaattagagattcagatagaatatatgttaaaagaaaatgtaggtttttcttttacatcttatagatatatgagacaagatgggtcaaaaacgaataaggttgcaagagctcctaagaaaattgactatgaaggattacttagaaatactataataggatgttctacagtggtcattgataaggagattgtaggagagttcagcatgcctttggtaagaagaggacaagatactgcaacctggttacagttacttaaaaaggaaaaatatgcatatgggattcaagaagatttagtgaattacagattagttggaaattctatatcaagtaacaagataaaagcattaaaacgaacttggaatacttatagaaatgttgaaaatttaagtttaccaaaaagtctatatgtattttgtttctatgtttttaatgccattaaaaaaagagta

SEQ ID NO: 16845 - DNA, 1830 bp, Clostridium difficile
atgaaaatatcaaaaaagatagtgtctttgttaactatgacatttttaactgttacattatatggaaatacatctaatgcatctacaaaagatacattaacgggttctggaagatgggaaacagcaataaaaataagtcaagctgggtggacaaagtctgaaagtgctgtcttagtaaatgacaattccatagcagatgctttatcagctactccatttgctaaagcaaaagatgcgccaatattattaactcaaagtaataaattggatagtagaacaaaagcagaattaaaaagacttggtgtgaaaaatgtatatttaataggtggttcaattgcattaagttcagagattgaaaagcaattaaatgcagaaaatataaattttgaaagaatatccggaaatagtagatatgatacttctttaaaattagctgaaaagctagatagggaaaagtctatatctaaaatagtagtagtaaatggagaaaagggtcttgctgatgcagtgagtgttggagctatagctgctcaagaaaacatgccaataatactttctgattcagagaatggaactgaagtagctgataattttatagatagtaaagatatagcaaaatcgtatgtaataggtggtacatattctatttctaattctgtagaaagaagtttaccaaatgcaacaagaatagcaggtagtagtagaagtgagacaaatgcaaaaattatagaagaattttataaagatactgatataaaaaatatttatgtaacaaaagatggtacaaagaataagaatgatttaatagattctttagcagtgggtgtattagcagctaaaaatagttctccaatagtattagcaggaaataagcttgatactactcaaaaagatgttttaaatactaagattatagataaagttactcaaattggtggcttaggtaatgaaaatgttgtagaagatatactagatatacaagaagagactaagtatactgttgaaactattgatgaacttaatgctgctataaaaagagcagatgcaaatgatattataaagtttaaaccagagaaagaaaaaactataaataattcttttagtattgaaactaaaaaaactgttactattgaattagatggaagatatagacaaacaataactttggatatacctaatggaaaatttaataactatgcagaaatagaaggtggagtaaagctaaaaaacataaaaaatgaatcattagttaataaaggaagtatacaggatttagatatatatgatgaaaatggttgtaaaatagagaatgaaagttctggagaaatttggtttgttactatagttgaagaagctaatgatgtatatatagttaatagtggtgatataacaaaaatatcaaataattcttctagtactataataagaaattctggaaatattgatacagttacaggaaaaaaagaacctgcaataagtggaaataaacctaaagtcaatgatacagaaaaagaaactaaagctgctagaggcttaaatcctagggtagaagcatgttctgttcctaaaaaagattatgttatgataacaattcctaattcacctaaagattcaagatataaaatttactatagagtagtttataataaaccttatgcaatggatgttggtgataaaattaatattggagaatggactgttgcaccaacagatgaagagccatttcttgaaaaagctaaaaatggttgttatgtagaagctgttgaggtaaatacttcaacgaaagaggtttctagatggggaagaactaacgctacagatgatggattt

SEQ ID NO: 16846 - DNA, 1938 bp, Clostridium difficile
ttgctgtttaaaggagggcttctagttatgcgagaaagtatagatttagagaaagaaagcttttttaataggctttttaaaaaatataaatttagacatttaacactattaattctagatatttgtagcgtactagtagcgtttcgaatgtctttaagcttgacaggtaatttaaatgcatttaccactaatgatataataatttcagtatgtatatatatagtacttcatatagtatcatttagattgtttaagtgctacaacacattatggagatatgcaggagaagaagaaattatatctatttttgtggcaactttagcttatttaattccgatttatataataaataaattattagggtttgattatcctataatgttttatgtattaaatacaatatttattataatgtttacaagtggcgcaagaatagcctatagagctataagaatagtcatgaacaagacatattctagaggaaaggtttcaaatatccttataattggtgcaggagatgcaggagaaatggttatacaggaactaaaaagaaatccagaacttaaaaaagtagcagtggctataattgatgatgataaaaataaaattggaagaataatccataatgtgaaaattgtaggaacaacttcagatataaaagatgtggtagaaaagtacaatgtagatgagataatcttttcaatagcaaacatagagaagcgtagaaaaaaagatattattgatatatgtaaaaacactaactgtaaaataaagacaataccaggaatttacgaaattatagatggaaaagttgatataaaacagattagagaagtagagatagaagacttgttgggtagagagcctataaaaacaaatttaagagagataagtaattacattgagggaaaagtaatcttaataactggaggaggaggctcaattggttcagagctttgcagacagattgcaggatttaatcctaaagagcttattatagttgataattatgaaaataatgcttactcaatacaacaagaattacttagaaaatataaaaataaattagatttgaagacagtaatagcatcaataagagaagaaaaaagaatggatgaaatatttaataaatataaaccagaagtggtatttcatgcagcagcacataaacatgttcctcttatggaatcgagccctggcgaagctataaagaataatatatttggaactttaaacatagctggcttgtcttcaaaatatagagctaagaaatttgtccttatatctacagataaggctgtaaaccctactaacataatgggagctactaaaagagctgctgaaatgattatacagactatgaatgctgaaagccagactgaatttgttgctgttagatttggaaatgtgcttggtagtaatggtagtgtaattccactttttaagaagcaaattgaagatggcggaccagtgacagttactcatccagatattattagatattttatgacaataccagaagcagtaggcttagttatacaagctggggctatggctaaaggtggagaaatatttgtacttgatatgggagaacctgtaagaatattggatttagcaaaaaacttaattaaattcagtggatttgagccagatgttgatataaaaattgaattttctggtcttagaccaggagaaaagttgtatgaagaactacttatgtcagaagaaggtctgttggatacagagcataaaaagatttttattggtagaccaatagatgttgatagagaaaaaataacaaaatacttaaaacttttaagagaaattactaacaatgaagaggttgaaaaaatagatggtattatgagggaattagtgccaacttatattaaaccagaagatgctaatatcaaagaaattgcaacaactagagaaaag

SEQ ID NO: 16847 - DNA, 2025 bp, Clostridium difficile
atgatgaaaaaaacaacaaaattattggcaacaggaatgttgtctgtagcaatggtggcaccaaacgtagctttagcggctgaaaatactactgcaaatacagaatctaattcagatattaatataaatttacaaagaaaaagtgtagtgttaggaagtaaatctaatgcaagtgtaaaatttaaagaaaaattaaatgctgattcaataacattaaattttatgtgttatgatatgccacttgaagctactttaaattacaatgaaaagacagattcatatgaaggtgtaataaactataacaaagacccagaatacttaaatgtatgggaacttcaaagcataaaaataaatggtaaagatgaacagaaagttttaaacaaagaagacttagagtctatgggattaaatcttaaggattatgatgttacacaagagtttataataagtgatgcaaattcaacaaaagcagtaaatgaatatatgagaaaaacttctgcaccagtaaaaaaacttgctggagctactagatttgaaactgctgttgagataagtaaacagggttggaaagatgggtctagtaaggttgtaatagttaatggagaattagcagcagatggaattacagctactccacttgcatctacatatgacgcaccaatattacttgcaaataaagatgatataccagaaagtacaaaagcagagttaaaacgtctaaatccaagtgatgtaataattataggtgatgatggttcagtttcacaaaaggcagtgtctcaaattaaatctgctgtaaatgtaaatgtgactcgtattggtggagttgatagacatgaaacatctttacttatagcaaaagaaatagataagtatcatgatgttaataaaatatacatagcaaatggatatgctggtgaatatgatgctcttaatatttcatcaaaagctggtgaagaccaacaacctataatattagctaataaagattctgtaccacaaggtacatataattggttatcttcacaaggtttagaagaagcttattacataggtggtagtcaaagtttatcatcaaaaattatagaccaaatatctaaaatagcaaaaaatggtacttcaaaaaatagagtttctggagcagatagacatgaaacaaatgcaaatgtaattaagactttctatccagataaagagttgagtgcaatgttagttgcaaaatctgacataatagttgattcaataacagcaggacctttagcagctaaattaaaagctccaatacttataactccaaaaacttatgtttctgcataccatagtacaaacttatcagaaaaaacagcagaaacagtatatcaaattggtgatggaatgaaagatagtgttataaattctatagcatctagtttatcaaaacacaatgcaccaacagaaccagataattcaggttcagcagcaggaaaaactgtagtgatagacccaggtcatgggggttctgattcaggggcaacaagtggattaaatggtggagcacaagaaaagaaatatactcttaatacagcattagcaactactgaatatttacgttcaaaaggtataaatgttgttatgactagagatacagataaaacaatggctttaggagaaagaacagcattatcaaatactataaagccagatttatttacaagtatacattacaatgcgtctaatggatctggtaatggtgtggaaatttattacaaagtaaaagataaaaatggtggaacaactaagactgcagcatcaaatatcttaaaaagaatactagaaaaatttaacatgaaaaatagaggaatcaagacaagaacacttgataatggaaaagattacctatatgtgttaagaaataacaattatccagcaatacttgttgaatgtgcatttattgacaataagagcgatatggataagttaaatactgcagaaaaagtaaaaacaatgggaactcaaattggaataggaatagaagatacagtaaaa

SEQ ID NO: 16848 - DNA, 837 bp, Clostridium difficile
ttggataacaatgaccataaaaatgaagatgggataattaacatactacttatgggaacagatgctagaccaaatgaagattcttcaaggtcagatgctatgatgatacttactattgataacaaacacaatgatatcaaacttacatcattagctcgtgatagctatgtagacatccctggtcatggtaaacaaaaacttactcatgcttatgcttatggacaagctgatttattaatacaaacaattgaagagaattttaatattgatattcaaaattatgcttgtgttaatttcgaatcatttatgtatataattgatgctattggtggcgttgaggttactgttgaaaaaggagaaatacgagaactaaataaatttattcctgaaacttataaatggaataaaagtgatgataaaggtagcatacaatacattagaaactctggaaagcagactctaaatggatatcaggcactatcttttgcacgtatcagacacaacgatacagcctttgctagagatggcagacagagacagattatacaagctataatcaagaaaacggaaactttacctgttactaaatatccaggtttattagatgcagttcttccatatgttaagactaacatgaagcctaatgcaatactttctttaggagctcaagttttaaaaatgggcgacttaaatattaagcaatttgaatttcctattgatgatgaaattcacagtacaggtggtatatatggaaaagctggatgggttcttagatttgacccagatactttagacatattacacgattttatatttaatgacatagagtttaaacaa

SEQ ID NO: 16849 - DNA, 954 bp, Clostridium difficile
ttgtcaggactcaaaaagttcgttatatttctagcccttttagttatagcatttcctgttagtatatatggatatgtttttactaaattaaaaactatacaagatgatagtataaatacagaggcgcttagtagtaatgactataaaaacgaagaaaatatcacaaacatattattgttaggtacagatgcaagaccaggagaagaagtttctcgttctgatgccatgatgatacttactattgataataaaaataaaagtcttaagctaacttcattaaatagagatacttatgttaatataccaggacgtggagaacaaaaattaacacatgcctacgtatatggacaagctaacttattaatagaaactatagaagaaaacttccaacttgatatacaaaactacgccgtagttgactttttctcttttatggatatagttgatgctttaggtggagttactgttactgttgataagagtgaaataagagaattaaataaatttattcctgaaacttataaatggaataaaaatgacaataaaggttctcttaaatatataagaaattctggtgagcaaaaattaaatggatatcagacacttgcattttctcgtataagaaaaaatgatagtacagctgaaagagatagaagacaaagaagtgttatacagagtttaataaatggtgttaaggatttatcagtcactaaatatcctaatctagttaacacaatacttccgtatgtaaaaactaatatgaatcctaatgaaataatatctttaggaaaagaacttttaagtataggaaatttaaatttgaaatctatggagtttcctctttctactgaaaatggtagaaaaataggtaatgcaggctatgtaataccttttgaggaatatgaactagatgcaatgcatgatttcatatttaaagatattatggttgaagat

SEQ ID NO: 16850 - DNA, 786 bp, Clostridium difficile
atgataaaattaatagcaacagatttagatggaactttgttagatgaaaagagcgaaataaatccagagttttataaagtatttaaaaaattaagagagagagggataatgttttctgctgctagtggcaggcagtatcaaaatcttataaaaaaatttgaagatataaaagatgatatgatgtttatatcagaaaatggaacactagtagtatataaaggaaaagaaatattatcaaatcctttaaataaagaattagtaaatgaaatcatagagacaacaagaagtataaaagggaaaaaaattgtaatgagtgggaaaaaatacgcttatatagaaagcaaagaagaagcgtttatacaagaggtcagtacttattatgcaaagtttaaaactgtagaagatttgacgaaagtagagggagacatattgaagatagctgtgtttgacttcaaaggtgcagaacataataataatatctactttgaaaagttttctgatagagctcaagtatgtatttctggagtggagtggcttgatttaactgcaaaaggtgcaaataaagggagtgccataaaaaaagtacaaaaaatgttagatataaaatatgaagaaactatggtatttggtgaccagttaaatgatgtggaaatgatgaaaagtgcctatcatagttatgccatggaaaatgcaaatgaacatttgaaacaaattgctagatttagagcaaaaagaaatactgaaaatggcgttgtagataagataaaagaggttataaaaattgga

SEQ ID NO: 16851 - DNA, 715 bp, Clostridium difficile
gttgatttgctttacagttttatttttatttattgcatttaaggctactcaaggtgtagtagctttggtaaaaagtatggataaaagtaataaaactagtcaacaacaaaatgttaactcagaacaatttgaccttggtaatgaagaggaaaataaaaagaaaaaatatactgtatttatagacccaggtcatggaggcaatgataaaggaactgaaagcaagaccagtaatagatatgaaaaagacctaaatctacaaattgcaaaaaaattagcaaataaattatctaaacaaaaggatattcaagtagtagtatccagaactgatgatacatatatatcattaaaggatagagctatcttagcaaataatagttctgctgatgtgcttgtttctattcatttaaatgcagagaaaaatggtaatacagcaacaggtatagaaacttggtataggaataaagctacagatggttcaaaagaacttgcacagacagtacaaagtactatagtatcctatgttaaagttagagataggggaatagttgaaaataactttgaagtacttagagaatcaaatatgcctgctatattaatagagtgtggttttttaacaacaccttcagaggaacaaaaaataataaatgaaaaatatcaagaccaacttgcggaaggaattgttcaaggtgtactttcatacctagattctaaaggg

SEQ ID NO: 16852 - DNA, 378 bp, Clostridium difficile
atgaatatatttgatattggcgtagatataattgaaattgatagaataagaaaggctgtagacaaaaataataggtttttggagaagatatttacagatagagaaatagagtattttaattctaagaattttaaagcagaaagtatagcaggtaatttcgcagccaaggaagctataagtaaatctataggtacaggaattagagtgtttaattttaaagatatagaagttctcagagatgaaatgggaaaaccaatagtaaaaacttataataatctagcaaaaatgtgcatagattataatgttttagaaataaaagtttcaatatcacattcaaaagattatgctatagcaaatgcgataaccataattaaggac

SEQ ID NO: 16853 - DNA, 2166 bp, Clostridium difficile
ttggtggtaaagatacttagaagtcctcacgcttatgcaaaaataaaagatatagagacatcaaaggcagaaatggttgatggtgttgaatgtgttttaacatataaagatgtaccaaaatctcgatttacacttgctggtcaaacatatccagagccatctccatatgatagattaattcttgaagatgttgtaagatatgtaggtgacgaagtagctatagtggcagctatagatgaaaaaactgcaattaaagcaatgaatcttatcaaagtaaagtatgaagtacttacacctgttttggattttgaagaggcaataggaaataaaactatggtacatgatgaagatagacattgtaactttgatataggtatgcaaagagaaaaaaatatagtatcccatcatgattatacaaaaggtgatgtagaaaaagtattaagtaattgtgatgtagtgattgaagaaacttattatactcaagctcaagcacatgcaatgatggagacgtatagggcatacaattatttagaccatatgggaagattggttgtagtaagttcaactcaaataccatttcatgtaaaaagacatttatctcgtgcactagaaataccagctagcaaaattagggttataaaacctagaattggtggcggatttggtggtaaacaaactgcatgtgttgagattttttctgcaattgttactttaaaaacagggaaaccagctaaaataatttatgatagaaaagaaacttttaattgttcaacaagtagacatgcaatgagattaaaagttagactaggtgctacaaatgatggcataataaaggcaatagatataaaagcactttctgatacaggagcatatggagagcatgcttctacaactattggtttggttggagaaaaaactttaccaatgtataataaagttgaagcaacaagatttattgcagatgtggtatatactaataagatgccagcaggagcacttagagggtatggagcatcacaaggatgttttgctgttgaatcaactataaatatgcttgctaataaattaaaaatggacccaacagatttaaggttaaaaaatgtggtaacagaaggtgaaactacatttgcatatggtaaaactttaaatagtgtcgatttaataaaatgtataaataaaggcaaagaacttattggatggaatgaaaaatatccttgtaaacatcttgataatggaaaaattagaagtgtgggtatggcaattactatgcaaggttctggtatacaaggtcttgataagtcttcagctgaaataaaattgaatgactgtggagattatactcttatgataggttctactgatatgggtacaggaagtgatacgattttagctcaaatggctgctgaggttcttgatacaagcattgaaaatataacagttatatcagctgatactgacttagttccatatgacccaggttcatatgcttcaagtactacttatgtaacaggtatggcagtagttaaggcagctcaagacttaagagaaaaaataatttctgctggagcaactaaactaggtgttgagaaggatgaagtagaatttgatggtataaaattaactagtaaaaaaggtagcactttattattcgatatagcagttgattctacaattggtccagatactaatcaattaataggtcttgcttctcatggtagcccagtatctcctcctccttttatagcaggttttgcagaaactgaaattgacacagaaactggaaaagttgatttagtaaattatgtagctgtagtagattgtggaacggttataaataaaaatctagctaagatacaagttgaaggtggaattgttcaagggattggaatggcattatttgaagaagttagatacacagaaaaaggaagcatggacacaaatacatttatgcaatacaagattccagctagatgtgatattggaaatgttaaagtagattttgttgaaacttatgaaccaactggaccatttggtgctaaatctgttggagaagttgttataaatacacctttaccagcaatacaagaagctgtgtttaatggaattggtgtaagaataaatacactccctattacacctgaaaaagtttttatggaaatgaataaa

SEQ ID NO: 16854 - DNA, 258 bp, Clostridium difficile
atggaaaaagtagttagtatcaaaaatgcaagtggattacatgctagaccagcaggaatgtttgttaagaaggcagctgaatttaaatcaacagtagaggttgtagcaaaagacaaaactgtaaatgcaaaatcaataatgggaataatgagtttaggtttagctcaaggagaagaattaaagttagttgtaaatggagaagatgaagaagtagctttagctgcaatggttgaattagttgaaagtggatttggagaa

SEQ ID NO: 16855 - DNA, 1710 bp, Clostridium difficile
atggcttacaaaggaataggtgcttctcctggtgttgctttagggaaagcgttagtagttgaacatagtgaattagtaattgaaaaaaaatctatagataatgttgaagctgaaattgctaaattagaagatgcagttgcagtttctaaagaagaattagtaaaagttaaggaaaaggcttctgaagaattaggagcagaggaagcagaaatatttgaagcacatttattagttttagaagacccagagttaattggttctgcaatagataaaattaaaactgaaagtgtaaatgcagagtatgctttaaatgaaataaaagagatgtttgttagcatgtttgagtctatggacaatgagtacatgaaagaaagagcggcagatataaaagatgttacaaatagaatacttagacatatattaggaattaaagttgttgatttatctgctttaagcgaagaagttgtattaatagcacatgatttaactccatcagacacagcaactatgaataaaaaaatggttttaggatttttaactgatataggtggaagaacttctcatactgctatcatgtctagaactttagaaatagctgcaatcgttggattaaatgatataacttcaaaagttaaggatggagattttgtggttttcaatggagacacaggtgaagtaatcgtgaatcctgatgaagagactataaataaatatactgaattaaaagctaagtatgaagatgagagaaaagcattacagctattaaaaggaaaaccatctgtaactttagatggaaaacatgtggaattagctggtaacataggaacacctaacgatatagaaggtctaataaagaatgatgctgaaggtgttggtctttatagaacagaatttttatacatggatagagattctttcccaacagaagaaatacaatatgaagcatacaaagctgtattagaaggaatggatggaaagcctatagttataagaacattggatataggtggagataaagaattaagttatttaagtatggaacctgagatgaatccattcttaggttacagagcaataagactttgcctagatagaaaagatatatttaagactcaattgagagctttatatagagctagtgttcatggaagattaagaatcatgttcccaatgatttcatctttagaagagttgttacaagctaaagaagttgtaaaagaagttttagcagaacttgattctgaaggtgtggcttatgctaaagatgtagaaattggtatgatgatagaagttccatctgctgctgtgatatctgatgtattggctaaacacgtagatttcttctctataggaactaatgatttaattcaatacacttgtgcagttgatagaatgaatcaaaagataagttatctttacaatcaatttaatccagctgttttaagacttataaagactgttatagacaatgcacataaagaaggaaaatgggcaggtatgtgtggagaatctgctggagaccaaaaaatgataccaatacttttaggtatgggattagacgagttctctatgtctccaatatcaatacttcctgctagaaagttaataacttcagttaaagagtcagatatgaaaaaattagctgatgatgtacttaatatgggtactgctgaagaaataaaaagctatatagaaaagacttttaatata

SEQ ID NO: 16856 - DNA, 1461 bp, Clostridium difficile
ttggttataaaattcaaccaaaaagtaagaagaacattatcagtagcaattctatttatggtattaataataggttgctttatagaaaaggatgacagtttagaaacatacaaagaaaaaactaattcaaaaataaatcagtataatatggatgttatatttgatgatgagactaagaggttaatgtgcaatcagaatgttgactacataaataatacaaaatcaaacatagataaaatatatttccatatatatccgaatgctttttccaagaaagattttgctccttttgaaaaaagtgaaatgacaagggcttatcctaatggatttaacgaaggatatatagatataaagaatatattaaataataatagtaaaatggagtataaaattaaaggagacaaaaatgacatattagaaatagaattagggaaagagttaaaaccaaatgaaagaatgtcattagatataaaatataacgtaaaaataccaaattcaattggaagatttggatatggagaaaatactataaatgttactaattggtttcctatagcttgtgtaaatgatgaaaggggatggaatttaaagagttatgaaactattggtgacccattttatagtgagactagtgattttcatgtgaaactattgattccaaataaatataaaattgctcatacaggaaaacttattgatgataaacatgataataagaaaatgctatatgaaatagaagctgaaaacgttagagattttgcatttatactaagtagcaaatttgatgtaaacaaagtagattcaaagggagtagctatcaatacatataatttaaataaaaagctttctaaaaaagcaactgaagtggcaaaagattcaataaatatatttagtgaattatttggaaagtatccttacaaagaattttctgttgtagcaagtgacttttttataggggggatggaatatcctatgcttgttatgatagaccaaagtttatataatgaaaaaaatgaatttttactagaatatgttattgcccatgagacagcccatcaatggtggtattctgctgttggaaatgatgaaataagtgaaccctggttagatgaagcacttactgaatattctacaatagtttattttgaacaaaagtatggtaaagatatggcaaacaagcttataaaaactatggagatacagacaaaaagttatttgagcgaaaatatatttaagccagcaaatgagtataaaaattctactgaatacagcttgaatgtttatacaaaaggcgcaatagcatttaatgaaataagaaaagaagttggagataaagtattctttgagactttaaatgagtactataataaatataagcataaaaatgctaatggaagagcttttgtggaactatggaatagtaaaggtgtagatataaataagattataagtgaatgtaag

SEQ ID NO: 16857 - DNA, 423 bp, Clostridium difficile
atgcctactaaagaagctcaagcaatggctaatagcaaaaacttagatttggttcaaatctcgccgaatgcaaatccaccagtatgtaagataatggattatggaaagtttagatatgagcaagcgagaaaagagaaagaagctaagaaaaaacaaaaaactatagttgtaaaagaagtaagacttagaccaggtattgaacaaaatgatttaaatacgaaagctaataatgctataaagttccttaaaaaaggggataaagtcaaagttgaacttagatttagaggaagagaattaggacataaagacataggtaaagaagttatgcttaagtttttagatataataaaagagtttggagaaccaacaaaagcccctgcatttgagggtaataatatggttgtaattatagatccaaaaaaa

SEQ ID NO: 16858 - DNA, 1137 bp, Clostridium difficile
atgattaaggagaactttatgtacgcagtaagatacgaattgataaagacttgtaagcagagtggtgcaaggttaggaagattacacactccacatgggattattgaaacaccaatattcatgccagttggaactcaagcaactgtaaaatctatgacaccagaagaattaaaagagattggttcacaaataatacttagtaacacataccatttatatatgagaccaggtcatgaacttataaaaagagctggtggtcttcataagtttatgaattgggataaaccaatacttacagatagtggagggttccaggtatttagtctagggcctttaagaaagataaaagaagaaggtgtagaatttaggtcacacttagatggttcaaaacattttctaactccagaaaaagctatggaaatacaaaatgcattgggttcagacataatgatggcatttgatgagtgtgcaccatacccatcagatagagaatatgtaaaaaattctttagaaagaacaacaagatggttaaaaagatgtaaagatgctcataataataccgacaagcaagctttatttggtataatacaaggtgggatgtataaagacttaagggaacaatcagcaaaagaaataactaatattgatttaccaggatatgctattggtggacttagtgttggagaaccaaaaccacttatgtatgacgtgttagagcatacaactccacttatgccaaaggataaaccaagatacctaatgggagttggtagtccagatgacttagtagaaggtgttataagaggagtagacatgtttgattgtgttctacctactcgtatcgctagaaatggaactgcaatgactagccaaggtaaagtagtagttagaaatgcaacttatgctgaagactttactccacttgaccctgaatgtgattgttatgcttgtaaaaactattcaagagcttatataagacaccttataaaagcaaatgaaatactgggtgcaagattaataactactcataatcttcactttttattaaatttaatgaaacaaataagacaagcgataatggaagatagattacttgattttagaaatgaattttttgcaaaatatggatatgaaata

SEQ ID NO: 16859 - DNA, 1893 bp, Clostridium difficile
atgttaagcaacaaaaagagaagtatggcaatagtaatggcaggtgctacagttatgagtgcagcagcaccaatattcgcagacaatactgtgacagaaaatgttgataaaaattacacagtaagtgcgaaagattctgctaaactaatcgaagaggttagaaaagcattagaagttaagtttgaagatacaaaagcaggagcaaatgtaaatgatagagtttacgatataaaagtagacaatgtaaacttaactaatgcaactcaattacaaaataaaataaactctttaacagaagggcaaagtttaaaagttactattcaagataaagggcatcaagtgttaggtggaaaagtagttgactataaaattgaaaactacaaaactgctcaagaaatagtagatgcagttaatgcttacaatgcaactttagcagaagattctgataacaagttaacagcaactataaaatctacaaatacagttgaagtaaaaagagcaaaagattcagcaaatgttattacattaaatgtaggagaccaacatttagatttctcaaaagtgataacatcagaagaaggtacttttgaaggttatgaaaagcgttatagtgacatagattcaaaagaattacatacggtaacagttaaaaacgcagatttacaagacatatcagcagaagaattatttgatggaattagattaactacattaggaagagaaatagttaataaagttaaaaatggatatgctttaacatttgaaaatgaagcaatccttactcaagaacaagaagatagtgatgataaagataaaccagaaaaatcaagctttgatatagttttaagcaaggcaaatgaaaagccagaaacaataagtgtttcaagtaaaaaccataagttagttagagacttacacaaagtattaactgatgtaaaagatggaaaagaattaaaagtagaagttttatctggtgattcaagatttacaacagcagtagaagttagtaaagagagattcaaagatggagaagcagaagctataattttagttggagaagatgctatagttgatggattagcatcagcaccacttgcctctcaaaaaaatgcaccaatattattatctaaaaaagattcactaccatcagaaatagaagctgaaatattaagagtacttggaagtaatctatcttctaagaaaatatatatagtaggtggagaatctaaagtatcaaaagaaactgaagaaaaactttctaaattaggtgtaagtaaagttgagagagtttctggagaagatagatttgaaacttctttagaaatagcaaaacaattaaaagatacatttaagactgcttttgtagtaggtggaaatggagaagctgatgctatgagtatatcagctagagctgctcaatttggtgctccaataatagttacaggtaacgaattagatgcaaatgctgaaaaattattaaaaggaaaagaattagaaatagtgggtggagaaaattctgtatcaaaagaagttgaagacaaattagttgatatagatttaaataataaagttgaaagattagctggagaaaatagaaaagatactaatgctaaagtaatcaataaatactatgcaggtgcaactaaagcatatgtagcaaaagatggttatgtaggtggaaatggacaattagttgatgcacttacagcagcaccacttgcagctagttcaaaagctccaatagtattaactacagaagaactttctaaatcacaagaagaagtagttgagttaagacttaagaatgctactaagttagtacaaataggtgaaggaatagctaaaaacgctattgaaaaaatagcagaaaaaataaacttatttactaagaac

SEQ ID NO: 16860 - DNA, 1431 bp, Clostridium difficile
atgaaaagtacattgggggtagaaaataatatgaagaatagtaaaaagatattagctataggacttacactatttttagtaatggtaaatactcctatggtaagtgcgttgacatcagttgagcaaataaaagggaatgacagatatgagacagcagcaaaaatagcagataagcaaaactacaatacagcaatactaatcaactcagataatagcttagcagatggtctaagtgcaagtggtttagctggagccttaaatgcgcctattttgatgacaaaacaaaatcagattccaaacacaactatggaaagattaaacaaagcaaagactgtgtatataataggctcagaatcaacaataagtaaaaatgttgagaatcagttactatccaaaaagaaggttgtacaaagaatctttggtgaaaatagatttgatacaagtataaaaatagctgaaaaaattaaagaaattaagccaatagataaagtaattatagccaatggatttacaggagaagcagatgcgataagtgcatcaccagtagctgctagagatggagtacctataatacttacagatggaaatagtgtgggatttgacacgacaggcttaaagagttatgcgcttggttctagtgaaataataagcgacgaattagttaagagcacaaattctattagattgggtggcacagatagatttgaaactaataagatagttatacaagagttttataaaaatagtaaagaattttatctaagtaaaggcttacaattaacagacgctttggctgcctctacaatagcaaaaaatgctcctgtagttttagttgaaaatggcagtaataagagtattttaagtggtgcagacaaattgactgtactaggaggcataaatcagaatgttatcaagcaatgtataaatcaagcttcaccaaatcaacaaggtttatattacaatccaaatgatagagcatttaaagagagaataaagggtaaagtatatgctcttacaaagcagtatagaaaagagaatggagtaagagcgttatctgtagcaagcagattagagggtctagcaaatgattggtctaatttaatggcaaataagaagactttatctcatacgataaatggaaaaaattcatattctacttttttgaaatacttagattggagtgagattaaacctggatatatagcagttcaaggtgaaaatataattaaatataaaattccagataaacctgtatatacaaatagagatgcagatgatataggaaactttatttttaatgagtggaagacaaatccagaagaaggaactaatatgttgcataaagggtatgaaataatgggatttggtatagctataacaggagataagaatctatatgctacacatgaattttatggaagatataaagaa

SEQ ID NO: 16861 - DNA, 2370 bp, Clostridium difficile
ttggacaatagaaaaggaggtacttatatgtcagttatagattcgatacttgacaaagcagatgagcaagaaataaagaaattgaatgttatagtagataaaatagatgcattagaagatagtatgaaaaatctatcatatgaagaactaaaagacatgacagctatatttaaaaatagacttaaaaaaggtgaaaccttagatgatatacttccagaagcatttgctgtagtaagagaagtatcaaaaagaaaattgggaatgcgtcaatatagagttcaattaattggtggaatagtaatacatcaaggaaagatagcagagatgaaaactggtgaaggtaaaactctagttgaagtagcaccagtatatttaaatgcccttacaggtaagggtgtacatgtaatcacagtaaatgattacctggcagaacgtgataaggagcttatgagcccagtttatgaatctcttggaatgacagtaggagtaattatatctaaccaagacccaaatataagaaaacaacaatataaatgtgatataacttatggtacaaatagtgaatttggatttgattatttaagagataatatggtgccagatttatctcataaagtacaaagggaactaaattttgctatagtagatgaagttgactcaatattaatagatgaagccagaactccacttattattgcaggagatggtgatgaagatttaaaactttatgagttagcaaatagctttgtaaaaactgttaaagaagaagactttgagctggacagaaaagataaaactatagcattaacagcaagtggtataagtaaagctgagtcattttttggtataacaaaccttactgatataaagaacatagaattatatcatcatataaatcaagctttaagaggtcataagcttatggaaaaagatgttgactatgttatttcaaatggagaagtaatgatagttgacgaatttacaggaagagtaatggatggtagaagatatacagatggacttcaccaagctatagaagcaaaagaaggtgttgagataaagaatgaatctaaaactatggctactgtgacttatcaaaatttcttcagactatatgaaaaactttctggtatgactggtactgcaaagacagaagaaggggaatttgagtcaatctataaattaaatgttgtccaaataccaactaatagaccagttattagagctgatttacatgataaggtatttaaaacagaagaagaaaagtatagtgctgttgtagaagaaataataaggatacataagactagacagccaatacttgtgggaacagtttctgttgaaaaatctgagaagctgtctaaaatgcttaaaaaacaaggtattaagcatcaagtcttaaatgctaaacaacatgataaagaggcagagataatttctaaagccggtaaattagatgctataacgattgctacaaatatggcaggtagaggaacagatatttctctaggtgcaggagataaagaagaagaacaagaagttaaagatttaggtggactttatgttataggaacagaaagacacgaatcaagaagaattgataatcagcttagagggcgttctggtcgtcaaggagacccaggtacatcaagattctttgtaagtcttgaagatgatgtaataaagctttatggtggaaaaactatagagaaacttatgaagagaacaagttcaaacgaaaatacggctattgaaagtaaagcacttacaagagctatagaaagagcgcaaaaaggtgtagaaggtaaaaattttgaaataagaaaaaatgttcttaaatatgatgatactattaatgagcaaagaaaagttatatataatgaaagaaataaagtgttaaatgatgaagatatacaagaagatattcaaaaaatggttaaagacatcatacaagaagcaggagaaacttatttaattggaagaaaaagagattattatggatattttaaacatttatatagtacatttatgccagcagatacattactaatacctggtgtagataaaaaaagtgtccaagagataattgatagcacatatgaaatttcaaaaagagtttatgacttgaaaaagatgatgcttggtattgataaggttgcagagttagaaaaaacagtacttttaaaagtggttgatcaatactggatagatcatatagatgctatggaacagttaaaacagtatataggtcttaaatcttatgctcaaaaagacccatttaaggaatatgctttagaaggatatgacatgtttgaagctttaaataaaaatataagggaagcaacagtgcaatacttatataaatttaac

SEQ ID NO: 16862 - DNA, 1425 bp, Clostridium difficile
atgacaaactcttttaaaaaagatgataatagaaaaaaaatcacagttttatttgtagtcattgccatgacttttatggcaacattagattctagtattataaatgttgctctcccagttcttgcaagcaagctaaatgtatctctagcatctattgaatgggtaatagcaagttactcaattattatttgttcaacactattattttttggaagacttggagatattattggtaaatcaagagtatttcaagtaggtactattctctttacatcagcttcattactatgtggattaagtaattctttaactttacttatagtttgccgctttattcaaggaataggcgcttctgcctacatggcaaacaatcatggaattatcacagaactatttccaaaagaaagcagaggaaaagccctagggattttagttactgcagttgctattggaaatatggttggaccatctgtgggaggatttattttgtcaatatttgattggaatgttatattttttataaatattccaatcggtcttattgtaatctttttaaatacaaaatttcttcctaatagtaaaaaatcttcagaaaatatggataaaactggtgctatacttcaatttttaggaacaacattattttttagtgctctaattagtgctcaacaaacaggattactaaatccatatatattaattgcactattattatcaattatttttattatattatttttgatattagaaaaaaaacatcctcaaccgcttcttgaccttgaaatttttagaaattttaaattttcattgaatttaatttgtgctcttacatcattcatttgtattgcatcatcaagtattttaattccattttatttacaaagtactatgaaacttccccctattcaagcaggtttatttatgatactatcacctttgattttagccattttttcacctatatttgggaatatatcagataaaattaagtcagaaaaaattattttaattggtcttctcgttatgagttttggattctttctaatgtcaagattgaaagaaagttctgcccttattttatttgtaatttatatattgataatatcaataggacaagctatatttcaacctgctaacaatgctttgataatgtcaagctgttctagaagtaagctaggagttgtaggaagcataaattcccttgtaagaaatttaggacaagttataggtattactatttctacaacacttttatataattttatgagtattaaagctggatatagggtcaatgattatgtgattaataatgataaaatatttgtatttggaatgagaaatgtttatattattgttacacttgtttgcttaataggtgcaatattaattggcttttatttatttaaatataataaaaatgaacaa

SEQ ID NO: 16863 - DNA, 2592 bp, Clostridium difficile
atggacgtagaaaaaatgactttaagagttcaaaaaagtttaaatgaggcttataacgaagcagtaaaaaatcataaccaacaagtagatgtaattcatcttttctcagcacttattaatcaagaggatggattgataccaaatataatcgaaaaaatgaatatatcaattgattctttgagaaatactgtaaactttgaaattgataagcttccaaaggtatatggagaaggtgctgactcacaaggagtatcagctactagaaaaataaatgaggtgcttataaaggcagagagtatttctaaagaatttaaagattcatatataagtgtagagcatgttatgcttgcaatgatggaaacagaatcaaaatcagctgttggtaaaatattaaaacaatataatataaataagaatgactttttaaatattttatcacaagtgagaggtagtcaaagagtagaaacacaagacccagaaggcacatatgatgcacttgctagatatggaacaaacttagtagatttagccaagaaaaataaattagaccctgtaattgggagagatgaagaaataagaaggattataagaattttatcaagaagaacaaaaaataatcctgtattgattggtgagccaggtgtaggtaaaactgcaattgtagaagggttagcagagagaatagtaagaggagacgtcccagaaggtttaaaagataagattgtattctcacttgatatgggagctttaattgctggtgcaaaatatagaggtgaatttgaagaaagattaaaggcagttttaaaagaagttcaaagttctgatggaaaaattatactgtttatagatgagattcatactattgttggagctggtaaaacagaaggttcaatggatgcaggtaatcttattaaacctatgcttgcaagaggtgaattgaactgtattggtgcaactacttttgatgaatatagaaagtatatagaaaaagataaggctcttgaaagacgttttcagcctgtaattgcagaagaacctactgttgaagatacaatatctatacttagaggtttaaaagaaagatttgagatacatcatggagtaagaatacatgataatgctattgtagcagcagcaaaactttctcatagatatatacaagatagatttttaccagataaagcaattgatttaattgatgaagctggagctatgattcgtagtgaaatagattcattgccaacagaattagatgttgttagaagaaagttatttacattagaaactgaaagagaagcattacttaaagaaaatgatgataaaagtaaatcaagattggatgatattcaaaaagaaatagcagagttaaaatctaaaaatgatgaaatgacagcaaaatatgaaaaagaaaagagtcaaatattagatattaaaaacttaaaggctcaattagacgaagctaaaggtaaagctgaaaagtatgaaagagaatatgatttcaacaaagcagcagaggttaaatatggggaaatacctaagttagaagaacaaataaagcagtacgaagaaaatatgaatgatggttctgaaaattctcttttaaaagaagaagttactgaagaagaaatatctagcattgtatcaaagtggacaggtataccagtaactaaactagttgaaggagaaagagaaaaattacttaaactagaagatgaacttcataaaagagttattggacaagatgaagcagttacagcagtttcaaatgcagtaatacgtgcaagagcaggattaaaagatgaaagaaaaccaattggttcatttattttcttaggccctacaggtgttggtaaaactgaacttgcaaaaactcttgctagaaatttattcgatagtgaagataatataataagaatagatatgtctgaatacatggaaaaacatgctgtatcaagactagttggacctcctccagggtacgtgggatatgaagagggtggtcaacttacagaagcagttagacgtgctccttattctgtaatactatttgatgagatagaaaaagcacatgaggatgtatttaacatgttcttacagatattagatgatggtagacttactgataataaaggtaagacagtagactttaaaaatactcttataataatgacttctaatataggaagtaattatctattagaagcaggaggaaatataacagagactactaacaatttagtaatgaatgaaatgaagcatagatttaaacctgagtttttaaacagagtagatgatattataatgtttaagcctttagaccaagaaaatatcaagaaaattatagatatatttatgaaagatttaaaaaatagattaaaagaaaaagatattactattgaagttacaaattcagcaaaagatgttatggtgagagaaggatatgaccctgtatatggagcaagacctcttaagagatatataggaaatacattagaaactataattgcaaagaaacttattgctggagatgtgtataatggatgtactatagttatagatggaaaagatgaaaatattgaagttttagttaaa

SEQ ID NO: 16864 - DNA, 372 bp, Clostridium difficile
ttgaatatagttattagtaattcgagtgggaagccaatatatgaacagattactacacaaattaaaagtatgattataagtggagagttaccagaaggctcagctcttccaagtatgagactattggcaaaggaacttagaataagtgtaattactacaaaacgagcatatagcgatttagaacgagacggatttattgagacagttactggtaaaggcagttttgtatctagtaaaaacatggattttgtcaaagaagaacaatttcgtttaattgaagaatacctacaaaaagcagttgatacagcaaaaagtagtgatattacatatgacgaattaaaagatattttatttttattatataaaggagaa

SEQ ID NO: 16865 - DNA, 1185 bp, Clostridium difficile
atgaataacgacaatacaatttcaaaatggaatgaatattttatagatacatataaccaacccaattttgtcatagattatggtgaaggaagttgtttttttgatactaatggcaataaatacatagattttacaagtggatatggagtatcttctcttgggtatagtaatagtaatttaaagaatgctctaaaagagcaagtagataaattattacatacttcaaatttatattttaatgagccagtgttgtgttcaggagagaaaataattaattcaagtggaatggctaaagtatatttttgtaattctggaacagaagcaaatgaaacagcattcaaaatagcaagaaagtatagtagtgacaaatatggtaatggtagaggaactatcataagtttaaaagactcttttcatggtagaacaatgatgtctttaatggcaactggtatggacaaataccataagtatttttatcctcttcccgaaggttttaaatatgtagaaagaaataatattgaagatttaaaaaataatcttgattccacagtttgtgcaataattcttgaagcgattcaaggcgaaggtggagttaatgttcttgaaaaagattatgttttggaaatagtaaaaatatgtcaagaaaaggatattgtagtgatttttgatgaagtccaatgcggtataggaagaactggtaaactttttggctatgaatattttgatgtaaaaccagatatagttaccgtagcaaaagggttgggagcaggaataccagtaggaggagtattggtaaataaaaaactttcaaaagtactaggaaaaggagaccaaggtacaacttttggaggtaatttattagctatggtggcagcttcagttgtattagatgagatatctaaagatggtttttataatgaagtattagaaaaaggaaattatataagaaaatctattgaaagttttaataacaaagttgtattaaagacaaaaggtattggtctaatgataggaattgaaactaatattgaatctagtattatagaagagaaagctagaaaaaaaggattgcttattttgactgctggaaaaaatgtattgagatttttaccaccattaacaatcagttataaggaaatagatgaggctcttgaaatcctaaaagatatattactagaaattaac

SEQ ID NO: 16866 - DNA, 177 bp, Clostridium difficile
atgtcagaagtaagagttagagagaatgaaacattagacagcgctttaagaagattcaagcgtcaatgtgcaatgtctggcatcatgtcagaagtgagaaaaagagagcactatgataagccaagcgttaagcgtaagaaaaaagctgaagcagcaagaagaaaaaacgctaagaaa

SEQ ID NO: 16867 - DNA, 198 bp, Clostridium difficile
atgaataatggaatagtgaaatggtttaataatgaaaaaggattcggttttatatcaatggaaggtagagatgatgtgtttgctcatttctcagctatacaaacttcaggatttaaatcattagaagaaggtcaacaagtaagctttgatatagttaaaggtgctagaggtcctcaagcagaaaatataactatatta

SEQ ID NO: 16868 - DNA, 546 bp, Clostridium difficile
atgataaggagaaaagttatgagtgttaaaaaagaaatatttgattggattaagtcaatagctatggctattgtacttgcatttgtaattctacaatttataataccttctattgtaagtggagaatcaatgtatcctactttagatgataaagattatctgattttaaataggatatcatacaaggttggtaaacctgaaaaaggcgatattgtagtttttaaaaccaatttagttgatggagaaacaggaaagaaaaaagacttaataaaaagagttatagctactgaaggtgacagaataaaaatatcaaattctaaagtgtatgtaaatggaaaattattaaatgaaccatatatacacaataactatacttctggagatatagatactgttgttccaaaaggtaaactatttgcaatgggagataatagagaaaatagtaatgatagtagattccctgatgtaggtatggttgatgaagatgaagttcttggtaaggttatggtgagactattacctcttgataatattgggaaagtagac

SEQ ID NO: 16869 - DNA, 1443 bp, Clostridium difficile
atgatagataataaatatactacttactcaaacccacttacagacagatattgtagcaaggacatgagttatatattttctccacaatttaaattctctacatggagaaggttatgggttgcacttgcagaaggtgaacatgagttaggaatcaatataactgaagaacaattagatgagctaagagctaatatagataatataaattttgatgaagctagaaaaatagaaaaagaagtaagacatgatgtaatgtctcacgtaaaagcttatggtttacaatgtgaaaaagccaaaggaataatacatttaggagcaacatctgcatatgttggagataatacagatgttatacaaatgaatgaagctttaaaacttctaagagtaaagcttgtaaatttaataaacaatttaaaagaatttgcacttaagtacaaagatatgccagctcttggatttacacacttccaagctgctcaacttacaacagtaggaaaaagagcttgtttatgggctcaagatttaattcttgatttggaagatttaaactatagaatagacaacatgaagttaagaggagttaaaggtactactggtactcaagcaagttttttaagcttatttgaaggagaccacgaaaaagtaaaagagttagataagaaaatttgtaaaaagatgggataccattcttcctatgcagtaagtggacagacatatactagaaagttagattatcaagtaataagcatactatcagggatagctcaaagtatgcataagatgactaatgatataagacttttacaaagtttaaaagaattagaagagccatttgaaaaaaatcaaataggttcatcagcaatggcttataagaggaatccaatgagaagtgagagaatagcatctttatctaagtatataatctctgaatctataagccctgcaatggtacaagccactcaatggttagagagaacattagatgactcagccaataagagattggcaatacctcaagcatttatggcagcagatgctatacttgaaatagggataaatgtaactgatggtttagtagtatatgaaaatatgataaatagacgtgtaaatgaggaacttccttttatggctacagaaacaatacttatggaagctgtaaaaagaggtggagatagacaggaattacatgaaataataagagaatattctatgaaagctgcctatagagtaaagcatgaaggcaaggataataacttaattgaacttataatgaatgatgattcatttaaaatgagcaaggaagaaatactatctataatggacccaaaaaactttataggtagagctccagaacaagttgtagaatttgtaaatgaagttgtagaacctgctataaaagattataaggaagacttaggaaaagtagatgtagacctaagagta

SEQ ID NO: 16870 - DNA, 2418 bp, Clostridium difficile
gtgatattaatggccacgaaaaagaagaaaaaaaagaaggtaaataccttaagttttaatgcagaatatcataatttaataacaatatttataggtgtatttttattatatagtttaaattctaattctatgggatggatacctgtgttaatgcaaaatctttttaagggactatttggagggctttcaatagcaataccatttatagtaattataacaggacttttaggattttttgatggaaatgaatatatatataggctaagaaagactaaactatactacataattattttatttatatttgtattttatggattattaaatgcaggaactcttcctgtagatagcccactaaaaggtaacatgtttgatgatgttatgaaattgggtgtaagtggacaaggtagtggtttgatagcaacaactattgcgtattatatgagtaaaatatttggtatagcaggtggatggttaataagtatcttcgcacttatactttctgtaatgtttatatttaatatttctataaaagatttggtgtcaaatgcaaaatcaaaatctaaagcatctaaagacagcaatttaacgtttaaagataaaattgcaaatatgaaaaaatctgcaatagatatgatgactgatgaagtagatgatactactataaataaaaaaccaggtttctttaaagggttaatgtcaaaaggtcttaataatgatgatgaagaagatgaatattttgaagaagaaaatagtgatggtgtagatgataaaactataaaaatagttggatttaataaggcagaagatgagtatttagaaatattagaaggaactcaaagtatgccagagttagatgttttaaaagaattacaaaaagctaccaatgaaaatccagttgtagatactaaaccagaaaaaaaagttgatatagctaaacctaatttaaatatagaaaaaactcaacctatgagtattgtagcagagccagttaatgaggattattcaaactataaaaagcctagcattgagcttttaaataaagtaaataagaagtctgatgaaaatggtaaaaagaaagtgttgaaaaatgcttctcttttagaaaagacactatcagattttggagtggaagcaaaaattaatcaagttacagttggacctactataacaagatatgaaatacaaccaagtccaggagtcaaggtaagtaaaattgtaaatttaactgatgatatagctttaagtttagcagctaaaagtataagaattgaagccccaattcctggtaaaagtgcaattggaatagaagttccaaatgaagaagctcaaatggttggtgtgagagaagttctagaaagtgaagaatttaataattttaactctcctcttgcaatgggacttggaaaagacgtagcaggaaaaattataattggagatataggtaagatgccacacttactaatagctggttctacaggttcaggaaagagtgtgtgtgtaaatacattaataagtagtattttatataaggcaaatcctgatgaagtaaaattactattaatagacccaaaagtagttgaacttgcaaattataatggaataccacatctattgataccagtagttactgaccctaaaaaagctgcaaatgctttaaattgggcagttacagagatgaatagaaggtacaaattatttgcagatgctcaagtaaaagatgtaacaagttataatgagaaagcggaagaaaaacttcctaaaatagtaataataatagatgagttagcagatttaatgatggcaagtgcaaatgatgtagaagattatatttgtagattagctcaaatggcaagagctgctggaatgcacttgattgtagcaactcaaagaccatctgttgacgttataacaggggtaataaaggctaatataccatctagaatagcatttgcagtatcatctcaaactgattcaagaacaatccttgatatgggtggtgcagagaagcttctaggtaaaggtgatatgttattctatccacttggtgcagcaaaaccagttagacttcaaggggcattcatatcagagagtgagtcggaaaaagtaatcgattttgtaaaaagtcaggttaaagatggaataaaatatgaagaagatataattgaaactatatctaaggttaatacttcaaagggtagtgatgaggatgagtttttgagtgaagcgatagaatttgtcgtggaaagtggtcaagcatctgcctctatgctacagagaagatttaaaataggattcaatagagcagctagacttatagattctatggaagaaagaggaataattggagcaagtgagggaagtaaaccgagaaaggtattaataagcaaacaggatttgcagaatttagaaggtgaa

SEQ ID NO: 16871 - DNA, 1332 bp, Clostridium difficile
atgttaaaaatagcattggaatcattaggatgctcaaaaaatttagtagatgcagaaataatgatgggaattttaaataacaaaggctataaattaattggagattttgaagaagctgatgtaattatagtaaatacatgtgggtttatagagtcagctaaacaagaatctatagatacgataataaactttgcagagttaaaaaaaactggcaatttaaagttgttgatagtaacagggtgtctagcccaaagatattctgaagaattaaaaactgaaattcctgaaatagatgctatagtaggaacaggaagctatcaaaatatagataaaatacttaaagaattaagtgaaatacatcaaattgtaagccttaatgatatagagtttgtatttaatgaagatttaccaagatatatatctacacctagctatatggcctatttaaaaattggagaaggatgttccaataattgtacttattgtataataccaaaactaagaggtaaatatagaagtagaaaatttgaagatataattaaagaagctaagaaattagctgaatctggagtaaaagaacttgtggttatagcacaggatacgacaaagtatggttttgatttatatggaaaagaaagattatcagaacttttagaagaacttgcaaaaatagatggatttaagtggataagggttatgtattcatatccagaatctataacagaggaattgatacaagttataaagaaatatgataatatatgtagttactttgatatgccaatacagcatgcaagtaacaatattttaaaattaatgaatagaaaaactactaaagaagatatattaaataaaatcaatctgataagaagtaatataccagatgctatacttagaactacaataatagtagggtttcctggtgaaacagaagatgacttcaaacaacttgtggactttgttgaagaggttaaatttgatagacttggtgcatttgcatattcaagagaagaagatacaccagcagatagattgccaaaccatatagatgaagaagtaaaaatacaaagaagagatactttaatgatgattcaacaaaaaatatctgaagaacttaatgacaaaaagataggaaaaacttatgaggtgttaatagaagaacagatagaagataatgtatatacaggaagaacacaaggtgatgcggaagaaattgacagtatagtgtatgtaaaaagtgtagacaatcttgaagtaggagaatttgtaagtgttcaaataaatgatgcaatggaatacgatttaatgggagatgttttatatgaacttgcc

SEQ ID NO: 16872 - DNA, 549 bp, Clostridium difficile
atgttttatatgaacttgcctaacaagttaactttgtttagaatatttttaataccagtatttgttttaattatgttgctcaatgtaccaaataaatttttaatagcttgtattatttgtataatagcttcaattactgatgctttagatggaaaaatagctagaaaatacaatctagtcactgactttggaaaatttatggacccattagcagataagctattggttatttcagcacttacatgtatgatagaagaccatcttgtaagtagttggatggtaattataatagtggctagagagcttacagttagcatattaagagctatagctgctgctgatggaaaagtaattgctgctggaaacagtggaaaacttaaaacgataactcaaatggtatctatagtgtttttattgttaggtgctcagtttgaaaatgtattgatattaaatattggtgaaattctcattcttatagctacactacttacattatattctggatgggaatatctatataaaaataaagagctttttatgtcttctaag

SEQ ID NO: 16873 - DNA, 1062 bp, Clostridium difficile
atgaagggatggtatagagatgagtgtgatcaagaaaaattaaaagcgttgaatgaagctttaggtaaaattgaaaaagattttggtaaaggttcagtaatgaaattgggagaagcaacatctatgtctatagatgttatatcaacaggagcgattggtttagacatagctattggtataggaggtctacctagagggagaatagttgaagtatatggtccagaatcttctggtaagactactgttgcgcttagttgtgtagcatcagctcaaaaagatggaggaatagctgcatttatagatgcagaacatgcacttgacccagtatatgcaaaagctttgggtgtggatgttgataacctaataatatctcaaccagatacaggtgaacaggctttagagatagcagaggcattgataagaagtggagcgatagatataatagtaatagactcagtagcagcattagttccaaaggctgaaatagatggagatatgggtgattctcatgtaggtttacaagctagacttatgtcacaagcacttagaaagttaactggttcaattaaaaaatcaaattgtgttgctatatttataaaccagttaagagagaaagtaggaataatgtttggaaacccagaaactactactggaggacgtgcactaaaattctattcatcagttagattggatgttagaaaaatagatacaataaaacaaggtgataaagttataggtagtagaactagagttaaagttgttaaaaacaaagtagcaccaccatttaagcaagctgaatttgatataatgtatggagaagggatttcaaaaattggagaccttttagatatagctgctgatgtagatatagttaaaaaatcaggttcatggtatagttacaatgatactaaacttggacaaggaagagaaaatgttaaaaaattcttggaagataatttagatttaactactgaaatagatgagaaagttagagcattttacaatttaaatgaagaacatgaagaatcaggtacttcagtatcaaaagaaattgtagaagaa

SEQ ID NO: 16874 - DNA, 1560 bp, Clostridium difficile
ttgggattattaacgaaggaggtggatgtcatagatagtgtagtaatgattgtaataggtgcagctgttggtattatagctggatattttgttagaaaaaatatatctgaagcaaaaattggacaagctgaaaacttggccaaagaaataatagataaagcacaccacgactcagaaacagtacaaaaagaaaaattactagaagctaaagaagagatccataagtggagaacagaagctgaaagagaaaacagagaaagaagaacagaagtacaaaagtatgaaaaaagagtagtacaaaaagaagaagtcttagatagaaaattacaaaatttagaatctaaagaagtaaacctaagtgaaaaattaaaggtagtggaaaagaaagaagaagaagttgaagtaataaaaactcaacagttagaaaaattagaaagtatatcaggaattacttctgataaggccaaagaaatcatcttaaccaatgcggagagagatgtaagacgtgaaatgtctataatgataaaagagatagaaagtcaagctaaagaagaagctgataagaaatcaagagaaattataggatatgcaattcaaaaatgtgcagcagatcacgtagccgaaactactgtaacagtagtaagcttgcctaatgatgaaatgaaaggtagaataataggtagggaaggtagaaatataaggactttagaaaccttaacaggtatagaccttataatagatgacactccagaagccgtaattttatcaggatttgatccaataagaagagaaattgcaagaattgctctagaaaaattaatagcagatggaagaatacatccagctagaattgaagaaatggttgaaaaggcgagaaaagaagttgacaatattataaaagaatatggtgaacaagctgcatttgaaactagtgtacatgggattcatccggaattaataagattattaggtagacttaactatagaactagttatggacaaaatgtacttaaacattctatagaagttgctcatatagctggtataatggctgctgaaataggagcagatattagattggctaagagggcaggtttattacatgatataggtaaggctgtagaccatgaaatggaaggtacacatgttgaaataggtatggatttacttagacgttataaagagtctaaagaagttatacatgccatgagtactcatcatggagattacgagcctcaaacagtagaggctgtattagttacagcagcagatgcaatatcagctgctagacctggtgcgagaagagaaactttagaagcatatataaagagacttgaaaaattagaagaaatagctaattcatatgaaggtgtagaaaaatcatttgctatacaagctggtagagaaataagaataatggtaaaaccagaagctataaatgatgaagaaatacatctattggctagagatatgactaagaaaatagaggatgaacttgaatatcctggacaaataaaagtaagcataataagagaaacaagagctatagagtatgcgaag

SEQ ID NO: 16875 - DNA, 939 bp, Clostridium difficile
ttgaccaatttaaaaaaagaattaaattggcttaaagaacctgataaattttcactacaaaacgccttaaaagatttagataatgcatataaaaaattctttaaagaaaaggcaggatttcctaaatttaaatcaaagaaaattaatagattttcatataaaactaactttacaaatggaaacattatgtattgtggtcaacatataaaactacctaaacttggtatggttaaggtaagggataaacaagtacctaaagggagaatacttaatgctactatatctaaagaaccaagtggtagatattatgtatcattatgctgtactgatgtagatattgaagtatttgaaaatactaataatcatataggtttagatttaggaattaaagaattttgtatctcaagttgtggagactttatagaaaatcctaagtatcttaagaagtcattaaacaagcttgctaaattacaaagagaattatcgagaaaaacaatcggtagtttaaatagaaataaagcaagattaaaagttgcaggacttcaagaacatatagctaatcaaagaaatgattttctacaaaaactatctactaaattaataaaagagaatgatattatttgcatagaagatttacaagtaaagaatatgattagaaatcgtaaactatctcgcttaatttcagatgtatcatggtcagaatttattcgtcaattagaatacaaggctaattggtatggtagacaaattgtaaaggtaggtaaattctttgcaagttcacaaatatgcaataaatgtgggtataaaaacgaggaaattaaggacttaaatataagagaatggatttgtcctagttgtaatgaaactcacgatagagatataaatgcaagtataaatatattaaaagaaggattaagactaataacgattcaaaataaa

SEQ ID NO: 16876 - DNA, 903 bp, Clostridium difficile
atgaataagattataagtatattgaaacccacaggtatgacatctcatgatgttgtaagtagagtgagaaagattttaaatataaaaaaagttggtcatacaggtactcttgacccagatgcttcaggtgttttaccaatctgtatagggaaagctacaaaagtatgtgaagttattttaaacaaagataaatcgtatatatgtgagcttactttaggtataagtacagatacttatgatgcttcaggtgaaattttaaaaaaagttgatgattttaaatttagtaatgaagacatagaaagagcttttgacacacaaagaggagagataaatcaacttcctccaatttattcagctttaaaggtaaatggaaagagaatgtgtgatttagtaagaagtggtagacaatctgaaattactttaaaaacaagaagagtaaatataaaagacataaaaatactaagtataaaaggtaataaagtaatgttttatgttgagtgttctaaagggacttatgtgagaagcatttgccatgatataggagaatatctaggttgtggagctcatatgtcgtttttgaatagaacatcttctggtaaatttgacttagataattcaataacattagaagaattagaattattttatgaaaataaaactttagacaaatacttatatgatatagattatgtccttgattcgtttaattatgttgtattaaaccctaatgctataaaatattatagtaatggtggctcaatagatgataaaaggtttttaaaaaataatttcgataaagatgatgaatttgtaagagtatacagtacagataatttcttaggattaggaaaattatcaaaacacaataatacaataagtgttaaaagtgataagatgttcata

SEQ ID NO: 16877 - DNA, 927 bp, Clostridium difficile
atggtgattataaaatctataaaagaaatagcaaacataaaagaaagtgtcattaccataggaaattttgatggtgtacacaaaggacatcaagttcttataggaaaaacagttgaacatgcaaaaaaagaaaatatacagagtattgtatttacatttgcaaatcatcctgtaaattactttagaccaaactcaacaaaaaatattataagcaatgatgataaaataaaattattagaagatttgggaatagatatagttgtaatcataccatttgatgagtatatgactaaaatacctgcaaaggatttcgtagatgagatactagtaaaaaaattaaaagctaaaaagatagtaattggacatgactttacatttgcaagggcaaaagaaggcaatgttaatctattaaaaagcttagaacatgaatttggttttgaggtagaagtaataaaacccatcaaaatcaatgatgtaagagtgagtagtacttatattagaagtttagtatcccagggtgatatggctaatgtcaaggaatatttgggtagaaattacaagttagaaggttgtgttatacattctaaacaccttggaagaactataggattcccaacggcaaatattgaccttaagaataatatgctcgttccaaagagaggtatttatgcttctattgtacatattggagatgagacttattttggtgctacaaatgtaggctataacccaacagttaatggaaaaactttgtctattgaaacaaatattttagagtttgatagagatatttatggggaaaatataattgttgaatttttggaaagaataagagatgaaagaaagtttaattcaatagatgacttaaaaaatcaattgtataatgatacaaattatgtgtatgaaaactatgtttgcaaaaacaag

SEQ ID NO: 16878 - DNA, 255 bp, Clostridium difficile
atgataaacaaatcagaaataataaaagaatatggaagagctgaaggggatactggttctccagaagtacaaatagctttattaacagctagaataaacgagttaaatggacatttaaaaactcataagaaagaccaccattcaagaagaggactattaaaaatggttggtagaagaagaaacttattagcttacttaaaggaaaaagatcttgaaggatatagagcattaatagctaaattaggattaagaaag

SEQ ID NO: 16879 - DNA, 2109 bp, Clostridium difficile
atgtttgaacataaaatatttaaaatggattttgcaggaagagaactttctgtagaaataggaaagatttgtgaaatggctagtggtagttgtatagttcgatacagtgatagtatggtaatggtaaatacaactaaatcagccaaacctagagacggaatagacttttttcctttaagtgtggattatgaagaaaaattatactctgtaggtaagatacctggaggttttttaaagagagaaggcaagccttcagaaaaagctatacttacatcaagattgatagatagaccaataagacctttattcccaaaaggatttagaaatgatgttcaggtagttgcaacagttctatcagtagaccaagattgtacaccagatatagtagcaatgataggttcttcaatagccctttctatatcagacataccatttaatggaccaacaggttcagtatgtgttggccttgtagatggtgcatttgttgtaaatccaaacgcagagcaaagagaaaaaagttcaatgcatctagttgtttcaggtacaaaggaagcaataatgatggttgaagccggagctgatgaagttccagacgaggtaatgcttgatgctattttatttgctcaccaagaaataaaaaaaatagttgagtttatagaaggtatagttgcagaagttggaaaagaaaaaatgcctgttgaattataccatgcaggagaagaaataactcaattggttcgcgaatttgcaactgataagatgaaaaaagcagttcagacttttgaaaagttagagagaatggaaaatatggatagagttaaagaagaaactttagctcactttgaagaaactttagaagattttgaagattttgttggagatatagaagaagtattacaagatataataaaagaagaagtaagaaaacttatagtacatgaaaatgtaagaccagataatagaaaacttgaagaaataagacctatatggtgtgaaactggcatgatacctagagctcatggttcagccatatttactagaggacaaactcaagtacttaatgttgctactttaggtgctttaggagatgttcaaaaactagatgggttagatgaagaagaaaacaagagatatatgcatcattataatttccctgcatatagtgttggagaagctagaccatcaagaggaccaggaagaagagaaataggacatggtgctttagcagaaagagctttattaccagtaataccatctcaagaagaatttccttatgctattagattagtttctgaagtattaagttcaaatggttctacatctcaagcaagtgtatgtggctcaacattatctttacttgatgcaggtgtacctataaaagatatggttgcaggtatagcaatgggacttataaagcatgatggtaaggttgcagtgctttcagatatacaaggtatggaagaccatttaggcgatatggactttaaagtagctggaacagagtatggtataacagcaatacaaatggatataaaaattgatggtatagataaagaaattctacaacgtgctttaaaacaagctaaagagggtagaatccatatactaggagagatgagaaaaactatatctcagccaaaaccagaactttcaccatatgcacctaagattgttaaaatgcaaataaatcctgacaagataaaagatgtaataggacctggtggaaagataataactaagataatagacgaaactggagttaagatagatattgaacaaactggggaagtatttatatcaggtattgagattgatatgattaagaaagctcaagaacttataaataatatagtagttgaaccagaagtaggaaaaacttataaaggtaaggtaagtagaataatgaactttggagcatttgttgagatacttccaggaaaagaaggattacttcatatatctcatatagctcatgaaagagttgccaaagttgaagatgtattgaatataggggatgaagttgaagttaaagttacagagattgatgaaaaaggaagagttaatttatcaagaaaagttcttttaccaaaaccagaacataaaaataaa

SEQ ID NO: 16880 - DNA, 1293 bp, Clostridium difficile
atgataagtatattaaaaaggagtgagaaaatgcctttagcagataaaataagaccaaaaacaatgaatgatgtaataggtcaaagtcatataataggtaatggaaaaatattgtctaagatattacaatctaattttttaccaaatatgatattttttggtcctcctggtgttggtaaaactacagtagcggaaataatagcagaaagaagcaataaaagcttctataaaataaatgctactaattcatctttagaagatataaaaaaggtgatatcagagcttggaagtataaataatgtaaatggagtcctattatatatagatgaaatacaaagttttaataaaaaacagcaacaatcaatattagaatttatggaaaatgggagtataactttgattgctagcactacagaaaatccatatcattatgtatataaagctcttttaagtaggtctactgtatttgaatttaaacctttagaaaaacttgatgtagaaaaaggactgaaaagagctgttgaagtattaaatgaagatagctatatggatattgagtgtaataatgatgctattgaagatatagcaattctttctgatggagatatgagaagagccttaaatattttggaagtggtagtctattcaactaaaccaaataaggataatataacttatatagattcagatgtaataagggcatctacatttaataaaattataaactatgacaaaaatggtgatagtcattatgatattttaagtgcatttcaaaaatctataagaggaagtgacccacaggcatctatacactatctagcaagacttataaaaggtggggatttgataagtatatgtaggagacttttagtaatagctagtgaagatataggtttagcttatccaaatgctattgtaattgtaaaggcatgtgtagactcagctatgcaacttggatttccagaagcgaaaataccattagcagaagctactattcttttggctacatctccaaagtctaattctgcatgtatagcaataatgaaagctatggatgaactggataaagagtttgttaaggatataccaaatagtataaaggatgctcactattctggttctaaagaaataggtaggggttgtggatacaaatatcctcataattttaaaaatcattatgtaaagcaacagtatttaccagatagcataaaagatagtatttattacataccacaagaaaataaaactgagaaaaatataaaaaaatatttagaatatctaaatagtgatttt

SEQ ID NO: 16881 - DNA, 2103 bp, Clostridium difficile
gtgggggtgtatggttttatggccaaaacattagtcatcgtagaatcgcctgcaaaagctaaaactatagaaaaatttttagggaaaagtcattacacagttaaagcatcagttggtcatgtcagagatttacctaaaagtaaattaggtgtagatatagaaaataattttgaacctcaatatataaatataagaggaaaaggcgatgtaataaaagaattaaaaaaagaagctaaaaaatctaaacaagtatatctagcaactgaccctgatagagaaggtgaagctatatcatggcatttagctcatatactaaatttagatgaatctgaggattgtagaatagagtttaatgagataactaaggatgcaattaaaaaagcaattaaacatcctagaaatattgatataaatttggttgatgcacaacaggcaagaagagtgctagacagacttttaggttatcaaataagtcctatattatggcaaaaggttagaaaaggtcttagtgcaggtagagtgcaatctgttacaacaaagttaatttgtgacagagaaaaagaaataaaggcatttattccaaaagaatattggacaatagatgttgaggctaagacagtaaaagacaaagatataactttgaaattttatggtaaaaatgatgaaaaaattgaattagaaaatgaagaagctgtaaatgaaatactaaaagaaatggaaggtaaagatttaaaggttgagaagatagaatctaaatcaagacgtaaatcagctccaaaaccatttacaacaagtatgcttcaacaagaaggagcaaataagttattttttactactaaaaaaacaatgatgatagcacaagaattatatgaaggtatcgacatagaaggtgaaggtactgttggtcttatatcatatataagaactgactctaaaagaatatctgatgaagcaaaagaaaaagctaagggctatatcgtaaacaatttaggagaaaactactataaaaacactggtgataaaaaagaaaaaaaggatactaaaaaggttcaagatgcccatgaggcaataagaccaacctcagttgatagaactcctgagagtataaaagcctcattgagcaaagaccagtacaagttatacaatttaatttggagaaggtttgtagctagtcaaatggaagattcagtgtttgatatactaaatgtagaatgtaaaataggcgatattgtatttaaggcaactggttcaaaaatgaaatttgatggttataccaaggtatataatttttcagaaagagaagacaaaattttaccaagtatagaaaaaggagatatattaaatatagaaaatatattgccagaccaacattttacacaaccaccagcaagatatacagaagctagtttagtaaaaacactagaagaactaggtataggtagaccaagtacgtatgctccaacaatagctactatactgaatagagagtatgttgaaaagcaaggaacaagtctatgtccaacagaacttggaataatagttactgatattttggaaaataatttccataaatttatagatgtagattttactgctgatatggaaagtaaacttgatgttatagaagaaggcaatacagattggaaaaagattgtatcagaatcatatgcaccacttaaagaggctattgaagaagctcttgaaaatatagaaaaagtaaatatggatgaagaaactgatgagatttgcgagaactgtggttctaatatggttatcaaatatggtagatttggaaagtttatggcttgtaaaaactatcccgattgtaaaacaactagaccaattatgaataaaattggtgttaaatgtccaaaatgtgaagaaggagatattatacttagaaaatctaaaagaggtaaagctttttatgggtgttctaattatccaaactgtgactttgtagcttggaataagccaacaggagagttttgtgagaagtgtggttcatatatggttgaaaaagtgactaaatctgaaacaaaaacagtgtgttctaataaagaatgtaataaagagacaaaagagcataatgacggaaaagag

SEQ ID NO: 16882 - DNA, 765 bp, Clostridium difficile
atgcaggataaaagtgtgagggagattaaagaaataatagagactttagaagtagaaaaatatatggaatatatagagctgttaagagttgatgaaagaaaatctgtacaaggtctagctataaaactagcaaaaaagctggataatattagaaaagaagaagaaagattggaaactataaatatatttgagaacgaaggctatgataaaggttatttatatattggaggaattgatgaggcgggaagagggccacttgctggacctgttgtagcttctgttgtagtatttaaaaaagataccaaaatagaaggtgtaaatgactctaagaaactgagtgaggcaaaaagagatgaactttttgaagtaataaaagaagaagcactagattatggaataggtatagtaaacaatgaagaaatagatgaatttaatatattaaatgctacatatatggcaatgaaaaaggctataaattgtttaaaaaaagcaccagattatttattagttgatgcagcaacaataccaggtattgacatatctcaaaatccaattgtgaaaggagattcaaaatctatatcaatagcagcagcaagtatacttgctaaagttactagggatagtataatgtaccaatatgatagagtatacccagaatatgggtttaaatctcacaaaggatatggaactaaagaacactatgaagctattgaaaaatatggcataactcctatccacagaaaaagttttttgaaaaatatactg

SEQ ID NO: 16883 - DNA, 423 bp, Clostridium difficile
atgttagatggaagaataatgggtcttgatgttggtgataaaactattggagttgctgtgagtgatttgatgggattaactgcacaaggtgtaaaaacaataaaaagagttggcaagaaaaaagatattgaagagctaaaagcaataataaaagaaaaacaagtaaataaaattgtatcaggattaccaaaaaatatgaatggaactttaggtccacaaggagaaaaagtaatcaagttttgtgaattggtaaaagcagaaacaggtattgatgtagagttttgggatgagaggctttctacagtagcggcagagaggtctttattagaagcagatgttagtagacaaaaaagaaaaaaggttatagatatgttggcagcagtaataattttgcaaggatatttagattttaaaataaattca

SEQ ID NO: 16884 - DNA, 255 bp, Clostridium difficile
ttggaaaaagatttagactacactatgaaatttgaaggaataccagaagataggatgagtgtaggagatactattgattttgtatataaagcattagttgaaaaaggatataaccctataaatcaaattatagggtatctcctttctggtgattctagctatataactagtcataaaaatgcaagagctataattaaaaaatttgaaagagatgagatacttgaagaagtaatcacgcactatctgaatagaaag

SEQ ID NO: 16885 - DNA, 2637 bp, Clostridium difficile
atggaaaagatgggattaaatgaaataagaagtaagtttttagaattttttgagtcaaaaggtcattatgtagcaaatagttattctttagtaccaaacaatgataagagtttgttacttataaactcaggtatggcacctttgaaaaactacttttcaggtgtagaagtacctccaagtgtgagaatgtgtacatctcaaaaatgtataagaacaggagatatagaaaatgtaggtataactgcaagacatgctacattctttgaaatgatgggtaatttctcatttggagattactttaaaagagagtcaataaaatggggatgggaatttgttacagaatggctaaatataccagaagataagatatgggtgactgtatatgaagaagatgatgattcttatgatatatgggcaaaagaaatgaatttcccagaagaaagaatggttagacttggaaaagatgataatttctgggaaataggtacaggtccttgtggtccttgttcagaaatatattttgatagaggagaagaatatggatgtgacaatccagactgtaaaccaggctgtgattgtgataggtatttagaattttggaaccatgtatttactcaatttgatagagatgaagaaggaaattatagtctattagaaaacaagaatatagatacaggtatgggtcttgaaagaatgggatgtattatgcaaggcgtagacactatctttgaagttgatacaattaaatctatactagaagcagttgagaagttaacaggagtaaaatatggagagaatccaaaaaatgatatatcaataagaataataactgaccatataagagctgtaacattcttagttagtgatggagtgcttccatcaaatgaaggaagaggatatgttcttagaagactccttagacgtgctgctcgtcatggtaagttattaggagtaaaagaattatttttacagaaactaatagatgaagttataaaagtaaatgataaagcatatccagttttagttgaaaaagaaagttatattaaaaaagtagttggaatagaagaagaaaaattcaatgaaactatagaccaaggaacagaaatattgaactcttatatagaagtattaaaaaatgaaggaaagactgtcctaagtggtcaagaagcttttaaactatatgatacttatggcttccctatagacttaactaaagaaatattagaagaagaacatctatctgtagatgaagaagcttttaatgaagaaatggaaaagcaaaaagaaagagctagaaatgctagaggaaatatggatggagaaagttggaaggaagaccctctatcaaaattagaatctacagttgacagtacatttaatgggtatagtgaaatttatggtgaaggaactattgaagctatagttaaagatgatgagctagttcaaagtgcagaagaaggcgataaggtatctatagtactagataacactactttctatcctgaaggtggaggacaagttggagattgtggattgataactaatgaaaacttagttttagaagtattaaatactaaaaaaggtgctaataatagtataaaacatataggtataataaaatcaggaagaataagtaatggggacaaagtgaagacactcgtagatagagaaactagaatgtcagctgcaagaaatcacagtgctacacatttacttcataaggcattaagagaagtattaggagaacatgttaatcaagctggttctttagtaactccagaaagacttagatttgatattactcactttgaagcgatatcaaatgaagaattaaaagtaatagaagaaaaagtaaataatgttattttatcatctttagacataaaatgtgatattatgaatataaaggaagctaaagaaaaaggagctacagcactatttggtgaaaaatatggtgatgaggtaagagtagtttctatgggagattattctacagaactttgtggaggaactcacttgacaaatacttctcaagtaggaatgttcaaaatattatctgaaggtggagtagcagcaggtgtaagaagaatagaagcaataacaggaaaagctgtttatgaatacctaaaagaaagagatggaattatctctgaagtttgtgtaaacttaaaatctaaagaagataatttaattcaaagaataagttctttattagaagaaaataaaaacttatctaaagaattgcatgatatgaaagctaagatgagtttacaatcagttgattctatttttgattctaaagttgaagtaaatggagttaatttgataactaataaatttgaaggtatggatatggatacactaagagaaacagcagataatctaagagataagcttggttctggtgtagtagtacttgcaaatgtagtagatgataaagttaactttgtagttactgccactaaagatgtattagataagggaatacattcaggtaatattgttagagaagttgcaaaaatagctggaggaaaaggtggaggaagacctaatatggcacaagcaggagctagtgatgtatctaaggttgaccaagctttaagctatgcaagtgaggttattaagacacaagttaaa

SEQ ID NO: 16886 - DNA, 1083 bp, Clostridium difficile
ttgtttatgaataaaaaagtaatgataggtatgagtggaggagttgatagctctgtagctgcatatcttttaaaacaacaaggatatgatgtcattggtgttactatgaagttgtggcaagatgatgatgttgttgaaattgaaggtggttgttgctctttatctgctgttgaagatgctagaagggtagcaaataaaataggtataccattttatgttttaaattttagagaagtgtttaaagaaaaagtaatagattattttatagatgaatatttggaaggaaaaactcctaatccctgtatagcttgtaataaacatataaaatttgatgatttttataagaaggctagacaaataggttgtgattatgtagctacaggtcactatgcaaagatagaaaaggatgaaagtacaggaagatatttgctaaaaaaatctgttacagataaaaaagaccaaacttatgcactttataatcttacacaagagcaactagagcatactttattgccaataggtgactatgaaaaagatagagtaagagaaattgctaaggaaatgggtatggcagtacacaataagcctgatagtcaagaaatttgttttgttaaagataatgactatgcaaattatgtaaaaaaacattctaaaaagcgtattgaagaaggtttttttgtagatactaaaggcaatatacttggaaaacataagggtatattatattatactataggccaaagaaaagggcttggaattacttttggaaaaccaatgtttgtaatagacataaatccaataaataataccatagttcttggagacaatgaagatttatttaaaaaggaacttattgctaaagatgttaactttatatcaatagatacgttagaagaacccttaagagttcaagccaaaataagatattcagcaaaaccatcaccagctactattcatagagtaggagaagatactattaaaatagtttttgatgaagctcaaagagctattactaaaggtcaatctgtagtaatgtatgatggagatattgtagtaggtggaggtataatcgagaaaagttta

SEQ ID NO: 16887 - DNA, 438 bp, Clostridium difficile
atgcaatatagtgataaagttatggaacattttatgaatccaagaaatatgggagaaattgataatgcaagtggtgtaggtgaagttggaaaccctacatgtggagatataatgaagatatttttagacatagatggagatgtaataaaggatgttaagtttaaaacatttggctgtggttcagctatagcaagttcttctatggcaactgaaatgataaaaggaaaaactataaaagatgcattagaacttacaaataaagctgttgcagaagctttggatggtttaccaccagtaaagatgcattgttcagttttagctgaacaagctgtaaaagcagctcttatagattatgctcaaaagaacaatatccatataccagaattggatggatatgttatagatgatgctcatgaccatgatgttgaagaagaagaa

SEQ ID NO: 16888 - DNA, 444 bp, Clostridium difficile
atgaagttgtctactaaaggtagatatggactaaaagcaatgtttgaattagcattaaatcaagacaatggaccagtatcattaaaatttattgctaagaagcaaaaaatatcagatcagtacttagaacaaatattttcatctttaaaaaaatcgggtctagtaaaaagtgtgagaggtgctcaaggaggttatttgctttcaaagaatgctgaagacataacagtaggagatatacttgtagtattagaaggaccagttgcattatctgactgtgtactagatgaagatgtatgtgaaaactcaaacatgtgtgtaacaaaaatagtttgggaaaagatgaaaaagggtatagaagatgttatagattcaattactcttaaagatatgataaatgactataacaaaaataaattagaaaatgatataacaaatattaaaaaa

SEQ ID NO: 16889 - DNA, 1275 bp, Clostridium difficile
atggggatgactatgacgcagaaaatattagccaaacatgctaaattaaatgaagttaagaaagggcaattaatcgaagcagatttagatgtagttttaggtaatgatataacatcaccagtagccattagagaatttgaaaaattaggaattgaagatgtttatgataagactaaagtagtgatggttttagaccactttacacctaataaagatataaagagtgcagaacaatgtaaatttacaagaagtttcgcaaaatcaaaaggagttgtaaatttttttgatgtaggagatatgggaatagagcatgttcttcttcctgaaaaaggtatagtaactgctggagatgtaattataggtgctgactctcatacttgcacatatggagcattaggagcattttctactggtgtaggttcaactgatatgggagcaggtatggctacaggaaaatgttggtttaaggttcctggagcaataaaatttgttttgaaaaataaaccaaataaatggataagtggtaaagatataatacttcatataataggggagataggtgttgatggagcactttacaagtcaatggaattttgtggagatggagtagaatacttatctatggatgatagatttactatttgtaatatggcaatagaagcaggagcaaaaaatggaatttttccagtagacgataagactatggaatatataaattcacataagtgttcaactatgacaaaagatgtaaatatatatgaagcagatgaagatgcagtctatgatgaagtatacgaaatagatttagccaaactaaaagaaacagtagcctttcctcatcttcctgaaaatactagaacagtagatgagatagataaggatataaagatagaccaagttgtaataggctcttgtacaaatggaagaatatcagaccttgaagtagtagctgagataatgaaaggcaaaaaagtagcagatggagttagagttatgatatttcctggaactcaaaaagtatatcttgaagctatagaaaaagggtatattaccacttttatagaggcaggagcagcagtttctacaccaacttgtggtccatgtctagggggacatatgggtatacttgcagcaggagaaaaatccatttcaacaacaaataggaatttcgtaggaagaatggggcatgttgattcagaggtgtatcttgcaagcccagctgtagcagcagcatcagctataactggaaaaatatcaaaaccatcagaaataatt

SEQ ID NO: 16890 - DNA, 1074 bp, Clostridium difficile
atgagtaagaaattatttattcctggtcctattgatgttaaagaagaagtcttgcaaaagatggctacaccaatgataggacatagaggaaaagatgcatctatgctccaaaagagtataagtgaaaagatgcaaaaactattctatacaaacaacacgatacttttatccacgtcatccggaactggtttaatggaaggctccattcgttcctgtacatccaaaaaggcagcagtattttcctgtggatcctttggtgatagatggtacaaaatggcagtggctaataatgtcccagcggatatatttaaagttgaattaggagaggcaacaacgccagaaatggttgataaggtgctttctaccggagaatacgatttaataactgtaactcacaatgaaacttcaactggaataagaaatccaatagaagaaattggagaagttgttaaaaagtatgaagatgtaatctactgtgtagatactgtaagttcagccggtggaataaaagtcgaggttgataagattggaatagatatttgtataacatcagtacaaaaagcactgggattaccaccaggaatgtctatttgcacattttctcaaaaagcaatcgatagagctaagcaagtaccttttagaggagtatatcttgatttgttagcaatgtatgaatacttaatcaagaaaaactaccaatacccttcaacaccatctctttctcacatgttcgctttagatttccaattagataatatattagatgaaggcctagataacagattcaacagacatgaagacatggcaaacttagttagaaactgggctaaaaaacacttccaaatttttaccaatgaaaatcacttatccaatacacttactgttatagaaaatactcaaggtattagtgtatcaaatttaaattcaaaattacaagaacgaggattccaaatagcaaatggctatggagatttaaaagaaaaaacttttagaatttcacatatgggtgactatactgtcgaagatgtacaagaattattagataatattgatgatatattaggttttaataaa

SEQ ID NO: 16891 - DNA, 1050 bp, Clostridium difficile
atgattaagtttaaaaaagcaatatcccttatagctgtaggtatgatgatagttactttatttacaggatgtaataaagcaactgattctacaaaagttttaaatgtatataatgttggagattatatagatgagtctcttatagataagtttgaaaaagaaacaggaatagatgttcaatattcaacttatgatactaatgaaatgatgtatcaaaaagtaaagagtggtagtacacactatgacttagtatttccttcagactatatggtagagaaaatgaaaaatgaaggtcttttggaaaaattagattttaagaatatacctaatatgaaatatttagataagagttttttaaatcctgtatacgacaaaactaatgaatatagtgttgcatatatgtggggaactcttggaatactgtacaataagaaagaagttaaagaccctatggatagctggaatatactttggaatccaaagtataagggaaatataatgatgtttgactctgttagagatactatagggataactcttaaaaaattaggatatagcatgaatagtgtaaatccaaaagaaataaatgaagctaaaaatcttttaatgaaacaaaaggatttagtattggcttatgtaaatgatgaaggtaaggatagattgcttggtggagaagtggcaatgggtatgctgtattctggagatgcagttacactaatggagcaaaatcctgaccttgattatgctatacctaaagagggaactaataaatgggtagatgctatgtgtgtacctacaacagcacaaaataagaaagaagctgagctgtttataaactttttattagacccagagaatgcaaaagtaaatgctgagtacattgggtattcaacacctaatacaggagcactaaaattattagacccagaaataactcagaatcctgttgcatatccatctaaagaagtacttgataaatgtgaaacttttgaagatattggtgaaaatataaaattatatgacaaggcttggatagagttaaaatcaaaa

SEQ ID NO: 16892 - DNA, 1932 bp, Clostridium difficile
atggaaaataagtttttaccaataagcaaacaagatatgatagatagaggatgggaagaattagattttgttctagttacaggagatgcttatgtggaccatcatagttttggaacagcaataatatctagagttttagaaagtgctgggtataaagttggaataatagctcaaccagactggagaactacagatgattttatgaagctaggaaaacctagacttgcatttctagttaatgcaggaaatatggattcaatggtcaatcattattctgtaagtaaaaagcatagagaaaaggatatgtattctccaggtgggaaaatgggttatagaccagatagagctactatagtatattgcaataaaataagagaagcatacagtgatgttgcaatagtaataggtggaattgaagcgagcttaagaagatttgcacactatgattattggagtgataaggttagaaagtctatgttaatagatagtggagcagatttattagtttatggtatgagtgaaaagcagattgtagaagtagccaatgcacttaatgatggatatgacccaaaatacattagacatattgatgggacatgctatatttcagatacattggaagaaatatatgataaatatatattaattccatcatataaagaaatttgtgaagataaaatgaagtatgtagaagcttttaaaattcaatatgatgagcaagacccatttagaggtaatataattgttcaacctcatggaagtaagtatctggttcaaaataagccagaaaaaccacttagtagagaagaactagatgaagtatatggattaccatatcagaagacataccatcctgtgtatgaaaaatttggaggaataccagctatagaagaagtaaaatttagtatagtaagttcaagaggctgttttggtagttgttcattttgtgcaataacatttcatcaaggtagagcagtgcaaagtagaagtgaaaaatcaattattgatgaagcaataggaataacaaatttagatgattttaaagggtatatacatgatgttggaggtccaacagctaattttagaagaccagcatgtaaaaaacaaattactaaaggtgcttgtaaaaatagacaatgcttatctccatcaccatgtaaaaatttagatgcagaccacagtgaatacctacatttacttagagctgtaagaaaattacctaaaataaaaaaggtgtttgtgcgttctggaattagatacgattatgtaatggcagataagaacaataaatttcttagagagttgatagagcatcatgtaagtggtcagttaaaggtagccccagaacatatatcagaagaagttttaaagtatatgcaaaaaccagcaggaaaaacttatgataaatttagacagaagttttttgctataaatgaagaattaggtaaaaagcaatatttgataccctatttaatgtctagtcaccctggttctaccttaaatagcgctatagagttagcagagtatttaagagatactcactaccaaccagagcaggttcaggatttttatccaactccagggactctatctacaaccatgttttatacaggtattgacccgcttacaatgaagccagtttatgttcctaaatcaaaacgtgacaaggcaatgcaaagggctttattacaatatagagcacctagaaattatgatttggtatactctgcgttagttgaagcaggaagagaagacttaattggttttggacatagatgtcttataaagccaaaaaatgaaaagccttattttaatagaaataattctaaaaaaaatgtatctaaaggaacaaataaaaacaaaaaaactaatacaaataacagaagtaataaaaatcaacaaaaaagttcaactaaaaaaaagaaaaaacat

SEQ ID NO: 16893 - DNA, 1254 bp, Clostridium difficile
atgagagatttaaatgtatcagagtatttgttcgtatttagtttgtttagtatatggtctttattgcttataaatattattttagctatgggtggatatatattttattttaaaaactttgataaagaaataaaagaaattgatgaatatcctatgatatcaatacttgttcctgctcataatgaagctaaagtgataggtagaactgtggagtctttgctattacttaattatcctaagagtaagatggaacttattgttataaatgacaattcttctgataatagtaaagaaattttagaaaatataaaggataggtacaacaattataatttcactataataaatacagatagtttaacaggtggaaaaggaaagtctaatgcattaaatattggatatacgatttcaaaaggagattttatagctgtttatgatgcagataacacaccagataaaaatgcacttagatatctagtacaaactatagtaatgaatgatgaattaggtgctgttattgggaaatttaggactcgaaataaaaataaaaacctattaaccaaatttataaacatagaaacattaagctttcaatggatgtcacaagctggtagatggcaactttttaatctatgtacaataccaggaactaactttatattgaggagaagtatcatagaagaaattggaggatgggatagtaaagcaattgcagaagatacagaaataagttttaggatatataaattgggatacaagataaagcttgtaccacaatctataacatgggaacaagagccagaaactgttaaggtgtggataaagcaacgtactagatgggcaaaagggaatatatatgtattaatgaaatatataaaaaatatatttaaacagggaagaaataagattgtgtttgatatagcttactttttttctgtatattttctatttttaacatctgtaattatatctgatattttatttgttttaagtatatctaaactagtagaaatttctattccaattaacttttttctaatatggatactatcttatcttttatttattatagaagtgagtataagccttactatagaaaaaggtgaagcaacaattgaaaatatattcatagtggcaataatgtattttacatactctcaactatggctgtttgtagctataaaaggaatgatagagtatctaaaagatataatttttaaaagagaggttaaatggtataaaacagaaagattt

SEQ ID NO: 16894 - DNA, 1122 bp, Clostridium difficile
atgaatgacatcaaggttatgactgtatttggaactagacctgaagctatcaaagtagcacctttaataaaggaacttgaaaaaagagagaatataaaaagtattgtttgcgttacagctcaacatagagaaatgcttgaccaagttatagaaacctttaatataaatgtagactatgatttggatataatggaaaaaggacaaagcctgaatgatataacatgtaagattttaaataaacttcccttgattttaaacaaggaaaatccaaatataatattggtacatggagatacaaccacaactctagctacaagtttgactgcattttataataaaactcttgttggtcatatagaagctgggcttagaacctatgataaatattctccttttccagaggagttaaatagacaacttacaggtattattgctgatatgcactttgctcctactaatttggctagaaaaaacttgatttctgaaggaaaacctaataataatatatttgtaactggtaatactgctattgatgctttaaagatgacaataaaagaaaactataatcatcctataattgatgagattggtaacgataggatgattttgttaacctctcacagaagagaaaatttgggtaaacctatgaaaaatatattcagagctataaagcgaatagtagatgactttgaagatgtacagatagtatatcccatacatttaaatcctaaaatacgaactatagctgatgagatatttggaaaatttcctgaaaaaattcatattatagagcctttagatgtagctgattttcataactttttaaataaatcttatatgataatgactgatagtggaggaatacaggaagaagctccatcattaggtaagccagttcttgtgttgcgtgataaaacagaaagaacagaaggaattgaagcaaagacacttaaattagtaggtactaatgaagatagaatatataattcagtgagcgatttattaataaataaagataactatgttcagatgagtaaagcatctaatccatatggagatggaaatgcaagcaaatatatagtggatataataattaaaaaatttaattgcaaatatttaaat

SEQ ID NO: 16895 - DNA, 546 bp, Clostridium difficile
atgataaaaataactacacctgtaaatgaaattgatatagcaaaattaaattgtggagatacaattagtttgagtggtatactttatacagcaagagatgctgctcataaaagattgatagattgtataaataaaggtgaagaattaccatttgacgtatatggtcaaggaatatattatgtaggacctactcctacaaagccaggagaagttataggtgctgcaggtccaacgacgagttatagaatggatgatttgactatacctcttttagaaagaggtcttagattgatgataggcaagggaaaaagaagtgatgaggttatagaaggtatgcaaaaatacggagcagtttatcttgctgcaataggaggagctggagcgtatatttcaaattcaataaaatcatgtgaaattattgcatatgaagatttaggagctgaagctataagaaagattgtagtagaagaccttaaacttacagtagcaatagatagctatggaaataatatatatgagcaaggtcgagcaatttatgaatgtaaa

SEQ ID NO: 16896 - DNA, 747 bp, Clostridium difficile
atgagagtattagtgtgtaaagattatgatggaatgagtaaaaaagccgctgaaatgatagcagctcaaatagttttaaaaccaaattcaatactgggactagctacaggaagtacaccagtaggtatgtatagagatttagtaaaaaaatacaatgataatatagtagatttttcagatgtgatgagctttaatttagatgaatattataagttaccaatatctaatgaccaaagctatgattattttatgaaagaaaatctatttaatcatgtaaacataaagccagaaaatactcatctaccaaatggaatggctgatgatattgaaaaagagtgtatgaactatgaagcttctatagatgcagctggtggtatagatgtacaagtacttggaataggtcgtaatgctcatataggttttaatgaacctgatactaaatttgcaaagagaactcatgtagttgaacttacagagtctacaatagaagctaatgcaagattctttaaatcaagagaagatgttcctaaaaaagctgtaagtatgggaataggttcaatattgaagtctaagaaaatattgcttttagcttcaggagaagaaaaagctgatgcagtatataatactgtttatggagatataactccagaagttcctggttctatacttcaacttcataaagacactatagttatagtagatgaagcagcagcaagtaaattgaatccaaaagattataaattagta

SEQ ID NO: 16897 - DNA, 1272 bp, Clostridium difficile
atgtttataatggaaaatgatttaacaatgcaagaattacttgaccagcaagaacaagtattcagcaaagtgaaagttggagaattgacaactggaaaaataactgcagtgagaaatgatgaagtacaattaggattagactatgggtttgatggaataatacctataagtgaattgaacatagaaaaaaatcaatatatagaagatatataccacataggtgatgaaataactgctgtaataacaaaagtatctcaaaaagatggtacaataactttatctaaattacaacttgacaaaagaaatgattttgccgagttacaaaaggcttatgatgaacatagaataataactgtaaatgttgaaaagaatatagataaaggtgtatttgctaattacaatacatatacattttttataccaatttctcaacttgatacaaaatttattacagatacatctaaatttgttggtcttaacttagaagtttatataaaagaattggatgttagaaaaaatagacttgtagcatctcatagagatgtattacaagagcgtataaataaagagagagaagaaagaagagctcaaattaaggcagaaaaagaagctgaaagagcaagaattaagcaagaaagagaagaagaaaaagctcgtatcaaagcagctaaagaagacttatttaattctcttgaagttggacaaaaaagagatggtaaggtgacaaagataatgccttatggtgcatttgtggatattggtgggattgaaggattagcacatataaataatttagcttggacaagagttgaaagtgttgaagatgttgtttcagagggacaagaagtagaagtttatgtgttggatgtaaataaagagactaaaaaaattgccttggcattaaaagacataaataatgacccttgggatttaatagcaaaagaagtacaaattgatgatgttgtcaatgctaaagttcttagaataatagaaaaaggggcttttgttcaaattaaagaaggtgtagatgcgtatttaccaatatctgaattgagtgatactagagtggctaaagttactaatgttgttaatattggagatgaggttaaagttaagattcttgattttaaaccaaagactaagagaatgttggtttcaataaaagaagcaactagagagccagaagaggatataacagaatacctagaagtagaggaatctttaggaagtattggagaattatttaaagataaatttaaagatttagaagtg

SEQ ID NO: 16898 - DNA, 1311 bp, Clostridium difficile
atgattgctattaaaagtaaatacttaatatcttctgctgatgaaatatatacaaattctgctgttgtagtagaaaatgacattataaaagatatattgccaaatgaagaagttgaaataaaatataaaaatattgaagaaataatagataaatcagatgctataataatgccaggattcgtcaatggtcatatgcatcaatatggagttctttctaggggaataccggcaaatgtacattttaccgactttgaaggtttcttaaatgactattggtggccatttatagaaaatagaattggattgaaagaagtgaaggcaacaactaaagcatcagcaatagaacttatagaatctggtgtggtagctttttgtgataccctagaagctccaaatacagaagaaggaactttaattgagcaaggaaaaatactagaagaaataggcatgaaagcgattttatccttagaaagttgtgaaagaataagctttgaaaatggacttagatgtttagatgaaaattctaatttaataaagtggagtagagaaaatagtaaattaataaatggaataatgtgtacacatacaagcttcacatgttctgatagatttattaagaaagctaaagaagatgcaaaaaaattaaatgcaccaatgcaatttcatttatgtgagagtatatatgagccaaactatgctgaaaaacattttggcaaaaaagcagttgactactataatgatttagatatattggatgaaactgtattagcatctcagtgtgtaaaagtaaatgatgaagaaatagatatattaaaagaaaaaggtgtaaaagtggttcatatgcctcttagcaactgtgaagtaggtggaggtttttctccagtaccaaaaatgattaaaaaaggcataaaagtggcactgggtactgatggatatataaatgatttttttgaagttatgagaggtgcatttttaatgcataaatcagttgaagaagatgcatcagtaatgccagcaaatttagtatttagaatggcaacagagcatggtgcttatgtattaggacttcaaaattctggtaaaatagcagttggtaataaggctgatataatagttatggaagatgaatttaaaactcctgtgactcttgataatatatttgaccagatagtagttcagggtaaaaaagaatttatatcaaatgtatacatagatggtagacatattttaaaagaaaaacagttagttgatttagataaaaaagctattgttaaagaaatgaaagaagttgcttgtgaattttggaaattt

SEQ ID NO: 16899 - DNA, 2553 bp, Clostridium difficile
atgatgtctctagtaaaattttcaattcaatatataaagcattataaaaaacaatctatatctatagttttaagtatagtactatcagtagcattattgacgggaattggttctttagttcatagtgcagacaaaagtagaattgaaaagataagggaagatagtggagattatcattatttctataaagtagataaggaacaacttaataaaattaaaaaaaataaaaaatcaaaggaatacactgtagatagacttggcgttacaaaacctaaaaatcagatagatgaaccttttattatagaatttttaaatgctgattcttcatatttagacatgacaggtagaaaattattaaaaggaactcttcctagtaaagatggagagatagtacttgacacatattctctaaacaatttaaatgtaaacaaagaaattggaacagaaatcaatttagatggtaaaatctataagttatgtggtattttatcaagtctttcaaacccagaaactgctctggagggatttgtaaacgattattttcagcctaaagaaaaggattcttatatagtttatgtaaaatatgatgaaaataaaaatattaaaaagcaaaattataaatttatgaaaaaattcaacatatcaaaagaaaaaacttatataaactggcctctttcagttgaatttggagtaaaaccaccaaaaaatatagaaaaatataatatatttgagttcttaaaaaatttagaactaaatacaaatgcaattatattgcttgttggagtgtttggtgcagcagcagtatatagtattttccatgtttcaatacttcagagaatatcacaatatggggttttagaagtattaggcgctaataataaacaacttttatttctactatttttagagttatttttactttttattgttggatttcctataggttgcttcttaggtattggagtagcgtctacaatatatgaacaatttccacatatatttttgagtagtgatattgttccaggagcattttttataagtgaaaaatctatttatttaggctttttatttatcttattgttgttaattttaattgctgtacgtgttgtacatcagttgaataaatactctagtatagaatctatgaaaaactctaagattactaataagaaaaagagaatattagaaagtgtaaaacactctaacatgacaaaagtattatctcataaatacatgactcaaaaaaagggaatgtttattggaattttgttttcattatcacttggtggaattatatttttatgttctagttactctatacagcttactaaaaataataatgaacttacaatgaaagctgatgatggtttaaattctgactaccaaataactatgcaaacaacagattttgatgtaggtataccaaaagataaaatttcaagattaaacaatgttgagggaatatcaaaagtctatccagtaagatatttatttggagctatgcaaattaaagaagaacaactattttggaaaaatttctttaaacctcttgaaaaagattacaggataaagactttttttgatggtatttgtacaaagcaaaatgaaggtggctatcttttaaaaacaaatatttatggttataacaatggtatgttagaaggattaaattcttatattatagatggggagattaatacccatgatatggttaaaaataataaggttatagttagactacctatggatggaactgggatgtatgatgcagttgatataaatccaggagatacaataaaagttaaagtgccaaagacaatgaaaccaacagatgaaattgttaaatttaaagaagaaaataagaatgattatacaacaaaagaatttgtagttgctgctactgtaaaacgtgtgatggcaaataacatatatttcattggtgattatggtatggatatagttatgacgaatggtcaaatgaaaaataactttgatatcgaaaattataattcagtaagtataaaaaagacagaagatagtaacagtgaggaattgtctgagaacataaaaagtgttgtaagtgatgtaaaaagatgtatcgtaacagattataccattgctattgaaaaaaataatacctacttaaatcaaaaactcttatttatatatggtattgtatttgtacttcttgcaataagtttgttccatataatcaatacagtaagctacttaattttttcaagaagacatgagtttggaattttaagagctatgggtattacggataataagtttttacttatgatgataagagaaggttttttatatggattctatgcaagtattataatggtaattggaagtgttattggacaatttatgatttattttatggtaaaacgtgtatacttatatataaatccaattcttaaaataaatacacctctatacataggtatgattattttaaatatcactattagtatagttgctgtaattattccagtaagacaaattttgaagagtgatattatttcagaaataaataagaat

SEQ ID NO: 16900 - DNA, 1749 bp, Clostridium difficile
atgcttgtttatgcgtcagttgcaataaatacatacagtagagaggggtttattatggattatactaaaacttatgaagagtggataaagggttcatattttgatgaagatacaaagctagagttggagaatataaaaaataatgaaaaagaaatagaggatagattctataaggatttagaatttgggactgcgggtcttagaggaataattgaagcaggaacgaatagaataaataagtacacagttagaagagctacttttggattggcaaactatatattagaaaacacaacaaaagaagaaacaagtagaggagtagtaatagctcatgataatagacacaagtctagacaattctgtatagaatctgcaaatactttggcagcatgtggtataaaagcatatatatttgatagtttgagaactactccagaattatcttttgctgttagaagcttaaacgcaatcgctggtatagtcataacagcaagccataatcctccagaatataatggatataaggtatactgggaagatggagcacaagttatgccagagattgcaaatgcaataacagagaaagtaaatagtatacatgattatagtacaataccaaccttaacggaagctaataaaaatttggtagttttgttggacgaatcacaagatactaaatttatagaagcagtaaaaagccaaattataagaaaagatttagttaaaaatgtaggtaaaagctttaagatagtttatacacctctttgtggaacagggaatgttccaataagaagagcattgaaagaagttggttttgaaaatataattgtagttccagaagaagaaaatccagacccaaattttgcagggcttgattatccaaatccagaagagaaaaaagctttaaatagaggtatattactcgcaaaagaaaaaggagcagaccttgtaatagcaactgacccagattgtgatagagtaggtgtagcagtaaaaactactacaggtgagtatgctttacttacaggaaatcaaattggtggtatgctgacacattatataatagaaggattaaaagaaaataacaaattaaaagaaaatcctacaataataaaaaccatagttacatcagaatttggagcagatatagctaaagcaaataatgttgatgtattaaatgttcttacaggttttaaatttattggtgaaaaaataaaattatttgaacaaaataaaaatagaagttatgtatttggatatgaagaaagttatggttacttagttgggactcatgctagagataaagatggtgtagtttcttcattgttaatatctgaaatggcagcattttactattcaaaaggtatgagtttatatgatggtttaatagaactttataaaaagtatggatttttcaaagaacagactatatctttgactttaaaaggtatagaaggtgtagaaaagataaaagaaataatatcttattttagagaaaatcaaattgattatataaatagtattaaagtagttgataaaaaagattataaaaatggtatagataatcttcctaaatctgatgttttaaaatactttttggaagatgaatcttgggtagctataagaccatctggaacagaaccaaaacttaaattttacatagctgtaaaaggagctagtgatattgaagcagataaaaagattcaaggtttgaaaaagtatatagatgacatggtcgaaaaattaaaa

SEQ ID NO: 16901 - DNA, 1596 bp, Clostridium difficile
atgagtttattagttttcggacataaaaatccagatacagattcaatatgttctgcaatttcattagcacatttaaagaacaaactaggaataaaagcaacagcttatgctttaggagatatcagaaaagaagctaaatatgccttggattactttaaggtagatgcacctgaaattttagataatgttagaatacaagttagagatttaaattatgataaagtagtacctttaacaccaacttcatctatattagaggcttataaccttatggatgaaaaaaatgttaaaacactacctgtaacttatgatgatggaacttttgctggtatcattactatgaaagaaatagctaaaaatctacttcatcaacactttacaactatacacacatcactatcaaacatttgtaaaaaccttaatggtactattcttgtggactgtggtgaagatataaaaggtagagtagtcactttatcatttggaatggagactctaatagagactttaaaagaaggagacatagctattgttggagatagatatgatagtattgaatatgctattgatacaaaagttaaacttttaatacttactaatcatacagagatttcaaaagatttgctagctcttgctaagataaatggagtgtctgttgtttctgttgaaagtgacaattataaaacttctaatgtaataaatcaatgtagtttcttagactctatagaagctacagaaaatttaattacattcaaagaagatgattatatggatgaaataaaagagattatgctagaaacaaacttcagatcttatccaatattagatgatgataataagtttttaggtttagtttcaaaaggtcatctattaaacccatctaaaaagaatgttgttttagttgaccataacgaatatgctcaaagtgctgatggaattgaacaagcaaacatagttgaaataattgaccatcataaacttggtggtatttctactgatgttcctatgtcatttagagttatgcctgttggatgcaatagtactataatttatcaaatgtacaaagaaaataatgttgagataccttatgaaatagccgggcttcttttatctgctatattatcagatacattattatttaagtctccaacaacaactgatatagataagaaagcttgtgaagaattaagtaaaatagcaaaagtagacatggaaaaatacgctatggatatgtttaaatgcggtacttctttagatgaatatactatagaagaaatagtaaatatggactttaaagaatttaatatgagtggacatagagttggtattggacaagtatttaccttagacatagactctatatttgctaaaaaagatgagtttttatcttatataaattcgactgattatgacaaactaattcttgcggttacagatataatcaaagaaggttcttatttaatctataaagcagaagacagcttaattgctaacgcatttggtgttgaaggtgttcaaggtacatttgcaccaggtgttgtatcaagaaaaaaacaattagtccctaatttaactactgcaatcaaaaattttaaa

SEQ ID NO: 16902 - DNA, 1623 bp, Clostridium difficile
atgttacaagttacaggtgttggacttagatttggtgataaggaactatttaaagatgttaacttaaaattcactaaaggtaattgctatggaataataggagctaatggtgcgggaaaatctacttttttaaaaatattatcaggagaaatagagcctaatacaggtagtatatctataactgataaagaaagaatgtcagttttaaaacaggaccactttgaatatgaagaagaaactgttttaaatgttgttataagaggtcatgagagactttggaacataatgaaagaaaaagatgcattgtatatgaaggaagactttaatgaagaagatgggataaaagctgccgaacttgaaggtgagtttgcagagcttgacggatgggatgcagaaactaatgctgagaaaatacttatgggtcttggtataacgaaagatatgcattacaaacaaatgaaggaactagttggtggggaaaaggttaaggtattgttagcacaatcactttttggtaagcctgaaatactattaatggacgaacctacaaaccacttagattttaaatcaataaactggttaaataattttataatggatttagaagaatctatagttataatagtatcacatgatagacatttcctaaatcaaatatgtactaatatagttgacgtagattttggtaaaatacaaatgtacgttggaaactatgatttctggtatgagtcaagtcaattggctttacaactggctaaggaccaaaataaaaagactgaagaaaagatagctcaattaaaggaatttatagctagatttagttctaatgcttcaaaggctaaacaagcaacatcaagaaagaaacagttagagaaattagaagttgaagatatacaaccatcaagaagaagatatccatatgtaggatttacacctgcaagagaaattgggaatgaagttttagaagtacacaatttaactaaaactatagatggggttaaggttcttgataatgtgtcatttagattggatagagatgataaagtagtatttatgggagatgaaatagctactactgcacttttcaacatagttatgggagaacttgaaccagacagtggagagtataaatggggagtaactacttctcaagattatcttccaaaaaatcataataagttttttgacggagtagaatattctttggttgactggcttagacagttctctgaagaaaaaagtgaaagttttataagaggatttttaggtagaatgttattctcaggtgaagaagcattaaaagaagctcaagttatatctggaggagaaaaggttagatgtatgcttagtaagctaatgctttcaaatgcaaatgtacttgtattagatgaccctactaaccacttagacctagaaagtataacttctgtaaataaaggacttgaaaagttcccaggagtgcttttatttacttctcatgaccatgaatttatatctactatagcaaatagaattatagagataactccaaatggaataatggatagaaaaatggactttgatgagtatttagaaagtaaagagatacaagaccaattagctaaaatgtatggaaaagataaa

SEQ ID NO: 16903 - DNA, 2328 bp, Clostridium difficile
atgctattgaggagggaatgtataatgattaataaggggataagaaagatagatagtacagcaattgtcacaggaaaacctctatatactgaagacctcattatgcataaagatgttttgacattaaaactacttagaagtccacatgctcatgctaagataaagaatatagatacatcaaaagccgaaaaaattccaggggttgtgggtatttatacgtataaagatgtaccacaggtcagatattgtgttccaggtcaaacagaaccagaagcatcaccttatgatagagttttacttgaagatacagttagatttattggagatgaagtagctttagtggctgctgaagatgagaaaacagcacttaaagccttaaaaatgataaaggtagattatgaggttttaaagcctgtgtttgatgcaagagaagcagaaggaaatgaagttgttatacatccagaaaaagacatagtagagccatacccttttggattggatgcaaaaaataatatagtatcaaaagaattttttgaatttggagatgttgaagctaagcttaaagaaagtgattttgtggttgaatcttcatacaaaacccaaagtcaatcgcattgcatgatggaaactcataggtcatattcatataaagatataaatgatagaattgttgtagtttcatcattacaatcaccacacaatgtaaagagaatacttagaaaagtattgggtataccgtcttcaaaaataagagtaattaaacctagaataggtggtggatttggaggaaagaatatagcagcaacagatatatttactgcatttgttactatgaaaactggtagaccagcaaaatttgtatttacaagaagtgaaacttttgtaggttctaatagtagacatgaaatgttttttgatgttaaagttggtgcagataaagaaggaaatttaaaagcaatagagctaaagtcattaaacaatacaggtgcttatggtgggaatggtgtctctgtttcttccgaatctggacacaataccttaccaatatataatgatattgatgctgttagatttaatgctagaacagtatatactaataggttaccagcaggagcacttagagggtatggtgctacacagggaatatttgcaatagatagtgctattgatgaattggcacataagattggaatggacccacttgaatttagaattaaaaatataatagataggtataccaatggaaaagcagctgaagacgaaatattaagttgtgagctgagacaatgtatagaaaagggaaagaaattaattaattgggatgataaatatccatgtaaagatataggaaacaacaaagtaagagcagtaggtatggcagtagcaaatcatggttctggtataccacgtgtagatatggcaacagtcactataagaatggatgaagatggcacatataaactattatctggtcttgctgacttaggtcaaggggctgatacaattcaagctcaaattgctgcggaagctttaaatactactgtagatagaatttctgtttatacaggtgattcagatttatgtccctatgatacaggagcatttgcttcttgtacaacaacggttacaggaaatgcaacaataaagacagcaaataaattaaaagatatattactttcagttgcagagtcaaagctaggatttaaaaaagaagatttagagttgggaaaagacagggtttttgttaaaaatgataatagcaagtttgttctattagaggaattgggtagagaatctgttggaggaataggatttgctagtgatgatgtaccagtagttttggaagcaacagaatcttttggcatgttgaaaaaaataaaaccatttatagcaggatttgcagagatagaattagataaaaatacaggcgaatataaagtcataaattttgcatgtgtacctgattgtggaacagttataaatccaactttagctagaatacaagtagaaggtggtgtgatgatgggtatagggtttgcaatgtatgaagaccctgtatttgataaagatgggagattattaacagatagtttcctacagtataaagttcctacaaaaaaagaagttggaaatatattggtagattttgctgagaatttcgacccaggaggtccttatggtgctaaatcattaggagaaatagttatacatacaccagcaccagctatagcaaatgcaatatttaatgctacaggagttcgtttaagagagcttcctatgacttttgaaaaagtttatatgggtatgaaaaataataataaacaatta

SEQ ID NO: 16904 - DNA, 936 bp, Clostridium difficile
atgaaatttattgatttacattgtgatactatagcaaaattaatggaaaatgtagaaacaagtgaacttaagtctaataaatattctgttgatatagacagattgaaaaagggggattcattagctcaaacatttgctctttttgttgatactgaagaagtaaaacatccttttgattattgcatgagtatggcaaataaatttcatgaggaaatgaaaaaaaatagtgatgaaatagctttagctactaactatgaagaaattatgaaaaaccaatcagaaggtaaacttacagctcttttatctattgaagaaggtgcagtacttgaaggtaaattagaaaatttaaagaaattttacgacttaggggttagaatgatgacaataagttggaatcatgtgaatgaattgagctttcctcataataaagtagaatatagagaaaaagggcttactgattttggaagagaagtggtacataagatgaatgaattgggaatgttggttgatgtttctcatatttcagatggtggattttatgaaattgcaaagatttcttctaaaccaataattgctacacattctaattcaagagcaatgatgaatcattctagaaatttaactgatgatatgattaaagtattagcaaataaaggtggagttacaggtataaacttcttccacttatttttaagtgataaaagtgaaagtaaacttgaagatatggttagacacataaaacatattgtaaatgttggaggaatagatgttgtatctctagggtcagattttgatggaatagattcaaaagttgagattgaagatatatctcagatgggtaaactgtatgaacctctaaaaaaagaagggtttagtgaagatgatatagaaaagatatactataaaaatgctttaagagtgataaaagaagtatta

SEQ ID NO: 16905 - DNA, 2379 bp, Clostridium difficile
gtggaaataagacaatatctgaaaaataatatattaatatttgatggtgcaatgggaacaatgcttcaacaaaaagggttaaagttaggtgaaaatccagaagtatttggtcttcaaaatccagataaacttatagaaatacatacagcatacttagaggcaggttcgaatgtaattcttacaaatacttttggatgtaatgaactaaaattagatagtaagtatactgtagaagaagtgattgacaatgctgttttggtggctagaaaagctatagaaaatgtagataatactaaaccaagatatgtagctttagatattggtcctataggagaaatgctagagcctatgggtactttaagttttgataaagcatatgaaatatttaaaagacaagtactacaaggcgttaaatctggagttgatgtaatagtaatagagactatgatggatttatatgaagctaaagtagctgtattagcagcaaaagaaaactctgatttacctattttctgtactatgacatttgatgaaggtggaagaagttttactggatgtatgccagaatgtatggtggctactatagaaggtctaggtgtagatgcaataggagttaattgttcattaggacctaaacaacttttaccaatagttgaaaaaatagcatcaagagctacagtccctgttatggttcaagcaaatgcaggtcttccaaatatagttgatggagaggctatatatgatgttgatgcaaaagaattttttgaaggggttaaaaagttcgttgaagttggtgctactataataggtggatgttgtggtacgaatccaagttttataaaagaaatatctgagaatataaattctgttacaaagggatgtatcgagaaaattgataaatgtgtagtctgttcaccatcaaaatttgtggaagtacaatcgcctacagttgttggagaaagattgaatcccacaggtagaaaatctctacaagaagcattaaaaaatgaaaatgttgattatgctataaatttaggtttagaacaagtaaatgctggagcacaaatacttggagtaaatgttggtcttccagagattgatgaaaaaaaactaatgccaaaattaataagagagattcaagcagtagtagatacacctttacaagttgattcttccaatgtagaggccttagagcaaggacttagatattataatggtagaacaatagtaaactctgtaaatggcaaagaggagtctttagaaagtatattaccaatagttaaaaagtatggttcatgtgtggttggacttacacttgatgaaaaggggatacctaaaaaggctgaagaaagatttgaaatagcaaaaaggatagttaatagagcagtttcttatgggataaaaccaaaagatatatttatagactgtttatcattaactgtttcagcacaacaagaagaagcaatagaaactataaaagctataacaatggtaaagacactaggagtaaaaactatattaggtgtttcaaatatttcatttggtcttccaaataggaaagcgcttaatgcttcttttctaacattagctttaggggcagggcttgatttagcaattataaatccaaatgaatatagtatgatggaagctatcaattcttttaaaatattaaataacacagataaaggatgtataaactatataaatcaatatagtaatataaataattcaaaaaaatcagattcatctacaaagattgacaaagatttgccattggatattttagttgaaagaggattaaaagatgaagcaaaaaatgtaacactgaatcttttaaaagagaaggatgaaaattatatattagatgagattttaattcctgctcttgataaagtaggaaaaagatatgatagtggagatatatttttaccacaattgattcaatcagcagaaacggtaaaagtttcattaaatacaataaaggaaactttattaagtaaaagtagcaataatgtatctaaaggaaaaataatagttgctacagtaaaaggtgatatccatgatattgggaaaaatatagtaaaaataatgctagaaaattatggatatgaagttatagatttaggtaaggatgtccctattgaagaagtagtggaagttgctaaaaagagaaatataaaattagtaggattaagtgcacttatgactacgactgttcaaagtatgaaagatacaattcaggcactgagagataatgagataaatgcaaaggtatttgtaggaggtgcagttttgacagaagaatacgctgaagaaatgggtgctgattattattcaaaggatgcaaagtctgctgttgaaatagcaaagttaaatttt

SEQ ID NO: 16906 - DNA, 1191 bp, Clostridium difficile
ttggatataaaattgaaaaataaaagtttattaaatcatatgtttcgacccatattagatattataataagctgtgctttaacttcaatgcttattttaacaagtatgtatataataaaatcattatatttcaatagtgggatatctgtaattaatcaacttgtatatcagttaagagatctcagaagtcttataggagagagtttattttatccatttttatttacaatcacatcattagcaatttattccatgatatcgtacaagagaaataagcaaattgtagattttataagaaagactaatagaaaaaatcaaaaattagaaatcattaaaagtgctgtaaatttaatggatgaaggtaacttagaaaaaagtatagatattgagtatgatttagatatattaaaggataaagaaaaggatgatattgatgaactagcacataaaatcaataatatagtccatcaacttagaaatataactattgaagagagacaagctcagcagacaaaaacagatttaataacaaatgtgtcacatgacttaaggacacctttgacatccataatgggttatttaggagtgatagaagaaggtaagtataaagatgaagttcagatgatgtattatgttgatattgcatatgaaaaatcgaaaaatttaaatgttcttataaatgatttgtttgaattgactaaaatgcaaaataatacaataaaattaaacaaaatagaaataaatttagtagagttattaagtcaagtagtatctcaatttgaaatttattttaaacaagaatttatggttagtagaattaattttaatgaagaaaaattaattgtaaaagctgatccaaataaattggtaagagcatttgaaaatcttataactaatgctgtgaaatatggaaaagatgggcattatgtagatatagtcacagagaaaaaggaagatatggcggttgtaaaagtgataaattatggggaaccaattccagtgttagatttaccaaatatatttgatagattttatagagttgaaaaatcgagaaatagaaatgttggaggttctggattgggtcttgcgattacaaaaaatattgtaaatttacatgatggagaaattactgtttcaagcgataaatatcaaactgtgtttgaagtacaactgccaataatacaatcagct

SEQ ID NO: 16907 - DNA, 726 bp, Clostridium difficile
atgcttgaaataaaaaatctttcctttaatgttgagtctaacaatgaggaactaggaataataaatgatgttagcctttcatttgagaggggaaaacttattgttatcacaggtccaaatggtggaggaaaatctacaattgctaagcttattatgggaattgaaaaagctacgagtggtcagataattttagatggagaagatataacaaatcttagtattacagaaagagcaaaaaaaggaataggatacgcatttcaacaaccaccaagaataaaaggtatgacagttgaaaatttacttacacttgctcatggaaaaccattgtctactgatgtatgttgccaataccttacagatgttggattgtgttcaaaagactatttaaatcgtgaagttgataactctctttctggaggggaaatgaaaagaattgagatagcaactctttttgctagagatttaaaggtttctatatttgatgaacctgaagcagggatagacctttggagctttggaaaactcaatgaaagttttaagaaaatacatgaagagtctaatcagactataatcataatttctcaccaagaaagaatattagagttagctgatgaaataattgttctacaagatggttcagtaaaaagccatggaacaaaagaggctatattacctgaaatcatgtgtcaagttaattcaagttgtgaattaatgaaagacatgaat

SEQ ID NO: 16908 - DNA, 852 bp, Clostridium difficile
atgataaaaaaatttttatcatcaaaagaatctaagtatgttacgatttctttagatgacaactttaaaaagaatagtgtagatgataaattttggacctattgcaaaggttgtgatagtcatgtatttagaaaggacatagaagaaaattcatttgtatgtccaaaatgttcaagacattatggcttaagagcaagaaaaagaataaatttattgattgataaaggaacttttatggagtttaattctgatgtagaatttcaaaatccactaaattttcctaaatacaaagaaaaagtagactcttataaggaaaaaacaaaagagtcagaagctgttgtcacaggttatggaagaataaatggaattaaaacagttatttgtgtaatgaatcctgattttatgatgggaagtatgggttctattgttggggaaaaaataacttattcaatagagtatgctgctgaaaataatttacctataattatttgttctgcttcaggaggagctagaatgcaagaaggtatggtatctcttatgcagatggcaaagacttctcaagcactttctaagcttgaagaaaaatcattgccatatatatcagttctaactgaccctactactggaggagtaactgctagttttgctatgcttggtgatattataatttctgagccaaatacgttgataggttttgcaggtccaagagtaatagagcaaacaataaatcaaaaacttcctgaaggatttcaaacttctgagtttttacttgaaaaaggttttattgacatgatagtagatagaagaaaaatgaaggaagtattatatcaaattcttgctatgcacaagaaa

SEQ ID NO: 16909 - DNA, 960 bp, Clostridium difficile
ttgacattgacgctacgtaattgtatatactttgtcttaaaggagatggtaaatatgaatattatagaaattcgctcagataaaatatacaagaagataatggatgcaccaataaacaaaaaagaagatatatacagatatgaattaatgaagccttttgaatttaagtggaagtgtatgaatgttccaatagttgctagacagaaaggtggatatgatgtaattatagcaagtgaaatgttaggggttttatcgcctaaggatattgatgaaaagcaaaaaaagaatataaatgtgttatctgctgataaaatttgggccacttgtaaagaaaccatagaaaactctataaatgcttttataaaagaagggtatgatttaaacattaaggactataaatattcaatattattggcgaatccaaatagtccttatacaatattaagtgatggatactggggtgatggtgggattcctggatatatatttctatcattggttcctaatgaatatactatcaatagattaccagtattaatagcacatgaatgtaatcacaatattagatttcagtttatagagtggaataataatataacattagaagaaatgatgataaatgaaggtcttgcagaaaattttgcaacatggatgtttggagaggaaatgttaggaccttgggtcagtagaacagatatcgaaacattaaatacttatataaagccaataataaaaagtgctttaaaagaaactggatttcaaaatataacatcttatctttatggtgatgatatagctaaaatgcaaggatattttccagtagggttgccttattgtgcaggatatgcttgtggatattatatgattaagtattatttagaaaagacaaataaatcaataatcgaagcgactttattgccttatagtgagataatcgaagcagtaaaagagttttgggaa

SEQ ID NO: 16910 - DNA, 1527 bp, Clostridium difficile
atgaaaaataatcaacaaagcaatgaagaagcgcaaattcaagaagaccttagtgaagtacttcaagtaagaagagataaactaaaaaaattacaagagtcaggtagagatccttttaaagaaagtagatatgatagaacgcattattctatggatataaaagataactttgattctcttgagggtaaaactacaaaaatagcaggacgtataatgagcaagagaatacaagggaaagctggctttatagatattcaagaccaagagggaagaatccaatcttatgtaagactagatgctataggagaggaagaatatagtgtattttcaacatatgatattggagatatagttggaattgaaggagaaatctttaaaactaaaaaaggtgaaatatctgtaaaggctaaatctgtagtattactatgtaaatctttacaagttttaccagaaaaatatcatggattaaaagaccaagaactaagatatagacaaagatatgttgacttaatagtaaatccagaagtaaaaaatgcttttttaattagaacaaaagcattaaaagcattaagagcatacttagatgatagaggatttttagaagttgagactccaatattaaatactatagcaggtggggcaaatgctagaccatttataactaatcataatactttacatataccaatgtatttaagaatagcgaatgaattgtatttaaaaagacttattgttggtggatttgataaagtttatgaaatgggaagaatgtttagaaatgaaggtatggatttaaaacataatcctgaatatactgcaatagaattatatcaagcatatgcagactatactgatatgatggaaataacagaaaatgttattgcacatatggctgaagttgctacaggaagtatgatagttaactatcaaggaacagaaataaactttacaccaccttggaaaagaatgagtatggaagattgtgttaaagaatattctggtgtagatttttctactataaatacagatgaagaggcactagaagttgctagagaaaaaggtatagagataaaacctggaatgagaagaggagaagtaataaatgctttctttgaagaatttggagaagataaattaatccaaccaacatttataactcatcatccagttgaagtatctccattatctaagagaaatgttgaagacccaagaagaactgatagatttgaggcatttgctaataagtgggagttagctaatgcattttctgaacttaatgaccctattgaccaaaaaggaagatttatagaccaattaagaaaaagagaattaggtgatgatgaagcttttgaaatggatgaagatttcttaaaagcattagaggtaggtctacctcctacaggaggactaggaataggtatagatagagtaattatgttattaactaactctccatctataagagatgtattattattcccgactatgaaacttattgataacaattcaaataaagaagaagaaaac

SEQ ID NO: 16911 - DNA, 966 bp, Clostridium difficile
atgaaaataggaaatttagaattgaaaaataaagtttttctatcacctatggcaggtgtaacagaccttccatttagattaatttgtaaagaacaaggatgtgggcttttatatacagaaatgataaatggtaaggcactttgctatgatgatgaaaatactaaaaaaatgcttaagatagaagaggaagaacatcctgtagcagttcagatattcggttcagaaccagagtttatgggaagagcagcagagataatgaatgattattcaaatgagattctcgatataaatatggggtgtccagctccaaaagtagttaaaaatggagatggttcagcacttatgaaaaatcctaagcttgcagaagaggtattgagggcagtagtgaagaactcaaaaaagccagtgactttaaagattcgaaaaggctgggatgataatagtgtaaatgctgttgaaatagcaaagatagcagaggattgtggaataagtgctttagcaatacatggaagaactagagaacagttttatacaggcaaagcagactgggatataattgcagagattaagaaaaatttgagtatacctgttataggaaatggtgatgtatttacaatagaagattcaataaatatgttagacaaaactggttgtgatgctataatgataggtaggggtgctcaaggtaacccttggatatttaaaagaataaaccattatatgaatacaggcgagattttgccagagccaactcttaacgaaaaaataagtactgccattaagcatttaaaacttgcagtagaagaacatggagagtatgtagctgtaagggaaatgagaaaacacatcgcttggtatttaaaaggacttagaaactctgcaaaattaagggatgaaattaacaaaatagaagactatcaagaagttgtgtcgaaattggagtactatatggaagactccttgaca

SEQ ID NO: 16912 - DNA, 1992 bp, Clostridium difficile
atgtatgaaaggagggcttctatattgaataagttgctaaaaggggcaggtttttatctacttgtttttataattatagtaggtatagttcaattctcaggtaagcctacagaaaaaataaaagatttaaaattctctgaagtatatagagaattaacagatgagaatatatcaagattatactttgtaaatcaaacttctgtagaaggtactataaaagatacaaatacaaagtttaagtcatatgttccaacagaagtgatgggaaataaacttgcagatgaggtgttagaccaagctaaggctgggaaactaacttttggtggtgaagctaagccatctacaccttggtttgtcgaaatgttgcctacattactgttaatattcttcatggtgattatttggttcgtgtttatgaatcagtctcaaggtggaggcggaaaggttatgagttttggcaaatcaaaagctaaggttcataaagatgatgaaaaaactagagttacatttaaagatgtagctggactagatgaggaaaaagaagatttgcaggaggtagtagatttcttaaagaatcctaagaaatatattgaattgggtgcaagaataccaaaaggaatgcttatggtaggacctcctggaactggtaaaacatatctatcaagagcagttgcaggagaagcaggagttccctttttcagtataagtggttctgatttcgttgagatgtttgttggggttggtgcttcaagagtaagagatttatttgaacaggctaagaaaagtgctccagctatcatattcatagatgaaattgatgcagttggtagaaaaagaggtgcaggtcttggtggaggtcatgatgaaagagagcaaactcttaatcaacttctagttgaaatggatggatttggggtaaatcaaggtataataatcatggcagctacaaatagaccagatatacttgacccagctttacttagaccaggaagatttgacagacaagttgttgttggtacaccagatgtaaaaggtagagaggctatatttaaagttcactcaagaaataaaccattaagtgatgatgtaaaaatggatgtcttggctagaagaacaccaggatttactcctgctgatatagagaacttaatgaatgaggctgcaatattaacagctagaaaaagagaaaagaaaattaagatggaaactatagaagaagctataacaaaggttatagcaggtgtggctaaaaaatcgaaagtaataagtgagaaagaaagaagacttacagcataccatgaaggagggcatgcagtttgtgcccatgtacttgaagaagtaagtcctgttcatcaagttacaatagttccaagaggaagagctggagggtttacaatgcaacttcctgttgaagataagttctatgctacaaaaaatgaaatgaaagaaaatattgtagttttacttggtggtagagtagcagaagagctagtacttaaggatgtatctacaggtgcttcaaatgacttagaaagagttacagctactgcaagaagtatggtaacaaagtatggaatgagttctaaacttggtccaatgtcatttgacagtgatgatgaagtattcctaggtaatagtttttcaagtaagagaaattattctgaagaagttgcttttgagatagaccaagaaacaaagcgtatagttgatggtgcatatgataagacaagaagtatattacaagaaaatatggatagattagagtatgtagcacaagctttacttatatatgaaactttagatgcagaacaatttgtaaaagcatttaataaagagttacctctgaacgaaattgaaaatgcagttacagaggaaaattcttctaaagaagttgaagaacaattaactataaaattagaaaaagatgaagaagaaagaaacaatgttattgatataaataaaaatttagaagataaatctgataaagataaa

SEQ ID NO: 16913 - DNA, 1386 bp, Clostridium difficile
atgatatttgataaggtactaagtactataaataaacataatttaatacaaaaaggcgataaaatagttttaggtctttctggaggacctgattcagtttgtttattgcatgtactaaatagattaaaaaaagattttaatatagaaatatatgcagcacatttaaaccatcaaataagagggatagaagctcaaaaagatgcattatatgtatctaaactttgtgaggatatgggaattatattctttgtaaagtctattaatgtaccaaaatattgtgaaaatgagggattatcattagaagaaggagcaaggaagctaagatatgaaatgttttatgaaattaaggataagattaaagccaataaaatagcaataggtcataatctcaatgaccaagccgaaacggttatgatgcgtatcatgagaggaacaggtttaaaaggcttaaagggaattgattatattagagataattgcataattagacccatattagacgtggaaagaaatgagatagaggagtattgtgaagcttataatttaaatccgaggatagataaaacaaatttagaaaatatatacactagaaataagataaggttagaccttttaccatatatgaaggataattttaattcaaatgtaatagaatctatagtgaggatgagcaatagtttaaaaagtgataacgattatattgagaaagaggcagaagctaaatttagagaagtttcaaatataaaagaaaaaggctttgtagagataaatttagatgattttgtttgcttacatgatgctatcaaagttagagttcttagaaattccataaaacatatactaggagatactaattttgttgaccaaagacatatagaggatataatgtctttagaagataattcaaaagtaaataaaatgttaactcttccaagaaatatatttgtttatagaaaaaaagacagtataatattaacgaatgaggaaattgttaatgaggaaattgaattttattacaatgtacctagtaatgggtttattaaaataaaagaattaaaacaaattattgagacccaagtaatgagcatagataggtataagagtatgaaattagacaattcatctaaagggtttgattttaataaggtaaaagggggtatagtaataagaagcagaaggcaaggtgataagataaagcttgctatgggaagtaaaaaagtgaaagatttattcatagatttaaaaatcccaagagaagaaagatgtaaaattcctataatcacagatagtgaaggaataatatgtgttggagattataaaatcagtgaaaattataaaattgatgaaaacacaaaagaagtattaaaaattaattttaacaaatta

SEQ ID NO: 16914 - DNA, 804 bp, Clostridium difficile
atgaacaataaaccaataggagtttttgattcgggattaggtggattaacagttctaaaagagataatgaagatattaccaaatgaggatataatatactttggagatactgccagaataccatatggttcaagatccaaagaaactataattaaatatacttttcaagctataaactttttaaaaacaaaaggtgtaaaagctatagttatagcatgtaacactgctactgcaagaagcttaaaagaagctcaagaaaaatatgatataccgataattggagttatagaagcaggagctagaacagctgtaagttctacaaaaaacaaaattgtaggaataataggaactgaaggaactataagttcaaaagcatacaacttggaaatatctaaaatagatgagagtatagaaattgttaataaagcatgtcctttatttgtacctattgttgaagaaggatgggcaaatacagaagtggctaaattgacagcaaagatatatttacaagaattgaaagaaaaaaatatagattctttagtgttaggatgtactcattatcctattttaaagagaacaataggtgaagaagttggagagcatataaaacttgttaatccagctaaagagactgcaaaggatttaaaaaagattttagaggtgcaaaatattataaacaatacagaaattcatggaacttatcaatattatgtatcagatatacctgaaaaattttcagatatagcaagagagttcttaaagaaaaaaattgataagattcaaaaagtagaaatacaaaaatac

SEQ ID NO: 16915 - DNA, 1167 bp, Clostridium difficile
atgataaaactaattcataatgcaaatattgtattagaagatatgattttagaaaatggtcatttaatcatagagggagatacaataaaaaaagtatcaaatgataagattgattacgcatttgactttaatgagatagatgaaataatagatgcaaaaaacttatatgtaatacctggtattatagatattcacagtgatgccattgaaaaggaaatagagccgagaccaagtacattattaccatttaatatggcattttatgaactagataaaaaactacctgcaaatggaataactacagtttatcattctatatctttaggggatggagtaggagttagaagtattgataactctttaaagatgattaaaaatattgattcatataaaaatatagatagtaagagcataaatcataaagttcatttaagatatgaagtgttgtattatgaaggtttagaaaaggttttagaactattagatgaaaataaaatagactacttatcaataatggaccattctccaggacaaggtcagtatacaaatccaacattttataaagagtatgctactaaagtgtggggagttacagaaaattatgtagatacatggttagatgatttagtaaatctgcatgataatttagattggaataaaatagctaatattataggtatagccaaaactaaaaatataaatgttgcatcacatgatgatgatacattagaaaaaatggatttcataaaaaatataggcataaatgtatctgaatttcctataactcttgaagttgcaaaacattcaaagaaattgggtgttctaacttgtttaggtgcaccgaatattgtaagaggtaaatctcataataacaatttaaaagcaatggatgctatattggaagattgttgtgacattgtgtgttcggattatcttccatcagctatgataaagtctatgtgtatagttgcagaaagaataaataatttaaataaagcagtcagtttatttacctcaaatcctgctaaagcagttggtatatatgatgaaagaggtagtataaaagaaaataaaaaagcagatttagttttagtagatattgatagtgaatatccaaaggttgtaaatactattgtaaatggaaaaacagtttataaaagggaggta

SEQ ID NO: 16916 - DNA, 1428 bp, Clostridium difficile
atgagaaatctaacacttcttactgatttatatcagcttactatgttaaatggctattttgaaaagaatattcatgaagacattgttgtatttgatatgttttttagaaaaaacgcttgtgatggagggtatactatagtttgtggtattgatcaggttgttgaatacatagataatcttcatttttcagatgaagatttagagtacttaaaaaacttaaatttattttctgacaagttcttaaaatttttaaaagaatttaaattcacaggagatatatatgctgttgaggaaggaactatcatgttccctaatgagccattaattactgttaaggcacctttatatcaagctcaacttattgaaacagcattgttaacaatagttaattttcagtctcttattgctactaaagcatctagagtttgctttgcagctcaaggagaccctgtatttgaatttggattacgtcgtgcacaaggtccagatgcagggatatatggagctagggctgccgtagttggtggttgtgctggaactgcaaacgtactagcagggaaaatgtttgatatacctataattggtacacaagctcacagttgggttcaaaaatttgataatgaacttgaagcattccaagcatatgctgatgtttatccagataaatgcctactacttgtagatacttatgatgtattaaatagtggagttcctaatgcaataaaagtattcaaaaatatttctgaaaaaggatacaaacctatgggtataagacttgactctggagatttagcttatttatctaaagaagctaaaaaacaattagataatgctggcttttcagatatcagcatcactgcatctaatgacctagacgaatataccataacatcacttaaagcagaaggagctactataaattcatggggagtaggtacaaagctcattacatctttcgattcaccttctcttggaggagtttataaattagctgcatcttgtgaaaaaggagttcttgaacctaagataaagatttctgagaatccagaaaaaataaataatcctggttacaagaaagttataagaatatataacgaagacaataaggcagaggcagatttgattatgttacatgatgaagttatagatgagtctaaacctttagaaatcttccatcctacttatacatggaaaacgaaggtatttacaaattacaaagttaaagagcttcttaaaccattgtatataaaaggcagatgcaaatataataaaaaagctgttcttgaaataaaaaatcatgtacaatatgaattaagtactatctgggaacaatacaaaagactttcaaaaccacacatttataaggttgatttatctagaaatctttggtatttaaaaacacaaatgatagattctaaaaaagtttta

SEQ ID NO: 16917 - DNA, 213 bp, Clostridium difficile
gtggtgaataggatgaaagctaaagaattaagagatttaacaagcgaagagctaatgaacaaattaaacgacttcaaaagtgaattatttagcttaagattccaattagctactggtcaattagaaaatacagctagaataaagtttgttaagaaggatatagcaaaagttaaaactgttcttgctgaaagaaagttatacgaaactagagct

SEQ ID NO: 16918 - DNA, 1935 bp, Clostridium difficile
atgagcaaaccgagtttttatgtaacaacaccaatatactatccaagtggaggattacacataggacatacttattcaacagtagctgcagatacaatagctagattcaagcgtttctgtggatatgatgtaaagttcttaacaggaacagatgagcatggtgaaaaaattcaaaagaaagccatagaacaaggaatgtcagagatagagtatcttgatggaatgataaaagatataaaggccttatggaatactatggatatatcttatgatgattttataagaactacagaaaaaagacatacagacataatacaaaagatatttactaaactatatgagcaaggtgatatatataaaggtgaatatgaaggtagatactgtactccttgtgagagtttctggacagaatctcaattactagaaggaaataaatgccctgactgtggaagagaaacatatttagtaaaagaagaatcttatttctttagattatctaaatatgaagacagattaaaagagttatttaaagatgatagtttctgttttcctgctgctagaaaaaatgaaatggtggcaaactttttagacaaaggattagaagatttaagcgtaactagaacgacttttgactggggtataaaagttccttttgatgaaaaacatgtaatttatgtgtgggtagatgctttatgtaactatataacagcattaggttatatgactgataatgatgaagaatttaaaaaatattggcctgccaatgttcaaatagtaggtaaagaaatagtgagattccatacaataatatggccagcgcttttaatggctttaggtctagaagttccaaaacaagtatttggacatggatggatactatttgctgatgataaaatgagtaaatcaaagggtaatgtggtttatccagaacctataatagaaagatatggaatagacacacttaagtacttcttattaagagagtttgcatttgggcaagatggaagttatactcatagaaattttgtaacaagaataaattatgatttagcaaatgatttaggaaacttaataagtagaactgtagctatggttgaaaaatacaataatggtataataccaacagcaaaagtttcaactgattttgatgctgacttaaaagaacaagctgtttcaactagagaaaactttgaagctgaaatggataaaatgcaattccatgaagcattagagagtgtatggaaattagttagaagaactaacaaatatatagatgaaactatgccttgggcactagctaaagatgaaacgaagaaaggtgaattagacacagttttatataatttatgtgaatctataagaataatcgcaacactaataaatcctataatgaatgagactgctaataaaatatatgaacatataggaataaaaggtcaagatgatataactacatgggaaagtacaaaaacatttggtcttattggagaaaatgtaaaagtatttaaaggtgaacctttattcccaagattagatgtagaaaaagagatagaagaattaactaaaatgttctctgggaaacctccagtagaagaaaaacctttagagcataaagaagaaattactattgatgatttagacaaaatagagcttagagtagggaaaataataagctgtgaaaaacatccaaaagcaaataaattattagtatcacaagttaagattggaccagaaacaagacaaatagtatcaggaatagctgaatactataagccagaggatttagtaggaaaagaggttacagtggtatgtaacttaaaaccagttaaattaagaggtgtagaatctcaaggtatgatattagcagcaggtgatgatggagaaccatatgttttaccatttacacaaggggctaaagatggatgcgaggttcgt

SEQ ID NO: 16919 - DNA, 768 bp, Clostridium difficile
atgttatttgactcacatgcacatttaaatgatgaaagttttgatgaagatagagatgaacttattggttcattaaaagataaaggtgtagatttggttgtaaatccaggagcagatatagagacgtcgataacagcaattgaacttgcgaaaaaatacgactttatatattcagcagttggggtacatccacatgatgtatcaaaactagatgatacagcaatagaaactctaagaaaacttgcaactgagaatgaaaaagttgtagctattggagagattggattagattattattatgattattctccaagagaagaacaaaaagagtggtttaagaagcaaattgaattagctaatgagctaaaacttccaataataatacatgatagagatgcacatggagatacttttgagataataaagaatactaaaaatcctgaaataggatgtgtacttcattgttatagtgggaatgtagagttagctagagaatatgttaagatgggttgttatatatcaattccaggtacggttacttttaagaataataaaaaaactagagaagtagtaagagaaatacctctagaaagattattcatagagactgattcaccatatatgtcaccagagccacatagaggaaagagaaacaatccttctcaagtatcttttgttgctgataagatagcccaggaaaaagggatatcttatgaagaagtatgtagagttacaaaagaaaatgcaaagaaattttttaatataaaa

SEQ ID NO: 16920 - DNA, 1080 bp, Clostridium difficile
atgtatatttatgatttattagagcaaggtataagactaaacgcatcagacatacacataacagttggaacaaatcctgtagctagagtaaaaggtggatttgtaaaactaagtgaacaaatattgacatcagaagtaacaatgcaaatggcaaaagatatagcaggggaatctatgtttaaagtaatagaagaacatggagaagctgatttttcagcttctctaaaaacaggagaaagatttagggtaaatgcatataggcaaaaaggaaattacgcaatagcaataaggactataacagcagaaattccaacatttgaaaaattaggccttccagagagtataaaatcttttactgaaaagcataaaggattagttttagttacaggtccaacaggaagtggtaaaagtacaacacttgcaagtatgataaatataataaatgaaaaacaacaaaaacatataattacacttgaagacccgatagaatatgtacatcatcataaacaaagtttagtaaatcaaagagaagtaggaactgatacagaaagttttcattcagcccttagagctattttgcgtcaggacccagatgtaatactaataggagagatgagagaccctgaaactgtttcaatagcattaacagcagcagaaacaggtcatttagtattttcaacactacatacagtaggggcagctaagacaattgatagaatagtagacatgtttcaaccatcccaacagcaacaaataaaaacacagttatctacagtttgtgaaggtgtggtatcacagcagttacttcctacagcagatgggaaaggcagaatagcagcaattgaattgatgtttgctactccagcaataaaaaacctgataagggaaggcaaaacatatcaaattccaaacatgatacaaactggagttaaatcaggtatgaaaactatggaccaagatttaatggaactttataaaaatggaaagattacaaaagatatggcacttagtaggtgtactgaccaagagtttatgacaagaatgataggtggagtaaactacaatggatattataatcgt

SEQ ID NO: 16921 - DNA, 528 bp, Clostridium difficile
atgataaaagaaataatagtagtagagggtagagatgacgttacagcagttaagagagcaatagatgcagaacttataactacaggtggatttggatttccaaaaggtgtaatggagcgtataaaagctgctaatgaaagacgtggtgttataatatttacagacccagattttgcaggtgaaaaaataagaaaaaaaatagcatcagaagttccaggatgtaaacatgcatttctaccgagagaggaagctaaaaaggatggagatataggtattgagaatgctactcctcaaagtataatagcagctctgaataaagttagaactgaaaatacagaaaaaagagatgaatttaagcaagttgacttaattagaaatggtcttataggtaatgaagaagcatcacttagaagagatgcacttggaaaaatacttggaattggatatggaaatgcaaaacaatttttaaatagattgaataattatggagttgaaagagaagaatttatagatgcattaaaacaaatc

SEQ ID NO: 16922 - DNA, 867 bp, Clostridium difficile
atggatagactatcttcacataatgcaacaaaggaagtagtacaaaaatataattttaaattttcaaagtctttaggtcaaaatttcttgatagatagtaatataattgataaaatcttatctggagctagaatcacaagaggagataatatcatagaagtaggacctggtataggaactcttactcgtgagatgggtaaaatagcagaaaaagtagtggctatagaaatcgatagaaatttaattcctatattgaaagataccttgtcagatttagataatacagaggttgtaaatcaagatatactaaaagtagacatacaggaattagtaaaagataaattaaatggtgggccagttaagcttgtagcaaatcttccatattatataactactccaatagttatgaaatttttagaggaagacatacctgtaacagacatagtagtcatggttcaaaaagaagttgcagatagaatgaatgctattccgggtactaaagattatggggcattatctatagctgttcaatactattgtgatacagagattgtggcaaaagctccaagacatatgtttataccacaaccaaatgtagattccacagttataggtctacatgtaagagataaaagaaaatatgatgttcataatgaagacatattttttaaaacagtaaaagcatcctttggacaaagaagaaaaactcttcttaattcgttgggaggtcttggttttcttaataaagatgaaataagagaaatattaaaagaagctaatatagacgaaaaaagaaggggtgaaactcttagtatagaagagttttcagttctttcaaatataataaatacaaaagtatcttctaaa

SEQ ID NO: 16923 - DNA, 366 bp, Clostridium difficile; identical to SEQ ID NO: 16755

SEQ ID NO: 16924 - DNA, 702 bp, Clostridium difficile
atggaggatatgaaaatgaaaggtaagttaataattatagagagtggttcagatgcaagtggaaaggctactcagacagaaatattatatgaaagattaaaaaaagaaggctatatgattaaaaaggtagaatatccaaattatgaatctccatcatctgccttggtgaaaatgtacctaaaaggagactttggtaaaaatgcatcagatgtagacccatatatagcatcaactttttttacagctgataggtatgcatcatttaaaaccgattgggaggagttttacaatgaaggtggaataattatcgcagatagatatacaacctctaatatggtacatcaggcctctaaaatggatatttgtgatagagaagagtatttaaattggttagctgattatgaatttaatttatttaagataccacaacctgattgtgttatatttttagatgtgcctattgaatttagtaaaaagcttatggagaatagaaaaaataaaattacaggggaagaaaaaaaggatattcatgaaagtgacatagagtatttagagaaatcttacaacaatgctttatatatagcagataaatatgattggaaaaaaataaattgtgttttagataacaaattaagaagtattgaaagtatacataatgaaatttataaaatagttcttgattcaataaaacctatggagaga

SEQ ID NO: 16925 - DNA, 933 bp, Clostridium difficile
atgtattttgaaaatattatagggcaagattttgcaaagaaatatttaacaaattctataaagaaaaataaacttaataatgcgtatatgtttgaaggaatggatggaataggaaaaaagaaatttgcagatgaattatcaaaactattacttgattatgaaaatctcgaaaatagtccagactatgtactcataaaaccagatggaaatagtataaaaatagctcaaatcagaaatttacaatcagatatagtaataagacctcataaagactataaaatatatataatcaataatgctgaaaaaatgactgtggaagctcaaaatgcacttttaaagacgctagaggaacctccaaactatgctataataatcttagtcacaaacaacaaggaatctttattagaaactataaaatctagatgtgatataataaagttctcacctataccaattgaagacttaaaacgttatttgataaatacaggtatagaagaagaaagagctcaattattggctattttttcgagaggaagtattgagaatgctctaaatctatctcagtcttctgagttttcaatgatgagagaagatatacaacagtatattcagataatgttagataaaaacatagtggagattttaaatataccaaataatatggaaaaatatagaggtaagattatagctttattagatatgatgataaactattttcgagatatcatcctattaaaagaaaatgtaaacaagaacatgttaataaatgtagataagctagttttcattcaaaatatgagtggaaaaattagttattctcaattgtccaagattattgatataatagaagatgcaaagagtaaaataaaaagcaattgcaatttcaatataagcatacaagttatgtctttaaatatatacgaggtgattaaa

SEQ ID NO: 16926 - DNA, 831 bp, Clostridium difficile
atgagcgggaaattgtacatatgtccaacaccaataggaaacctagaagatataacatatagaactttaagaacattaaaagaagtagacttgattgcagcagaagatacaagacatagtataaaacttttaaatcattttgaaatctcaaaaccactaactagttatcatgaacataataaggattcaaagggagattatttgataaataaactaattgatggtgaaaatatagctctgataagtgatgcaggtatgcctggtatatctgacccaggagaagagataataaaacaagctatacaaaataacatagagatagaagtattgccaggtgcaacagcctttgtaacggctttagttggctctggtatggacacacatagatttgtttttgagggctttttagatagagataaaaaagttaggaaagcacaattggaagaattaaaggaagaaagtagaactataattttctatgaatcaccacatagattgaaggatacactaaaagatatgcttaaaattcttggtaataggaatatttctataaatagagaacttacaaaaaaatatcaagaaataataagagaaaatatagaaactaccataaaaatatttgaggaaaaagaagtaagaggagagtttgtattaatagtagagggttttcatggtgagaagtcaaagaaagaaaattatgatgggcttacagatagggaatatgttttaaaactaattgaaagtggtatgaacaaaaaagatgcaataaaaatagtttgtaaagatagaaagttaaagaaagatgtggtttataaacaagttttagattta

SEQ ID NO: 16927 - DNA, 907 bp, Clostridium difficile
ataattatagccacacatggaaatatggctaaagcaatgttagaaagtgctgaattaatagtaggcaaacaggaaaatgtagaaactttaggattaaaccatggtgacagcatagatgagtttagtagaaagttagaagatggaattgagaaatataaggatgaaggggttttagtattgcttgatttttatggcggaactccatttaatacatctgctattataataaataaatttgctaaggtatgtgagttagaatgtttgacaggtgtaaatttacctatgcttttagagttatttttaaacagagatactatgaagttaaaagacttgaagaatttatgtgaggaagttgggatatcaggaatcaaagatgttaaaactgttttaaagttgtaaaataaattaaaaatctggaggaataattatgagtaatatagcattaacaagaattgatgatagattaatacatgggcaagttattactgcttggtgtaagattacatcagcaaaaaggatagtaatcgtggatgatttagtagtaaaggacccatttatagttcaagttttacaaatggcagctccatcaactgttaaggttgaagtacatgatgtagaatcaggtgctgaagtcttaaaatcacataatggagatgaaaatttaatagtattggtcaaataccctaaaactgtcttaggtttagtaaatagcggggtagatttaaaggaattgaatgttggaggtatgggagcagggcttggtagaaaaagtttttataaaaatatatctgtgtcagatgaagaaaaagaaatatttagagagctaatatcaaaagatgttaaatgctttatacaaatagtaccagatgcaaagaaaattgatgtaggaacattattgtaaagaaga

SEQ ID NO: 16928 - DNA, 612 bp, Clostridium difficile
gtggagatatttagttatataattattgctgtagttgcatatcttttaggaaatatatctacctcatacatagttgcaaagcgaattgctggggttgatataaggactcaaggttctggtaatgcaggttcgacaaatgtacttaggacacttggaaaaagagcaggagcaatgacatttttaggtgatgttcttaaaggtgtaatggctgttttaatatcagaatttgcagcaagattggttggaatagatactcttttagctggatatctggcagttatatgtgttgtagcaggtcataattggccagcggttttaggatttagaggaggcaaaggtgttgcaacttcactaggggcaatgctagctgtaaatccagtaataacactaatgtgtctagcagtatttatattggtggtagctataacaaagtatgtttcattgggttctgttgtaggaataggatgttcaccaatatttatgattatggtaaaaaataaagctggtttaatagtagctctgttcttaactgcatcagtaatatataatcacagagcaaatataaagcgattattaaatgggacagagagaaaaattggtcaaaagaaagaa

SEQ ID NO: 16929 - DNA, 1080 bp, Clostridium difficile
ttgatgagtggaatatggggaaataatttaaaagtatcaatttttggagaatctcatggaaatgctataggtataaatatagatggtcttccttcggggattgaacttgaccttgataagattgataaagaaatgaagagaagagcacctggaaaaaattctatatctacttcaagaaatgaaagtgatataccagaaattctaagtggatattttaatggaagaactacaggaacgccattatgtgcaatcataagaaatagtgatactcgttcaaaagattatggagagcttaaaaatttaatgagaccaggacatgcagatttcacaggtaatgtgagatattctggatttaatgactatagagggggggggcatttttcaggtaggataacagctccattagtattttgtggggctatatgtaaacaaattttatcacaaaaaggaatagagataggagcacacataaaaaaaattaaaaatatagaagatatgagttttgattatgtaaatatttcaaaacaacagttatcaaatttgcaaactttggaactacctttacttgatttatcaaaggaagaagccatgaaaaatacgattatagatgcaaaaaatcaaggagattcagttggtggtataattgagtgtgcagtagtaggtattaatgtagggcttgggaatccattttttgactctgttgaatctactttatcacatttattgttttctgttcctgccgtaaaaggtgtagagtttggtttaggttttgaacttgcagatatgtatggctctcaaagtaatgatgaaatgtattatgaaggaaatcaagttaagagcaaaacaaataacaatggaggaattataggagggattactactggaatgccaataattttcaaagtggcaattaagccaactccatcaattagcagacaacaaaacacagttaatataaaagataaaaaggacgatattttatatattaaaggcagacatgacccttgtatagttcaaagggctatacctgtaatagaagcagtaacagccattggaatttttgatttgatgaaaggacga

SEQ ID NO: 16930 - DNA, 696 bp, Clostridium difficile
atgaacgtaataggaattataggtgcaatggatgaagaagttagtattttagttgatttaatggatattagagagactataaaaaaagctagcttagaattttataagggaattttggaaggtaagaatgtagtgttagtaaagtgtggcataggtaaggttaactctgctctttgtgcccagatactaataagcgaatttaaggttgatgctattgttaatacaggtgttgcaggagctttaaacgaaaaacttgatgttaatgatatagtaatatcaactgatgctatacagtatgatgtagacactacagcatttggagaccctaagggagttataccaagaatgaagacttctgtatttaaagcagatgaaagacttatagatgctgcttacaaatcttctgtggaagaagtaaagactcataaagtattaaaaggaagagtagttacaggagataaatttataaattctaaagaattaaaagaagaattagtaaatgattttggtggatattgtggagaaatggaaggtggagctatagctcatgtatgctatttaaataatactccatttgtaataataagagcaatgtctgataaggcagatggaagtgctgatgttacttatgatgtatttgtacatgatgctgccaataactctaaagacatagttttaaatatgttaaaatcaata

SEQ ID NO: 16931 - DNA, 597 bp, Clostridium difficile
gtgaatactttgtttaagaaaataaataaagatattgaatatataatgaagaatgatccagcagctaggtctaagatagaagtttttttactttatccatcagttcatgcaatgataatgcataggatggctcatgctctttataagaagaagaagctttttacagcaagattaatatcccagatatccagatttatgactggcatagaaatacatcctggtgctaaaatgggggaaggtatattgatagaccatggaatgggtgttgtaattggagagacagctgaagtagggaatagggtgacaatatatcaaggagctactttaggagctacaggaaaagatactggaaagagacatccaactgttggtgatgatgtattaattggtgctggaacaaaaatactaggacctttaaatataggttcaaattcaaaaattggtgcaaattctgttgtcgttaaggatgtacctaatggtgcaacagttgttggtataccagcaaaaatagtaaaaataagaaacctagaacctgtaaaaaagaataaaaaagaagtgtcctatgagtatgatgaattagataatgtatattatata

SEQ ID NO: 16932 - DNA, 1308 bp, Clostridium difficile
atgaataaagaacaattaaaatctctagtaataaaaactatagatgaaaatagagaaaaaatattaaaaataggtcaaggaatatacaaaaatccagaatatggatataaagaatttaaaactacagaagctgtttcaaacttttttgagcaagaattaaatttatctgtagaaaaaaatatagcagttacaggatgcaaagcagatgcaaattctagcaagaaaggtcctcatatatctatacttggagaattggatggtatatcatgtaaagaacataaagatgctaatgaaataggtgcttctcatacttgtggacataatattcaaatagctggaatgttaggtgctgctgttggtttagtaaaaagtggcgttttagaacatttagatggtaaagtatcttttatggctactcctgctgaagagtttattgagttggaatacagagagcaattaaaaaaagaaggaaaaataacttattttggtggaaaacaagaattaataaaaagaggttattttgatgatatagacatatctatgatgtttcatgcttctgatttaggagaagataaggctctagttggtcctgagagtaatggatttgttggaaaaaaggttaaatttataggtaaagaatctcatgctggttctgctccacatgatggaataaatgctttaaatgcagcaatgcttgctataaacaacgtgaatgcacttagagaaacttttaaagagtctgaaagagttagattccaccctatcatcacaaaaggtggagatatagtaaatgttgttcctgctgatgttcatatggaatcatatgttagagctagaactataaatggtatgattgatgctaatgaaagaataaataaggctttgatggctggtggaatggcagttggagctgatgttgagataactgaaattcctggatatcttccaatattacgatacaaaagtcttgataatttatttaaaaacaatcttgaagatttaggtctaaaaggaaaagttattgatggtggagattttacaggctcttttgattttggagatgtgtctcatataatgcctactcttcaccctatgattggtggtgtaaaaggagctcttcatacaagagattttgaaatagttgatgaagatttagcttacataattcctgctaaagcaatggcacttacagttgtagaccttctttttgataatgctaaggatgctaaagatatattagatacctttactccagttatgactaaaaaagaatatctaacattcttagaaaaacacgataaaacttta

SEQ ID NO: 16933 - DNA, 1501 bp, Clostridium difficile
aagaaaaacttttttgacaggacattaaacagaatagaaactgttggtaataaactaccagacccagttacaatatttttagggttatgtgtacttttacttatactatctagtctagttggttctatggggatatcagtagttcatcctggtactggagaaactataaccgctgtaaatttattgactgtagaacagcttcaaattcttttaggaaacatagtcagcaatttccaagggtttgctcctttgggtctagttctagtaactatgataggtgctggtgtatgtgacaaaacaggacttatgacagcaacaatcaaagcatcagtaagcaagattcctgaaacaagagtaactcttgttgtaatgactataggtatgcttgccaatatagcttcagatgcaggtacaatattatttccaccattagctgcacttgtatatcttggtgttggtagacatccacttataggtttattttctggatatgcagcagtctgtctaggatttgccgcaaacattatggataagtgtcaatgatatacttgctgcaagttttacagttccagcagctcaaatgattgattctggatttcaagccaatgcaacaatgaacttattttttatgatagcatcaacttttgttctaatacttttggcaacatgggtaacagaaaaaattgtagctcctagatttggtaaatatgaaggaaatgcagaactagatgttgatggaagtcttagtgatgtagaaaagaaagggcttaaaaaagctggtataagtatattaatatatgtggctattatagtagctcttagtgtaatcggtaaaaaaccattcttagctgacccagaaacaggagatttactatcaaacaatgctcctcttatgaaaggtatggtacctataatagcactagcatttttcatacctggtgttgtatacggaaaaactataggtaaaataaagaaggataaggatgtagtctctataatggctagtgcaatgagtgatatgggtggatatataatactagcatttgctgcttcacaatttttgcaattattcacaaatagtaatttaggtctgatactagctgtaaagggcggagaatttttaaaatcagcaggaataaatggacctttattgttgataggatttattatattatcatgttttataaatttatttataggtagtgcatctgcaaagtgggctattcttgcacctatatttgtaccaatgtttatgatggttggatacaatccagcacttactcagatggcttatcgtataggtgattgtataacaaatccacttagcccattatttccgtacttccctattatactagcattcacaagaaaatacgataaagatgctggtatgggtactgtaattgctaatatgataccatactctatatcattcttaatagtgtggactatactactaatattgtttatggtatttaatattccactaggacctggaata

SEQ ID NO: 16934 - DNA, 951 bp, Clostridium difficile
atgacagctaaagttcagtataatttgggaggaaatacaatgaataatcaagatatatatataaatttattaaatatattaagtaaagaggatataaaagtcgatgaacctatgaaaaaacatatttcatttagggtaggaggaccagcagatatattagttagacctagaactgaagaacaattaaaaaatgtacttaagttggtaaaagaagaatctattccgtatttaataattggaaatggttcaaatattttaattaaagatggtggaataagaggagtggtaatagaactagctgataatttcaattcttatgagataaatgatactaggatgactgctcagtcaggagctttattatcagttttagggaaagctctccaaaagcaagaattaaaagggtttgagtttgcatcaggaatacctggcacattgggaggagcattagccatgaatgctggagcatatggtggtgaaatgaaggacatagtgaagtcagtaagactgatggatatggaaggcaatatatttgaattatcaaatgaacagatggaatttgggtatagaaaaagtataatatcgaaaaacggatatatagctttatcagcagaattagaattacaagaaggaaattatgatgaaataaaaagtttaatggatgatttagcgacaagaagaataactaaacagccattaaattttgctagtgcaggaagtacatttaagagaccaacaggatattttgcaggtaaattaatagaagaaactggattgagaggtcttactttaagaggagcacaagtatctgagaagcattgtggatttgtagtcaatcaaggagaagcaagtgctaaagatattttggatttaatatatgttataaaaagtgctgtatatgccaagtttggggttatgttggaagaagaagtcaaaatacttggagaggat

SEQ ID NO: 16935 - DNA, 834 bp, Clostridium difficile
ttgttattatataattattgccataaaaagacaagggaaagtataatttttaagggggaaggatttatgagtaaaggattcttgacacctggggaaactgcacaagcaactataagtgcaggcattaaaaaagcaaatatttcgacacaaaacgcaattctattaggtttatttggaggagcatttataggttttggggcattggggagtatgatagttagtcaaacttttggcaagatagacccgggggtagctagctttttaagtgctatggtctttccagtaggtcttatgcttgtagtagtggcaggagcagaattattcactggaaacaccttaatggctattgcacttatggacaaaaaaataacattaggaaaaatgttaagaaactggggactggtttattttgcaaatttagtaggttcaattttgctagttgcacttgtgttttattcttctacattgacaggagatgcagctacaaaagctatagctgtggcagaagctaaggttaattcaactatagcatcaatgtttttaaaagcaatactttgtaatattctagtcgttttagctgtatggatggctacagcatctcaagatataatgtcaaaattggcttcatgttggacagtaataatgctatttgtattatgtggattccaacatagtgttgcaaacatgttttttataccaatgggaatggcattaggagcaaatataactatggttcaatttataactaatttggtatttgtaacacttggaaatatcgttggaggttccatagtagttggagggatttattatctttgctatgtcaaaaatagt

SEQ ID NO: 16936 - DNA, 495 bp, Clostridium difficile
atgtgcgattttatttcacacaacaagcaattatttgacgaactagatatatttattgactctcttgcaacaaaggaaggtgcgttaatacaagttctacatgaagcccaaggtatatttggatatcttccaaaagaagttcaacttcatgttgctagaaaacttggagtagctcctgcaaaggtatatggggttgttacattctattcttattttactacagaacctgtaggtaagtataaaatcagtgtctgtctaggaactgtatgttttgtaaaaggtgctgacaaaatcttaagtgcttttgaaaaacagcttggcataaaagttggagaaactactagtgattttaaattttctttagaaggtttaagatgtttgggggcatgtggtttagctccagttgttactgtaaatggtaaagtttatggtaaagtgaaacctgaccaagtaagcgaaatattagatacttatagagaattagaattgaattgt

SEQ ID NO: 16937 - DNA, 1884 bp, Clostridium difficile
atgcgtaaagtaaattcatttgatgaattaaaagttttagctgatgagctgaaacctaatcttagcttaagaaaaaattattctaaggaaaatgtattaagaagagaattacttgtttgttgtgatactggatgtacatcttcaaacagtctagaaatagttagtgaattagaaaatgaaataaagaaatcaggaatccaagataaagttagtgttcgtttgacaggttgttttggtttctgtgctcaaggtcctattgtaaaagtttatcctgataacgttttctacgtaaaagttgagccatctgatgctgaaaagatagttcaaagccacttaattagaaatacagttgtcgaggaattattatatgaggaagaatctttaagtaaaaaagttgaagaacaagaagaaatgtctttctacaaaaaacagttacgtatagctttaaaaaattgtggtcttatagacccagatagtatagaagaatatattgccaatgatggttatttagctctaggcaaatgtttaacttctcttactcctcaagaagttattgcagaggtaaaaacttctggccttcgtggtagaggtggtgcaggtttccctactggctctaaatgggaagctgcttcaaaaaatccagctggtccaacagataaaaagtttgttgtatgtaatgctgatgaaggtgacccaggtgcatttatggatagatctgtacttgaaggtgaccctcatagtgtactagaagctatggcaatatgtggatacgctataggttctgatacaggatacatatacataagagcagaatatccaaaatctatagaaagattaaaagtagccatagctcaagctgaaaaatacggtttacttggcgaaaatatcttaggcactggatttaactttaaattagaattaaaatatggtgcaggtgctttcgtttgtggtgaaggtacagcgctaatgcattcaattgaaggtagacgtggtgaacctagaatgaaaacttatagttcttctaagagtggtctatggaaatctcctacttgcttaaataacgttgagacttttgctaacatacctgcaattatacttaagggtggagattggtttgccaacttaggtactgaagattctagtggtactaaagtctttgctcttggtggaaaagtagaaaatgtaggacttgttgaagttccaatgggtactactttaagagatattgtatttgaaattggtgggggaatccctgaaggtaagaaatttaaggctgttcaaacaggtggaccatctggcggatgtataccaactgaacatttagacactcctatagactttggttcattaagttctatcggttcaatgatgggctctggtggtatgcttgttcttgatgaatctgactgtatggtagatatagccaagttcttccttgagtttactgttgaagaatcttgtggtaaatgtacaccttgtcgtataggtactacaagattattagaaatattaactaaaattacagaaggtaatggtactctacaagatttagatgacctagaaaaccttgctgaaactatacaaactgcttcattatgtggtcttggtaaagctgctccaaaccctgttttaagtactcttcaatatttcaaagatgagtatatagctcatgttgtagataagaaatgtcctgctggtaaatgtcagaacttactttcttactttataacagatgactgtaagggttgtacaaaatgttctagagtgtgtcctgctggttgtataacaggttctgttaaggaacaacatacaatagatacttctaagtgtctaaaatgtggtgcttgtatagataattgtacatttaacgctataatcaagaaa

SEQ ID NO: 16938 - DNA, 901 bp, Clostridium difficile
gactttgagattatagatgagtggtattcatgtaccaaagtcacagacgaagcttttatagtatatggtactctttgggtaatagaaaaagattacctagaaaaagatatctatgtagaaatggatactcgatttactatggtatacagagttacagatgatatgattaaacttatccatgttcaccattctattccaaactttgaccaaatgaaagatgagtattaccctaaaacaataactgaaaaagcacaagaagcactagcaatggcaaatgaatttaaactaaaatcagaaaaagaccttatgactggactatacaatagacatttttttgaagtacacataaaagaaatgcttaaaactgtttcacatggatacttttacatctttgatttagataattttaaacaggtaaatgatatctttggtcatgttcgaggagatgaaatactaatacatttttcaaatattttgactaaagtattcgtaaatgatgctattattggaagacttggtggagatgaatttgctgtttttgaatatagtaatcaatcaaaagagaatgttgaaaataaggcaaagaaggttttagaattatgcctagagagtaattcttgttctataggtatatctaaattagaaaataactctgatactttccagtctttatacaaacaatcggattatgctttgtattattcaaaacgaaataataaaggaaactttagttggttttagtacaaaagatattaaaataggcaaatttattagagtatcttgtcctatatactaataagtaaagtaaacaacaagctatctttgcatatatttatataaaccaactattcttaataaaactacaatagtcaacatgaccactattatagaatataataaa

SEQ ID NO: 16939 - DNA, 927 bp, Clostridium difficile
atggaaactagcaataaagtatcaataagagagataataaaagagttgaagttaaaagtagtatacatgcctgatgatgtagattattatgtctactctcaagatataaatagaccaggattacagtttgcaggatattttgattattttgcatatgaaagaatacaaatagttggaaagacagaatataatttttttggattaatggatagtcatattcgggaagaagtactagatagatttttctcatatgaaataccagcgttaataatttctagagacttggaaatcaagccagatgtaattgaaaaggctaaaaaatataaaagaatacttttgagcacaaatagaaataccactagacttataaatagactgtcaaactatttggataataagttagcaccacacacaacaattcacggggtgctagtagatatttatggtataggtgtactgataaaaggtgaaagtagtataggaaagtcggaaacagcattagaattgattcaaaggggtaatagattagttgcagatgatgctgtagaaataagaaaattagatgaaagtatgcttgtgggtcagtcacctgaactaataagacattttcttgagataagaggaataggaataatagatgttagaagtttatatggagtaggggcaatcaaaaattctaaaatgatagatttagtagttcatttagaagcttgggatgaaactaagtattatgatagactgggactggataaagaatatgaagaaatacttggtgttaatgtagagaaattagttgtacctgttaaacctggaagaaatactgctatgatattagaagtagcagcaatgaattttagacaaagaggaatgggatacgatgcagctcaagaatttactaaaaaattatcaaaattaatcgatactaag

SEQ ID NO: 16940 - DNA, 1758 bp, Clostridium difficile
atgttaaataatgtaaagaagacaaaaattgtttgtacactaggtccagcatcacaaagtgaggaagttttaactcaacttatgcaaaatggtctaaatgtgtgtagatttaacttttctcacggttcgcatgaagaacataaagaaagaattgatatggcaaagaaagttagagaaaaattaaataagccagttgctatattattagatactaaaggtccagaaattagaacaggtaactttgaagacccagaggtatttttagaagaagggcaaaagttcactataactatgaaagatattatggggactaaagaaatgtgtacagtaagctataaaggtcttgctgaagacgttaaatcaggagattctatactaatagatgatggtttagttggcttaagagtaaaagaaataaatggagaagatatagtttgtgttgttgaaaattcaggaatagttaaaaatcataaaggagtaaatgtacctggtgttaagataaatttaccagcaataactcctaaagatataagtgatatagagtttggaataagtcaaggaatagattatatagctgcttcttttgtaagaaaggcatctgatgtactagcaataagagaagtattagagaacaataatgcaactgatatacaaataatatctaaaatagaaaaccaagaaggtgtagagaacctagatgaaatattaaaagtttctgatggtataatggtggctagaggtgacttaggtgttgagataccaactgaagagatgccaatagttcaaaaaatgatgataaaaaaatgtaatgaattagcaaagccagttgttactgccactcaaatgcttgattctatgataagaaatccaagaccaacaagagcagaagttacagacgttgccaatgctatatatgatggaacagatgcgataatgttatctggagaaactgctgctggaaaatatcctgtagaggcagtaaaaatgatggctacaatagcaaaaagaacagaagagactttagattatgatagattactaaaggaaaatggtactaacaatgttactgtaacagatgcaataagccatgcaacttgtacaacagcagtagatttaaatgcatcagctataataacatctacttcttcaggatatactgctagaatggtatctaaattcagaccaaaatctccaataatagctactacaaataatgaaaagactatgaataaattagctcttacatggggagtatatccagttaagtcttctgttgcaggaaatacagatgaagttatagaaaaggcaattgaggcagctagacaagctgattatatagataatggggaattagtagttataactgctggagtaccagtaggagtaagtggaactactaatttaataaaggttcatgtaataagcgaagaaatcgtgcaaggtataggtgtaggtactcaaacagtagaaggtaaagttcgtataataaagaatggaaatgcttgtgtagactttaatgaaggcgacatacttgtttctactgctactgatgctgaaatgaacaattatatagaaaaagcaggagctgtagtaactgagaatggtggaatgacatcacatacagctattgtaggtataaatttagatataccagttattgtgtctgcagctgatataacaaatctagtaaaagatggagaagttgtaactgtggatgcatcaagaggcgtggtatatagaggttcaactagagtttta

SEQ ID NO: 16941 - DNA, 2823 bp, Clostridium difficile
atggaagataaaattataataagaggagcaaaagaacataatttaaaaaatatagatttagaattaccaagagataaatttattgtttttacaggtttgtcagggtctgggaagtcttctttggcatttgatacaatatatgcagaaggacagagaagatatgtagaaagtctatctgcttatgcaagacaatttttaggtcagatggaaaagccaaatgtagaatatatagagggtttatcaccagctatctcaattgaccagaagactacctcaaaaaacccacgttctacggttggaacagtaacagaaatatatgattatttgagactattatttgcaagagtaggagatgtgtattgccctacatgtggtgaaaaaataagtcagatgactattcaagaaatagttgataaaatgctagattttccagatagaacgaaattacaaattctttcaccaattgttagaggacaaaaaggtacacataaaaaagtctttgataatatcaaaaaagaaggatttgtaagagttagagttaatggtgaaaactatgaagttagtgatgatataatcttaaataaaaatcaaaaacataatatagaagttgtagtggacagaatagtaattaaagatggaatagaatcaagactagcagattcaattgaaactgcagttaagctatctgatggtcttgtaatagcccaaataatagatggagaagaaattcttttttcaactaaatttgcatgcccagaacatggaattggcatagaagaattatctccaagaatgttttcatttaatgctccctttggtgcttgtgatgtttgtaatggtcttggggaaagtaaagaagttgacccagaattagtagtaccaaacaaagatttatcaataaaacaaggtgcagtggcagcatggggttcaacaggtgttaatgatgacacttattacagtaaaatgataaaaagtttagcagagcattttaatgtatctttgacaacaccgtttaaagatttaccagatgattttgtggaggaattactttatggtaaagataatataattgtagagtttacttatgagtcaaaatttggaggaactagaaattataaatcatactttgaaggtgtaatagtaaacttagagagaagatatagagaaactaattcagattacatgagagataagattgaagaatacatggcagagagaccatgtccaaagtgtaaagggatgagacttaaaaaggaagttttatctgttttagttgatggaaaaaatataatggaagttacaaacttatctgtaaatgaattgattgactttatggaaaatataaatcttacagaaaaacagagatttatagctcatgagattataaaagagataaaaggaagagctatgttcttaagagatgtaggtcttgattatttaaatttatcaagaaaagctggaactttatcaggaggagaagcgcaacgtataagattagctactcaaataggttctgcattggttggagttttatatgtacttgatgagccaagtatagggcttcaccaaagagataatgataggcttataactactcttagacatctaacagatttaggaaataccttaatcgttgtagagcatgatgaagacacaatgagagaagctgattatgttatagacattggtccaggtgcaggtatacatggtggtgaaatagttgcacagggtactttagatgaaataattgaaaatgagaactcaataacgggtcaatatttaagtggtaaaaaacaaatattgcttcctgagactactagagaaggaaatggaagttttatagaaatagttaaagcatcagaaaataatctgaaaaatattgatgtaaagttcccattaggtaagtttacatgcataacaggtgtttcaggttctggaaaaagtacattaataaacgatatactttacaaaggtgttgcaagtaaagtgaatagacttaagcaaagagctggtaagcataaggagataaaaggaattgaaagtatagataaagttataaatatagaccaaagtcctattggaagaacacctcgttcaaatcctgctacttatacaggtgtatttgattttataagagatatttttgcatctactaatgaagctaaagcaagaggttataaaaaaggtagatttagttttaatgtaaaaggtggtagatgtgaagcttgtaagggtgatggaataataaaaatagaaatgcatttcttaccagatgtatatgttccttgtgaaatttgtaaaggtgaaagatacaatagagaaacattgcaagtaaaatacaaagataaaactatatctgatatattagatatgaatgtggaagaagctgttgagtttttcgaaaatataccaaatataaaaagaaaattagaaactttaatggatgtaggactttcatatattaaattaggacagccttcaactcaattatcaggaggagaagcacaacgtataaaattagctgctgaacttagtaaaagaccaacaggaaagactttgtatatattagatgaacctactactggacttcatatggcagatgtagacaagctaatccaagtattacaaagactagcagatacaggaaatacaattatagtcatagaacataatttagatgttataaagacttgtgattatgtaatagacttaggaccagaaggcggagataagggtggaactatagttgcaactggaacaccaaaagaagtatctaaagttgatggttcttatacaggtcaattcttaaagaaatatttttct

SEQ ID NO: 16942 - DNA, 957 bp, Clostridium difficile
atgaaaactataggattactaacaagtggaggagatgctccaggaatgaatgctgcgattagagcggttgtaagatcagcaatatattatggatgcaaagtatatggaatcaatagaggatataagggattactagaagaagatttaactgaaatgaacttatcttctgttggagatattatacacaggggaggaactatattaaaatcttccagatgtgaagaatttaaaacagaagaaggtagattaaaagcagtaaaaattcttaaaaagtataaaattgattgcttagttgtaattggtggagatggttcatttgcaggagctcaaaaacttagtgacttaggattcccagctataggcataccaggaactatagataacgatttagcatatacagattatactataggatttgatactgcaatgaatactattatagatgctataggtaagataagagatacatcatcatctcatgaaagagttaacatagtagaagttatgggaagacactgtggagatttagccttatatgcaggtcttgcaggaggagcggaaactataatagtaccagaagtagaaattacagtagatgaagttgctctaagattaaagactactcaaaaaagaggtaagagacatagtataatcgttttagcagaaggagtcggaagtgctagtgatttagaaaaggaacttaaaaaagagtcaggagcagatttaagagtcactgtattggggcatgtccaaagaggaggaagcccaactgtatctgatagaatactagcaagtagacttggagtaagagcagtagaattattattagatggaaaatcagctagagttgtaggaataaaagaaaacaaaataattgatttagaaataagtgaagctttagctcaaaagaaagtatttgataaagaagcttatgagatggcaaaaatattatctata

SEQ ID NO: 16943 - DNA, 2763 bp, Clostridium difficile
atgaacaaaaaagaaaatcgtatggctattcgtcagactgtagaaaaagcagtcatccgtgacgaacagaactgccgcattcaatttgcggcaaccaatcctattaaagaagttttaaaaaaacttcataccacacttcgtggcttagaagtagatgaagtatccgtaagtcgtgctaaatatggtactaataaagtcactcatgaaaaaaagaaatctctggcaaaacgactggttggcgcatttatcaatccatttaccgccattttattttgtctggctttagtatccacaattacagatatgatttttccgtatttttctctgtttggcagtgtgccagaggactttgattccctgactgttgtaatcattttaacaatggtattcatttccggtacgcttcgttttgtacaggaatccagaagcggaaatgcagcagagaaattgttagccatgattacgaccacttgtacagttactcgtagaaactatgaaaaaaaagaacttcctatggatgatttggtggtgggagatattgtacatctttctgctggagatatgattccggcggatgttcgtattttggatgcgaaggatttgtttgtcagtcaggcaagtcttactggtgagagtgaacctattgaaaaaacacccaatgtaagtgctcagaaagaaagcgtgactgattacacaaacattgcttttatggggagtaatgtaatttctggtagcgcaacagctgttgttgtttgtgttggcgatcatactctgtttggctctatggcgtccgcagttgctggagaagcggttgaaacaagctttaccaagggtgtcaatgccgtttcttgggtattgattcgttttatgctcattatggttccgctggtgttctttgtcaatggtatcaccaagggcgattggttggaggccttcttattcggcgtttctattgctgttggtttgacaccagaaatgttgccgatgattgtaacaacctgtcttgcgaaaggcgctgtttccatgagcaagaagcagacaattgttaaaaacctcaattccattcagaacttcggtgctattgatattctctgtactgacaagactggcacgctgacccaggataaggttgtgctggaataccatctgaatgtaaatggcgaggacgatacgcgagtactgcgtcacgcttacctcaatagttacttccagactggctataaaaacctgatggatttggcaattatccataagactgaggaagaggaagccgcagattcgcgtctcattgacctgtctgaaaactatgtgaaagtagatgagattccttttgacttcacacgtcgtcgtctgactacagtggtacaggataataagggtaagacccagatggtaacaaaaggtgctgtggaagaaatgctctctatttgtgcgtttgcagagtgtaatggaggagtgcagcctctgactgatgacgttcgttacagaattctggagacagtggacaatcttaacgataagggatttcgcgtactagctattgcacagaagagtaatccttccccaatcggcgcatttggtgttaaagatgagtgtgatatggtactgattggatatctggcattccttgatcctccaaaagaatctactgcggatgctattaaagctctgaaagaccatggtgttataaccaaaattttgacaggtgacaacgacaaagtgactcgaactatctgcaagcaggtgggattagaggttcgcaatatgcttctcggttctgatttggaacaaatgggcgatgcagagcttgcaagagtggcagtgtctacagatgtatttgcaaagctaacccctgatcagaaagcccgtgtggtttctgttctccgtgaaaatggtcatacggtcggtttcatgggtgacggtattaatgatgctgcagctatgaaagccgccgatattggtatttcggtggataccgctgtggacgtggcaaaagaatctgctgacattattctattggaaaaagatctgatggttttggaacagggtattattgagggacgaaagacatatgccaacatgatcaagtacattaaaatgactgcttcatccaacttcggcaatatgttctcagtgcttgctgcatctgctttgttacctttcttaccaatgatgagtgttcatcttatatttctaaacttaatttatgatttatcctgtactgcaattccttgggataatgtggatgaggagtttattaccaaacctcgtaaatgggacgcttccagtgttggaagttttatgatctggattggaccaaccagttctatctttgattttacaacctatatttttatgtactttgtattttgtccattgttcgtatcgaatggtgtattatttaatgatttgcctgctcatttcagcggtgcagaactggtaatgcttcaggcacagtatatcgggatgttccaagcagggtggttcgtggaatctatgtggagccagacattagtcattcacatgattcgtactccaaagctgccttttgttcagagtcgtgcatcagctccggtgactttgctaacaatgactggaattatagttctgaccattattccgtttactgtgtttggaactatgcttggatttgttgcattgcctgcagcatactttgcttatctgattccatgtattctgctgtatatgactttggcaacaagtttaaaaaaagcctatgtccgtcatttcggagaactgctt

SEQ ID NO: 16944 - DNA, 1308 bp, Clostridium difficile
atgaaaatgaagcttaaaagaaaattagcaacaggattagcaataacattattattaggttctttagttgggtgttcaaattctaatgatgcaaatgcatctaaaggagaaaagactgatagcaatattacgaagatagatttctgggctcctttaggtggaactaatggagaaactgctcaaaaaatggttgaccaatttaatagtgaacataaggatgtacaagtaaatatgttaaaacagaaagattactatgaaaatgcaacaaaactacaggcagccttaacatctaaagaccaaccagatgtaacattattagaaataactcaaacaggtacattcgcatcagcaggtgctttagtagatatgagtaaatattttgataaaacatatcaagaaagattcttttctggtcttttaacaaattcatattatgaggataagtttgttggtatgccatttaatagaagtacaccaatattatacataaataaagatatggcaactaaagcaggtcttgacccttcaggtccaaaatcatgggaagagcttaaggattatgctagtaaaatgacaaataaatcagaagatacttatggttttgaaacgccaatagatatttggttctatgaagctatggtaatgcaaagtggaggagaaataactaatggtaaaaaagtagcatttaataatgaggcaggacaagcaccagttaagttctggcaagatatgatgaaagctggaataatgaaaatgcctcctggagaagattataatgcctgggacgtagcaaaacaagattttgtaaatggtaaagtaggtatgatatttacatcaacagcagatttagcaggacttatgcaacaaacagaaggtaagtttgaaatatcaacagcattcttaccaaaaaatcaaaaatacgcaactcctacaggtggagctaatctagttatgcttgaaggtggaacagataaagaaaaagaagcaagtgcagaatttatagaatggatgacacaaacagataaaatcgttcagtttagttcatcaacaggatacttaccaacaactgaagatgcaacaaactcagaaaagttacaaacattatataaagaaaaacctcaatataaggttgcaactgaccaattacaatatgctgttgcacttccaatgttaaatggatacaaggaagcaactgataagctaatggatgagattaaaaaggggcttactgatttaaatgcaaatccaaaagatgtagtaagcaaaggaacttctgcaatgcaagcagtaatagataaaacaaataaa

SEQ ID NO: 16945 - DNA, 3567 bp, Clostridium difficile
atgaacaaagattttgctcatcttcatgtacatactgagtatagtttacttgatgggttttcgagggtgaaaaaacttataaaaagggctaaggaactaaacatgagctcaatagctataactgaccatggttgtatgtttggtgttatagatttctacaaaacagctataaaagaaggaataaagccaattatagggtgtgaagtctatacagctgcacgtggattgagagataaagacccaaactatgacaaatatcaaggacatttagttctgttagctaagaatatggaaggatataaaaatttaataaaaatagtttcaacttcatacgtagaaggtttttactataagcctagagttgacatggaagaacttaaaaaacataacaaagggattatagcactttctgcatgccttgcaggagatgtagcacgtgctttaatgaatagaaattatgaaaaagcaaaacaatttgctcttgactacagagacatatttggagaagaaaatttctttttggagattcaagatcacaatttacctgagcaaaaagaagtaaactctggtttagtaaaattatcaaaagagactggtataccactagttgctactaatgatgttcactatgtaaataaagaagattcgaaaatacatgatgtacttatgtgtattcaaatgggaaaaacattaaatgacccaaatagaatgagatttggtagtgatgagttttatttaaaatcaagagaagaaatggaagaattatttccatatgcattagaggctattgacaatactgtgaaaatagctgatatgtgtaatgtggagtttgattttaatactatacatcttcctaagtatgatgttccagaaggatatacaccagaaacttatttaagggagttgtgttttaatggattaaaagagagatatgataatcctagcaatgagatactagagagattaaattatgaattagatgtaattgaaaaaatgggttatgtagagtattttttaattgtttgggattttataaatttttctaaagaaaataatattatagtaggaccaggtagaggtagtgcggctggttcgatagtagcatatacacttaagataactgatatagacccaataaagtactctctattatttgagcgttttttaaatccagaacgtatatccatgccagatatagatatagatttttgttatgagagaagagaagaagttatagattatgtaaagagaaaatatggtgatgaccatgtagcccagataataacttttggaacaatgggtgcaaaagctgcaataagagatgttggaagggtattggatataggctacaataaagttgacaaggtagccaaggaaataccatttgctttaggaatgacaatagataaggccctagatacgaatcctaatcttaaagaattgtatgaccaagacccggaaacaaaagaaataataaatatatcaaaacagatagagggaatgctaagacatgcttctactcatgcagcaggagttgttatatcaaaaaatcccgtagatgaatatgtacctttgtacaaacatcaagatgcaatcacaacacagtttactatgacaacacttgaagaacttgggcttttaaagatggattttcttgggctaagaactcttacagttataagagatactcttgatttaatagaaaaaaatagagttataaaaaactacacagaaaaaatagacttttcaaagatggattatgacgacccgaaagtatatgaaatgctttcatcaggaaatacactaggggtgtttcaattggagagtgctggcatgagaagttttatgaaacagctaaaaccagacaattttgaagatattgtagcgggaatatccctatttagaccaggtccaatggattctatacctgcatatataaaaaataaaagcaacccaaaagatgtaacatatctacatgaaaaattaaagcctataatggaagttacatatggttgtttggtatatcaagagcaggttatgcaggtcgttagagatttaggtggttatagttacggacgaagtgacctagttagaagagccatgagtaagaaaaagatggatgtgatggaagaagaaagacaatattttattcatggtaaatttgatgaagatggtaatatagaaattgcagggtgtatcagaaatggtgtagaagaggaaatagctaataaaatatttgatgatatgatagacttcgctagatatgcatttaataaatcacatgcagctgcatatggggttttagcatatgagacagcttatctaaaaacatattatccagttgaatttatggcagcattgataaccagtgtaatgggaaatactgataaggtagttgagtatataagagaatgtaaagcactagaaatagatgtattacctccagatataaacaaaagtttttcaaagttttcagttgaaggcgacaatataagatttggtctagcagctgtaaaaaatgttggtgtaaatataataaacaatataatcgctgaaagagaatctaatggattatttgtagatttagtagatttagtcaaaagattagaccaaaaagatacaaataagagagtaatagaaagtctaataaaatgtggagcttttgataatataagtgaaaatagagctagtctgatggctggttatgaaagtttattagaaagtgtatctatggatagaaagaaaaatgttcaaggtcaaatttctttatttgatgcttttggagatagtgaggaagatagtgattttcaacaaatatacagtttacctaaaaggcaagagtatgaagaaagagagagacttaaccttgaaaaagaagtcttgggaatgtatgtaagtggacatcctttatcacaatttgaaaaagaactacaagaaaaaacatctatggataatggaaaattaaattcattaaaagaggaagaagagtcatacctacaaatgaatgaaacagatgttataatgggtggaatgattgtaactaaaaccattaaaacaacaaaacgaaatgaaattatggcatttattgaattagaagatttgtatggtgctatagaaataatagtttttcctcaattattacaaaagtataatgtcattttgaatgaagataatataatatatgtaaaaggaacattaagtataaaagaaggcgaaaatgcaaaacttatagctagagagataaaagatataaatgatgatactgactttgcagatagaaactacaattcaggaagaactagaaatgtagaaaatattaagccagaaagtggtaaaaaattgtatttgaaaatagatagtatgtctgatactgatacaactaataatattgtagaaatagccaaacaatatccaggtaatgacagtatatacttgtaccctatggatgaaaatataaatggtaaacgtaaagcatataaaatgaccggggcattgacttgtatatgtgatgaatttataaataacttagaagagttacttcctaaagataacataaaagtaaaagct

SEQ ID NO: 16946 - DNA, 954 bp, Clostridium difficile
gtgatagatatgtctttttcaactgaaaccaaaaatgaactagcaagagttatatctgggaatgaatgttgtaatatagctgaattgtcagctctagttaaatcagggggaagtatacaaattgttggatataagaagctaaatctaaagataacaacagagttaaattcaatagcccgtaaagtatttaaattattaaaaaagaattttaatatcaatactacaatctcagtaaataagaatcaaatgctaaagagaaataacagttatgtattaatggtaacaagcgaaatgggttcagaaatgttattaaaaaagttaggtatacttgaagataaagaaggattttttactataaacaaaatttcagagaacttaattaagcatgaaggatgtaagagagctttcataagaggagcttttcttggtggaggttctataagcgacccagaaaagaactatcatatggaatttgtaactaataatgaggagtttgcagattctctaaaagaacttataaactctttaggttttaatagtaaaattgtggctagaaaaaataatcacgttgtttatatcaaagagagtgaacaaatatcagatttgttgagtattataggaggacaccacgctcttttaagtcttcaaaatactaaaatagtaaaagaaatgagaaataatgtaaacaggatagtaaattgtgagacagctaacctttctaaaacagtaaatgcagcagtaagacaagtagaaaatattaagctcatacaagagactataggaattagcagtttaccagaaaatttacaagagatagctaagattagaatcgagtatgaggatatgactctcaaagaacttggagagatgttagaaccaccaataggaaaatctggagtcaatcatagacttagaaaaatagaagaaattgcaacagatttgaaaaaaaaatca

SEQ ID NO: 16947 - DNA, 1116 bp, Clostridium difficile
atggaggcaaacatggctaaattacttattattgtaggaattttaggttggattgcattaattgtatcgttatttatatataaaaaagcaaaaaatgaaaaagtaaaactatttcaaaggtctattgttgaaaatagagaaccaaatgtggttgtgataggtggaggtactggtcaatcggtatttttaagaggtcttaaacacactacgcaaaatataactgcaattgtaactgttgctgatgatggtggaggttcaggtgtattgagagaagacttaggaatgctcccaccaggagacataagaaactgtttattagcacttgcaaatatagagccaacaatgaatgaagttatgcaatataggtttacagaagggcttttaaaaggtcagagttttggaaatttgtttttggctgctatgaatgggttgtatggaaactttgaaaaagctgtatataaattaagtgaaatttttgctataacaggaagagttttaccagtaactttggaagatgtaaatttagttgccaaattagaaaatggcaatataataaatggagaatctagtatacctgaagagtcaaaaattcaaaaaagctctattgataaaatttttttaaatccaaaagatgtaaaaccattaaaggatgttattgcatctatttatgatgctgacattataattatgggtcctggaagtttatatacaagtataataccaaatttacttgtagaggggattgtagacgctattaaatcgtctgtagctccaaaagtatatatagcaaatataatgactcaaccaggtgagacagaagggtacaatgtattagagcatgttaatgctatagtaaaacacactgatgagaatttaatagattatgtaatcgcaaataatgagatattgccagaagaaatgcttgacttatataaacaagatggagcagagcaagtcttgttagataaaaagcaaaaagataaattaaaagagatgggtataaaaactgtagagaagaatttaattgaaataaaaaataattatataagacatgatgcaaagtatatatctaacatagttattgagttagccctaaatcataattacaacaaaagt

SEQ ID NO: 16948 - DNA, 366 bp, Clostridium difficile
  misc_feature (56)..(56): n=g, a, t or c
atgctttcagcgcttatccattccgtacatagctacccagccatgcccttggcagnacaactggtacaccagaggtacgtccatcccggtcctctcgtactaaggacaggtcttctcaaatttcctacgcctgcgacggatagggaccgaactgtctcacgacgttctgaacccagctcgcgtaccactttaatgggcgaacagcccaacccttgggacctactacagccccaggatgtgatgagccgacatcgaggtgccaaacctccccgtcgatgtggactcttgggggagataagcctgttatccccagggtagcttttatccgttgagcgatggcccttccacgcagaaccaccggatcac

SEQ ID NO: 16949 - DNA, 855 bp, Clostridium difficile
atgaaatttgttatagttacaggtctttcaggatctggaaaaagtgagacaatgagagctttagaggatatgggattttattgtgtagataatctacctcctgctttgataactaaatttgcagaattatgttatcaaccaaattcaagtattgataaagttgctctagggatagatataagagggagaaagttttttgaagcgcttcatgaaagcttaaattatttagaaaaagaaaattatgaatatgaaatggtatatttggattgtaatgatgatgtattgctaaagagatataaaatgacaagaagaaatcatccattggcaaaagatatgcagattccagaaggtataaaaatggaaagaaagataatggaacctttaaaggagttatctacatgtataattgatacaactaacatgaaacctaaagaccttaaggaagaaataaagaaaatatattcttctggtgaagataatccaaacctaactatttctgtagtatcttttggatttaaacatggtatacttgctgatgcagatttagtatttgatgtaagatttcttccaaatccctattatgttgaagagttaagagctaaaactggtgatgataaagaagttagagattatgttatgaattctaaaatcagtgaagaattttatgtgaaacttttagatatgattcattttttagtacctcaatatatagaggaaggaaaacaacatctagtaattggtgttggatgcacaggtggaagacataggtcagttactataacaaatcttatagcggaggatttatctaataagggatatagagttgtaaagaaacatagagactctatgttgcga

SEQ ID NO: 16950 - DNA, 480 bp, Clostridium difficile
ttgaaaacaaatacagatgttattatggagataattgattatatagaagaaaatcttacagaaaatctaaatttagataaaatagcttatattgctaattattcaaaataccatttacacagaatgtttacaaatgttgtaggatgtactatccatcaatacatacagaggaggagacttactgaagcagctagacaacttatatttacagacaaatatattatagacatagctattacagtaggatattctacacatcaatcttttacactagcatttagaaatttatataaagaatctccacaagtatatagaaataaagatgaattttatcctattcaacagagatttgttttaaatctaaatcatcaaattcaaagcgaaaaatgtatttcttatgcaaatatgaattataaacaaagaagagatgaaatcaattcttatttgaactttaatattaattgtgaggtgaaagtagca

SEQ ID NO: 16951 - DNA, 309 bp, Clostridium difficile
atgttgacgatgaatatgataaaaaaatacagggaggtgaacacggtggcaaatataaaatcagctaagaaaagaataagtgttatcgaaaagaaaactgctttaaatagagttagaaaatctcaaataaaaactgcaataagaagattcgaagatgctgttgcagctggaaacagagaggatgctgttgctaagttccaatacgctcaaaaaagaatataccaagtagcttctaaaggaactatacataagaatgctgcagctagaaaagtagctaaattagctcaaaaattaaacggtatgaacgct

SEQ ID NO: 16952 - DNA, 1407 bp, Clostridium difficile
atggaggacattataatgactgacagtaaaaagaaacgatttattataccacacacttttacaataatatttttactaatagtcttaatggcaatattgacttggatagtaccaagtggtgaatttagtagagaagatgtagaaggtagaatggtagttgtaccagggacttatcaaagtgtagaaagtaatcctcaaggatttgcagatgtttttaaagcaccaatagaaggctttatcgattcagctgaagttgtaggttttgttttaatagttggaggtgcttttggtattgtaaataggactggagctatagaagcaggaatagcttcggttatctctaagtttaagggaaaagaacttcttataattccaatatcaatgattttatttggacttggaggtacaacatttgggatggcagaagagacattaccattttatatgatatttgttccactcatgacatccttgggatatgattctctaacagcaatagcaattgtatttataggagcagcagcaggagccgccgcttcaacaataaatccattttcagttggtattgcacaggcactagctcaacttgctcctggttcaggagtaacttacagagtagttatttttatagcatatatactaataagtatagcatttgttatgtactatgctaagaaggtaaaggaaaatcctgaaagttcaatagtatatgaaatagataaaaataataaatcaatacttaatcaaacttcaacagaaataaaagaatttacttttaaagaagtatctgttcttgctatatttggaatagggatggcaataatgatttggggtgttttaagtcaaggatggtacattccagaaatatcaatgtgttttgctgcaataggtgtgctttctggattggttggtagattatctcaaattgaaatctcagaaagttttatagatggagcaaaagatttagcatctgcagctcttgctatagctttggctcgtggaatcgtaataattgctcaaaatggatttataatagatactatattaaattccgcagcagcctttctaggtgggcttccaaaggttatatttgtatatttatcatttttcttggaagctgcattggcatttttaattccatcatcttcaggtcttgcttcacttacagtacctgtacttgctcctcttggtgatttggttaatatatcggctcaagtgatagtaaccgcttatcaatttggtgtgggtcttacaaactttataactccaacttcaggagtactgatgggagcacttgcagtagcccatattccattttcaaaatgggtaagatttataatgcctatcttgttgattttgacagctgtatctctagtttttttaacaataggtatttatatagggttt

SEQ ID NO: 16953 - DNA, 501 bp, Clostridium difficile
atgtttaatgttgcaattataacacttagtgataaaggatatgaaggaaaaagagaagatataacaggaaaaaagttaactgaatttgttgaaaatacaggagcttataaagttactgaatatgtacttataaaagatgataaggaaatgctaaaggaaaatattataagactttgtaatagtaataaaatagatttaattcttacaaatggaggtactggtttttcaaaaagagatataaccccagaagcaactaaggaagtgttggaaaaagaaataccaggtctgagcgaatatatgagaatgaaatccacagaaattactaaaaaggccatactaagtaggggtgtaagtggaataagaaataattctataataataaatttacctggaagtcctaaaggtgcagttgaaaatctaagttttataattgatgttttagaccatggcatagaagttttaagaggagaagctacagaatgtgccactaaaaaaagtgaa

SEQ ID NO: 16954 - DNA, 957 bp, Clostridium difficile
atgattgataagtatggaagaaaaatagactaccttcgtatttcacttacagataagtgtaatttaaggtgtgtctattgtatgccaccagatgtaaaatttgataaaaattatataaatgaaaatctaagctttgaagactacaagtttattataaaggctatggctgaacaaggtataacaaaaattagatttactggaggagaacctcttttatatcctaaattaaatgagcttataaaatttacaaaagaagaatgtggaataaataacataggaatgaccactaatgctattgggctttctgatagaatctttgagcttgaaaaatgtggcttaaataaagttaatataagtttagattctttgaaggaatataagtataaatccgtaacaagaggaggaaacttaaaagatgtcttaaaatcgattgaatcttgtttaaacttaggtataaaagtaaagttaaattgcgttgctataagtgggtttaatgatgatgagcttaaagattttatgtttttaacagttaaatcaccaattgatgtaagatttatagagcttatgccattaggtgaggctaatagagtttataagaagggttattttaatgtaaaagaaatgattgaaaaaatatatggtttatataaagtcaaaaatgatgaaaaaagtacagcagaatattatatgtttaaaggagctaaaggaagaataggaattataactccattaagctgttcattttgtaacacttgtaatcgtattagacttacttctagtggtgcaataaaattatgtctacattcaaaagaagaaatagatataaaaccatttttacataaaccattgttatttagagaatctatgaaagatataataaaacaaaaaccagaaaaacatcatttaatagaaaataaatgtagtgatacaaataggcgtatgtatgaaattggagga

SEQ ID NO: 16955 - DNA, 2919 bp, Clostridium difficile
ttggcaaattggaggtttttaaatatgaaagcatttaaaaagcacttcttgatactttctttgatatttttacttattatatcatgttttaacaatatactatgctttgctgatgagtctgaaaattcaaaaaaaataagagttggatattgtgatgactacggaataatatcctcatcaaaagagcattcttatacaggatatggttatgattatctaagagaaatctcaaaatatacaagatgggaatatgaatttgtaaaagggtcttgggaagaatgtttagacagactagaaaagggtgaaatagacttactcggacctttacagaagaatgatgaaagaaataaactatttaattttcctaaactaagttcaggatatgaatatagtgcactatatacaaaggatagtaacaataatatgttttatgaagatataagttcctttaagggaatgagagtagctgtacttagaggaaactttcataatactgcatttgagaagtatagagaagaaaataatttttcagttgaatatatatactgtaattctattgatgaattaattgagtccgtcaatgaaaaaaaggcagatgcatttgtttgtggaagtattataaatgctaaaggaatgaaaatagttagcaaattttcagtagaacctttttattttgctactgcaaaagataaacctaatttggtaaaagaattagattatgctttaaaagaattaaaaataaatgatatgtattatgaattggaattatataaaaaatatttcaaaagagaggtcaataattccatagcatttactcggcaagaaatgaattttattaaagcaaacccaaaacttactatggtatatgattcagagtggtctcctgtagagtattatgataaagaaagcaattcatttaaaggtataagttccgatttaatgtcaattatatcaaaaaaatgtggtataaaatttgaatatattaaaacaaaaaattataatgagagtcttgattacataaaaagtggtaaggcaactatgctatgtggctcaatcaatgaaaatgataaggcaaaacgatttaatatgaaattgacaaatccatacataaatattccaatgattatggtaggaaaattggataccaatctcaataatgatttaaatattgctttaactagtagttataagtctattgattcttatatagaaaagagttttgaaaatgctaagacaacatcttataagagtgtagaaagttgtctaaacgctataaatgaaggtaaagcaaacttaatgatacttagctcttatcagtttgatgaacttttaagagaaggaaagagtgagaatttatctgttatatctgttttagatacaagctatgggatgcgtataggggtatcaaataaaactgaccctatattagtgtctattttaaataaatcaatagacaaaattactgaagaagaattaagtgattgtatatattctaatactattgacaaaccttataaagtaccatttggtgtgatttttaaagaatattcaatacaaattatttcttttgtatgtattttattcttaattgctattaaatatataatttataataaaaagaagaaagaggattatctaaggaagatagcatatacagatccattgacaggagcagatagtatagataaatttaaaataaattctaataaactgtttgataaaaataatccagaagaatatgcgttgttttatatagatgttgacaaatttaaatatataaatgatatgtttggatatgatatgggaaatgatactttgatacatatatcaaatactattgcaagtgaattaaaggaagatgaaatttttgcaagagtttctgctgaccattttgttcttcttattaagtataagacagatgatgatattaaaacaaggttaaacaatatttacaataaggttcaaatacttagtaatcctaaaataaactattataaattgattttagattgtggtatatataaaataagtaaaagtgataatgacataaatactattatggatagagctaatactgcaagaaaaactataaaaggtggtcataaaaattcatttgctttttatgataaggaaatgcacaaaaaaatattaaaagagaaagaaattgaaaattcaatggtagatgctcttaataatggagaatttattgtttattttcaacctaaatatagtctttcagattatcaaattataggggcagaggctcttgttcgttgggataatccacaaaaaggtctaataccaccaatagaatttattcctgtatttgagaggaatggttttattgtaaatattgatttctatgtatttgaggaagtgtgtaaaaagattagagaatggatggatgaaggacaaaaagtagtacctatatctgtaaacttgtctcgaatgcattttgtaaatagtaattttatagagaagtttaaattaattgtagataaatacaaaattccgacaagacttatagaattagagctaacagaaacagcagtattagataatatagaaggattacttgatacaatgaacaatttgaaagaaaagggatttgtaatctctatggacgattttggtacaggatattcctctcttaatcttttaaaagaattgcctgttgacatattaaaactagatagagcattttttacagaaaaagatgagagtaataatgaaaaaattgttatatctaatgtcattaaaatggcaaaggaactgaaaatgaaagtaatatcagaaggtgtagagactatttcgcaagtagaatttctaaagcaaattgggtgtgatatggtacaaggatatttgttttctaagccaatgcctgtaaaagagtttgaaaaaatcgcttttaaaaaagaa

SEQ ID NO: 16956 - DNA, 1116 bp, Clostridium difficile
gtgatagcagtggaaaaagcttataagtttagaatgtatccaaataaaaaacaacaagagttaattaacaaaacttttggatgttgtagatttgtatataataagtatcttgctaaaagaatagatgtttataaaaacgataaagaaacttttacttataaacagtgtagttctgatttgaccaatttaaaaaaagaattaaattggcttaaagaacctgacaaattttcactacaaaacgccttaaaagatttagataatgcatataaaaaattctttaaagaaaaagcaggatttcctaaatttaaatcaaagaaaattaatagattttcatataaaactaactttacaaatggaaacattatgtattgtggtcaacatataaaactacctaaacttggtatggttaagataagggataaacaagtacctcaaggtagaatacttaatgctactatatctaaagaaccaagtggtagatattatgtatcattatgctgtactgatgtagatattgaagcatttgaaaatactaataatcagataggtttagatttaggaattaaagaattttgtatctcaagttgtggagaatttatagaaaatcctaagtatcttaagaagtcattaaacaaacttgctaaattacaaagagaattatcgagaaagacaatcggtagtttaaatagaaataaagcaagattaaaagttgcaagatttcaagaacatatagctaatcaaagaaatgattttctacaaaaactatctactaaattaataaaagagaatgatattatttgcatagaagatttacaagtaaagaatatgattagaaatcgtaaactatctcgcttaatttcagatgtatcatggtcagaatttattcgtcaattagaatacaaggctaattggtatggtagacaaattgtaaaggtaggtaaattctttgcaagttcacaaatatgtaataaatgtgggtataaaaacgaggaagtgaaggacttaaatataagagaatggatttgtcctagttgtaatgaaactcacgatagagatataaatgcaagtataaatatattaaaagaaggattaagactaataacaattcaaaataaa

SEQ ID NO: 16957 - DNA, 1617 bp, Clostridium difficile
gtgaatatagtaattagccttatcggtggacttggactttttctttacggaatgagtttaatgggagaaggtttacaaaaatcagcaggagacaaattaaaaaaaattattgaactcttaacaagtaatgttgttatgggtgtactggtgggtacagtcgttacaggtattatacaaagttcaagtgctactactgttatggttgtaggatttgtaaatgcaggtataatgaatctaagtcaagctattggtgtaataatgggggcaaatataggtactacagttactgctcaattagtttcatttaatcttgaaggaattgcaccaattgctttaggtataggtattttattctatttatttacatcaaatcaaaaaacaaagcatttatctgagatacttataggtttcggtatattatttacaggaatggagtttatgaaagatgcagtagctccacttgctgaatataaagcattcactgatgcacttttatattttagtaaaaatcctgtattaggtatattggcaggatttgccataactggtattgttcaaagttcaagtgcatctatgggtatgttaatagcactagcttctcaaggaatacttcctctatcatctgctttacctattctttatggagataatataggtacttgtgttacttcacttttatcaagtgttggtgcaagtagaaatgctcgacgtgcagctgtaatgcatttaagttttaatgtaattggtacaataatatttatgcttgttttaaataaacctatatcagccatagttactcattttgacccaactgatacagctagacaaatagcaaatgcacatactttatttaatcttacaaatgttataatattattaccattttctaaatacatagttaaattagcaaatagacttatacctattaaagaaactgaatcagaaatagtaaataatactaagtacttagatgaaaggatgtttagcactccatctatagcacttggtaatactgtacaagaagttgtaagaatgggtcataaagctacaaactctttggaacattcaattgcaggatttttaaataagagcaatgaagatattaataaagcttttgagtcagaaaaagttgtcaataagttacagaaagatatattgaactatttgttaaaactttctaaagaacctcttagagatgatgaacgctttagaacagatttgctttttaatactgtaaatgacattgaaagagtctctgaccatgcagaaaatatagctgaattggccatgagtgttaaggaaatgaacattagtttttctgatagtgcgataagagaaatatacgaaatatacaataagacaattactaattttaaggatgccttaatagttttagatgttaaagattttgagttagcaaataaagttttagaagttgaaaatgaagtaaattatttagaaaaaacttttagaaattcacatatgattagactaaataatggaagttgtacaattgatgctggtgtactttatcttgacttacttactaatctagaaagaatttctgaccactcaacaaatatagtaaaacaagtactaaaacttaaacaaaaaata

SEQ ID NO: 16958 - DNA, 1599 bp, Clostridium difficile
atgactgttgttgagtataaagatgaaataattgttatagatgctggacttagttttccagaggatgaaatgttaggagtagatatagttataccagatataacttatttagtaaaaaatagggataaaataaagggtatatttattacacatggacatgaagaccatataggagctcttccatatatattaaagaaaataaatgtacctgtatatggggcaagacttagtataggtcttatacaagtaaaacttaaagaacataaaatgaataatgttaagttaaatgttataggtcctagacaagttataaagcttgataatatggaagtagagtttttgaaaaataaccatagtataccagatgcttactctattgcaatacacacagaccaaggtataatataccacacaggagattttaagattgacttgactcctattgatggagatgttatggatatgcatagaatctgtgagttgagcaaaaaaggagttcttttaatgctggcagatagtactaatgcagaaaaaccaggatttactatgtctgaaaagactgttggggtaggtcttgacgaattatttgcaaaaggaaatggcagaagaattatagttgctacctttgcatccaacatacacagattacaacaaataataaatactgctgaaaagtttaatagaaaagttgctatatcaggtcgctcaatggtcaatgtagttggagttgcaaaagaattaggatacctagatatttctgatgacatgcttatagatttaaatgatatatgtaagtatgaagatagtgaattagtgataataacaactggttcacaaggtgaacctatgtcagctcttgctagaatggctttttcagagcacaaaaaagtagaaataaagagtggcgatttagttataatatctgctcatccaataccaggaaatgaaaaattaatatcaagagtaatcaatttcttatttgaaaaaggagcagaagtagtatacagtgatatagctgatatacacgtttctggacatgcctgtcaagaagaattaaaacttatacatgcattagttagaccaaagttttttatgccagctcatggtgaatatagaatgttaaaaagacatgctgaaatagctgaacagcttggtatggataaagaaaatatttttgtcatgcaaacaggagatgttttagaattagataaaaattctgctaaggtagcaaaccgtatacaaacaggaaacatattagttgatggtctaggagtaggcgatgtaggtaatatagttttaagggatagaaagcatttatcagaagatggtcttatgatagttgtagttactatttccaaggatgagggtaaggtcttagcaggtccagatataatttccagaggattcgtatatgtaagagagtcagaagatttaatggatggagcaaaggatataattaagaatgttctaaatgaatgtgaagagaaaaatattaaagaatgggcttatttaaagaataatattaaagaaaacctaaaagaatatttatatcaaaaaactaaacgaaatccaatgatacttcctatcataatggaagta

SEQ ID NO: 16959 - DNA, 594 bp, Clostridium difficile
atgttaagtatgaatataggagaaatagtagcaagtttagttggtatagctatggcaatatcaatacatgagtttggccatgcttattcagctcacttattgggagatgatacagctaaagcttatggtagaatgacattaaatcctgtaagacatgttgacccaataggtcttttggctatgtttatccttaagatagggtgggcaaagccagtaccagtaaatccaaataactttaaaaactataagataggaaacctgatagtttcacttgcaggcgttttttgtaatgttttgactgctatactgtgtgtaattatcaataagtatgtgcatatgtatgctataaatacaatagctgaatatgtgtttttatatagtattggatttgcagcttttaacttacttccgatacctccacttgatggatggggagttatatctacatttgtaccatataaatggaatgaatatttgtataaatttgaaagcatgagttatataattttattaattgctttatttactggtatgtatagaataatattaacaccaatatatgcagtgttgctaaaaatagtatatttatttgtt

SEQ ID NO: 16960 - DNA, 1449 bp, Clostridium difficile
atgaatataaagtattctaaagaaatattaaaaagtttagaaaatgctataacagtagtagctctatttgagggagaagatgtttctacgacatttgataaaataaatatgataagcagaaattttaattctaaagaaaatagtatagatactgtaacattaattgaaaataacaatttggtaaatgtttgtcttgttggttttggtaagagagagttattgaatagagaaaaaattagaatcataggtgggaatttgtgtaaaaaattaaaaaatatattgaaaaatgaagcatataagagtagtgatgttaatgtactgaatcttaatttaaatagtgatgaaataggttgttttgtagaagggatattacttggaaattataagtttgataagtataagacaaaaagtaaggattttgaaagaaaagaagttgatactataactatatttactgaaaaagaagttgagtgtcaaatagaaaaggctaaaatattagctaattcaactataatagctagaaatctagttaatgaaccatcaaacgtaatatatccaaaaacattagcagtagaaacagttaaacttggtgcagagtttgggtttaatgttgatgtttatgaagaagaaaaaataaaggcattgggaatggatgcttttttcgctgtttcaagaggttcaattaataaaccaagattcatagtaatgagatactttggagataaagaaagtacagatatattaggtctagtaggtaaaggattgacttatgatactggtggatattctttaaaatcaaatgcttctatgctagatatgaagacagatatggctggtgctgcgagtgttataggtgctatgtgtgctatatctcaaagtaaattaaagaaaaatgttatagcagtagtggctgcatgtgagaatgctttatcaggaggttcatacaaacctggagatataattagttctatggcaaagaaaactattgaagttttaaatacggatgcagaaggtagacttacattagctgatgcaatatactacattataaacaatgaaaaagtaacaaaggtggttgatgtagctacattaactggtgctgctttaacattgttaggtaatgttgcaactcctatagtaacaaataatgatgatttttattgtgaattagaaaaagctgccactttatcaggggaaagggtatggaagatgccaatttatgatgaatttaaagatatgataaaaggagaagaagcagaccttaaaaacactggtggtaaaaatgctggatgtataacagcaggagcttttattggtgaatttgttgggaatactccttggatacatatggatatagcggggacaagtacatcatcaaaatcaattggatacaaagcaaagggggctacaggagaacctgttagaacattgtactatttggcagaaatc

SEQ ID NO: 16961 - DNA, 966 bp, Clostridium difficile
atggaaaagagaaaagtaataattgattgtgacccaggaattgatgattctttggcaattcttctggctttaaactcaccagagttagaagtaattggaattaccacatgttgtggaaatgtcccagcaaatataggtgcagaaaatgcactaaaaacacttcaaatgtgttcttcactaaatattccagtatatataggagaagaagcaccactaaaaagaaaacttgtaacagctcaagatacacatggagaagatggtattggagaaaacttttatcaaaaggttgtaggagctaaagcaaaaaatggagcagtggattttataataaatactttatataatcatgaaaaagtatcaataatagcacttgcaccacttacaaacatagctaaagcacttattaaagataagaaagcatttgaaaatctcgatgagtttgtatctatgggaggagcatttaggattcatggaaattgctctccagtagcagagtttaattattgggtagacccacatggagcagattatgtttacaagaatttatctaaaaaaatccacatggtaggtttagatgtaactagaaaaattgtacttactcctaatattattgagtttataaatagacttgataagaagatggcaaagtatataactgaaataactagattttatattgatttccattgggaacaggagggaataattggctgtgtgataaatgaccctctagcagtagcatactttatagatagaagtatatgtaaaggatttgaatcatatgtagaagttgtagaagatggaatagctatgggtcagtctatagtggattctttcaatttctataaaaaaaatcctaatgcaattgttctaaatgaagttgatgagaagaaatttatgtacatgtttttaaagaggctttttaaaggttatgaagacattatagactctgtggaaggagtgata

SEQ ID NO: 16962 - DNA, 1992 bp, Clostridium difficile
gtgaataaaaaaaagattgttattatagggattatttattcatttttagtagtattttcacttacaaatatgtatgtaaatatggagtataatttaaatgtatttgaatatattaagaagtcacttccatttacagaagaagaaaaaaagtggttagaaaaacacaagaatttgatttacagctctgaccaaagttcacctcctttgagatataaaggtaaggaagatggacagtataagggaattattgttgatttaataaattctctgtcaattcaaattggtagagatttttattttaaaccaaataattggtggaaagaatcttttgtaaattcaatagatgatagtataaagttttttgacttgattccatcaaaagaaagggcaaataaatttatatttactgacccaatatacactttgagtgcaaatatattgaaagataaaaagtcccaagatataaatagttacatggatttaaaggggaaaacagtagcaattccagaaggtgattattctataaattttttaaagcaaaaaattcaagatataaacattttgttgactccagatataaagactggagtcaaccatttaatgtctggaaaagtagacgtagttgttggtgatgaaccagtattgcgatactatataaataattatggactttcaaataaatacagtgttttaagtaatcctatatatactaaaaaagcagttcttgctgtacctaaacaatatgaagagctggttagtattttaaataaaggcatttttaaacttcagaaaaatggagtgtataaagatttaaagaaaaaatggtattctacgtataatgaagttgatgatatattgtatgagcgaggaattgtgcctagtatttatctttttataggtataattttaatatcaatttatgttttttatagctatacatatttgttaaagatagaaatcaaaaggaaaacagaacaggtaatagaaaataaaaaaactttagaggcaacttttaatagtattacagatataataatgcttgtagatgaaaataacaatatagtagaatcgaacaaagtactatatgactttatgggtgaaatgagttataagatagcagatttgattagcatgataaaaggtgttattgaaaataccttctctgaaaatactaataaaactagtgaaatagaaatacacaataaaattttaaagataaacacttttcctgtagagtataaaaaaaataatactgagtatatagtagttcttattaaagatataactaatgataaaatagtagaggcgaaattacttagagaaaacaaaatgatatctataggacaattagcttctggggtagcacatgagataagaaatcctttgggtataataagaaataattgctatctcttaaaagataacgttacaatggaagaagtaaatgattgtgttaaatcaatagaaagtaatgtagatagggcaagtaatataataaccaacttgttaaattttgcaagaatatcagatgataatttagaacatataaatataaaaaattttattgaaaatatagtgaaacttcaatataaaatgttacagttaaagaatgttgaaataaaaattgactgtgaacataatttaatatgctatataaatggagaatcgttaaaacatgtatttataaatttaatttctaattcaatagatgcaatacatcaagatggaaaaattattatatactgttatgaaaaaaatcattgtttatttatagattttaaagataatggtgaaggaataaaagaagatgtcctaaaggacatatttaatcccttctatacaacaaaaccaattggtgagggaactggtttaggtttatatattacttataatgagattaaaaagaataatggagatataagtgttgaaagtaaattgggggttggaacttgttttcatataaaaattccattaaataaagaggtgactata

SEQ ID NO: 16963 - DNA, 474 bp, Clostridium difficile
ttggaggaaataaaaatgatatatgaaggaaaacttattggaaaagatttaaaaataggtataataaattctcgttttaatgaatttataacatcaaaacttttatcaggagctgaagactgtcttttaagacatgacgtttctccagaaaatatagaaatagtttgggtacctggagcttttgagattcctcttgttgctcaaaaaatggctaaaagtggtaagtatgatgctataatctgtttaggctgtgttataagaggtgctacttctcattatgattatgtatgtagtgaagtctctaaagggatagccaaagtatctttagacagtgaattacctgttatatttggaatcgtaactacagaaaatattgaacaagctattgaaagagcaggtacaaaagctggaaataaaggttatgattgtgctatgaatgcgctagaaatggcaaatttatttaagtctttaaat

SEQ ID NO: 16964 - DNA, 1224 bp, Clostridium difficile
atggtttttaaaaataataaaggagtgaattacatgtttaatactattgaagaagctattgaagatataaaaaatgggaaaatggtaatcgtagttgatgatgaaagtagagagaatgaaggagatttattgatggcagctgaaatggctactcctgaatcaataaattttatggctacatatggtagaggtctaatttgtctacctgccactgaaaaaaaatttaaaagtcttaatatacctcttatggttagagaaaatacagatacatttcaaacagcctttactgttactatagatggagcagatactctaactggtatatctgcatatgaaagagctgaaactgtaaaattattctgtgatgaaaattctacaagtaaagatttcaaaacgcctggtcacatctttcctttaatagcaaaaactggtggagttcttgtcagggatggacatacagaagcctcagtagaccttgctagacttgcaggttttaaagagattggtcttatctgtgaaataatgaaagatgatggtacaatggcaagagttgatgatttaatgattttcaaagaaaagcataatttaaaaatcatcactataaaagaccttatagaataccgcaaaataaatgaaactactatagaaaaagtatctagtgctttccttccgacaaaatatggaaattttgaaatcataggatatagagatacttattcaaatgaagaacacattgcccttacttatggaaatataaatatagaaaatactctagttagacttcattctgaatgtttaacaggagatgtgttccactctctaaaatgtgattgtggattacagctagaatcttctatgaagaaaattgtggaaaatggaagtggagttttaatttatatgaagcaagaaggtagaggtattggtcttttaaataaaattaaggcttataaacttcaagaagaaggttacgatactgttgaagcaaatttaatgcttggatttgaagaagatatgagagatttctatatggctgctcaaatattaaaaaatttaaacataaaaagtataaatcttttaagtaataacccagataaaataaatcaattagagaaatatggaataaaaatcgaaaatagaatccctattaatgaagaaattaatgactttaataagctatatttaaaaactaaaaaagataaaatgggacatcttttagatattata

SEQ ID NO: 16965 - DNA, 663 bp, Clostridium difficile
atgtttactggcatagtagaagaagttggaatacttagaaaaattactgctaatggtaagagtggaaaagtaaccatactatcaaataaaatattagatggcacaaatcttggagatagtatagccgtaaatggagtttgtctaactgtttcaaacctcggaaaaaatgaatttacagccgatgttatgatggagacaattcgttccacaaatttaggtttattaaatgcaaatgacaaggtaaatcttgaaagagctatgagtctttcttcaagatttggtggtcatatagtaacaggtcatgttgatggtaaaggaactatctgcaaatttgagaaagatgaaaatgcagttttagtaagtatacgacctgataaaaaacttttatcctcaatgatactcaaaggttctgttgctattgatggtgtaagtttaactatatcatatttagatgatgaaatatttaaggtttctattatacctcatactaaaattaacactattctcttgacaaagaatgttggagatttcgttaatttagaaagcgatgtaattggaaagtatgttaataattttatggctaataactacaaggaattaaattctaatagtagtaaccataaatcaaatatagataaagattttttatttaaaaatggtttt

SEQ ID NO: 16966 - DNA, 1110 bp, Clostridium difficile
gtgaattttgtgaatcaaaaagaaaaagatatttattatatgaaaaaagctattgaattggctaaaaatggagaaggctttgtaaatccaaatccattagttggatgtgtaattgttaaagatagtaatataataggcaaaggatatcatgagaaatttggctctaatcatgctgaagtaaatgctataaacagtgctaaacaaagtctaaaagactctactctttatgtaaacttagaaccatgttctcattatgggaaaacgcctccttgtgtagataaaattatacaaaataagattaagagagttgtaatatctacattagacccaaatccacttgtttgtggtaatggagtaaaaaaattaaaagataacaatattgatgttactgtgggaatattagaagatgaagcaagagatttaaatgaggcatttttttatcatataaaaaacaaaagacctctttgtattgtaaaatcagcagtaagtctagatggtaaaattgctacaaaatcactagaatcaaaatggatatctaatgaatcatcaaggtatctaactcataaatacagaaataaataccaaagtataatggttggcataaatacagttttgaacgataatcctttactaacttgcaggctcaatcaagaaaaagtgtctcatcctacaagaatagtaatagatacacacctaaagttgccacttaatagtaatttggttaaagataaaaccagtaaaactatagttttcacatgttgcaaagaaagtataaaattatctatgttaaaagaaaataatgttgaaacaataatttctccttcaaaaaacaacttagtagatttggaatttgtaatgtataaattaggagagttaaacattgattctgttctagttgaaggtggtgctactctcaatgacagtctctttagaaataagttagttgataaagtcaaattatttctatcacccaagattataggtggtaaagatgcacctacattcgtttctggagaaggaataaatcatttgtcagattcaacacagttaacaatcaataatgtaactttgatagatggcgatattcttatagaatcagatgttttaaat

SEQ ID NO: 16967 - DNA, 2481 bp, Clostridium difficile
atgaataaaaaacttttagaaatactatcaaaatactatggatatacaagttttagaaaaggtcaggaatctataataaattctatcttaagcgaaaaagatgtgttagctattatgccaacaggagggggaaaatcaatatgttatcaaattccagctttgattttagatggaatgacaatagtaatttctccacttatatcacttatgaaagaccaagtagatgccttaaagactatgggaattagtgctgcttttataaatagttcattaagtagcaaagaatttaatgaaatattaaataatattagaaaaaataattataaaatactctatattgctccagagagattagatgcacaagagtttattgagctaataaataataacaatgtaagtcaagttgcgatagatgaagcacattgtgtatctcaatgggggcatgattttaggttgagttatagaaggatttctgattttataaaaaatttgcctaaaagacccatagttacagcatttactgcaacagcttcagaagaggtaagaactgatataataaatttactgtatttagaaaatccagattattatataactggatttgatagagagaatttatcaataaatatagtaaaatcatctagtaaaaataagtatattttagattatattcaaaatcataaaaatgagtctggaattatatatgttgcaactagaaaggaagttgaaaatatatctaatggtttatctaagagaaatatatctgtatcaaaatatcatgcaggtttatctaaaaatgaaagaagtaaaaatcaagaagattttataaatgataatgtggatataatggtagcaacaaatgcatttggaatgggtattgataaacctaatataagatgggttatacattacaatatgcctcaaagtatagaaaactactatcaagaaataggtagagctggtagggatggagaaaaaagtgagtgtgtacttttattttctccaggagatgtacatatacaaaaatatttaattgatattggagttgaaaatcctgaaagaaaattatttcagcataagaagcttcaatacatgattgacttagtttacagtaattcatgctatagaaagacaatattgagttattttggagaaaattatatagacaattgcaataattgtagcaattgtttagtagagggtgaaatagtagataaaactatagatgcacaaaaagtcatttcatgtgtagctagaatgaaaagaagttatggtgttactactattgtagatgtgcttagaggttctaagaataaaaagattttacagcttggattaaatactttgtctacatataacattatgagagattattctagtgaagacttaaagaattttgtaaatacattggtttctcatggttttttagatttagttgagactctaggcaatggaaatagaggtagttttcctactataagattaaatgagatgtctatgaaagttttaaaaggtgaagtgaaagtagagtttaaagaaattgttatgacaaaatcattggaagtagaggatgagttatataatgctttaagagaacttagacattcaattgcaagtgaagaaaggatagctccatatatggtatttggagatggtacacttagagccatgtctagtagttatccaattaataaagaagaaatgctagatatctctggagtaggagaaattaaatatcaaaaatatggtagagattttgaagcagtaattaaagaatatgtcgaaaaaaataatataaataaaaaaatagatgaaaaaaatgtcgattcaaagaacgttaatagtgatttcttagaggttaatacagataaagttttatatgaaaaactgttagtcattagagaagaatatgcaacaaaggaaaaattacctgcatatatgattttagccaataaggctttgaaagaaataagtggaagatatccacttgatgaagaacaattaaaagatatttctggcataggtggagtaaaatttgaaaaatatggagctagtattttggcagaggttaataaatatgtaaaagaaaataatattaatgttatttgggagaaaaagggcaaaaggaagttaatattagatggagaaagtagaaaaaataatgaaatagcattagatttgctaaatcaaggaaaagatatacaaagtatcagtcaagaaatagaagtttcactgtcaaccattattggatatgtgcatgactatgtaaaggatggacatagtatatcatttgaattaggactagaaaatttttataatgaagataaaaagaagatgattttagaagtttgcgaaaaagttggctatgataatttaaataacataaaaagaaaacttccagattcaataaagtatgaaaatataagagctgtgatacttgactcttatcttgaaaacttaaaaaataatattatagcagag

SEQ ID NO: 16968 - DNA, 1566 bp, Clostridium difficile
atgaaattaaagaagttaaaagttttaagtttagtaatgatacttagtctaatggcaggttgttctagtggaggagacaaagataagaaggcagatacgcctaaagatggaaaggtacttgtttatggaagtaatgactatacaagtataaatcctgcactatacgaacatggagaaataaattcgttaatatttaatggattaacagctcatgatgaaaataataaggtggttccttgtctagcaaaggactggaaatttgatgaggcaacaaatacatatacttttaatttaagagatgatgttaagtggcatgatggagaaaaatttacagcaaatgatgttaagtttacaatagaaactataatgaatccagataatgcttctgagatagcatcaaattatgaagatataacaaaaattgatgtggttaatgataatactataaaaattactttaaaagctccaaatacagcaatgcttgattatttaacagtaggagtattaccaaaacatgctttggaaggtaaggatatagctactgatgaatttaatcaaaaaccaataggtactggaccatttaaacttgaaaaatgggacaaaggtcaaagtataacacttgttaagaatagtgattattttgtaaaagaaccaggattagataaagtagtctttaagattgttccagatgataaggctaaggcaatgcaattaaaatcaggagaattagacctagctcaaataactcctaaagatatgtctaactttgaaaaagacgaaaagaattttaaagtaaatataatgaaaacagccgactatagaggtatattatacaattttaattctaaattctttaaagataaaaaagctaaaggattaccaaatgctttaagctatgcaatagatagaaaagcaatagttgacagtgtattattaggacatggtgtaccagcatattcacctttacaaatgggaccatataataatcctgatatagaaaagtttgaatataatccagaaaaagctaaacaagaaattgaaaagctaggttggaaattaggttctgatggaatctatgaaaaagaaggtactaagttagctttcgagataacagcaggtgagagtgaccaagttagagttgatatggctaaaatatgtgcacaacagttaaaagaaattggtgttgatgctaaagctgttgttgtaactgaaacagattgggctaatcaagatgctcatttaataggttggggaagtccatttgacccagatgaccatacatataaagtatttggaacagataaaggtgcaaattacagtgcttactctaatcctactatagataaaatacttcaaaaagcaagagaaacagaagataaagatgaaaaattaaagttatataaacaattccaagtagaaatgactaaggatatgccttatacatttattgcttatatagatgcaatatatgttggaaaaccaaacataaaaggattaacacctgatacagttttaggtcatcatggtgtaggtatattctggaacatagctgactggacaattgaa

SEQ ID NO: 16969 - DNA, 942 bp, Clostridium difficile
atgggagaaaaaagtaaagggtatgtatttatagcaatagcagggttattatgggctacacttggattatttggaaagtttttaatgggaaatggactgacatcagaacaagtagcatttacaagattgttttttggatttatagttttaggcgtatattcatctataaggacaccacaaatcttaaagataaacaaaaaaggaattatatattcagtaataataggaattatatgtcaggcaatgtttaatttatgttattttaaagcaattgacattgcgggtgtatcaattgcagcagttttactatatacatcaccactgtttttagcaatattttcaaaaatatgttataaagaaaatattactagaagcaaattattttcacttattctttgttttattggtgcaattatggcagtgactggtggacgtttggattttcaaggtttaaacgcttttgggcttttacttggggtattatcagcaatagcatatgcacttatgccaactattagtaaaaatgctttaaaggaattttcaagttcaacaatattagtatacagtttcttatttggagctatatttatgattccttcttcaagaccttgggaaatcttaaattatgctaaggatttagatgttttatcttgtatgctaatgttaggcattgttccagctgcacttgcatatattttttatgcagcaggtatatctaaaggtgtagagttgtcagttgcaggtgttgtggcatcagtagaattagttggttcagtaataattggttgcactatattaggagaaagtttttccttagggaagttatttggagtgatgttgatgttaatatctgcagtagtagcacttaatctttcttatgatgaaataagaatattttataagtccaacaagttaaagcagattgaaaaaactgaaagtatt

SEQ ID NO: 16970 - DNA, 618 bp, Clostridium difficile
aatttgccaagtttagggtcaaaggctcctgattttaaagccaatacaacaaatggtcctattagactctctgactataagggtaattggattgttttattttcacatcctggtgattttacaccagtttgtactacagaatttttatgttttgctaaatattatgacgaatttaaaaaaagaaatacagaactaattggtctaagtgttgatagtaacagttcacatttagcttggatgtataatatttctttacttacaggtgtagaaattccatttcctattatagaagatagagatatgagaattgccaagttatacggcatgatatcaaaaccaatgagtgatacatcaactgttcgctctgtatttattatagataataatcaaattctaagaacgattctttattatccactaactacaggaagaaatattccagaaatacttagaatagtagatgcacttcagactagtgatagagataatatagttactcctgcaaactggtttcctggaatgccagtgattttaccttatcctaaaaactataaggaattaaaaaatagagttaacagttgtaataagaaatattcatgtatggactggtacttatgt

SEQ ID NO: 16971 - DNA, 1986 bp, Clostridium difficile
gtggctattggaaaaacccagattatcaacattttgaaaaataatagattagaaataaaggtgaattatatgaatttaatgacattggaaaatataagtaaaagctattctgaaaaaaaattactagaaaatatatctcttggaataaatgaaggggaaaaaataggacttattggtgtaaatggtactggtaaatctaccttactcaaaattattgcaggagttgaagaaagtgagactggtaatataacaaaaactaatggtattaggatagaatatctacctcaaaatccaacttacaatgaaaattcaactgtacttgaacaagtatttaatggaacttctgaagaattaaagctacttggtgaatatcaagaaatcctagaaaaacttaattcaaactttacagaggaattaaataaaaaattattatcagtacacgaaaaaatagatgccttaaatctttgggatttagaaagtgaagctaagtcagtacttacaaagcttggtataaatgactttaatcaaaaaatagcagaactttctggtgggcaaagaaagagagtctctctggcatcagcccttattacaccttgtgagtttttgatactagatgagcctacaaaccatctagacaatgatactatagattggcttgaggaatatcttaattccagaaaaggttcattgcttatgataactcatgatagatactttttagaccgtgttacaaatagaattattgaactggacaaaggtagattattcagttatgatgggaattattcaatatttttggaaaagaaaatggaaagactttcgctagaagcaagtattgaagataaaagacaaaatttaataagaacagagcttgcgtgggtaagacgaggagctcaggctcgtagcactaaacaaaaagctcgtttacaaagatttgatgaacttataaatagagattcttttaaacctgatgaaaatcttgatatatctgttgcatcaagtagacttggaaataaaataatagaaatacacaatatatataaatcatttgaagaaaatactgttatagataatttagaatacactttaactcgtacagatagaattggtataataggcaaaaatggtatgggtaaatctacccttataaatatacttaatggagaaatagagcctgatagtggatatatttcaattggagaaacggttaaaataggttgtttttctcaagacgactctcatatgaatattgatatgagggctatagactatgtaaaagaagctagtgactatatagaaacttcagatggtactaggattacagcttctcaaatgtgtgaaagattcctttttaatggtactatgcaatatactttgataggtaaattatctggtggtgaaagaagaagactacatcttcttaaaatccttatgacagctcctaatgtgcttcttttagatgaacctacaaatgatttagatattgaaacgcttaaaatattagaagaatacctagacgaatttaaaggtgtagtagttacagtatcacatgatagatatttcttagatagaatttgtaataaaatatttgcatatgaaggtaatggaaaaattcatatctatacaggtaattacagtgattatcttatttatagagagattcaaggaattgaatttgaagaatctaaaaaggaatcagttaaaaaagatgactctactaccctaaaaaaagaaaaacctaaaaatgataaaaagcttaagttctcatataatgaacaaagggagtttgaaaatattgactctgatatagaaaaactcgaatctaaaattgcaacacttgatgaaagtactgcaaaattttcaactgattttactaaacttcaagaaattttagatgagaaatctaaactagaaaaagaacttgaatacaaatatgaaagatgggaatatttaaataatctagctgatgaaatagctaataataag

SEQ ID NO: 16972 - DNA, 2187 bp, Clostridium difficile
atgtatgaagttaatttagaacgagctatgaattattggatggatttgttagatgattatacgaatatagcaaaaattccaaatgattttttttataaagattgttctgatgaagtagtagatgaggtttttaagatgaatattgagaaacatgaaaggttaattcaatattctaaagtgaacaatattagcatagactctatcatagaaactatatatggccttatacttcaaaagtatatatatgaagatgatgtagtttttggtaaaacaatgaatataattccaataagagtaagagttagacaaagtgaaaaatttatagatgttgtaaggaagctaaaaaggcagtggagcaggtctttagagtatggatactatttgttatcagatatagagaataaaaatcatctaaatactaagcttataaacacaatatttatagctaaaagttttgatttatcatatgattatgacatagaaaaaaaaggatatgatttatctgtaatagtatatactaagagggcacttaaaataaaaataaagtataaaccatctatatataaaagagaaactattagaagaattttaaatcaatttgattatataatagagcaaataatagaagataatgatattttaatagaagatttagaatttgtatgtaaggaagaagaaaaagtattattggaagactttaataataatcaatatgaaataccatatgataaaagttatgttgatttatttagggagcaagttaaggtaacacctagtaatatagctactagggatgaaaatagaaagttaacatataaagaattggatgaagtaactgataaacttgcaggttatttaaatcatataggagtggaaagtgaagacatagtagctgtaatgttaccaagagatattaacataattattacagcaatagggattatgaaatcagggggagcattttttccaatagacacaagtaatccagaagaaagattgaattaccttcttgaagatagtaatgcaaaagtagtgataactacagatgaactcaaaagtaaggttgtaaatgagaataccatagtactcgatgtaaatgatgaagaaatgtttaagtttggatatgaattaactgaaaaaataacatcatcaaattgtgcatatacgatatctacttcagggtcaactggtaggccaaagaccatagctatagaacataagagtttagtaaatatgtgttattatagcgtaaaatctataagcgctacagaaaatgatatatgtggtatatacttaagtttcagttttgatgctgtaatgaaacaactattcccttatttgcttgtaggtgcatcaatagatattatgcctgaagaagctaaatttgatgaatatacagtaaatgaatactgtgaggaaaatgacataactatactagcattgccaacagcatttgcaaggttatttatacaaaattgcaataataattcacttagagttgtacagactggaggagaaagattaaaaggatatagaaagcgtaattatgaactatataatgagtatggaccaaccgaatttactgttgtatcgacttcttttcatgtggacagagagtatggaaaaataccaataggaaaacctatatttaatacttatgcatatgtattagataaaaagaacaaactatgtccaattggagctccaggagagctatgtctatcaggcattcaaatatcaagaggatatttaaataaaaaagggctaacagagcaagtatttgtaaagaatccttacaaaacttgtgaacataataagttaatgtatagaactggtgatttagtaagatggttagatgatggaaatttagattatattggaaggatggacaatcaagtaaaaattgatgagtttaggatagagctatatgagattgaaaatataataaataatattacagaaattaaaagtgttgtttgtatatcgagaacaaatgatgatggagatatgtatatatgtgcatattatgtaattgatgaggaagatagtggtaagataaatgaaagaactattagagaatatttaaatgagcatctacctccatatatgattccaacaataataatgaggatagataagataccagttacaccaatcggaaaagtaaataaaagagcattaccagaa

SEQ ID NO: 16973 - DNA, 539 bp, Clostridium difficile
atgtctatagctttaatattgattgatattcaaaatgattattttaaaaatggaaaatgtgaattatttcaatcagaagaaactgctgaaaatgctaaaaaaatactactgttttttagaaaaaacaatttaccagttattcatatacagcatatatcaacagataaaacagcttctttttttcttcctaatactcatggttcagaaataaataaaattgtttttccactagataatgaagaaattataattaaacacacaccagatagtttctttgaaacagatttgcaaagtatccttgagaaaaaaatattactaatctagtaatctgtggaatgatgagccatatgtgtattgatacaagtgtaagaacagcaaagaaacttcgatacgacataactctaataagcgatgcatgtacaacgaagaatttatcttggaataatatagaaattaatgcaaatactgtacatcaagtattcatggcatcactacagaacagttttgcagatgtaaaaaacacagataaatttttatct

SEQ ID NO: 16974 - DNA, 807 bp, Clostridium difficile
atgaaagattactataaaataggagagatatctaaaatatatggaataggtagagattcattaatgtattatgaagaaataggcattctaagaccagttagagatataaatggatatagaatgtataatatatcagatatatggaaattaaatttaataaaagaatttagaagcttgaactttccaatgaagaaaataaaagaatacctagatgacagaagtatagagtctacgaaaaatattttaaatgaagaactcgatttaattgataaaaaaatagctgaatttataagccataaggaaaatattataaaaagattgagttcaattgaaagtgtaattcaaaatacaaaaatagatgagatagaggttgtatatatagaaaaaagaaaagctttagaattaaatgctgatataaagagggatgaagacttcgattttttaattcaaaaacttcagaaagaatatgaagatagatttaatatacttggaaataacaatattggttctgccttttctactgaagcaattaataaaggtatatttaatgagtttaaatctgtattttgttttctggaaagtaatgagaaagtatataatatagtttttgatgaaggatattatgtaactttaaattatactgggagtaattctaataataagatgtatatggagaaggtgtttaaatttatagaagaaaacaattataagataattgctgaccctatagaaatttacaagatagatatacatgagactggaattgtagaggagtttgtaacggaaattcaagttcctataactaaa

SEQ ID NO: 16975 - DNA, 474 bp, Clostridium difficile
atgaaagaaatattaataaatcctataggtaaaatatgtattcaaggcgaagaggtctttattaaattagacaaaaagtatgtacctgcattaaatgaactcgacgatttcagtcatttaaatgtattttggtgggctgatgggtttgataatcctgaactaagaagtattttagaaaccccaaaaccttataaaagtggaccagacgttataggaatatttgcaacaaggtcacctataagacccaatccaatagcattgactgctgtacaaattatcaatatcgaccatgaaaatggcataataaaaataccatatattgatgctaatgataatagtcctgttattgacttaaagccatatactccaagcgttgatagggttgaaaatccgtccgttcctaaatggtgtagtcactggcctaagagtgtagaaaaatcaggagaatttaattgggaagatgaaattgaattt

SEQ ID NO: 16976 - DNA, 2232 bp, Clostridium difficile
atgcaaaatcataattatataaaaatgttaaataaaaaggtagaagtattatctaaggaattagatagtagaaattttaaattaaaaaccttaaatgaaatagattttttttctaaaataccaaacagagaatttatgtaccaatatattgatgactgtatttcgaaaaatatacatataggaatcatgttattaaatatcgataactttaaattatttaatgatatatatggatatctagtcggagaaaatttattaattactctaactcaaaaccttttgcactttattccagaatcaaagggaatagtcgcttatttaaaaggagaaggttttttaattgtacttccaaatgtatcaaataaagagttaaataatatgggtgcaactattatagagagcgcccgagaattaaaaataaaacttcctaatgaaaaagaaatatactccaatgttacatttagtattggcagcactatctggaatggtgaaccaaacatgactactttgatgcttttcaaccaagtatatagtgctttaaaaaaggctaaaagtgaaggtaaaaatagatacattctatttgattttaaagataatagtttttacaataaattagaaaatgataaggagttcttatcagaaatatcacatgttctacaaactaaacaaattgaagtattttaccaaccactttataatataaaaaataatactatagttggatgtgaggcacttgcaagatggagacaccctattaaaggacttcttactccagataaatttattcctttatttgaacagtttggtctgataacggaattagatttgcatttatttgaagagaactgtaaaaatataagaagatggattgataacaatgatgtttttgttccaatttgttgtaacttttctcgtcttcatttttttaaccctaattttccaagtatgctaaaaggtattactgaaaagtacagcgtctctacatcaaattttagcattgaaataacagaaaatatattaatagaaaatacaaatacaattattcaacaactagctgaacttcgttcttatggtttttctgtatcaatggacgattttggttctggatattcatcttttggtatgttgcaaaatctaccttttgatataatcaaaattgataggatatttttatctcataatttaaatgattttaaaaatacaaccattttgtactctataataaacattgcaagagctcttgggatgcttacagtatgtgaaggtgttgaaacagaacaacatgtagaatttattaaaagtataaattgtgatatcgcccaaggttattattatgcaaaacccatggagtgcaaagaatttgaaaaattactatctaaagagaataattcagagaaaatgtttataaaatattctgatataggaaaatctttaatagagaagatatttgatggattttttattatgcaagatatgaaaaaactaagagctaatgtcactgaagacattcaatggtttgatttttacaacaaaactgaaattacatcttttcctaaagtaatagagcattttgaaaaacatattaaaggtaaaaaattttctattctttacaaaagtataaccccacataatactgaatcagattcattattaattagtggagaagccgttttatcagatgaagcttctgaacatcaaaaatatagcaatttctactttagtgcaaattgtataatttcagaaaataaattactcttagcaaaattacatttggatttaattaaaactgctggctatataaatgaatttgaatcatattcaatacctaaaatgacaaatacacatcttgatgaaagtaatattttatcacaattttattcaatgttgcctgtaggtataattcgctacgatttatttggtgatatgattattacttatatgaatgaagaaatgtttgatattataggttatacaaaagaacagttttttggtgagatgggcggaaatttaagagcaattgttcatccagatgatttagactttgtttataaaaaaagtttggacatgattgacacaaataaaattgaaccatttttatatagattcataaaacgagatggtcaaattgtcacagttatgtatacacaatgtaacctttctgcaattgatggaaggtcgattgcccagggtatgtatgtagatgtaaataaaataaaaaatttaacaaaaatc

SEQ ID NO: 16977 - DNA, 1906 bp, Clostridium difficile
attcttatgatagacaattatgattcttttgtatacaacctagtccaatatatagaagaattaggggaaacagttgtagtaaaaagaaataatgaaatcaaaataagtgacattgaagaactaaatccagaggtaattgtgttatctccaggaccgtgttctccaaaagaagctggtatttgcatagatattgttgagcattttaaggggaaaaaacctatactaggaatttgtttaggtcaccaaactattggacatgtttttggaggagatattataaaagcacaacagcctgtgcatggaaaagtatatagtatcaaccatactaataaaggagtttttaggggacttaaaaatcctttaaatgtcactaggtatcattcactaataattgattccaatacagttccaaaagaattagaaattacagcaattactgataaaggggaaataatggggattaggcataagaaatatttaatagaaggagtacagtttcatccagaagctattttgtcagagtatggtcatgaaatgcttaaaaattttataacagaagctagagaaagggtacatgtgtaatatgataagagagataaatactaaattaaattcttttgagatatttactatttttagaaatgaacatgacagttttatattagacagtgctatggataaagaaaaattgggaagatattcttttataagtagccaaccatttaaggtattaaagtataaagatactgatgaaaatcctttagaagttttaaaagaagaactacataagtatagggttgtaaatgatactaatcttccatttgtaggaggtgctgtgggatatttatcttatgatttaggtaattacatagaaaatttacctagaactgctgtagatgatattgagatgcctgatatgtattttggattttataatcatgtaatagttatagaccatcttgtgcaaaaaacttatatagctactccaaacatagatatcgaattagaagaaaagataatagataatatagaacaaagaatattaaaagaagagaaaaaaggtatagatagcatatgttatgaagaaaaagaagtaacacctataagacttaaatctaattttacaaaggaagaatttaaaaatgcagttcaaagtgttagagagtacataagacaaggagatatatatcaagctaatttaacacaaaggttcagtggagaaacagaacttacaagctttgaattgtatagggacttaagaagatttagcccggcaccatttggggcattcttaaactttgaagatgcacatatattatcaaattctccagaaagatttataagatgtgttaataagagaatagaaactagaccaataaaaggtactcgtccaagagggaaagataaaaaagaagatttaagacttcaacaagaacttagaaatagtgaaaaagatagagctgaactacttatgatagtagatttagaaagaaatgatattggcagaatatctaaaactggaagtgttaaagttccagagctatttgtaattgaaccatatgcaaatgtaaatcacttagtttccacagttgtaggtgagttaaaagatgataaagatgctactgatgtaataaaagcaacttttccaggggggtctataacaggagcacctaagattagagcaatggaaattatagacgaattagagccaacgcaaagaaatgtatatactggttcaataggttatataggttttaatggtgatatggattttaatatagcaattagaacaataatcaaaaatgacaaaaaagtctactttcaagttggaggaggaatgacttgggattctgacccagatgaagaatatcaagaaacacttgataaagctaaatccataatgaag

SEQ ID NO: 16978 - DNA, 1731 bp, Clostridium difficile
atgagcatactcctaaaaaaagcacccaaattagcaaaacatattataacaagtttttatataaatcgagatatcaatgaagtattaaaatacctttgtgaaaatgttacatggattggaccaggagaacaggaatttctcacttcttttaatgaaataaaaaattatttttatgcaggtcaagatgaaattccttcttgtgatataaataatgatatatttgaaactgtaagtgaagatgagaatagatgtatggtattaggaagatatactgttcgaactaaagaaaatgctcaaatgattttagaggtaaatcaacgttgtacatttgagataattgaggatagaggaaaattattaataaagcacatgcacatatcaaacccttatggtgaaatgcaacttgatgaatactttcccactaaaattggaactcaaagttatgattatttgcaaagattactaaaagaaaaaacagaagttattgaaatgattacaaataatatcaatggtggcttaaaaggtagcaatgatgatagtacatactcatttttctatgtcaatgagggattgcccaaaatattaggatacacatatgatgagttcatggaaatgagtggtggttcagcagtgggtgctgtatatccaccagacttacctaaagcactagaagattgtgaacgatgttttgcaaaaggacctacatattcatctgaatatagaatccgaaaaaaagatggaacattaatgtgggtattagattctggaatgaaatcgttaaatagtgatggcatagtaaaaattaatagtattattactgacataacccaactaaaaaacatagaatctgaactaaaattagaaagagagcgatatcgtattgctttgcaaaatattacagatatcatgtttgagtatgatattgaaaacgatacccttataaaatatcaacgtgtagaaattgacaaaaaaattgaattagaaaattttgaaacaaaaaattactccaaactattagaatctggtaaaattattcaccttgatgatattggaaaactactagaagtacttcatggaaatcttcgtgaaacaattgagataagacaagtaaattcattaactaaaaatgaatggagatggattcgtgttcaatgttcagttatatatgatagtgaccataaccctatcaaaacaataggcgttttaaaagacataactgaagataaatctaaattagaaagcttaattaatcaggctcaacgtgacccactaacacaattatataatcaaagagtatcacaaaatcttattgaagagtatctatgtagttctgattccaaaaataatgatgctctattagttattgatattgatgattttaaaactgtaaatgatacttttgggcatttagagggaaatgaagttttagttgctgtatcaaaaatactattacataacacacatgataaagacatagttgctcgaattggtggagatgaatttacaatatttataaaatcattaacaaaggatttaataataaaaattactaatgatattttaaatgatgcgagtaaaataaaagtaaaggacaatcataaaataacattaagtattggtattgccttcactgatgattcaactaaattatataaagatttattttctaaagctgataaagctctttatctatcaaaagcagatggcaaaaattgttatagtacatacgaa

SEQ ID NO: 16979 - DNA, 1362 bp, Clostridium difficile
atgattttaaatacaaaattatttggacgtacttatcagtttaaaggcttatatgatgtaatggctaaagctaatgaagaaaaatcaggagataaattagcaggtcttgcagcagaatcagctgaagaaagaatagcagcaaaagttgttttatcacacataaaattggaggatataagaaataatcctgcagtggcatatgaagaagatgaagtaacaagaataatacaagatgctgtaaatgaaaaagtttatgaagaaataaaaaattggacagtctctgaacttagagaatggctattggattcaaatactacaagtcttgatataagaagaatatcaagaggattaacttctgaaatgatagcagcagttgcaaaattaatgtcaaatatggacttagtttatgcagctaaaaagataaaggttactgctcactgtaatacaactataggagaacaaggaacattatcagcaagacttcaacctaatcatccaacagacgacccagatggaatacttgcatcacttcttgaaggtttaacttttggtataggagatgcagtacttggattaaatccagttgacgactctgttgagagtgttactaaagtattaaaaagatttgaagaagtaaaacaaaaatatcaaataccaactcaaacatgtgtattggcacacgttactacacaaatggaagcaataagaaatggtgctcctgcagatttaatattccaatctatagcaggttctgaaaaaggaaatgaagcatttggatttaatggcgacactatagaagaagctagacagttagccttaaaacacggtacagctacaggacctaacgttatgtattttgaaactggacaaggttcagaattatcttcagaagcacatcatggaatagaccaagttactatggaagctagatgctatggatttgctaaaaagtatgaaccattcttagtaaatacagttgttgggtttataggacctgagtacttatatgatgctagagaagttgtaagagcaggacttgaagaccactttatgggtaaactacatggcttaccaatgggtgttgatgtttgttacactaaccatatgaaggctgaccaaaatgatatggaaaacttagccatactattaacaacagcaggatgtacgtattttatgggaatacctcatggagatgatgttatgcttaactatcaaacaacaggataccatgaaacagcatcacttagagaaatgtttggactaacagcaataaaagaatttgatgcttggatggaaaaaatgggattctctaaagatggtaagttaacagagttggcgggagacgcatctatattattagga

SEQ ID NO: 16980 - DNA, 2847 bp, Clostridium difficile
ttgataatgcaaatagatatgaataaattaactcctatgatgaaacagtatcttgaagtaaaaaatagatataaagactgtatactgttttttagacttggagatttttatgaaatgttttttgaagatgcattagtagcttcaaaagctcttgaaatagcattgacaggaaaagcttgtggtttagaagaacgtgctcctatgtgtggtgttcctttccactcagccaattcatatatatcaaaattagttgaaaatggatataaagtagcaataggtgaacaaatggaagacccatctacagcaaaaggaattgttagaagagaggttataagggtcatcactcctggtacagttttagatggaaatttacttgaaaataaaaagaataattatttattatctttgtataaggatggtactaatataggtctaacttatgttgatataagtacaggagaaactaatgcaacatgtttaaatgaagataaggtaattgaagaaattgcaaaaatccatccaactgaaataattataaatgatttagactttatagaaaagcttagagatatagctactgtaagtaatatatacataaatgaaagttttagtgataactatttggatataaatatattaaaagaatattttccagatgtttatctacaaaaactaaagtttgatgataaaggtctaataaagtcaagcttatcaattcttctgaattatatatacaatactcaaaaacaaataacatctaacattaataatataaatatatacaattcatcagaatatatggttctagatatgtttactagaactaatttagaacttactcaaactataagaggaaataagaaaaaaggttcattattacacgtacttgataaaacttctacagcaatgggaggtagacttttaagaaaatatgtagaagaacctttgataaataaatctaaaattgaaaatagattagatgtaatagaagaaataaaagatgactttatattaagagaagacctaaatgatatacttaaaaatatatacgatatagaaagaatatgtggaaagatagcatttgagagagtaacaccaaaagagttaattcacttaaaaaattcgatagaaaagttacctaatttaaaagatactataaatttatcaaatgcaaaaatcctaaaagagtatgtttcagaaatggataaattagatgatatatacaatttaatagatgaagctattctagaagaacctacgataaccataaaagatggaaacataattaaatcagattttagtgatgaacttaaggaactaagagagatttctaagaatggagcctttcttgtaaaggaaatagaaaacagggaaagagaaaaaacaggagttaaatcattaaaaataggatttaataaagtttttgggtattatatagaaataacaaaagccaactttaaacaagcaaagctagatgagacatatataagaaagcaaacacttagtaatgcagaaagatatataactccagaattaaaggaaatagaagaaaagatactacatgcagaggaaaagattaaatctttagaatacgagatatttgtagagataagagatacaatatataaaaacatagatagaatacaaaaagtggctaagactatagctaatatagatgtttttgtgtcccttgcaacagttgcacatataaataactatgtaaaaccagcaataaatgaaaataataaacttgatataagaaatggtagacatcctgttgtcgaaaatatagtaggagaggaaaatttcgttccaaatgatacttatttaaatcgtggagaaaacattattaacataataactggtcctaatatgtcaggtaaatcaacatatatgagacaaactgctataatagctcttatggcacatataggctcatttgtaccagcagagtctgctgatattccaatattagatagaatatttacaagagttggagctagtgacgatttatctcaaggtcaatctacttttatggtagagatgaacgaagtatcccttatattaaaaaatgcaacagagagaagtttagttatattagatgaaataggtcgtggaactagtacctatgatggtataagtttagcatggtcaatagtggaatatattcaaaaaaatattagatgtaagacattatttgcaacacattatcatgaacttactgatttagaagaagagtttaaagaggttaaaaattattcaatagcagtcaaagaagatggggaaggaataatatttttaagaaaaataattcctcaaggagcagacaagagttatggaatatatgttgctaaattagctaaattaccagacgaagtcatagaaagagcaaaatatatacttaaagacttggaaaaaaatcatgtttacaacagtgttgcaataaatggagataaagaaaacaataatataattaatagtaatttggacgaagaattagttaaggtaaatcaaagtaattttaagaataaatatgaatctctaaaaatagaacatgaacttatagtaaaagactacaaacatataaaaaaggattatgataaattaaattctaaatttaaagcattaaatgatgaagttgctttaatgaagcaaaatgatgataaagagaaaattaatcaagaagattctgtaaaagaagtagccttaactcaaatctcttttgatagtgtaaatagagatatactatcagaagaaattttaaatctggatattttaaatatgactccattagatgctataaactctctttataatcttcaaagaaaagcaaaagaaataaaatct

SEQ ID NO: 16981 - DNA, 1965 bp, Clostridium difficile
atgaaaaatataattaacatcctagatgatttgactataaataagatagcagcaggtgaagttgtagaaagaccttcttctgtagtaaaagaacttattgaaaactccattgatgcaggtgcaaataaaatttccatagatataattgatggaggaaaaagtctaattaagattacagataatggaataggaataccttcaagtgaagttgaaaaatcatttttgagacatgctactagtaaaattaaaaaaattgatgatttgtatgatttatactctcttggttttagaggagaagcattggcatctatttcagctgtatcaaaattagaaatgacgactaaaactaaagatgaaataataggaactaaaatatatgttgaaggtggaaaaataatatcgaaagaaccaataggttttactaatggaactaccatcattataaaagatattttctttaatacaccagcaagacagaaatttttaaaatctactcatgcagaaactataaatataagtgatttgataaataaacttgcaataggtaatccaaacattcaatttaaatatacaaataacaataaacagatgctaaatactccaggggatggaaaacttgtaaacactattagaagtatatatggaaaagaaataacggaaaatataatagatgtagagtttaagtgcaatcattttaaaatgaatggatatataggtaataacaatatataccgttcaaataaaaacttacaacatatctatataaataaaagatttgtaaaaagtaaaataatcatagatgcaataacagaaagttataagtctataattccaataggtaaacatgcagtgtgcttcttaaatatagaagtagacccatcatgtatagatgtaaatatacaccccaataaacttgaaattaaatttgaaaaagaacaagaagtgtatatagaacttagagattttttaaaggttaaattaatacactcaaatcttattggaaaatatgctacttatagtgataaaaaaacacaacctagaatcgctattaacagtagagaaaaaagtacagattataaattaagaaataatgatttattagaatctactcctaaaaatagtaatattactaaaggtaaggatgaagtcattgaagttgttactttatcaagtgaaaaaccaataaatgaatttcaatcagtaagtgaagtcctaaatgcaagtgtagaagatgatgtaaaaaacattaattatctaagtgaagatagtgcaaatgataatatacaagaagagtttcaagttgatggaattaaaaatgaaggaaattattacttaggagatagtattaaggacagtgaagaagaatacttgtgtagttcaaaacgcaagttttctttatacggatattctgtaattggagttgtatttaatacttatataattttgagcaaagatgattctatgtatttgttggaccaacatgctgcacatgaaagaatactatatgaaagatatatggagaagttctatagacaagatataaatatgcaaatacttttagacccagtggttattgaagtatcaaatgtagatatgcttcaaattgaaaataacttggagttatttatgaaatttggttttgagctagaaatttttggcaataatcatataatggtaagatgtgttcctactatatttggagtacctgaaactgagaaatttatacttcaaataattgataatatagaagaaattacaagtaattatgatttaaaaggagagagatttgcatctatggcatgtaggtctgctataaaagcaaatgataaaatatacgatattgaaataaaaagtttattggaacagctagaaaagtgtgagaatccatttacatgtcctcatggaagacctataatggtcgaaatatctaagacagaaatagaaaaaatgtttaaaagaattatg

SEQ ID NO: 16982 - DNA, 1062 bp, Clostridium difficile
atgttaaaaaaattagaggtattggaagatacatataaagacttaagtgaaaaaataggtgatccggatgtaataaatgatcaaaaagtttggcagaaatatataaaagaacatgctgacttggaacctattgttatgaaatacagagagtataaaagcgttttagatagtataaaagaatcaaaagaaattttacaagaagagtcagatgaagaattaagagaattagctaaaatggagttagctgagatggaagaaaaagtagcacctctggaggaagaaataaaaatactattattgcctaaagaccctaatgatgataagaacgttatagttgaaattagaggtggagctggaggagatgaagcagctctatttgctggtgatttatttagaatgtactcaaggtatgctgaaagaagaagatggaaaatagaattattgagtgcaagtgatactggagttggtggatataaagaagtatcttttatgataaaaggtaaaggtgcttattcaagattaaagtatgaatctggagttcatagagttcaaagaataccatcaactgaatctggtggaagaatacacacatcaacttctactgttgcagtattaccagaagttgaagatgtagaggttgaaataaatccaaatgatttaagaatagatgttttccgttcttcaggtaatggaggacaaagtgtcaatactactgactctgctgttagggtaacacatatacctacaggtgaagtagtatcttgtcaagatggaaaatcacaattaaaaaataaagagcaagctttaaaaatattaaaagctagactttacgataaagcattggcagaacaacacaaagatatagcagcagaaagaaaaagccaagtcggaacaggagacaggtcagaaagaataagaacatataatttccctcaaggtagaataagtgaccatagaataaatttaactttatataagttagatgcattcttagatggagatatagatgaaatgatagatgctttaattactgttgaccaaacagaaaaaatgactgcaata

SEQ ID NO: 16983 - DNA, 1506 bp, Clostridium difficile
ttgctaaagagagtgaggtgtagctatttgaaaaaaaatagattaatagcaaagaatatatcaatagcatttatagtactattcttttttagtgtatttacattcttttatgtaggtaatattaatagagtgttagaatatgaaacaaatgacataataacagttacaattgctggatggattatactttcatttttatttttaggtattataatttacatattatattcaaaagcaaatagtcaaaaaactatagaaaaagtagcatatacggattttgtaacaggttattccaactggagaaagtttgaattagatgttacaaatttattaaagaaaacatcacaaaataataaatatgcaatggtcatattcgatattgataaatttaaagcaattaatgatatatatggccataaaaagggaaatttaatattaaaagatattgcagatactttaaatgaattgactgatatcaatgaaacttttgctcgtgtaagtgctgataatttcaatatattattaacatataacaaaaaagaggatataataaatattatcaaaaagattatggcaaataatgaacttgtaaacttatcttttggaatttatgaaatcaaagataaggatttatctgtaagtgtatatagtgatagagcttcacttgcaaaatcatcaataaaaaataatagtgatgtaaattttgcattttttaatgacaaattaagagagaaattattatttgaagataagatagaaaaagaaatggaatatgctcttgaaagtgggcaattcgtaatgtatttacaaccaaaatacaatattaaattagataaattttgtggaagtgaagccctagtcagatggcaatatacagaaaaagaggtcatatatccaggtgattttattcctatatttgaaaaaaatggatttattagaaagattgatatgtacatattagaacaagcttgtaaagaaatccggtctttatttgataaaggaatttcacctttacctatatctgtaaacttctcaagagttgatttttttaaaaaagattttattgaaaacatagtaaatatatgtgatagatataaaataccatatagtttaatagaaattgaaattactgaatctagtatgtttggagatactgatactctatttaatgttagtagaaacctacaggatattggctttatagttgcaatggatgattttggctctggatattcttctgtaaatatgcttaaaaatataccattaaatgtaataaaattagatagaggattttttgttgatgataaagatgttgataagagtcaaattgttataaaaagcatagtttctctcattaagcaattaggaataagggttgttgctgaaggaattgaaacaagaagtcaaatagaaatgttaaaaaaagcaaattgtgatattgttcaaggatattatttttcaaaaccattaccaattaaagaatttgaaaaattagtctataaaata

SEQ ID NO: 16984 - DNA, 1476 bp, Clostridium difficile
atgcatattgaatctacaatggtaatgccaattgaattatcgaaaaaattattaaaatcaggtacgacaactatcatagccgacccacatgagttggtcaatgtaaaaggagttagtgcaatagattttttattagaatcgacaaaagatataccacttaatgtatatattatggtgccttcatccgtacctgcaacaagttttgaaactaatggagttggtaaatttagtgcaaaagacatggagagttatgtaaataatcctagaattttaggtttaggagaggtaatgtgttttaatgatgttataaattctgaaaatgaaatcttggataaactagagctttttaaaaataaagttgtagatggacatgcacctaatataaatggtaaatcacttcagacatatgtatgtgcaggaatagaaaatgaccatgaatgtataacttttgatgaagtatatgaaaaattgagagcaggattaaaaattttaataagagaaggaagcgcagcaaaaaatttaaagtctatagtaagtggtatgctaaagcataacttgccaattgaagaatttatgttttgcacagatgataagcacttagatgatatagaaaaacaaggtcacataagatggaatataaaatgtgcgattgatttaggtatggaacctgttagggctataaaagttgcaacttataattctgcaaaagcatatgggttaaggaaaattggagcaataggtgcgggttataaggcagatattgttgtattgaatgatttagacaaaatggaagtggatagtgtatataaagatggtaatttggtaaacgaagagatgttttctaattacaattatgagattaaagataaagaattgcttaatacagtcaagtttaaatatattaataaagaaaaaatacagttaaaagtaagtgaaaaaaattatgtaatggagattgtaccttatcaaattttgacaaataaggtatatgaatctttaccatgtgcagatggatattttgttccaaataaagagtattcaaaactttgtgttgttgagagacatagaatgactggaaatgtagcaattgctccactaaaaggatttggcataaaaaatggagcaattgctactactgtggcccatgattctcataatattatagttgcaggggataatgatgatgatattctagtagctataaattacttaaaggaaatacaaggtggttatgtaattgtatcaaatggaaaagttcttgcacacctaagtcttcaagtagctggattaattagtacttttacagctgaagaagtacaagaaattactgataatatgttggagatagcaagaaaaatggaagttccagagtatgtagacccttttattacactttcttttatggcacttccagttgttccacaaataagacttacagatttaggtctatttgatgttgaggaatttaaatttata

SEQ ID NO: 16985 - DNA, 1017 bp, Clostridium difficile
atgatgggtaaaataagatttggtattgttgggacaagcaatatagcaaatatatttctaagagctgcatctagggttaaagactttgaattggttgctgtatattctagaaatttagaaaaagctagagaatttggaactctatatggagcaagtattttttttgatgatttagaacaaatggctaaatcgaaggatatagatgctgtatacatagcttctccaaatgcattacattcaaagcaaaccattacttgtttaaaacacaaaaaacatgtgctttgtgaaaagtcgttagcatctaatttaaaagaagtcaaatcaatgataaaaacagccaaagataataatgtattgcttatggaagctatgagaattacatgtgttccaaactttaaagcagttaaagaaaacttgtataaaatagggaaaataagaagattttttggaagctattgtcagtattcttcaagatatgataaatataaaaatggaattatagaaaatgcctttaaaaaagagttgtcaaatggagctttaatggatataggagtgtattgtatacatcctatggtgaatttatttggtgctccaaaaactgtaaaggcagtttctcatatacttcaaactggagtggatggagaaggttcagctgtatttcaatatgatgatatggatgcgataattcagtattctaaagtagctgattcttatataccatctgaaatacagggagaagagggaagtataataattgaaaagcttaatctatttgaaaaagctattattaaatacagagatggaagagaagaagatatatctattccaaaagaaaaagcagaggaaaagcctagagaaatagaaggaatgtattatgaacttgtagagtttataagtcttataaataacaataaaatagaatcaaatataaattctcatgaaaattcaataatagtaatggaaattatggatgagataagaagacaaagtagtattgtttatccagctgatagtata

SEQ ID NO: 16986 - DNA, 609 bp, Clostridium difficile
atgataaacgatattaaaaataaattcaaaaattacaaaccatatataaatggatacaagaatatgaagagagcatctgttttaattccaatagtagaaataaataacacacactatatattatttgaagttcgctcaaaaaatttgaagcatcaacctagcgaaatttcttttccaggtggtaaaatagaatcaggtgagactccatatgaagctgttattagagaaacttgtgaggaacttggaacttttagtgacaatatagaagtaatatcaagtcttgacctccttataacaccagtaaagtttatcatacatccatacttaggatatataaaaaatattaataatttaaatataaacaaggatgaagttgaccatacttttttggttcctataaaatatcttttagagaatcctccaaatacttatagtaatactgtaaaagtttttccagacgaaaatctaccatatggttcaattccaaaccaaaaagattataaatttgaaagtggaagttatcctattctgttttataaatataaagattatgtaatttggggaatgacagcaaaaatactagaaaactttttaaattttttatcagaa

SEQ ID NO: 16987 - DNA, 1092 bp, Clostridium difficile
atgttctttagtttgtctaaagagaattataggaggtactgtagtatgaaagcaaggttaatattagaagatggaacagtttttataggaaaggcatttggatatttagaagaaagtgtaggagaagtagtatttaatacttcgatgataggatatggtgaagttttaacagatccttcttactatggtcaaatagttactatgacttatcctcttgtaggaaattatggtataaatttatcatcagcagagtctgaaaaagttcaagtaaagggattcatagtaagggagaaaagtgattctccaagtaattttagatgtgaaattgatatagaccaatatttaaagcaaaataaagttatcggacttgaaggaatagatacaagagctttgactaagatacttagaaataatggaacaatgaaaggtataattacattagaagacagtaaattagaagatgttaaacataaattggataagttttcaaatacagaagcagttagaactgttacaagaaaagaagtagagcatataaaaggaaatggtccaaaagtggctgttatggattttggagtaaaaagaaatatattaagatcatttatagctcgtggatgtgatataacaatatttccagctacaacatctccagaagatgtattgagtataaaccctgacttaatattcttgtcaaatggacctggagacccagaagacttagaagatgttatagaaaatataaaagctcttattggtaaaaaacctatagttggaatatgcttaggacatcaacttttagctttagctcttggaggaaaaactgctaaacttaaatttgggcatagaggtggaaatcatccagttaaagatttagaagaaggaaaagtatttataacttctcaaaatcatggttattatgtttcagaagttcctgaacaaatgaaagtgacacatataaatttaaatgataatactgttgaaggaatgcgacatgagaagctagatgtatacagtgttcaataccatcctgaagcttgcccaggaccaaaagataatgactatatttttgataaatttttagaattagtaaaa

SEQ ID NO: 16988 - DNA, 450 bp, Clostridium difficile
atgaacatcaatgaaattaaggaattattaaaggccatagactcaactaacttagaatatgtaaaacttgaaagtagcgatttaagattagaagtatctaaaaaagctcaatctacaagttcacctgttttaagtgtacaacaagaatcagtagtggatctttctttagaaaagccagttgtaaacgatacacctgtcacatctaatgagaatctatcagtagtagtagctcctttgatgggaacattctatgattctccaagtccagatgcagatagctttgttaaagttggcgatgtagttgaagaaggcgacactttatgtatattagaagcaatgaagcttatgaatgagataacaagtgaaattaaaggtgaaataattgaagtattagttagtaatgaagaactagtagaatataatcaacctttatttaagataaaaccattg

SEQ ID NO: 16989 - DNA, 1359 bp, Clostridium difficile
ttgataaaaaaaatactagttgcaaatagaggcgatatagcagttagaatcatcagaacatgtaaagaactaggtataaaaactgttgctatctattctgaaatagataaagattgttttcatagatatatagctgatgaatctatttgtataggaccaaataatataagtaagagttataataatatagaaaatataatctatcttgctcttaaattaaagtgtgatgctattcatccaggctttggatttttatcagagaatcctgaatttgcaaagcaatgtgaagataataatattatttttataggtccaacaagagaacaaatgattttgatgggagataaatctagagcaagagaaactatgatggaattgaatatccctgttgttcctggttcagaatctgttttgaaaactaaggaagaagctttagaagttgcaagagaaattggatatcctgttatgataaaagcctcaagtggaggcggtggaaaaggtatgagaatcgttagaaaagaagaagaacttttttcaaattttgatatggcaagttcagaagctctagcagcattttctaatagtgatttatatatggaaaagtttatagaaaatcctagacatatagaagtacaagtatttggagataaacattcaaatgcaatacatttaggtgatagagattgttctatgcaaaggcgaaatcaaaaagtaatagaagaatctttaagtccatacctttcagatgaagaaagacaaaaacttcataaaattgcagtagatatagtaaaaggagtaggttatatcggtgcaggtactattgagtttatagttgacaaagataaaaacttttattttatagagatgaatacaagaatacaagttgaacatccagttacagagatggtaacaaatcttgaccttataaaacttcaaatatctatagctaatggggataaaattccttttaaacaagaagatattacttttagaggtcatgctattgaatgtagaataaatgcagaagattcatcaaagaattttgctccatcaccaggtaagatagaatcattaaatttacctggaggttttggtgttagatttgatacttttgtatatgcaggatatactataccacctttatatgattctatgataggtaagttaatatgttgggctgaaactagagaagaatgtataagtagaatatatagagctctagacgaaattattgtagaaggtattaatacaaatgtagaatttcaaaaggcacttgtaacaagtgaggagtttagagaagatactcatcataccaaatttatagaagatgtctttatgaagaaagaatttgctacatta

SEQ ID NO: 16990 - DNA, 942 bp, Clostridium difficile
ttgattgaaaataatagtgaaaaaataaaagtcttagaaaatgatattaaacaattaataactatttctaaggcaaataatatagatttaagtgataaaataaattcacttaatgagaaattggaaaagcttaaggaagatgctttttcacatctatcagcatatgaaaaggtaacattaagtagagatataaagagacctacgacattggaatacatagaacatatttgttctaattttttagaacttcatggagataggctttttaaagatgacccttctatggttggaggaattggtcagataggaaagtttaatgttactatagttggacaccaaaaaggaagagatacaaaagaaaatataaaaagaaattttggaatgcctcatccagaaggatacagaaaagcattaagacttatgaaacaagctgaaaaatttaatagacctataataacgtttattgatacatcaggagctttttgtggtctagaagcagaagaaagaggacaaggagaagctattgcaagaaacttacttgaaatgagtaaactttctgttccagtaatcacttttgtaattggtgaaggtggtagtggaggagctttaggtatcggagtaggaaatgatgtatgtatgttagaacattcagtttattctgtaatttctccagaagggctttctagtattctatttaaagattcatctaaagctaaagaagcttgtgatgttatgaagcttacaagtaatgatttatatgatttaaaaataatagataagattataaaagaacctcttggaggagcacaaaaagatgtagaagctgtttcaaaagaaataaaagcttatattttagaaagattaaatcattacaaagatatggataaagaggaaattatagctcaaagatataaaaaatttagaaatattggaaaatgctta

SEQ ID NO: 16991 - DNA, 1116 bp, Clostridium difficile
gtgatagtagtggaaaaagcttataagtttagaatgtatccaaataaaaaacagcaagagttaattaacaaaacttttggatgttgtaggtttgtatataataaatatcttgctaaaagaatagatgtttataaaaacgataaagaaacttttacttataaacagtgtagttctgatttgaccaatttaaaaaaagaattaaattggcttaaagaacctgataaattttcactacaaaacgccttaaaagatttagataatgcatataaaaaattctttaaagaaaaggcaggatttcctaaatttaaatcaaagaaaattaatagattttcatataaaactaactttacaaatggaaacattatgtattgtggtcaacatataaaactacctaaacttggtatggttaaggtaagggataaacaagtacctaaagggagaatacttaatgctactatatctaaagaaccaagtggtagatattatgtatcattatgctgtactgatgtagatattgaagtatttgaaaatactaataatcatataggtttagatttaggaattaaagaattttgtatctcaagttgtggagaatttatagaaaatcctaagtatcttaagaagtcattaaacaaacttgctaaattacaaagagaattatcgagaaaaacaatcggtagtttaaatagaaataaaacaagattaaaagttgcaagacttcaagaacatatagctaatcaaagaaatgattttctacaaaaactatctactaaattaataaaagagaacgatattatttgcatagaagatttacaagtaaagaatatgattagaaatcgtaaactatctcgcttaatttctgatgtatcatggtcagagtttattcgtcaattagaatacaaggctaattggcatggtagacaaattgtaaaggtaggtaaattctttgcaagttcacaaatatgtaataaatgtgggtataaaaacgaggaagtgaaggacttaaatataagagaatggatttgtcctagttgtaatgaaactcacgatagagatataaatgcaagtagaaatatattaaaagaaggattaagattaataacgattcaaaataaa

SEQ ID NO: 16992 - DNA, 1836 bp, Clostridium difficile
gagaggttaaataataaccttgaagcaatctctatgcttaacagagtggaaagtggagaacgagagcttgatattacagctcaggaagttttagctaaatatgtcggctggggcggactttctgatgtctttgatgaaagcaaggatggacagtggaaagatgcaagagccttcttaaaggaaaatctatcgtcatcagaatatgaagctgcaagagaatcaaccctaacgagcttttatacaccgaaaatagttatagatggaatatataagactctttccggtatgggatttaaacaaggtaatatccttgaaccgtcaatgggtatcggaaactttatcggtaatgtacctgatgaaatgggtaagtcaaagttttatggagtagagcttgactcggtaagtggtcgcattggaaaactactgtatccggaaagtgaagtacaggtaaagggacttgaagaaacgggattctccaataacttctttgatgtagcaatcggaaatgtcccatttggagagtacaaggtaaatgacagagaatacaatcgcaataactttcttattcacgattatttctttgccaagtccattgataaggttcgtaacggcggtgttatcacctttattacatcatctggaacaatggataaaaaggacgaaagtgtaagaaggtatcttgcagcaagagctgaatttttaggagcaatcagacttccaaatgatacctttaagggtgttgccggaactgaggtaacaagcgatattatattcctaaagaaaagagatagcgtattagagcgagatgaagcttggatacacctttcagaagataaaaacgggcttgtatataacaaatattttgtcgatcatcctgagcaggtgcttggttctatgcgtgaagtaagcggaaggtttggaaaaactctaacctgtgaaccgatagcttatttagggcaagagataaatatggcttcattaaaggagcgtatcgagattgcaggagaaagaatttcaaaagataccaagtatgaagaaatagagcttttagatgatgaaatcacttcaatccctgcaaccgatgatgtaaagaacttctcttataccttgaatgatgatgaagtctattacagagaaaattcgctctttattaaaaaggaagtatcagacaagaataaagaaaaaatcaaagattatcttgagctgaatgttgccttaaaagatgtgatttacaagcagaaggaagattttagcgaagaagaaatcaaggcttcacaggaaaaactaaatgaagtatatgacaacttttcaaagaagcatggctttgtcaataatttaagtaataccagagctttgaaagaggatagcaactttccacttgtttcctccatagaaattcttgatgaagaagaaaatttcaaggcaaagggagatattttctccaaaagaactattacaaaagccaaagttatagaccatgtggatacttctttggaagcccttgttttatcggtatctgaaaaaggctatgtggactttgactatatgggaagtcttacaggaaaagacagagcgactttaattgaggagcttcgaggggaaatctacttaaatatcagagaagaacaaaatttttacagaccactttcttttaatcctgaagatggagatttaccttttgcctgtgcaaatggcagtaattcctataaatatggctatgtaacaaaagatgaatacctaagtgggaatatcagggataagattgccattgtagatagctatttatcaaagttaagacaaacggaacgagagcttcctcatcttggctttgttgag

SEQ ID NO: 16993 - DNA, 624 bp, Clostridium difficile
ttggattatttgactatagcactagcaaaaggacgaattgaaggggaatcatttaaaaaatttaaaaaaatgggtctaggagatagtatagacacagatacgagaaaactaatttttaaagatgaagaaaataaaattatatatatacatgtaaagccatcagatgtagttacatatgttgaaaaaggagtcgctgacctcggtatagcaggtaaagatactattttagaaaatgagacagatgtatatgaaatatatgatttaggttttggaaaatgtaaatttgctgtagcaggattaaagggagatagcatatatagagaagatgaatatttaaaagtggcaacaaagtatcccaatatagcaaaaaagtattttaaagagaaaggtcaaaaaattgaaataataaaattaaatggttctgtagaactagctccaatagtagggttgtcagatgtaattgtagatatagttgagactggcaatacacttaaagcaaatggtcttgaaatattagaagacatatgtaatataagtgctagaattatatcaaatagagctagctatagatttaaatatgaacaaattcagaatataattcgtttatttgaagaacttgataat

SEQ ID NO: 16994 - DNA, 210 bp, Clostridium difficile
atgctagtaatttcgagaaaaaaagatgaagcagtacttataggagataacatagaagtaaaagttgtaggagtggatggaaataacataaaattagctatatctgctcctaataatataagtatcttaagaaaagaaatatatgaaaaagtaaaaaatgaaaatataaaagccacaaataaaaatataaaaatcttaaaatcattaaaa

SEQ ID NO: 16995 - DNA, 3406 bp, Clostridium difficile
tcaatgtgtacaaattgtaaatcaagggataagacctgctattaatacagcaaaagtttatatattatcaggcaaaataactgatgaagagttttctaaaataaaagattactgtataaatccagtagatagtagagaagcatctttagagaaaccagaaacgttaaaaatggaaactgaaataccaacaacagttgaagtattagatggatttatagatttagatgaaaaaggattaagaacatttgtaagtgaaaaaggattagcaatgactttaggagacttacaacacgttcaaaaatactttaaagatacagaaaagagaaatccaactataacagaaataaaagtattagatacttattggtctgatcattgtagacatactacttttatgactgaaatagaaaatgtaaagatagaagatggtaagtttaatgatatagtaaaagaagcgtatcaaatgtatcttaactcaagagacaatgtatatgtgaacagacataaagatatatgtttaatggatatagccactgttgcagtaaaagaattaaagaaaaatgggaaattaaatgacctagatgaaagtgaagaaataaatgcatgtagtataaacgtagatgttgaagttgatggtaagatggaaaaatatctagtaatgtttaaaaatgaaactcacaaccatccaactgaaatagaaccatttggtggagcagctacttgtttaggtggagctataagagacccattatcaggaagaagttatgtttatcaagcaatgcgtgttacaggaagtgctgacccaagaacgactttagaagatactttacctggaaaacttatgcaaagaaaaataactacagaagctgctcatggatatagttcatatggtaaccaaataggtcttacaactgggcaagttgcagaagtatatgatgaaaactttgttgcaaagagaatggaaataggtgcagttatagcagcagcaccaaaagagaatgtagtaagagaaagacctgaagcaggagatgtaatcgttcttcttggaggaaaaacaggaagagatggctgtggaggagcaactggttcatctaaagaacatagtgaagagtcaatcttaacttgtagtgcagaagttcaaaaaggagatgctcctaacgaaagaaaaatacaaagattctttagaaataaagaagttgctcaaatgataaaaagatgtaatgattttggagcaggtggagtttgtgttgctataggagagattgctgatagcttagatataaacttagacttagttcctaaaaaatatgatggacttgatggaactgagcttgcaatttcagagtcacaagagcgtatggcagtagccataaaaaaagaaaataaagataaatttatacaattagcagtagaagaaaacttagaagctacacatgtagctacagtaacagatacaggatatttaagaatgttctggaatggaaaagcaattgtagatataaatagagagtttttagatacaaacggagtaaaacaaactactgatgttcatgttactaaagtagatgaagaaaatacattctttagctctaatgaaatagtaaaagatgttaagtgttcaagtatgaaagacaagtttacaaaagtactatctgaccttaatgtttgttctcaaaaaggattagtagagatgtttgataatacaattggtggtaatacagtacttatgccatttggaggaaagtatcaagcgactccaacacaaggtatggttgctaagataccagtacttggaggagaaactaatacttctacaataatgacttatggatacaatccaaaggtaggaaaatggagtccattccatggtgccttgtatgcagtagtagaatctgtgtgtaaattggttgctattggaggaaattatagtacaacaagacttacattccaagagtattttgaaaaacttggtaacaatccagaaaaatggggtaaaccattctcagcacttttaggagcattttatgcacaaagtaaatttgagatacctgctataggtggaaaagacagtatgtctggtacatttaaagatattgaagttccaccaacattagtttcatttgctgttgacacagtagatgcgaagaaagtagtatctccagaatttaaaaaagcagactcaaaagtagtaatgttatgtgtaaacaaggcagaaaatgatgttgtagattttgaggaattaaagagaaacttagataaagtaagagaacttatacatggaaataaagtcttatcaacatatgcattaggatttgcaggtgtaggtgaagcaataagtaaaatggcttttggtaataaaataggatttaagtttagtgaagaggctgaaaaagcatttacagatgataaattatttgaggctagttatggaaatatagtacttgaattagcaaatgatgatttaagtatgttagaaggatacaattatgttgtgcttggaagtacagttaaagaagctagtatatttatcaaaggtgaagaacttgcattagatgaattatataaagcacattgtagtactttagagcctatattcccaactaaaacagaagaagtaaaatcaaagatagaaactataagttatatatcacaaggagaagctaaaaaatcatcattaagtatagctactccaagagtatttataccagcattccctggaacaaactgtgaatatgactctgcaagagcatttgaaagagcaggagctaatgcaagtataagagtatttaagaatttaacttataaagacatagaagattctatagatacaatagtaaacgaaataaaatcttctcaaataataatgttaccaggtggatttagtgctggtgatgagccagatggttctggtaaatttatagctactgtatttagaaatcctagagtgcaagaagctataaatgaatttttaactcaaaaagatggactaatgttaggtatctgtaatggattccaagtattaattaaattagggttagttccatatggagaaataagagttccaagtgaaagtgctccaacacttacttacaataatattggtcgccatcaagctaagattgctagaactagaatttcatctaataaatctccttggttagctcaaactaatgttggagatattcataatatagcaatttctcatggagaaggtaagtttgttgccagtgaagatgttatgagagaattaattgctaatggacaagtagcaactcaatatgttgactttaataatgaagctacttatgatattgagtttaatccaaatggttcattctatgctgttgaaggtataactagtgctgatggtagagtgtttggtaaaatgggacattctgaaagaatt

SEQ ID NO: 16996 - DNA, 1090 bp, Clostridium difficile
ttaaagttacaagagtataaacatagtatggagcagatggcttcaaatttagaagaattgagggtttctctttgacatagcttcattgatgaaaaatatacaaattaatgaagaaaagatgaatcaacaagacttttggaatgataatgaagtcgctcaaagagtacttcaagaaaataaatctttaaaagagacattagaagaatatgaaagcttaaaaagcttattagaagatatagaagtattaattgaaataggtttagaagaagatgatgattctgtagaaagagatatagaaaagtccatagaatcaatggaagaaaaattatctgaaatgaaaataaagactcttctaaatggagagtatgataaaaataatgctatattatctataaatgctggtactggtggcttagatgctcaagattgggctcaaatgcttttgagaatgtatataagatggtcagaaagtaagggttataaagttaagcttttagatataatatcagaccctgaagcagggataaagacagctacaattcttgtagaaggaacaaatgcttatgggtatttaaagagtgaaaaaggagttcatagattagtgagaatatctccatttgacccatcaggaaaaagacatacttcatttgcatctatagatgtaacaccagagttagatgaaaatatagaagtagaaattaatccatcagatttaaagatagacacatatagagcttctggagctggagggcaacatgtaaatactactgattcagcagttagaataacacatatccctactggtgtagtagttcagtgccaaaatgaaaggtctcagcatctaaataaggacagagctatgagacttttaatggcaaaattgatagaattaaaagagttagaacaaaaggaaaaaatagaagatatacaaggcaaatactcacaaataacttggggtagtcaaattaggtcatatgtttttcaaccatataaattggttaaagaccatagaacaaatgctgagtttggaaatgtagatagtgtaatgaatggaaatatagacttgtttattaatgaatacttaaaaatg

SEQ ID NO: 16997 - DNA, 2673 bp, Clostridium difficile
atgagctttatggataatttattcaacatggcagataaaaaagaattaaaaaagttcaataaaactgttgatataatagattcattagaacctaaatttgaatctatggcagactcggaacttaaaaatatgacaaatatatttaaagaaagattagcaaatggtgaaagtatagatgatatacttccagaagcttttgcagtagttagagaagtttctaagagagtgttaggacttagacactacagagttcaaatgattggaggtatagtactacatcaaggaagaatagcagaaatgaaaacaggtgaaggtaaaactttggttgcaactgctcctgtttatttgaatgcgcttactggaaaaggtgtacatgttgtaacagtaaatgattaccttgcaaaacgtgatagagaccaaatggcaaaaatctatgagtttttaggaatgagtgtaggcgttattatacacggtcaaaatccaaaagttagaaaagaacaatatgattgtgatataacttatggtacaaataatgaatatggatttgactatctaaaggacaatatggtaatacacaaagagcaaagagttcaaagaggattaaattatgctatagtggatgaggttgactctatactaatagatgaggctagaacaccacttatcatatctggacctggagacaaatcaactcacttatattcagatgcaaacacatttgttttaaccttaaaaccagatgattatgaattagaagaaaaagataaggctgtatctctaacagcatcgggtatacaaaaagcagaagtgtattttaatgttgataatataacagatatatctcatacagaattataccatcatataaatcaagctttaagagcacatgtaataatgaagaaagatgttgattatgttgctaaagatggagaaatagtaatagtagatgagttcacaggtagacttatgtttggtagaagatattcagaaggtttacatcaagcaatagaggctaaagaaggtcttaaaatacaaagagaatctaaaacactagctactgtaacattccaaaactactttagaatgtacaaaaaactttctggtatgactggtacagcaaaaacagaagaagaagagtttaaagcaatctacaaaatggatgttttccaagtacctactaataagcttatgataagggaagacttaccagactgtgtatacaaaagtgaaataggtaaatttaatgctgtagcacaagaaataattgaaaggcacaaagtcaatcaaccaatacttgtaggtacagtatcaatagaaaaatcagaattattatcacaaatactaaagaaaaagggcataaagcacgaggtattaaatgctaagcatcatgataaagaggcagaaataatagcacaagctggtagacttggagctgttacaatagctactaatatggctggtcgtggtacagatatagttctaggtggaaatccagattttttaactaagagagaaatgagaagaaatggatttaaagaagaaatagtaaatagagtagatactccaatagaaggtatacctgtaaaaggtaatgaaattctatttgaagctagagaagagtatgaaaaactatttgaaaagtttaagcaacaaacgcaagaagaacaaaaacaagttgtagaagcaggtggacttgctataatcggtacagaaagacacgaatctcgaagaatagataaccagttgagaggtcgtgctggacgtcaaggtgacccagggagttcaagattctatataggtcttgatgatgaccttatgagattgtttggtagtgatagaatatctggtattgtagataaaataggtcttgaagaagacatgccgatagaacatagaatattatctaagtctattgaaggagcacaaaagaaagtcgaaggtaaaaactttggaataagaaagcatgtacttcaatatgatgatgttatgaataaacaaagagaaataatatatgcagagagaaaacgtgtattagaaggtgaagatttacaagaacaaatacaatcaatgactcattctataatagaagaagcagttactctttatacacaagataaaggatttgatgaagaaggattcaaagaacatatgtataatctgttcttgccaaaaggtagcatagaaataccagaaatagaaaaacttaatccagttgaaataacagaaaaagtttatgaaatagctatgaagatatatacttcaaaagaagaacaagttggctatgagagaatgagagaagttgagagagtaatcttacttcaagctgttgataaccattggatagaccatatagatgctatggaccaattacgccaaggtattggtcttcgtgctgtaggtcagcaagacccagttattgcttataaaatggaaggttttgatatgtttgatgaaatgaataaacatatcaaagaagatactgtaagatatttatttaatataacaatagaaactccagtggaaagaaaagcagttgtagatgttgaaaatctatcttctccatcagatggaacacttccaacaagtaaaactgttaaaaaagatgaaaaggttggaagaaatgacttatgcccttgtggaagtggtaaaaaatataaaaactgttgtggaaga

SEQ ID NO: 16998 - DNA, 1332 bp, Clostridium difficile
atgaatagattggaaagaatacttatgccattggctgaaaaaataggtaaaaataaattattaattgcaattagagatggttttttagtatcatcaccattattaataataggttcattatttttattagtagcaaattttcctataaaaggatggaatgaatttgtaggtcaaatttttggtccagattgggctgtaaaattgcaacaaccaactgtagcaacatttgaagtaatgactctacttgcagttttagggattggatattcttatgcaaagcaaatagatgtagacccaatagcatcagcagcagttgcaatagttgccttttttataataacaccatttgtaataccatatacaccagaaggaacagaatcagtttacatggtaacaggtataccactaggttggatgggttctaagggaatgtttgtaggtatgataacagcaataacctctgtaaaattatttgctgcagttgtaaaaaaaggatggacattgaaaatgccagatggagttcctccaactgtatcaaaatcatttgcagcattaataccaagtgcaatagttatggtagttttctttttagttaagatagcttttgaagctacaccatatggaaatgtacatgaatttatatttaattttttacaaataccattattaaaattaggaaatactttaagcgctacagcaattgcttatgtattcttacatctattctggttctttggaataaatggaagtagtgttgttggagctgtgtataatccaatattaaaaattctatcagctgaaaacttagctgcttttcaagctggtacaaaactaccaaacataataactgctcaatttcaagatatgtttgcaacatttggtggggcaggtagtacattatcattaattatagctatgttattaatatgtaaaagtaaacgtataaaatcaataggaaaattatcaattttaccaggtatatttggtataaatgagccattgatatttggtctaccgataatgcttaatccattgctattgataccatttgcattagttccaacagtaaatataataatagcttatttctgtatgtcaacaggattagtaccacttacaaatggagttcagctaccgtggacaactccaattatattctctggatttctaacaacgggatggcaaggggcagttttacaattagtacttcttatactaggaatatttatgtatataccatttataaaaatactagacaaacaatatttaaaagacgaaaaatcaaatgttgcagaggaagatgatgatatatcttttgatgatttagtatta

SEQ ID NO: 16999 - DNA, 306 bp, Clostridium difficile
atggaagaaatagttttaaagattataattcatgctggaaatgcaaaatctatgctttatgaagcacttgactatgcaaaggaaaacgattttaaaaaagcagatgaattaattgaaaatgcaaatgaagaaattttaaaagcacataaagtacaaactgaacttatacaaaaggaagctgggggagataaatcagatatatctattttattgattcactctcaagaccatttaatgacttgtatgagtgagagaaaccttataaaagaaatgattatgttaagaaaagaaattcaaaaattaaaa

SEQ ID NO: 17000 - DNA, 363 bp, Clostridium difficile
atgagagaagagataaatgattgtaattgtaatatagtacatgaagaaatagtaacagaggctaaatcaactatgccagatgaagaaatgttatatgatttagcagaattatttaaagtatttggggatactactagagtaaagatattatatgcattatttgcaaatgaaatgtgtgtatgtgatatagcgagtttattaaatatgactcattctgcaatatctcatcaacttagagtattaaagcaggctagattagtaaagtttagaagagaaggaaaaacagtgtattactcattagatgatagtcatataagtcagatatttgattgtggattaaatcatattagagagacttataaa

SEQ ID NO: 17001 - DNA, 2217 bp, Clostridium difficile
atggaaaaattagaaggaatgataagtgaaatagtctttaaaaacgaagataatggttatacaatagctcacctggtaaatgaaaatgatgaaattgtggttgtaggatgtatgcctactttggcaattggagaaagcatagaagttgaaggaaagtgggtaaatcataagatttatgggactcaatttgaagtgaatagttttatgccagtaacaccatcatccttagaaggaatttatgtttacttatcttctggaatgatacatggtattggtgaaaaaatggcaaaaagaataattgataagtttggtgtagatacgttagaggtgatacaaaattcaccagaaaaactacaagaagtagaaggtatagggagtaaaaaagtaaaacaaatagtaaaaagttatgaagaagacagagaattgagaaatataataatacagctatctccttttggaataacaccaaattactgcctaaaaatatataaaaaatataaaagcagtgcaatagaagttataaataaaaacccataccaacttgctgaagatataagaggaattggatttaaagtagctgatagtatagcaagtaaaattggtatagataaaaactctaaagatagaatttgtcagggaatcttatacactttaaataaatctttaagtaatgggcatacatatttaccagagcatgttctaatacaagattcggaaaaattattggagctaaatggagaaataataaaagagtgtgtaatgatgctagtttataatcaaaaaatacatatagagaaagtaaacaatgaaaatcttatataccttatgccatactatttagctgaaaatggagtatgtagtcaaatagtaaaattatcacagtatgaatttgaagacttaaaaatagatatagataacgagattaatgttttagaagaagataagaaaattaagttagcagaaaaacaaattttagcagtcaaagaatctgttaatagtggagtattaattataactggtggaccaggaactggtaaaacaactaccattaatgctatcatagatatatttgaaaataatggtaaaagtgtgactttggcagctccaacgggaagagcagcaaagagaatgagtgaaacttctaataaagaagcaaaaactatacataggttgctagaaatgggattttcaacagatgatgatttaactttttttaaggatgaagaagacccaataaattcagatgtaataattgttgatgaggtatcaatggtagacattatcttaatgtacaatttacttagagctataaagttaggaacaagagtaattttagttggagatagtgaccaattaccttctgtaggtgctggaaatgtacttaaggatatgattaattctaatattataaatgtagttaaattaaatgaaatatttagacaagcgcaagaaagtatgataattgtaaatgcccataagataaacaatggagaaccactttatctaaatacaaaaggtaaagatttcttttttataagaaaatcaactaatgaagaaattttaaatgaaataataggattggttaatgaaagattacctaaattttataaagttgataaattaaaagatatacaagttttatcttcaatgagaaaaggtgaattgggagttactaatctcaatatagagttacagaagtatcttaacaaaaaagaaaaatttaaagttgaagaaagtttttctaaaagattatttagagttggcgataaggtaatgcaagtaaaaaataattatacaaaaaaatgggaaacagaagaccaaaaagaaagtggagaaggtatctataatggagatataggatatgtttatcacatagataaagataagaaaactatttatatattatttgaccagactaaaattgtatcatacctatatgatgaattagatgaaattgaccatagtttttgtacaacaatacataaaagccagggaagtgaatttccagttgtagtattgccaatagcgtgggctcctcctatgttacttagccgtaatttattatatacagcagtaacaagagcaaaaaaattagttgtattagttggagatgtgaaatatcttgaatatatgataaaaaataatagagttaatcaaaggtattcaaatttaggatataagctaaataaatttaaacaagaagggttgttgatagaa

SEQ ID NO: 17002 - DNA, 1383 bp, Clostridium difficile
atggataatttaaataaaaagtttttgatggaatatatagatgagatacagggagaattaagagatatatcagataagatatggaaaaatccagaacttcagtataaagaatactatgcttcaaatttacaaaaagaatgtttaaaaaaacatggttttagtatagagggattagaagatatggatacagcatttgtggctagttatggagaaggtagaccagttatagcagttttgggagaatatgatgctttagatggtttgtctcaaaaagtatctactactaaagaacctattgtagatggtggtgcaggtcatggatgtggacataacttacttggtacaggttcaataggagctgtaattgcagtaaaggaattaatcaaactaaaaaagctgaaagggactataaaatactatggatgtccagcagaagaagatttatctggaaaagtattgatgataaaaaaaggtttttttgatggaattgattgtgcttttagttggcatccatttgatataaatactcctataagaatcccaacacttgctaattactctgtgaaatttagatataatgggattagtgctcatgcagcacaagctccttataacggaagaagtgcacttgatgcagtagaacttatgaatataggttgtaattatttgagagaacatatatttgatagttgtagagtacactatgtaactactaatggtggaaaaatgccaaatatagttccagattttgcagaagtgtggtattacataagaggagttaaaatggagcatgtaagagatgtatttggtaggattgttgatatagcaaaaggagcagcattaatgactggtactagtatggaatatgatattataagtggagtatatgactatattccaaatacaatattaacagatattctatcacaaaatatgaaattagtaggtgtgcaaaactataatgaaaatgactactactttgcagataaattagctgagacagtgtctatagataaaagaagtagtgtttctagtgtcttaagtggaaataaggatattactaagatgaatttacatgatgaggttacagatgatacatttactcataataactgtatatcattatcattggatattggagatgttagttacataattcctacagcacagtgttcttgttcagtttggcctattggtatttctgcccatacatggcaatcttgtgccagtgcaggttctgatatgggatttaaggcaatgttattggcatctaaatctatatcatgttcaataaatgatgtaatgcttgatgaattggttataaataaagcaaaaaaagaattgaaggatactgtaggtagttttaaatatataccaattatt

SEQ ID NO: 17003 - DNA, 1191 bp, Clostridium difficile
atggcaagacatttatttacgtcagaatcagttacagaaggacatcctgataagatatgtgaccaaatatcagattcaatattagatgcattattagaaaaagacccacaatctagagtagcttgtgaaactacagttactactggtttagttttagtagcaggagaaataagtacatctgcttatgtagacattcctaaattagtaagagaaacagtaagagaaattggatatacaagagcaaaatatggatttgattgtgatacttgcgcagttataacttctattgatgaacaatctggagatatagctatgggagttgatgaaggtctagaaagtaagactggagaagagatagaagaagaaatagaaaaagttggagctggagaccaaggtataatgtttggatttgcatgtaatgagactccagaattaatgccacttccgatatctttggcacataaattatcaagaagacttacagaagttagaaaaacaggtttagttgattatttaagaccagatggaaaaactcaagttactgttgaatatgaaggaagtaaagctgtaagagtacatacagttcttatatcagctcaacattgtgaaacagtatcaaatgataaaataagagaagatttaattaatcatgttattaaggaagttataccagcagaattacttgatgaagagactaaaatttatataaatccaacaggaagattcgttataggaggaccacaaggagatacaggtcttacaggaagaaaaataataatagatacttatggtggatattctagacatggtggaggagctttctcaggaaaagaccctacaaaagttgatagatctgcggcttatgcagctagatatgttgcaaaaaatattgttgcggctggtcttgcagacaaatgtgagatagaacttgcatatgctataggtatagctagaccattatctatatttatagatacttttgggacaggcaaggtttcagaagaaaaacttgttgaattagtaaataaacactttgatttaagaccgggagcgataataagagacttagatttaagaaagcctctttataaaaaggttgctgcttatggtcactttggtagaactgatatagatttaccttgggaaagaactgacaaggttgagcagttaagaaaagatgctttaggtgaa

SEQ ID NO: 17004 - DNA, 996 bp, Clostridium difficile
atgagttcaataactaagcataaagaagaaaaatcttctccattattgacaaaattaacaagtgtatttagagaccaagggagtgcagctgtaggacttgtaataatttttataataatgagtgtagcttcatctaactttttaactttagataatttaattaatgttggaagacaaatatcaataaatgcaatacttgcagtaggtatgacatttgtaataattacaggaggaatagatttaagtgtaggagcagtaattgctttagtaggtacattttgggctacaacagtagtgaattataatgcacctatatgggtaggtatgatacttgcattaacaatagggacaatattaggagtcataaaaggtgcaattatttcaacacaaaaactacctccattcattgtaactttagccatgttaacgataataagtggggcaagctttgtatttacaggaggaagacctatatcagtaaatacagatgcatttaagatgctcggtagaggatatattggaccaataccaataccagttataattatgattatagttgtaatagcaggacattttctattaaaaagaactaattttggacgtcctgtacatgcagtaggtggaaatgaagaggccgctagattatgtggagtaaaagtaaataaagttatagtaaaagtatacgcactagctggactactaacagcattagctgggataatactatcatcacgtttggcatcaggttcaccaactgttggagatggagcagaattggatgctatagcagccgttgtgcttggtggcactaatatgatgggtggttctggttctatagtaggtacatgtataggtgtcggaataataggaatattaggaaatggattaaacttattaagtgtatcttcatataatcaaatgattataaaaggtttggtaatgttatttgctatatggataaataatataaaattaaaaaaatcagctaaatctaaa

SEQ ID NO: 17005 - DNA, 267 bp, Clostridium difficile
ttgatgccaggagtactaatagtagaagctctagcacaagtatgtggagtggcaatgatgtctgtagaggaaaacaaaggaaaactaggtgtatttgcaggtatagataaagttagaatcaagagagaagtaagaccaggagatacattaactatggaagttgaaatgacaactcttagaaaaaatatagctaaggcagatgctaaggcatatgtaggtgaagaacttgtctgtaaaggtgaattaatgtttgctttagtagaaaaa

SEQ ID NO: 17006 - DNA, 2232 bp, Clostridium difficile
atgaaattatcaaggtataagaaaaatagtttagttctgtctataattttatgttcacttattatttcaatccttgtaattactgtttttaataccgtaaaactacacaatatatctaataaacaatctaaaaactatttaaacgatgtatctacacagattgtaatgaatgttgattctaaaatcaaatttattttatccgacttaagaataatggcagattttattaagcaatatgaaggtgatagtcgatatgagtatttatctaaaagaaagactagttataagtattatgatgttggaataatagatttaaaaggtaaagctgagtttttaagtggaaaaaagtttgacttaaagaatactgcttcctataaaaaaggaattgaaggtaaagaatactcagaagtaatagagtcaatgggttttgttctttatagtgtacctatatttaatgataatcatgaagtatctagtattttaataggtgtatctgataaagaaagtatgaatgagattcttaatatagataactttaatggaaaaggaactattgaaattattaatagtaagggaaaacctcttttcataggaaaaaatactgaattaataaaggaccttagccataaatataagagttctggagatgaaccttgggcacaaaagatgcttgaggattttaaaaatgataaatcagggaatattacaataacctcatcaaaaggtgtacaatgcttattaacttatcatccaattacaagaggtttaaatgattggcattttcttctcatagtacctgaagatgctgtacttggtgaacttaataaattaaactcttttacaataacaatgacatttataatcacatgtattattggaattataacattaattttatatattataagaagaaaatatgtaaatcaaatagaaaatattgcatatttagatagtataacaaatggtataaactcaactaagtttagtatgctagtcaaacctttaatttcagaatcacctgatagtacttatatgatgatagcaatgaatataaaagattttaagctaataaatgattgtttcggtagtgaaaagggaaatatgacactaaaacatctttacaatattttgtataaaaacattgatgaaaatgaagagtttgtgtgccgtcatgatgcagaccttttctatttgcttattaagaatagaccagtgttagaagccctggagttattatataaaatagaagctgacacaaattattttaataaaaatagggaaaatccatactttttaagactatcagtaggtatttacacaattgaaaatcataatgaagatttaattacaatacaagaccatgcaaatacagcaagaaaaagctttaataaaactcatcaaagtgatttttctttttatagtgatatagaaagaaaacgattaatatctgaaaaggaaatttcaaatttaatggaaaaagcccttgaaaataaagaattttttatgtgcttacaacccaaaattgatataaaaagtggaaaaattagtggagcagagtctcttgtgcgttggaaaaattcagaaaagggcataatttatccaagtgattttattcctcttttcgaaaaaagtggatttatatgtaagttagatttatatatactagaagaaacatgcaaattgatttctaagtggataaaagaaggtaaagaagtgttgagaatttctgttaatgtatcacgtcaacatctgaatgataaattgtttttagaaaaatataagcatatatgcaataaatacaatgtaccaacatgtctgatagatttagaacttaccgaatctattttcttagaaaatccagaagctatagatataatagaggatattcattctaatggatttaagtgttctatagacgattttggatttgggtactcatcattaggaatattaaaggattttaaagttgatataattaagttagaccgttcattctttgttagcaaaaataatatagaccgtggtaaggtagttattaagtctattattgaacttagcaaaaggctaggtatgaaagtaacagctgaaggaattgaagaattagaacaagttgagtttctaaaaaatgtgggatgtgattatattcaaggttatgttttttcaaaaccattattaatttctgactttgaaaattttgcatatgaaaataataaaattaaaaatatccattat

SEQ ID NO: 17007 - DNA, 1434 bp, Clostridium difficile
ttgtcaatgatactaaatcaaatatttatagaagttggagggattatgagaaataaaataattataggaattactttttcacttgtattactaatgtctggatgtgcttcaaaacaaacagcagaaataaacgtattagcaactactgatttacatggagttataccttatgagttaacttcttatgtaaaagaagaaagaaaaaaagataaaaatctaactttagtagatgcaggagatttttttgatagtggcgaagtgtttggttctagcatggatagttattttagtgctagatataaagatggtgataataacactgaaagttacattgagacgcctatttcaaaagatatgaaagaggtaggttatgatgttgcagttcttgggaatcatgaatttatatccaacaataaattttatctagataatatgatatctgattttgagaagcaaaacataaatattttatcggcaaatacgtataaaaaaaatggagatagttatacaaaaccatacataataaaaaatattaatacacctgaaggaaacgtaaaactaggaattttagggcttactataaaagaagttggtgagaggaaacagtggaaagatggaaaacttgttgactctaagtctttagaactaaaagaccaagagggttacaatggtgaattgtatatgaatgatttagtagaagatgctaaaaagtgggttggtataatggaaaaagagaagcctgacattatagttgctgtggcacatacaggtgagaaacctaagaaacctaaaaacccaggaaatagaatacaagacttagctcaacaagttgatggaattgatgctatagttgcaggtcataatcatgttcaaattgagcaacatgattataaaaataaatcaggagaaaatgttatagttactgagccaggaaagcatggggaatgtatttctaagattaattttaaattagaaaaaaacaatgataaatggaatatagttgacaaatctagtaaattaattaaatttgaaaaaaatcaagaaagtgataaatttggagaatttatttcttcaattaataaagtaagtaaagataagaaagaaataagattatcagaagtaaagactcctgaatgggataaaatatatgtttttaaatctggaacatctgcagatgatatatataaaacaataggatataaatggagaaatatatcatctccaaagggtgatgacatggtgcagattgttgtaatgaataataataagcctgttagctatgtatatggtgaagctgaagttatgccaattaatataaaatgtgatgaatcagagtataaagataatgttgtaactatttatcctaataaaaatgataaatttaaaattgaaaaaggtaaacaagaatatagtattaatttaaaacatatacaa

SEQ ID NO: 17008 - DNA, 1533 bp, Clostridium difficile
atgaaacatgaattagtacttgtaatagattttggaggacaatataatcagttgatagctagaagagttagagaaaacaacgtatattgtgaaatacttccatgtactgcaagcatagaaagaataaaagaaaaaaatcctaaagggataatatttacaggcggtccaaatagtgcgtatttagaagattctccaacaatatcaaaagaaatatttgaactaggagtaccaatacttggaatatgctatggtattcaaataatgtctcatgtattgggtggagttgtaagaaaaggtaataaacaagaaaaagaatatggaaaaacagctataacttatggaaaatcatcattatttgaaggaataactacaaatagtgtatggatgagtcacacagatttaatagaaaaagttccagaaggatttactatagttgcaaatactaatgattgtccagtagcagctatggaaaatgtagaacgaaacctatatggagttcaattccatccagaggtagaacactgtttggaaggggacaagatacttacaaacttcttatataatatttgtaaagtaaaaggtgactggactacagattcattcatagaagataaaataaaagaattaaaagaaaaaataggcgataaaaaagctttatgtgctttaagtggaggagttgattcttctgttgctgcagttcttattcataaagcaattggggacaacttaacttgtatatttgttgaccatggtttacttagaaaaaatgaaggaaatgatgtagaaagaatatttagagagaaatttgatataaatttaataagagttaatgcagaagatagattcttatctaaattaaaaggagtttctgaaccagaagctaagagaaaaataataggtgaagaatttataagagtatttgaagaagaatcaaataaattaggaaaaatggatttcttagtacaaggaacaatctatccagatgttatagaaagtggacatggaaatgctgctactataaagtctcatcataatgttggtggaatcccagaagatgtagacttccaagaaattgtagaaccattaagagagttatttaaggatgaagttagaaaaataggattagagcttggtatagaagaaggattaatatttagacatcctttcccaggaccaggtctaggaataagagttataggtgatgtaactaaagaaaaatgtgatatattaagagaagctgatgctgtttatatggacgagcttagaaaagcaggtttatatagagaaatatggcaagcttttgcaacattaccagatgttaagactgttggagttatgggtgatgaaagaacatatgcttatttagttggtttaagagcagttacttcttctgatggaatgacttctgactggtataagatgccttatgatgtattagaaagaatttctaatagaataataaatgaagttgatggagtaaatagagtagtttatgatataacttctaagcctcctggaactattgaatgggaa

SEQ ID NO: 17009 - DNA, 1626 bp, Clostridium difficile
atggctaaagaaattaaattttcagaggaaacaagaagagctttagaagctggtgtaaataaattagcagatacagtaaaagtaacattaggacctaaaggaagaaatgttatattagataaaaaatttggttctccacttataactaatgatggagtaactatagcaaaagagatagaactagaagatagatttgaaaatatgggtgctcaattagttaaagaagtagcaactaaaactaatgatgtagctggagatggtactacaactgctacagttttagcacaagctataataagagaaggtttaaagaatgtaacagcaggggctaacccaatacttttaagaaaaggaatacaaaaagcagtaacagtagcagtagaagaattaaaaaatcaatcaagaatagtagaaacacaagaggctatatctcaagttgcttctatatctgctggtgatgaagaagttggaaaattaatagcagaagctatggaaatagtaggtaaagatggagttataactgttgaagagtctcaaactatgaatactgaattagatgctgttgaaggtatgcagtttgatagaggatttgtttctgcatatatggttacagatgtagataaaatggaagcagttttaaatgacccatatatattaattactgataaaaaaatatctaacatacaagaattattaccagttcttgaacaaatagttcaacaaggtaaaaagctattgataatagctgaagatgtagaaggtgaagcattatctacattagtagtaaataaattaagaggaacatttgatgtagtagcagttaaagctccaggctttggagatagaagaaaagaaatgcttcaagatatagcaatacttacaggtgctcaagtaatatcagaagaattaggttatgatttaaaagaagctgatttatctatgctaggtagagcttcatctgttaaggtaactaaagaaagtactacaatagtagatggttctggagataaaaaagctatagaagatagagtaactcaaattaaacatcaagtagagcaaactacttcagattttgatagagagaaattaatggaaagattagctaaacttgctggaggagtagctgttgtaaaagttggagctgctacagaagtagagttaaaagaaagaaagttaagaatagaagatgctcttaatgcaactagagcagctgtagaagaaggaatagtagctggtggaggaactgcttttgttagtgttataccagcaataggaacactaattgagagtttagaaggagaagttaaactaggtgctcaaatagttaaaaaagcgttagaagagccattaagacaaatagctataaatgctggtcttgaaggtgctgtaattgtgcaaaatgttgttaattctgaagcagaaactggatttgacgcattgaatgaaaaatatgtaaatatgatagaagctggtatagttgacccaactaaagttagtagaagtgctttacaaaatgctgcatcaatagcaagtactttcttaactactgaagctgctgttgctgaccttcctgaaaaagaagatgcaggaatgccaggaatgggtggcggaatgcctggtatgatg

SEQ ID NO: 17010 - DNA, 960 bp, Clostridium difficile
atgagagtgagaaaaattttatctttaggaattgctggaatactagcaataggaatgttaacagggtgttcaatggaaggaccaagtaaatcagataataaaggtggttcagacaagaaagatttaactattggagtatctacaataactcttcaacatcaattttttatagatattgatgagggaataaaagaaaaagctaaagaattaggtgtgaaagttatagtaaatgacccagaccaagatgtagctaagcaaacatcagcaatagaagattttatacaacaaaatgtagatggaatgatagtacttggaactgataattcggctatagtaccagcagtagaaggagcatttgaaaaaatgccagtagttacagtagatgctgtattaaatactgaaaatattacaagttatgtaggaacagttagttatgatgctggtaaaaaattaggggaatacactaaaaaatacatagatgaaaagttaggtggaaagtcagaaatagcaatagtgacagatttaaaatctcaaatacaaatgcagagaatagatggatttaaagatgcattaaaaggttcagcaaatgttaagatattaaattcacaaccaggatatgacagagaagaatctcttaatacagtagaaaacttaattcaatctaatccagatgtagatataatatatgcaacagctgaaaatagtgtactaggagctaaagctgcacttgaatctgcaaaaaataaggatgttaagattgtaggatttgacttaactgaagaagcatcaagtggaataacagatggaactattcttgctatgattcaacaacaacctaaagagatgggacgtttagctgtagaagcagtagtaaaagctataaaaggggaaaaggtagaaaagaatataccagtaccagctttactttatgataaggaaaatataaaagactttaagaat

SEQ ID NO: 17011 - DNA, 975 bp, Clostridium difficile
atggaaaaatacataataaaattaaaaaataaagtattgagagaaaaagaaataagttatgaagaagctcttaatttaataagccttgatacaaataataaaaacgattttgatattctattaaaatctgcaaatgaaataagagaatattttatgggaagaaaagcagatttatgtacgataatgaatgctaaatctggcaaatgtagtgaagactgtaaattttgtgctcagtcttcttattataaaactggtgtagaagaatattcattattagattacaatgaaatcttaaatagagctaaagagatggagagtaaaggagtgcatagattctcattggttacaagtggtaaaggtatgtcaggaaaggagtttaataatattttaaatatctatgaaggattgagggaaaatactaatttaaaattatgtgcatctttaggtattatagattatgagcaagctaaaatgttgaagtcagcaggtgtgactacatatcaccacaatgttgagacgtgtagagataattttcataatatatgtacaacacacacatataaagataggataaaaactataaaagatgctaaaaaagctgggctagatgtatgtgtaggcggtataattggaatgaatgagagtgaagaacagagactaaaaatggcttttgaaatacgagaattaaatgtaaaatcatttccaataaacattttaaatcctattaagaatacaccaatggaaaattatgatgtattagaaccaatggaaatactaaaaacaacagcagtatttaggtttataattcctaatgtgtacataaggtatgctggtggaaggctatcattaaagggatatgacaaagttggatttaatgggggagtaaattctgcaattgttggtgattatttgacaactgttggaagtgggattgaaaatgataaaaaaatgattatagagcaaggatttgaactt

SEQ ID NO: 17012 - DNA, 2700 bp, Clostridium difficile
atggatagacctaatcctgatattctattagaaaaaattaaaaatgaagaagaaaaactaagtagaggtcaattaaaaatattctttggttatgcagctggagtaggaaaaacctactctatgttggaatctgcacaaaatttaaaaaaagtgggtgtagatgtagtagttggatatattgaaccacacactagaccagaaacattggctttacttgatggcttggaaattcttcctgtaaaggagatagaatataaatctataaaactaaaagaatttgatttagatgctgctttagaaagaaaaccagaagttatattagtagatgaatttgcccattctaatgttgctgggttaaggcatacaaaaagatggcaagatatagaagaattgctgttagcaggcataaatgtctacactactgtaaatgtacaacatttagaaagtctaaatgacattgttgagataattacaaacgtatcagttaaagagactataccagataagtttttggatacaaatacacagttagaacttatagatgttgaacctgatgtacttcttgaaaggttcaatgaaggtaagatatataagaaagaacaagctactagagcaaaaaataatttttttataaaagataacctggttgcacttagagaaatcgcacttagaaaaacagcagagagagttaataaagaagttcaaatgaccagactatcaaagggtgatgtaactgtaatacctacatcagatacacttcttgcatgtataagtccatctccatcttcagcaaaagttattagaactgcatccagaatatcagacagtacatttgcaaaatggatagctttatatgttgaaactccaaacacagcaagacttccatttgatgaacaaaaacaactacaaaataacctaaaattagctaagaaattaggtggagaaataattgttttacatggtgaaaatataatagagcaaatacttagaattgcaaaactgagaaatgtaacaaaaattgtaataggtagaaatcattcaagtaataaaagatttagtaaaagatttaaaaaagatatagttgacaaattaattgatgaagttgattatatagatatacatataattccatataaatttgcctcagatgttaaatacaaaactaaaaaggataaatcatcaataaaatctaaatttaaaattagcaaagttgattttataaaacttatatttattactttgatgataagtattttagcatatgcagtacaaagcatgggatttataagagaaaatatattattaatatatatgttgggtgtagttttagtttctatgtggactaaagggtatagtacaggcataataagttctgtatttaatatagttcttttaaattatttttttacagcaccattatatacattatctatagcagattcaaactatatagtaacactggttgtattctcaatagtaggtataataactagcactcttacgtctaagatacagcatgaagcagaaactgctgctaaaagagaagaaaatacaaaaatgatatatcaaataattaagggatttttaagattatcaaataaagatgatatagtaaacaaaggtatagaacttttgtctcttagcttaagtagagatgtaatttgttatttaaatgtagataagcataataaatcaaagctttacaaaaaaaatactaataataaggataaaaatgatttggatagtgaagatgaaaaagctgttgcaagttgggttttatccaattcaacagtggcaggaaatgacacggatacacttcctggttcaaagggatactatataccaattgtaggaatgaatttaactttaggagtagtgggaatatcatgtattgattcaaaattggatacagaagatataagcttaattgaaacaataattgctcaaatggcaatagcgcttgatagagaaatattgtcagaagctaaagaaaataccaatcttgagattgaaagggaaagattaagaagtaatcttttaagagcagtttcgcatgaccttagaactccactagcaggaatatctggtgcagtaagtacaattataaaaaacaagggtactataggtcaagatataatagatgaattacttagtggtgtatatgaagatactcagtggttaataagacttgttgaaaatttacttagtatgaccaagatagatgaagggaaattggaagttaaaaaacattctgaactggttgaggaaattatatcagaagcgttacaaaaaataaaaaaaagaattgaaaatgcacttatagatattaatataccagaacagatattatttgttcctatggatgcaaaattaatagaacaagttttaattaatttaatagataattctttgaaatattcaaaggaagattgtaagatagagataaatgtatatgagaaagatgattatgtttggtttgaagtatctgataatggtcctggtatatcaaaggaacttaaaaagcatatctttgacagattttttactggagaagaaggagctaaagattccagaaagggtgttggacttggattatcaatttgtaaatctataattcaagctcataaaggtgaaattatggtagaaaacaataaagataagggttcaacttttaagtttagtttgcctaaggaaaatgaa

SEQ ID NO: 17013 - DNA, 1263 bp, Clostridium difficile
atgtcaggaaaagatgtaaatgtcttcgagatggcgcaatctcaagtaaaaaatgcatgtgataaattaggtatggaaccagcagtttatgaattattaaaagaacctatgagagttatagaggtttcaattccagtaaaaatggatgatggttctataaaaacttttaaaggatttagatcacaacataatgatgcagtagggccaacaaaaggtggaataagattccatcaaaatgtttcaagagacgaagtaaaagctttatctatatggatgactttcaagtgttctgtaacaggtataccatatggtggaggtaaaggtggaataatagtagatccatcaactttatctcaaggtgaattagaaagattaagtagaggatacatagatggaatatataaattaataggtgagaaagttgacgttcctgcaccagacgtaaatactaatggtcaaataatgtcttggatggttgatgagtacaataaattaactggacaaagttctataggtgttataactggtaagccagttgaatttggtggttctttaggaagaacagctgctactggatttggtgttgctgttactgcaagagaagctgctgctaaattaggaatagatatgaaaaaagctaaaatagctgttcaaggtataggaaacgttggttcttatacagttcttaactgtgaaaaacttggtggtactgttgtagctatggctgaatggtgtaaatcagaaggttcttatgctatatacaatgaaaatggtttagatggtcaagctatgttagattatatgaaagaacatggtaacttattaaacttcccaggagctaagagaatatctttagaagagttctgggcttcagatgttgatatagtaataccagctgcattagaaaactctataactaaagaagttgctgaatctataaaagctaaattagtttgtgaggctgctaatggaccaactactccagaggctgatgaagtatttgctgaaagaggaatagttcttactccagatatattaactaatgctggtggagttacagtttcttacttcgagtgggtacaaaacttatatggatactactggtcagaagaagaagtagagcaaaaagaagaaatagctatggttaaagcatttgaatctatttggaaaatcaaagaagagtacaatgttacaatgagagaagctgcttacatgcattcaattaagaaagttgctgaagctatgaaattaagaggatggtac

SEQ ID NO: 17014 - DNA, 1812 bp, Clostridium difficile
atgatttttgtatttattagaatagtagcattctttggaacactaagaatactatttccagctggtacacctgctttatttaagtcactctttgcaatcattatatcaatattgatttcaagtactatgcaaattgaatatgcaacaaatatagacaacattgtattgtttaccttatatggtgtaaatgagaccataactgggattatgcttggatatataaccaacctatgtttttatagtatcagaatggcgggttctatgatggaccaacagatgggattatcaatgattaatatgtttgacccaaattcaatgactcagacaactttaattgataatcttatgaactggacagcacttatgatattttttagcatggatggtcatcatgttttaattagaggtataaggtatagttttgagttaattccaataggaaaaccatttgtagataataacatagattatataataaacatatttgtgcagtgctttttaactggattcaaaatagcaatacctattgtactttgtctgcttatggcagattttattttagggcttatatcaagaagtgtacctcaattaaatgtaatgatagttggtatgccattaaaaatattggttggtattgcattatttatcatatcaatacctttaattgtcaatcaaataagtcatttattaagtcaaataccaaagatgtatgagggaacttttgcactagctcctatgttttttatgggttcagcagataaaacagaagaagctactccaaagaaaaagggagaacaaagaaagaaaggtaatatagcaaagagtagagaattacccgttgcaatgactctacttgcattcaccttattagtacctacattattttcatatgtagtagatacacttaaatcttcgcttaattattttttgagtctagatttttatatgaacataaattattcaaacctagagaaattagttatagcaggattaatggatttttttaagatatttttaccaatagctattccctttttagttttaggcataatagcaaacctatttcaggtgggaatactgtttactggtgaaactttaaaaccaaatttatcaaaattaaatccaattagtggattcaaaaacatgttttctatgagaagtttgtcaaccttaataaaggatacagcgattatatctattttggcttacataggatatacattcttccaagataattatttagatatattaaagctaggtaacatatacctaccaactttaatgtacacagttaaagacttagtatattcaatattgagtaagatttgtgtagctatgatagctatagcagttgcagattatgtttatcaaagatacagtcataaaaagcaactgagaatgacaaaacaagaagttaaagatgaatataaaaactcagaaggagacccagaagtaaaagctaagataaaacaaaaacaaagacaaatttcgtctcaaaggacaatgcaagcagtaccaagtgctactgtaatagtaaccaatccaacccacttatctatagcagtgagatatgaaaaagggaaagaccaagctccagtagtggtggcaaaaggtgcagattatttagcttttaaaataagggaaattgcaaagggaaatgacatccctataatagaaaacaaacctattgctaggttgttatataagcaagtagaaatagaccaagaaattccagaggacatgtatcaagcttttgcagagatattagtggcagtatataaaatcaaaaatagatacaaagtccccaaaagg

SEQ ID NO: 17015 - DNA, 1911 bp, Clostridium difficile
atgattgttttgtcatgtaataacttaaataaaagttttggtatagattctatattagaaaatattagttttacagtaaatgaaggcgataaaattggtataatcggtgttaatggtactggaaaaactactttatttaaaataatttcaggaatttatggatatgatagtggagatatttacacttctaaagattgtgaaatcggatatttagaacaaaataccaatttttattcggataatactattttggaagaagtactagaagtttttaaaaatttgatagaaatggaatcctatttaagagaattggaggttaaaatatctgaagaaagtacaaaaacaaactctccaattatagaaaaaatcatggatgaatattcacataaactagaattattttcagatttaaatggatatggatataaatctgaagccaaaggagttctaaagggattaggatttagtgacaatgatatggataagccaataagcatactttctggtggtgaaaaaactagagttcttttaggaaaattacttcttaagaaaccaactctattgttacttgatgaacctactaaccacttagactctgaagcaatagaatggttagaagtatttttaaaacaatataaagggactgtcatgttaatatctcatgatagatatttcttagaccaatccgtaaatagaatttttgaagttcacaacaaaaaacttaaagtatataatggtaactactctaaatttgttgagttatctaaaatagaaaaagaactagagcttaagaaatttgaagaccaacaaaaagaaataaaaaagcaagaagaatcaattgaaagactaaaagcttatggtagagaaaaacacctaaagcgtgcaagaagtaaagaaaaagcattagacaaggtagacgttttagataaaccagaagcttataggaaaaaagctcgtatacaatttacgccttctgtccagagtggtaatgatgttcttcaaattagagatgtatctatgggttatggagaaagaatactttttaaagacttggatttagatatatatagaggggaaaaagttgcacttataggtgcaaatggtgttggcaaatctacattatttaaaataataactaatgaactacaacctcttagtggcaatattaaatttggaactaatgtacatgtttcctacttccatcaggaacaaaaaactcttaatttagataacacaataattgatgagatttgggaaaataatactcatcttactcaaactactttgagaaatatgttaggggcatttttatttgtagatgaagaagtttttaagaagatttctacattgagtggtggagaaagagctagagttgccatacttaaacttatactatcaaatgcaaacttattgttattagatgagcctactaatcacctagatattgattctaaggaagtccttgaagaggcattaactaattatgatgggactatatttacaatatcacatgatagatactttctaaatactgttgttgataaaattttagttttagatgaaaatggaattactgaatatctgggaaattatgattattatatagataaaaaaaggcaaatccaagagatgagtattatagaagaaaaagaagaaaaaactagaactcaaataaaagatgaaaaaagaaaagagagagaacaaagagaaatagaaaagaaaaatagaataaaaagacaaaatatagaaaaagaaattgaaaagttagagattgaaattgaaaaattagatatacttttatgtcaagaagaagtatactctaatccagataaagctaaagaagttagccaagaaaaaattaatttagaaaataaccttgcctctctatatgatgagtgggaagaatttatg

SEQ ID NO: 17016 - DNA, 1044 bp, Clostridium difficile
gtggaaccaattaaaagaggtgtagagtttatgagtgatataataacattagctatagagagtagttgtgacgaaacagctgcatcagttttaaaaaatggtagagaagtactttcaaacataatctctactcaaatcgagacacataaaaaatttggtggtgtagttccagaagtggcctcaagaaaacatgtggaaaatattgatatagttgttcaagaagctttagacaaagcaaatataggttttaatgatatagaccatatcgcagttacatatggacctgggctagtaggtgctttattggttggtctatcttatgctaaagcacttgcatatactttgaatattccacttgtaggagtaaatcatatagaagggcatctaagtgcaaactatatagagcataaggatttaaaacctccttttataacattaatagtatctggaggtcatactcacttggttgaagtaaaagattatggcaagtatgaaattttaggaaaaacaagagatgatgcatctggagaagcatttgataagatttcaagagctatgaatttaggctatccaggaggtcctattattgataatctggccaaaaatggaaataaacatgctatagaatttccaagagcctatttagaagaagatagctatgattttagttttagtggattaaaatcttctgtattaaattatctaaatggaaaaagaatgaaaaatgaagaaatagtagttgaagatgtagcagcatctttccaagaggctgtagtagaggttttatctactaaagcactaaaagcagtaaaagacaaaggatacaatatcataactctttctggtggggttgcttctaattcggggcttagagctaaaataacagagcttgctaaagacaatggtattactgttaagtatcctcctctaattttatgcacagataatgcagctatgatagggtgtgcaggatattataattttataaatgggaaaacgcatgatatgagtttaaatgcagttccaaatttaaagataaatcag

SEQ ID NO: 17017 - DNA, 2148 bp, Clostridium difficile
gtgaataaattggatataaatcaaatcttaaaaaaagagtttaatcttagagatgaacaaataaataatacattaaaacttattgatgaaggaaatacaataccatttatagctagatatagaaaagaaatgactggcgagatgagtgatgttacactaagagaattttatgaaaaactaatgtatttgagaaatcttcaaagtagaaaagatgatgtagttagactaatagatgaacaagggaaattaacagatgaaataacacaaaatatagaaaaagcaaaaacattacaagaagtagaagatatatatgctccatataaacaaaagaaaagaactagagcaacaatagcaaaagaaaaaggattagaaaatttagcattgtcaatactagagaataatttagataatatagaaatagaggcaaagaattatcttgatgaagagaaagaagttctttctattgaagatgctctaaaaggtgctagagatataattgcagaactagtctcagatgatgctaagattagaaagtatataagagaattagctttaagagaaggtatgatagttagcaaaagtgctactgatgagaaatcggtttatgatatgtattatgattatagcgaagcagtaaaaagtatggctccacatagagttttggcaataaacagaggagaaaaagaaagcttcctaaaggttaagttggaaataaataatgataaagttttaaattacataataaacgaatatgtaaatgataaaaatttcaaaaataaagaagaaatcgtaagttcaatagaagattcttataaaagattaattttcccatcaatagaaagagaaataagaaatcatttaacagaaatagctcaagaaagagctataagtgtatttggaaagaatgttaaaagtttattgcttcaaccaccagttaaagacaaagtagttatgggatttgaccctgcatttagaactggatgtaaaatagctgtagtagataaaaatggtaaactactagattatacaacagtatatccaacagaccctcaaaatgatgtagagggagcaaagaaagttttaaaaggattgattgaaaaatacgatatagatataatttcaattggaaatggtactgcatctagagaatcagaaacttttgtatcagaaatgataaaagaaatagatagcgaagtgcagtatgtgatagttagtgaagcaggagcatctgtttattcagcatctgaacttgcaaatgaggaacatccagatataaatgtatcaataagaggagctatatctatagctagaagattacaagacccattagcagagcttgtaaaaatagaccctaaaagtattggtgttggtcaatatcagcatgatttaaacaaaaagagattagaagaagtactagatggagttgttgaagattctgtaaatagtgttggagtagatttaaatactgcatcatactccctactagaacatgttgcaggaataagtaaagctatagcaaaaaatataatagcatatagagaagaaaatggagattttacgtcaagagcacaattgaaaaaagtaaaaagactaggacctcaagcatttactcaatgtgctggatttatgagaatcttagagggtaaaaatccactagataatacaggtgtgcatcctgaaagttatgatatatgtaaaaaaatgattgagataattggatattctttagatgatgtaaagaataagaatataggtgaaatagatgaaaaaataaaagaaattggcttgagagaattaagtgaaaaactggaagtaggacaagttacattaaaagatattatagctgaaatcaaaaaaccaggaagagacccaagagaagaaggtataaaacctatacttagaactgatgtcttaaaaattgaagatatacaagagggtatgactttaaaaggtacaataagaaatgttgtagactttggtgcatttgtagatattggaataaaaaatgacggattagttcataaatcagaaatgagtaatagttttgtgaaagaccctatgagtattgttacagtaggtgatatagtagatgtaaaagtcattggaattgacttaaacaaaaaaagagttgccttatcaatgaaaaaa

SEQ ID NO: 17018 - DNA, 1296 bp, Clostridium difficile
gtgccaagtggaaattttgaaagagtagatatagacggaaggtcagttgttgtagctggaacttatgaaaaagcaccatcaaatccacaaggaattactgatgtatttacagcacctataaacggatttatagatgcagctgaagtagttggatttgttttaatagttggaggagcttttgggatagttaataaaacaggagctatagaagctgttatagctcatactgtaaataaaatgaagaagtttcaatttttaataataccaatttcaatgattctatttggactaggtgggacgacgtttggaatgagtgaagagacactacctttttatatgatatttattccacttatgaccagtatgggatatgattcattgacagcagtggccacagtatttataggagcaacagctggatttggagcagctactacgaatcctttctctgtaggaatagcacaagcattatcacaaatagtaccaggttctgggatagagtttagagttgttatgtttataatatatatggctatatctataggatttgttatgatgtatgccaataaagttaaaaaagaccctaaaaaatctttagtacatgatatatcactaaatcaagaattaatggttaatagtgatacaaatataaaggaatttacaaaaagagaagccatggtaatagccattttcacaataggtatggcgattatgatatatggagttttaagactagaatggtacataactgaaattgcaatgatatttacagctataggtataatatcaggaatagcatcagggcttaaacaagatgagatagttaattcatttataagtggagcaggagatttaattacagcaggattgtgtatagcatttgcacgtggaatcgtaataatagcagaaaatggatttataatagatacaattttaaattctgcagcaaatttattaaatggattaccaaaaactatatttataaatttaactttcttaatagaaggattaatagcatttttaataccatcagcatcagggcttgcatcacttacaatacctgtacttgcaccacttggcgacttagtagatgtatcaagacaaatgatagttacagcttatcaatttggtataggtgtaactaacttgataacacctacatcaggtgttttaatgggagcactagcagtagccaatattccttggtcaaagtgggttagattcgtaattcctttaatggtagtattaacaattcttgtaatggcatttttgacaataggattatatctaggattc

SEQ ID NO: 17019 - DNA, 1185 bp, Clostridium difficile
atgatagagagtataaagaagagagcttatgagatagagaatgaacttggaaaagaaattgaagaagtttgtaattttatatttaacaatcctgaattaggggaagaagaatacatatcatcaaaatacttagtagaaaaaatgaaggaatatggatttgatacagtttatccatattgtaatatggagactgcttttagagctgaattaggagataatgatggacctaccatagcatttttagctgagtatgatgcacttcctggatatggagaaaataaagaaccagctcatgcttgtggacataactggattgcagcatctacactaggagcttgtatagtattaagtaagttaaaagaaaattttaaaggaaaaattgtactaataggaacaccagctgaagaaacaacaggaggaaaatgtgatttagttaaggcaggagcttttgatgatgttgatgtaagttatcaaatgcatatagaagcttttaataatataaactgtaaggctttggcgatagattcattagagtttagttttgaaggggtatcagcacatgcagctagtcaccctcatatgggagtcaatgcactagatgcagtacaacttacttttgctgggataaatgcactaagacaacatgtaaaatcagatgttagaatacatggtatagtttcaaatggaggagaggctccaaatatagttccagaaaaagcagcctgtaagtttttcgtaagagctgctgaaagaagttatttagatgaagtaactaaaaaagttataaactgtgcaaaaggtgcagagttaatgacaggagctaagctttcttatagatactttgaaaattcttttgacaacataataaataacaaagtacttcaaaagataacaaagaataatttgattgaggcaggtataacagatatattagaaggtaaagatggtccagtaggttctacagatataggtaatgtaagtcaagtttgccctactatgtatacagaaatagccttagatataagtccaatggtatatgttcatgaaaaagaatttctaaattatgcaaattctgaggaagcttatgataaacttcacaaagcagtaaaggcaatggtaggatgtgcattagaaatttatttagaagatggactacttgatgagattaagaaaaaccacttaaat

SEQ ID NO: 17020 - DNA, 720 bp, Clostridium difficile
atggctaaaaataaattttcagagatatatgaagtattgaaagaggaaatacttgatggtaaatatacaagtaatatgatgctgcctactgaacttcaacttattgaaaggttttcatgtagcagaaacactgtacgtagagcaatttctcaattaaacacagaaggatatgttcaaagtataaaaggcaagggtgttgtagtgttagaaaatagttgttctaatgatttttttctaaatatgcacaatttcaaaggtgtagaatcgattgtagaagataaaaaggttaatactgctactagtgttctcaacttcagcaaaatcttaattgataataagttatctaaaaagacaggttttaaagttggtagtgaagtatattaccttcacagactaagatatattgataacatacctaaaattctcgacattaactattttctatgtagtatagttaaagaccttgatgtttctatagcacaaggctctatttataaatatatagaagagtgtctaggtacaaaaattgtttcatccagaaagatatttaaaattgaaaaagctacagaacttgagttaaaaacgctacctctaaatgattataattgtgttggtgttattaaaaatagtgtatatactgatgatggaaagctttttgaatatactgaatcaaagcatacacctgaaacatttgtattcatggatgttactcaaagatat

SEQ ID NO: 17021 - DNA, 396 bp, Clostridium difficile
atggctaaaccaaaaaagaaagttacacgtattagaagaagagaacgtaaaaatatagaacgtggtcatgctcatatacaatcaactttcaataatacaataataactttaactgacgttcacggaaatgctatatcttgggcaagttctggacaattaggattcaaaggatcaagaaaatcaactccatttgcatctcaaatggctgctgaaacagctgcaaaagctgcgatggaacacggactaaaaagtgttgaggtattcgtaaaggggccaggttcaggaagagaagctgcaataagagctttacaagcaactggactagaagtaactatgataaaagacgttactccaatcccacataacggatgcagaccaccaaagagaagaagagtg

SEQ ID NO: 17022 - DNA, 525 bp, Clostridium difficile
atgctaactccaattgagatagaaaataaagagtttaaaaaaggtttaagagggtatagagatgaagaggttgatgaatttttagatatcatcaaggaagattatgaatctctatgtagggaaaatacagctcttaaagaaaaattagggttatatcaagaccaagtaaacaagtatgaaaatattgaagaaacactaaaagccactttaataactgctcaaagtgcagcagaagacacttgtagtgcggctaataaaaaggctaagataattgttgaagaagctgatttaaaagctagacaaattatagaacaagctaataaccgtgttatagagataagaaaagagtatgatgctttagtcaaagaatttaagatatttagaaataaatttaaatcactgttagaagatgaaataagaagtgttgatgagattttttatgatgtagatgaaaaatgtgtaaatgcatttgaaggaacaacagtgtataattatagtaatgatgaagctgctacaactttagaa

SEQ ID NO: 17023 - DNA, 894 bp, Clostridium difficile
ttgtttctgggggtgtatttatatatggaaatgaaaatagcagtatccaatcttagtaaaagatttgggaaaaaacaagctcttgataatataaatcttgaaatcgacagtggtatgtttggtcttttaggaagaaatggagcaggaaaaaccacatttatgagaattttagccactttattatcaaaaacagaaggttcaatacatatgtgtggagttcctattgagaatactaaggaaattagaaatatggttggttatttgccacaagacttttcaatgtatcctaacatgacagtatataaagcaatggattatttagcagttttatcggatataccactaagaaaaagaagaaaaattatagcaaagttattaagcaaagtaaaccttactaattatcaaaatgtgaaagtaaaatctttatctggaggtatgaatagaaggcttgggatagcacaagcattaattcataatcccagagttttaatagtagatgagccgacagcaggtcttgacccagaagaacgtataagatttagaaatttactatgcgaaattgcaaatgatagaatcgttattttatctacacatattgttggagatatagaagctacatgtgaaaacgtagctatattgaatagtggaaaagtcatatacaatggctcaacagaagcattagcaaaactagctgaagggaaagtatatagtattgaagtagataaaaaagacattgaaaatataaaaagtagatttatagttataggaatgttgactcatggtggaaaggctatacttaggattatatcagatgataaaccttttgagacagcagtaaattgtaatccaactattgaagatggctatatgcttataatgggaggagataatata

SEQ ID NO: 17024 - DNA, 489 bp, Clostridium difficile
atggaacaaatttctagcaaagaaggtgagatttatatggctggtaaaaaaatattagcaacaaacaaaagagcaagacatgaatattttatagaagaaacttatgaatgtggaattgaattaaaaggaacagaagtaaaatcaataagacaaggcaaagttaacctaagtgatggatttgcatctgtagataatagcgaagtatttttaaaacaagttcatataagtccatatgagcaaggaaatatattcaatgttgattctttaagagttagaaaactattacttcataagcatgaaataagaaagcttattggagcaactactataaaggggtattcacttataccacttagtttgtatctaaaaaacggtaaagttaaagtagagattgccttagcaaaaggtaaaaaactatatgataaacgtcaagatatggctaagaaagatgcacaaagacgtatagaaagagaaatgacaggtaagtat

SEQ ID NO: 17025 - DNA, 1158 bp, Clostridium difficile
atgaaattttatggatataaaagaccagatggaagagttggtataagaaaccacatattaatattgcctacgagtgtgtgtgcatcagatacaactagaataatagcatcacaagttcaaggggcagttacctttaataatcagaatggatgttcacaagtacattcagaccaacaattaactatggatgttatggctggttatgcagcaaatccaaatgtatatggtgtaatagttgtatctttgggatgcgaaaattgccaaaatgatttggtagttgatgcaataaaagagagaacaaataagccaataaaaactcttgtaatacaagaagaacatggaactttaaaaactatagaaaaagctgttcgttatgctagagaaatggcacaagaagcttctttgcttagaaaagaagaatttccaatatctgaacttatactaggaactgaatgtggtgggtctgacccaacaagtggattagcagcaaatccattaataggtgaattaagtgataaacttgtcgatttaggagcaacatcaattttaagtgaaactactgaatttataggtgcagagcatatactagctaggagagcagtaaatgaagaagtaaaagaaaaaatattacatatagtacatagatatgaaaattcattaaaattggttggagaagaagttagagaaggtaatccatctcctggaaatatagctggtggtttaacaagtttagaagaaaaatcacttggttgtatacataaaggtggtcatagacaaataagtgaagtatatgattatgccaaacaaattgataagaaaggtcttgttataatggatacccctggaaatgatgcttcatctgttgctggtatggtagcaggaggagcacaaatagtggtatttagtacaggaagaggaacaccatcaggaaatccaatagcaccagtaataaaaataactggaaataaaataacttttgcaaatatggaagataatatggattttgatgctagtccagttatctatggtccacaaacaatggaagaattaacagatgatttgttaaatatggttgtagatgtagcaaatggaaaacaatcaaaagcagagtcccttggatatactgaaatggcaatagctagagtatgcaactatgta

SEQ ID NO: 17026 - DNA, 900 bp, Clostridium difficile
atgaagtttgtaagttttactgaaggagaaaatgaatgtaaaagaactggagttttttctaaagatgaattatttattatagatgttaactctttaaatctcagtagaaattttaaggatttaaatgaattaattcaaaatgtatctagtgaagatattattaagttgaaaactattataaatgaaagtacattctataattatgatgtttttaaaagagagagatgtacggtacatgttcctatagaaaaaccaatacatgatatcttatgtgtgggagtgaactataaagaccatcttgaagaaactcaaactcactttgatgatagttttgaagaaccacaaaaaacggtttattttacaaaacgtgtgacaaaggcaataggtccagaagatgagatagatggtcattttgagataaataatcaactagactatgaagttgaacttggagtagtaataggtaaaacaggtgttaatattagaaaagaagaggtagaagattatatctttggttacactgttataaatgatatttctgctagaaagttgcaaaaagaacatgttcaatggtttagaggaaaaggattagatacatttacctctttaggtccatgtattttacataaaagtgcagttccttttcccataaaacttaaagtatgtagtagggtaaatggtgaagaaagacaaagttctaatacaggattattcatatcagacgtttcagacatagtttcagaactttcaaaaggtatgactttagaggctggagacattatagctactggaacaccttctggagtagggatgggattttcacctcctcgatatatgagtagtggagatgtagttgaatgtgagattgagagtattggaattttaaaaaattacattaag

SEQ ID NO: 17027 - DNA, 891 bp, Clostridium difficile
atgaaagcagaatttttgacaccagttgttacaatatttgatgaagaaggaaatttagataaagaaggtaataaaaaagtgtatgaccatcttatagatggaggtgtagatggactagtcataatgggaagtactggagagttctttaatatgtctatggatatgcaaaaagaacttatagatttagtaactagtcatgtaaataagagagtaaaagtgtttataggtacaagtcgtatgtgtataaatgaatctatagaactttcaaactatgcacataatagtggagcagatggtgttatgataataagcccttattatttctctcttgatgatgatagtattgagttattttatagtgaaatagctaagaatacagaggctgaaatatatttgtacaattatccagatagaactggttatgatttaagtccagaacttacattaagacttgcaagaaaacataaaaacatagttggatataaggatacagtaactttgatgggacataccagagatttaataaatactatgaaaatagagttcccagaatttaaggtttatagtggttatgatgaaaactttatacataatctaatgtctgggggagcaggttgtataggggggttatcaaatttaattccagaagtttgctccaaatgggctgaagcttacaataatagagatatggagaaggttatagaaattcaaaaatatattaataaagcaatggatttttacttaataaccaatccatttataccagcaatgaaaaaagctatgaatatcagagggttacaaataagtgattatatgactgctccatttgtaaaaccaaatgaaaaacaagtatgtgaaattaaaaaattgatgaatgaattaaatatatgt

SEQ ID NO: 17028 - DNA, 1023 bp, Clostridium difficile
atggattttatcaataaaatgagaataaggaatacaacaatatttatagtattaattataagtatgatacttacttttttagtgtgtgtagcatttggctctgtaaaaattgaatttaaagaagtaatagatgttgtattaagaggtatggataatacagaacattataaaataatatacaatataagaatccctagagtacttgcaaccatggtaggtggagcatgcctagcagtatcaggtattttattacagatattttttaaaaacccaatagttgaaccgtatatattaggagtatcttcaggttctactttatcagtagctctcatgattttgggaggatacacattgggatttgagagtgtaaattcaatgagtatatttgtagcagcttttataggagctttaattgtaatgtctatagtcattttatttgcaaataaggtaaagaatataacaactcttttaataataggaattatgaccggatatgtatgtagtggtataacaaatgtgttacaatcatttgcaaatagtgataaattaaaagaatttactatgtggtctatgggaagtttttctggatttacatgggaaaaggtagaaatacttataatagttggtatattaggtcttttgatgactgtattcataataaaacctttaaatgcttttttactaggagaagagtatgcaaaaagtattggcataaatataagattttttagagttttgatagtatttatatctagtatattagcagcaatagtatcagcatttgcaggacctatagggtttattggacttgcagtgccacaaatttcaaaaatgatatttaaaacatcagataatagagttttgataccagtagtaatatttttaggcagtatagttacagctctttgtgatttaatatcaagagtaattttatcaccagtagaattaccaataagtacgataacatctttattaggagctccaattgtagtaatgttattggtgaaaaggaaggatagggct

SEQ ID NO: 17029 - DNA, 351 bp, Clostridium difficile
atgacaattgaagaacatataatagatgaagaattagtagaagtagcaatgcaaataatacttcgtgcaggtgaggctagaacagaaattaaacatgctcttaatgatttggaaaagtttgattatagaaatgccgatttaaaactagctaaagcaaaagggtttatgacagaagcacatagagctcaaaccaagattatacaaggggaagctggtggagagaaaagagcacattcgctgttatttgcacatgctcaagatactcttatgaccatattcagcgagttaaatataactatgtctttagtaggtatagtaaagtctatagaatataaggtaaataatagtaaa

SEQ ID NO: 17030 - DNA, 459 bp, Clostridium difficile
atgcaaaattttatgaagcaggaaccctgtgactttagtcatgggaggttcagatttggtggcgaaataataagaagaaatgaaaagactaagtttgactggttaagtagagataaagaacaagttgaaaaatatataaatgacccattttgtggagtagtgtgtagttgtggctttttttatgatttagttcaagggttaaaagaaattgaggataaagaaaacttaaaaaaagtgccacttgatatacctatttacataatatctggagataaagaccccataggaaaaaatggtaaaggagtcttaagactaagggatagatatataaaattaggagtaaaagatgtaacttgcaaactttacaaagatggaaggcatgaattgttgaatgaaataaatagagaagaagtttttgaggatataatttgttggttaaataataaaatagaaatattg

SEQ ID NO: 17031 - DNA, 2097 bp, Clostridium difficile
atgaattggatagagcttaacaatcaagtgataattaaaaatgaacaaggcaagtaccaattggaaaaggataaggaagccttaagtagttacatagaagaatttatacagccaaagttgagaaaatttaataacctagaagaaagattgaagtatttaatagatgaaggttattattcaaaagaagtaataaatcagtatagcatagatgttattaaaaatatatatgatatgattgataaacataagtttgaatttcaatcatatatgagtgtaaataagttttatcaaaattatgcattaaagagcaatgatggaaaggaaatattagaaacatataatgataaagtgttaattgtagctttgacactaggaaatggcaataaagatttagctttaaacttggcagataaaatagtaaaacaagaatttcaaccagctacacctacttttttaaatgctggaagaaaaagggctggagaaatggtatcatgttttttactatctgtagaagatagtacagaaggtatatcgtatgctatatcttcatcaaatcacttatcaaagattggtggaggagttgcactaaatttatctaaacttagagcatctggcgaatctatcaaagatatagaaggtgcagctggaggtgttgttggagtagctaaaatgttagaacaatcatttagttactttaatcaaatgggagctagacaaggttctggtgcggtgtaccttactgtattccatcctgattttgaattgttgatggatactaaaaagataaatgcagatgaaaaaataaggcttgctacattatcattaggagctataataccagataaatttatggagttggcagaaaaaaatgaagtagcatatgcattttatcctcatactgtgtataagaaatatggagtttctcttgatgagatagaaatggatgagtggtatgataaattggttaatgatagtgatataagaaaaaaagaaataaatcctaggcagatgttgacaaaaatagcacagatgcaacaagaaagtggatatccatatgtagtgtacatagatacagctaatagagaacatacattaaaagatgttggaattattaaaatgtctaacttatgttgtgagatatttcaatatcaaacaccttcagaaatagaggggtatggaggaaaaaatgaatggggacaagatataagttgtaacctaggttctttaaacatagctaatgtaatggataataaaactatagaaagtacagttgaaacagcaataagagcactgtcatttgtagcagatagcacagatataaaaccagtgccaacggtaagcaatagtaacagcaagtctcattctataggattaggagctatgaatttacatggatacttagtaagagaaaatattttatatacttcagatgatgctatagatttttctaatgtattttttgcaatggttagatactattcaattaaagcttctatgaaaatagccatagaaagaaatcaaacttttgaaggatttgataaatcagaatatgttaagggaagaaatagcaaggttttatcaaaatactatgaacaatcttatctacctaagtcagaaaaggtaagagcattatttgaagggatttatataccaacaaaagaagactggacaaaattattggatgaagtaaaagaaaaagggatatataatgcatatttaatggcagtagcaccaactcaaagcattagttatgttcaaaatgctacatcaagtataatgccaattactgagccagtagaagtaagaacatatggagactctactacaatatatccaatgccatttttaacaaatgataatatgttgtattatcaatcagcatacaggatggatatgagaaaggtcatagatttagtggcaacagttcaaaaccatgttgaccaaggtatatcaacaacactgtttgttacagatgaaaagacaactagagatatagctagacattatatatatgcctataaaaaaggtttgaaaagtttatattacacaagaacaaagatgacaagagatactcatgagtgtctagtgtgttcagta

SEQ ID NO: 17032 - DNA, 969 bp, Clostridium difficile
atgacatttaatttacataaaatacataatgcagttaactggaatagagaagaagatggatttacacaagctttttgggaacaaaatgtaaaacaattttggcttcctgaagaaatatctgtttctaaagacataaaggtatggaatgaactaagtaataaagaaaaggaattatataaaaaagtattgggtggtttaacattactggatacaaaacaggggaataatggaataccatctatgatgagtttaacagaaaacctacaaagaaaagctgtcttgtcttttatggggactatggaagaaatacatgcaaaaagttattcttctatatttatgactctactttctaatttagaaatagatgaattatttgaatggatagaaacagaaccaacattacaaagaaaggctgatttagttttagctcaatacgaaaatactacaaatcaagagggattatacctatcaatggttacaagtgtatttttagagagtttcttgttttattcaggattcttttatccattgtatctatctggtcaaggaaagatggtagctagtggagaaataatatcgcttattcttagagatgagtctttacatggtaagtatataggattgctagcacaagaaatatacgattcatttgataaaatggataaggagatgttagaagagaagatgtattctatactttatagccttatggagaatgagatagagtatacaaatgttatatacagagaaagtgggcttgaaaaagaggttgtgaactttttaaaatacaatgcgaatagagctttagaaaatctagggtttgagaagctatatactgtagatgctataaatccaattgtattaaatggtcttagcactgaaaccaaaacacatgattttttttcaactaagggtaatggataccaaaaaggagtgtatgaggaattagaggatgaagattttataata

SEQ ID NO: 17033 - DNA, 744 bp, Clostridium difficile
atgaaaattttaactgtaaataatttaagtaaagtatatggtaaaaaaataattttcaacgcattaaatgacataaattttagtatagaagatggagaatttgtaggaattatgggtccatctggtagtggaaaaactactcttttaaatatgatttctactattgacaagccaactacaggaactatggaattaaagggcaagaatcctttattgttaagaggtgaggaacttgcattatttagaagaagagagttaggttttgtatttcaggattttaatttattggatacattaactataggagaaaatatagtattgccattgacattagataaggtcagtgtaaaagagcaagatgagagattgaatgaagtatctacaatattaggtataaaagatttattaggaaaaagaacttttgaagtatcaggtggtcaagctcagaggactgctattgctagagcattgattaacaatccatcaatacttttagcagatgaaccaacaggtaatttagattcaaagtcatcaaaggttgtaatggagctatttcaaaagataaataaagaaaataaagttactactatgatggtaactcatgacccattagcagcgagctactgtagtagaatcttattcataaaagatgggtctatatataatgaaatatataagggtagtagtagagagcagttttatcaagagataatggatgtactcacattattgggaggcgataac

SEQ ID NO: 17034 - DNA, 867 bp, Clostridium difficile
atggcattagtgacaactaaacaaatattattagatgcacaagaaggacattatgcagtaggtgcatttaatgttgaaaatatggagatggttatggcagtaatagaggctgctgaagaacttaaatcaccagtaatattgcaaacaacaccttcaacaataaagtatgcaggactagattattatttagcgaatgtaaaggtagcatcagagaaggcaagtgttccagtagcaatgcacttagaccatggttcaagctttggactagctatgcaggcacttagagttggatatacttctattatgattgatggttctcatgaaagttacgaagataatatttcaatatctaaatctgttgtagatgcatgtatgccttcagatatacctgttgaagctgaattaggtaaagttggaggtaaggaagacgatttagatggtggtgatgggggagcatatacagacccattagaagcaaaagagtttgtagagagaacaggggtatcatctttggcagtagcaataggtacggcacatggattatataagggagagccaaagcttgatttagatagattatctgaaattagagaggttgtatcagttccattagtattacatggtgggtctggaataccagatgaggttattaaggagtctataaaaagagggatttgcaaggttaattatgcaacagaattaaggattgcttatagcaatggggttaaggatgtgcttaattctgacccagaggtaattgaccctaagaaatatggtaaaaaaggtttagagtcagttaaagattttgttaagagtaggatggaagtttgtggatgtgtaggaaaagcaatagagacagtgaagtgt

SEQ ID NO: 17035 - DNA, 1548 bp, Clostridium difficile
atgaagttggagtatgtattaggtgtggatattggtacatcaggtactaaaacagttttatttgataaactaggaaatactataaaaagttgtacatatgaatatcctcttatacaagagaaatcaggttgggcagagcaggatgcaaatgattggtggaaagctgtagtcgaatctataagagaagtagttcaaagttcaaatataagcagtgaatgtataaaaggaattggattatcagggcagatgcatggtctagttatgctggacaatgaaggtaaaacattgagaaactctataatatggtgtgaccaacgaacagtaaaagagtgtgaggagataactgatttagtaggtgaagaaagactgattgaaataactgctaatccagcacttacaggatttacagcatcaaagatattatgggttagaaacaatgaaccagatatatataaaaatactaataaaatacttcttccaaaagattatataagatacaaattgacaggtgaatatgctacagaggtatcagatgcaagtggtatgcagttgctcgatataagaaaaagagattggagcgatgaagtactagaaaagttaaatatagataaaaatcttttaggtaaagtttatgaatcacaagagattacaggttatgtgactagagatgtagcaagtttgacagggcttaaagaaggaacaatagtggtaggaggagctggagaccaagcagcaggagctataggaaatggaatagttaaagatggagtagtttcatctactataggtacatcaggtgtagtatttgcttatacaaaagagccaaaaattgataaagaaggtagagttcatactttctgtcatgcaataccaaatacatggcatgttatgggagttactcaaggagctggcttgtcattaaaatggtttaaagataatttctgtcaaagtgaagtggaagtttcaaattctttaggtgaagatgtatatgagattataaataatcaagtaagtcaagtaccaacaggatgtaatggattgctttacttaccatatatgatgggagaaagaacccctcatcttgacccttatgcaagaggtgtgttctttggattatctccaatccattctaaaaaagaaatcgcaaggtcaataatggaaggtgtttcatatagtcttaaagactgtatggatataatagagaatcttaatatagacgttaatgaagtaagagcctcaggtggaggtggaaaaagtaaagtatggagacagatgcaagcagatatgtttaatcaagatgtatatactataaattcaagtgaaggaccagcacttggagttgcaattcttgcattagtaggagctggaatatatgaaaatatacaaaaagcttgtgatgctataataaaaacttcaactaaattagaaccaataagtgaaaatgtagatacatacaatatatatcatagattgtataaaagaatatacaaatctttgaaagatgactttaagttattagatgaagtagttaatgcaaaaataaataat

SEQ ID NO: 17036 - DNA, 1083 bp, Clostridium difficile
ttagatagcaatcatcatatttttactactgaacaaactattactgtaaaatatattggagatgatataaattacattgaaggtagtgaggatgaaaagaagttaaagttagatatgacaaatgtagatgtagatggggatggaataccggatataaatatagacactgatggtgatggaaggccagatatcaatatagatacgagtggtgattggaagccagatattaacatagatactgataatacaggtgaatggaagcctagtacagaaggtggaaatggagatggtatttggaaacctgataaaaatatagataccaatggagatggaaaccctgatacagattataatcgtccagcaatagatacagataatgatggagtagatgattattggaagcctgataaaaatgtagatactggctcaggaggttatgatacaggtaatccaaatctaaataagccagatccagataatggaggaaatagcaagccggatccagataatggaggaaatagcaaaccagattcaggtaatggaggaaatagcaaaccggattcaggtaatggaggaaatagcaaaccagattcaggtaatggaggaaatagcaaaccggattcaggtaatggaggaaatagcaaaccggatccagataacggaggaaatagcaaaccagatccagataacggtggcaatggtaaaccagatccagataatggaggaaatagcaaaccggatccagataacggtggaaatagtaaaccagacccagataatggaggaaatagcaaaccagatatagatacagatggggatggaaaaccgaatataaatatagacacagatggagatggaaaaccagatataaatatagatacagatggagatggaaaaccagatataaatatagatatagatggagatggaaaaccggatataaatatagatacagatggggatggaaagccggatataaatatagatacagatgggaatggaaaaccagatataaatatagatacagatgaaagtttagatagtaatgtaggtcaaaatgtacaaacaggagatcaaagtaat

SEQ ID NO: 17037 - DNA, 1362 bp, Clostridium difficile
atgtgtaaaatattaggaggacatgaaatgagtgaaatatttaaaggaataggacagataaaatttgaaggagtaaaatctgacaatgaattagcatttagatactacaatcctgaacaagtggtaggtaataagactatgaaagaacacttaagatttgcaatgagctattggcatactttatgtggagagggtaatgacccatttggagtaggcacagtagagagaccttggaataatataacagacccaattgagatagcaaagattaaagttgatgcaggatttgaatttatgtctaagatgggaattgagtatttctgttttcatgacagagatatagcaccagaaggaagagatttagaagagacaaataagatattagatgaaatagttgagtatataaaagttaatatggaaaagacaggtataaagttattatggggaactgccaatatgtttggaaatccaagatttgttcatggtgcatctacaacatgtaatgcagatgtatatgcatatgcagcagctcaggttaaaaaagctatggaaataactaagtacttaggaggagaaaattttgtattctggggtggaagagaaggttatgaaactttacttaacactaatacagaacttgaaatggataactttgcaagattcttacaaatggctgtagactatgctaaggaaataggattcactggacaattcttaatagagcctaagccaaaagagcctactaaacatcaatacgattttgatactgctactgttttaggatttttaagaaagtataatctggataaatacttcaaaatgaatatagaagcaaaccatgcaacacttgcaggacatactttccaacatgaattaaatatagcaagaataaacaatgttttaggtagtatagatgcaaatcaaggagacctattattaggttgggatacagaccaatttccaacaaatatatatgatgcaacacttgctatgtatgaagtgttaaagcaaggtggaatagcaccaggagggtttaattttgactctaaagtaagaagagcatcttttgaggtagaagacttattcctagcttatattgcaggaatggatacatttgcaaagggattattaatagcacataaattattagaagatgaggtatttgaaaactttactaaagaaagatatgcaagttttagtgaaggtataggtaaggatatagtagaaggtaaggttggatttaaagagttagaatcttatgcactgcaaatgccagttataaagaataagtctggaagacaagaaatgttagaagctatacttaacagatatatatatgaagtagatacaatttctaataag

SEQ ID NO: 17038 - DNA, 1398 bp, Clostridium difficile
atgaagaataaatatgaagatgtagctcaattgataattgatggacttggaggaaaagataatataattgacttaactcattgtatgacacgattaaggttcatcttaaaagatgaaaagaaagtcaatgcagataaattaaaatctatagataaggtagttggagtaaactcaacttcaactcaatatcaggtcataataggtaatgaggtaggtgttgtatttaatgcaataataaataaggggataaataccacaggagatattaaaagcgatataaaaaacaaaaataaaaaaaatagtattttaaataatataatagatacaataactggttgtatgacacctatgataccagcccttacagcatctgggatgataaaagttatattatctctttgcaccacttttaattggctatcatcaaattcaagtacatatagagtattagatataataggagatgtagcattttactttatgcctataatacttgcaataaatgcagctaaaaaatttaatgttaatacgtcaatagcagttatagtagtaggtgtgtttttacatccaaatttctctgcatgggtatcaagtggggaccctatatcatttataggagtaccaattcaaggtgttatatatgcagcatctgttatccctgcacttttaacagtatggatgatgtcatatatagaaaaattcattgataaattaacacctagcatgttaaaaacaattttaaatccaactttagtattattaataagtgcgccaatagcattaatagtaattggaccaataggaaatttcttaggagagggattagctagtataataaatttactacaaggaaggttaggatttataatggtttgtttattagcagctgcaatgccatttatcgttatgacagggatgcatcatgcattgactcctatattcatatcagcatttgcaactacaggacaagaatcgctaatattaatatctcaagtttgtgctaatttagcgcaaggtggcgcgacattagctgtagcattaagaagcaaagatagtaagatgaaacagttagcatcagctgcatggatatcagctatcatgggtataactgaaccagctctttatggagttacattgaaacttaaaaaacctgctatgttagcatctataggagcaggaatcgcagggttatttgcaggaattactcatgtgactttatatgttccacaaaatagtataatggcagtacttggattatcaggggaaaaggggatttcgaatatagtaaatggacttatagttatatttatagcattggttgctccatttattatgacatatgtttttggagttgaaaaaaatgttaaggaaggtatagataatgtagtagaggaagta

SEQ ID NO: 17039 - DNA, 1104 bp, Clostridium difficile
atgacacagatgggaagattaggaatatcaatttatccagaaaaaacaacatctaaggaaatatatgattatatagataaagctgctgaaaatggatttacacgtatattttcatgtttattatcagttaaagatactaaagaaaatataattaaaaaatttaaaagtataaatgaatacgctaagtttaaaggttttgaggtaatacttgatgtaaatcccagagtatttggtgaattagaaataagctacaaagatttgaatttttttaaaaagacgaaggcagacggaataaggcttgatatgggatttacaggttctgaagaggccttaatgacttttaatcctcaaaatcttaaaatagaaatcaatatgagtaataatactaattatatagatacaataatggactaccaaccaaataaagaaaatttgacaggatgtcataacttttatccacatagatatagtggattaaatttagaacactttataaaatgtacagaaagatttaataagtatggattaagaacagcagtttttgtaacaagtcaaaatgaaaccacatttggaccatggcctgtaactgatgggcttccaacaattgagatgcacagaaatctacctatagatattcaagtaaagcatataatagctatgaataatataaatgatataataatatcaaattgttatccaacatatgaggagctaaaggtattaggttctatgagaaaagatatggttacatttgatgtagcaatagaggaaaatatacgagaagttgagaagaagatactctttgaagaaatacattttaatagaggggacatatctgacagtctgataaggtctactcaatctcgtgttaaatataaaggatacaaatttgaactatttaatactcctaaaataataaaaagaggagatatagtaattgaaagtagtgaatatggtcattatgcaggggagttacaaatagccttgactgatatgaaaaacagtggtaaatcgaatgtagtaggatatataagaaaagaagaattatttatattagattatattaaaccatggcaaaagtttaattttaaaccctcaacaaaa

SEQ ID NO: 17040 - DNA, 912 bp, Clostridium difficile
atgttaataaaaactttagaaaatttagttacagaaggtagaaataagaatacattgcaaatagataaagaagatacattaggcataatagaattaataaataacgaagataaaactgtagcctatgctgttgaagaacaaaaggagagtatagcaaaagctgttaatataatagtagatagaatgaagcagggaggtagattattctatataggagcaggtaccagtgggaggataggaatactagatgccacagaatgtcctccaacttacggagtggattttgagcttgttcaagctataatagctggtggaaatcaagcaatatttaaagcaatagaaggtgctgaagatgataaagaacttggaaagcaagatataatagatagaggagttacatctaaggatgttatatgtggtatagctgcatcaggaaggactccttatgttataggtgcaatggagtatgctaaggaactggggtgtgcagtactatcaataactatgaatccgaatagtgaaatgagtaaaaaagcggatttaccaataaacattatagtaggggcagaagtaataatgggttcaactagaatgaaaagtggtacagctcaaaaaatggtatgtaatatgttaacaacagcttctatggttaagatgggaaaagtatactcaaacttgatggtagatgttaagacatcaaatgaaaagttggttgaaagagcaaaaagaataataatgatagctacaaatgtaaaatatgatgttgcagaaaaattcttagaagaagcagataatagcgttaaattggctatatttatgataaaaagtggtttagataaggatagtgcaaagagtatcctagatagacaagaaggttatataagtgaagctttaaaatcaatagaaaaattg

SEQ ID NO: 17041 - DNA, 849 bp, Clostridium difficile
atgagttgcattttaaaattaaaacagatatatgaagatttaacggaagtagataaaaaaatagctgattacatacttaataatacagaggctataagtaagctttctgtatcagaattggcgtcaaactcaaaaacaagtacagcaagtatagttaggttttctagaaaaatgggatattcgggttttggggatttaaaaattgagatagctaaagatttgatgggcaaagaaaatgaatacacatatgtagatgaaaactatgattgtaatatagatagtgttataaacaaaattacaaacaaaaacatagagactatcaaccaaacaaggttgttgaatgaaaaagatataataaaagaagcagttgaacagataataaaggctaaaaatgtatatatatttggagtaggtggttcggctttagttgcactagatttacagatgaaacttttaaggataaataaacaggcatttacctctttagatagtcatacacaacttatggtatcttcaaatgtagataaagaagatatagctatagcaatatcttactctggagaatcaaaagaagtaataaagtctatagaaaatgcaaaattaaaaggatgtaaggtcatttgtataactaaatatagtgacaatcatcttagtaagattagtgatttaaagctagtagtaccaaatatagaaaaaaggcttagagaaggagctatttcttcaagaatagcaatgcttacgttgatagatataatatatatttctataattcaagaaaacttaaatgaggcagaacagaaactacaagaaacaaaaaggatacttgattatttaaatattaataatgct

SEQ ID NO: 17042 - DNA, 978 bp, Clostridium difficile
ttgcatttgaataatattaattcacttaaagtaataaaattatctcttggatgttctcttgctatatttattgcttggctattaaaattagaatactcaatggttgctggagttatagtactacttacagtaaaggacactaaaagagaaactcttaaaggctccattggaaagatttatggttttcttttatgtactattttttcatatttatgttttaatattttaggatataatttgacttcattttcaatatttatatttataattataccactttgttttttgttaaatattcaagatgttattgctatgtgtgtagtcatagcatcccattactaccttcaaggagaaacttctatcaaatggattttaaatgaagctggaatatttgcagtaggaactggaataggtgtcttaataaatatgtatattccaacaaatatacataaaatccatgaagttcaaaaaaagttacaggaagaagtgagtattgtacttatagacattgcagatattattgtaaatcctaaaaaagaaaatggatatagtagagatttatatacattaaattcacttattgacagcagtatttctgaaacttacgataatattaataatactttattaagtgatactagattcttcttagaacatatggatattataaaaagccaacgggatatcttagaaaatttgtatagttatgtatctcaactaaattctacaccaccacaagctcatattctatctgcttttatacataagataggttatactgaatttgaagctgaaacaggcaatcttcttcttgaagaattaaagagactaatgattagtatgaaaaaccagcctctacctgttgacagaacagagtttgaaaatagagctattttattcctatgcttgactgagttaaaacagtttttagttaatcgtaaacatgctcagatgcttagagataataatttttataaa

SEQ ID NO: 17043 - DNA, 1377 bp, Clostridium difficile
atgataggaagtatatctataaatgagatagataaaaaaagattcaaacttgatgatttaagtaagaaaatatgggaaaatccagaaaaagcatttaaagaatttaaagcatgtgaaaatacagcaaactttctaagaagtgaaggatttgatgtggaagtaggtgtaggaggtttagccacggctattagagctagttttggttcaggtaaaccagttataggttttatgggagagtttgatgcattacctggtttaaatcaaaaagtttcaacaaagcaagaagcatttgaattgggtgcatatggtcatggatgtgggcataatttattatgtacagcacatgtaggggcagtagtagggcttaaaagagagatgatagaaaataacttaagtgggactatagtattttatgcatgtccaggagaagaacaattaacaggtaaaggatttatggctagaggtggagcgtttgaagggttagacttagctataaattttcatccaaataaaattagtgaagctacaattggtacttcaacagctgttaattctgtaaagtttcattttaagggaaagactgcacatgcagggtcagaccctcaaaatggaagaagtgcactagatgctgtggaacttactaatgtgggagctaattatttgagagaacatgttacttctgatgtaaggattcattatacaattacagatggaggagtagcacccaacatagttcctgataaagcatcagtatggtattatacaagagctttaagtagagaagctgtagaaagtacatatgaaagacttgtaaaggtagcaaaaggagctgcaatgatgactgaaactgaagttgaagtagagtttttaggaggatgttataatactttaaacaatcatgttttagcaaatcttgtatcagaatgtatgaatgagattaaacaagagccttggactcgagaggaattggattttgcagctgaattagatagacaaagcccacaacaatataaggctatgataagtaaatataatttgccagaaggaactcatctatattatggtggaggaaatgttacaaactttaatagttatggctctactgatattggagatgtaatgcatatagttccgacagcatacttttttacagggtgtacgaatctaggtgcaccaggtcatagctggcagtttacatcttgtgcaggaagttctataggagaaaaaggtatgatatatgcatcaaaaattatggctatgtttggagctaaaatattaaataatccagagatagctaaaaaggcaaaagaagaatttgataaatctatgaatggtaaaacatataaatctcctattccagatgatattccaactcct

SEQ ID NO: 17044 - DNA, 930 bp, Clostridium difficile
ttgaatttattaaaaaaatatcctatacctattgcaagtttgattttatcaatttttactttaggtaacttattacaatcttatagtgaatcattacgtaatgtaattggatttataggatttattttgtatgcaatttatatagtcaaaatagtattacttagaaagggtgttaaagagcaattagagaaccctttaatatcaagtacatttccaactataacaatggcaacaatgatatttgctacatatataaaaccattatctttagaattaagtattatgatttggagcataggaattgtgggtcatcttgtgttaatagtcttatttagtaagaagttcttagttaaattctcaataaaaacggtatttccatcttggtatatagtatatgttgggatagttgcagctagtgttacggcaccagcatttaatcaacttttgattggcaaaattgctttttggataggatttgtatcttatatagttcttataccagtaattttaaagagagtatggataatcaaggaaatgcctgaaccatctttaccaagtatagctatattagctgcaccagggtcactattattgtctggatatattaattctttttcagataaaaataatgtagtattatacttgttattcatattatcaattgtattttatattatagttttgggatatttaccgaaattattaaggttgcctttttatccgagttttgctgcatttacattccctatggcaataagtgcaatgggtatgaaactaatgaatggttatttaactaaatcaggtcattttataagttggatttcatatgcttctaagttagaagagataattgctacagtgattattttatatgttttagttttgtttattatataccttagtaaatctgaaactacatctaaagctaaa

SEQ ID NO: 17045 - DNA, 1179 bp, Clostridium difficile
atgatagaattagaagatgccataaaaattattgaaaaaaatgttttaccaataaacagggtcaagatagtaaatcttatagatgcagtaaataaggtagttgcagaagatatatattcaacaattgatagtcctccatttgataggtcaccctatgatggttatgcatataatgcaaattctgaaaatagaaatttaaaggttatagggactttgtatgcaggagatgtatttaatagggtattaaataaaaatgaagcagtgaagataatgactggtggaaagataccacagggtgcaaattgtgtaataaaaaaagaagatgtaacagttataggtgatatgataaccttaaatataaaattaaaggaatacgataattacatatttaagggtgaggatataaaaaaggggcaattgattattaataaaaatcagaatataggatatgatggtattggagtattagcaagtcttggaatatccaaagtaactgtttatgatgatttaaaagttggaattttgaatacaggtacagaactacaagatataaatgagactttagagaatggtaaaatatacgatagtaatagatataccttatattcaagattattaaaacttggaatacaagcagatacaatatgcaattgttctgatgatatattggagttagaaaaaaaggtaaagaatatgttacagagtgtagattttttaattaccacaggtggtgtttctgttggagataaagatttaattccagatgtattcaaaaaaataggggcaacagaattattttggaagataaacattaaacctggtggagcttgttatgtaggtacattgggagaaaagctattatttggtctttctggtaatccacatgcagcaatagtggtatttgataatgtgatagttcctgttattgagtatttaacatataagaagggaacacatcatataaaagctatatttaaaggagaatttaataaactttcaaataaagatagatttgtaagtggaaaactatatacaagtgaaggtaaattgtatgtagagctaaatgataagaaagatgcaaaagctagactatctgcaactctaagaagtaattgtatgattaagattaaaaagaatgagacaataaaagaaaatcaattagtggatgttgttattaga

SEQ ID NO: 17046 - DNA, 1698 bp, Clostridium difficile
atgataaaacaatttgtcaaatattataagccatataagaaaatttttacactagaccttatagcagcttttctattttccttatgtgatttagtttatcctatgataactagaaatataatggatgacgttgttccaaataaaaacttaagaatgttagtagtttttgcagtagcacttatacttatatttatagcaaaagcagggcttaactattttatgcagtattggggacatgttattggtgtagatatgcaagctgatatgagaaatgaggtatttacacacttacaaagacttccaaatacgtattttgataataacaaatctggagtaactatgtctagaatagtaaatgatttaatggatataacagaacttgcacatcatgggcctgaagatttattcatttctatagtaatgttggttggttcattctttatacttatagatataaatattcctcttacgcttataatatttgctatattaccgtttataatttggtttgcaatagctaaaaaagataagatgaatattgcttttatgaagagtagagttactataggtgatgtaaatgctactttagaaaatagtatagcaggtatgaaggtaactaagtctttttgtactgagaaagaagagttaaataagtttgtaagaagcaataaattatttagaagagcaagacaagattcttataaggtaatggcagaatattactctggtatgaatttatacatggatatcttagagtgggtagttgtaatagctggtggttattttacttatataggaaagattactttgggtgattttgctgcttatatactatatgtaaaaatgtttatacaacctatgaaaaaattaataaactttacagagcaatatcaaaatggtatgacaggttttaaaagattcatagagataatggaacaagaccatcaaaaagaagctaaaaatcctattgaacttgaaaatgtaaaaggtgacattgagatagaaaatatatctttcacatatgaagataagactcaagttttggataatttaagtttatctataaaagctggtaagactatagcattagttggaccttctggaggaggaaagactacattatgtaatctattgccaagattttatgaatttgataagggtgatataaaaattgatggaaagagtataaaagatgttagtttaaaatcattgagaaaaaatataggtatagttcaacaagatgtatttttatttacaggaactataagagataatattctttgtgggaaccctaatgctacagatgaagaaatgatagctgctgctaaaaaagctagaatacatgactttgtagagactttgccagatggatatgatacttatataggagaaagaggcgtaaaattatcaggtgggcaaaaacaaagaatttcaatttcaagaatctttttaaagaatcctccaataataatattggatgaggctacatctgctttagacaatgtaacagaaagagaaattcaagagtctttagaggaattaagtaaagatagaacaaatttagttgttgcacatagattgactactataaaaaatgctgatgaaatcatagtattgacggataaaggaattgaagaaagaggtactcatgaagagctagtaaacaaaaatggagtatatagtaggttacacaataac

SEQ ID NO: 17047 - DNA, 1284 bp, Clostridium difficile
gtgaagaatttgtttatagataaggcaagaatatttgttaaggctggaaatggtggaaatggttcggtagcatttagaagagaaaaatacgttccagctggtggtccagacggtggagatggtggtcgtggagcaagcatcatatttgaagttgatttggggcttagaactctaatggactttaagtaccagaaaaaatatcaagctcaaaatggtggcgacggaagcaaaggaaaaagagctggtaaaaatggagaaaatttagtattaaaagtaccagcaggtacagtaataagagatgaggctacaggtcttgtattagcagatttaaaaaaagaaggagatacagctatagttgcaaaaggtggtataggtggtaaaggtaaccaacactttgcaaatgcagtaagacaagctccagcttttgcaaaatctggtacagatggagaagaaagatggataactcttgaacttaaaatgatagcagatgttggtcttttaggatttccaaatgtaggtaaatcaacatttctatcagttgtaactaaagctaaacccaaaattgcaaactatcattttacaacacttacaccaaatctaggtgttgttcaaactaagtttggagatagttttgtacttgcagatatacctggaattatagagggtgcttctgaaggcataggattaggtcatgagttcttaagacatgttgagagaacaaaggtattgatacatattgtagatatatctggattagagggaagagaccctattgaagattttgacaagataaatgatgagcttaaattgtacaatgaaaagctttcaaagagaccacaagttgtagttgcaaataaatttgatatattagaagatgagagtaagtttgagaagtttaagagtgaattagaaggcagaggatatacagtatttaaaatgtcagcagcaactcgtcaaggcatagatgaagtaatagcctatgtttctaaaatgctaaaagaagtagaagatgtggagctagtttcagaagaagaaatgtatagaccagaacttgatattggtactgaagaagagttaagtatagatattgaagatggtgtgtatgtagttacaggtaaagcacttagaagaataatgtattctgtaaattttgatgatatggaatcccttcaatatttccaaaaagctatggagagtcaaggtgtttttgataggcttagagaaatgggaatagaagatggagatgtggttaaaatttatgaattagaatttgagttttacaat

SEQ ID NO: 17048 - DNA, 1257 bp, Clostridium difficile
atgaaaaaaaataaaattattgctttttttgctccatctatcatagttggagttctagttttagggattatcctatacccaaatgaagctataaaatctgcaagagaaggcttttctatatggtctaatgttttagttccatcactactaccatttataattggagcaaacttaattgttgatttaaaaatagtggatattatagggtttatcatcaatcccataactagatttgtatttaatgtttcaggaaagagcgctttagcttttgctatatctacagtatctggttatccagtaggagtaagtttagcttctgaatttaggagtaatggacaaatttctaagtatgaagcacaaagacttgtgtctttttgttctacatcaggacctttattcataataggttcggttggtacaggtatgttccaaaattcaaacttaggttatttaatgattctctgccattatctaggaactatattggttggtcttttctttagaaattatggtaatgaaaatcttccaaagacaaaattggatttaaaaacaaatataaaaaatgtaatcaacattagaaattcaagtgggaatggtttttttgttttatttggaaatgctgtatttaatggagtaaatacattacttacagttggtggatttgtaattgttttttcagtagtatttaaaatactatctctttttaatgtaatctcattaatagcatcagttatatatttgcctctttcatttttaggtgttagtaaagaactctgtcaagcatttgtaagtggtctatttgaaattactataggatgcaataaagtatctagtataacaagttctccagaaattttaagagcatctttagctagttttttgataggatttagtggattatccatcctagctcaatgttgtacatttctatcaaaaacggacatagatttaaaattatacatactaagtaaatttgcgcatggagttttagctgctatctttatatttatactttatccaattgcaaactctgctgtgttggtttctagctttgctgatacatacaacgttatatataataatttaatctggttttattatcttagctattatgatacaattcttcaaattgtagtaataatttatctaatctcagccgtatttattgcaaaaaaacatatgaaaactttatctacaaatgggaaactaatgcgatataaaaatacttttttcactaagaaattttcacgaaaaaaa

SEQ ID NO: 17049 - DNA, 777 bp, Clostridium difficile
atgcttacaagaattattgcttcactagctctggttccattatttctatttgttgtatatggaggtattcctctatatatagctgagacagcaatagtttatattgcattgcatgagttttataaggcatttaaaataaaagatgtacatccaatattcattataggatatttattttctatttatttagctgtaaaaaatatttttaatttaccattagaatatacttatgcagtaatttttattttatttttagcaagtataatttatatgttgatgggcaaaaacaatgttatagatgtttcgattacgtttttaggagttttttatataggagtatttttagattttataattataactataaatggatttgaaaaaggtagtatatatgtatggcttatatttgtgatatcttttatgacagatatatttgcatattttagtggttatttacttggaaaacataagctaattcctaaagttagtcctaaaaagactatagaaggagctattggaggaataataggaagtacactttgttgtattttatttggatatttatttggcattgatttgcttcaattagcgataataggaagtataggaagtgtaatagctcaattaggagatttatttgcatcttctataaagagatatgtagggataaaggattatggaaagataatacctggtcatgggggtatattagatagatttgatagtgttatattagttgcaccttttgtatatagtgcgattaaattttttattaga

SEQ ID NO: 17050 - DNA, 732 bp, Clostridium difficile
atgaataacaacattatatatgatatagacttaaataacatacctactcatattgctattataatggatggaaatggaagatgggcaaaagctagatttcttccaagaactgcaggacataaggctggagtagaaactataagagatatagtaaaagaatgctcaaaattaggtgttaagcacttaacattatatgcattttcaacagaaaactggaaaagaccgaaacttgaagttgacacacttatgaacttattatctacatacttaagaaatgaaatagctgaacttcaccaaaacaatgtaaaagtaactgctataggagatataagtgctttaccaaaaacttgtataagagaattaaactcagctaaggaactgacaaaaaacaatacaggagttaacttaaatttagcattaaactacggaagtagagcagatataaaaaatgctcttatagatatagtaaaaaattgtgaaagtggtaaaatagatataaacaatattgatgaagatattataaaaaactatttaagcacaaagtctataccagatccagacttggtaataagaacaagtggtgaacaaagattgagtaactttttactttgggaagttgcttattctgagttttactttactgatatacattggcctgattttaaaaaagaagaactacagaaggctatatacgtatatcaaagaagggatagaagatttggaggacttaag

SEQ ID NO: 17051 - DNA, 555 bp, Clostridium difficile
atgaaactggaaatacataagcaattagaagagaaaatgaatgggacaattgatgctttaaagtttgaatttggaactataagagcaggaagagctaatgcacaaatgctagacaaaataagagttgattattatggaactccaactccaataaatcaaataggtgctatatctgtaccagaaccaagaatattaatgatatctccttgggataaatctgctatgcatgaaatagaaaaagcgatagctaactcagacttaggattaaatccatcaaatgatggtgaggttataagactttctgtacctgctttaacagaagaaagaagaaaagaattagctaaaaaagctagtaaagctgcagaagaatttaaagttagaataagaaatgaaagaagagacgccaatgagaagattaaaaagatggaaaaaggcggagaattaactgaagatgaattaaaaaaagcacaagatgaagttcaaaaaatgactgataaatttataaaagaaatagatacattattatctaaaaaagaaaaggatataatggaggta

SEQ ID NO: 17052 - DNA, 702 bp, Clostridium difficile
atggataaaccaatgtacaaaagggtattgttaaaattaagtggagaagcattagcaggagaaagaggttttggtataaataatgatgtagttaatgatattgctattgctataaaaaaaatacaagaaataggtgttgaagtagctgtagtagtaggtggaggaaacttctggagaggcagaaccagtgaaggaatggacagaactactgctgactatataggaatgttagctacagttatgaatgcaatggcgctacaggatgcactagaaaatatagatgttgctacaagagttcaaactgctatagacatgagacaaattgcagaaccatatataagaagaagagcagttagacacttagaaaaggaaagagttgttatatttggtgcaggaacaggaaacccttactttacaacagatacaactgctgctttacgtgctgctgagatggaagcagaagttatattgttagctaaaaatgttgatgcagtatatgacaaggatccaaaagtacatgcagatgctaagaaatttacagaattaagttacatggaagttatacagaaagaattaaaagtaatggattctacagctacatctttatgtatggataataaaattccaataaaggtatttgagcttacaacagagaatataataagagcagtaaaaggcgaaaatataggaactactgtaaaa

SEQ ID NO: 17053 - DNA, 909 bp, Clostridium difficile
atggctaatataactgctcaaatggtaaaagagttaagagaaagtacaggcgcaggaatgatggactgcaagaaagctttacaagaagctgaaggaaacatggaaaaagcagtagatttattaagagaaaaaggattatcaaaagctgctaaaaaagctggtagagttgctgctgaaggtctagttgcaatagaaatgaatgatgataatacagttgcttctatggtagaagttaactcagagacagatttcgttgctaaaaacgaagacttcaaagtgttcgttaaagatgctgcttgtatggcattagctactgataaagaagatatagcttctttattaggtgaaactcataaagagggaataactttacaagaagttttaaataatagagttgcaaaaataggtgagaaattagactttagaagatttgctaaagttgtaactaatggacaagttgctggatacattcacggtggtggaaaaataggtgttcttgttgaaatggaaacagaagctagagatgctaaagttttagaattaggtaaagatgtagctatgcaagttgctgctatgaatcctaagtatgtttcaagagatgaagtagatgctgaatacatagcacatgaaacagaagtattaactcaacaagctttaaatgaaggaaaaccagctaatatagttgaaaaaatggttaaaggaagattagaaaaagaattaaaagaggtttgtttattagagcaaactttcgttaaaaatccagatataactgttaaacaattagttgctgatgttgctaaggcagtaggttctgatataaaagttgttaaagttgtgagattcgaagttggtgaaggtatacaaaagagagaagaaaactttgcagaagaagttgctaagcaacttaag

SEQ ID NO: 17054 - DNA, 711 bp, Clostridium difficile
atgtcagtaatatcaatgaaacaattattagaagcaggtgttcactttggtcaccaaacaagaagatggaaccctaaaatggctaagtatatattcacagagagaaatggaatatatataatcgacttacaaaaaacagttaaaaaagttgaagaagcttacaagttcactaaagaagtagctgaaacaggaaagccaatcttattcgtaggaactaaaaaacaagctcaagatgcgataaaagatgaagctgaaagatgtggaatgtactttgttaatgaaagatggttaggtggaatgttaacaaaccacaaaactataaaaacaagaataaataaattaagagaattagaaaaaatggaagaagaaggcgtatttaatgttcttcctaaaaaagaagttataaaattaagagctgaaaaagaaaaactagaaaaatacttaggtggaataaaagacatgcctgaattaccaggtgcaatgttcgtagttgacccaagaaaagaaaacatagctattcaagaagctcatagattaggtataccagtagttggtatagttgatactaactgtgacccagaacaattagactttgctataccaggaaatgatgacgctataagagccgtaaaattaataactggtgctatggcaacagctgtaattgaaggtagacaaggtgctgaggaagaagtagctgaagaccaagaa

SEQ ID NO: 17055 - DNA, 984 bp, Clostridium difficile
atgaatacaaaggctggaatattaggagtaggaagttatctacctgagcaatcatatgataattttcacttcgaaaaaataatggatacatcagatgagtggataagtactagaactggtattaaggaaagaagatttgccaaagagtctgaagcaacttctgacttagcatctaaagctgccttaaaagctatagaatgtgcaaagttaaacgtagaggatatagagctgattatattagctacaattactcctgatatgtctttgccttcaactgcatgtatagtacaagatgcaataggagcagtgaatgctactgcatttgatatatcagcagcttgttctggatttgtatatggagtaactattgcaaagcaatttgtggaaacaggttgctataaaaatgtgcttgtaataggagcagaaacttgttctaagtttttaaattatgatgatagaacaacagcagtattgtttggagatggagctggagcagctgttattggccctgtaaatgagggtggaatactgtctacacatatgggctctgatggtaaaggaaaagattgtttaaaagtacctgctggaggttcaagacttaaggcaagtaaagagactgtagaagctaatctacatacaatagaaatggcaggtagtgatgtgtttaaatttgcagttagaaagatggcagaaacttctttaagagctcttgaaaaagcaaatctaaatacaactgatatagactacttagtgccacatcaagctaatataagaatcatacaagcttcttctaagagattagagcttgatatgaaaaaagtttatgtaaatatagacaaatatggaaatatgtctgctgcatctataccagtagcattagatgaagcttatagagaaggtaaaattaaaaagggtgataatgtagttttagttggctttggtggaggtctaacttggggggcttcagttgtcaagtggacttta

SEQ ID NO: 17056 - DNA, 942 bp, Clostridium difficile
gtgaaggagaattgtatgaataaaatttgcaaaatattaaatataaaatacccagttatccaagggggaatggcatgggtagctactgcatcattagcaagtgctgtatctaatgcaggaggacttggcataatagcagcaggaaacgcaccaaaagaagctataaagaaagaaattgttgagtgtaaaaaattaacagataaaccttttggagtaaatgtaatgcttatgtcgccatttgttgatgatataattgatttgattatagaagaaaaagttcaagttattactactggtgctggaaatcctgcaaagtatatggatagattaaaggaagctggaacaaaggttattcctgtagtacctacaatagctttggcacaaagaatggaaaagctaggagctacagcagtaatagcagaaggtactgaaggtggaggacatataggagaacttactactatggtcttagttccacaagttgctgatgctgtaaacatacctgtaatagctgctggaggaattgtagatggtagaggaattgcagcatcatttgcattaggtgccagtgcagttcaagtaggaactagatttatttgcagtgaagagtgttctgtccattcaaactataaaaacttagtactaaaagcaaaagatagagatgcaattgtaacaggaagaagtactggtcatccagtaagaacattaaaaaataaactatcaaaagaatttttaaagatggaacaaaatggagctactcctgaagaattggataaaaaaggtacaggagctttaagatttgcaacagtagatggagacatagaaaaaggttcatttatggcaggtcaaagtgctgctatggtaaaagaaataacaccttgtaaggaaattatagaggctatggtaaatcaagcaagagagattatgccagcaatagaactg

SEQ ID NO: 17057 - DNA, 948 bp, Clostridium difficile
atgggaaaagttgcattagtattccctggtcaaggagctcaatatgtaggtatggccaaggatttatatgaaaataatgctgttgctaaaagtgtaatagatgaggctagtgatgccttaaatatggatttaaaaaaccttatgtttaatggaaatgaagaagaactttctaaaactgaaaacactcaacctgctatggttacacatagtgtagctgtattaaaagcagtacaagcccaagtagatttaaaatatagtgcatgtttaggtttatctttaggagagtatagtgcattggttgcagcagatgcaattgactttaaagatgctgtatgcttggtcaaaaaaagaggtaagtttatgcaggatacagttccaacaggtgttggagctatggcagcaattttaggtctagatagaagtatattagaaaatgtagttaaagatatacaaggaggtattgtggaagtagcaaattataattctcctggtcaaatagttatatctggtgaaaatgaaaagatagaagaagcaatggtgaaatgcaaagaagcaggagcaaaaagagctgttaaattaaatgtaagtggaccttttcactcatcaatgctaagagaagctggagtaaaattaggtagtgagctagaaaaagtcaacataactaaacctaaaattgatgtagtagcaaatgtaaatgcagattactataaaagtgaagggaaagaactgcttataaaacaagtaagttcatctgttctttgggaagattctatagaaagacttttaaatgatggatatgatacttttatagaaatgggacctggaaaaactttaaaagcatttattaagaagatagcttccaataaaaaagcaaatgtcaatatttataatatagatggtatagattctcttaatgaatttgtacaaaattatagaaatggagagata

SEQ ID NO: 17058 - DNA, 747 bp, Clostridium difficile
atgataaatcttacaggacaagtagcagttgttactggtggctctaggggtataggaaaagaaatagcaaaaaaactagcatcttttggggctgatgtagtaatcaattatacttctaaagaagatgaagcactaaaaactaaaaatgaaatagaaagtatgggggtaaagtgtacctctataaaatgtgatgtgtctaaatttgatgaagtgaatcaaatgatagattctgttgtaagcgaatttggaaaaattgatatattggttaataatgcaggcataactaaagatggtctgcttatgagaatgaaagaagaagattttgatagagttatagatataaacttaaaaggtgtctttaattgtacaaaagcagttactaaacctatgatgaaaaagaagtatggaagaataataaatatgacttcagtagttggaattatgggtaatgcagggcaaactaattattgtgcatcaaaagcaggtgtaattggatttacaaaagcttctgcaagagagttagcatcaagaaacataaatataaatgcagtagcacctggatttatagaaacagatatgactaaagtactaagtgatgatgtaaaagaatcaacactagcaaacataccaaagaaatcttatggtaaaccagaagatgtagccaatgccgtagcatttttagttagtgacatgtcaagttatataacaggacaagtaataaatgtagatggtggaatggtaatgcaa

SEQ ID NO: 17059 - DNA, 1236 bp, Clostridium difficile
atgaataaaagagtagtaataacaggacttggatgtgttacgccgttgggaacaggaaaagaagagttctggagtaatataaaatctggagtatctggtatagataaaataactaattttgatgctagcacatatcaaactcagatagcaggagaagttaagaattttcatccagaagaatatataagtaaaaaagaattgaagagattagataaatttgctcaatttgcaatagtatctgctaaattagcagttgaagatgcaaatcttgatttagataaagttgatagagaacgttttggtgttataataggttctggaataggtggagttgaagctatagaaactcaacataaaattcttttggaaaaaggaaataaaagagtaagttcactttttgtacctatgatgataggaaatatggcagctggtcaagtttcaatatttttaggagcaaaagggcctaacactaatgtatgtacagcttgtgcatcaggaactcattcaataggtgatgcttttaaggtaattcaaagaggtgatgcagacatcatggtagcagggggctctgaagctgctgtaacaggtcttgcttttgctggattctgtaacatgaaggctatgtcaactagaaatgatgaccctaaaactgcatcaagaccatttgataaagacagagatggttttgtaatgggagaaggagcaggtattgttatcttagaagacttagaacatgctttagcaagaggcgctaaaatatatgcagaagtagttggatatggtttaactgctgatgcataccatatgacaactccagctgaaaatggagagggagcagctaggtctatgaatatggctttgaaagatggaaatgttccattagaagaagtagattatataaatgctcatggaacttcaacttattacaatgatttatatgaaactatggctataaaaactgtatttggagaaaaggcatatgacttatgtgtgtcatcaacaaaatctatgactggtcacttattaggagcatcaggtgctatagaggctgttgtttgtgctatgagtatagaagatagttttgtgcctccaactataaacatacaagaagttggtgaagatttggatttagattatgttccaaatcaaggtaaagaaaaaaatattagatatgcactatcaaattctttaggatttggtgggcataatgctacaatagtactaaaaaaatatgta

SEQ ID NO: 17060 - DNA, 507 bp, Clostridium difficile
ttgatgaaaaaagatagggcacaaaagagtacaacaagagaatatataatgaaacttatataccaaataaatattaataaagaagattttgaaactttagaagataaagtagataattttttaaaagataattcagaacatattataaatagatataaagaacttgcacttcaatactcaaaaaatacaaatttaaagttagaagatactgaaattgaagatgttatagacaaaaaatatataaatacagtatgcaaagcattgaaagaaaatcatgacaaaatagatgagttaataaataagcatgctaaaaactggacagtagatagaatgccaaaggtagatgtttctatacttagattgtctgtgtgtgaaatactttatttagacactcctaataaagtatcaataaatgaagcagtagaacttgcaaaaatatattgtgatgataagtctcctaaatttataaatggtatattgggaagtgttgttgatgaaattgggaaa

SEQ ID NO: 17061 - DNA, 1203 bp, Clostridium difficile
atgaaactaagagctttagatataagtgaagcaaactcatatattaaaagaattttaataaacgacccaatactttctaatcttaaagttaaaggagaaatttctaattttaaggttcatagtagtgggaatgtatatttatcacttaaagatgaaacatcaaagttaaactgtgtaatttttaaaagtaattttaatcgcaatttaaaattagataatggtgtaaaaattatagctaatggatatatatcagtctatgaaagagatggtgcgtatcaattatacattaatgaaattgaaatagagggaataggaaatttacacatagagtttaatagattaaaggaaaaacttaataaagaaggattatttgaccctaaatacaagatacctatacctaaaatgccaaactcaattggcgttataacatctccaacaggtgctgttataagagatataataaatgtaataaaaagaagatatccgaaagttaatataaagctttatccagtaacggttcaaggagataaatcagctgaagaaatctgtgaagcaattagatttttcaatcatatgaagaatgttgatacacttatagttggtagaggtgggggttcaatagaagaactttggtcttttaatgatgaaatggtagcaagagaggtttttaattctcaaattccgataatatcagcagttgggcatgaaacggattttactatttgtgattttgtgtctgatatgagagccccaacgccatcagcagcagctgagattgctactccatcattggatgatataaactataaacttggaaacataaaaagtaggatgagtaagtctcttacaaatcaaatagagctagaccaatataggttagaaacagtatttaataagataaataactatttagattcgtacacaataaaagataaagttatacaattagacaaaatatatgataaaataatttttggaatagaaaataatttaaaattagaagatgaaaaattagtaaaaattggagcattactccataatttaagtccattagctactatggatagaggttatagtataactcaaaaaaatggaaaagtaataaatagtataaaaggattaaaaataaaggatagtatagatatagtattaaaagatggaaatttagaatgtatgatagataaaattgaaaataaagaggga

SEQ ID NO: 17062 - DNA, 885 bp, Clostridium difficile
ttggaatttaaacaatgtctaaaagaaaaagcaagttttgtagaaaaagtacttaaagaatatatgcctaaagaagaagggtatcaaaaaactgttattgaagctatgaactatagcttaagtgctggaggtaaaagattaagaccaatacttacattggaggcttgtaaaatagttggaggtaatgaagatgaagctattccttttgctattgcaattgaaatgatacatacatattcactaatacatgatgatttgccagctcttgacaatgatgatttaagaagaggaagaccaacaaatcataaagtatatggagaagctatggggattttagcaggagatgctttgttaaactatgcttttgaagtaatgcttgcaggctcaatcaataaagaaaatccagaaaagtatctaaaagctataaatgaaattgccaaaggtgctggtatatatggaatgataggtggtcaagtagtagatgtagaaagcgaaaacaaacaaattgaaaaagaaaaattagattatatacatatgaataaaactgctgcaatgatggtaggctgtatgagagcaggagctactataggtggagcaaattctgaacaaatggaagaaataactaaatatgcaaaaaatatcggattatcattccagatagtagatgatatactagacatagtaggagatgaagctaagttaggtaaaaaggttggaagtgatatagaaaatcataagtcaacatacccatctcttttaggtttagataaatctaaagaaattgcacataatttgattgatgaagcaaagaaaagtatagaaaaattatctgatgatgtagattttttaaagggattggctgaatatataatagatagagaatac

SEQ ID NO: 17063 - DNA, 2646 bp, Clostridium difficile
ttggaaaaaaaattaattataatagatggaaattcaataataaatagagctttttatgctcttccagaaatgaataataaagaagggctaaagaccaatgcaatatatggatttacaacaatgctatttaaaatgatagatatatataaaccaacacatataagtgtagcatttgacagaaaagcacctacatttagacatttagaatataaagagtataaggctggaagaaagggaatgccagatgaactggcagaacaattacagccattaaaagaccttttagataaatttagaataaatagattggaaatagatggctatgaggcagatgatattataggtactgtttctaaaaaagcagaagaaaatggatataaggtatacatagtaactggagacaaagatgctattcaacttgcttcagacaatacaactactcttataacaaaaaaaggagttggagaagttgaagaatacaactttaattctgtaattgaaaaatacgagatgactccaacacaatttatcgatttaaagggtcttatgggagacaagtctgataatatacctggagtacctggaataggtgaaaaaacaggtataaagcttataaaagagttttctagtatagagaatctaatagagaatacagataagcttaaaggtagtgtaaaaaagaaaatagaggaaaacaaagaaatagctattcaaagtaaaagacttgcaacaattataagagatgtgccaatagaagtggatttagatagtatgatttttggcgattatgataaagatgaacttttagataaatttagatactttggatttacaagtctcttatcaagattagttgatttggtcgattcagatgacacagaacacgtagaagaaaaaatagaaatattaaaattaaaagatatagaaaaatttatagatgaagtaaacaaaaaaggacaagttattttaaaaactgttagaggacaaggtaatatacttgaaaaaaatataatatatatttttataagtgtagatggagaaaaaatatattatgtagattcaaatgaagtgtcaaagttagatagtatattttcaaataatgaaattaaaaagtatggatataatttaaaagatgattatatatctttaaaaccatataatataaacttagaaaatatgtattttgatataacaatagctgagtacttaatagattcaacttcatctacctcatatgattgtagtgcaatagctatgaagtatttatcaaaaaaggttaaatcaaaagaagaattattaggaaagggtgttaaatctaaaaactatgaggatttagaatttgaggatttagcagagtatatgggtcaaataatatgcacagttaaagaaacagttcctatgatggaaagaagtctaatggatatgagtatggatggtcttttttatcatgtagagatgcctttagtagaagtcttaggtcatatggagtatgaaggtataaaagtagacaaaagtatattggatgaattgagtgttgaatttaaagaaataatagctacattagaaaaggaaatttatgaattatcaggagagccattcaatataaattcaccaaaacaattgggtgttatattatttgaaaaattagagcttccaataattaaaaaaactaaaactggatattcaactaatgcagatgttttagaaaaattaagagataagcatccaataatagataagataactgagtatagacaaatagtaaagttaaattctacttacgttgaaggacttttaaatataataaatccagaaagtaatagaatacattcatcatttaatcaaactataacgactacaggaagaatttcatctacagaaccaaatcttcaaaatatacctataaaaatggaaatgggtagaaaaataagaaaagtgtttattgcagatgataactgtaagttggttgatgccgattactcacaagtagagctaagagttcttgcacatatgagtcaggatgaaaatatgatagaagcatttaaacatcatgaagatattcataccaaaacagcttcacaagtttttaatgttcctatggaagatgttactagtgaattgagaggtgcagctaaagctgtaaactttggtattatatatggtaaaagtgactttggtctagctgatgatttaaatatacctgttccaaaggcgaaagaatatatcgaaagttattttgctaaataccataaaataaaagagtttatggacacaacagtagaaaaggctagtgaggatggatatgctgtaacaattttaaacagaagaagatatataccagaaataaagtcaagcaattttatggaaagaaatagaggaaagagatttgcaatgaatgcaccaatacaaggaagtgcagcagatataataaaaattgctatgataaatgttcataaaaaattggaagagaacaatttgaaatcaaaacttatactacaagttcacgacgagttgatagttgaagcaattgatgatgaaatagatatagttaagaaaatagtaaaagaagaaatggaaaatgctgtaaatatggatgttcacttagatgtagatttaaatgtaggtagttcttggtatgagacaaag

SEQ ID NO: 17064 - DNA, 1713 bp, Clostridium difficile
atgaagagaataaaagtcttaacagtcgttttagctataacttttatggtagctggttgtagtaatactaaaacaaaacaaagtagtagtgattcaagtttacaaagtcaaagttcgatagatgctaagtatataaacttaacaatggtaactccaaaaactataaatcctataactaatactgataagtctgttggttatataatgaatttagtttatgatagtttatttactatagatgagaactacaatgtaattcctcaattagttaaggagtataatatagctcaggatggaatgagtatagatataaagctaaaagatgcaaagtggcatgatggaaaaaatgttacttcaaatgatgtaaactatactattggtttaattcaaaaaagtgcagatagtccatataatgaatttactaaaaatatagcttctgtgaatattaaatcagataaagattttacaataaaatttaaagctagatatgctttttcaattgatagtttaatttttccaattgtatctcaaaatcatttagattcaaaagatgtaaatgacaagaataataatatgataggaaatgggaaatataaaatagaatcatatacagaaagagaaggaatggttttatctgtaaacaaagattactatgaagaagttccaaaaaccatgaagaacataaaagtaggtatggtgcctaatgaagatgcaaggacatctatggttatggctcttgatagtgatataaccaatgttacattaaatgatttaagtaagtttcaagaaaaagagtttaatataacaaaatatcaaggaagagattatgagtgtgtattatttaattataataatccttttttcaaagatgttaattttagaaaagcaattgcacactctatagataaagatagaattattagtgaaggttatatggatgatgctactccagttaattttccacttaattcaaaatcaaaatactataatagtgaaatgaaggatttagagtttaataaagataaggcgatagagtgtcttgctaaggtagaatatgcaaatgtaaactcagtaaatcaaaatgacaataaagtaaaaaatcagaaaaaatcagctaaaaagaactcaaagaagcttacgccagaagaagaagcaaaagctaaaaaagcagaagaagatagaatcaaaaaagaagctgaagagaaaaaaaatagagaaaaagaggaagtaaagaaaagtctttctgaaatgaacttaaagataatagtaaacagagataatagtgagagaataaaaactgcaaacataataaatgaaaacttaaaagctataggaataaatagtacagtaaatcagctgtcagataaggatatggaaaatgctcttaattctaaaaattatgatttagcattagttggatggaaactatcaattataccagatgcaagtagtattatagcgagtagtggatatactgatgataagttaaatggatatatgtctgcacttacaagttctacgtctgaaattgaaacaaaaaaagcatacaaagatgtacagacatatataaaagataatgcaacatttataagtttagctgtgagaaacaactatattgtaagtaatagtagattaaaaggtaaaattactccaaatgattttgatgtatatgagggaatatctaatttagatataaaatcgaatgaatcaaat

SEQ ID NO: 17065 - DNA, 912 bp, Clostridium difficile
atggatattatagagggatatatagattacataaaagataaaaaaaaattatcagagaatacagtggcatcatactttatggatataaaaaaatatatggaatatataaatcaaaaaagcattaaactagtagatatagtagaaaatgatattataagttacttaataaagttggaaaaagataatgtatcaatagctacaatagcgaggatgatatcctctataaaatcttttcatgattatttatttttaaatcatatatgtacaaataatcctgcaaaggatataaaaaaacctaaaataaaaaaagaaaatataaatatacttacagaagaagaaattgaaagactattaaattttccaaagttaacaacgcctaaattgattagggacaaggctatttttgaagtattatatggtactggtataaaagtatctgaattagtagagatgaatatagaggatattgacctagatattgattatatatattgtaattcatgttgtaaaaatcaaagagtgataccactttgtgatattacaaaactttacttagaaaagtatctaaaagaagcaagacctaaaatggctgtagaaggtgaaaaatcattattcgtaagttcattaggtcaaaggtttacacgacaaggtctttggaaagtcataaaaaaatattctaatctagccaatatagataaaaatataaatcctacaatgcttagacattcatttgctattcatttgttaaatgaaggtgctaacattgctgttgtaagtaaaattttaggaaatgttaatttatctagtttgcaagtatatttaaatcatatagataaaaacgtgagaagagaaataaaggagaaacatcctagaaatgatgttgatgtagaattacaaaaagcagaagctaaa

SEQ ID NO: 17066 - DNA, 1245 bp, Clostridium difficile
atggaattaaataaagtagaacttttagctccagcaggtgatttggagagattgaaaatagctataacatatggagcagatgccgtttatataggtggagaaatttttggaatgaggtctgcagcgaagaattttagtaaggaagatatggcagagggagtagcttttgcacatgaaagaggcaagaaagtattcgtaacagtaaatataatacctcataatgaagattttctacaattagaagactatttgttggaactagaagagataggaatagatgcagttataatagctgacccaggagtgcttagtgtcattaaaaaagtaattccgaatatggaaatacatttaagtacacaagcaaatacaaccaattatctaagtgcaaacttctggtacgagcatggaataaaaagagttgtagtggcaagagaattatcttttgatgaaatatctgagataagagcaaaaacacctttagatatggatatagaagcgtttatgcatggtgctatgtgtatttcttattctggcagatgtttaataagcaactatatgactggaagagatgcaaacaaaggttcttgtgctcaatcttgtagatggcaatatcatttggtggaagaaaaaagacctggtgagtattttccaatatacgaagatgaaaggggtacattcttctttaactcaaaagatttatgtatgatagagtatataccagagttaatcaaatctggtataacaagtttaaaaatagaaggtagaatgaagactgcatactatgtagctactgttgtaagagcatacagaatggcaatagatgaattttacagagacccagaaaactggaagttcaatccaatgtggatggaagaactaaaaaaaggtagtcatagacattttacatcaggtttttacttgaataaaccaacaacagaagaccaaaattatcaatcagcatcatatgttagaaactatgattttataggtatagttagagaaacagaagatgaagatggtcttattgttgttgagcaaagaaataaaatgtgtgttggtgatgaaatagaagttatgggaccatataaagaaactatgtttactaaaattgaagaaatgtacaatgaagaaggagaagctatagaatcagctcctcatcctagacaaatagtgaagttaaagctatcagtaaaagttggtaaagattatatgcttagaaaagttatagaagaaaaggttgaagaa

SEQ ID NO: 17067 - DNA, 915 bp, Clostridium difficile
atgaaaaatataaaaatgggaatgataggtcttggctccatagctcaaaaggcgtatttacctatattaactaagtctgagagatttgagtttgtaggagcttttactccaaataaagttaaaagggaaaaaatttgtagtgattatagaatcatgccattcgattctattgagtccctagctaaaaaatgtgattgtatttttctacatagctctacagaaacacactatgaaattataaaaatattattaaatttaggtgttcatgtatatgtagacaaacctcttgcttcaacagtaagtcaaggagaagaacttatcgagttaagtacgaaaaaaaacttaaatttaatggttggattcaaccgtagattctgtcctatgtacaaagaaattaaaaataatgctacagaaattgtatctatcaatatatgtaaacatggattaaattccttaagaaatgttagattcgacagtactcttatagatgactatatacatgttattgacactgctttatggttagcaaatgaagatgttgaaattagtggagaggatttatttttaacagacaataagaatcttatatttgtaagtcataaacttaaaggtaaaaatttctctataaacacctctatgcatagagattctggaacaaagttagaacaagttgaaattctttcaaagggtaagattcaaagagttaagaatcttaatgtactggaaatagaagaaggtggaaacctaactttaaagcaaagtggtgcatgggtaaatatattaaaacaaaagggttttgaggatatatcaaatcattttattgattgtatagaaaataatataaaaccagctattaatggagaagagtgtatcaaagctcaaagattactagagaaaattataaattcagtaaaa

SEQ ID NO: 17068 - DNA, 705 bp, Clostridium difficile
gtgatttatctgaaaaagtcatttaattcaaccattaaggtaaaagagatggcaccagaggaaagacccagagaaaagatgcttgccaaaggcgtaaaaagcttatcaaatgctgagttgttggctatacttttaagaactggcaacaagaataaaaatgctattgaattagccaactatataataaatagagatattcagggtattagacatttagaagatatgacaatagaggagctgtgtaatatagatggaattgggttatcaaaatcaacccaaattaaagcagctttagaactaggctctagagtagctagttttaaacctataaagtataaaataatgaatccttgggatatacagaggtattatatggatagcctaaggtatttaaaaaaagaggtttttaaagcggttcttttaaacacaaaaaatgagataatatctgatgtagatgtatctatagggactttaagctcgtcattagtccatccaagagaggtttttaaagaagctataagaagaagtgcaagtaagataatagtgatgcataatcacccttcaggaagtgtagaaccatcaagagaagataaaaatatcacatcaagacttattaaatgtggagaaataattggaatagaaataatagaccatataattattggagatggattatactttagctttaaagaaaatatgataatt

SEQ ID NO: 17069 - DNA, 1059 bp, Clostridium difficile
atggctaaggaaaaaaagaaagaaaaaaaaggtttttttagttttaataagatgacaaaggatatgggaatagatttagggactgcaaatacattagtttacataaaaggacaaggtattgttgttagagaaccatcagttgtcgcaataagagatgatagtaaagaggtattagcagtaggtgaagaagccaaaaaaatgataggtagaacaccaggaaatatagtagctataagacctatgaaagatggagtaatagctgattttgacataactcaatcaatgattagctattttatacaaaaagcggctgataaaaaaggtgttgtaagtccaagaatagctatatgtgttccttttggagttacagaagtagaaaagagagctatagaagaggctgcaagacaagcaggagctaaagatgcattccttatagaagagccaatggcagcggctataggggctggattaaaagttgaagaaccagaaggtaatatggtagttgatattggtggaggtacttcagaaatagctgtaatatctttaggaggaatcgttactgctaaatctataagaataggtggagacgaatttgacgagtctatagtggcttatgtaaaaaaagaatataatcttatgataggtgaaagaactgctgaaaatgtaaaaattaacataggttctacatttaaagatgatgaagaaataaatatgcaaataagaggtagagatttaatctcaggattacctaaaacaatagaaatatgctctacagaagttagagaagcattaaaagaacctgtaagttcaatagtagatgcaataaaatctacactagaaagaactccaccagaattagcctcagatataatggaaaacggaataatgctaacaggaggaggcgctttgcttagaggtcttgataagcttattacacaggaaactggtatgtctgtacaaatagcagaaacacctcttgattgtgttgcacttggaacaggtaaatctgttgaagaccaagaaatctttgaaaaagtattaatgatgaatactaagaat

SEQ ID NO: 17070 - DNA, 3552 bp, Clostridium difficile
ttgtatttaaaaagactagagttaaagggatttaaatcctttccagtaaaaacagatattatttttaaagaaggaataacagccatagtaggaccaaatgggagtggaaaaagtaatatatctgatgctgtaagatgggtattaggagaacagagtattaagagtcttagaggtgataaactcgaagatgtaatatttgcaggtacagatacaaaaaaacctatgaattattgtgaagtggctcttactattgataattctgaaaatcaattggaattagattttacagaagtaactataagaagaagggcttatagaaatggtgaaagtgaattttttctaaataataaaagttgtagattaaaagatataaaagaagtctttttagatactggtattggaaaagatggttattcaatcatagaacaaggaaaagtagatgaaatattaagtaataatcctttaagcagaagaaaagtttttgatgaagcttgtggcatatcaaaatatagatataaaaaacaggaagcagaaaggaatttaagtaatacaaaggaaaatttagaaagaatagatgatgtatatatagaaattgaaaatcaattaaagcctctttttaatcaacagacaaaggcaaaaaagtacttggaaataagtgaaaaattaaagacacttgaagtaaatagctttataagagaaattgaaggaatagaaaaagaattaagtgaggttaatgaacatcgtaaggttattgaaaaggagctcaatgaaaaagaagaacaaaaaaatgttgtagagaaaaagcaagaagatattaataaagaggtagaggtattacaagatgtaattgaaaaatctgtagattatataaattcaattaaaggagttatatcaaaaaaagaatcccaaataaatttaattaaggaaagaataagaaattttacgaatgaaattagtagaaaaaatttagaaataaaggatataaaagagaagctaaatgaaaataagcaatacataaaagaattagaaagcaataaattatcaggtagtgaagaactatctaccttgcaggaaaatataaaagtattggaaggaagtaaagataaacaaaaaattaagttagaatccctaaataatgagatagaattattgaaagaaagtataattgatatattaaataagaaacaagagtttagtaataagctgtccactttaaacgcaaataaagaaaatatgaatatcagagatgaaaatataaattcagagataacagagttaaacaaaaatattgaaataaaatcatctgaattagatactataaataaagaatttaatatgcaaaatgaaaatttaaagaatgtaaataatagacataaagaattatcaattaatttgcaggattcaattagtgaacacaataaactagaagatgaaatacagaaaagtaaatataatttaaatggatataattcaaagttaaatgtctatatagatatggaaaatcattatgaaggatttaatagaggagtaaaagaagtactaaaaaataaaaatttaaaaggagttcatggagcattaggacagattataaatgtacctgaaaagtatgagaaatctatagaagcagctcttggtgcttatatgcaaaatataataactgataatgagtttagtgctaagtctgcaataaactatctaaaacagaataatttaggtagagtaacatttcttccattaaatataattaaatcaaataaaataagtctaggaaatttaaaagcaaatactaagttcataggaatagcaagtgatttaattacatttgatgaaaagtatagaaatataattgaaaatatacttggaagaacaatacttataaataatatagatgagggcataaaatttgcaaaagaaactggtcataggtttaaaatagtaactttagatggtgaaatcttaaatccaggaggttctttgactgggggaagtctaaaaactaatgggaatatactatcgagaaaaagatacattaatgaatatacagaaaagataagtaatatcaagaatgaaatttcacatctagaattaaaaagagaatctttagacaaagatgtgaaaaatatcaaaaatgaaattgattcacatgaaagtaaaataaaagatttagaaaaaagtataataataaaaagtacaagtataaagaatgttgagtctgaaattgaatcgttaaaaggtagtattactaaattagaaaatgagaagaatgatttaaattctaatctaaattatacacttgaaaaaagtgatgatgttagaaaagatatggaagagttagatgatttatacaataaaaataaagaaaaaattgatgcattgaatgaggaaataaaaagatacaatgatttatatgataaagaaaaatctgaatttgatgaattgaacttaagtttagtgaagaaaacagaagtttacaatagtatagttagagatataaaaagaatatctggtgaaaattgtgagttagaagaaaaaaataaacaattagaagagtcattaaattatgaagaacatgaaataattaaattacaagattctatactcactgaagaaaaagaaaaagaaaatttaacaaaacaactaggggatagtaatagaaatcttgaaactagaaaaatagcaaaagatgatttaaaaaatagttttgatgaaattaataaagaattaaaaactatagatagacagcatatagaacttaaagaaagtttatttaaagttggtggaagattagaaagattaaaaactagtcaagacacatatataaataagttgtttgagcaatatgatatgaccttagtacaagcattggaaattaaagatgaagatttggatatagatagaaaattcttagaaagtctaaagagagaaataagaagtcttggaaatataaatatagactctataaaggaatatgaggaaataaaagaaagatacgatttttatagcgaacaaaagcaagatttagaagagtctatggaagagatagaaaaacttatacatactttagaagaaaatatgaaatctgaatttgaaattaagtttgaagaaataagtaaaaattttaaatatgtatataagagattatttggtggaggttgtggagaattaactattttagataaagaaaatttattagaaagtgatatactaataacagctcaacccccaggtaaaaaaatgaaaaatttaaacctattatctggtggagagaaagctttaacggcaataagtatattatttgctatattgattacaaagccaacaccattttgtatattagatgagattgaagcgccacttgatgacgcaaatatatttagatttggagaatttttgaaggatttatctaaagagactcaatttatatcagtaactcataggagaggaactatggaagctgctgattatatctacggagttacaatgcaagaaaaagccatttcaaaagttattagtttaaaattaaaagaagctcaggaaataacagatattata

SEQ ID NO: 17071 - DNA, 1278 bp, Clostridium difficile
gtgttaaaaaaattatttggttttggaaaagacaaggaaaaggaaatagaaaaaaaagatgctgaagaagaaatagaagttgaagacagtgttgataatttagaaaacttggaagaaactattttttcaggacttgaagaagaagtgatagataaagtggaagatgttgaagaaaaaaatgaggaaagtgtcaatgatgaaggcactgaagaaatcgaaaactttgaaaaaatagaagttgagatggatagtaatggaaaagaagtagaaaatatttcaaataatgattctcaagaagagataatcgaagaattagaaaattatgatgaaattgagtctaaagagatagaagataaagaagataagaaagttaacttgtttgaaagactaaaacaaggattgacaaaagcaaagcaaggaataactgatagaatagatgaagttttaaaatcatatacaaagatagatgaagaattacttgaagatttagaggaaattttaataacagcagatgttggtgtaaatacaactatggatataattgaaagactaagagataaaataaagcaaaaaggtattactgaaccaataaaggtaagagaagaacttaaatctatagttgaagatattcttacaaatgaaaactctacactagatatagaaccagcaccatgtataatattaatggtgggtgtaaatggggtcggtaagactactacaataggtaaactagcaaatagatacaaaaaagatggtaaaaaagttttattagcagcagcagatacatttagagcagcagcgacagagcaattagaaatttgggcaaatagaaccaatgtagacataataatacatcaagagggagcagactctggagctgtagtatttgatgctataaaagctgcaaaagctagaaaaacagatgtattaatatgtgatacagcaggaagattacacaataaggctaatcttatgtatgaacttggaaaagtatttaaaatagtagatagagaatttccagaagcaaaacgtgaagtacttcttgtggtggatgctacaacaggtcaaaatgcagttgttcaagcaaagacatttaaagaagttgcagatataacaggtatagtacttacaaaacttgatggaactgcaaaaggtggagtagtccttgcagtaaaatcagaagtagatgtacctgtaaaacttattggagttggagaaagtgtagaagacctacaagatttcaatgcaaaatcattttcagatgcattatttggtaac

SEQ ID NO: 17072 - DNA, 2235 bp, Clostridium difficile
ttgaaatataataatacatctgaaataaatccactagattatatattgggtcaagaaagagctgtagaagctatggaattagggttgaaaataaataatccagcgtacaacatatatatagctggtgaacctggaactggtaaaagtacttatgccttaaaggttttaaatgagtatgcatccaaaaaaaatacgcataaagattggtgttatatatataattttgaaaaccctagagagcctattatagttgaattagaaaaggggtttggaagagaacttaagaaagatatggagaaattaattgaaagtcttttagaagattttaaaaatgcgtttgaaagtgaaaattttgaaatagaaaaaaataaacttctggatgaatatgaaatagaaaaagatatgcttttgaagcaaattaagaaatatggagaagaaaaaggatttaaattaaaacagagtaaaatgggaatagtttttatccctttgaaagaagaggaagatgaaagtgatgagtctgatgaagagttttacaaagctaaaagagaactagaaaatatggcgatacaggtcgtatataaaattagaaacttagaagaaatagctgaaaaagcagtgttagagcttgaagaagagatagctaaacttgtagtagaacctcatatcaagagattgtgtgaaaaatatgaaaattatgataagattcaaacttatctggaaaatataaagaaagatataatagaatatatgtatttattctatttagatgaagaggagttaaaagataagtatgataaagagcattttattaaatataaaattaacctatttgtagacaatggaagctcaaagaataaagaatcagcacctgttgtagtagagataaacccaagtccagcaaatctatttggaaaggcagagtatgattatgcaaatggaaatataaagactgatttcacaaaactattatcaggagcatttcatagggctaatggtggttatttagtactttatgcagaccaattactaaaatatacaatgtcttgggaaattcttaaaaagactttgcagactaaaaaagtaatattggaaacacaaacagcaattaaaccagaaaatatgccattggatgttaaattagtactgattggaagccactatatatatgatattttatatagatatgatgaagattttgaaaaatattttaaagtatttgtagactttgatagtgaaatggataaaaatgaagataatgaagaaggaatagcaagatttatagcataccaatgtgataagaataatttaaggcattttactaaatcagcagttgaagaggttattaaatttagcactagattatctggtgatttagaaaaattatcaactaagtttaataaaataatggaagttgtaatagaaggaagtgcttatgcagagtttagaaattcggagtatacagagcagtgtgatgttaaaaaagcaataagtgaaaagagaaaaagaatcaatagagtggaaacacatatggatgaatcaattgaaaatggatttactctaatagaaacagagggaagaaaagtaggagtgataaatggtttgtcagtcttaagtacaggagaatactcttttggtagagcttcaaggattacagcgaccactagcccaggaagtaaaggcatagtaaatatagaaagagaagtaaatatgagtggctctatacataacaaaggagtacttatattaggtggctatctttctgagaattttgcacaggatttactattgtcactaaatgcatatgtttgttttgaacaaaattatggtggaatagatggagatagtgcatcttctgcagaattatatgtactattatcatctcttagtggagtatcaattaaacaaaatattgctgttacaggttctataaatcaaaagggtgatatacaagtagttggtggtataagtgaaaagatagaaggattttattctatatgtaaaactaaagggttaaatggtgagcaaggcgtcataattcctagaaaaaatcaaagaaatctcgttttatcagatgaagttaatgatgcagtgcgagatggaaaatttaagatatatactgttgaaagagtagaagaggctatagagatattgacagatgttaaatttgaagaaataaagaaattggtaaaagaaaaattaatatctttcagcaagatacaaactgtgtcaaaagaa

SEQ ID NO: 17073 - DNA, 318 bp, Clostridium difficile
gtgtatttaatgtacgctatagtaaagactggtggaaagcaatataaagtttctgaaggtgatgtattattcgttgaaaaattagaagctaacgcaggtgatgttgttactttaaacgaagtattagcttgctctaaagatggagaattaaaattaggttctccagtagtagaaggagcatctgttcaagctaaagttgttgaacaaggtaaagctaagaaagttatagttttcaagtataaagcaaaaaaagattacagaagaaaacaaggacatcgtcaatcatacactaagatagttgtagaaaaaataaacgct

SEQ ID NO: 17074 - DNA, 288 bp, Clostridium difficile
atgttaaacatgaatttacaattattagcatctaaaaaaggggtaggttcttctaaaaatggtagagattctatatctaaaagattaggtgttaagagattcgatggtcaattagtaactgctggaagtataatagttagacaaagaggaactaaaatacatccaggaactaatgttggaaaaggtagtgatgatactttatttgcattagttgatggtactgttaaattcgaaagaaaagacaagaagagaaaaaaagttagtatatatccagtagcaatagctgag

SEQ ID NO: 17075 - DNA, 1479 bp, Clostridium difficile
atgtattattcaagtacgagaggcaccgaagaaaaagtaactgcatcacaagcaataataaaaggaatatcaaatgatggtggtctttatgttccaagtgaatttcccaatgtaaaaaatgaacttataaatttagtaaatttaacgtattctcagatagcattttttgtacttagtaaatttttatgtgattttactgaagatgaaattaaaaattgtatagaaaatgcatatgatgaaaagtttgattgtagtagtatagctccattaaataaagtaaatgatacttatttcttagaactatatcacggtccaactttagcatttaaagatatggcacttactataatgcctcatcttcttaaaacatctataaagaaagataatttagagaaagatgttgtgattcttactgctacatctggagatacaggtaaagctgcacttgagggatttaaagatatagataaaataaagataattgtattcttcccagaagatggtgtaagcccagtacaaaaacttcaaatgaaaactcaaactggaaaaaatacatatgtagttggtataaaaggaaattttgatgatgcacaatcaggtgtaaagaagattttttctgataaagaatttaatcaaaaactattggataataattatatattatcttctgcaaattcaattaatataggaagacttcttccacaagttgcatactatttttattcatatatgaaattagttagcaatagtgatataaatttaaatgataaaataaattttgttgtcccaactggtaattttggtaatattctagctggatattatgccaaacaaatgggtcttccaataaacaaattgatatgtgcatcaaatgataataatgttctttatgatttctttaaaactggtgtatatgataaaaatagaacattgaaattaactacttctccttctatggatatattaatttcaagtaatttagaacgattactgtttgaaatatcaaatagaaatactgatattgtaaataagcttttatcagaccttagtgataaaggagtctacaaaataagtgatgatatggaaaaaaatttagcctcattctatggagaatattcaaatgaagaagaagttaaaagcacgataaacaatgtgtttaaaaattataattatttgatagatactcatactgctgttgcatacaattgttatgaaaaatataaaaaagaaacttctgataacacaaaaactgttattgtaagtactgcaagtccattcaagttttctgaagatgttctaaagtctatagattgtgattttaaagaccttgatgactttgctataattgatagattatcaagtatttctaaaatagatattccaaaacctattaaaaatcttaaaaatgcagaaatactacataaagatatttatgaaaaagatgaattaaaactagctataaaaaaattcttaaaggta

SEQ ID NO: 17076 - DNA, 1005 bp, Clostridium difficile
gtggggaaagatatgagaaatttaggcaatactaacatgaaaataaagagagttggctttgggggcattccaatacaaaggattactcaagatgatactaacttagttataaatgagttagaaaaacaaggaataaactttattgacagtgcaagagggtatacaataagtgaggaagcaatcggaattgccattgaaggaaaaagagataaatttttcttagctactaaaagtatgtccagagattatgattcaatgaagagagatgttgaaataagtttaaataattttaaaactgattttatagatttatatcaattccataatgttaaagaagaggagtatgataatctttttaaagataaaatggcttatagtgcccttttagaggcaaaggagcaaggtaagataaaacatattggtataactagtcacaatttaaatactatagaaaaagctatagaagatggaaaatttgacactatacaattcccttacaatatagttgaaggacaagcagatgaagtgtttaaaaaagctcatgaaaaaggaattgggataatagtaatgaaacctttagctggaggtgctttagacaatgcaacactggctattaaatatatactatctaaagattacatagatgtagttataccaggtatggagagtgttgaacaggttagacaaaatgtcgctgtacttgaaaatcttgtgctagatgaaaaagataataaggaaattgaagaaataagaaattctttaggtaaaaaattctgtagaagatgcgaatattgtatgccttgtgctgtaggaataaatataccattgagttttttatgtgaaggttattatactagatatggattaaaagagtgggctaaagaaaaatatgaggttatggatgttaaacctactgagtgtattgactgtgggctttgcgagagtagatgtccatatgaacttcctataagagaaatgcttaagactgttgttgaaaagctagga

SEQ ID NO: 17077 - DNA, 753 bp, Clostridium difficile
atgttgaaagttataattagtggctataatggaacaatgggaagagttttagcagaatgtgtaaaaaaagataatgaattagagttggtttgtggtgtagctaggtctgctgatgaaaaaggtcatcatagtgatacaaaactttacaaaacaatgactgatgtaactgaaaaaactgatgtaataatagacttttcacatcatgagactttagagccaatattgtcatatgctctaaaaaataatacacctgtagtattagctactactggatatgacgaaaatgacttaaataaaatagaagaagcatcaaaaaacattcctatattattatcatcaaatacatctcttggagtaaatatattaataaaattagttaaggacgcttcaaagatgttagaaggttttgatattgaaatcatagaaaaacatcacaatagaaaagaagatgcccctagtggaactgctactatgatagctaatgcaattagagaagtcttgcctgaaagtgaaaatacacatggtagatatggtagagattgtaaaagaaaaccaaatgaaattggaatacactctataagaggtggcaatataatcagcgaccatgatgttatatttgcaggtgataatgaagttcttacattaagccatcattctcaatctgatgaagtatttgcaaacggttctatagttgcagctaaatttttaattggtaagcaatctggactttataaaatgtcagatatactagga

SEQ ID NO: 17078 - DNA, 288 bp, Clostridium difficile
atgactaatccacatgatgtaataataagaccagttgtaactgagcacagtatggctgaaatgggtgaaaaaaaatacacttttgttgtggctaaagatgcgaacaaaactgaaataaaaaaagcagtagaaaaagtattcggagttagtgttgataaagtaaatactttaaactacgatggaaaagttaaaagaatgggtagaactcaaggaagaacatcaagctttaagaaagcagtagttaaattaactgctgatagtaaagaaatagaattcttccaaggaatg

SEQ ID NO: 17079 - DNA, 699 bp, Clostridium difficile
atgaacgaaaatattttgattgtggatgatgaaaaagaaatagcagatttaattgaagtatatttaaaaaatgaaggttttacagtatacaagttttatacaggtaaggaagctctagaatgtattgaatctaaaaatttggatatggctattttagatattatgcttcctgatattgatggatttcatatttgccagaaaattcgagaaaaatactattatcctatcattatgttaacagctaaaattgaagatatagacaagataatgggtttaaccataggtgctgatgattatataacaaagccatttaaccctttggaagttgttgcaagagtaaagacacaattaagaagatatatgcgatataataattcttatgaacaacagtcgataattgttaatgagtatgatattaaaggattgattatcaataaagaaacacataaatgtagtttatttgggaaagaagtagcattaacaccgattgaattttctattctttggtatttatgtgaacatcaaggaaaagtggttccttctgaagaattgtttgaagctgtatggggagaaaaatatcttgataataataacacagttatggctcatatagggcgattacgtgaaaaaattcatgaaccttctaaaaacccgaaatttataaaaactgtatggggagtaggttatacaattgaaaag

SEQ ID NO: 17080 - DNA, 828 bp, Clostridium difficile
gtgaacgataaattaaaatatttttcttatagtcaaaattcaattaacacatataaatcatgtccattgaaatttaaatataaatatattgatagaataaattggaaaaatgatgatgttggtagtagagagtattatgaaactttaaaaacaggaagagattttcatttgatttgtgaaagatattttagcaatatacctcttggaatctattttaatgaggatgataaaaatagtaaaaagtttttaaagtggatggaaaatataaaaaaagttgttcctattgaaaaaggaaaaacgtatttgccagaatatgaagtaaggatgacattaaatggggatataatacaggcaaagtatgatttagttgtaattggaaataacaatatagaaatatgggattggaaaaccgagtctaaaaagattgactataaacacgtagaaaatagaatacaaactattgtttatatgtttttagcaaaagaagtaatacctaaagttttaaaaatggacataaatgttaaagatataaatatgagatattatcaacctgaatttgatgacttaccaattaccattttatatgatgaagaaaaacatgaagcaaatagaaataaaattcaaaattatataagtatgataaaaaacactaattatgaagaacatacatacgaagacaatctatacaatgatatagaaaaggtatataataaagaagaacgtatgtgctatagaaataaaaagcattgcaagtattgtgaatttaataagttatgtaatggcaaagaaatagattatagtattttggaggcggaaatttatgggact

SEQ ID NO: 17081 - DNA, 366 bp, Clostridium difficile; identical to SEQ ID NO: 16669

SEQ ID NO: 17082 - DNA, 1005 bp, Clostridium difficile
atggttaaagtagctataaatggatttggaagaataggaagattagcattaagaaaaatgatggagcaacaagataagttcgaagttgttgcaataaacgacttaacagacgctaaaatgttagctcatttatttaaatatgatacagctcaaggaagatttaacggagaaatagaagttaaagaaggtgcttttgtagtaaacggaaaagaaataaaagtaacagcagaaagaaatcctgctgacctaccatgggctgaattaggagtagatatagtattagaatgtacaggattctttacatctaaagataaagctgaagctcatatacaagcaggggctaagaaagttgttatatctgcaccagctactggagatttaaaaacaatagtattcaatacaaacagtgacatattagatggttctgaaacagttatatcaggagcttcttgtactactaactgtttagctccaatggctaaagtattaaatgataaatacggtatagaaaaaggattaatgactactatacatgcatacactaatgaccaaaatactttagatggtcctcatccaaaaggtgatttaagaagagctagagctgctgctggaaacatagttccaaacactacaggagctgcaaaagcaataggcttagtaataccttcattaaaaggaaaattagatggggcagcacaaagagtaccagttgtaactggttcaataactgaattagtttgtacattaggaaaaaatgttacagttgaagaaataaatgcagctatgaaagaagcttcaaacgaatctttcggatatactgaagaaatgttagtatcttctgacataatcggaataagctacggttcattatttgacgctactcaaacaaaagttatggaagtagatggaaaacaattagttaaagttgtttcttggtatgataatgaaatgtcttatacttctcaattaataagaactttaggatactttgcacaattagcaaaa

SEQ ID NO: 17083 - DNA, 963 bp, Clostridium difficile
atgaataaaaaagcagcaatagtagcagcaatagctattataggattagtgacagtgtttgcattaggtggaagtaaaaagaatgaatcaaaaacatcagaaaattcaaataataccataaagataactcataacttgggagaaacagatgtaaaattaaatcctaaaaaagtagtagtatttgattattcggctttagatacaatggatgcattaggtgtagctgagaatttagtaggacttccaaaagcgagtttaccagcatctttagaaaaatataaggataagaagtatacagatttaggaggcttaaaagaaccagatttagaaggtataaagtcggcaaatccagatttaattataataaatggaagacaagaagatttttatgagcaattgtcaaaaatagcaccaacaataagtacaagtaaagatgataagaagtacttagaatctgttaaaaataatatagacaaaatagcaaaaatatttggagtagaagaaaaagcaaatcaagaatttagtaaaattgaaaagaaaatagaaactttgaataaaaaagtaacagataaaaatttaaatgctttaactataatggtaaatgaaggtaatttaagtgtatttggtgaagaatcaagatttagtatattatacaatagttttggatttgaaaataaagataaaaatataaaagaatcaagtcatggacaaaatattacttttgaatatatagctaaacaaaatccagaagttatgttcgttatagatagaggaatagctactggcagtgatgtaaaagaaagctcaactgcaaaatctgttttgaacaatgatataataaaatctatggatgcatataagaatgataatataatatatttagattcaccaacatggtatgtaaatgatggtggtctaacatctttaaataaaatgatagatgatgcttcaaaagcggtaaat

SEQ ID NO: 17084 - DNA, 534 bp, Clostridium difficile
atgaatgaaactattaaagaagagattgtagagtggataaaaataattattactgcacttttttttgcatttattataactcgttttataaaaccaacattagtaaatggagaatcaatgtacccaacacttaaatcacatgattatttggtagcaaacaggatgacatataagttatcagaaccaaaatgtggagatataatgatatttaagactgatttattacaagagaatggaaggaaaaaagagcttgtaaaaagggttataggtgttcctggtgaccatctaaaaattaaggattctaaggtttatataaatggtaagttattaaatgaagtttcatatatacatgataattatactgaaggcgatattgatatggtgattcctaagggaaaagtatttgcgatgggagacaatagagaagttagtttagacagtagatataaagaagtgggattagtagatgaagaaaatattaaaggaaaagttattttaagagtatttccttttacagatataggtatttttgag

SEQ ID NO: 17085 - DNA, 1884 bp, Clostridium difficile
gtgttaatgaataaaagaaaatcttttataagaactatagcagtatcaactatggcagtagctgtaactggtagtgctacatgtgcatatgcagctccagttttacaaggaacaaaaacgtatgagaaagtaaatactatagatatatctgtggactcagtagaaaacatagtatattcatttcaagccagtataaaagtacaaggtgaggttgaagtagtagataatgagcagaaagaaaagattacttggtctgataatataaaatctcagataaaaagtggaaatgcaaatgctacttgtagagcagaatacaacaaatcaagtaatacaactacattagatatatacgttacatcaaatgaagatttactagacggaaatagattgaatataggaagaatatctgtaaaaaaatctggcagtaactcaaatgctgactataaagttttaggaaaaggaacaagtgataaaccagctttaaaaattgtaacatataacaacaaaacagtggattatgaaaatataagctctgatgaaggattaatatttacccttattaatgagagtgaagtaaaaccaattggtggaactggttctagtaaaaatgaccctgaaaagtataaggtagagaaaagtgaagcacttgaatatttattaaacaatattaggataaactattctattgttagtaaagaaacacaagaaagtggttcaaatgtaatattaaaacttggattagcacaaaaaacaactaagggaagaaaagctacaataaacaaatatgttgaagttacacttccaaaaagtttagaatacatagttgaaaatgaattatcaaaaccggatgaattaccaccagataatggtagtggtggaaataatggtggaggaagtaattcaggcggctcatctagtggtggaagctctggaggaggaaattcaagtgattctacatctaatgtcacagtcaaaaaattaaaaggtgctgatagatttgagacagctatcaaaatatctcaaagtggttggacaaaatcagatacagttgtaatagtaaatggagaagataaaagtatggtggatgggcttacagctacaccacttgctagtgtaaaaaactcaccgattcttttatcatcaaatgaaaagcttcctcaaaaaactgtagaagaattgaaaaggctaaatccatcaaaagtagttgtgataggtggaaacaactcaatgccaaattcagttgttgaagctatcaaagctgtaaattcaaaaatatcagtacaaagaataggtggagatacaagatatcaaacttctattaatatagcaaaagaaatagataggacgaataatgtgagcaagttgtatataggagcaggaaatggagaagctgattcattatcaatagcatcactggctggtaaagaaaaaactccaatagtacttacacaaaaagatggtgtagataatgaagctgaacaatttattaaatcaaataaggtgtcaaatatatattttattggtggagtagaaaaaatatctaacaaggctattgaacaagttggaaaaatagcaaacaaagatatatcaaacaatagggtggcaggtcaaactagacaagagacgaatgccaaagtaatagataaattctactctcaatctaagctagatggagttgtagttgcaaatcaagacaaacttatagacgctttagcagttggaccattagcagctaaaaacaattcaccagttatacttgctacaaatacgttagataaatcacaagaatcgtcattaaaaggtaaaaattcatcaaagttgtttgaagtaggtggaggaatagcctcatctgtaatagacaagattaagagtttaattgaaaaa

SEQ ID NO: 17086 - DNA, 1992 bp, Clostridium difficile
atgagtaataaacaaacctttaaattaaatatgccagaaataaatttatatataattgttattggtatttctagtataattttgctttattacaacttgtatgtagggtgtttatttttctgtatttttgtatatatggtttttcacaattggagaactactaatattagacgtcatgaatggacagagtatattcaaaatttatctttagatatagatgaaacaactaaaaaagccataataaatcttccaataccattatgtattttagaatttgatggaaatatatcctggtataatggaaagttttatgatatgattggccaaaaagatttacttgataaaaatatagaggatatagttaaaaatcttaatttaagaaaagtattaaatgaaaataaagagatgtacacagaaataaactataaagaaaaagaatatacaataatttataatgttataaaaaatgatcaagaaaaaaatcctaaatatttgatgatattatactggatagacaagactgaatatttaaaagtaaaacaaaattatgatgatgaaaaaaatgcaatgatgctaatacaagtagatggatatgatgaagtattaaaaagtgcagcagaagataagagagctttaattaatgttgaagtagagaaaatactttctgctttagaattaaattcaaatggtgcattgagaagaacttcaaaagacaaattcttcttggtaatgcataaaaaagagttaaaaaaattggaagctgagaagttttctattttagatacaataagacatattgattatggaaataatcttcctgttactataagtataggaattggtatagatggagatacattaaatgagaacctaaaacttgctacgggtgctctcgatttagcacttggtagaggtggtgaccaggctgttgtgaaaacaaaagataaatttgtgttttatggaggaaaatctaaagctgtagaaaagaaaaccaaagtaaaatccagattaataggtcatgctttaagagaggttatacaacaaagtgaccaggtttatataatgggacataaatatcctgatatggatgctatgggagcagcagttggtgtttatgatatatgtaaatcctgtaacaaaactgcaaacatagttttacaatctgtaaatgaatctatagaaatatttataaataaaataaatgaaaataattactataaaaagttgtttattggaaaagaggaagctattgacaactgcactaaaaatacattagttgtagtagttgatactcatagaccaaattatactgaatgtgaagaactgttaaagctatcagagaaggtagtagttatagaccatcatagaagaggtgtagagtttataaatgatgcagtgcttttattccatgagatatatgtatcctcaacatgtgaaatggttacagagttagttcagtatatggatgaagatgtaacaataaataaacttacagctgaagggcttttagcaggtataagtctagatactaaaaactttgcattcaaaacaggtgttagaacttttgaagctgcttcttaccttagaaaagttggagcagatactatagaggtaaagaaattcttcaattctgatgtaaaagatttcataataaaagctgaaataattcaaagtactaaaataattaataatagaatatgtttagcatattcaagtactgagatagatagtataaatgttataatagctcaaactgctgatgagttattaaatatcaaagaagtagaagcttcctttgtattaggtgaaaaagatgatactatatttataagtgcgaggtctttaggacaaataaatgtacatgtacttatggaaaaattaggaggcgggggacacatagatatagctggagcacagttaaaaaatgtttctctaaaagaagcttataagatggtaaataaaataatagaggagtatttggaggaggaagaa

SEQ ID NO: 17087 - DNA, 2505 bp, Clostridium difficile
atgaaagaagacattgggttacatcgaatgtgtaaaaaagaacaagcaacaaagaatgaagttatatcagaggatattctaaaatctatgagtattggggtcagtaaacattttttagatgattcatttacaataatatggggaaatacatcattctatcaattattaggatatacagaagaagaatttttagttaaattttctagcttaaaagattattatgaacagaatctttatcattttgaatctatgaaaaatcattttttagaggcttatcatcatggcgaaaagagtatagaatatcaaatttgtatttcagcaaataatggagaccctgtttgggtaataatgactggtatattaattgaatcacaagataatgagaaatcaatggtctatatattgtattcaaaaattaatgagttaaaaataaagcaagaagaactatctgatatggaaaaagagagtacagagaattttaaatggatgatgtcagagtatgctgggaatgtttatattagcgatatggatacatatgaattactatacttaaataagcactcatgcaatactttacaggcatcagcaaatgaacttattggaagaaaatgttatgaggtaattcaaggtagaacttcgccatgtccgttttgtacaaattcgtatttaaaaaaagatgacacatatgaatgggaattttataataaaaaactgaaacgaacatttataattaaagaccgtatgttgaattggcaagggcgaagagttcgtattgaattatcttatgatatgtatagtgctgaatataaattagcaaaaaaagatcaggaaagagaatcaattttgaaaactattccagcaggaatggttagattagatgcaagagattatcttactatactttggtgtaatgatatatttttgaatatgattgaatatacaaaggaacagtttgcagaggaacttaataatcaatgtggatatttattttctgaagattataaacgtagtaagaaactggcacaagatttgaaggagtctggggataatattgtatttgaagcaaaaatatatacacgttcaagggaagaacgtatatggactgttacattgtgttatatcagtggggaagacagttgggatggaataccatctttttatagtataggtattgacataacaaaggaaagaaaacagattgagaaattacagcatatatcagagaaagatgcattaacaggaatttataatcgtgctgagactgaaaggcagattaagaaatattttgaaaaaaatttaaatgttatgggtgcactgtttatgattgatacagataattttaaacagattaatgatacagaagggcatatgattggagatatagtacttactgagatggcatcaggtatgaaaaaaataatgcgtgacagtgatgttgttggaagaataggtggagatgagtttacaatttttatgaagaatatttcttcagttaaagatgcagaaaagaaagcagaagaactattgtatatgttccgtcatctatttcagaaagaaaaaagttttctaaaagtaacttgcagcataggaatagctatatatccaaaggatggtactacattcaaggaaatatatgcaagagctgataaagcactatatcaagcaaaaaatatgggaaaaaataattatgtaatctacaaccaagattattttaaagaattagaagaatttgattgttcttctcttggtacagttattgattcagaaaaacaatatgctgaatgtcctgataatcttacacgttatatattccgtatgctttatcagactgatgatatagaccaggcgattaatatgatacttgaggttgttgggaaacagtttgatgtaagtcgtgtttatatttttgaaaatacagaagatggtcgatatacttctaatacttatgaatggtgtaatgaaggaatctcttctcaaatggcttatttgcaaaacagcaattatcaagactatgaggattatgaaaagttttttgaggatgaatcagttttttattgtcgagatattcacacattaagtcctaaactagaagaattgttttctagtcaaggtatccactctacacttcaatgtgcatataaagaagatagagttttcagtggatttgttggatttgatgaatgcacaggactacgtctatggtcacaagaggaaataagtacattatcattgatttctcaaattatatcaatgtttttacaacgtaaaaaaaataataaacttaatcaacagattcaacaataccagaatattttagataatattgaccagtgtatttgtgtgattaataaagaaaataattttttattatatgtaaataaaaaatttaaaaatacatattctaaattccaaattggacaaccttattatcttgattctatagatattcataagatatccattatatggaataaaaaagaagcatacctatgcactagcacgatt

SEQ ID NO: 17088 - DNA, 3825 bp, Clostridium difficile
gtgagttctcctaaatggacaaaagagcaattagaagttatagaaagtagagaatgcaatttattggttgctgctgctgctggttcaggaaaaacagccgttctagttgagcgtataattcaaatgataacaagtagagaaaatccaattgatatagataagttattagttgttacatttactaatgctgctgcgtcagaaatgagagagaggataggggatgctataggaaaagccttagatgaaaacccagaaaataaacatttacaaaaccaacttgttttattaaataaatctagtattacaacaatacactcattctgtttggatgttataaaatcaaactttcatagaataaacttagaccctaatttcagaataggagaccaaactgaatgtgctattttgaaacaagaagcaatagaggaagtatttgaagatttatatgaagaaagagatgaggggtttttaaatttagttgaaagttatgcagaaagaggaggagataaagaagtacaagatattatcttgggaatatattcatttgcaatggcttctcctgaacctaaaaaatggttgattgactcagcagaacgatttaatattgatgaaaattttgatttttcacagtctatttgggctagagctatattagacactgtaaaaatagagattaatggtctttgtctaaatatggaaagggcattaaaagaagtggaatcaatagaagaattagaaacttttgcagaaaagttatccgttgaatataaaaaaattgctgacatttcacaagcatgtaataaatcttgggatgaggcatataaaaagatggcaagtatgtcctttgaaaattatgtaaaaggagtaaaaagaatttcaaaagatgctccttcgtatataaaagaatcaaaagaaaaggcaaaaactataagagataagactaagaagtctttagaaagtatagtaagtgctacattcaataaagataatgattctattagagaagaaataaaatatctttataacatagttaaaccaatatctagtgttgtactgagatttgaagaggaatatagcaataagaaaagagaaaaaggaataatagattttaacgatatagagcattttgcattaaatatacttacagatgtagatgaaaaaggtaatattgtaccttctgatatagcagttggatatagaaacaagttttatgaaatatttatagatgaatatcaggatagtaatctagtgcaggaagtactgcttaaagctgttgcaaatacagaaactccaaatagatttatggttggtgatgtaaaacagagtatatatagatttagacaagcaaagccagaattatttttgcaaaaatataataactataatgataaaaagggaagctcccatagaaaaataatgctttacaaaaactttagaagtagagaagaagttgtagatgctgtaaattatatatttgaaaatataatgaatgagaatataggagaaattgaatatacagaaaaagaaagactaaatttaggtgcaaattttaatgtggatacagacgagaaatctattattggtggagcaacggagatacacctaatacaaaaagataataaacttgatgatgatattataaatgataaagacgatagaattaataacaaagaaaatgaaatagaggaagaagaaaaattagataatatacaacttgaggctagaatggttggaaacattatcaaagatttaatgaaagtcaatgaagatggaaaaattcaaaaggtctatgataagggaatagatggatatagacctgtggaatttagagatatagttattcttttaagagctacatctgcatgggctccagtgtttgcagatgaattgatgaatatggatataccaacgtatgctgatgttggagtggggtattttgatacgattgaaataaaaacaatattgtcattacttcaaataatagataatccaatgcaagatatacctcttatatctgtattaaaatcacctatatttggatttacaccagaggatttgattgatattagagttcagagtaaagataaaattttttatgaggttttaaaaagtacagcagagtatgatggatttacagattctcaaaatgaaaatgagtctgagtttataccaagtgaagaatgcataaacaaaagtaaagattttttaattaagctaaaggaatttaaagaaaagtcaatgtacatgagtacagatgaatttatatggtacttgtacacaaggactggatactatgcctatgttggagcattgccaggtggaagtcaaagacaagctaatttaaaagtattgtttgagagagcaaaacaatttgaagaaaccagtcttaaaggaatattcaactttgtaaattttatagagaaattaaaaaaatctagttctgatatgggaagtgcaaaaacacttggtgagaatgcaaatgttgttagaataatgagtattcataaaagtaaaggtctagaatttccagtagtcatatgctctgcaatgggtaaaaatttcaatactcaagattttaaaaagagtattttatatcatcataatttagggtatggacctcaatttgtagactatgagagaaggatttcttttccaagtatagccaaagaagcattaaaaagcaaaataaatatagaaaatttatcagaagagatgagagttttatatgttgcatttacaagagctaaagaaaaattgattataactggttctactagaaatatacaagatagtataaagagatggtcaaatggaattgaaagtttagatacaatatcacaatacgagatattaaaaggtaaaaattttttagattggataatgccttgtgtattaagacatagggatttatctaatctactagaagaagtaggattagacgcagtttttaatgttgaacataattcaaaatggtatggaaagttgtggaataagaatgatattttagtggaaaagaagagtgatgaagaaaaagaaagtattgaagaaattcttgaaaaaatagatgtaaataatcctgacagtgattattacggtgaaatagaagaaaaattaaactatatatatccatatgaatttagtacaagaaaacctgctactatatctgttacagaaataaaaaagatacaaaataattatgaagaagagttaataaatactatatttgaacaaaaagtaatattaaaaaagcctctatttattcaaaatgaagaagaaagagaaaaaataagtggaacagaaagaggtacaatagtccatttagttatggaggttttagacttaaaaaatgtaagtagtgtaaatgatataaaatcacaaataagaggttttgtttcaaaaggtataataacagaaaaacaagctagtatagtaaatccatataaaatatataaattttttgcctctaacataggaaaaagaatgttgaatgctgaaattataaatagagaaaaatccatttatgcacaagtaaatatgaaagacatatatatttatgaaaagcttataaacaatgatgataaaaaactttatgataatgaaagtgtcatgttaagaggtatagttgatgcttattttgaagaagataatcaaatagttttggtggattataaaacagattttgtaaatgaggaaaatataaatcaaataatagagaaatataaaaaacagttggatttatatgcagatattattgaaactttaactggtaagtcagtaaaagagaaatgtatatatttatttggagttgatgaagctgtttgttat

SEQ ID NO: 17089 - DNA, 249 bp, Clostridium difficile
gtgataattatgagattagataaatttttaaaagtatctaggattataaaaagaagaactgttgctaaagatgcatgtgataaagggattgtcactataaatggaaaagttgctaaatcttcttcagaggtgaatattggagatacattagaaatacaatttggagagaagaagatgaagtttaagataaatgaagtaaaagagcatgtattaaaaaatgatgcaaaagaaatgtacgaaattttagaa

SEQ ID NO: 17090 - DNA, 1584 bp, Clostridium difficile
atgaggaggggagtaatttatatgatgaagaaaatacaacgttttggaggggcaatgtttacaccaacactattatttgcttttgctgggataatggttggattctcaattgtatttcaaaatcagtcaattatgggttcacttgctacaccagaaaatatttggtaccaattttggggtgtaatatctagtggagcttggatggtatttaatcaattgccattattatttgctatttctttaccaatagcacttgcaaaaaagcaacaagcaagagcttgtatggaggctttagcaacgtatttgacttttaattattttgtaggttctatgttaagtttttggggaaaaagctttggagttgatttcgcagctgaaataagtgctggaagtggacttgtaagcattgctggtattaaaacattagatactggtatggttggtgctttgttaatatcaggtattgtcatttatattcataatagattttatgataaagaactgccagattttattggattatttagaggctcatcacttgtagttgcaatttgtttctttgttatgataccagttgcattattaacttgttttatttggcctcatattcaaaatgttattagatatttgcaaacgttttttataaatagtggaaatataggagtttggtgttatgcattcttacaaaagattttaataccaactggattacatcattttgtatatgcaccaatttgttatgatagtgttgttgttccgggtggtacatcagtatattgggctactcatattcaggattttcaaacttcagctaagactctaaaggaaatgtatccaatcggattttcattatccggattatcgaaggtgtttggttcattaggtgtatttggtgctttctatgtaactgcaaagccagaaaaaaagaaaaaagtattaggtttaatgattcctgctactcttactgcagtattaactggaattactgagccgttagaatttacatttttatttgtagcaccacttttattcctagtacatgcatttttagatgcatgcttgcaaacgatttcgtttgccctaggagttgttggtgattttggtggaggaattattaactgggttgtattaaattggcttcctcttggaatgtatcactggaaggtatatattgttcaagttgttgtagggattatattttcatttatctggttctttgtatttactttcttaattaagaagtttgatatgaaaactcctggtagagaggaagatagtgaagaaacaaaactatatactaaaaatgaatatttagaaacgaaagatgaaaaaggaaataaattgagtaaagcctctcaacaagcatctgaatacataaaattagttggtggagcagaaaatgttgtagatgttacaaactgtgctacgagattgagattaaccttgaaagatgactcaattatttctaaagaagaagattttaaggcagtaggtgcacatggtttagtgcataatggaaaagctgttcagattattattgggctttcagtaccaagtgtaagagaagaatttgaaaatttatta

SEQ ID NO: 17091 - DNA, 1326 bp, Clostridium difficile
atgattttagtggggaatgggaggctaataagccaagattctttaaatccctatatggaagatggatgtgtagtaataaatgataatctaattgaagatataggtactacagaagaaatgaaagctaaatatccagtacatgaatttatagatgcaggcaagaaaataatcatgccgggtctaataaattcacatatgcatatatacagctcatttgctagaggaatggcagttccaggaaaaccttctgagaactttttagagatactaaacaatttatggtggagacttgacaaacagcttacactggaagatacaaaatacagtgcatatgcaacgtatatagaatgtataaaaaatggtgtaacaacagtttatgaccatcatgcaagtccaaatgcaattgaaggcagtttgtttacaatatcagatgttgcaaaggatttgggaattagaacgtgtctttgttatgaagtgtctgatagagatggtggaaatacaatccaacaaggtatcaatgaaaacgtaaactttataaaatacgctcaaaaagatgatacagacatgataaaaggaatgtttgggcttcatgctgcatttacactatctgatgatacattaaataaatgtgcttcagagatggctggtcttgatacaggttaccatgtacatgttgctgaaggactagcagacttacaatataatgtagataaatatggaaaaagggttttagaaagattcaatgattttggagtactaaaagaaaaaacaatagcagttcattgtatatatataagtgcagaagaaatcagttttttaaataaaacaaatacatttgtagttcataatccagaatctaatatgggaaatgcagttggatgttctcctgcaatagagttattaaaaaggggagttacagtaggattaggaactgatggatatactagcgatatgtttgaatcattaaaagttgccaatataattcacaaacatcacttaaaagacccaagagttggatttgaagaatcacaaacaatgttatttgataacaatagaaaaatagctaaagcttattataaaaatgacctaggagtacttaaaaaaggtgcttatgcagatgttatagtagttgattatataccacatactccattgacagaaaatacaatagggggacacactatttttggaatgagtggaagaagcgtagatacaactattataaatggaaaagtacttatgaaagatagaaagttaataaacatagatgaagaaagtattctagcaaaaagtagagaactaagtcaaaatctatggaatagaatt

SEQ ID NO: 17092 - DNA, 1269 bp, Clostridium difficile
atgttaaaagtattaaaaggaaatataatttttacaaaaacttcagaaactttcacagtatttgaaaatagttatattatactggaaaaaggtaaagtaaagggaatatttaaagagatacctaaggaatacaaaaacctaaaagtagtagattacactgataagcttataatacctggtatgaatgacctccatgcccatgcctctcaatttaaaaatcttggaatggctatggataaagagcttttgccatggcttgaaacttatacatttccagaagaatcaaattataaagatatagaatatgcaacaaaaatgtataaaaaatttgtaaaagaactttggaaatctggaactacaagaatagcagtgtttgcaacagtacataaagaagcctctatgaaacttatggatatattcaaagaagttggtcttggagcatacgttggtaaagtaaatatgaatatgaattgccctgatactttattagaaaacactcaggattctattactgatacagaagaaattataaataagtatagtgatacagattctattgtaaaaccaataataacacctagatttataccaagctgtacaagtgaacttttaaaaggtttaggagatttatgtttaaaatataatattcctattcaatcacacttatctgaaaattatgatgagattgaatgggttagaagtctagaacctgaatctaaattctatggagatgcatataatagatataatttatttggtcaaactcctactttaatggctcattgtgttcattgttctcaggatgaaatagatttaatgagagaaaataatgttatggcagttcactgtccagcttctaactttaatgttggtagtggtgctatgcctatcagaaaattaatcgataataatattagattagcacttggatcagatataagcggtggacatacattgtcaatatttaaagcaatggtatctgcaatacaattatctaaattatattgggttaattctggtaagaagtataatttcttatctttatctgaggctttttatattgcaaccaaaagtggtggaagtttctttggaaaagttggtagctttgaagaaggttatgattttgatgcattgattattgatgattcaaatttaaatcatgacaattattctatacttgaaagacttgaaagatttatctatgttggtgatgatagaaatatcattcatagatatgtatgtggaaaactaattgaagaacctaatata

SEQ ID NO: 17093 - DNA, 219 bp, Clostridium difficile
atgaacagactgaaggatattaagtgtggagagactgtaaaagtcaaaaagttagaaggagaaggagctacacgaagacgtataatggatatggggattacaagaggtgttaatatatttataagaaaagtagctcctcttggtgacccaattgaggtaacagtcagagattatgaactatcaattcgtaagtcagatgcagaaaaaattattgtggaa

SEQ ID NO: 17094 - DNA, 876 bp, Clostridium difficile
atgaattttcaagagatgatactggcgttgcaaaaatactggtcaaagcaaggttgtatcatgatgcaaccttatgatattgaaaaaggtgcaggaactatgaatcctaatacttttttaagatcattaggacctgagccttggcaagtatgttatgtagagccttcaagaagaccagcagatggaagatatggtgaaaacccaaacagactataccaacatcatcaattccaagttatactaaaaccttctccagataatatacaagaattatatttggaaagtttaaaagagattggaattgacccaagtgagcatgacataagatttgttgaagataactgggaagctgctacagttggtgcttggggacttggatgggaagtttggctagatggtatggaaataactcaatttacgtattttcaacaagtaggtaatattgaatgtgagcttgagacaggagaaattacatatggattagaaagattagctatgtacattcaagaagttgatagtgtttatgatttaaaatggaatgataaaataacttatggtgaagtatttaataaagctgagtatgaaaactcaatgtacgcatttgaattatgtgatgcagatatgttgtttaatctgtttgatatatatgaaaaagaagcattaagacttatggaaaatggacttgtaataccttcatatgactatgtgttaaaatgctctcatgcatttaatacattggatgcaagaggtgcaataggagttagtcaaagagcttcatttataggtagagttagaaatatggcaaagactgttgcagaaacttttgtaaaacaaagagaagaaatgggattccctcttttaaaggacggtgacaaa

SEQ ID NO: 17095 - DNA, 1917 bp, Clostridium difficile
atgaaaattatagatttattagatgaaaagtcaattaagttaaatttaaattcaaaaaccaaatcagaagcaatagaagaattagtagatttggtcgcaaatagtggaaatttaaatgataaagaaaactacaaaaaagcaattttggctcgtgaagaaatgagtacaacaggaattggagaaggtgtagctatacctcatgctaaaaattcttcagttactaaagcttgtatagcagcagcagtgtcaaaagaaggtatagattatgaatcgtttgacggaagtttatcaaatctattttttatgatagctgcaccagacggagctaacaatactcatcttgaagtattatcaagattatctacaatacttatggatgaagactttagaaataaacttataaattcaagctctgaaaaagaatttaaggaaataatagataaaaaggaaagagaaaaattcagtgaagaatatcaagatgagaaagttactgaaaaaaatataatagatactaaagagaatgatgctaataagtatcctaaggttttagcagtaacagcatgtccaactggaatagcacatacatttatggcagctgaaagtttaaataaaatggcagaaaacaaaggtgtatcaataaaagtagaaactaatggttcagcaggtgttaaaaataagcttacaaaagatgaaatagaaaatgcaacatgtataatagtggcagcagataaaaatgttgagatggctagatttaatggcaaaaaagtcataaaaactaaggtggctgatggtatacacaaagcggaagaacttatagacaaggctgtaaatggagatgctccaatttaccatggaggagatggaagtcacaacgaatcaaatgaagaaagtgaaagtggatttagaaaagtatacaaacacttaatgaatggtgtatctaatatgttaccatttgttattggtggagggatacttatagcgatagcctttttacttgatgattatactattaacccttcaaactttggttcaaatacacctatagcagctttttttaaaggaataggagataaagcttttggatttatgttacctgtacttgctggatatatagcatactctatatctgatagaccagcgtttgttgtaggatttgtaggaggtgctctagcaggtgatggtggttcaggatttttaggtgcactacttgcaggttttatagcaggttatttagtagaagggcttaagaaaatatttagtgtactaccagcttcattggaaggaataaaaccagtattgttatatcctttacttggaacacttttgatgggaattataatgacatttttagtaatacctccagttacagcaattaataatgcaatggttggatttttaaatggtttaggtggaacttcaaaaatatttttaggattagtattaggtggaatgatggctgtggatatgggtggacctgtaaataaagcagcatatgtatttggagttgcatcacttgaatcagggcagtttgaaataatggcagcagtaatggctggtggtatggttccgccacttgctatagctcttgcaactacattttttaagaatagatttactaaagaagaaagagattctggtaaagttaattatgtaatgggattatcatttgttactgaaggagcgataccttttgcagctggagacccacttcatgttataccagcttgtgttggaggttcagcagtggcaggagcacttagtatgttgttcaacgcagctcttcgtgcacctcatggaggagtatttgttataccagtggttacccatccatttgcatatatattagctatagctgtaggcgctttggttggaatgatgcttttagcattacttaaaaaaccattaaatcaagaagta

SEQ ID NO: 17096 - DNA, 1542 bp, Clostridium difficile
atgaggaatttacaaaaaaaattaatgttttttttatttatttgtataattttacaaattacatacacaacaccagtctattctttatgcaaactctataaaaacaactccataaataactttgagtctattgtgtctaataatcagcttattagcaaacatgcaatacaaataatacttattatggctataatatgtgtaatacttatattctatataatatatgataaattaaattttaaaattaaattgcaaaggatagcatatacagataatcttacaggagcaaatactatagataaatttgtaattgatgctaacaaaatactatgtaaaaatactcaagtaaagtatgctttattatatatagatattgataaatttaaatatataaatgatttatttggatatgaagttgggaatgaaattttgtgtaatttaacaaagattattaagagtaatatatttgaagaggaaatgtttgcaagaatatctgcggataattttattataattatgaaatatatagaagaagaagatataacaaagaggttaaaaactatatttgaagaattagacttgtttaataataatcaagaagaaaaatataagttagttttaagttgtggaatctattttatacttccagaagatagagatatcaactcaatcatagatagggctaatatacctcataaaatggcaaagggaggacataaaagttcatatgcattttatgataataagattcatgaccaagagataaaagaaaaagagatggaaaatacaatgttttcaagtctagaaaataaagaatttattatatacttacaacctaagatagaacttaatacaggagagatacaaggttcagaagcacttgttaggtggaaacgtcctgataaagggctaatacctccaaatgaatttatcccattttttgaaagaaacggttttgttataaatttagatttatatgtgcttgaagaagtatgtatataccttagaaaatggattgatgcaggaataaatccagttactgtttcagttaatgtttcaaggatacatttatattgcaataattttatagaaacatacaaaaatataattgataaatacaatatacctgcaaagtatatagaacttgaattaacggagagtatcatatttgataattttgatattttaattgatataatgaataatttaaaaaaaataggatttttaatatctatggatgattttggttcagggtactcatcattaaatatgttaaaagaaattcctatggatatcttaaaacttgaccaaaaatttattatggaaacttataatagtaaaagaagcaaaataattgttactaaagtaatagaaatggcaaaagagttgggtatgaaagtcatatcagaaggagttgagacagaagaacagtttaaacttttaaaagaagtaaagtgtgatatggcacaaggatatttgtttggaaagccaatgccaattgaagaatttgaacatttaattgtatctaacttggtaagaggg

SEQ ID NO: 17097 - DNA, 2670 bp, Clostridium difficile
atgcataattattttagggaggtttttagtatggagaaaaaagaaaaggtagtagaaaaatcaaatgttgaagtatgtagtcctgaaattgtcaacagtgttgaaacattaagaatgagattagaagaaattagattggcacaaaaagaatttgcaacatttacgcaagaacaggtagataagattttcttagctgcttcaactgcagctaatcaacaaagaatacctctagcaaaaatggcagtggaagagactggtatgggtattgttgaagataaggttataaaaaaccattttgcctcagaatatatctataatgcttataaagatactaaaacttgtggtgtcatagaaaaagatgaagcatttggttttacaagaattgctgagccagtaggtgttttatcagcagttataccaacaactaatcctacatcaactgcaatattcaaatccctaatagcactaaaaactagaaatggtataattttctctcctcatccaagagctaaaaactgtactatagaagcagctagagttgtacatgatgcagcagttaaggcaggagcaccaaaaggacttataggttgggtagatgttccttcgattgaattaactaatgttgtcatggcagaggcagaccttatattagctactggtggacctggaatggttaaatctgcatactcttcaggtaaaccagctgtcggagttgggcctggaaatgtacctgcaataatagatgagagtgcagatataaaaatggctgtaagttcaatcttagtatcaaaatcattcgataatggtatgatatgtgcttccgagcaagctgtaatagtaccagaaaaaatatatgaagaagttaaaaaagaatttaaatatcgtggagcacatttcctaaataaagaagaaactgaaaaagtaggaaaagtagtaataattgatggttcattaaatgccagaatagttggacaaccagcacatgtaatagccaaaatggcggatgtagaagttccaaaaacagctagaataataattggtgaagtagaatctgttgaattaaatgaaccttttgcacatgaaaaactttctcctgtacttgcaatgtacaagtctaaaagttttgaagatgcagttgctaaagcagaaaaattagttgcagatggaggctatggtcatacatcttcattatatgcagactctataaatcatccagagagagtagaaaagtttgtaaatgctatgaagacttgtagagtattagttaatactccatcatcacaaggtggtataggtgatttatataactttaaattggcaccgtctcttactcttggttgtggttcttggggtggaaactcagtatctgaaaacgttggagtaaaacatttgcttaatatcaagacagtagctgaaaggagagagaatatgctttggttcagagcaccagaaaaggtttatttcaaaaaaggatgtttaggtgtagcagcaagagaatttaaggatgttatggataaaaagaaagcatttatagtaacagattctttcctatataataatggatatactaagaaattaactgatttattagatgagatgggaattaagcatactacattctttgatgtagctccagacccaacattagcttgtgcaagagaaggagctaaagctatggctgatttccaaccagatttaataatagctgtaggtggaggaagtgcaatggatgctggtaagataatgtgggtaatgtatgagcatccagaagtagatttccaagacttagctatgagatttatggatataagaaaaagagtatatgtatttcctaagatgggtgaaaaagcgtattttgctgctatcccaacttcagcaggaactggttcagaagtaactccatttgcagttataactgaccaagattcaggtgtaaagtacccattagcagattatgaattaatgccaaacatggctataattgatgctgatatgatgatggagatgccaccaagattaacagcagcatcaggtgttgatgctttaacacatgcattagaagcatatgtatctatgttaagaactgaaccagctgacggtctagcactacaagcaggtaaaataatatttgaatatttacctcgtgcatataaaaatggaaagaatgataaagaagcaagagaaaaaatggcaatggcatctactatggcaggaatgtcttttgcaaatgccttcttagggatatgtcactctttagcacataaattaggtgcattccaccatgttcaacacggtgttgcaaatgcattattaataaatgaagtaatcaagttcaattgtgcagaagctccaaataaaatgggtgcattctcacaatacagatatcctgattgcatacaaagatatgctgaatttgcttcttttgcaggtattaaaggaagtacagaccaagaaaaagtagataatcttataaaagcaatagatgaactaaaggcaaaagtaggtcttcctaagactataaaagaggctggagtagaagaatctaaattcttagaaagattggatgctatggttgaacaagcttttgatgaccaatgtacaggtgctaatcctagatacccattgatgagtgaattaaaagagatatatctaaaagtttattatggtaaa

SEQ ID NO: 17098 - DNA, 1113 bp, Clostridium difficile
atgccctttgataaaattatattatacataatggctgtgggagtgcttttaggagcgttagatagaataattggaaataaatttggacttggcgagcagtttgaagaagggtttaattcaatgggtccattggctttaggaatggttggtatagtttgtttagctccagtaatttcagatgtactaggtcctataataataccaatcttcaatctctgtggagctgacccatctatgtttgcaactattttagcgaatgatatgggagggtatccattggctatggaacttgcacacaataaagaggcaggaatgcttgcaggattggttgtgtcatccatgcttggatgtacattagtattttcaattccagtaggactaggtcttatagaatatgaagacagaccattctttgcaaaagggttactgataggcttgataacaataccttttggaggtattataggaggattaatagcaggatttaacttatcaatggtaattataaatatgataccagtgataatattggcagtaatattggcagtaggtttaaaatttaattctacgcttatgataaatgggtcattagtttttggaaaatttatatctatattgataacgataggtttgggagcagcagcatttcaagaaataacaggtatagtacttataaaaggcatgacacctataagagaaggtattcaagtaattggaagtattgcaatcgtgttattaggtacttttccaatattacatttattagttaaagttcttaataaaccacttacaatagtgggtggaaaattaggtatggatgccactagtgcagcaggattagtttttactttagccaatagtattccagtatataaaatgatgaaagatatgagtccaaaggggaaagtagtaaatactgcttggctggtttgtgctacagcagctttgggggaccatttaggatttacagcaggattagttccagagatgattacacctgttgtaattggaaaattggttggaggagtattggcaattgcacttgctatacttatgacaaaagatttaaccttggaagaagaacaaagtattaaaatgaagaaagatgcagtg

SEQ ID NO: 17099 - DNA, 1269 bp, Clostridium difficile
atgaggagatcaaaaaatatggctaagataatagtaaaaaagagtaatccacttaaaggtagtgttaaaatagatggtgcaaaaaatgcagttttaccaataatagcagcgactttattagcaaacggaaaatcaacattaaatggagtaccaaatttaagagatgttcatgttatatcagatttattaagacatgtaggagcagaagttgaatataaagaaaatacacttactgttgatgcaagcaatataaaaacttgtgaagctccatatgagcttgtaagaaagatgagagcttcttttttggttatgggaccattgcttgctagatttaatagtacgaaaatttctatgccaggaggatgtgctataggaacaagacctatagatttacatttaaaaggatttaaagctttaggtgcaaagatagaaatggaccatggttttgttgaagcagcaacagaaaagttagtaggaaataaattatatttagatttcccatctgttggagcaactgaaaacataatgatggcagcttctttagcagaagggactacaataatagagaatgcagcagaagagccagaaatagtagatttagcaaacttcttgaacgaaatgggagcagatgttaaaggtgcaggtactaatactataaaaataaaaggtgttaaagagttaaaaggagcagaacataatgtaattccagacagaatagaagcagcaacttatatggttgcagcagctatgacaaaaggtgatataactgttgaaaatgttttaatggagcatttaaaaccagttgtagctaaattaagagaagctggttgtgaaataacagaaatggacaattctgtaagagttgtaggtccaaaagtattaaaaccaatagatataaaaactttaccacatccaggatttcctacagatgttcaagcacaatttatggctatgcttactgtagccaatggaactggtgtagttatagaaactgtttttgaaaacagatttatgcatgttgctgaatttaatagaatgggtgctaatataaaaatagatggaagaagtgcggttgttaatggtgtagatgagctacacggtgcagcagtaaacgctactgatttaagagcaggggcagcccttattttatgcggtcttatagcagaaggagaaactcaaataggagaaatataccatatccaaagaggttatgttgatatagataagaagataacagctctaggtggtcaaatcgaaatagtagaagat

SEQ ID NO: 17100 - DNA, 969 bp, Clostridium difficile
ttgaatatgttaagaagaccaagaagactaagagcaagtaaagcaatcagaaatttggtaagagaaactaaggtgaatgtagaagacttaatatatccactgtttgtagtagagggggaaaatataaaagaagaaattaaatctttaccagatgtctatcatttatcaatagatatgctagaagacgaaataaaagaaataagtgagttgggaattgaacatataatgttatttggtgttccagatgaaaaagatgagtgtgcttcacaagcttttaatgataatggaatagttcaaaaggcaattagaaaggtaaaagaaataaattcagatataaatgtaataacagatgtctgtatgtgccaatatacaagtcatggacattgtgggattttaactgatactggttatgttgataatgataaatcattggagtatttggctaaaatatctgtaagccatgctaaagcaggagctgatatggttgctccatctgatatgatggatggaagaatacaagcaataagagaagctttagatgaaaatggattagaaaatgttggaatcatggcttatagtgttaagtatgcttcaaattattatggaccttttagagaggcagctcattcagcaccatcttttggagatagaaaaacatatcaaatggacccagcaaatagcaatgaagctataatagagactgaacttgatatattggaaggtgcagatatacttatggttaaacctgcattatcatatttagatattataagaagagttaaagataattttgacttacctctagcagcttataatgtaagtggagaatactctatgcttaagtttgctgtgaaggaaggtttattaaatgaagatgtaattcttgaatcaattacatctataaaaagagcaggagcagatataataataacttattttgctaaagacattgctaaactgttgaaaaaa

SEQ ID NO: 17101 - DNA, 339 bp, Clostridium difficile
atggctaagtaccgtaaattaggacgtgaaacagctcacagaaaccttatgttaagaaacttagtaacttgcttactaagaagtggaagaatagaaactacagtgactagagcgaaagaaactcgtagaatggctgaaaagatgataactcttgctaagagaggagatcttcatgctagaagacaagttttagcttatgttatggatgaaacagtagttaataacttattcacagatttagctccaaaatatgctgagagaaatggtggatacactagaataataaaaatagggccaagaaaaggcgatgctgctgaaatggcttttatagaattagta

SEQ ID NO: 17102 - DNA, 1151 bp, Clostridium difficile
agtgttataattgttgcagcgggaagcggaaggagaatgaacttagatataaacaaacagttcataaaattaagagaaaaagaaattattgctcatacaattcaagttttttatgaaaatataaatatagatgaaatagtggtatgtataaaaaaagaagaagaagatttttttaaagaaaatataataaataagtataactttaaaaatataaaaatagcatatggcggaaaagaaagacaggactcaatatataatggtttaaaaaaattagataaaaattgtgatatagtacttatccatgatggagcaagaccatttgtcgaccatagaataatcaacgaatctataaaggtagctaaagaaaaaaaggctgtggttgtaggtgttccagtaagtgatactataaagatagtgtcagatggaacagtaaaagaaactccagaaagaaatttgctgtgggcagcacaaacccctcaaacctttgaatataatctcataatagatgcttatgaacaagcatataagaacaattattatggtactgatgattcaatgttggtagaaaatataggtcaaagtgtcactatggtaatgggttcttatgaaaacataaaaataactagtccagaagatttaaatatagcagaacaaatattaaatatggaaaaaagagatgaagttaacagtagaaggagaattatatgagaataggattaggatatgatgtacacaaattaacagaggatagaaaacttataatcggtggtgtagagataccacacgataaaggtttgttgggtcattctgatgctgatgtattgatacatgcaataatggattctattttaggtgctctagcattaggagatatagggaagcatttcccagatacagatgaagaatataagggagcagatagtatgaaattattagaacatgtgtataatctaataacaagtaaaggatataaaattggtaatatagacagtactataattgctcaaagccctaagatggctccatatattgagagtatgagaagtaatatatcaaaagttttaaacacagacattgataatataaacataaaggcaacaacagaagaaggtcttggttttacaggagcaaaacagggaatagcttcacaa

SEQ ID NO: 17103 - DNA, 1386 bp, Clostridium difficile
gtgataaatttgtttatagatgatacaattgcagcaatagctacagcacctggagaaggtggtataggtatacttagaataagtggagaaaaagctttgaaggttgcagaagaaatctttaaatctatgtctggaaagagtattgaagaatacaataagagaacattaatatatggaaatatagtggataatgaaaatataattgatgaagttttattagcatatatgaaaggaccaaattcctatacaggagaagatgttatagaaattaattgccatggtggatttatttcggtaaagaagatattagaattaatactatcaaaagatgttagattagcagaggctggtgagtttactaaaagagcattcttaaatggaagaatagatttatctcaagcagaggctgtaattgatgttataaaagccaaaactgatatagctcatgaagttgctcaaaatcaattagagggttctttatcaaagaagataagagaattgagagataaagtcactgagatattagctcatgtagaagttgctatagattatcctgaggaagatattgagcatataacatatcaaactcttaaagaaaaaactgatgaacttaaaaaagacattaaaaaattatatgatacagctgaaagtggaaaaatacttagagaaggcttaaagacggtaattgttgggaaaccaaatgtaggtaaatcttcactacttaattctattttaggagagaatagagcaatagttactgatataccaggaactactagagatgttatagaagagtttgtaaacataaaaggtatacctttaaaaattgttgacacagcaggtataagagatactgatgatattgttgaaaaaataggtgttgaaaagtctaaagaatcatttactagtgcagacttgatagtaatggttttagatgcatctagaaagttgtcagaagaagatatagagatattagaaaaacttaaggataaacaaacaatagtgctgttaaataagaatgatttgaaacaagagattgaagaagaaaaaatacttaaatatgtagaaaataatagtataataaaaatatcagctttacaacaagaaggaatagaagaattgcaagataaaatagagtctatggtatataaaggtagtatcaaaaataattctagtttagtagtaacaaattcaagacataaagatgcacttagtaaagcatataaatctgcaacagatgctttaattgctttggaacaaagtatgccatttgactttgtagaagtcgatttaaaaaatatatgggactatcttggatatattaatggtgatacagtaacagaggatttactagataatatattccataatttctgtattggtaag

SEQ ID NO: 17104 - DNA, 366 bp, Clostridium difficile; identical to SEQ ID NO: 16669

SEQ ID NO: 17105 - DNA, 687 bp, Clostridium difficile
atggcttatgacttttatttagatggagtacaattaccaatacctccgccaaagttagagattaaagttacaaataaaaacaagacagttgatttgataaatactggagaagtaaacatactaaaaaaagaaggattatctgaaataagttttgaagcagaatttacacataataagttgccattctatcgtggagcttttagggatgttcaattctttttaagtaagctagaattactaaaaactgattgtaagccatttcaatttattgtctcgagggaaatgggtggaaaagtactatttaacactaatataaaagtatctcttgaagagtatgctatttcagaagacgcagataatggttcagatacaaaagttgcaataaagttaaagcaatatagagattattcaactaaaaagttagttcttgcccctcctaaaaatgagactggtagacctaatgtaaagatagagccaaaacgagttgattcagtcaatgccacaaacactaaaacatatacagtaaaagcaggggatagtctttggtcaatttgtcagaaacaacttggtaatggttcattatataagaaagtatacgaattaaataaatctatgatggataaggcaaataaggggaagaatttaagtaaatacaccatttataaagggcaggtgttaaaacttggt

SEQ ID NO: 17106 - DNA, 978 bp, Clostridium difficile
gtgatgatacctgtgagtgaaaagacaatagtagaaaatgcctataagggatataatttttctgacatgaacgaattaggacataagaaaatttataaacttagcaatgaaacgggtacaggagaaatgtgttgctataatttaatagatggttttactttgtcttataacaatttaaacatggaatcttcgcatcagaagattaatccttgtaagggtataattcaaattgaccattgtttggatggctgctatgaatttaagttaaaaagtaatgaaagagcattcgtagggaaaggtgattttagtgttgtggatttaggaaaagttccttttgaaagttcgagcatacctatgaaacgatatattggattgactgtatttatagatataaaaattgcccaaagatccatagataaatattttccttttgcaaagatcaatataaaagaaattatggatatgttgtgtaaaaatggtccggcattaataataaaatcaagaaaagaaataaaccatatattaaacgaattatatacggttagtgaggacattcgcatatcatattctattatcaaaatcattgagttgttactttttttaagtcttataaaaacagaagatatgaaaaaaataccaactttttctgaaccaatttatgaagcaacacaagattgctataaggcacttgttgaaaatccatttgataaatattctatttctgaacttgcaaaacagtatgcgatttctgaatccagtttaaagcgttgcttcatgcatttaacaggacaatctattggaagttttataaaaaatacttgtttggaagaatctgcaaagttgctaattgataaaccacatattacgataggggaagttgctgattttgcaggatatttaaatccgagtaaatttgcttctgcttttaaaacttattttggagtttcacctcaacaatataggaaaaataatttgacc

SEQ ID NO: 17107 - DNA, 2031 bp, Clostridium difficile
ttgattacaactaatggattacaagaggagtctaattcatcaaagagacaaattacttatagaataaataaaatcaatgacatgcttaaagtaaaaaatgtaccacttatatgtttaagagccgacaaagatattatcgttagaaaagaaacaaaaaaagcaattaaagaaattttagaaaaaaactattctaagaatacttattattttagtaagacagaaagacttttatatatgtatttaatgctttttattaacatggaggatatttcaattaatcattttataaattctataaaagtaagtaggtctactgtaaatcttgatttcaaagatttgataccagagcttgaaaagaagaacattaaagttaagaacaatcgtataaatggatattacatagttggcaatgagatggaaattaggagagtgcttattaaaaacattatagaaactttgtctaatgagaaaagttcaagagtatttgatatttttattaaagaatataatttagatagttttgaagatgctaaaaaaattatattaaagctaataaaaaaatatgaaattacttttgttgaagatagattagtagaatttatatatatatttatctttctaaaggcaaggatgtattcaactagaatagttactcaggaaaatgtagatattcctaatatttcagttatgagttcaatgaaggagtataaatttgctaaggaattattagaagtatatgggagtgaagataagataaagcctcacaatataatgtatattagtgcttggattttaggtatatcagtaggaaattatgaagaagatacagaagataaggatgtaatttcaaaaattgtaaataaaatgatgacaaagtttggatatttaagcggagtttactatataagtcaagaaaaaatatttaaacaattatattctcattttagacctgcctactatagacttttatttaaattacctatttataatccgatttgtgaaaaagtaaaagaagaatataaattagtttatagaattgtaagtaatgcaatgaaagagttttgcggattatttggagaagaaattcaggaagaagagttagcatatcttacaatgcactttgcaacacttttttcaaataaaaaagaatttgatggttttagaaaaagaatagcattaatagtttgttcaaatggcgttggtagttcagctattttacatgcagaacttacaaacttatttcctgacttacactttataccaatgtcggaatcagttggattagaaaatataagtgaacctgtagatattgtatttactactaattataacacagagggtttaaaaacagatgtaccagtaattaaagtaagccctgttatgaccacaaaagaaaaatataagattacacgtgaagtgtatattcaattaggtgatatttttttaagacaacctaaaatagatgaggttatggatataataaaaaaatatgcaaatgtaacctctgaaagtattctttcaagtgagctattagcttattttacacagatagagaattttacatctaaggaaggagaggggcctatgctaagtgagattactaatgaaacactagtaaaaataaaggtaaaagctaagaattgggaggaagctattagacagtcagcttctgtattagttgaaaataacaaagtaactgaagggtatgtagatgctatgattaactcagcaaaagcatctggaccatacatagtaattacaaaacatgttgcacttccacatgctagaccagaagctgggtcaaaagagattgcaataggcattgctactttagatagtcctattgagtttgggaataacgaaaacgaccctgtaaaatatgtattttgtctaagtgcaatagacaataatagccatttacgtgctatgtctgagctagttgaactattggaagaagatgagttttttaaggttttagatagtgctaaagaagctaaagaaattattgattttataaaaacacacgaatta

SEQ ID NO: 17108 - DNA, 1041 bp, Clostridium difficile
atgaaggggaaattaattttagaagatggaacagtatttgaaggaaaagcatttggatatctaaaggaagctattggagaagttgtatttaatacttcaatggctgggtatggagaactattgacagatgcaacttattatggacaaatagttactatgacttatccacttataggaaactatggaataaatttagaagatgttgaatcaaataaggtgcaagtaaaaggacttattgtaagagaaaaaagtgataacccaaataattttagatgtgaaatggatatagacacatatctaaagcaaaataaggtaataggacttgaaggaatagatacaagagcattaactaaaattattagaaacaatggaactaagagaggaattataactttagaaaatgtatcattacaagatgttcagtctaaattagaagagcattgtaacaaagattcagtaaaaaatgttacaagaaaagaaattgaaaatataaaaggtactggagctaaagttgtagttatagactttggtgttaaaaatagtgtactagagtctcttaaggcttgtaactgtgatataactatagtaccagcaatgactacagtagaagaaattttaaatataaatcctgacttaatcttattatctaatggcccaggaaatccagaggatataaatgatatagttgaaaatataaaaaaattaataggcaaaaagccattgacaggaataggtttaggacatcaaattttagcattggcattaggaggaaagacttcaaagcttgtatttggacatagaggagctaatcacccagttaaatgtttagaaactggaaaggtatttataacttctcaaaatcatggatataatgtttcagaaatgccagaaaatacagaagtaactcacataaatttaaatgacaatactatagaaggaatgagacataaggaattaccaatatatagtgttcagtacattccagaatacacaacaaaagaagatttagattgtatatttaataaattcttagcattaata

SEQ ID NO: 17109 - DNA, 2691 bp, Clostridium difficile
atgaataacgataatgataaaaatggaaataaaatcaggagaaaaaaagttagctcatctggtaatacaaataaaccaattaatagaacttcagctaacaagactcgttcaacaaaaaacaagaaaaaatctaaaaaaagcgataaatttaaaaaactaagagtatttgggatagtatttttagttttactagttgttggtacagcaggtactgctggtctagtatttgcgtcactaagagatgtaactccagttacagaagctgttttagataaacagacgaaccaaacaactactattaaatacgctaatggaaaaacattatctacagctccaagtgtaaataaaaagacacccgttccattagataagatttccccttatcttcaacatgctgtaattgcaatagaagatgagcgtttttatgagcataagggtgtcgatattaaaggtttatttaggtcagtattaaagacccttacaggtactaagcaaggtggtagtactattcctatgcaggtatccaaaatgctgttaacaactgaacagcaaactatacctcgtaaaataaaggatatttactatgcacatgagatgagtaaaacagtaagtaaagataaaatactagaaacttatttaaataacttcttcgttggtagaggtctagcaggtgctgaggctggtgcacgtggttattttgataagtctgcagctgaccttactctagcagagtcagcacttcttgctggttcaactaaaaatccatcaagattttcagcctataaaacttctaagttagagggaaatgaaactaaggaggatttagagaataaattattattttttgttaacacaactgatgatgatttagatgaccctactcaagtggactttgatatgattgaaaaaataaaatcttgggagcttatatctaatgatacttatagacaattaaaagcaggtacattagttgttagaaaggctgtaagtaatcctgaagctaaaaaaagacaagaaattgttttaaagaaaatgttagaattgaaatatataaaacaaagtgaatatgatgaagcaatcaaagctaaaatagaaataaaattgcctcaatcatcagataaagtttcttcatctgtagaagaccttatcgaaagtgaagttataaatgctttaatggaacaaggacatacaaatgatgaagctcaaaacttattctacaatggtggtctaattgtaaacacaactatagaccctaaaatgcaagatgctttagaagaagaatttgatagaaatagcaatttcccaggacatatggtcggtcctgatggagttagccaaccgcaagctgcaatggtaatcttagattataaaaatggtgaaataagagcactagctggaggaagaaatataagtggtagaaaaactttaaatcgtgctactaaccctcatcagccaggttcttctataaaacctttagcaatatatacgccagctattgatactctaaaaataacacaagcaactgctctaagtgattctcgaggaggatataagtttgaagaaaataataaatggaatccaagaactactactgctggtcatggttctatgagtttacgtaaagcacttgctaaatcttcaaacacgatagctgtcaaaactgctgaaatgcttggagactcttatgatgaatgtgtagatataatgatggattacttaaagaactttggtataacaactttaaagaataatcactcaggttcatctgaagcaagtgatagaaaattcccatcattgacactaggtggtatggcgaatggtattactccacttcaaatggctgctgcttatggtacattggcaaatcacggtatttatgtagaaccttctatttttactactataactacctttgatggtcaattattagttaaaaatgctcctgaagaacataaagttgtagaccctgaagtagcttatgttgttacagatatgttagaaagcgtaattactgaaggtattggtggtgttgctacacttccaaagggaatgcctgtagcaggtaaaacaggtactacaaatagtgcatatgatgcttggtttgtcggttacactccttattatgttggtgcaacttatattggagatgatgctggtagaaaagatgattctggtaacactataaaacgtagagaagtaccacatggaagtactagtactgcaaaactatgggaaaaaattatggaaaaaatacatgctaatttaacggttactgaatttgaagttcctaaaaatgtatattttacaaaaattaatttagaggatggaggaaagcaatcttctggctctaaagcagcatttattgaaggtactgctcctactaaagtaagttctcaaccatcatctgaagatacaaaaaaaccagacaataaccaaccagaagaaaataataataacaataataacacaggtgataatggtggcggttctacacctcctgataatggcggaaacaatggtggtggctctactactcctcctgataatggcggaaataatggtggtggctctactactcctcctgataatggcggaaacaatggtggtggctctactactcctcctgatggtggtggaaataatggtggtggctctactactcctcctgatggtggtggaactccagcaact

SEQ ID NO: 17110 - DNA, 1191 bp, Clostridium difficile
atggatactttaaaggaactttttaaaataggaagtggaccttcaagttctcatactatgggaccacaaagagcagcagagagatttaagaatgaaaacccagatgcagaaagttttagagcaatattatatggtagtttggcagccacagggaaaggtcatttaactgactatataattgaaaaaactatagcacctaaaaaagtcgaaattgtttgggaagaagatattataaaagattttcacccaaatgggatgaagtttgaagctttagataaagataaaaatgtaacagctgaatggactgtatattctgtaggtggagggactatagcagaagaaggccaaagaaacagtaaaagcaatagtatatatcacttagatactatggatgagatagtaaaatggtgcaaagaaaataataagactttggtagattttgtgttggaatgtgaaccaaaagacataaaagattatataaaaactataaaagatgctatgagaaaatctattgatgatggactaagtacagatgaaataataccaggcaagttattattaaaaagaagagcaagtacattttataatgcatataaaaaagataagagcttctcaacacttgtatatgcatatgcactagcagcttcagagcaaaacgcttctggtaatataatagttacagcaccaacttgtggttctgctggagtaataccaggaatattctttgcaatgcaggatttctataattatgatgacgaaaaaataattgaagcactacttgtagctggaataataggtaatataataaaaactaacgcttcaatatctggagcagaggtagggtgtcaaggtgaagttggagccgcttgttctatggcagcagcagcagtagcatacttaaaaggtggaactatagaccatattgaatatgcggcagaaatagcacttgaacatcatttaggaatgacttgtgaccctgtatatggatatgttcaaattccatgtatagaaagaaatgcaatggcagctcaaagagcttatgatgcagctaattatgcattattaactgatggctcacattctgtctccttagaccaagttgttgaaacaatgaaagaaactggtatagatatgatggataagtacaaagaaacagctaagggtggacttgctaaacatttcttctcttgc

SEQ ID NO: 17111 - DNA, 2652 bp, Clostridium difficile
atggctcataaagaacaagtaataatagaaaataaaaaagaaaatgaagttatgtcagttggtttagatactgtaaataacgttgaaagcttagttaaaaaactagcaaaaatcagagaagctcaaaaaatatttgctacatatagtcaagagcaggtagataaaatttttttagcagcatctttggcagctaataagcaaagagttcctctagctataatggcacaaaaagaaactggtatgggaattgctgaagataaggttataaagaatcattatgcctcagagtatatatataatgcatataaagaaactaaaacttgtggtgttatagagaaagacgaagcatttggtatgactaaaattgctgaaccaataggtgttattgcagcagttgtacctacaactaatccaacttctactgctatctttaaagcacttttagctttaaaaactagaaatggaataattttctctccacatccaagagcaaaaaattctactatagaggctgcaaaagttgttcttgaggctgctgttttagctggagctcctgaaggtataataggatggatagatgagccatctttagaattaactacaactgttatgaaagaagtggatttgacccttgctacaggaggtcctggaatggttaaatcagcatattcatctggaaaaccagctattggagttggtgcaggtaatactccagcaataattgatgatagtgcagatataaaaactgctgtaaactcaattcttgtatctaagacttttgacaatggtatgatatgtgcttctgaacaatcggttatagtattagaaaatatatacaatgaagtcaaaaaagaatttaaagagcgtggtgcttatttattagataaagatgaaacagaaaaaataagaaatataattttagtaaatggaggattaaattctaaaatagttgggcaaacagcttgtactatagcaaaacttgcaggctttgaagtcccagtagatactaaggttttaataggtgaagtagaatcagttgaaatagaagaagcttttgctcatgagaaactttcaccagtacttgcaatgtacaaggcaagtgattttgatgatgcagttagaaaagcagaaaaattagtagaagatggtggatttgggcatacatcttcattatatattgatgatgtaaatcaaagagaaaaacttgataagtttacttcagccatgaaaacttgtagaattttaattaatactccttcttctcaaggtggtataggggacttatataattttaaactagctccttctcttactttaggatgtgggtcttggggtggaaattcagtatctgaaaatgtaggagttaagcatttacttaatattaaaacagtagctgagaggagagaaaatatgctttggtttagagcaccagaaaaagtttatttcaaaaaaggttgtttaggagtagcattaaaagaacttaaagatgtaatgaataagaagagagcttttattgtaacagatacattcctttacaataatggatatactaaagcagttactgatttattagatgaaatgaatattaagcacactacattctttgaagtagaaccagacccaactttggaatgtgctaagataggcgctaaagctatgagagaatttaatccagatgtaataatatctataggtggaggaagtgcaatggatgcaggaaagataatgtggacattgtatgagcatccagatgtagatttccaagacctagctatgagatttatggatataagaaaaagggtatatacattccctaaaatgggtgaaaaagctaattttgtagctataccaacatcagcaggtactggttcagaagtaacaccatttgctgttataactgaccaagatacaggagtaaaatatccattagcagattatgaactgatgccaaatatggctatagttgattctgatatgatgatgaatatgccaaaaagcttaacatctgcttctggtatagatgctttaactcatgcattagaagcatatgtatctatgcttgcaaccgattatacaaatggattagctttacaagctattaagagtatatttgaatatcttccacgtgcatatgataatggtgcaaaagacccagaagctagagaaaaaatggcaaatgcttctacaatggcaggtatggcttttgcaaatgcatttttgggtgtttgtcactctatggctcataaattaggtgctttccaccatgtaccacatggtgttgcaaatgctcttttgataacagaagttatgaaatttaattcttcagatgcaccaaagaaaatgggagcattctctcaatataaatatccagaagcattaaagagatatgctggaatagcttcatttttaggattaaaaggaaattctgatgaagagaaattccaaagtttattggtagctattgaagatttaaaacttaaagttggtattcctaaatctataaaagagtttggcgttgaagaatctaagtttatggattcaatagatgaaatggtaattcaagcatttgatgaccaatgtacaggagcaaatccaagatatccacttatgaatgaaataaaagatatgtatttaaattcatattatggaaga

SEQ ID NO: 17112 - DNA, 1098 bp, Clostridium difficile
atgaataataaaaaaattgcagttatatttggtggaaactcaacagaatatgatgtatcattacaatcagcttttgcagtacttgagaatttgaatacggaaaaatatgatattctaccaattggaattacaagggagggtaattggtatcattatattggagattataataatatccagaataacacttggtttgaaagggatactgatataattccagttattgtttcgcagaaccgtgtcaaaaatggtattattgaatttttaatttctgatgctgtttctcagaatcatattccaaatagtgctattgaatcatgtgaaaatgatattaaatacactaaacttgattttgtatttcctgtattgcatggaaaaaatggagaagatggaacagtgcaggggttatttgaattggcaggtatacaggttattggatgtggtactctttcttcagcattatgtatggacaaagacaaatcacataaacttgttcattcagaaggtattaaagtaccaaaatcaatattactaaaatactcagataaatttaatgtggctgaactgtcaaaagacttaacttatccattatttataaaacctgtgcgtgcaggttcatcatttggtattagtaaaatttataaaaaagaagagttacaagtagcagtagacttggcttttgaacatgataatgaagtaataattgaggaaaatattgatggttttgaggtagggtgtgcagttttaggaaacaatgacttacttgttggaagagtagatgaaatagaattgtcaaaaggattttttgattatacagaaaaatatacattgaaaagttcaaaaattcatatgccagctagaattgatttggattgtgagaaaagaatacaagagacagcaaaaattatttatagaactcttggatgttctggatttgctagagtagatatgtttttaactccatctggtgaaattatttttaatgaagtcaatacaattcctggctttacttctcatagtcgttatccaaatatgatgaaaggtattggactgtcttttgaagaaatattggacaagataattgaggtgtacataaaa

SEQ ID NO: 17113 - DNA, 911 bp, Clostridium difficile
ttggtgataggaataatagttatgactcatgggagttttagtgaagaaattataaaaagctgtgaacttattgcaggaccagcagaaagaacagcagcaattaaactaaataggaatgataatattgaagacttaaataaaaattttgtagaaaagttaaatgaattagatgaaggtgacggagttttagtattagctgacctattaggaggttcgccaagtaatgttgcaagtttaaaccttaaaaaaggtggcaagtttcatgcacttactggagtaaatcttccaatgctacttgaagctttaattaatagagagggaaaaagtttagaagagttagcagaagcatgtattgaagcaggacaaactggtataaacaatattaataaagttcttagctcaatgtaatagaaaaaggagtttgattaaaaatgtctttagtaaaatattgcagatgtgatgatagattaatacatggtcaagttatatataaatgggttaagcatctaggtgtaaaaaagatagtagtagtagatgatgaaacaaccaatgatgttattgctaaaggtttgataaaaatggcagcaccaaagaatattgatttatcaatattaactgtaagtgaatcaaggagatatttttataataatcaagctgatgataacgtttttgtattaattaaaaatttagatactgcaaatagaatgatagaagaagggattaatatcaaaaaacttattgttggaagaatacctacaggaataggaaaaaagaaaatatctcaaaatgtatacattaataaaaaagagtttcttttaatagatgaatttattaaaaagaatattaatgtatcaattcaaatggtacctgatgaagaagaagtagaattaaaccaaaatattaatcgctat

SEQ ID NO: 17114 - DNA, 468 bp, Clostridium difficile
atgtcattaaatatagtattagtagaaccagaaatacctcaaaatacaggaaatataataagaacctgtgcagcaacaggttcaactttacatttagtaaaaccactgggtttttcattggatgataaacacctaaaaagatgtgggcttgactattgggatatagctgatatacaatattacgatagctttgaagaattacaagaaaagtatccaaatagtaaatactttttttctacaacaaaggctaaacagtcacattcagatgtgaaatatgaagaaaattgttttatagtatttgggaaagaaacaaagggattaccagaacctttgttgaaagcaaatatggatacttgtattagagtgcctatgttggatgttgaaaaagctaggtcattaaatttatcaaattcagttgctattgtagtgtacgaggctttaagacaaataggatacccaaatatgagg

SEQ ID NO: 17115 - DNA, 1089 bp, Clostridium difficile
atgaaattatctaagaagattcaagcattaatcttatttggtgtaatgggtacatctatattaacaggatgtagtagtaaaccaaaagaaaaagaagaagcaaaaactggaaaagatgattatacaataacagtaggttattataattgtgaccatatgactgcgggaccagtagcagaatcggcaggaatatataaagatttaggtcttaatgtaaaaactgttggaaatggtaaagttcctgaagctatggcagcaggaaaaatggatgcaggttacataggaactaaggggttagttggagcaatacctaagggttcgccaataacaatagcagctaacaaccatactggtggttctgaatatttaatagtttcaaaagatataaaagaacctaaagatttaataggtaaaaaaattgcaacagatatgagtgatttcttatggacaagtgattatggtccagaaacaggtctaccaactgacccatcaaaatatgaagttgtaaatatggattcagacaaagataaatatttagctcttaaaactgggaaaattcaagcttttacatcttgtgacccttggggttctgtagctgaaaatgacggtgcaggaaaaataatagcatctactcaatataaagaaaaagctaatggcaaagaatataactgttgttcattctcattaaacaaaaactttataaaagaacatccagatttagcaaaaaaattggttctagcacatacaaaagcaatagaatatatatatacaaatccagctgaagcagctaaaatatttgcaaaatattataatgtagaagaagaagttgcacttagaactatctataagaagactgttggagaaggtagaactcttacttggaaagttacaggtgaagaatataaaaataatttacaaatgtataaagatttaaaggctttagatgatatacctaaatatgaagatacgattgatacaagcttattggactcttgtggagctgatgattttgacaaatttataaaagaaaaagttaacccagagtttcctgaaggtatgagttatgaagactggaaagcaaaggtatta

SEQ ID NO: 17116 - DNA, 735 bp, Clostridium difficile
atgataaaagttttgatttgtgatgatgataagattgtaagagatgatatagcaaatatagctaaagagtctggatatgtagattatgttaaaaaagttaaggatggtatagaggcaattgaatttataaaaaatgagaaaatagatttattgattattgacattgatatgccatataaaaatgggattgattctgctgaagaaattctttctatagataaggatatacatatagtatttgtgacgggtttcgctgattatagtcttgaaagctttaaagtgcatcctatagattttgtagttaaaccatttaaaaaagaaaaaatacttgattcaattaacatagcaatagaccatattaactcccataagattgctaataataattttatagaagacaccctttttgtatataaaataaggaagcagatacatatgattaattttgatgatatagttatgtttgagaaaaattcaagagcaattaatctacacactaaagatgaagatataataaagttttatgagaactttgatgatttaaaaaaacgcctacctcctaatttctttatgacccatagacaatacatagtaaatctaagatttatacataaggttatacctataaataaatcttcattagagataaggtttataaattttcaagaaaatgccatattaaacaaatctctagaaaaagattttttatatagattttatagggttaaaagattc

SEQ ID NO: 17117 - DNA, 513 bp, Clostridium difficile
atgaaagaaaaattaactcattttaaggtaggtcaaatagtaaatacacaaggtttaaaaggtgaagtaagagtttatccacttactgatgatatagagaggtttgatgaattaaaagatttctatctgggaaaagatttaaataataaattggctgttgaaaaagtaagatacaaaggttctatggttataatgaagataaaaggcatagacagcatagagaaagcagaaaaactaaaaaataaatttatgtatgtatctagagaagatagcagagagcttgaagaaggcgaattttttatagcagatatgattggaatggaagttttaactgtagatggaaaatatgtaggaatactagaagatgttcttcaatactcagcaaatgatgtctatgtagtaaaaggtgaggaagataaagaatttatgataccagctataaaaaaatttgtacctacaatagatattgatgaaagaaaaatgattatagaccctattaagggaatgatagat

SEQ ID NO: 17118 - DNA, 4629 bp, Clostridium difficile
atgaagcaaaataaacttttacagcgtggtgcttattttaatgataagaacatattgattgatgattttgataaaagatataatgattatgattttgtagaattttttactggtataagtaatagtacctttggtttaaaatcagatggtaatttatatgcttgtggcgataatacaggttttcaactaggacttggaaaagattcgtcagagagaaggatgtttagtaaagtaaaaattgataatgtaaaatatgtatcttgtggttcaaaacacagtgtagcagtaactaaagatggatttgcatatggagcaggaacaagtaatgtaggtcaattaggtgtaattgagtctacagtatattatgaatttactaagctaccaatagatgatgtaaaaactgttgcatgtggttatgattttacatttgtacttaaaaatgatggaacattatattcagcaggtttaaactcaagtggtcaacttggattaggtgatactaacaatagagttactttcactaaagtaaatatagatagtgtaaaagatgtagtgacttataatcaatctgtattcatcataaaaatggatgggacagcacatgcatgtggattaaattcaaatgggcagttgggaattaatagtactttaaataaaagtgtatttaataaaatagaaggtatggataatgtaaaacagatagcgtgtggtagtagtcatacaattcttattaagaatgatggaactatgtatactacaggttctaatggttatggtcaacttggtacaggaaataataataattcaattgtatttactctttctagtataaataatgttaagtatgcttcttgtggaaataatcatactatgatattaaaatacgataatacactatttagtacaggacaaaacaattatggtcaactagccaatgccaataaagatgtagcatcaagaaatacttttgttaaggttaatgtagaaaatataaaagatattaagtgtggttctcaatttaattttttaataaatggttcaaaggagatatttgtatctggctgtaatttagcaggtcaacttggttcattttttcatacaacttttctgtatgagttttcaaaggtgcaatcttcaaatttagataattattcaggtttattggttaatgatgattatttgtatgttacaaaggataatagtgaatttttaaatgtaaagttaagtgataattttcaggattataagaagatagagttaacagataataatatgtttattgttatgaatgatggtacattgtatgcttgtggtttaaataattatggtcagttaggactgggggatactgttaacaggtcagttatgactaaggtggatatagataatgttttggatataaagggaaatggaaactcaacttttgtacttaagaataatggaactttatattcttgtggatataatagttcaggtatattgggattaaaagataatacaaatagaaatatatttacaaaaattgagatagaaaatattaaggaattttgtgtagaaagtaactatattgtagcattaaatcattcaaaggaattatatgggtggggtaatcaatcttatatagtttatggtgataatagaaactacccttacaaagatactagagttagtaatgtagaaaaaatagctacgtggagtgatactttgtatatattagattcaactggagctactaagactataggatactcttataatggtagtggaggatacccagctcctagttctagttcaacatatagggaaggtgggtatattaataagaatacatcatacagaactttggaattttataatacaagtaaaactaaattagtgaatctatttgctttttataatggctgtgtatttgttgatgaaaatggattagcttattgtataggggaaaataatattaatttcagaggcggttcaacaacaaatgaaaacaatagtctcagatttatcaataattcaggtgtatattatactaatacagacggaacagactatacttgctatcaatggacatataaattaattcgttgttctatttttgatagtccccaaaatattataggaaatagtaaaaacatattatacttatcaaaaaataattctacatttaaatgtacaggaaattgtataacttatggaataaatagtcaaaattggtatagttattttagtgatagcagtaatggtgcaatagcattaggtaatgagtttatactaaaaaattattctggggaatgtttgttaaaagggtatggtaaagctactaatggagaatttggaaattcaactaatataagtagtattagtaattatgatacaggattaaaagatataaaagatataattgtaaaaaataacactgtagtagtagtagataaaaacaacaatatatatgtaacaggagcaaatcaatttaacaaacttggtataggagaatataacaatcaaccaataagaaaattcacaaatataactgaacaatcaaactcatttatatttatggatgatataaaagaaattacaacatcaagaaatacaatgtttatagtaaaaaatgatggaacagcctatgccacaggaaataatagttctggacaattaggattaggtgacacaataaatagaaataagttcactcagataaaccttgataatataaagaaaatatcaacaagtatagatggtaacacaacatttgcaattagaaatgatggaacactatactccacaggattaaataccaaaggacaactgggattaggtgatatagtaaatagaaatacatttaccaaagtaaacatccaaaatgtaagagatgttgttttagggactactcactcgcatgcaatcaaagatgataacacattatattcatgtggagaaaacactcatgggcaactgggcttaggaagcgaaagcaaccatccagacgtattgacatttactgtaaacaatataactaatgtaagagatgtgtactgctcagatacaacaacatttattgtaaaggacacaaacattgcatattgttgtggatacaataataattcacaattaggtatgggaaatactactgaccagtatagttttataaagtgtatggaaaatgtaaaagaagttataccaaatgaaataaatacctatataataacaatctataatactgcatatagtacaggtttaaatactgattattgcttaggtctaaatagtaatagcaatcaaagttcattttctgaaattccaatttcaaatgtagtaaaagtagctccaaacagaaataatgcagtacttttacttacaagtgaaggggatgtatatactgcaggtaaatgtagtaatggttcaggtacaggaagtgagactccagagaagattaaaaaaatagcatcaaaggcaaaggacattggaatgaattatagatgtggacattatgtaagtgataatggagacctatatggtacaggttttaatgattgtgggcaattaggtgttggtaatgtaacaaaaagagatacatttataaaaaccaatacaagagtaaagaaaatacttcctttagaatatgcaaatatagcaataaaagatactaatgatatatatatttgtggattaaataactatggacaattaggtgttggaaatagatacgatagtagaaataatgataatagaatatttaattataagcatatgaattttgtaatgggagatttgacatctattaaaaacagacataactttatacttctaaacaataagatagttatacctaccacaaaagacatagattatggtttagtattaggaaatttatacaaaggagacctttatactgagcttccatatgaagatataaaagaagtatctatttctaagactcatattattatattacttaatgatggaacaatgtatggatgtggtacaaactaccatggagaattattgcaagacttgtctataaatcaagtggatgaatttgtgcagattaatgtatcagatgtaaagcatgtttcatgtggagataactttacttactttataaaatctgatgatagtctttggtctattggtaaaaattccgaatatcaattaggtataggtcacaataatccagttactgaattacaaagaattacaactatatctagctgtaaagaagtacattgtggtaaaaactatacattagtagtaactacaagtaatgaattatttgtacaaggatataatgataagggagctttaggattaggaagcgatagtgaaaatactataattaagttctttacaaaagcactaacagacataagagaaataaaatcttatggaagtgaccatatattagtacttaaaaatgataattcagtatgggttactggaaaaaatagggatgtatataaaattgaacaaccagtagaatttttaaaagaatttactatagtacctatttctgaagatgtaaatacagtaaaggatgtacttgcaacagacaatacattatatattatatcagaagtaggaacgacaaatgctgctatagaaattactgaaaaatcaatttgcatcaat

SEQ ID NO: 17119 - DNA, 1965 bp, Clostridium difficile
atggtaaagataaagtgtgatattaaattttattatcatccaaaatctaaggaggagtctcttatgaaaataaaatttattatagtagcatcaataatatttttaatagtattacttgtggggtgtcaaagtactaaagacacagaaatcaatgtactcgccacaagtgatttacattcaattattccagataatttaatttcctatgtagaagaggagagaaaatatgatgagaatctacttatggtagatgcaggagatttttttgacatgcaaagtggtgagatgaataagtggtttactggtcaaaaattagtaagatttaaagatgggataccagagtacaaaaaaatagctgaaccacgtgaaggagaagttccattggctaaaaaaatggcaaagctgaagtatgatgcagttacatttgggaatcatgaatttgtatctaatgacaagcagagccttgataaattggtttctgattttaaaaataacaatataccattagtatcagcaaacgtatatgaacaatctggagaaaactacgtaaagccatatgtaatgaaaaatataaatactgacaagggaactgtaaaggttggtatacttggtctgactataaaagaagtaggggaacgttcaaggtttaaaagttttgaacaagataaaaaggctagagaacttggggaacaacctcaatacaaagggaaattatatgcaaatgatttagtagaagatgcaaataagtgggtaaaggttatggaaaaaaaagaaaagccagatataatagttgccattgtacactcaggtgaagagccaaaaaatcctaaaaatccaggaaatagaataaaagaactagcaacaactgtagagggaatagatgctattgtagcaggtcatacacatgaaaaaatagaacagcatacatataaaaataattctggtgaagaagtaatagtaacacagcctggagctcatggtaatagtatatcaaagattaattttaagttggataagaagaatgataagtggtttataaaagacaaatatagtgaattaaaggtttttggaaaggaagtaaatataattacaacttctggtctgaatccaaaattttcagatgaaatggcagttaatttgtttaatgaaagagatagagatgttcaacctatatttatagatactggagattttttaaatactaatacaaaagaaatgactaagtgggctaaagagtggcaatacaatgaaaataaaggcatctataaaaaaataaatgaatggccaattgtatatcttggttatgatgctgtagtacttggtagccatgactttacagaggataaagagacttttgaggaaaaaaaatctacattggattatattatagaaaactttgaagaaatgaagataccagtattatcagctaatatatatgatgaatctggagaaaattatgtaaaaccttatataattcataatgtagaaactagggaaggaaatataaaggttggagtattaggtcttactactactgataaggatgaagaagacttaagtaactcaagcttaagcaaagactcaaagacttcgaaaattcctgaagaaacaggaaagttatatactaataatctagtaaaagatgcaagcgaatgggtaaaagttatgcaaaaggaaagtcctgatgtgattgttgcagttgtacattcagataataatagtactctaaaaaatccaagtagtgaagtcaaaaaacttgcaatgtcagtagatggaatagatgctattgttgtaggtcatacgaaaaataaggtagaagaacatatttacaaaaataagtctggggatgaggttatagtaacacaatctggagaggattgttattcaaaaataagtcttgaactaagaaaagaaaatggcaagtggaatatcataaacaaatatagtaaagcaataaaaatgaag

SEQ ID NO: 17120 - DNA, 1011 bp, Clostridium difficile
atgatagtagtattaaaaatgggagcagataaaaatgaagttaaaaaattaattgaggctattgggagagaaggagtagaagttaatcccatagatggaacagaattaactgttttaggtttagttggagatactagtaaaatagatgccaaaagaatagaagcaaataaggtagttgaaaaagttatgcatgtggtagagccttttaaaaaggccaatagaaaatttcatccagaaccttcaatcataaatgttaatggaatggaaattggttcaaagaaaattgctatgatagctgggccttgttctgttgaaacagaagaccaaatagtatctatagctaaagatgtgaaaaaatcaggtgcaggatttttgagaggtggagcattcaaaccaagaacatcaccatacgctttccaaggattgaaatatgatggattggatttattaaaaaaagcaaaagaaaaaacagggcttcctatagttacagaaataatgtcaacacaagatatagatatatttgaagaaaatgtagatgtaattcaagttggagctagaaacatgcaaaactttgatttattaaaagaattaggtaaaacaaataaaacaatacttttaaaaagaggattatctgctacaattgaagagtggctaatgtcagcagagtatataatggctggaggaaatgaaaatgtagttctttgtgaaagaggtataagaacttttgaaacatatactagaaatactttggatttaagtgcaattttagctgtgaagaaacttagtcatttaccagttatagttgacccaagtcatgcagcaggtaaatcatggatggttgactctttatctaaggcagcaattgcagttggagcagatggtctaataatcgaagttcataatgacccagcacatgcactttgtgatggaaaacaatcgattaagccaaatgaatatgatgaattgataagtgaattaaagactatcgcatcagcagttggtagagaaata

SEQ ID NO: 17121 - DNA, 276 bp, Clostridium difficile
gtgaataaagctgaattagtatcaaagatggcagaaaaaagtggattaacaaagaaggaagcagaagctgcgttaaacgcatttatgagttctgttcaagatgcactagtaaataatgaaaaagttcaattagttggatttggaacatttgagacaagagaaagagctgctagacaaggaagaaatccaagagatccagagcaagttatagatataccagcttctaaagcaccagttttcaaagctggaaaaggattaaaggatataataaatgga

SEQ ID NO: 17122 - DNA, 1224 bp, Clostridium difficile
gtgaaacaaaaagtagtggaaagatttttaaaatatgtatcatttgatacaacatctaattctcagtgtgagaactgtccatcttcagaaggtcaaagagttttagctaagtatatagttgaagagctaaaaacaatgggtgttgatgatgtgagtttagatgaaaatagttatataatggctactttaaaaggaaatactgatggtgtggatactataggattcatatcacatttagatacaattgaagatgttagtggaaaagatattaaaccaagaataatagaaaattatgacggaaaagacatagttttaaatgaagcgttaaatgttattacgtatgtaaaggattctccagagttggaagaatttaaaggtgacgatttaatagtcactgatggaacaactctacttgggtctgatgataaagctggtatagctgagatagtgactgcaatagagtatctaataaatcatccagaaattaaacatggagatataaaaataggatttacaccagatgaagaaattggtagaggtgctgatttatttgatgttgaaaaatttggagcaaaatatgcatatactttagatggaggaatagttggagaacttgaatgtgaaaattttaatgctgcaaatgcaactattactatacatggtagaaatgttcatccaggttcagctaaaaataaaatggtaaatgctatacatatagctgctgaaatatcagaaatgttcccagcagatgaaagaccagaaacaacagaaggatatgaaggattttggcatttaaattctataggtggaaatgtcgagaatgtaagtatggcttatattattagagaccattgtaaagaaaaatttgaaaatagaaaatctattatgatagagaatatagaaaaaataaataagaaatacgataatagagtggaattggatttaaaagactcttattacaatatgaaagaaaagattgagccagttatgtttatagttgatatagctaaagaagctatggaggaattaggtataaaaccacgtttagttcctgtaagaggtggtactgatggagcaagattatcttttaatggattaccttgtccaaatatatttactggtggattaaacttccatgggaaaaatgagtgtataccagttagttctatggagaaagctactaaactaattgtaagaatagctgaaaaatatgctgaaagagtt

SEQ ID NO: 17123 - DNA, 1461 bp, Clostridium difficile
gtgaccgatttagttaacaccattaatggaattgtttggtcacccgtattagttgcaatgtgtttgtgtataggattatatttttcattgaaattaaaattttttcaaataagagatgtaaaagaaatgtttactctcttgcttgagggagatagttctcatgttggtatatcatcatttcaaggttttgctacatctatggctggaagaatagggactggaaatatagctggtgtagctgtagcaatagcaatgggaggtccaggagcattagtatggatgtgtataatggctacattaggttcagcaactgcatttgtagaatctactttagctcaaatatataaagatgagcatgatgggcagtatagaggaggacctccatattattttgaaaaaggtcttgggtggaaaaagtgttcagttttattttcaatagttgcaataataagttatacattttttatgcctggtacacaatcaaacactttatatctagcaatgaatcaagcatttggattttcaaaaatgacaatagcagtagcatcttctattgcattagcgataataatttttggaggaattaaaaggattggtttatttgctgaaaaagtagtacctataatgggtggagcatatcttattatgacattagtaataattataacaaatattagtttagttccagaggctattgtaacaatgtttaaatctgcatttggatttggttcagtttttggaggaatgctaggttcagcaatatcttggggagtaaaaagaggtatatactcaaatgaagcaggagaaggttctgggacttatggtgcggcagcagcagaagtaagtcatccagccaaacaaggattagttcaagcattttctgtttatgtagacacattattaatatgtatggctacaggtattatgattgtaataacaggaatgtataatgttacaggtgtttgcacagcactaccaggtgtagaaccgggaccacaatatgtacagagtgcaataaatacattacatccacaattaggtgatatttttatagcaatagttttattattatttacatttacaactttattagccttctcatatatgatggagactaatgtatcttacttagtaactagaattaaagcagaaaaacatgaaaagtacataattaatgtctgtagatttatgcttatagcatgtgcagcaatgtgttgttttatagaaccacttacaagctgggcattaggtgatatatgtataggtgtattaacatatataaatttaattgccatctttacactaaaaaaaccagctataaaggcatattatgattatataagacagaagaagatgggaataaaaaggagtgatagaacttttaaccctatagagttagatataagaaatgctgagttttgggaaaatagatacttaaaagaggataagcatgagttaaat

SEQ ID NO: 17124 - DNA, 366 bp, Clostridium difficile
atgatacaacaagaatcacgtctaagagttgctgataactcaggagctaaagaacttttatgtatacgtgttctaggcggaagtaaaagaagatatggtaacataggcgacgttatagttgctactgttaaaagtgcaacacctggtggagttgtaaaaaaaggtaaggttgttaaagctgttatagtaagaagcaaacaaggcgtaagacgtaatgacggaagctatatatcttttgatgaaaatgctgctgttataataaaggacgataaaactccagtaggaactcgtatattcgggcctgttgctagagagttaagagacaatgaattcatgaaaatagtttctcttgctccagaagtacta

SEQ ID NO: 17125 - DNA, 1905 bp, Clostridium difficile
atgcttgtgtcgaggcaaattgaatttcttaaattgatactaaacgaaaataaatatagacctataaaatactttaaagataaattaaatgtatctgataaaactttacaaaaagatttgaagatgattgagaaatatttagaaacttttaatataaaaattgatataaaaagaggctatggaatattaatagaagatttagcaaagaagaacatagacttaattaatagtttaaatatacaatcgaaggaaaataaatctttatcagtagagcagagaagaatggagattttaaagtatttattactaaattcaaataatataacttcaataaatcagttagcagataaatattatgtaagtaaaacttctatagtaaatgattttaaatatatagaggcatggataaaagaatacaatttaaaacttaataaaactttagaaggaactaagattataggtaaagaagtggatataaggaaatcgattgccaaaatgatggatgatttattagatgaaaattatgaacaacatgatatatctgagttaacaagattagattctgctacatttagtgcattgataaatttatttgatattgattctattatatttgtagaaactataattacagaattagaatacaatttaggatatactataaatcagccctactatataaatttaattacccatatacttatatgtttaaagagaatcgaagaaggtaatcaaatagaatctcaggaagaaagagaaatttctgtagataatttggacgagttagtatataaaaatgtcactacacttatagataaaatagaaaatagatacagagtaaaaataacgaaagatgaacttatgtacatatatatttttttggtatcatctggatttagtagcgaaagtaatagtagttacaatgatgaatcagatagattaagtgaaagtgaaaaagtttcatctataatgatagagaatatgtcacgatttttaaatataaatctcaaaaatgatgacttactacagaaaagtctagcatatcatgtaaggcctatgttaaacagattaagatatgatatccaaataaaaaacccgttgttaggagagatacaagagcgattttcagatgtgctgggattatgtatgatgactataaatattatgacagagtatgataatttgaagaatattagtatagatgaagtctcgtatcttgccacatattttcaagcggcaatagaaagaaatatgagtagtaaaagagtaatagtagtttgtcatacaggatatggaacatctcagctccttgcagccagattaaaaagagaatttcctgaatggactatagttgatatagttcctatgcatcagttgagtaagcgaaatttagatgatgtagactttgtaatatctactgtaaacttagatttgaaagataaattacatatagttgtatcagtactattaatggaaaatgatattaataatataaaaaatgctttactttctaaacctaaaaaaagtatgaacttagatacaaacttattaggaatgtatttagaagataatatatattttaattttgatgtagctcagatggaaagtttaataggtgtgaatttagggagtaaatatgaatctatttcattaggaaaagatttaaatatatatatacataagcaaagtaaattaaataaagggataatgaatatcaataatgttactagaacgattgatatttatttagaaattagtaatcaaagttttttaaagaatattttaatggaaatatcaaatttatataggcaaaagaactatataaactatataatagattgcaagagcaaagaggatattaaaatattatttaagaataatctattggagaaaacaaatggaaat

SEQ ID NO: 17126 - DNA, 1020 bp, Clostridium difficile
atgaataaaaacaattgcttagacttaatttttgaaaaagtagacccttcaagtgttggtatgagttcagaaaagctttcacaacttgaacctttaataatctcacaatatagcaatataaatggtataattattgcaagaaaaggaaaaattgtctttgaaaagtactataatggatataatgctgatgatacttttcatgttgcatcagttacaaaaagtattatatcagccttaataggtattgcaatagataaaggatatataaaagatgttgaccaaaaggttgttgatttttttcctgaatatacttgtagtccttctgaaatatgtaaaaaagcagtaactatacgtcacctacttacaatgactgcaccatacccttttaaaaatatgactgagtctttagaaagactttgcaaacaaaaagattggataaaatataccttgaatcaacttggtcaaaaaggcgaaattggtactttcaaatattcttcagctggaacgcacctactttcagctattataacaaaaactactggaaaatctgctcgtgaatttgctaatgagtacttatttaaacctattggtatgaaagttataccagattatgatatgaaagattttggttttgaagatttctttggaaaaaatcttaagggttgggcaaaagatagacagggttattctataggtggctggggacttacattgagtgctagagatatgttgcgatttggttttctgtatttaaatgatggtatttggaataataaacgtattatatctaaatcgtggattgaagaatcagttaaaatgaatagtaatgaatacggttatctgtggtggctatgtaaaaaagatggtgttttgtggtattcagcaatgggaactggaggaaatgctatttgttgtattccacaatatgacttagtaatagccataccatctaaaatagtgtttaaacctcgtgatagatgggagttcattgaaaaatatatacttacttctataatagat

SEQ ID NO: 17127 - DNA, 1224 bp, Clostridium difficile
ttgaagaaggtagtaataataggtggtggaccagcagggatgatagccgcatcaactgcatgtgagaaaggctatgatgtaacattaattgagaaaaatcataaattaggaaaaaaacttgcaataacaggaaaaggtagatgtaatattactaacgcttgtgaaatagaggaattaatagaaaatgtacctacaaatggaaaatttctttatagtgctttttatacttttacaaatgatgatgtaataagtatgtttaataatcttggagtaaagactaaaacagaaagaggaaaaagggtttttccagagagtgataaagcctttgatattgtaaatgctcttgaaagacaacttaaaagtaagaaagtaaatatattattaaattcaaaagtagaaaaaataatatctaaaaataataaaattgagaaagtaattttaaacgataaaaaagaaattaagtgtgattcagttgtagtagcaactggtggattaagttatccacttactggttctactggtgatggatataaatttgcaatttcacaggggcacacaattatagatacaaaaccatctttaattggtatagaagtacaagaaagttttacaaaagatttagaaaaattatcattgagaaatgttgaaataagggtgtttaatagcaaacaaaagaaagtttatagtgattttggagaacttgaatttactagatttggtttagatggacctataatcaagtctgcaagttgtagaatgaaagatacaaggaaagaaaattacactatattattagatttaaaacctgcattagatgaggaaaaactggataaaagagttcaaaaagattttcagaagtatacaaataaaaaatttgaaaaagcattagatgatttacttccaaaaaaactaatacctataataataaacttaagtgaaattaatccaaatacggttgttcaccaaatttctagagagcagagaaaaaacttagtccatttattaaaaaatttaaagtttacagtaaagagatacagacctattgaagaagctataataacttctggtggtgtaaaagtaaacgaaataaattcaagtacaatggaatcaaaattagtagaaggtttattttttgctggagaagtaatagatatagatgcatatacaggtggattcaatttgcaaatagctttttctactggatatttggcaggttttaattgc

SEQ ID NO: 17128 - DNA, 993 bp, Clostridium difficile
atgtataaagtgacacttataccaggagatggaataggaccagaagttgcgaaagctatgaaaaaggtagtagaagctactggagtagaaatagaatgggaagaagttaatgcaggagaggcagttattgaagagtatggtactccacttcctgaatatattatagatagtataaaaaagaacaaaatagctataaaaggcccaattactactcctgtaggtaaaggatttaggagtgtaaatgtaactttaagacaggcattagatttgtatgtcaatttaagacctattaaaagttttaaggggataaaatcaagatatgaagatgttgatttagtggttgtaagagaaaatacagaagatttatatgctggaatagaacataaaataggtgattatgcagctgaaagtataaagataataacaagaagtgcaagtgaaagaatcgttgattttgcatgtaactatgttaaagataataagagaaaaaaagttacagctatacataaggcaaatataatgaaaatgtctgatggattgtttttagatgtgtttagagaagttgcatcaaaacatggtgtagaatatgatgatttgattgtagatgcagcagctatgaacttagttttaaatccagaaaattatgatgtaatggtaatgccaaatctttatggagatatactatcagatttaggtgctgggcttgttggaggtttaggtataattccaagtgcaaatattggtaaagattgtgcgatatttgaagctgttcatggaagtgctccacaaatagcaggtcaaaataaggctaatccaacagcacttattcaatcatcagtaatgatgcttagatacttaggtgaatatgaaaatgcacaaaaaatagaaacagctttagaaaaagtatttcttgaaggaagtaaattgactgtagatttgggtggctcagcttctactacagagtttgcggatgaggtgtgtaagtatattgta

SEQ ID NO: 17129 - DNA, 1773 bp, Clostridium difficile
atggcattagatggattagttatacattcaatagtcgatgaattatcatcaaaacttacaggtggaaaaatagataagatacatcaacctgaagatgatgaggtaatttttaatataagaaataataaagaaaattttagattggttttaagtgcaagtgcctcaaatcctagagtttatcttacaagtaattatcaaaaagaaaaccctctaaaagcgcctatgttttgtatgttacttagaaaatacatacaaggtggaaatatagtagaaatttctcaaataggttttgaaagaataataaaaataagtgttgaatctttagatgaattaaaagaaaagacagttaaaaatattatgattgaaattatgggaagacatagcaacataataataactcatggtgaagaaaataaaattatagattctataaaaagagtcccttttagcataagtagagttcgtcaagttttacctggtcatgattattcattgccaccagaacaaaacaaactcaaccctcttgatgatatatctaaggatttgtttattaaaaacctagaggaattggaaggacctatctttaagtctatatattctaaatttctaggtataagccctattatagctaaagaaatttgctacagagcaggtgtaaatcaaaatgctatcataaaggatatatctgatgaacaatttgatgctttacacaaagtattttgtaatttattcaatgatataaattctaacaaatactctccttgcattattatagataaaaaggtggatagggtagttgatttcagttgtataaaccttacattatttagcgatttatcatatataaataaggatagtatgtctcgtattctggaagatttctatagaactaaggatattaaagatagaattaatcaacgttcatctgatttaaagaagagtatatctgttaagcttgatagactttataataaacttaaaaaacaagaagaagaattatcagaatccgaaaatgcagatatttataagataaaaggagaattgattacttcatatatttatatggtagaaaaaggtatggaaagtattgaagttgctaacttctatgatgaaaattgtaatgatgtaataatagaattaaataaaaacttgacaccatctgaaaatgctcaaaaatactttaaaaagtataacaaaatgaaacatgctaaagtcgagatatctcatcaaatttccttaaataaggaagaaatagattacttagaaaacataattttaagtattgaaaactgtgaaaatttagctgaattacaagatataaaagaagaacttgctaaagttggatacatcaagactcaaaagaaaaacagtaaaaaggatactatcccatctacaaaacctcatgaatttgtttcttctgatggatttaaaatattggttggtaaaaacaataagcaaaatgactatcttacactaagacttgctgataatgatgacttatggatgcatacaaagaatattcctggttctcatgtaataataaagtgtgctggtaaggaagtccctgataatactgtatttgaaggagctatgctagcagcattctttagtaagtcaaaactttcttctcaggtgcctgtagactatactaagagaaaaaatgtgaaaaaacctagtggttctaaaccaggtatggttatttatgaaactaacagtactatttatgttactcctgaagaagaaacagtagccaagcttaaggttaaatctgaa

SEQ ID NO: 17130 - DNA, 510 bp, Clostridium difficile
atgagtgattttaaagagattttggcagaagagattaaaaataatccatttggattgataggtaaagattggacacttataacagcagaaaatgaaggtaaagtgaatacaatgactgctagctggggagggcttggagttatgtggggaaaagatgttgcttttgtagtaataagaccacagcgttatactaaggaatttatagataatacagataaattttctcttacattttttgatgaagattttcgtaaagagctttcatattgtggaaaggtatctggtagagaagaggataagatatcacagattggatttaatatagaacacttaaatgatacaccttattttaaagaatctaaaatggctattatatgcaaaaaaatgtatagccagaaacttgaacctcaatgttttattgctgaaggtatagatggaagatggtatccacaaaaagattatcatactttatatatagctgaaataaccaatgtacttgtaaaagaagat

SEQ ID NO: 17131 - DNA, 2583 bp, Clostridium difficile
gtggtaaatatgaaagataatttgaaaatagtactaaggtatataaaaagttataaagctaggtctttagcaattgttgtgagtataattcttgctacatcactcgttgttggtattggtaccctctcaagaagtgctcagcaagcagatgtagatagattgaaaagagagcttggaactgaccatgtatactttaaaaatataaagaaaaatcaattaaagtccataaaatctagcaaagatattaaaaatctgggtataacatcttactatgcgtctacagatgttaatgaaaaattacctataaacatactatatgcaaataaaaattatttgactagtcattctaaacttataaaaggtcgatttccaaaagctagcaatgaggtggtagtcgagaaatggattttaaatagtatgggcttaaaaccagagataaatcaaaaccttacttttaaattatatcaaaaagaaaatccagaaacttttaaagttgttggaatccttgaagatagatttatagagaaaaaaatgggacaatgtgaaattttttctaatctcaatgaatcaaaactaagtgattttacaacttatattgaatttaatgaaggcagtgatataaatacaaacatagacaatataataaaaaatgctatgttagatgagaaaagtataggaagaaactcaatgcttatagaatctactatgaaaaacggtactttagataattcaagtaaatacgttgcaattgctatgagtctatttgctggtattgtaatatatagtatctatgttatatcaatataccaaagagtacaggaatatggcgtcttaagagctattggttccaccaactttaggattttcaaacttatgctttatgaacttttcatacttgctctaatagcaatgcctataggtatatgtataggtatggtaggtgcacaaatatttaataggtctgtaggaaatattcaatttgaaggaaatataaatgttacaccttttgttattccagataaaataattctcttatcaattgcatgtacaatactaataatactaattataagtttctttacatacttaaaaataagaagaatttctcctattgatgctatcagaaaaacttttggagctgataaaaatgtaaccaaagttaattatttaatatcaaaattaactttaaatatgtcagtaacaaaatctatatctgcgaaaaacatctttagaaataaaaaggggttcatgataattgtattatctatgagtataggaggtataatcgtcataaaagacaattataaatattcttttttagatgtgcaaaacaaatccgtgcaagaacaaacatatatgaatgcagattttattctatcaaatgtttatctcaatgaaactggtaacaatacttcttttaaagatataaaagggtttagtgatagtcagatagataaaataaaaaatatagatggaattgacaaagtcaaaactgctagtatcttaaacacaagaatagaggtaaataaaataaatcaattagattactacgaagctattaattcaaaaccttattataaactaaatcctctgttcataaaaaataagactactggcaaatatacactaaagcaaaagctaaaaggttataatgatgagatgataaagtcattagaaaaatacttagtaagtggaaatataaacttgaaaaaaatgaaaaaagaaaatttagctattgtatatgtaccagaaatttctaaaacacagaaatacacaaagacttttactcctggtgaagggacaccagctgtagatataaaagtaggtgatactataaaagtcaaatatccaaagggtgggatggatacagggctttatgaaagtctaaaagataattatgaatacttagaatatgaatttaaagttggagctattataagttatacttttgcagataatggtatgtactctggagatgatggtgtagatgtaataacgagtagcgaatacctaaaaaaattaactggtgtagataaatataacttaatttatgcagaccttaatgaaaatgcaaacaagaaaaaaataaataaccttttaggtaaaattggaagtgaagttcctggaactacaacagtagatatgatggtagaaaaagaaaattctgataagatgacatctagaactatgatttatagttatggcatagtagcaataatgttcataatcagtgtacttaacataataaacaacataagttataacttaacttcaagaactagtgaatttggaatgttaagagctattggtatctctgagagagaatttaaaaatatgatactttatgaaggaatattatatggtgtactctcaagtataattactatcgtgtcaggacttataatacaacttaaaatgtattatatgcagggctttatatcacatggattgggattttcaatagattacaaaatatatatactagttgttgtagcaaatataattgtaggtattctagctacatatattccatcaagaaagataaataaaattagtatagttgaagctataaacattacagaa

SEQ ID NO: 17132 - DNA, 663 bp, Clostridium difficile
atggagatggataatatgagaataatattacttggacctccaggtgctggtaaaggtactcaggcggtaggaatagtagaaaaatacaatatacctcatatatcaacaggagatatattcagaaagaatataaaagagggaacagaacttggaaaaaaagctaaagaatacatggaccaaggtttattagtaccagatgagttaactgtaggtttagttactgatagaatatctcaagaagattgtaaaaatggatttatgttagatggatttccaagaaatgtagcacaaggagaacatttagatatcttcttaaaaaatgctggtatatcactagataaagttgtcaatattgaagttgataagagtatattagtgtctagagcagttggtagaagaatatgtaagtcttgtggagctacttaccatgttgagtttaatcctcctaaagtagaaggtgtatgtgatgtatgccaaggagaattatatcaaagagctgatgataatgaagaaactgtatctaagagaatacaagtttatctagatgaaactaagcctttagtagattattatagcaaacaaggtataatagcagatataaaaggtgatcaagcaatagataaagtatttgaagatattgtcgcagccttaggaagtggaaaa

SEQ ID NO: 17133 - DNA, 600 bp, Clostridium difficile
atggaagtatgcattcttatgggaagtcctaagaaaaaaggtaatactgctgctattttaaaaccttttattgaggaattagaaaattataattcaaatattgaagtaatatggttatatgattgtaaaatagagccatgtattgcttgtaaaaaatgtcaggataacttatttgattttggatgttattgtaaagatgatgttcagaaaattttcaagaaaattcttatgtgtgatttaattgtttttgctactccaatttattcttggtactgcacttctccaatgaaagcactacttgacagattggtgtatggaatgaataaatactatggtaatgagaaaggccccgctctatgggcaggaaaaccagtagcacttattacaacatgtggatatagacctgaaaagggtgctgatatttgggaaaatggtatgaagcgctactgtaagcattcacagttaaaatatataggaatgcttgttgaacgtgatttaggtaaacctaattttatgaataaagaaaaagaagaacattctcgtcaatttgcaaaacaaatttattatattttagataattcaattgaagtagataactgc

SEQ ID NO: 17134 - DNA, 486 bp, Clostridium difficile
atgacacttagagaaataactaaaagatatggtgttaagtttataataaatgatagagtggatatagcacttatttgtgatgcagatggagtacatgtaggacagagtgacattgatgttagagaggttagaaagcttataggaaacaataaaattctaggagtatcagcaagaactttagaagaagctatttgtgcaaaaaatgatggcgcagactatttaggtgtcgccttttcaaccatttcttcaattctagctggatgtattcttccatctgctattaatttttctagagcaattcttgcaatttctcttcttattggatcaaatcctgataaaattacggcttctggagtgtcatctattataaggtctatacctgttaaggtttctaaagtccttatatttctaccttccctacctattattctacctttcatttcatcattaggcaagcttactactgttacagtagtttcggctacg

SEQ ID NO: 17135 - DNA, 2058 bp, Clostridium difficile
ttgaaaagagaggtagttatgtcaattttagtaacattgttgggattattggtttgtacaacgatttcaactgtatttagcaaaaagtggagtaatattcctcttgcaatatatcaaattgtactagggattatattgtctattttgccatttaaattctcattttcatttaatccagaaatatttgtaatatgtatcatagctccattactattcagtgaaggacaaaatgtatcgagaaaagagctattagagctcagaaaaccaattttgcttcttgcatttggtttagttttaataaccgtgtttgcaggtggaatctttatacattttcttattcctgggatgccattatctgtttcatttgctttggcagcagtaatatctccaactgatttagtagcagtaaaatcaattacacaaggattaaattttcctaaaaatatgatgagtatacttgaaggtgaatctttattaaatgatgctgctggagtagtagcatttaaggttgcagtacttgccacagttacaggagttttttcaatagaagaggcagggattcaatttatgattacagcttttggaggaataatagtaggaagtattttaggatacataattataaaaataagacttagtttacacaagtggaatttggaagaaattccaatggtaatagttatacaaataatgactccactttttgtatattttgtagcagaagaaataggagtatctggaatcctagctgttgtaatggcagggatagctcatggaattgaaaaagagcatttacaaaatacaactactaaattaaggataatatcagacaatacttggtatgttttggagtatgtattgaatggatttgtctttacactgcttggttttttgttaccaagtatatatacaggacttagtagtaaaaatgaaaatatggcattggaattgacttttatttctactttaattgtacttattttatttgttataagatttatatgggtatatttatggcataattcttttataaaacctaaaaagaatcctttaaataatttttttgtaggttttttaggttttaaggatgaagaagttgtaaaagagagtatttctaaatgtaaatactcactaatagttgctacttgtggtgttcatggtacatttacactagcaactgccttatctatacctttttatttggctgataaagatgtatttccaatgagagatactgttttatttatatcatcagaagttattcttataagtttagtattggcaacagttttactgccaagattattaaaaaataacgtacaagagtcagaacctttattatctgataaagaggcatataaactaattttgaaagaagccattttaaaacttagtaatgaaaaagcacaagaagtacaaccagttatacatgatttaaatgaacagttggtagactcagaaaaaggaatactaaatactccagataataaacttataagtatgatgattgcagaagcagaccaacagggattattagctgttttgaaactattagaagatggtaaaatttctgatagagcctttaaattgtatagattttatattacaaaatcaagaaaatctgttcaaaaatctatatttaaaattgtaaaattaaaaataagcatgtggattataaatagaaaagtaaagaaagaagtaaaagaaaaaattacaaaaatagtatctgagaataaagaaataatcaaagagtttcaccatgcatatgcactttctactaaaactgctatatcatttataaataaaaatactgatgaagataacagacatgaggccttaatagcaatcagattctataatcgttatttgaattggattactagaaagattcaaaatgatgataagtttgaggcaagagtagaatactacagagtaatggcgatacaaagtcaaagagacagtgttcaacaattagttgaaactaagcaaatatcaagagaagtggctaaagagttattggaaaatattctctatgatgaaatgatgatgatagaatca

SEQ ID NO: 17136 - DNA, 1020 bp, Clostridium difficile
atgaaaaatattataaaaataaattctaaaacattacttgttatatcaattttaatggtgcttatttttatcacttttttattgagtttaaatatgggctcattttctatagaaccaatggatgttataaagacttttttagggcagggtcagcgtaatcatgaaattgcaatatttaaattaagattaccaagaatagtaatagcacttttggttggttctgcattatcaacagcaggtgtaatacttcaaggagttacaaagaatgatttagctgattctggaattttgggaataaattcaggtgctgcattgtttgtagtagtttatatatatcttatgaatggtaatgtatatgaaggtatgagtaacttgactgtatttacaatgcctattgttgcacttataggagctttatttggagcatttcttatatattctcttgcatggaaaggtggtataaattcgtcaagattactacttattggtataggtgtaaacatagcttttacttcaattttgacgatattccaattgaaatttacaacacaagaatttaatagggttatggcatggacatcaggaagcatttggggaaccagttggaaatatgtaatagctgtgcttccatttatagtgatttttatgggtataactatttataaatctaaatatatagatgttttaaatttgggtgatgaagtatctataagtcttggtgtagatgtagaaaaacaaagaagaagacttataatatatgcagtaattttatctggtgtatcgacagcagtagcaggtagtatttcatttttaggtttaatagctccacatataggtagaaaaataataggaccaaagcataaaagattaataccagtatcagcattgataggaacattattacttttaatagcagatactatatcaagaaatcttctagcacctatagaaataccagtaggtatagtagtttctataataggagtgccgtactttatttatttaatgttggtaaatgat

SEQ ID NO: 17137 - DNA, 2028 bp, Clostridium difficile
ttgtatacgccaacttgggtggaaccgcgaattaatatcgtcccaaacatatttggggcgattttttattacaaaaaatctaaaaattatttcaataaggaggaaaaaacaatgattaaagttgctttaaaagatggctcaataaaagaatttgaaaatgctatttctgttatggatgtagctaaatccattagtgaaggattagctagaaatgtggtagcagcgtctgtgaacggagaggttgtaggtctggaccacattatagatactgattgtgacttgaatttatttaagtttgaagataaagaaggtaaggaagtttttagacatacatcagcgcatatattagctcaagctataaaaagactttacccagaagcaaagcttgctataggaccaagtatagaaaatggattctactatgatatagatttagaccatagattagttccagaggacctagagaaaatagaagctgaaatgaaaaaaatagctaaagaagatttaaaaatagaaagatttgaacttcctagaaatgaagctttagagcttatgaaagaacaaggagaagactataaggtagaacttatttctgatttacctgaaagtgaaataatatctttctacaagcaaggtgattttactgatttatgtagaggaccacatttaccatctactaaaaaggtaaaagctgttaaattacaaagtgtagcaggtgcatattggcgtggtgacgaaaataataagatgcttcaaagaatatatggaacttcttttgagaaaaacaaagacttagaagagtacttacatttactagaagaagctaaaaagagagaccacagaaaattaggtaaagaattaggattatttatgatacctgaagaaggtccaggattccctatgtttttaccaaaaggtatggaacttaaaaatgaattattaaaattctggagagaaatacacagaaaagctggatatattgagatagaatctccaatcatattaaatagaaaattatgggagacttcaggacactggtatcattacaaagaaaatatgtatacagttaaaatagatgatgaggattatgctataaaacctatgaactgtcctggtggattaatttactataactctcaactacattcatatagagatttcccaatgagagttgcagagcttggtagagttcatagacatgagttatctggtgcattacaaggattaatgagagttagagcatttactcaagacgattcacatatattcatgttaccagagcaaattaaggacgaaataaaaggagtagctaacttaatagatggtatatacaaaacttttggatttgaatataatttagaattatctacaagaccagagaactctatgggaagcgacgaagagtgggaagcagcagaaaatggattaagagaagctttagaagagttaggtctaccatatactattaatgagggtgatggagcattctatggtcctaagatagacttccatctaaaagattgtttaggaagaacttggcaatgtggtactatccaattagatatgcagcttccaagacaatttgataatacttatattggtcaagatggtgaaaagcatagaccagttatgattcatagggttgcttttggtagtatagaaagatttataggtatattaatagagcattatgctggtaaattcccagtttggttatctccaactcaagttaagatacttcctatatctgataaatttatggattatgcaaatgaagttaagaaagagttatttgataagggtataagagttgaattagatgatagagctgaaaaaattggatttaagataagagaagctcagcttgaaaaagtgccatacatgttaatagtaggtgaaaaagaagtagctgataataatgtttctgttagatcaagagataaaggtgaaataggtagtattaaattagatgaatttatagctagtatttcaaaagaaattgaatcaagagaaagtattattcaagac

SEQ ID NO: 17138 - DNA, 267 bp, Clostridium difficile
atggattatagaaataattttgaaaatgataagagtttaatagtctatggtcattatatgaaaaataaaactatgtttggtcaactagaaaactatactgatgaagtatttttcaaagaaaataacttagtagaaataaattataaagtacaaacttatacttatgaaattttttcagtatatactgctgacttaattaacagagattatttaagtatacactttaataataatgatgagtttaaatattctttgaattatataacc

SEQ ID NO: 17139 - DNA, 702 bp, Clostridium difficile
atgaaagagccaatttataaagttatagaaaatcatgttagagagttaataaattcagacagtttgaaagaaggggatttaatcccttctgaaaaacagctgagtgaagaatttaatgtaacgagaatgactgtaaggtctgcacttaataatctagttaaagaaggctatataactagacaaagaggtgtaggtagtatagttattgcaaataatatatatgataatatatcgtctgtaagtggatttactaaagagatggaaagtaaaggctataaagtatctaatatattggtatctcttgaaatagttcaggcagatgaaaatttatcaagtaagttgaatataagtttagaagaaaatgtttgggaaataaaaagagtaagattagccaatgatgcaagagtttcatatatgattacttatatgccagttaagttatttccaaatttaaataagactcattgtgaaaattctctttataattttgttgaagaagtgtgtggatacaagatagccatgtcagagagagaagtacaagctgtaatatcgaatgaagaatgtatggataatctaaaattagaagaaccagagccacttttatatataagccaaatttgtaagttacaaaatagtgagatttttgagtactcacacacatatcactatggatatacattaactttgaatgctgttgtcgaa

SEQ ID NO: 17140 - DNA, 732 bp, Clostridium difficile
ttgacaagtatatattctatattaaataaagaagacataattttaactgttaagggtcaagagcaaaaagtatcttcctttaagaaaacagttgaggaacttttggatgaacagggtgtaaagtataattctgaagataagattaatccaagtttagatacagaactaaaagatgatatgaaaataaaagttgttaaggtaactaaaagtaaaaaagaagagattgaaaaaattccatttgatacaaagcatgtaaatgatagtaatttgttaaaaggaaaatctaaagtttatcaagaaggtcaagaaggagaaaaaaaactagtctataatttaacttaccatgatggaaagttagtcaaaaaagtcttatcaaaagaagtaatatctaaggagccaactacaaaaattataaaatatggaactaaagaaaaagtactaatagcatcaagaggagcaaatataagaggaggcaaacatatgaaagtggttgccactgcatatgcaggagatacaataacatctactggtacaactccaagatggggtgttattgcagttgacccacgtgtaataccatatggaacaaaagtatatatacctaaactgggtatgacttttgtagcagaagattgtggaggtgcaattaaaggtaatagaatagacatttttatgaacagtgaaggaaaagcttcaaattggggaaggaaaagtatagatatatatctacat

SEQ ID NO: 17141 - DNA, 429 bp, Clostridium difficile
gtgcagatgatgccaacaattaaccaattagttcgtaaaagtagaaaagcgctagagaagaaatctactgctccagcattacaaaaaggttacaactctttaaataagaaagtaactgacgctagtgccccacaaaaaagaggggtttgtacttcagtaaaaacagttactcctaggaagcctaactcagctttaagaaaagttgccagagttagattaactaatggtatagaagtttctgcttatataccaggagaaggacacaacttacaagagcatagtgttgttcttataagaggaggaagagtaaaagaccttccaggggttagataccatatactaagaggtactctagatacagcaggtgttgataagagaagacaatcaagatctaaatacggtgcgaagagacctaaagaagctaaaaag

SEQ ID NO: 17142 - DNA, 801 bp, Clostridium difficile
atgttaaaagatataactatagggcaatactacccaacaagttctgctattcataaattagatccaaggataaagcttgtagcgacaattgtatttatggtatctatatttgtagtaaataaattttggccttatatagtagttttattatgtttattagctatgataaaattggctaatataccagtcaaatatattgttaagggtgttaaacctcttaaatggattattttgtttacatttcttataaatatttttttcttaccaggtgatgaaatatggtcatttggatttttagctattacaaaacagggtctaagacaagcaatttttatggcaataagattaatatttttagtagttggtacatcattgcttactttaacaacttcaccaatagaattaactgatggaatagagagattgttgaatccatttaagaaaattggtttgccagttcatgaacttgcaatgatgatgacaattgctttacgttttattcctacattgttagatgagacagacaaaataatgaaggctcagatgtctagaggtgcagattttgaaagtaagaatcttataaatagagcaaagaatttagtaccacttttggtacctttatttgtaagtgcatttagaagagctgatgaattggctatggccatggaggccagatgttacagaggtggacataataggactaagatgagagagtctgttatatcaagaagggattatatggcatgtgtatttcagcttgtttatctgggagcaattatagctactagatttatagcaatt

SEQ ID NO: 17143 - DNA, 1323 bp, Clostridium difficile
atggatgcaagagaagttggatttaaagtattatgtgatatagaaaaaaatgacaattattcaaatattgcaataaataagcattttaaaaatttagaaataagtgatatggatagaggacttgcaacagagttaatttatggagtaatagaaaataaatattatttagattatataatcaataaactttcaaaaataaaggtaaaaaaaatgtcaacttatgttaaaatctttttaagaatgggaacatatcagattttatttttagatagtatatcagattatgcagcagttaatgaaactgtaaaattatctaagaaatatgataaaaaatcttctggtttcataaatgctattcttagaaatgaaataagagctaaagagactataatggacataactgaggaagatagtgtaaaatacttatctataaagtattcctataactcttggattataaaaaactggatagataaatttggacaagaatttgctgaagatttgttggaagcaaataatgaaaagcctagtatctatataagaacgaatacacttaaaataagtagagaagaacttattgaaaaattaagtgaaatgggtattgtatgtttaaaagttcctatggtagaagaagctattaaagtcgaaaaaatgaaaaatatagaaaaaaatgaattatttaaggctggtttatttacaattcaagatataagttctatgatagtagggaaagtaattaatccaaaagaaggttcatttgttttggatgtatgtagtgctcctggagggaaatctactcacttagctactttaatgaacaatactggtcaagtagtagctagagatatttttgagcataaactaaagcttataaactctactgtaaatagattggggcttaaaaatgtgtttgtagaaagatttgatgcttctgagattgatgaaaatagtataagtaaatttgattatgttttagcagatgttccttgctctggttttggtataataagacgtaaaccagaaattaagtataagaaagaagaagagttaaaagacatcacttctatacaaaagaaaattttagaaaatgcatctaaatatgtcaaagttggtggaactttagtatatagtacatgtacaattcaagatgtggagaatataaatatagttactttttttgttgaagaaaatcacaactttgaatttgttccaattgatacagtaaatgtagacttagacaatcaagataaaggatatttaaagatatatcctaatattcatggtatagatggttttttcatagcaaaattaaagagaataagg

SEQ ID NO: 17144 - DNA, 3204 bp, Clostridium difficile
atgcctaaattagatagtataaagaaaactttagtattagggtcaggaccaataataataggtcaagctgcagagtttgactattcaggaacacaagcttgccagtctttgaaagaggaaggaattgaagttgtattaataaatagtaatccagccactataatgactgataaagaagtggcagataaaatatatatagaaccattaacaatagaatttatagaaaaaataatagaaaaagaaagaccagacagtttacttgcaggtatgggtggacaaacagggctaaatctagcagttgaactttatgaaaaaggcatactagataaatatggagtaaagataataggtacttcagtagaatctatcaaaaaaggtgaagatagagatatatttagagaagtaatgaaagaaataaatcagcctgtaatagttagtgatatagttacagatttacaagcaggtcttgattatgcacttacaattggttatccagtagttgtaagaccagcatacacactaggtggaactggtgggggtatagctgataatgaggaagaattaagagaaatactttcacatggtctacaattaagtcctgttggacaagtattaattgaaaagagtataaaaggttggaaagaaatagaatatgaggtaataagagattcaaagggaaattgtatagttgtatgtaacatggaaaatatagacccagtcggagttcatacaggagacagtatagttgttgctccaactcaaactttaagtaacaaagaatgtgcaatgcttaaaaaagcatctttagatatattaaatgcagtagaagttcaaggtggttgtaacgttcaatttgcacttaatccacatagttttgaatatgcagttatagagataaatccaagagttagtaggtcatcagctttagcatcaaaagctacaggatacccaatagctaaagtttcgtcaaaaatagctttaggttatactttagatgagatagaaaatgcagtaactaaaaaaacttatgcttgttttgaaccaactatagattatgtggtggcaaaaataccaaaatggccttttgataaatttaaaaaagcaaatagaaaattaggaactaagatgatggcaactggtgaaattatgagtataggaagtaactttgaggctgctattcttaaagggataagatcacttgaaacaggaaaatattcattagttcacacaccatctgaggagagaagcattgaggaattaaagaaaagagttgtagtacctgatgatgagagactatttgacttagctgaaatgataagaagaggctataaagtagaaatgatagaacaaattacaggtatagataaatggtttataaataaatttaaatggatagtagagcaagaagaaaaattaaaagttatgaaaattgaagatttaactaaagactatcttcttgaattaaagaaaaagggattctctgataaaggtatatctgacttaatgaagataagtccagaaaaattatatgaattgagaagtctatacaatatcaaaccagcatataaaatggttgatacttgtgcaggtgagatagatgctatatctccttactattattcaacttatgagcaatatgatgaggtagttgttagtgataagaaaaaggtgatagtattaggttctggtccaataagaataggtcaaggtatagaatttgactattgttcagttcactgtgtaaaatctttaagaaaaatggacatagaaactataatcataaacaataaccctgaaactgtaagtacagactttgatacatcagataagctgtattttgaaccattaacagaagaagaagttttaagtataatagaaaaagaaaaaccagaaggtgtaatactacagtttggtggacaaacagctataaaattggctaaatttttacatgaaaaaaatatacctatattgggaactgattttgatgatatagatgcagcagaagatagagaaaaatttgatgatttactagagagactagatataaatagaccaaaaggaaagggtgtatggtcacttaacgaaggtattgaagttgctaatgagttaggttatccagtattagttagaccatcttatgtacttggtggtcaaggtatggaaataacttataacgaagaaaaattatctcaatacctacaagatgcatttgatagagaccataaaaatccagtacttatagataaatatctaactggtagagaaatagaagtagatgctatatgtgataaagaagatatattgatacctggtataatggagcatttagaaagagctggagttcactctggagatagtacaacaatgtatccaagtcaaaatatatctgatgaaataaaagaaaagatagtagaatatactaaaaaaatagctttagaccttaatgtgcttggtatggttaatatacaatttatagaatttcaaaatgaattatatataattgaggttaaccctagagctagtagaacagttccgtatataagtaaagtaagtggagtaccaatagttgacttggctactaagtgtatgttaggagctaaattaaaggatttaggatatggtacaggagtttacaaagagccaaaattagtatcagtaaaagtaccagtattctcaatgtctaaattatctaaagttgaagtaagtctaggacctgaaatgaagtctacaggagaagttctaggtgtaggagaaaatttagaagaagccttatataaagggttcttggcagcaggtagacatatgtctgatgaaagaggagtagtacttgctactgtaaataatcatgataaagatgagtttatagagatagcaaaagatatgaaagaattaggatatacttttgttgctacagaaggaacagctaatagtttaagagaaaatggaatagaggctgatatagtaaatagagtagaagaatctagaccaaacatattagatgctataagaaataaacaagttgatatagtaataaatacaccaactaaaggaaatgactctacaagagatggatttaagataagaagaacagctattgaattttctactgaaataatgacatctttggatacactaaaagctttagtagaagttaagaagaaacatttaaataaagatgagttaaaagtttacaatatagctgaa

SEQ ID NO: 17145 - DNA, 1545 bp, Clostridium difficile
atgaataaaaatagcatgacaagaatttacagtttaaataaaataatttttattataattggaattttaggaatagttttactcacaagacatattgaggtagatattaaagttttaattttaattttattaaccttgtttagtataaatgtatttatttcatatcttaaaattaagttgtatgaggataaaattaatttaggattgataaataattcagataagtttataaatattactaaagatgagaacttcctaaaacatgttcaaaattatattatcagtaatgaaaaagaaaactgtgtaatggcttgttttgatttatgtagactcaaacttataaatgatatatatggttatgagctaggggatgaagtgttaaataatattttaagtaacttaaaaaattattttggaaaagaagctatttatggaaagttaaaaagtgatgtttttgtattaataataaagcttgaaaatagggaacagaagattccttatttagtaaatcttattaagaataaaattgtgatactaagtcagattgacagttttaaaatggatataaatattgaggcttctattggaatttataaatttaacaataatgaaattgatataaaaaaagctatagataatgctgatatggcaaggcttaaatcaaaaggactaaagcacatagagtatgtagaatttgataatgctatggaagaagaaatacaatcaattatgaaaatagagagagatttattcttggctattaaaaataaagagtttgtaattcactatcaacctaaagttgattcaagtacaggtaacattataggttcagaggcattgataagatggttgcacccatcattaggaatggttggaccaaataagtttatacctatagctgaaaaaaatggtctgataaacaatattggtagatggctaattcaagaagtttttattaccattaacaagtggatttcagaaggtataaatgtcttaccagtctcaataaatctttctagagtagaactatataaaaatgatttagttgatttttttaaactgatgtttaatacatataatattccaaaagaacttatagaattagaaattacagaaacgacagcactaagagatgtaaaatttataagtgaaaggctttatgagattaaatctttaggtatgaatatatcattagatgattttggagtaggtaattcaaattttatcaatcttaaggggataccactagatattataaaaattgataggtcacttatattggatatagttacaaatacaaaaacaaagtttatggtgaaagcaattgttaacctttcacatgatttaaacgtaactgttatatgtgaaggggtagaggatatgcatcaggtcaaagtcttaagtgaactgggatgtaatttcatacaaggttatgtattttttaaacctttggatgagatgaattataaaaaacttcttactgacggaagttatataaatctgaaagatactcttttagataaatgcatgacagttgaggaggag

SEQ ID NO: 17146 - DNA, 870 bp, Clostridium difficile
atgttattattagcagataaatggaaagattatgaacttatagatatgggaaatggagaaaaattagaacgttggggaagttatgtacttagaagaccagacccacaggttgtatggccaatggaatctgaatgggctttatggaaaaaccctcatggacattatcacagaagcaataaaggtggaggtcaatgggaacacaaaaaaagatatccagaacaatggactataaattataaaaacttaaagtttcacattaaaccaactggctttaaacatactggattattcccagagcaagcagctaactgggattggatgatagagaaaataaagaaagctaacagacctataaaagtgttgaatctttttgcatatacaggtggagctactgtagcatgtgcatctgctggtgcagaagtatgtcatgttgatgctgcaaaaggtatggttaattgggcaaaagaaaatatagaattatcaggtcttaaaaatcaaacagtaagatttatagtggatgatgttgtaaagtttgttgaaagagaaataagaagaggtaaaaaatatgatgcaataataatggaccctccttcttatggaagaggtcctaaaggagaagtatggcaaatagaagaaaagttatacagttttgtagatttatgtatgggagttttatcagataaccctttatttttcttaattaattcttatacaacaggattttctccaatagttcttgaaaatgtattgtctacaacaataggtaaaaagacaaatacaggagatatatacggtggggaattaggaataccagcttccagagatggtaagatacttccttgtggtatatttggaagatgggagaaaaaa

SEQ ID NO: 17147 - DNA, 1182 bp, Clostridium difficile
ttgaatcatgagagaagggggtttatgatgctaaactttgacgtagaattagaagaatgtgcacaaattaaagtaataggtgtaggtggcggtggaaacaatgctgtcaatagaatggtagaagctcaactaaaaggcgttgaatttatatcagtaaatacagataaacaagctttatatacatcaaaagctgaatataaagttcaaataggagaaaaattaactagaggacttggagcaggagcaaatccagaagtagggaaaagagctgctgaggagagtaaagatgaaatagtaaagttacttcaaggagctgatatggtctttgtaacagccggaatgggcggtggtactggtacaggagctgctccagtggttgcaggcttggcaaaagaaatggggatacttacagtaggtgtagttaccaaaccttttgcatttgaaggtaagataagaatgaagaacgctgaaggtggaatagcagaacttaaatcaaaagtagatactcttataacgataccaaatgatagacttttacagatagtacaaaaaaatacatcaatgttagatgcttttgcagttgcagatgatgtattaaaacaaggtatacaatcaatttcagaccttatagcagttgaagggttaataaacttggactttgcagatgttactactataatgaaagacaagggacttgctcatatgggtataggtagtgctagtggtgaaactagagcaattgatgctgcaagacaagctattcaatctccacttctagaaacatcaatacaaggagctaaaggagtacttcttaatgttacaggtggtcctaacttaggattatttgaagttaatgaggcatcaactttagttatggaatcctgtgacccagaagcaaatgttatatttggagcttctataaaagaagatttaggtgatgaaataatgattacagtaatcgcgacaggatttgaaggattacaaaatggtgccttagatttagatactaaacctaaatcaagcatacgttcttcattaaatacaacagtaaaacaagctgtaaaagaaattgaagaagaagtaattgctgaggaaaaaatagagcctcctaaaaaggcaagtataattgaagaagatgatgatgagagcatggagatacctacattcctaagaagaagaaga

SEQ ID NO: 17148 - DNA, 1323 bp, Clostridium difficile
atgagtataagtaggccagttgtagctgtagttgggagaccaaacgttggtaagtctacaatatttaataaatttgcaggaaaaaggatatcaatagttgaaaatacacctggagttacaagagatagaatatttgctgaagtagaatggttagataaatattttacattagtggatacaggaggaattgaacctgatagcgaagatataatattatctcaaatgagaaatcaagccatgcttgcaatggacatgtcacatgtaatactttttatagttgatggtaaagctggaataacagctgctgataaagaaattgcacaattgcttagaaagacaaaaaaaccagtaatcttagtggttaataagattgatagtcaaagtcaatttgataatatatacgatttttatgagttgggatttggaacgccttttgcagtttcaggagccaatagtatgggatttggagatttattagatgagatagttgaaaattttccagcaggattagatacagagtatgaagaagatataataagagtagctataacaggtaaaccaaatgcaggaaaaagttctatactcaataagatacttggagaagaaagagtaattgtaagtccaattgcaggaactactagagacgcaattgatacttattttgaaaaaaatggacagaaatttcttctaatagatacagcagggcttagaagaaaaagtaaaatatatgagacaatagaaaaatacagtgtaataagagctatgagtgctgtagatagagcagatgtagtattgatagtaatagatgccttagaaggtgtaacagaacaagatacaaaggttgcaggtatagcacatgatgaaggaaaaggatgcatatttgtaatcaataaatgggatttaatagagaaagataataagactatgagtaattacacaaaagatataaaagaaaaatttccatttatgatgtatgctccaatcgtatttgtttctgcaaaaactaatcaaagaatgaacaagatactagatacagttgaatatgtgtcaaatgaacattctaagagaatatcaacttcagcactgaatgaagtaattggagaagctgtaatgttaaatcaaccaccatctgacaaaggtagaagattaaaaatttactatgggactcaaactgacattagacctcctaaaattacattgtttataaatgataaggatttaactcacttctcatatcaaagataccttgagaataagataagagaaaattttggatttgaaggaacttccataaagtttgagtatagacaaaaaaataaaaaa

SEQ ID NO: 17149 - DNA, 834 bp, Clostridium difficile
atgattaaattaggaacacatctttcaatagcaaaaggatttgctaatgcggctgagacagctgtatatattggtgcaaatacatttcaattttttagtagaaatccaagaggaggaaatgctaaagaatttgatgaaaaagatataattaaatttcaagaaattagaaaagaaaataattttgcaccactgcttgcacatgcaccatatactatgaatctgggtggtacaaaggatgatgtatacgaatttgcaacaagggtgatagatgaggatataagaaggatggactcattaggaattgaatacatgtgttttcatcctggaagtcatgtaggtggtggtgtagattttggcatagatagaatagtaaaaggattgaacaatgccataaagggtgatgaaaatataactatacttcttgaaactatgtcgggaaagggaactgaaataggttttaaatttgagcaattaaaaagtataatagacaaaattgagcataaagaaaaaataggtgtgtgtcttgatacatgtcatattttttcagctggttatgatatagtgaatgatttagatggggttttggaagaatttgataaggttataggcatagaaagattgaaaactgtccatctaaatgatagtatgatgccatttggagacaaaaaagacagacatgctcctataggggaaggaaagataggattaaaagcattaattgattttatggaacatcctagtctaaaacatttaccatttttcttagaaactccttttgatgatgaaggtcacaagagagagcttaaaatgataaaagaaatactatctagtaaa

SEQ ID NO: 17150 - DNA, 1152 bp, Clostridium difficile
atgaatcatgaatttatggaagcattagatgaattagtagttgacagaggtatagataaagaaatacttatagatactatagaacaagctcttttaactgcatacaagaaaaactttggttcagcacaaaatgttagagttgaatttgatagagacaagggagatataaaagtattttctcaaagagttgttgttgatgaatcagatttatatgatactttcttagaaatagagttagcagatgctagagagataaaccctaattatgaattaggtgatattatagaacatgaagttacacctaaaaactttggaagaattgcagctcaaacagcaaagcaagtagttgttcaaagaataagggaagctgagagagaaatagtgtataatgaatttatagaaaaagaaaatgaaatagttacaggagaggttgctagagcaaataaaaatgttgtttatgtaaatcttggaagaatagaaggtataatgactcaaagtgaacaaataccatttgagaattataaagcaggtcaaaaaataaaattctatatacttgaagttaaaaagactaacaaaggacctcaaatagttgtatcaagaagtcatccgggtctagtaaagagattgtttgaagaagaagttcctgaaatatatgaaggaatagttcaaataaaatctgtagcaagagaagcagggtcaagaactaaaatggcagtaagatctatagatgaaaaaatagacccaattggagcttgtgttggaccaaaaggacttagagtaaaaaatatagtggatgaacttggcgatgagaaaatagatataataaaatatagtgaagacccagcagagtttatatcagcagcacttagcccatcaaaggttgttagagtagatatagatgaagatgaaaagtctgccttagtaatcgttccagattatcagttatcgcttgctataggtaaagaaggtcaaaatgcaagactagcagcaaaattgactaactggaaaatagatattaagagcgaatctcaagcagaacaagaaatgttaaatcttgaaaattccaaagaaatagaagctgaggatgttgaagctgaatttatagaccaagaagagttagatacttcagaggataattttagtgaagaagag

SEQ ID NO: 17151 - DNA, 999 bp, Clostridium difficile
atgaaaaaagtaaatgtagcaatagttggtgctactggaatggtaggtagaacatttttaaaagtattagaagaaagaaattttccaatagaaaatctatttttattctcttcttctaaatcagctggttctaaagtaatgttttgtggtaaagaatatatagtagaagaattaaaggaaacttcatttactgatagaggcatacaaatagcattattctctgctggtggaagtattagtgaaaagtatgctccaatagctgcttcaaatggaatcttagtagtagataactctagtcaatggagaatgaatccagatgtgcctttagtagttcctgaggttaatccagaagccataaaaaatcataagggtataatagctaatcctaactgctctactatacaagctatggttccccttaaagctcttgatgataaatacaaaattaagagagttgtttactctacttaccaagctgtatctggttctggtgttaaaggtgttgaagatttagagaaaggaatgaacggtaatcctactggattctaccctcatcaaatctcttacaactgtcttcctcatatagattcattcactgaaaatggatacactaaagaagaaatgaaaatggtaaatgaaactatgaaaatacttgataactacgatttaaaaataactgcaactactgtaagagttccagtaaaaaatggtcatagtgaatctataaatgttgagtttaacaatccatttgagttagatgatttagtaaaaacacttgaagaagctccaggtgttgtagtagttgataatcctgctaaaaacgaatatccaactgctgtagaatttgatgatagagatgaagtatttgttggaagaataagaagagattttagtgttgataatggtgtaaatctttgggttgttgctgataatataagaaaaggtgctgcaactaacgcaattcaaatagctgaaatggctttatcatacgatttagta

SEQ ID NO: 17152 - DNA, 1011 bp, Clostridium difficile
ttgaatattcttatctatagtactaatataaattacaaggaggtgtttgacttgaaaaaaggttatgtttatataatactgactaccttattttttagttcaatggaaattagtctaaaaactgtcactaatgactttaatcccttacaaataactttatcaagattttttgttggcggtttagtcttactaccttttgctgtaaaaagattaagagcccttagtctttctattacaaaatcagacttaaaatactttgcatttttaggttttatgtgtgtagtagtaagtatgtcattgtatcaacttgctgttctaaacacaaaggcatctgtagttgctgttttgttcagttgtaatccagtctttgtaatgcttttagcttacttaattttgaaggaaaaaatatataggcacaatgtaatttcacttatattagaagttcttggaattatagttataataaatccattgcatacaaaactaactcttagtggaatattcttaacattatcttctgctattattttttcaatgtatactgtatttggtaaaagaaaaaccttaaaatttggtggaatagttgtaacctgctttagctttatatttggtagtttggaaatgttgatattggttttactcactaaaattaattttatcgcagatatattaaataaaaataagcttcatgtatttgcaaatatccctatttttagtggatataccttacacaatatgcccattatgatttatgtattcgtatttgttacaggtgttggttatgcgctttactttatggcaatggaagctacatctactagtcttacatctttagtattcttctttaaaccagtaatatctccaatactagcattattaatacttaaagaaattatccctataaacatggttgtaggaattttattgatagtaattggttcaataatttctattatacctacgataattactcaaatgcataataaacacgttgaagccttgtataaggag

SEQ ID NO: 17153 - DNA, 747 bp, Clostridium difficile
atgaagaagaatttagtatctataattactcccatgtataattctgaaaaatttattgaagcaaccataaaatcagtattaaaccaaacttatcaagaatgggaaatgttaattattgatgattgctcaacagataatagtcctaatatagtcaaatcttatatgcaacaggatagtagaataaaatgtataaagactgagactaataagggtgtctctaatgctagaaatttagcactaagtaaggcaacaggacaatttatagcttttttagatagtgatgaccaatggaatagtagtaagttagaaaaacaagtaaattttatgttagaaaatgactatgtaatttcatttacttcatatgaactgatggatgaaaatgataaaaaattaaacaaagtaataaaagttccacctaatgtagattatagaagattattaaaaggaaatatcttaggatgtcttactgttgtgattgataagtctaaattggattttgaaataagaatgagtggtgtaagacatgaagattatgttttatggttatcgatattgaaaaaagggcatattgctcatggaataaatgaagttctagcattatatagaaaatctagcaattccctaagtggtaataaaataaaagctgctatgtggacttggaatatatatagaaatatagaaaaaatacctttatacaaagctatatactactttattaattatggaataaacggaatcaaaaaaagt

SEQ ID NO: 17154 - DNA, 1641 bp, Clostridium difficile
ttgttatataaacagtatggaggttatgttatgaacaataacaaaaataaagactcctttctaaaaggagcccttatacttgggctagcaggtgtaatcgtaaaaataatgggtggattttttaggattccccttggaaacatgattggttcagaaggaatgggatactatcaggctgcttatcctgtgtatactctatttttaacattagctactgctggatttccaacagctgtggcaaaattggtttcggaaaaagttgcaattggaaattttaaaggtgcaaataagatatttaaggtatcacatacagttttattcattactggtataatatcattttgtatattattttttggagccgactacatagtaacaaacgtaatgaaaaatccaggtgcgttatactctatgaaagccattgctccagcattactatttgttcctgcaatgtctgcatatagaggatattttcaagggagacaagatatgactaagattgctgtgtctcaagttgcagagcaattttttagagttgtattaggtcttactttggcctacttgcttatgaagagtctaggtcagacttttggtgcagcaggtgctatatcaggggctacaataggttcaatagcatctatgctttatttggtgtttgcttatatgctagggagaaaagagcgtagagcagagatagatgcaagccaaagatttaaagatgaaagagtgtcttatatttttaaaaagcttttaactgttgccattcctataacaataggagcatcagtaatgccacttgtaaatatgatagataatgttattgtaataagaagacttatggaagcaggctttacatacaaagtggcaaattccatgtttggtcaattaacaggtatggcaatggccacaataaatttaccagcagtcataacaactgcaatgagtatgagcttagttccagcaatttctaaagcatatgcattaggaaataagtcaaaagctagaaaagatactaagagtgcagttaaggtaactttacttatagtattgccttgtgcgtttggtatggcttctttagcaataccaataatgggtcttttatttccacatgaaccatcttctgtaggaactattttgtttactcttactccatgtgtattatttttaggattaatacagacattgactggtataattcagggaatgggaaaaccaatagtacctgtaattgctttatgtgttggtatgctatgtaaaattgtaataagttatactttaacaggtataccagatattaatgtactgggttcagcatttggtacagttacagcatactttgtggcagccatgattaacttactatatgttaaaaaacacatgaatgtaaacttttctaaaaaagaatttataataaagccatttataacagttatgacaatgtttataatggttaagttgagttatggtgctttagttggattcttaggaaacagcatatctacaataattgcaatatgtgttggtggaattgtatatgtagtagtaatacttggaataggtggaattaaaaaagaagagattctaactatgccaaaaggtgataaattatataaattgttaaaaaaagttaaacttataaga

SEQ ID NO: 17155 - DNA, 360 bp, Clostridium difficile
gtagtggtggaaaaagcttataagtttagaatgtatccaaataaaaaacaacaagagttaattaacaaaacttttggatgttgtagatttgtatataataagtatcttgctaaaagaatagatgtttataaaaacaataaagaaacttttacttataaacagtgtagttctgatttaaccaatttaaaaaaagaattaaaatggcttaaggaacctgacaaattttcattacaaaacgccttaaaagatttagataatgcatataaaaaattctttaaagaaaaaacaggatttcctaaatttaaatcaaagaaaattaatagattttcatataaaactaactttacaaatggaaacatt

SEQ ID NO: 17156 - DNA, 474 bp, Clostridium difficile
atgaaacttacaactatttgttatatagaaaaagatgacaagactttgatgttgtacagaaataaaaagaaagatgatatacatgaaggtaagtatgtaggagttggaggaaagtttgagcaaggagagactccagaagaatgtgtaattagagaagtaaaagaagagactggtcttactcttaaatcattgtcatataaagggttgataacttttccaaaatttaaagatgaagaagattggtatatgtttttgtatttctcagatgagtttgaaggtgaattatctgaaaaagatttaaatgattgtaaagaaggaaatttaatttgggttgataatgataaaatattcgatttaaatatgtgggaaggtgacaggctgttcttaaattgggctaagactggaaatatctttagtgcaaagattgtatatgataatgggaaactaaaagattataatgtaagtttcttagat

SEQ ID NO: 17157 - DNA, 183 bp, Clostridium difficile
gtggctagaaaagcgatggttgttaagcaacaaagaaagcaaaagtacgctactagagaatacactagatgtactatatgcggaagaccgcattcagttttgaaaaaatttggtatatgccgtatatgctttagagaattagcttataaaggtcaaatacctggtgttagaaaagcaagctgg

SEQ ID NO: 17158 - DNA, 537 bp, Clostridium difficile
atgaaaataagaatgtcatctactataagttatgacagcatagttgatggaccaggattaagaatggtaatatggactcaaggatgtattcataattgtaaagagtgccataatcctcagacacatgatttatgtggaggattttatatggatacagaagaaattataaataaagtcaaatcattgaaattacaaaaaggcattacgctatcaggaggagaaccatttttacaaccagaaccattagaagaaatagcaagagaagctaaaataaatgggttagatgtatggtcatatactggatttacgtttgaacaactgttagataaaaaaaatagagcgtattttaaaaatttaaatttactaaagcaaattgatattttagtggatggaaaatttatagctgaaaaaaaagatataagcttaaagtttagagggtcatcaaatcaaaggataattgatgttcaaaaaagtttgaaatataaaaaagtgtttttggttgagcaatatatgaaggatgatttatctatagcagaa

SEQ ID NO: 17159 - DNA, 225 bp, Clostridium difficile
atgtttgagaaaataaaagaaataatagcagaacaattaggggtagacaatttagatgagataactatggaagcatctttaatggacgacttagaagctgattcattagatgctgttgaaattataatggcccttgaagatgaatttggaatagaaataccagacgaggaagctgagaactttaaatgtattggtgatatatgtaaatatatcgaagaaaacaaa

SEQ ID NO: 17160 - DNA, 1473 bp, Clostridium difficile
gtgaaatttgctaataggagtgatgttatgggtaagataagtattgtaggtcttggaccaggagactattctcttataagccaaggtgtgttagaatctttaataaatagccctaaagttttttttagaacagagaaacatccaataattgataaacttaaagaaactatacaatacacttctttagactacttttatgaaaaagaggaaaattttgataatgtttatttgaaaatatctgaatttatcatagaagaatcagcaaagggtgacctagtgtatgctgttcctggtcatccaagagttgcagagaagactgtaagtataatagagagattagccaatgaaaagcacatagcagtagaaatattgccttctatgagctttgtagacgctatgtttaactatttggctatagacccatccgagggatttaaactggtagatgcttttgaaatagaaaattcatatatagacttggatacaagcatgataataactcaggtatatgataaatttatagcatctaatgtaaagttaaaacttatggaacattatgactataatcaagaagtatgtatagtaaatggagcaggtgtcaaagatttagaaagtaaaaagtttataaagctttgtgaattagacagaaatgaaaacttttttgactatttaactagcttatatatacccaaaagttctaaaaagatgtataatacagtacatgacttagaaataatagttaatacacttagaagtccatctggatgtgaatgggataaaaaacaaacacatcaatcattaaaaaattctgttatagaggaagcatatgaactttgtaatgcaattgataataatgatatagatgaaatggtagaagagttaggtgatgttcttttacaggttatattccattgtcagataggaaatgaggagggctactttgatttaaaagaagtagtaaatggcatatgtaaaaaattaattcatagacatcctcatatatttagtggtgcaaaattagatatgtctaagtttgagaaaacttgggaagaattaaagaaagaagagaaaggcgaaagtactataacagatggccttagaaggataccaaaacatttaccagctcttatgaaggctagtaaagttcaacataaagcagcacttgtcggctttgattgggacaatgtagaagatgtatttaaaaaaattgaagaagaatatcaggaattacttgacgaacacagggtcgggaatataaaatacataaaggaagagctaggcgatttattattttcgatagtaaatctagctagatttttagacatagactcaggagaagccttgaactgtactacagaaaaattcataaatagatttgactttatagaaaaaagtgcaatgaacttgaataaaaaattagaagacatgacacttgaagagatggatgagttttggaatcaggctaaaaaacaa

SEQ ID NO: 17161 - DNA, 1083 bp, Clostridium difficile
ttgttttgtactggaggatatatatttatgaattgtaaatggatatctaaaatagatgagagaaaaaaatgtcatagagaagcagattcttctggatattgtatctttcataaagaaaataagtctgatgaagagatacagttgatgatggatactcttcataaagaagagataagtgaatttaatggatttgtttttgaaaatgaatttaatgcggaagaaatattaacttacaattacaaaatactggatttttctgaatccatatttaaacaaaaagcaaattttaaaaaatatatttttaaaaagaatattatttttaactatacagaatttagagataaagttttatttaatggttgtgtattcttagaaaactgtgattttaatagaaccatatttagtaaacactatataaatgaccgtatatttgaaaaagtgaaatttaaaggacctgatttggtagttaataaagtagaaaattttccacgaatggatggaataatttttagcatgtgtacaaaatttgtgttaaagaatgttgaatatggaaaaagtgagtatgagcatggcaagataaattatagaatagctagaaatcaagcaacaaaaattggagaatatgagatgataggattttactattataaggaaagaatttatagtagtaaaataatgaaacgttctaattatcctactttcagtgattatttagttgaaaaattttttgaccaaatagcacgttacacaacaggttatggagaaaagccatggaatatattattagttattatagcaataataagtgtttttgctttattatacttatttgtaggcatagaaagttcaaatagcacacttgtagctttagatataaacaatataggtgattactcactaagtgagattttcaaaatgtatatggatttatggtattttagcatggctacatttagtacagtaggatatggagatatggttgctacaagtttgattgggaaagcattggcaggtatagaagtattttttggagttacaataggagcaatttgggcatctgtgattattaaaagaatgataagg

SEQ ID NO: 17162 - DNA, 1200 bp, Clostridium difficile
atgaaaacatcaattttaatcgcattaatagaaaagacaagccttattgtagtattgtttcttctaataacaaagttaaaaatatttaagcagatatttcaaaaggaagaatatagttttaatgacttggtctgtatagcattagtttttacttttttagccatatttggaacttatagtggtataaattatatggggtcaatagtaaacactagaataatatctatagtatcaggtggcattttatttggtccaatggtaggtattacagcaggagttttttcagggattcatagatattttatggatattggggggataacatctgttccatgtcttttatcaagtatactagcaggtgtattatcaggatttctatataagaggataccaaaacaacatagagtaatgtatggaatattggtaggcatgatttctgaaagttttactatattacttatatacttaatatcatatccacattctttagcaattcaaataatcggtggaatatatttacctttaatagttgggcagattggaataggatttgttatatctatagtagaggggattgagaaagataaaaaagatatagaagcgagaaataaagcagaaataaaagcacttcaaagacaaattaatccacattttttgtttaattccctaaacacaatagcttcatttataagatttagtccagataaggctagagagttaataataaatttatcaacttatctaagatataatcttgaatatagtgataacttaattgatataaataaagagattgaacaagttaaatcttttgtagagatagaaaaagctaggtttggagaattactaactgtatcttatgatatagaagatgtaaatataaagattccaagtttgattatacaaccattagtggaaaatgcaataatacatggtattttagaaagtggtagagctggtgtagtgaaaatatccataaaaaagttaccgtattcattagaaaatactgtgagaatatcaatagaggataatggtataggtataagtgaggaaattataaataatgtatatcaagataatatgccagaaaataagattgggctttataatgtacatttaaggcttaaactgatgtatggaagagggcttaatataagaagaatagataatgggactttgatagtattttatgtaaaggag

SEQ ID NO: 17163 - DNA, 368 bp, Clostridium difficile
  misc_feature (153)..(153): n=g, a, t or c
atgctttcagcgcttatccattccgtacatagctacccagccatgcccttggcaggacaactggtacaccagaggtacgtccatcccggtcctctcgtactaaggacaggtcttctcaaatttcctacgcctgcgacggatagggaccgaacnttctcacgacgttctgaacccagctcgcgtaccactttaagtggcgaacagcccaacccttgggacctactacagccccaggatgtgatgagcaaacatcgaggtgccaaacctccccgtcgatgtggactcttgggggagataagcctgttatccccagggtagcttttatccgttgagcgatggccttccacgcagaaccaccggatcactaa

SEQ ID NO: 17164 - DNA, 1206 bp, Clostridium difficile
atgttatacatacttattaacattatcaacaacacctactactattactactatgattttaacttatttttatatataaaaagccagaggaggttatccacattgaaaataatttgtaatcaaaaaatcctagcaaatagaattggaattgctcaaaaagctattaatggaaaaacaacaatagaattattaaaaggtatacttatatctacagaagaaggtcaattaaaacttactggatatgatgctgaaataggaatagaaacttatgtacaagcagaaatcatagaaaaaggtgatgttgttgtagatgcaaggctatttggagatataattagaaaattaccagattcctttgttgagatagaaactgattcagaaaataatatttacataaattgtgtaaattcaagatttaaaattaaaggttatgcagcaaaagaatttcctaaattaccagaattaaatgaagaagatttatatagcatacctcaagaaatcctaaaaaatatgattaaacaaactgtatttgctatctcacaggaccaaacaaaacctgttttaatgggagaacttttagaaattgtagatagaaacttaaatttagtagcaattgatggatatagattagctgtaaaaagttgttcggttgatagtttaactgaaaatataaaagtcataattcctggaaagacacttatagatgtaaatagtttgctttctggagaggataatgttaaagttggatttaatgaaaaaaatgctatttttataattaatgatacgaaaattattacaagattgcttgaaggagattttattgattataaaaaattattgccaagagaacataacagcagagttaaattaaatactaaggaacttttaaatagtatagagagagcgtctttattgtctcaatcagaaaaaaataatcttataaagttatctataagagataaagtaatggcaattacttctaatacagaaaaaggaaatgtgtatgaagaagttgaaatagatttagatggagattacctagatatagctttcaattctagatattttatcgaaggtttgaaaaatatagataatgaggaaatatttatagaatttactacaaatgtaaatccttgtataattaaaccaacagatgatgttaattatatttacttactgcttccagtaagaatatcatcaaatata

SEQ ID NO: 17165 - DNA, 2664 bp, Clostridium difficile
atggaaaatacgaatttatcaaaaacttataacccaaaagattttgaggctaggctatataaaaaatggatggatgaagggtattttaaatctaaaccaaatccagataaaaaaccatttacaataatgatgccaccaccaaatataacagggcaattgcatatgggacacgctcttgaccatacacttcaagatatattaatcagatggaaacgtatggatggatatgaagctttttggcttccaggaactgaccatgcttctatagcaacagaagttaaagttgttgaaagaataaaaaaacaagaaggcaagacaaagtatgaaataggtagagaagaatttttaaagagagcctgggaatggaaagatgaatttggaggaaaaatatctaatcagcttaaacaactaggtgattcttgtgattgggataaagaaagatttactatggatgaagggtgtaatgaagcagttatagaattttttgtaagcctatatgaaaaaggtcacatatacagaggaaatagaataataaactggtgcccagattgcaaaactactttatcagatgcagaagttgaacatgaagaacacgacggaaacttttatcatataaagtacccactaaaagatagtgaagactttttagaaatagctacaactagacctgagacaatgataggagatactggtatagcagtaaatccagaagatgatagatataaacatttaataggaaaaacagcaatacttccattagtaggaagagaacttccaatagttgcagatagttatgttgatttagagtttggaactggtgcagttaagatgactccagcacatgaccctaatgattttgaagtaggattaagacataatcttgagcagttaaatactatgaatgaagatggaactatgaatgaagtttgtggaaaatatgaaggtatggatagatttgagtgtagaaaagctatcgtagcagacttaaaagaacaaggttacctaattaagataaaagagcataatcataatgtaggaacttgttatagatgccatacagtagttgagcctagattatcagagcaatggtttgttaagatggaagaacttgcaaaaccagctatagatattcttaaaaaaggagaattagaatttgttccagataaatttgataaaacttatttacaatggctagaaaatataagagattggtgtatatcaagacaattatggtggggtcatcaaataccagcttattattgtcaagagtgtggagaaatagtagttgctagaaaaatgccagataagtgtcctaaatgtggaagcactcattttaaacaagatgaagatgccttagatacttggttcagttctgcattatggcctttctctactctaggatggccaaataagactgaagctttagattattattatccaacaagtgtacttgttacaggatacgatataatattcttctgggtagttagaatggcatttgcaggtatgttctgtatgaatgaaaagccatttgaccatgttttggttcatggattagtaagagattctcaaggtagaaaaatgagtaaatctttaggaaatggtatcgacccattggagataatcgagcaatatggagctgatgccctaagatttacattaacaactggaaattccccagaaaatgatatgagattctatatggaaagagtagaatttgctagaaactttgcaaataagttgtggaatgcatcaagatttgtatttatgaatattgatgaagatataattaaaaacatgactagagaaagtgttaaagaggacttaactctagctgataaatggataatatcaagagcaaataatattgtaaaagaagcaactaataacatggataagtttgatttaggaatagcacttcaaaagatatacgattttacttggtcagaatactgtgactggtatattgaaatggttaaacctagattatatggagaagatgcaaatgctaaatctgcagcattatatacattaacttatgttcttgaaaaaatattaaaattattacatccatacatgccatttataacagaggaaatatatactcatcttcctactgttgaaggatgtataatagtatctgaatggccaaaatataatgaagaagataacatggctgaagaagaagatatgatgaacttattgatggaaggtataagaagtataagaaatgtgagagcagaaatgaatgtaccaccttctaagaaagctaaattgataataatcccaagtgaagaaaaaatagaagctattgagcttggtaaagactattttataactttagcatctgcttcaaatgtagagatagcaaaagataaatctaatgttccagaagatgcagttggagtagttattgatggtgttgaaatatttatacctcttaatgaattagttgattttgaaaaagaaattgagagattgtctaaagaaaagaaaaagttagaaggcgaaataaagagagttaatggaaagcttgcaaatcaaggtttcttagcaaaagctcctgaaagtttaattgaagaagaaaaagcaaaaaaagaaaaatttgaagagatgattaaatctgttgaggaaagattaacaaatttagaatctaaaataaaa

SEQ ID NO: 17166 - DNA, 450 bp, Clostridium difficile
atgaagataggattaggctgtgaccatggaggatataatttaaaaaaagaaataataagctatttagaaagtaaaggtatagaatgtgtagattatggaactaataatgctacagattctgttgattatcctgtttatggagaaatagttgcaaattcagttataaataaagaagtagattatggaatattatgttgtggtacagggataggaatatctttagctgctaataaggttcctgggataagatgtgcagttgtatcagatgtattttctgcaaaaatgtcaaaagcacataatgatgcaaatatgttatcattaggcgaaagagttttaggaaaaggtctagcacttgagatagttgaagcatggattaatacggattttgaaggtgatagacatgctagaagagtaaacatgattaaatcaatagaagaaaaacataataaa

SEQ ID NO: 17167 - DNA, 951 bp, Clostridium difficile
ttgagatataaaaagttctatttcaaaaaattcaagatgaggtggaaatgcatgagaagttttgaagaagtaattaagtttgcaaaagaaagaggacctaaaactatatcagtagcatgttgccaagataaagaagttttaatggcagttgaaatggctagaaaagaaaaaatagcaaatgccattttagtaggagatatagaaaagactaaagaaattgcaaaaagcatagacatggatatcgaaaattatgaactgatagatataaaagatttagcagaagcatctctaaaatctgttgaattagtttcacaaggaaaagccgacatggtaatgaaaggcttagtagacacatcaataatactaaaagcagttttaaataaagaagtaggtcttagaactggaaatgtattaagtcacgtagcagtatttgatgtagagggatatgatagattatttttcgtaactgacgcagctatgaacttagctcctgatacaaatactaaaaagcaaatcatagaaaatgcttgcacagtagcacattcattagatataagtgaaccaaaagttgctgcaatatgcgcaaaagaaaaagtaaatccaaaaatgaaagatacagttgaagctaaagaactagaagaaatgtatgaaagaggagaaatcaaaggttgtatggttggtggaccttttgcaattgataatgcagtatctttagaagcagctaaacataaaggtataaatcatcctgtagcaggaagagctgatatattattagccccagatattgaaggtggtaacatattatataaagctttggtattcttctcaaaatcaaaaaatgcaggagttatagttggggctaaagcaccaataatattaacttctagagcagacagtgaagaaactaaactaaactcaatagctttaggtgttttaatggcagcaaaggca

SEQ ID NO: 17168 - DNA, 855 bp, Clostridium difficile
atggaaaatattttagaagtttataacttaaataagacttataccgatttttcattatctaatataagctttgcattaccagaagattgtataactggatttataggtgttaatggagcaggaaaaacaacaacaatccgttcaatattggatgtcataaagcgtgatagtggaaaaataaaaatctttggtaaagatttcgatggaaatgagaaggaattaaaaaatcgaattggagttgtatttgatgattcatatttctatgaggagttgtcaatggcagaaatgaaaagtattattgcaccttcatatgataattggtgtgaagaagattatcaacaaaatatgaagcgttttaatcttaacccaaaacaaaagattgatacactttcaaaaggaatgaaaatgaaatttgctttagcattagcattatcgcataaagctgagtttttaattatggatgagcctacaagtggcttagacccactaatccgtagtcagatacttgacatactaacagaatatatgaagaaatgtggtcgtggtgttttcttttccactcatataacatctgatttagacaaaatagcagatatgattgttatgattgacaatggacgtattatattagagcgtgaaaaagatactctattggacgaacatagaaaagtaaaaggggatattcaatttctaaatgatgaaatcaaaaaattatttttaaatttagaaattacaggttatggttttatagggattacctcaaaaattaatgaagtgcaaaaaaatatgccagatattttaatagagcgtcctacaattgaagatattatgcttgcatatattgaaaggagagag

SEQ ID NO: 17169 - DNA, 2916 bp, Clostridium difficile
atgaagaaaggaaatagaaaggcattattaattagtttaattatgattttaagtatggtggtgtctacaatatatccaactgtatcttatgcttcagaattaggagagaatagtcagattcaaagtggttcaactaattcatcaactggagaggagaaggaaagcgacaataaaaagccagaacagactccagagaaagataaggcaacagataataaaaaaccagaacagaccccagaggaagaaaaaccaacagataataaaaaaccagaacagaccccagaagaagataagtcaacagataataaaaagccagagcaaactccagaaggagaaaagccaatagataataaaaagccagagcagataccagaagaagataagtcaacagataataaaaagtcagaacaagctttagaagatgaaaaaccactagacaataaaaatacagaaaaaactccagaggaagataatctattagaagatgaaaatttattgaaagttttagaagaagaacttaatgaagaaaatgaagactatggatttgttgtaaaaattaataacaatacaatagaaacggaatcaatgaaaaaaatatcatttaatttaacttatactccaacatcaaaaggaatacaagcaggagattcaataacttttaaggtgccagatgtattcaataaagttaatttagattatacaagtgaatgctttgataaaacagaaagtaatggagagtatacacttacatttagagaattacctaatggccaaagtgtaatgcaaggtaaaataggtttggaagcatatgttaaaaaggttgatgaagatactaatgcaaaaatacatattgaaactactggaaaaatagaaagtggaagtggagatatagatgtagaaataaaacctggagataaaacggatgttccagatgctaaaggaacacttaaaaagcttgttgaaggaaaaaaatcaactactgtatttatgccagttaaaaataaagatataaattacagtatacaagtaaatgaaaagcaggaagagttaaaagatattattttgtatgatgagcttcctgaaggattgacattgataaatggttctgtaagtgtagtaacaagtgatggaaaagaagttagtgattttaatattgaacagagtaaaaattctatttcagttaattttggaaatatagataaatcgtatactgttaagtataaggctagaatcagtgacaaaaatgcaaaacatggtaataaatataagaatgtagctaggattgaatctgatggtaagaagatacaagaagatgatgctactgtaagtatatttgatagaggagatgattatcttcttactaaaggacattcaggagcaacaaatattactcaagttggtcaagtaataaactatcagatttcaataaatgatgataaatcaccaataagtaatgttgttataacagataatataccagaaggcatgagattaactacttcaggagaagctgggcatgattttagagttgtagaaattccaatgaatgggagctggactccttggagtaaagaaaaaattgccaataatatttcatataaagtagaagaaaaaagaaatgaaagtgggcaagtagataaagttataactggatttacaattaatctcagtaaagaagaagtggaatcaaagttttttatagcttatacattaaaggtaattagtattgaagatagctatataaatagagctgttcttgatgcaaataatagtgaaattgataaaaatgatgagataaactttaagaaaaattctggattaataagcgcaaaaaaagaagttgataaaaaagttttaaacagtagtgataaccagattgttaaatacaaaatcaatatgtcaacttatggagtttatgatgcaggacaagtaaatcttttagatgaagtaaactcagttctagaaatatctaatataaaatattctgataatcttgaacttaaaaaagaagctggagatggaaaaaatacaataagattagtaaataaatacgaatttaaacagataaaagaaggggaacctgtgcaaagttgggttacatttgatgcaaacttcacaaatgtaaaagttggggagactatacgaaatgtggctcagattaatggttcaagtcctccaggagtagagactactaagcaaggttatgcttttgaagctaaaaaagtggatgctttagataaaaatgtactttcaggtgctaagttcaatttagaagatgcatttggaaatatagtagttaaggatttagtcagtgatgaagatggtataattcaatctagtgtaaaaaacccaggaacatattatttagtggagataatggctccacgtggatatgaaaaactgaaggataaaattaaggttgaaattggtaataaagatattggtagaatagtggatattggaaatatagaaaacataagacaagaaaatccaccagtaaatccaccagcaccaccaaatacagatgaaccaatagtaaatccaccagtaccaccaagcacagataaaccaaggaaaccatcaagttcatctgatacagaggatactatagttataaatccaccagtaccaccatcagaagatataataaatccgccaataccagaggtattgaatcctccagtaccaccatcagaagagatgatagaaactcctgttaaacagattattccaataccagaagtagtaaagccatcagtgtcagaagaaaaaaataataaagttaaagatgatactttggtaaatccaccagtaccaccaaaaacaggggatagtactacaattattggagaaatacttttagttataggagctattgtaggacttatcgtattaagaagaaataaaaatacaaat

SEQ ID NO: 17170 - DNA, 2499 bp, Clostridium difficile
atgagttcaaataaagtggtagaaagttataaaattacaggtatgacatgtgcagcttgtgcaaaggcagtagagagagtaactaagaagatggatggagtatatgaccaaagtgtaaatatagctactgaaaaacttaaaatagaatatgataattctaaggttaattttgatgatataaagcaggttgtagaaaaagcaggatatggaattataaaggaagaaagtaataaaaaaattgatatgaaaattgatggaatgacatgtgcagcttgtgcaaaagctgtagagagagtggtaaaaaaattggatggagtagaaagtattagtgtgaatattgcaacagataaagctaatatagactatgacccatcaaaagtaaaattatctcaaataaaagcagctattgaaaaagctggatataaaccaatagaagaggtaagaaataaggttgatgtggatgaagataaattgagaaaagaaagagaaatgaagtctttatttgttaaatttatagttgcaatagtatttgcagtacctctgttttatatagcaatgggacctatgataataaagcctatagggccatggcctttgccagaaattataaatcctatgacaaatacttttaattatgcattaattcagttaattttagtaataccagtaatgatagctggttataaattttatataaatgggtttaaatcacttttttctttaagccctaatatggattctttagttgcaataggaacattagccgcatttttatatagtctatatacgacactacaaatagccaatggacaaattcaaggtatgcaccatcatcagttgtattatgaaagtgcaggaataataatagcacttatcttacttggtaaatatttagaatcaaaatcaaaaggaaaaacatcagaagcaattaaaaagcttatggggctacaacctaaaactgcaatagtgttagttgatggtaaagaagttgaaactcctatagaagaagtagagataggagatatactattagtaaaaccaggaactaaaatacccgtggatggagttgtaatagaaggatatacatcagttgatgaatcaatgcttacaggtgaaagtataccagtagaaaagaatgttggaagtaaggtgacaggagctagtattaataaaaatggtgttattaagtttaaggctgaaaaaattggtggagatactgctcttgcccaaataataaagttagttgaagatgcacaaggtacaaaagcacctattgctaaacttgccgatactgtatctggatattttgtaccaatagtaattgcaatagctgtagttgcatcattattgtggtttttaataggaggaaaagatatagtatttgtacttactatatttatatcagtacttgtaattgcttgtccttgtgcattaggattagcaacaccaactgctataatggttgggactggaaagggcgcagaaaatggaatcttgataaaaggtggagaggcactagaatctgcacataaagtaaatacagtgatatttgataaaacaggtactataacagaaggaaagccaaaagtaacagatatagtattaaataataatgtaaaagaagaatatcttatcaagattgcttcaagtgcagaaaaaggttcagagcatcctcttggagaagcaatagttaagtatggagaagagaagaatataaaatttgaaaaagttgataattttaaagccataccaggtgctggtatacaagttactattaatgatgaaagtatattacttggaaatagaaagcttatgaatgacaataatataaagcttggggatttagaagaaaaatcaaatatattggcaagccaaggtaaaacacctatgtatatagctgtagatggaaatttatcaggtataatagcagttgcagatgtagtcaaagaaagtagtaaaaaagcaatagaaatacttcatgatatgggaataaaagttgcaatggtaactggagataatgcgaaaactgcaaatgctatagcaaatcaagtaggtatagatatggttttggcagaggttttaccagaagataagtcaaaagaagttgaaaaactacaaaatcaaggaaagtttgttgcaatggtaggggatggaataaatgatgccccagctcttgcaaaagcagatatagggatagcaataggaagtggaacggatgtagccattgaatctgcggatatagtacttatgaagagtgatttaattgatgttccaacagcaattaaacttagtcatgaaactataaaaaatataaaacaaaacctattttgggcatttggatataatacaattggtatacctgtagcagcaggaatattatatgtatttggaggacctttattaaacccaatgattgcagcagcagcaatgagcttaagttcagtttcagtcgtatcaaatgcacttagacttaaaaacttcaaggcatataagagagat

SEQ ID NO: 17171 - DNA, 1677 bp, Clostridium difficile
atgtctaattctataccagagatagaaaatgcagatgttttatttatatttggatataatggagcagattcacatccaatagtggcaaatagaatagtaaaagctaaaaaaaatggtgctaaattaattgttactgaccctagagtaactgaatctgcaagaattgctgatatacatctacctataaaaggtggaacaaacatggttttagtaaatgcttttggaaatgtattaatagaagaaggtctttacaataaagaatttgttcaaaatcatacacaaggatttgatgagtataaagaaattgttaaaccatatacagctaaatatgctgaaaagattacaggaatcccagaagagcttataagaaaagctatgagagaatatgcaaaaggtaaaaaagctatgatactttatggaatgggtgtctgtcaatttggtcaagctgttgatgtagttaagggacttgcatcaattgctctacttacaggtaattttggtagagaaagcgttggaataggacctgtacgtggacaaaataatgttcaaggagcttgtgatatgggagctcttcctaatgtatatcctggctatcaaaatgtaactgatgataagataagagaaaagtttgaaaaagcttggggggtaaaattatctcctaataatggttatagtttaactcaagttccaaatttagtactaaaagagaaaaagcttaaagcttattatatatttggagaagacccagtgcaaagtgacccagatgcatcagaagttagagaagcattagatgaattggaatttgtcattgttcaagatatatttatgaataagacagcacttcacgctgatgttatacttccagctacttcttggggagaacatgagggagtatatacatgtgcagatagaggattccaattgatgagaaaagctatagagccacaaggagatgtaaaaccagactggcaaattataagcgaaatttctacagcaatgggatatcctatgaattataaaaatactaaggaaatatgggacgaacttagacaattatgtccaagtttcttaggtgctacttatgaaaagatagaaactcaaggatgtgttcaatggccttgtaagagtgaaagtatggaagataaagggactatgtatctgtatgaaggtcaaaagttttctactcctaatggtaaaggtaatttgttcgctgctgaatggagaccacctatggaagttgaagatgatgaatacccatttagtttatgtactgtaagagaagttggacactattcagtaagaacaatgactggtaattgtagaacacttagttcattagaagatgaaccaggacgtgttcaaataaattctaatgatgctgaaaaattaggaattgaagatgatgaattagttagaattagttcaagaagaggaagtgtaataacaagagcaacagttactgatagagttaaggaaggtgcaacatatatgacttatcagtggtgggttggagcttgcaatgaacttacaatagcaaatttagaccctatatctaaaacaccagagtataaatattgtgctgttaaacttgaaaaacttgaagaccaagaattagcagaaaaatgtgtaagagaagagtatcaaagtttgaaagacaaaatgacagctacaaatatc

SEQ ID NO: 17172 - DNA, 780 bp, Clostridium difficile
atgaactgtataaatactaagaatctaaatgtatcatatggaaacacagatattataaaaaatttaaatttaaatataccaaaaggaaaaataactaccatcataggggctaatggttgtggaaaatcgacaatacttaaaactataggtagaattattagccctaatagtgggaaaatatatataaatggagaggacatctacaaaaagaagtctaaagaaatagcaaaagatatggctgtacttccacaaagccctcaagcccctagtggtcttaccgtttcagaattaatttcttatggaagatttcctcataaaagtggatttggtaattctagtaaagaagacagagagattgtaaattggagtttagaagttactggaattgcagaatttaaggatagaaatatggaagatttatcaggaggacaaagacaaagggcatggatagctatggctttggcacaagaaactgatatattattactggatgagcctacaacatatttagatttggcacatcaattggagatactaaaattattagatgaactaaataaaaaacaaggaagaactattgtcatggtaatacatgaacttaataatgcagcaagatttgctgaccacatgataggtattaagaaaggtaaaatagtttgtgaaggtgatgcatatgatgttatgacgaaagataatctaaaagaattatttaatattgatgcagaaatagcagcagacccaagaacaaataaaccaatttgtataacttatgacatggtg

SEQ ID NO: 17173 - DNA, 1200 bp, Clostridium difficile
atgtcaatgcttaacaaaaaaactatagaagatattgatgtgtgcggaaaaaaagtattagtaagatgtgactttaatgtgccattacaagatggtgtaattactgatgaaaatagattgaacggagctttaccaactattcaatatttaatttctaaaggggcaaaagttatattatgctctcacttaggaaagccaaaaggagaagctaaaccagaattatctttagcaccagtagcaaagagattatctgagatgttaggaaaagaagttgtatttgcagcagacgataatgttgtaggagaaaatgcaaagaaagcaactgaaaaaatggaaaacggagatgtagtattattagaaaatactagatatagaaaagaagaaactaaaaacgaagagaatttctctaaagaactagcatcacttgctgaaatatttgtaaatgatgcatttggaactgctcatagagcacattgctcaacagttggtgcaggcgagtttttacaagagagagtttgtggatacttaattcaaaaagaattaaaattcttaggagaagctgttgcaaaccctgtaagaccatttacagctatacttggaggagctaaagtttctgataaattagctgttataaacgaattattagaaaaagttgataatctaataataggtggaggaatggcttatacattcttaaaagctcagggttatgaagtaggaacttctttacttgaaatagataaagttgaatatgctaaagaaatgatggaaaaagctaagaataagggtgttaacctattattaccagtagacgttgttatggcagaccactttgcaccagatgctactccaatagtaacagaagatgctaatgtaaaagaagattacatgggactagatatgggacctaagactatagcaaactttgtaaaaactataaaagaatcaaaaactgtagtatggaatgggccaatgggagtatttgaatttgaaaactttgcaaatggtacattatcagtagctagagctatggcagagttgactgatgcaactactgtaattggcggtggagatagtgcagcagcagttaatcaattaggatttggtgacaagatgactcacgtatcaacaggtggaggagcatcactagaatttttagaaggtaaagaattaccaggtattgcagcattagataataaa

SEQ ID NO: 17174 - DNA, 813 bp, Clostridium difficile
atgttagcgaggaggggtcataaattgtataaagtagatttaaatagtgatttaggagaaagttttggaacgtataagattggtttagatgaagaagttttaaaatatatttcatcagctaatatagcttgtgggtttcatgcaggtgaccctagtcatatggaaaaaacagtacagctagctaaaaaaaatggagtgaaaataggcgcacatccaggtttcctagatttaataggatttggaagacgtgagatgaaaataacaaagcaggaagctaaagattatacaaaatatcaattgggtgctttaatggcatttgcaagttcaaatggatgtaatatacaacatgtaaaaccacatggagcattatacaatatggcagctaaagataaagagttagctatggggatttgtgaagctatatatgaagtcgataaagatattatactgttggggctatataatagtgaaatgataaattctgctaaagaaattggacttaggtttgcaaatgaagtatttgcagatagagcttatgataataatggttttttggttccaagaagtgtagaaggagcagttatacatgatacaaaacatgcaatagatagggttgttaggatggtaaaagaaggaactgtagaaactttaacaggtgaagttatacatatcaaagcagattctatatgtgtacatggggacaatccaaaagcaatagagtttgtcaaagaaataagaaagcgttttgaattagaaagtatagaagtttgtccattagaaaacatagaagtttgttcgtcagagaacatagta

SEQ ID NO: 17175 - DNA, 1611 bp, Clostridium difficile
atgaaagaacagctgatttttaatattacaaatttagtaacggttgtatttgaagcttttgtcatccatatgtttttatcagactttttaggccagaaagaagggtatataaaagttgtaagatatgctaaactgggttttataatatgtttaggattctgtaatttaataactttaaaccctaaaatcacaatgcctttaattttcatccttattttttcaacatcatttttatataaaggaaatttaaagacacgattgtttactactgttttattaagtatattctttatactgtcagaaattgtagttacaagtatttttgttttatttgtaaaagaaggctttgaaataatgcttgaaaataatagtataagagtattggcgacaattttatctaaaattgtctttttgttgacttgtaaaattatttgtctatttaaaaaagatgtacatttagatatgcccataaagtattggctccctttatttttaatacctatatttagtttatttctgtctgtttctatctttgatgtaagtaaattttttagtcttgaaagtttaaaatttctaagcttaatatctagtgttggtattttatatattaattttattgtcttttatttatttaaatttattatagataaaactaaactatctatgaaatatgaactacttgaaaaagaaataattcataaggaagaattaagacttagtaatgagtgttataaaattattgttgaacagactgattctgtcgttttcgaatggaatatcaaagaaaataaatcatttgtatcgcaggcttggactgaaaaatttggatataacaatgcatgtaagaatatttttaaagaaattaaagataaagacttagttcattctgaagataaagctatatttgaaggttttcttgaaagtattaaaaaaaagaatatgcacaatcaagcagtatatcgtttaaaaaaatctaatggtgaatatatttggtgtagaacatcaattacaagtatttataatgatgaaaatgaacttttaagagttgtcggagtaattgtagatgtagatagtgatataaaaaaatatgaagagttaagaactagagcagaaagtgactcattgaccaatatatacaataaaggtacatttgaaaaattagtggaagaaactatagttatgaatacaggtgataaaaaagatgcattattcattattgatttggatgattttaaagaaataaatgataattttggtcatccatttggtgattttgtactaaaaacatttgctgataagatacaaactagttttggtagtaaagacttagtcggaagaattggtggagatgaatttgttgtatatatgcaagattatgttacagaagtaaatttgcataaaaaagctaaagaattaaatagagtactttcggataattacactgatttgagttttagttttgatgcttctgtcagtataggtattgcaaggtatcctcaagatggaacttcattttttgaattgtttaaaaatgcagatagagcactttatagcataaaagcatcaggtaaaaattcatattgtttatttgaagaagaactatatgtacag

SEQ ID NO: 17176 - DNA, 606 bp, Clostridium difficile
atgtacggaatagcaacggctttggcaggaactcagggaaactataggtcaaataacttaagccaacttgaaagaaatattaatgatattgccaataaacaagttagaagcaaaggaaatcagacagtaacagacaatgggactccaattataggacaaggtgatgatgctgataaagacttgtttatgaagatacttgtggcacagatgggtaatcaagacccaatgaatccgcaagacccaacagaatatgtgtcacaattagcacagtttgcaactttagaaaagatgtcagctatgaatgagaagctagatgtacttttagccttaagtaattccactctaataaactctgctttgagtatggcaacatcattaattggtaaagaagtagaagtatctggggaagagaaagaagatgaaaacattgtaggagtagtaaagtccacatatataaaagatggggaagtacacttagaattagaagtagatggaagtgacaaaactgtaggtgttaaatatgaaaaattacttaaaataggagaggtagatgaaaattcaggagaagaaaatgactcttcagaacaagaatctccagaagaagca

SEQ ID NO: 17177 - DNA, 801 bp, Clostridium difficile
gtgtcattaattgtgtttgattatggtaaaagaacttatataatgggaatattaaatgtaactccagatagtttttctgatggaggagattttaataacttggacatagcaatacaacatgcaaaagatatggttgaccaaggtgcagatataatagacctaggaggagagtctacacgcccaggtcatagctatgtagactcagacgaagagctaagaagagtaatccctgtaataaaaaaacttaaacaggaattggatataccaatatcaatagacacttataaggcagatgttgcagaagaagcattaaaattaggtgtcactatggtaaatgatgtttggggtcttagaaaagataaaaatatggcttctgtaataggaaaatatgatgcagaagtgtgtataatgcataatcaagatgggacaaactatgacaaagatataatggagtcaataaaagacttttttaaggtaagtatagaaatggcaatgagttgtggtgtaaaaaaagaaaaaatagtacttgacccaggtgtaggatttggcaaggattttgaacaaaatattgaagtattgagaagattaaatgaattaaaagatttagggtatcctattttgcttgggacatccagaaaatcagtaataggaaaagtacttccagttgagcctaaaaaaagattagaaggtacaatagctactactgttcttggtataagagatggcgtagatatagttagagtacatgatgtttatgaaaatttaatggcagctagaatgactgatgcaatatatagaaag

SEQ ID NO: 17178 - DNA, 993 bp, Clostridium difficile
atgataatgcacaaatttataatacatgttttagataagaatagtgatacaccaatattgaatgattttgaaggtagggttaatcaagatatggtcctattttttcaaaagaaaataagcaaagtatcaagagataatgatatcagaacagcagtatttaatgactatagtaacaatctaattaagaagtgttgtgaacaaattatttatgatgaaagttcatttttaaataactctaaagagattgcagcttatttatttgatgttatgaagcttaatgctacattagaatcttgcgacttatcaatttgcttatactctcaaaaagatgaaaagaaagttgctatattaaagcttgattacaataattcgtatactcattcaattgagtttaaagatgataaatttaatatacagatgtctaaaaatgaaattaatatacaagagactaaagcaattaaaattggtgcattgattggattaagtggaattaatgacgaatatcatctaaaagtattggataaagatgcagagaaggaagaagctaattctaagtttgttacagagtttctaaatgctactaaagtgaaagatgataagtataagactaagatgtttaaagcttttgtggactcttatatagcacatttatatagtgatatgaagcagggcgaagatgtaagaggaatgttactttatatgttaagagaaaaacaaaaacttgatataaatgagtttgctgataaggcgataaaggatgatttaaaagatagttttaaggaccatatagaagaaaaagggattgaaagttttaatattgataaaaaatgggttgaaaagaatttaaaaaatagacatataaaaacggatacaggttttgagataaaaggtaaaatggaggattttgaggattttatgaaatatggtattagacataatggaaatggaactgtagatatagttattaaaaatgttaatttatataatgagaag

SEQ ID NO: 17179 - DNA, 648 bp, Clostridium difficile
atgagattttttatagacacagccaatattgaagaaataaaagaagcaaatgatttaggtgtaatctgtggtgtaactactaatccgtctctaatagctaaagaaggtagagattttatagaggtagttaaagaaataagtgaaatagtagatggaccaataagtgcagaagtaataagtttagaacataaaggtatgatagaggaagcagaaaaattatctaagatacataaaaatatagttataaagatacctatgacagcagaaggtctaaaagcggtgaaagtactatcaagtaaaggtataaagactaatgtaacgcttatattctctgctggacaagctcttttagctgctagagctggagctacatatgtaagtccttttgttggtagattggatgatatatcacaaaatggtcttgatttaattgaagaaatcgttgatatatttagtgtaaatagtattgaggctcaaataatagttgctagtgttagaaatccaatacatgttttacaagctgctagaatgggagcagatatagcaacagttcctcttaaagttataaaccaaatgattaagcatcctttgacagacaaaggaatagatagctttatgaaggattgggaaggtgcttctttaaaatta

SEQ ID NO: 17180 - DNA, 1134 bp, Clostridium difficile
atgatagagataagaaatgtaacaaaaaaaataggaaataatgttatattagatgatatttctctagttgtagaaacaggtacattggtagttttgattggttcaagtggttgtggaaagactactactttgaagcttataaacaaattaataaaacctacatctggtgagatatatattaatggcaaaccaatttctcaggaaaatgaaatagagcttagaagaaaaataggatatgttatacagaacacaggcctattccctcatcttacaataaaagaaaatatagagctaattccacgcctaaaaaaggaaaaatccgttgaagaaattgaaaaaagaacattgcaactacttgagatggtaggacttgatagtgatgaatttttgaataagtatccttcagaacttagtggtggacagcaacaaagaatcggtgttgcaagagccattgctactgatgctgaaataatattgatggatgagccttttagtgctttagacccaataacgagaacatctttacaagaacaattattttctcttcaagatgaattgaaaaaaactataatatttgtaacgcatgatatggatgaggctttaaagatagctgataaaatttgtattatgaaggatggaagaatagcacaatatgatactcccgaaaatatacttagaaagcctgcaaatgactttgtaaaagattttatcggagaagatagagtttgggataatccagaatatataaaagcaagagatattatgataaaaaatcctattgctgttaattctactagaactgtaactcaaggaatagaaattatgagaacgagtaaggttgatagcttactaattatagatagagcaaaaacattaaaaggtattgttactgtaaaagatatgaaagatattgatgataagtcaatattacttgctgatattatgtcaagtgagcctttgcatgtaaatgaaggtgataatttagtagaaatactaaatgtaatgaatcgtaattcggttggatatattccggttatttctgatgaaaataaactggtagggcttattactagaagtagtttactttctgttttaagtgaacaattcttagaaatggaggtgagtgttcttggc

SEQ ID NO: 17181 - DNA, 186 bp, Clostridium difficile
atgaaagcaaatgttaatcaagatacttgtataggttgtggattatgtccatcaatatgtccagaagtatttgatatgaaggatgatgggaaatcacatgttatagttgatgaagtaccaagtgatgctgaagaatcagcagcagaagctagagaaagctgtccagttgatgcaatagatgtgcat

SEQ ID NO: 17182 - DNA, 354 bp, Clostridium difficile
atggcaagagttaaaaaagctatgaacgctcgtaaaaagcataagaaaatattaaaacttgcaaaaggattcagaggatctagaagcaaattatatagaccagcaaatacattcgtaatgaaagcattaaaaaatgcttatataggaagaaagttaaagaagagagacttcagaaaactttggatacaaagaataaatgcagctgctagaatgaatggaatatcttattcaagattaatgaatggattaaaattatctggtgttgaagttaacagaaaaatgttatctgaaatggctatacaagacccagaaggatttgcaaaattagcagaagttgctaaagcaaaattagct

SEQ ID NO: 17183 - DNA, 1935 bp, Clostridium difficile
atggaatttgaaaaagggagtatttcaattcatacagaaaatatttttcctataattaaaaaatggttatactctgataaagacatatttataagagagcttataagtaatggatgtgatgcagtaagtaaacataaaagacttgtatcactaggagaaatatcagaaaataagtcatcagattataaaattacagtatctgtaaataaaggagaaggtacacttaaatttattgacaatggaattggtatgactgaagaagagataaaaaaatacataaatcaagttgctttttcaggtgctgaagatttctttaataaatataaggataaaatggaagagtcaaatgatataataggtcattttggattaggattttattctgcatttatggtgtctaaaaaggtacaaatagatacactttcatatacagaaggagcgactcctgtaagatggatatctgaaggtggtacagaatacgaaatatctgaatcagatgctagaaatgatagaggaactactataacactatttattgatgatgatagtaaagaatttttagatgaatttactgtaagaggaataataaataaatactgttctttcttaccagtagaaatatatttagaagatgttgaaagattagaaagagaagctaaagaagcagaagaaaaagctaaaaaacaaaaggaagatggaaaagaagagattgtagatgcaaaagtaattgagcctttaaacgacactaatcctctatggttaaaatctccaaaagactgtactgatgaggagtataaagagttttatagaaaggtattcaatgtatttgatgaacctttattttggatacatttaaatgtagattatcctttcaatttaaagggtatactttacttccctaaattaaaaaatgagtttgaactgactgaaggaaaagtaaaattatacaacaatcaagtgtttgtggctgacaatataaaagaagttataccagaatttttacttttattaaaaggagttatagactgcccagacttaccattaaatgtatcaagaagtttcttacaaaatgacagggatgtaagcaaaatttctaaacatataattaaaaaagtagctgataagttgaaatctctttgtaaaaatgaaagagaagaatacaataagttttgggatgatatacaaatatttattaaatatggttgcttaaaagatgaaagtttctatgagaaggtaaaagaatgtatattattcaaaactattgatgatgagtatataacattacaagattatttagaaaaatgtaaggacaaacatgaaaataaggtattttatgtaagtgataaggaacagcaatctcaatacattaaactatttaaagaatacgacttaagtgctgttgttttaaactcatcaatagatactcattttatttcatttatggaatataaagagaatggagttaagtttaatagaatagatgcagacctttctgatgtattaaaagataaaaatgaaaataaagatagtgaagaaaacaaagaagagatagctaagatagaaggtctgtttaaagaagctgtcggagaaagagtgaagaattattctgtagaaggattgaaaaatgaagacactccagctatggtattagtatcagaacaatctattagaatggcagaaatgcagtcaagatttgctggaatggatttaggaatgaattttgaggaagaaaaaactcttgtaataaatgagaacagtccaataatcaaaaaattggtttctcttaaagatgatgaggaaaagaaagataagattacgcttatttgtaaccagatagcagatttagctttactttctaataaagaattaaagccagatgagttagattcatttgtacaaagaagtaataagcttatgagtcttttgatagaatta

SEQ ID NO: 17184 - DNA, 2511 bp, Clostridium difficile
atggaggattgtgtagtgaatttaaaaaaattacttttattaattattgtaattacatctatattcacttcttgcatattttcttttggtatcaacgctataggtaatgataatcgtaccattcgtgttgcttatcctattcaaaaaggtttaactgaaatagatgagcaaggtaactattttgggtatacatatgaatatttactagaaattgcacagtatactggatggaattatgaatttgttcaagttcctggagagataaatgaatctattacaaaattaatgaagatgttagaaaatggtgaaattgatataatgggaggtatgttatacaatgagccaatgcaaaaaatatataattatgcaggaaatagttatggagtagcaaatacagtactacaagcattatatgaaaatacagatattgataacataatgagttcacaagatgtgaaaaaaatccgtattgctgtaatagaaaattctgatactagacttaaagaattagatgagtattgtaaaatgaatcttatgtcacctgaattggtatattgtaaaacaaatgatgagcaactagaagcactaaagagtggtaaagcagatgtacttcttaatgtgagtatgaacccaatagaaggtgtacgtactgtagcaaaattttcatcaaaaccattttatttcattactcctaaaggtagtacaaatttaactcaaaagcttaactcagcaattaataatattgaacagaaagacccatatttttcaactactttatatgaaaaatactttacaccagagaataatcaaatgtttttatctgatgaagaaactaattacattaaagagacagaaaaattaaaagtaggagtacttttaaacaaaccaccatttcaaaatatagataaagatacaggtgaattaagaggtatatcaattgatttgttaaatcatatatgtgataaaacaggcttagaatttgaacttgtgcctgtaaaatctcaagaagatttagaaaacatgactaaaaagcgtgaaattgatattgtagcaggaatgatttatgattatgagtactctcgtgaacataatatagctatgtctcggccttttctttctactcaatatactatgatgattaataataaattaaatgagaatagtctaaatggaaaacgtatagctctaaccaaaggtgttaattattatggccagtttgaagagaatatagtttggtatgataatttagaagagtgtatagaagctgttaataaaggctatgcagattacacttatggagaaggttattctatgcagtactatatgaatcaacctaagtataaaaatgtgcgtctagttcctcaaacctataaagcaaagagtatttgttttggtataattaaaaaagataaacaagaattattgaatatatttaataaagctattataagtatttcatcagaaaaaatgcaatcaattgtctaccaaaatactacatatagacaagatttctcgttgctttatattatgcaacagaatccaattgagactatttttattgtagccagtttattaatttgtattattggatttatggcatttggtttacatactcgtacaagtatgaacgagaagatatctttggaactcaaaaaacatactcagttgtatgaaatgacaagtgaatacttttttgagtatgattataagcaagataaattgataatttctatgccagaaaagggtattgaaacttattatggtttggataaaaatgataaggaaagtgaaaatggcaatatagaaaatgaaagagataaaataaggaaagaatataataaaaagttttttgatgtaataaaatcacaagaaaatggaacaactgaaatgtattctattatgcttgatgatacttttcattggattagagttacttcaaaaataatttataatgatagaaaaataccaatgtatgtaatcgggaaaatatgtaatattgattctgaaaaagaggaaaagaatagattgttagataaggctcaaagggatagtttaaccaatatttataatgcagcatatattagaaaattaactgcacaaaatttgttgaatttatcaactgaaaaaaatggtgctttattgattatagatattgattattttaagtcgattaatgatacttatggtcacttgttaggagataaagtacttattgatgttgcaaaggtacttgatgaaagttttgcaaaaaatgatatagtaggtcgtttgggtggagatgaatttagtgtttatatcaatgatataataaataaggaagaacttattaataaatgtaatgatgtatacaatcatattcatctcattaagttgccaaatggagaaagtttatctattagtatgggggtagttatagcaaagcctggtcaagagtatgatgaactgtatcaaatagcagataatgctctttatgattctaagagacaaggaagaaatagatttaaaatagta

SEQ ID NO: 17185 - DNA, 1119 bp, Clostridium difficile
atggaggcaaaaaaattaggatttggattaatgcgtttaccaataaaagatgaaaatgatgttacaactattgatatggaacatttaaataaaatggtagacacttttctagaaaggggatttacatattttgatacggcttatgtgtatcacatgggaaaaagtgagatagcacttagagaatctctagtaaaaagacacaaaagagagagttttactatagctacaaaacttccattaatggctttaaagaaaaaagaagagcaagaaaccatttttaatgagcaattagaaaaatgtggtgtagactattttgactactatcttttacacaatataggcgtgtcacattatgaagtagctaaaaaatttgatagctttaagtttattgaagaaaagaaaaaagaaggaaaaataaagaatattggtttttcttttcatgatagtgcagaattattggataaagtcttgagtgagcatccagaagtagacttcgtgcaattacagattaattatttagattgggataatgaaagcatacaatctagaaaatgctacgaggtggcagagaagcataataagcctgtaattgttatggagccagtaaaaggaggtacacttgcaaagataccagaaaaagcagagaaattattgaatgactacaatccagatatgtcaatttcatcttgggcaatacgttttgcagcaagtaaagataatgttatgatggtcttaagtgggatgtcaaatatggaacaattattagacaatacaggatatatgcaaaatttcaaaccattcgtacaagaggaatataatattatagatgaagcagtagagattatcaacgaatcaattttagttccttgtactgcctgtcagtattgtgtagaaggctgtccaaaaaatatcgctattccaaactattttgcgttgtacaatgcagaaaaacaagctcttaatactggattttcaacacagatggtctactataataattatactaaaacttatggaaaggcctcagattgtattgaatgtaaacaatgtgaagaaagctgtcctcaacacattaaaattatagatgctttaaagaatgtagcagaaacctttgagaaa

SEQ ID NO: 17186 - DNA, 1359 bp, Clostridium difficile
ttgaagggtgataatatgaaagagcaaattaaagaaaaagtaaattctctacaagatgaaatgatttcttcaatacaagaaagtgtaaaaatacctagtgttatatctgaagcaactgaaaattgcccatttggtgaaaatgtagataaagctttaagaggtatattagacttatgtaaatctttaggatttaagacagtatacaaagatggatattatggatatgcagaaataggacaaggtgaaaaaatgataggtatacttggtcacgttgatgtggttccagaaggtgatttagaaagctggaattaccctccatttgaagctgttttagaagatggtaaattgtatggaagaggaacacaagatgataaaggacctacaatatcagcaatttatgcagtgaaagctcttatggatttaaatgtagactttaataagaggataagattcatttttggggctgatgaagaaaatctttggagatgtataaataaatataaagaaaataatgaagaaataccaaactatggatttactccagattctagattcccaataacaaatgcagagaaaggtcttttacaagttcatttgacttgtgatagcaaaagtgatatagagttgtcagttggaaaggctttaaatgcagttccaggtaaagcaatctatattggaaaatactctgataaattaaaaaaagaacttgataaattaaattttgagtatactgttgaaggtaataaaatctgtataattggaaaaagtgtccattcagcagcaagtgatactggtataaatgcagtggctagactttgtatagctcttaataatataggtatagattctaatataattaagtttttagcagaagttattggtgaagatgctaatggaaacaatataattcctaattgcaaggatgatgtatcaggtaaactaacagtaaatataggtagagtaactattgataacgaaaaagaatttgcaggaatagatgtaaggattccagtaacatataaaaaggatgattttgtaaaagagttaaagaaaatgacagataaatacaatttaaattatgaagaatatgatttcttggattcaatctatgttccagaagatactcttcttgttaagacacttagaaaagtatatgaagaagaaactagtcttgatggaacaccactttcatctggaggagcaacatacgcaagagctttagataattgtgttgcatttggagctatttttccaggaaaaccagaaacagaacaccaagctaatgaatacttaatagtagaggatattataaaagctactcaaatatatgctctttctatttacgaattattaaagatt

SEQ ID NO: 17187 - DNA, 450 bp, Clostridium difficile
gtgaaggggatgtcccttaagcaaaagttacaagaggatttgaaatcttcgatgaaaaacaaagatacagtgagaaaatctgtagtaactttaataagagcttctataaagcagtatgaggttgataatagggtcgagcttgatgaagatggaattatcgatgtaatagcaaaacaattaaagcaacgtagagatgcattagttgaatttgaaaaagctggaagagaagacttaataaaagaaacagaaggtgaaattgaagttttaaaagagtacctacctcaacaattaagcgaagaagagttagaagaaattgtaaaatctactatatctgaagtaggggcaacttctatgaaggatatgggaaaaataatgtcagttatccaaccaaaagttaaaggaagagctgacggaaaacttataaataagttggtaaaacaaaacttacaa

SEQ ID NO: 17188 - DNA, 654 bp, Clostridium difficile
atggaattacaagatactatttttaaaagacaaagtgtaagaaagtttaaaaatcaagatgtatcagatgaagatattttaaaaatgataaaagcagcaggtgcagcaccatcaggcaagaatattcaaaactggcattttgttgttataaaacgccgtgatttaatggaaaagatagcagatgtgataactaaaaagcaacaagaaatacttgtagaaatggataaagtatcagtggataaggctaatagatttagaaaatttgttaaaaattttacactattttacttaaaagctccagttttagtattagtttttacaaaggtatataatccatcaggatattatgaattagagcttatagatgcacctaaggagactatagataaattatttataagaaatccaggtatgcagagtctaggtgctgcaattgaaaactttacactatcagcaattgaacttggatatggttcttgttggttgacaagtcaaaactatgcagcagatgagatagaagctgttttagaagcagaaactggttttgaaaagggagagtattttttaggtgcaatgttagctcttggagtgccagaggacaatttgaagagtccatctaaaaaaccagtagaagaaatatgtacatttataaaa

SEQ ID NO: 17189 - DNA, 834 bp, Clostridium difficile
ttgctaacagagttacattgtcatacaagtatatcagataataattttactactgaagaaataataaaaaaagcagcagaaaagaatataaatatcttagcaataacaaatcatgacacattatctggattggatgaagctcttgtgcttggagagcattatggaataacaataataccaggtatagaaatttcagcctatgattataaaaatagaaaaagagttcatattcttggatataacatagatttaaacagtcaagaaataaaaaatttgtgcaatccaatggtatgtgacagacataaagcatctgttaagatggtaaataaaattatagatttaggatacaaaatatctctggaagatgtaaagaaatattcatcaaagactggaatatttaaacaacatataatgaaagctcttatagataaaggatatacagataatatatattcaaatctatataaagaattgtttcatagaggaaacggcaaggtatatgtatctttaaaatatgtggattacagagatgcaataaaagctataaaaaattctggtggaatttgtgtgttagctcacccgggtcaaatggataattttagcgctattgaagagatggtaaaagtaggattagatggaatagaagtatatcatccatctcacaacaaagaactagaaaaagagtcgctttcttatgctaagaagtataatctagtggtcacaggaggttcagattaccacggattttattctcaacataattatgaacttggaagcaagagcttaaataaagaagatttatttaagtttaggttagctttaggaggggtatta

SEQ ID NO: 17190 - DNA, 183 bp, Clostridium difficile
atggctaaattacaaataaagttagttagaagtgttataggaactactcctaaccaaaaaaagaatgttgaagcgttaggattaagaaaaagagaacaagttgttgtaaaagaagacaatgctcaaacaagaggtatgataaataaagtaagtcacttattagaagtaactgaaatagctgaa

SEQ ID NO: 17191 - DNA, 2286 bp, Clostridium difficile
atggctgttaacaggaggagaaatatgaatttagatacattaaatcctgctcaaagagaagcagtagaaaagactgaaggtccagtacttatactggctggtgctggttcaggtaaaactaaggtattaacaacaagaatagcatatcttatagaagataaaggtgtacaagcaccaaatatattggctataacatttacaaacaaagctgcaaatgaaatgagagagagagttgaacaaaatataggtcctgaaactaaggatatgtggataagtacattccattcttgctgtgttcgtatactaagaaaagatataaataagattggttacaatagaagttttgtaatttatgattcagcagaccaagttacattggttaaagactgtctaaaagaattaaatttaagtgataaagtgtttgaaccaaaagcagttataagtgcaatttcaggagcaaaagacaaactttatactccaaagcagtttaaagatatcaatatggcagataatagaatggttaagattgcagatatttatgcgctatatcaagaccgtttaaaaagaaatagtgcacttgactttgatgatttaatacttaaaactgtagaacttttcaaggctaatgatgaagtgttagcatattacagaagcagatttagatacataatggtagatgagtaccaagatacaagtaaagctcaatatgaattgataaaattattagcaagagaacatcaaaatatttgtgttgttggagatgatgaccaaagtatttatggatggagaggtgcagatataagaaacatacttgaatttgagaaagattatgacaatgtacatgttgtaaagttagaacaaaattataggtctacacaagtgatattagatgcagctaataaagtcatatctaataatatagaaagaaaaagaaaaaagctttggagtgaaaaaaaagaaggagaacttataaagatacaattaactggtagcgaaatagaagaggctgatttcattgctgattcaattgcacaaatagctagaaaagaaaatagaccttataaggattttgcagtactttatagagcaaatgcacaggcaagacctgtagaggacgctttaaatagaagtcaaattccatacaatatatatggtggtacaaaattctatgagagaaaagaaataaaggatttgttggcgtatttaagagttattcaaaatccacaagatgatatatctataaaaaggattataaatgttcctagaagaggtatagggcttagaactatagaaaaaattgaagatagagctaacttaaaacaggaaagtatatactcagtattaattgatatagaaacaaattcagatatatctactaaggcaagggcaagtataagtggatttgttgatattatagggactcttagaactataaaagaagtttatcctgttagcaaacttatagaaaaagtcttggatactacaggatatatggacgagcttgtagagataagaaataaaaatgaaaaagatttaacaggcaaaggtgaagaagctcaagacagaattgataatttgagagaatttatttctatagctttggagtttgaaagtagtaatgatgatacttatgaaaataaagacttagagacattcctaacaagtatagcacttacatctgaatcaaatgatgaagaagacaatgatagggtttcgcttatgacaattcatacatccaaaggtttagagttccctgttgtgtttttaacaggtatggaagaagggttatttcctatatcaagagctataaaatctatgagtgattcacaaatagaagaagagagaagactttgttatgttggtataactagagctaaagaagagctatatatgtcattgacagagaagagaacattatatggtaaaacaaatgttgcaatagcttcaagatttatggaagaactgccagaagaatgtatagaaagattgtacaaagtaaaaaaagaactaagctattctaaagcaagttataatatgttagataaatatactaaaaagtatatgagtactataagcaaatctaaagttgcagataaagttaatgctacaataaaagattctaataaagaaactaatccagatgatataaaacttggttctaaggtacatcatcctaaatttggggttgggacagtggtttctataattggtacagatgttactatagcttttgaccaacagggaattaaaaaaataaataaagaatatacaacactaaatatttta

SEQ ID NO: 17192 - DNA, 702 bp, Clostridium difficile
atgaatcaagcgcattattatctcataggaaactttaagattagtgaaacaatactagtaagttggggaataatggcctttttagcgatagcatcttattttttgactagaaacttaaaaaaagttccaactagtaaagttcaaatattcttagaatttgcagtaggtggtcttgctaaaatggttacagatgttatgggtaaaaatacagtaaaaagaatgccatatatgataccatacataggaagcttgtttttatttttcgcatgttcaaatttaagcccattacttggattaaggtcaccaacaaccgacttagacacaactgctgcatgggcaatgattacattttttatgatttattttgcaggagttaaatttaaggggttatcatactttaaagaattggctcaaccacttgccataatgttaccaatcaatattataggtgagttagctagaccaatatcattaagtttccgtccatttgggaatattttaggtggaacaataataatgggtctgttttatcaacttttaggttttatatctagtttaataccaggattatcaataccaattggagaaatattaataccagtcccattacacttgtactttgacttatttgcaggattgttacaagcatatatatttataatgttaacaatggtatttatatcaagtgcaggagagttagat

SEQ ID NO: 17193 - DNA, 252 bp, Clostridium difficile
atggaaagaggaagaagaaaagttagaataggccgtgttgttagtgataagatggataaaacaatagtagtagctgttgaagaattcgtacgtcatccactatataataaacgtgttaagagaactaagaaattcaaggctcatgatgaaaagaatatatgtaacatcggagatagagttaaaataatggaaactagaccattatctaaagataagagattcagactagttgaagttgttgagaaagttaag

SEQ ID NO: 17194 - DNA, 1089 bp, Clostridium difficile
atgaagactgtttgttatttagctgatgggtcaaatcctcatactttaaaatggtgtagtttttttaaaaataaaggatatgacattcatgtaatttctttaaatggaggtcacatggaaggaataaaaatttataattttggttctaatgtagaagaactaaaaaatgaaaatatttctaaaaaaacgggatacttaggttcaataaagcagataaagaagctagtaaatgaaataaagccagatatattgcatgcacagtatgcaagtagttatggatttataggaagtctacttgggtatcatccatatattatttctgtttggggtactgatatttatgatttccctaataatggttttatacaaaaacaaattataaagcataactttagaaaagcagactatatcttttcaaatagtagagatatggctaaagaggctaataaatatacagctaaacatgtagatgtaaccttttttggagtagatatggataggtttaagcctatggaagtagaaaaagaagacgcttttgtaataggaattataaagagtttagaaaaaaaatatggaatagaatatttaatacaagcatttaagatgcttaaagatgaatataaagataagaaaataattcttaaaataggtggctctggaagtcagatggacaacctaataaatttagctaaagaattgggtatagaaaatgatgttcagtttttaggaagaatatctccagaaaatgtaagcaagacttttaattcttttgatgtaactgtatttccttctttaagagagggatttggagtggcagctatagaatcagaagcatgtgaagtacctgttatagttacaaatgtaggaggacatccagaatctgtatgggaaaatgaaactggcttaattgtagaaccaaaacaaccagaagaaataaaaaatgctataataaaactaatggaaaatgatgaacttagacttaatatgggtaagaaagggcgtcaatttgttagagaaaattatgaggttaatttaaactttaatgatatagaaaaaatttatgattctatatttgataaatataaaaaa

SEQ ID NO: 17195 - DNA, 1029 bp, Clostridium difficile
atgaaagcagtagttaaaactaaaccaggctatgataatgtagaagttttagaagtagaagaaccaaaagctacaggagacaaggttaaaataaaagtagaatatagtggtatatgtggttcagatatacattcatttaaaggtgaatatgcaaatataaaagccccagtaacattaggtcatgaattttctggaattgttgtagaagtaggagaagatgttaaaaatataaaaataggagatagagttacatcagagactacttttgcaacttgtgagaaatgtatatattgtgaaactaaagattataacttatgcccaactagaaaaggtattggtactcaagtaaatggaagttttgctgagtatgtattatcaagagaagaaagcatacatgtacttcctgaaaatgtatctttattatcagcagcccttacagagccactagcttgttgtgttcatgcagctcttgaaaagactactatagaaagttctgatacagttttaataataggaccaggaccaattggtttattattagctcaagttgttaaatctcaaggtgctacagttataatgtctggtgttacaaaagataaggaaagattagaaatagctaaaaatcttggagtagatagaactgtaaatgtaatggaagaaagtttggcagatgtagtgaatgaaatgactgatggaaatggagtaaacaaaggatttgattgttctgggtttatgccagcagttaacgaagccttaagactgcttagaaaaaaaggtactttcgtacaagttggaatctttgctaaaaaattaaatgaaatggaccaagaagcaataatccaaagagagttacaatatataggaagtagatctcaaaagccaagttcttggattacagcattagatttaatggcaagtgggaaagtaaatacagaagctttagttactagaactgttggtttagacgaatttaaagaaggtattacagctttaatgaacggggaagaaataaaagtagcagtaaaatct

SEQ ID NO: 17196 - DNA, 720 bp, Clostridium difficile
atggctaaaaagcaacgtatagataaaattctttcaaatttaggttatggaagtagaagtgaaataaagaagtattgtaaacaagggtctgtagtagtaaatggaagtgaagtttcaaatccaggaactcaagtagacactgaaaatgatgagatattatttaatggagaagaagttatatatagagaatatatatatttgatgatgaataaacctgatggatatatatcagcaactacagataaatatgacccaacagtattagatttaattgatttatcatacttagcttttgaaccatttcctgttggaaggttagataaagacacagagggattattagttttaactaatgatggaaagctttctcatagagttttatctcctaagaagcatgtgcctaagacttattatgcaaaaattgatggagtagttactgaagaagatgtagaagcttttttagaaggtgtagtgcttgatgacagatataaaactatgccatcacagttaaatatattaaaaagtgatgatgaatcagaaatagagcttacaatacatgaaggtaagtttcaccaagtaaaaagaatgtttgaaagcgtaggcaaaaaagtagtatacttaaaaagattgtctatgggcaatttaaaattggatgaaagtttagagttaggtgagtatagagagttaacagatgaagaagtaaaattgattgaagaaaga

SEQ ID NO: 17197 - DNA, 858 bp, Clostridium difficile; identical to SEQ ID NO: 16791

SEQ ID NO: 17198 - DNA, 705 bp, Clostridium difficile
ttgaatataataggaaatttcttaggattgattcttaaggtaatatttgaatttgttaatcattatggtatttctataatactttttacgatacttgtaaagattattttattaccattaacaattaagcagactaagtcaacaaaggcaatgcaagatatacaacctcgtataaaagagatacaagaaaaatataaaaataagccagaaaaacaaaatgaagaaattgttaagttatatggagaagctaaaattaatccactatctggttgtttacctttattaatacagtttcctatattaataggattatttagcgttttgagagaaccagttgctcatggcgtttttgcaaacaaagctgcatttttagcagctgacaatgggtttttatggataaaaagcttaacatcaccagattatgtattagcagtattttcaggagcaagtgcatatgtcatgcaaaaagtaatgacaccaaaagatcagttacaaggctctatgaaagtaatgacatatgtaatggcaggtatgtctttctattggggatttatattcccagcaggacttacattgtactggacagtaagtaacttattctcaatagctcaatattacttaataatgaatcctttaaaagctaaactggctgctaactctaaggaggaaaaagttaatgagaaaaagcctaaaattaataaaaag

SEQ ID NO: 17199 - DNA, 1872 bp, Clostridium difficile
atggacggcaatatttcaatttattataaaggtgatatatctaaaaaagaagatattaaatttaaaataaaagaatctgtaaataatacaagactttctagtagaatagagtataaggatgaggaaaaaacttttgattttgaaagatttaatgtaattgatgctatttatggaaataaaccatttgaaaaagatggaaaagttattgtttttaatggaaatatatataactatcatgaaataaaagaagaattaattaaaaaaggacacaattttactacaaatgatgatattgaagtcttattggcatcttatatagaatttggtaagaattgtgtacataagattaaaggaatgttcaactttataatctatgatagagaaaatgaaagtatatttggagcaagagatttatttgggataaaaccactttattatataaataaggaaaatgcaataattttttcctcagagtataagtttttacttgaatatatgaaaaatttaaatataaatgaaagaagcttacaaagttatttttcatttcaatatgtacttcctgaagatactatgatacaaggaataaggctgataccagcaggtcactattttagggtagaaaatggtatactatctttaaagagatataataaacttgagtttagaagtagtacaaaatttttttatactaaaaatcacttaggcaatagagatgtgaacgaggatgatataagaaatatagtagtagattcaatagtaactcatatggaagaggagaaagaaattggaacatttctgtctggtggaatagattcatctattataactactgtggcttcacaaattaatccaaatataaaatctttttctgcaggctttagtgtcaaaggatatagtgaattagaggtagcaaagaaaacagctgataagttaggtatagaaaatatccagattaatataacacaagatgaatatataaaatcattaccgaatgtaatttattctttggatgaccctatagcagacccttcagaagtaggtctttatttcttaattaaagaggcaggtaaacatgttaaagtagcattgtctggagaaggagcagatgaattatttggaggatataatatatataaagagtatagtactatgaaatcagttgtcaattcacctacttatattaaaagtatattaggaagagtttcagaacttatgccaaacataaaaggaagaaattatctttatagagctacaacaccattagaaaaaagatatataggaaatgcaaaagtttttgaaaacagcgaagtaaaaagattcttttttaagtataaggaaaagaatatatatgaatacctgttgtctaatttgtatagagatgcacaaaaaaataattacgattatataagtaaaatgcaacatatagatgtgaatacatggcttcaaggcgatatacttcaaaaaattagcaaactttctacagctgagcaggttgaacttagagtaccatttttatataaagatgtatttgatgtagcaaaaaatttaagaatggagcaaaaaataaataagaataatacaaaagttttacttagagaggcgtttagagaaatagtcccagaacatgttgttcaaaggaaaaaattaggatttccaactccaataagagtttggttaaaagattctctaggggatattgtaaaggaaactatttataattcaaatgtagatgaatttatagataaaaaatatgcaataaaacttttagatacgcatcttaaaggtcatagagataattcgagaaaaatatggactatatttacattttgtctatggcatcaattatttattgagcataaaaatgtcgagtat

SEQ ID NO: 17200 - DNA, 831 bp, Clostridium difficile
atgagttggaaacatataaaaataccaaatggagatacaatgattttttgtaactcatttattaccagaaaatcatccatgaatattgttgttacacatactcctattgtcactacgcttgagatgcaaaaagcatatgaaccacttgccaaacataatgtaaatatatttgcttttgatttttcaggaacagggaaaagtgatggatatgaaaaagatttttctcgcaattcaattgtaaaagacttagattctgtcattacatacatagaaaaaaattattcttccaacatacatctatatgggaatacgggaattggtggtatgtttgcacaatattatgcatgttcagacaataagttaaaaagttttgctcagtttgcttgtgttgattataaaaacacaacaggagtaggctatacctatctcactgttaaattattaaactttttctttaagtttcttcctaattttcacataacagtaaaaccacctaaatataaaggttataatgaagtctatgataatgaattttataaaatatttgaaaagaaaaatcctcatatttggaaaaatagtacaaagataattaatacaatgttagaatgctttattgcaaaagatagtaagataaaagatggagtcaacatacctactcttgtctttaaaacacttcatgatagatattttaaaacccaatattttgatagctattataattcactaaaatgtaaaaagaaacttgttgaaattaataatgttcataatagttactatatagatagtgagaaattttgccaagaagcttatgattggtttgtagaaaaccag

SEQ ID NO: 17201 - DNA, 3435 bp, Clostridium difficile
gtgataagagcaaaatcgttaaaaaatgtactgagtattgttttaatatttttatttacaataatttctttttctgattttgcatttaaaactaatgtccaggaagaagaaaatagtaaaattaatttaagagaaatatccctacaaagttccaatgctataaaaataaaattagatagttctctatcctttattaaaagtgtggcaaatatggtttcttattttaatactatagataactcaaaaatagttccattattagctaatatatcaaaagaatctgactttcaaagaatctctattgtatctcctgatggaataagtcataccagtgatggcaaaattatcaatgtgtcaaagtatcagtattttaagaaagctattaaaggagaaagtaatatatctgaagttgtgaaatctccaattgatggaaaagatacttttgttatagctactcctgtatttaataagaataacaaaataattggtgttttatacggttcttactacaatgataaattagctgaatttatagatataacaagttttaatagtgaagggtacatagatatatttgaatctagtggtcaatttgttttaaaatcttcacatacaaacaaactgattaagtcaagtagtaacatatatgatatatttaaaaaagcttcttttgatgatggttatagctataaaaaaatatatgaagatacaaaaaataacaagagtggctttacctcatatgaatacaaaggagaaaatcgttatgctacttatacacccattggtgtaaatgactggtatgtaatttctgtgataccacaatatactgtaagaagaaacattgataaaataaatcaattagcattttctcttattttcaaggtattcttattgtttattatgcttataacatatattatttataaaaacaataaatctcagaaagatatactaaaagctaacaaagaaatctcatctattacaaatagcattcctggaggagtacaaaagtgtaccctgggtgaaacatgcaatattaattttttaagtgatggatttatagagttgtttggttatacaagagaagaaataaaaacattgtttaataatgatttttatagtttaatacataaagatgatgttgaaagaataaaaaaagaaatttttaaacaactttacaaaaataaaactgttgaattagaatataggattataacaaaaaatggtaatacagtatgggttttagataaaggggagcttataacagaacctgatggaaaagaatatttttgttgtgtaactgtagatattactagaacaaaacaattagaacaagagatggaacaaaaaaatctagaacttgaaatgatatcagaaaatgttttaggtggtataattataacagaatttaatgatgattttactataaaatacgctaactctggttatctttcaatgattggatatacacgtgaacaattagaaaatgaacttaaatacaaagcttgtaatcttgttttttatgaagatagaaagaaggctcttgaaagtatacaacatcaattaaacacaaaaggaatagctgtatatcaacatagaataagaagaagagatggtaatattatttgggtttctataaaaggaaggcttattgttgatgatgatggtattgaaaaaggtatttggattctaaatgatataacagatttaaaaaatgcagaacaaaaacttaaaataaatgaagaaagatttagaattgcattaaagcaaacatcaaacactatatttgagtatgatataaaaacaaagtcacttttaaatactagtaaagagcttgataaatataatatttataaaattactaaaaatgttccatattctctagtagaattaggagttattcataaagattttagtgatgattttataaatatgtatgaaaatgtaataaatggagcaaaaaaagcaagttgtgtagttaagatgaaacttccagatgaaaattatatatggaataaagttaccttgactacgatttttgatgaagatggtaatcctgtaagagcaattggtatacaggaagatataagcaaacaaaaggaagcagagataagatacaatcaagaaggtaagtatcattcagctatattgtcggaagcaatgataacttatgaaataaatgtatcaaaggatacttttatcaaaggaaatgaaagttggcaaaaaccatttggaattaagcctgacaataactattctcaaatggtaaaaactatagcaaatagtattgtacataaagacaataaagaaacatttttaaatacatttttatgtgaaaacttattggatgcatataaaaataatgtgactgaaataaaattagaatatcgaagaatgaatcaagaaaataaaatgatttgggtcatttgtacaatgcacttaataaaagattctattacgaacgatataaaagcacttgcttatgttaaagatattgacaagcaaaaaaatgaagaaattagattaaaattaaaagctgaaagagatactcttacaggattatataataaaggtactacagaaaaattgattaatgatttcttgaactctgaggaagcaagcttaggaatgcatgcatttttaattgttgatatagataattttaaatctgtgaatgataatttaggacatgtatttggagataaagtattatttgaagtttctaaaaacctaaaacctatatttagaaaagatgatatagtaggtagaattggtggagatgaatttatagtattcttaaaaaatattcagtcttttgagaatatcaaaaagaaagcagaaaaaatatgcgatatatttagaaattcttatacagaaaataaaaagacatataaaatatctggaacagttggaatttcatttgtaccagaacatggaactgtatttgaagaactttataaaaaagcagacatagcactttattatgcaaagagcaaaggaaaagataagtatgcactttataatgattgtatctaccaaaatgaacttgaaaataatataagtgataataatataaagttagcagataaatgtgagaaatccaaaccagtacttaaagaaattcttgattctattgataattatatctatatagtgaatccaaatacttatgaacttctttttgtcaataataaggtgtctcgtttggatttagagataaaattaggagaaacctgttataaatcactattaaaatctgatagaccatgtaataattgccctcttaacggattagaagaaaataagcattcaaaattcaaaatagagacaaatacatttggtaaaaatatcagtatagcaagttggattaattgcatagatggagaatacaactgtcttatagagtgtatagattcttctttatacaaaaataaa

SEQ ID NO: 17202 - DNA, 885 bp, Clostridium difficile
atgaaaaattacgtttgtatagatgttggaggtacttcaataaaatatggttttattagagaagatggatttataattgataaatcaagtcttgatactgaagcaaaggaaaaaggtggagaaggaatattagccaaaataaaagatatagtaaaaaaatatatagaggaaaatgaaataagtggtatatgtatatcaactgcaggtatggttgacccagttgaaggtaaaatactatttgccttagaagaattaattccaaactataagggcatgcaattaaaaaaagaagtagaaaaagagtttaatataaaatgtgaagttgaaaatgatgttaattgtgctggacttggtgaaatgtggcttggagcaggtagaggtgcaacatcttctatatgtttaacaataggtactggaattggtggatgtattataataaataataaactgataaatgggtttagtaatagtgctggtgaagtaggatatatgaatgtaaatggaagttcttttcaagaattggcatctactagcagtctaattaaaaaagtagcaaaaataaaaaatttgaatgaaaatgacttaaatggaaaaataatttttgatttagcaaagaataatgatgaagattgtttaaaagaactcgataatatgataaaatcattagcagttggaatcgcaaatatatgttatgtaataaatccagaagtggtaattttaggtggtgggattatggcacaagaaaagttcctaaaaccaaaaatagacaaagcattaaaggaggttcttatagagagagtttacaaaaacactaatatagaatttgcaaagagacaaaatgatgcaggaatgcttggagcattatataattttttaaacaaaata

SEQ ID NO: 17203 - DNA, 1938 bp, Clostridium difficile
gtgtcaaaaacaagagtataccaaatagcagaagaattaaatatatcaaatgaagagcttataaataagttagctgaattagatataaatgtaactgacaaagattcagtattagaaggtgaagagttagaattagcacttgaaatgttaggtgaagatttatctcaagaaaatggaaatgttatagaaatagatggaaagttgacagtacaagtattagcaacgaaattagataaatctccatcagaaataattatgaagcttatgaaaatgggaactatggcaacaataaatcaagagataagttttgagattgctgctttggctgccaaagactatggatttgaattaacagtagctgaaagtgatgatacagaagctttagaaatagaagctttaatggaaattgaagaagataaagaagaggatttaaaacctagaccaccagttgttacagttatgggacatgttgaccatggtaagacatctttactagatgcaataagaaaaactgatgtgatttcaggtgaagctggaggaataactcagcatataggtgcttcagaagttaaaatcaatggacacaaaatagtatttttagatactccaggacatgaggctttcacatcaatgagagcaagaggagcacaagttacagatatagcaatattagtagttgcagcagatgatggtataatgcctcaaacagttgaagctataaaccatgctaaagcagcaggtgtacctttaatagttgctattaataaaatagataaaccaggtgcaaacccagataaggttaaacaggaattagcagaccaaggattattagttgaagactggggtggagaagtaatagcagttccagtatcagctaagaaaaaagaaggaatagatacacttttagaaatggtattattggttgctgaaatggaagagttaagagctaatccaaataaaagagcagtaggaactgttatagaagctgagcttgataaaggaagagggccagttgcaacagtacttgttcaaggtggtactttaacagtaggtgacccaatcgttgcaggtgttgcatgtggtaaagttagagcaatgataaatgcaaaaggtaagagagtaaaaacagcaggaccatctacagcagtcgagatattaggtctatcagaagttccacaaggaggagaccaatttgtcgaagttccaactgataagattgctagaagtgtagcagcaagaagacaacaaatagttagagatgaaatgttaaaatcaactcaaagattatcactagatgctctatttagtcaaatgagtgaaggttctataaaagaccttaatatagttataaaagcagatgtacaaggttcagtacaggcagttaaacaatctttagaaaaattatcaaatgaagaagttcaagttaaagtaatacatggtggtgttggagctgtaacagaatcagacatattacttgcagcagcttctaacgcaataataataggattcaatgtaagaccagttccaggtgcagaatctctaggagaaaaagaaaatgttgatataagaacatatactataatatacaaggcaatagaagatatacaagcggctatgactggtatgttagaccctgaatatgttgatgaagaaacaggaaaagctgaaataagagaaatatataaaatatctggtgttggaacagtagctggatgttatgtgactaatggtaagatatttagaaattgtaaagtaagattagttagagatagcataataatacatgaaggtgagcttgcagcacttaagagatttaaagatgatgtaaaagaagttaattctggatacgaatgtggtatgagttttgtaaattataacgacataaaagaaggcgatatagtagaagcttatataactaaagaagtagaaagaaaatta

SEQ ID NO: 17204 - DNA, 1506 bp, Clostridium difficile
atgagaattatgaagggtaaggtttacttagtaggggcaggaccaggtgattataaactcatgactttaaaaggtttagagtgtataagaaaatcggatgtaatagtatatgatagattagcaaatagtagttatttaagagaagctaagcctgattgtgaacttatatatgtaggcaaggcatcaagtaatcatattttgccacaagaagatataaatagaattatagcagaaaaagctaaagaaggaaaaattgtaactcgtcttaaaggaggagacccttatgtatttggtagagggggagaagaagcagagactttagtagatgaaggtatagaatttgaagtagttccaggtataacttctgctataggaggtttatgttatgcgggtattcctataacacatagagaccatgcttcgtcatttcatgtaataacaggtcatttgaagggtgatgatagtggagaattaaactggaatgctcttgcaaataacaaaggtactcttgtgtttttgatgggaatttcaaacctagagaaaataagtgaaaacttaatgaaagaaggaaaagataaggatacacctgttgctcttataagttgggcaactagatataatcaaagagttgttacatctacacttgaaaatgtttatgaaactgctattaaagaagaagtaaaaccgccaactcttatagtagttgggagtgttgtaggacttagagaaaagttgaacttctttgaaagtaagcctttatttggaaaaagtattgctgtaactaggtctagaaatcaaaatagtgtattggtagaaaaaataatggatttaggtggaaatcctatagaaatacctactattaaggtagaaaaaatacaaaataatattaacttagaaaatgaaataaaaaatataaataagtataattatctaatactaaccagtaaaaatgccgtagaaatcttctttgaaaagatatatgaaatgaattttgatttaaggatattatctaatttaaaggtatgtgctataggttctgctacatcaaatgagttgaaaaaaagaggaattatagcggatatagtaccaaaaaaatttgtagcagagtcactgtatgaagagttagcgcctattttaaatgatgacgataatatacttatacctagagcagaaaatgctagagattatctggttgacaaacttaaggctatttgtgaagtaacagaagtacatatatatagaacagtaatagatgaggagaaaaaaggtgagatattagatattttaaattctaatgacatagattatataacatttactagttcctcaacagtaaataatcttgttgaaattataggaaaagaaaatattaaaatattagaaaaaataaaaacactatctataggtcctataactacagagacaataaatagtttgggaataaaattgtacaaagaatctgctacatctactatagattcgttagtagatttaattataaaaaat

SEQ ID NO: 17205 - DNA, 900 bp, Clostridium difficile
gtgattattatgttagagattatagttcctgcaacaagtgctaatataggtccaggatttgattgtcttggaattgcgttaaatatatacaataaattttatgttgaagaaattgaaagtggtcttgaaatagaaggttgtgaagatgcttacaaaaacgaaaataacttagtttatacatctatgaagtacttttttgatagagttaaaccagaaaaaatacctgctggtatcaaaataaaaatccaaagtgaagtacctatatgtagaggtcttggcagtagtgcctcttgtatagtagctggagttatagctgcaaatgctctatcaggtgctaatttagataaaaatcaattactaaatatagcttcagaaatagaaggtcacccagataatgttgctcctgctattttaggaaatatgattgtatctgttactgataatgagaatatacattatgatattataaaaattcctgaagaacttaaattttgtgcaatgatacctaattttaagttatcaacagaaaaagctagaggtgttttaccaaaggaaataccatattctgatggggtattcaatgttagtagagttgctttactaatatctgccttactaaacaaaaactttgacctacttaaagtagcttgtcaagacaaattgcatcaagattatagaggaactctaattgagaactacaatgatattgttgaaaaatctgaacaattaaatagtattggagtatttttaagtggagctggacctactataatgtctttaataaaagaaaatgatgatagttttgtggataatatgaaaaattacctacaaaaactaaaatctgattgggaaataaaagagttatgttgcgattctaatggagctgttttaaatataata

SEQ ID NO: 17206 - DNA, 819 bp, Clostridium difficile
atgggatataaattaattgtaacagatatggatggaactttattaggcaataatcataaagttacagatgaaaataaaactgcactacaaaaagttataaaaagcggtattaatgtaactttagcaacaggaagagccttcgattcagctaaatgcaatgtagattttcttaaagaggacatgccaataatagcttgtaatggttcattaataagagagcaaaatggaaatataatatattcaaataagattgatacaagaacatgtttaaacattttagatgtattagataaatacgatatttactaccaatgtaatagtatagattctatgctttcgaaaaaaatagaaggacgtgaagatagattaagtgtatttttaggctctgaaacagaagtaattgtaaaagatgatttgagagaagaaatctttaaaaaagatatactaaaatttgtaatcatagaagaaaaaaatccatctattttggatgaaataagaaaagaattgagaaaagttcaaggaataaagataacctcttcatggccaaacaatattgaagtcatgaatgaaggtgttgataaaggtaatgcagttaaaattttagctgaaaaaatgaatatagacagagaagatataattgcatttggagacaattacaatgacatagaaatgataaagtttgctggtcttggggtagctatgggaaatgcagaagaattgattaaacaagaagctgattatgttacagatacaaatcaagacagtggagttgcaaaggcaatttataaattcctagagttaaaagaatcacttagctct

SEQ ID NO: 17207 - DNA, 1296 bp, Clostridium difficile
gtgaattacatgaaaacagttgcaattgttggttctcaatggggagatgaaggtaaaggtaaagttatagattatcttgctactcaagcagatgtagtagtaagagggcaaggtggaaataatgcaggacatacattagttgtagaaggtaaaaaatatgcattacatctaattccatctggagttttaaatccaaatacagtgaatataatcggaaatggaatagtgtttgaccctaaaggatttttagaagaattggaaatgtttaaaacggataatataagtacagaaaatataaaaataagtgatagagcacatgtcatattcccatatcataaagaactagatgcattgtcagaagaagccagaggcgatttaaagataggtacaacaaaaaaaggtattggaccttgttatatggataaaacagagagatctggtattagaatatgtgacttaatggataaagataaatttgctataaaattaaaagctcaaatagatgctaaaaatgaaatagttaaaaatatatatggaaaagaagaactatttgattttgaaactatatataacgaatatctaggatatgcagaacaaataagaaaatatgtggcagatacgtctgttattgtatatgatgcagtaagagcaggtaaaaaagtattgtttgaaggagcacaagggactttattagatttagatttaggaacttatccatttgttacatcttctcatccaacatctggtggatttgcaattggtgcaggtataggaccaaatatgataaaagacgttgttggtatagtaaaagcatatactacaagagttggagaaggaccgtttgttacagagcaaataaatgaaactggagataagataagagaacaaggacatgaatttggggtaactactggtagaccaagaagatgtgggtggtttgatgcagttatagttaagtatgcagctagagttaatggattgactagtatttcatttatgttacttgatgtattaactggatttgataagataaaagtttgtacgtcttataaaatgggcgataagataataacggatttcccagcttcattagatgatttagcaaaatgtgaacctgtatatgaagaattagatggatggaatgaagatataactcaaatagataactttgatgaccttccagagaatgcaaagaaatatgtagcaaaaatagaagaactagttggagtaagtgtagatatggtttctgttggtccaaatagagctcaaactataataagaagaaatatatttgct

SEQ ID NO: 17208 - DNA, 1392 bp, Clostridium difficile
atggatgctaaaaaagtaaaagtaccagttagagaacaagaacctgctgtgagagcaacaaattttgatgaggtatgcttagggtataataaagaagaagctatggcagaagctaatagatgtttagcttgtaaaaaaccaaaatgtgtgggtggatgtccagtaggaatcgacataccagggtttataacaaaaattaaagaagatgatatagaaggtgctgctaaagtaatagctaagagcagttcattaccagctgtttgtggtagagtatgcccacaagaaagtcaatgtgaaggtgtatgtatacttggaataaaatcagatgctgtatcaataggtaaattagaaagatttgtagcagattggtcaaaagaaaatgacataaatttatctgatacagagcctaagaaaaatcaaaaagtagcagtaataggaagtggtccagcaggtctagcttgtgctggtgatttagctaaaaaaggctatgatgtaacaatctttgaagcaatgcatgagccaggtggagttttaacttacggaatacctgagtttagacttccaaaacaagctgttgttcaacctgaaatagacaatataagaaaattaggtgtaaaaatagaaactaatgtaattgttggtaaaacaattacagtagatgaacttatagaagatgaaggatttgaagctatattcataggttcaggagctggtcttccaatgtttatgaatataccaggggaaaatgcaaatggagtattttctgcaaatgagtttttaactagagtaaacttaatgaaggcttatagagatgattatgatacacctattagttctggtaaaaaagttgctgtagtaggtggtggaaatgttgctatggacgctgctagaactgcattaaggttaggttcagaatcatatatagtttatagaagaagtgaaaaagagcttccagcaagagctgaagaagttcatcatgcaaaagaagaaggcattatatttaatacattaacaaatcctaaggaaattttagtagatgaaaatggatatgttaaaggtatggtttgtataagaatggaattaggagagccagatgattctggaagaagaagacctatagaaatagaaggttctgaatttgtacttgatgtagacacagttataatgtcacttggaacaagcccaaatccactaatatcttctacaacaaagagtcttgatataaataagaagagatgcttaataacagatgaaaatggtcagacttctaaagagggtgtatttgcaggtggagatgctgttactggagcagcaacagtaatatctgcaatgggtgctggtaaaacagcagcagcatcaatagatgaatatttaaaagcaaaagttaatgct

SEQ ID NO: 17209 - DNA, 759 bp, Clostridium difficile
atggaatatacagttcaaaaattaagtaaactagctggtataagtactagaacacttagatattatgatgaaataggtcttcttaaaccacttaaaataaattcttcaggttatcgtatatatggtcaaaatgaagttaataaacttcaacaaatacttttttatagagaattaggaattaacttagaaaatataaaaaacattataaattcaccaaacttcgatagtttaagtgcgttaaaagaacaccataataaattactagccaaaagaaagcaaattgatttactaatagaaaatgtaactaaaactatagctctgaaggagggaaaatacactatgacagatatagaaaaatttgaaggttttaaagaaaagatgattgatgaaaatgaaaaaaattatggaactgaaattagagagaaatatggtaaagatattatagatacatcaaataaaaaacttaaaaatatgtctaagcaagattatgaaaattggcaaaacctaaatatcgaaataattagtaaacttaaaaaagcttttaaaactggtgatgcctctagtgaactggctcaggaagttgcaaaattacatcataaatggttgagttacacttggaacacatactctaaagaagctcattcctctctagcacagatgtatgtatatgatgaacgttttacatcatattatgatagagaacaacctggattagctaagtttttaagggatgctatagtaatatatacaagagataaa

SEQ ID NO: 17210 - DNA, 1398 bp, Clostridium difficile
ttgggggaattaaagatgaagatagtagtagtaggtggtggaccaggaggatatgtagcagctataaaagcttctatgcttggtgcagatgtaacagttgttgaaaaaagaagagttggaggaacttgcttaaatgcaggatgtataccaactaaagcacttcttgcttcttcaggagtattgaatactgtaaaagaagcaaaggattttggtatagaaatagatggtacagttaagccaaacttcactgccataatggaaagaaaaaataaagttgtaaaccaattaataagtggtatagagttcttatttgaaaaaagaggagtaaacttagttaatggttttggaaaattaattgataaaaacactatagaagtaactaaagatgatggaacagtagaaactataaaagcagataagataatactagcaaatggttctgttccagttgtaccaagaatgttcccatatgatggaaaagttgtaataactagtgatgaagttcttggacttgaagagatacctgagtctatgttaatagtaggtggtggagttataggatgtgagatagggcagttctttagagccttaggaacagaagtaactatagttgagatggttgaccaaatactattaaatgaagacaaagatgtagctaaacaactacttagacaatttaagaaagataaaattaaggttattacaggtattggagtacaaacttgtgaagtagttgatggtaaggctgttgcaactctttctaatggaaaggttatagaagcacaatatgcattagtatgtgttggtagaagacctaaccttgacaattctggagtagaagatataggaattgaaatggaaagaggaaaagtagtagttaatgaacatcttgaaactaatgtagaaggtatatacgcaataggcgatataatagatactcctttcctagcacatgttgcttctaaagaaggtatcgtagcagttgaaaatgctttaggtaagactaaggtagtagattatagagcaattccaagatgtgtttatactgaacctgaagttgctggtgttggtaagactgaaaagcaacttgaagctgaaggtgtagaatacaatgtaggtcaatttgattttagaggtcttggaaaagcacaagctataggacatttccaaggatttgtaaaagttatagctgacaaagaaactgataagataataggtgcagcagtagtaggacctcatgctacagatttattgacagagttgtcacttgctgttcatctaggattaacagtagaacaagtaggggatgcaatacatccacatccgagtttatctgaagggctaatggaagcacttcatgatgtacatggagaatgtgttcattctgtacctaaatta

SEQ ID NO: 17211 - DNA, 2529 bp, Clostridium difficile
atgtcattgaaatcactaaaaataaaagaaaatttatattgggtaggttcgcttgaccctgatttaagagtatttgacataattatgtatacaccttatggaactacttataattcatatgtattaaaaggaacagaaaaaacagttttatttgagacagttaaagataagcattttgacaattatattgaaagattaaatgatttaaatatagattttgaaaaaatagactatattgttgtaagtcatactgaaccagaccatgcaggaagcgttgaaaagcttttggatttagctaaaaatgcaaaagtagtagcttcagaaacagcaattaaatatcttaaggaaatcgtaaacaaagactttgaatatgttgcagttacagatggagatacattatcaattggggacaaaactttagaatttttctctgtacctatgcttcattggccagataccatatacacatatataaaagaggataaaactcttgtaacatgtgattcatttggtagtcactatagtaatgataagatagtaaatacacttgatgaaaatgaagaaaaggattacttggatgctttaagatactattatgattgtataatgggtccatttaaaccatctatggtaactgctatagaaaagataaaagatttagatatagatactgtatgtccaggtcatggtccagtattaactgaaaatcctagaaaaattatagacctttattacaactggagtgtaaatgaacaaataaagttagaaaaagaagttacaatttgttatgtttctgcacatggatatacaaagattatggcagaagctataaaagcatatattgaaaaaaatagcaactataaagtaaatttatttgatgtaatagagcataagcaagaagatattttggcaaaaatagcagtatcacaaggtgtattatttggaacaccaacaatattaggagatgcgttaaagcctatatgggatatattaatatcgttaaacccagttcttcatggtggaaaagttgcttcagtatttggttcatatggatggagtggagaaggtatagaaaatgctatggagagaataagtcagcttagaatgacagcagtaaaaccttttgctgttaactttaaaccatcaaatgaagagattgataaattacattcttatacaggtaaattcctagataagttaaattctacttttggaagtaaaaagaaaactaagaaatttaaatgtgtaatttgtaatgaagtttttgaaggtgatagtgctcctagtgtatgccctgtatgtggagctaaggaagaccaatttatagaagttgaagaagatgaagttacttttagaaaagatactgatgaatatttcgtaatagtaggaaatggagcagctggtttttatgcagcagatgctataagaaaaagaaataaaacttgtaagataactatgatttctaatgaagatgagttgacttactatagacctgcactttctgatggtataaatgaagaacttggttcagatttctacatggaagataaagattggtatgataaaaataatatagtagtaatattaggaacgaatgtagataaattagatgaagtaaataaaactattatagtgaatgatggagctattaaatttgataagcttgtaatagctacaggaagtagaaactttataccaccaattaagggtcatgatttagaaaatgtgtttactcttagaaatataaaagatttatatagtgtaaaagaagcactagaaaaatctaagaaagttgtagtgattggtggcggtttattgggacttgaagctgcatgggaatttagactaaaaggattagaagtagtagtagttgaagccatggatagcatactatcaaaacaacttgataaagaaggtagtaaaatattagaacaatgtgtaagagatacaggaatagatgtaagattgggtgtagcagttgatggtattgaaggtgatgtaaaagctcaaaaagttgtatttaaagatggagatagtgtcgactgtgatatggtagtattttcaattggtgtaagagcaaacactcagatggttcaggatacatctgtaaaaattgatagaggtattgttgtagataagacattacagacaaatgttaaagatatatatgcttgtggagatgttgcacaagtgggaaatattagtttagcaatatggccatcttcagtagaaatgggaaaaatagcaggggcaaatgcaagtggagataatttgacatttgaaagtgaagtatatccagtttcattagatgcaatgaatgtaaaagtatttagtattggtaatatacaaaattttgataaagaaatttcatcaaaagatgaaggtcaaagaatatataaaaaattatttatgaaagatggttcattagttggagctatacttataaatgatttaagctgtactgttaaattgataagattaatatctgaaaaaggtgattttgaggatattatgaaggctgatatacta

SEQ ID NO: 17212 - DNA, 777 bp, Clostridium difficile
atgaaaatgagaaaagtggctttagtcgttggaggaggaagaagtttaggtgaatatttatctaaacatttagctaaagtaggttatgatgttgctattgcagatttaaatgaagacaacgcaaaaaaagtagctgaagaaataaaaactgaatttggttgtaaatctgtaggatatagttgtaatgccatagatgaaagacaggttataagtactgtcaaagctattgaaaatgattttgatagaatagatttattagtgtacaatgcaggagtggctgtaagtaaaaaaataactgattttggatacaaagattttaaatttattgtagacgtaaatttaaatgggtactttctatttgcaagagaagtatctaaagtcatgatagcaaaaggtattgagggtagaataatacagataaattcaaaatcaggtagagtgggaagcaagcataattcaggatattcagcaggtaaatttgctggagtaggacttactcaaagtttagcgctagatttggcagaacataagataactgtaaatgcactgatgctcggtaatttacttgattctgatatgtttgaaagtttaattcctcaatatgcagtaaaattgggaatacctgaatcagaagtcaagcaagtttatatagataaagtacctttaaaaagagggtgtagatttatagatgttgcaaatatgcttacattttatgcttcaaaggaagctgaatactgcactggtcaatctataaatattactggtggacaagttatg

SEQ ID NO: 17213 - DNA, 792 bp, Clostridium difficile
atgtatacaattggacaagtatctaaatttttaggaatatctagagatacactaaaattttatgaggacaaaggattagtaaatcctaagaaaaatgatgaaaatggatatagaatatataatcaggttgatatctatgatattgcaacaataaacttttatagagaaattgatatagaaattaaaaagattcaagaaataagaaaaagtaagagtataaacaatttagaactcttactagaagagaaggaacaaatcatactaaaagagatagaatataaaaagcttctcttaaaaaaggttcagttagtcaaagaagattgtgacaaaatcaaaacatattttggaaaatacacaataaaagaaatgaagcctttggaagtaaaaggtaaaataaaacatgttactaactatgaggaatatgaagccttaaaagagaatacaaacaacttaaaaaaagcagttacattaactgatttaagaagagtaataaattttaatgaagaaggtataatagaagaaaaatttataattgtaagggaagtagatgactacaacaaaatcatagaaggtgaagttctatctcatcccaattgtatttatactattattgaagatggcagatggtcaactggaggagaaaatattgataataaagtggaagacagattaagagaaatagcaatagaaaatgaatgtgaattacttggaatagtctatgttaatatattgcttactacttatgaagaagggattgagcgtatatttttagagatttatgcacctataaaa

SEQ ID NO: 17214 - DNA, 1452 bp, Clostridium difficile
atgaaattaaatgatattatacaggggttggatataatcaatgtcaagggtgaattaaatatagatattaataatgtacaatatgattcaagaaaggttacaaaaggtacattatttatatgtataaaaggatttgtgtcagatggccataagtatataaaagatgccatagaaaagggagcaagtgcatttattgttgaagaagatgtagcaataaaaggatgtacatttataaaggtaaaagatacaagaaaagatatggcaaaagtagctgataatttttacaatcatccatctcaaaaatttaacgttataggagttacaggtactaatggaaaaactagtataactactatactaaatgagatattaactttaaataagaataaagttggacttataggaactataaaaatttttgatggagaaaaagacattgtttccaattcaacaactccagaaagtatagatttacaatatcattttaataatatgttggataatggatgtgactactgtgcgatggaagtttcatcacattcattggcattaaatagagttgatgaaacagactttaaactaggcatatttacaaatttaacaccagaccatttagattttcataaagatttagaggattatagaaaagcaaaagaaaaattattttttaagactactatggcaaatataataaacatagatgatgaaggtggaaaaaagatatatgaaaatataaaaggtataaatgtaccttgttacacttatggtgttgatactaaggctgattttatggctagagatataaaatcagattcggatggagtatcttatagattaataacaccttcatatgaagaagtaatatttataccagttccaggaatgtttacagtatataatactttagcagttatagctgcttgctatgtacttggcatacctaaaccaatatataaagaaggccttagactttctaatggagtatcaggaaggtttgaaacagttccaaatgataaaggtataagcgtaattgtagactatgctcatactcctgacgcacttgaaaatgtactaaagacaactcaacaatttgcagaaggaaaaataatttctgtgtttgggtgtggtggagatagagatactgaaaagagacctttgatgggagcaattggacaaaaatattctgatttatgtattataacttctgataatccaagaactgaagaaccagaggcaataataaaagatatacttgaaggaattgacaagaaaaaagaaaattaccatgttgttgttgatagagaacaagctatagcagaagctataagtatggcaaaaaaggatgatgttgtaattataacaggtaagggacatgaaacttatcaaattataggtaaagttaagcatcattttgatgataaagaagttgcaaatgagtgtttaagtaagatg

SEQ ID NO: 17215 - DNA, 1290 bp, Clostridium difficile
atggagggaataaaagtgggtatgttaaaaaaattatgttcactagctatggtagcaattatgactacaacacttataacagggtgttcaagtggaaatggaaaagattcaaaaaaggatggcgaaaaagaaaaactagttctttggatgccaccagtagaaaataatatgaaggaagtttgggaccctattttagataaatttgaggaaaaaaataactgtgaagtagatttacagataattccttgggataattattctgaaaaatttgcaacagctataagtgctggcgaaggtccagatgtaggatatatgtatgcagaaatgtatccacagtttatagaaagtggagcagtagaagatttgactaattatgcaactaaagaggataaagagcaatctatttatataaaaacatctgaaatgatgggtggaatgtatggtatgccattccaagcagcaaatccaggggtattatactataacaaggatattttagagaaattaggagaaaaacctcctaatacatgggaagattttaaaagaatttgtaaaaaagcaacgcaagatactgatggtgatggaaagatagaccaatggggattagctcagggatggggagctaaaacttttggtaacttaaactggaactggtatccttatttatggcaagctggtggagatatatttaatgatgatttaaaatcagttaaatttaatgataagagtggtttagaagcagctaagttcttaaaagaattacaagcatatgtgcctgaagattctttatctaaagatagtaatgaaatgatagaaagtgtatttggaccagggaaagcagcatttacaataatgttatcttctgctgcaacaagtgtatttgatgaatcattcccggatttaaattggggatttgtaactggactagaagataagaaagcagcaacttttggagcagtagaccatttatctttaatgtcatctgcgaaaaataaagaacttgcatacaagttaatacaacatatgttaagtgttgaatcaatgacagaatttcataaagcaataccaagagcaccaataacaaaaggtgaaccatatcaaggtgatgaaagattcaaagaaatggtggaaaatgacaaaaatgtatacagaccattagtagtaggacctcatggagttgaaatatatgaatatttatggaaagaacttcaaactatgatttcaggagataaaactccaaaacaagcgttagatgatgctgcaaaatattcaaatgatttattagcacaa

SEQ ID NO: 17216 - DNA, 1787 bp, Clostridium difficile
gtgaaagtttataatacattgactagaacaaaagaagaatttgttccattagaagaaggaaaggtaaaaatgtatgtgtgtggtccaacagtttataactatatacacataggtaatgcaagaccatttataatatttgatactctaagaaggtatttagagtatagaggatatgatgtaacttatgtacaaaactttacagatgttgatgataagattataaatagaagtcatgaggagggaatatctcctgaagaagttgcggctaagtatataaaagaatattttgtagactgtgatgggctaggaataaaaagagctactgttcatcctcaggttacagataatatacaacagattatagagtttataaaagagttggaagataagggatatgcatatgcagtaaatggtgatgtatattttgatacaaataagtttgaaggttatggaaaactttcaggtcaaaaacaagaagatttagaggcaggggctagaattgaggttaatgaccaaaaaagacatcctatggactttgttctttggaaggcaaaaaaagaaggtgagccaggatgggatagcccttggggagaaggtagaccaggatggcatatagaatgttctgttatgtctaagagatatttaggtgaaacaattgatatacatgcaggtgggcaagatttaacattcccacatcatgaaaatgaaatagctcaaagtgaagctagaagtggaaaaacattctcaaaatactggatgcataatggatatataaatataaatgatgaaaagatgagtaaatcaaaaggtaatttctttacagtaagagatatatcaaaattatatgatttagagatagtaagatttttcatgttatcagcacattatagaaatccagtaaactttagtgatgagatgttaaatcaagctaaagcaggtcttgaaagactatataatactaaagaaaaattagaatttacgctaagtaatttagtagaatctcctttaacagaaaaagaagtagagcttgttaaagaattagatgactttagacaaaaattcatagatgctatggatgatgatgttaatacagcagacgcagtaagtgtaatatttgaattagctaagttaataaattctaatgtagatgaaaattcttctttggagtttgctaaaaaatgcttagatgaatttaatgaacttacaggagtattaaatattgtaaataagaaaaaagatactgtattagataaagacattgaagaattgatacaaaaaagaactgatgcaaagaaaaataaagagtttcaattagctgatgatattagacaacaattactagatatgggaattgtattagaagacacaagacaaggtgttaagtggaaaaggatataaaaatggaaaaaactgaattagttactatgtcaccattagttttagcatacttaggtgatacagtgtatgagacatatataagagaatatttaattagacagaatacacaaagaaaagttaatgatttgcataaactagctataaagtatgtaaaagctaaagctcaggcaactataattcatgaaattgaaattgagttaactgaagaagagagtaaaatttataaaaggggaagaaatcaaaagtcaaatacttctcctaagaatgcagatattatagactacaaacatgcaactgggtttgaggcattagtgggatatttgtatttaaataatgaaatagagagacttcaatatattatcaataaaggaatcaaaattattgaaaga

SEQ ID NO: 17217 - DNA, 1440 bp, Clostridium difficile
atgagaacaattagaagagttttagcattaggtttaacattagctatatttctaataaatgtacctaatgtagatgcattaacatcagatacaattaaaggtaacaatatatatgagacggctggattaatagcagataaaaagagttatgatacagcaattatggtaaatatggataattctatagcagatggtctttcagcaagtggtcttgcaggtgctgttgatgctccaattttgcttgcacaaaaaaataagataccaaatgaaacaaaacaaagattaaaaaatgttaaaaagatatacataataggtaaagaattatcaataagtaagtcagtagaaactgaactaaaaaacacaggggcacaggtaactagattaggtggagatgacagaataaagactagttatagtgttgctaaagaggtaaatggtatcaaaaaagttgatgaagtgatattaactaatgcatataaaggagaagcagatacaataagtgctgcacctgtatcagtaagagatatagctcctatagtacttacagatggaaagagtgtgcctttttcaacaagcaatgtaaaaacatatgcagtaggtgggagtatatcaatgagcactagtttagttaataaaactaatgctaaaagacttggtggttcagatagatatgatacaaataagaaagttataaaagagttttatccagatgcatcagaattttatttgagtgatggatatgatttagtaaatgcacttacaggttctacaattgctaaggaaaatccaattgtattggtgtcagaaagtagtgataagtctatattagcaggagcagataagattactagattaggttcaataagtgacagtgtgtataataagtgtgtttctgctgcacaaaataatggcgattcgtctacaaaaggtgagtcacctatgaaaaatgagacaagcatattaggtcagccaacagctagtttagaagcgtgcttaaaatgggcaaaatctaaaaaagctaatgatttatttatagagttaataccaatattatatgatactgctgttcaggaaggtgttaatcctgttttggcagtagctcaatctgcaaaagaaactggtttttgtaattttggtggagtattagatgcatcatttaagaatccttgtggacttaaaacttctgtaggtggttctgatactgataagaatgcccattcaagatttgatacttgggaagaaggaatattagctcaaattcaacatttatgcttatatgcaggacaagatggttacccactttcaaatccagtagaccctagacatgaaaaatctttatttggtaaggctaaaacagttgaaagtttatctaataattgggctggaggtcaatatggacaagatttagtaagaatgatgggagaaattgaggcaacaaaa

SEQ ID NO: 17218 - DNA, 1248 bp, Clostridium difficile
atgtctaaatatgaagaaaaacgacaattaaagtgttcattctgcggtaaaaatcaagatcaagtaagaagattaattgcaggtccaaatgtatatatttgtgacgagtgtgttgaactttgtgacgaaattattcaagaagagatagaagatactatagatgaggatactacatctttaccaaaaccaaaggaaatgatggagattctaaatgattatgtaataggtcaagaaaaagctaaaaaagctttatcagttgcggtttataatcattataagagaatatacagtaaaaaatctagtagtaaggatatagaaattcaaaagagtaatatacttttattaggacctacaggttctggaaagacattacttgctcaaactctagcaagaactctaaatgtaccttttgcaatggcagatgctacatcattgactgaagctggatatgttggagaagacgttgaaaatatacttttaaaacttattcaagctgctgattttgatatagaaaaagctgaaagaggtataatatatatagatgagatagataagattgcaagaaaatctgaaaacccatctataactagagatgttagtggtgaaggtgttcaacaagcacttctaaaaatattagaaggtactgttgcaaatgttccaccacaaggaggaagaaaacatcctcatcaagaatttttaaagatagatactactaatgtattatttatattaggtggagcttttgatggattagagaagataattcaaaaacgtggtggagataaaacactaggttttggagctaaaatagaaagtaaaaaagaattagatttagggaagctatatgaaaaagtacttccagaggatttattaaaatatggtataataccagagtttataggaagaataccagttttagctactttagagttgttggatgaagatgcattaatgcagatattacaggaacctaaaaatgctctagtaaaacagtataaaaagttattggagttagatgatgttgagctagaatttgaagaaggtgctcttcgtgcaatcgctaaaaaggccatagaaagaaatacaggagctagaggacttagaagtatagttgaaagcgtaatgatggaaactatgtttgaagtaccatctagagataatataaagaaggttatagtaacagagaaatctgtgaacgaagactcagtaaatcctatcatagtacttaaggatcaagaggaaagtgca

SEQ ID NO: 17219 - DNA, 811 bp, Clostridium difficile
atggataaaatattacttagtaatctaggattctatggatatcatggtgttcttaaagaagaaaattttctaggtcagaaattctttgtcgacatggaactttatattgattcaagagaagcaggtcttagtgacgatataaataaatctgtaagctatgccgaggtttacaatgttgttaaagatattactgaaaataaacaatttaatcttttggaggctttagcggaaaatattgctgaagaagtcttgaataaatttatacttataaatggagttatggtcagagttagaaagcctgaggctcctgtaaatggtatttatgactattttggtgttgagataaggagagcaagagatgaataaggcttatttgggaataggtactaacatgggtgatagatttgataatttatcaagagcatgtgaacttttgaaaaatagtgattctatatataaagtaaaagaatcaagcttatacgaaacaaaaccatggggatatacagaacaagcagattttctaaatatgtgtgtagaaatagaaacagagtttgaaccttatgagttgttagaatattgtcaagaaatagagagagaactacatagagagagaatagttcattggggaccaagaactatagatgtagacgtactattttttaatgatgtagtttccactgatgaaagactaacaatacctcatccaaggattcaagatagagctttcgttttgataccacttatggatttaaatgaagaacttataataaatgaaaaaacaataaaagaacatttaaacctcctatctgct

SEQ ID NO: 17220 - DNA, 762 bp, Clostridium difficile
atgaaaagagaagttaaaaggactaaagctttgatatatagtgttttatttttttcattattattagtgttaatatttgtttttgtttatggaataaaatacatatgttctaaatctgacaattcaaaaatgcctatatataaagttgatacaaatgagaaaaaaatagctttgagttttgatgtagcatggggaactgataatatggatgatattttaaaaattttagataaacataatgtaaaagctaccttctttttagttggtagttgggtggatgataatgaagaaattgtaaaagctatagatgaaaaaggacatgaaattggaaatcattcaaatactcatgccaatttgaaggaaatatcaaaagaagacataacaaaagagatagaaactacatcagaaaaaatatataatataacaggaaaaaggactaatttatttagacctccttttggggacgtaaacaataaagctatggacatttgtagtgatttaggttataaagtaattaagtgggatgtagattctatagactggaaggagcttggaccaaatcatgtaattgaaaaagtaataaaagaatctcaacctggttcaatagttttattccatgctaatataaatgatgtagataactatttggatactataataagtcgactaaaaaaagatggatacagtctagtcaaaatatctgatttgttgtataaagataattatgtagttgattccaatggagtgcaaaaaactaagaat

SEQ ID NO: 17221 - DNA, 2367 bp, Clostridium difficile
atgttgatggaacaaaattatactaaaatagatcatgaattaccattaattcctctaagaggattagctatatttccatatatgatattaaattttgatataggtagagagatatctcttaaagctttagaccaagctatgatggatgaagaacttatatttttaacttctcagaaagaagcagaggtagatgagccaggagaagaggatttttatcatgtgggaacaatctgtaaagttaagcaaatgataaaattaccaggagatacagttcgtgttttggttgaaggtgtatcaaggggtagagtaaagaaaatagaacaagaagatgggtatttcagagcagtaatagaagaaatagtatttgatagtgataatttggatagtgaaacagaagttgaaattgaagcatttgtaagaaatgtatttgatgcctttgaagagtatataaatattggaaatagggtatcaccagaaatattaatatctttagctgatatagaagatgtagatagatttatagatacgatagctgcaaacatatatctaaaatcaagccaaaaacaagaaatattagaagaatttgatattagaaaaagacttgaacttatttattctatattattagaggaaatagatatattaaaaatagaaaagaaaataactttaagagtaaaaaaacagatgaataaggttcaaaaagaatattatcttagagaacaattaaaagctatacagaaagaattaggtgaagaagaagatataaactctgaagcagatgagtatagagaaaagcttaaaaaaataaaagcacctaagacaactaaagagaaaatagaaaaagagatagataaattttcaaaaatatcttctatgtctccagatgtatctgtaagtagaaactatttagatactatattctcattgccatggaataaagagacaaaagataaattagatataactaaggcaaaagatatattagatgaagaccattatggattagaaaaagttaaggagagaatactagagtatctagctataagaactcttgctaagtcacttaaagggcctataatatgtctagttggtcctccaggaacaggaaagacatctatagtaaaatcaatcgccagagcattaaatagaaaatttgtaagaatatctttgggtggagttagagatgaagcagaaataagaggtcatagaagaacttatgtaggttcaattccaggaagaataattaatggggtaaaagaagcccaaacaaaaaatcctgtattcttatttgatgagatagataagatggcagcagattataaaggtgacccagcttcagcaatgctagaagtattagacccagagcaaaataaggattttgtggaccattacttagaaataccttttgatttatcaaaaatactatttgttacaacagcaaatagtctaggtaatataccaagaccattattagatagaatggaagtaatagaagtatctggatatatagaagaagaaaaattaaatatagcaaaaaaatacctacttccaaaacagattaaagaacatgctttaaaagaaaactttataaaaatagatgatgaaactttaagaagtataatcaaccattatacaagagaagcaggtgtaagaacactagaaagaactattggtaagatttgtagaaaggttgccaaaaaatacgttgaagacccaactcttgaagaggttgttataaataagtctgacctagagacatatcttggaaaagacatgtttaagtatcaacttgcagaagttaaccctcaaataggattagtaaatggtcttgcgtggacagaagttggtggagttacacttgaagtagaagtaaacgtacttaaaggtaaaggcgaaattgtattaactggaaaattaggagatgttatgaaggaatctgcgaagacaggtatctcttatataaggtcaatagtggacaagtttgatatagaccctgaattttataagacgaatgatattcatatacacattccagaaggtgctgttccaaaagatggaccatcagctggtataactatggctcttgcagtaatctcagcacttactaaaagacctgtgcctggaaatatagcaatgacaggagagataactttaagaggtagagtcttagcagtaggaggagttaaagaaaagttattagcagctcatagagctggtataacaaaagtattaattcctaaagaatgtgaagctgatttagatgaaataccagaaaatgtaaaagaaaaaatggagtttgtacttgtagaacatatggatgaagtattagaacaagctttattaaagagtggtgaaaataatgaaaat

SEQ ID NO: 17222 - DNA, 1263 bp, Clostridium difficile
atgaaaaagttaccaataaagactgtcgtgcaaagattactaaacttacaagaagaggggaaaagtgcaactcttttaggaattggtcctatgtcaccaaacttgttacaagcaagttttgaactagcaaaagatgatgattttcctttaatgtttatcgcaagtagaaatcaagtagatgcagatgaactaggtggcggttatgtaaatggttggaatcaggaaacttttacaaaagatattaaggaggttgccgacaaagttggatttgatggtttatattatttatgtagagaccatggtgggccatggcaaagagataaagagagaaatgaccatttgcctgttgatgaagcaatggagttaggaaaaaaatcttatttagcggacattgaagcaggttttgacctattgatgattgaccctacaaaagacccatttgaaattggaaaagtaattccactagatgtagtactagaaagaactgtagaattaattgagtattgtgaaaacgagagaaaaagacttaatctaccagacataggttatgaggttggtacagaggaaaccaatggaggtctgacttcaactgagacgtatgaaacatttataactagactaaaggttgaactcgataatagaggtttgccaatgccaacatttatagttggtcaaactggtactttaactagaaagacagaacaagtaggaacttttaattttagaaatgcttatgatttagctcaaatggctaagaaatatggagttggtttaaaagagcataatggcgattacttagatgatgtaactttattagaacatataccatctcaaattattgctacaaatgtagctcctcaatatggtactgaagaaactagggcatatttaaaattagcagaagttgagtgtaaattagaaaaagagggcttagttgagaaaacttctaatatcagacatgttcttcttgttaatgcaattgaatgtggacgttggagaaaatgggtagtaggagaacaaaaaaatctaactactgaagagatatttaaggatgaagttttatctaatgaaatactagatattgcaggacattatacatttaataatgatgatgttaaaaaagaaatagaagtgctttatgataatttaagtaagaataatattgatggtcaaagatttgttgtagaccatattaaacgtcctttgcgtgattatgcagaatgctataacttaaaaggtgttactacgaggattttaaataaa

SEQ ID NO: 17223 - DNA, 876 bp, Clostridium difficile
atgaagaataatttctatcatatgaacacttttatgagtatggacaaaaattatgaagaatctaatcttatagtatttggtgttggatttgatggaactacttctaacagacctggggctagatttgcaagtagctctatgagaaaagaattttacggtcttgagacatacagtccttttttagatttggatttagaggattataatatatgtgattatggagatttagaaattagtgttggaagtacagaacaagtcttaaaagaaatctatcaagagacatataagattgttagagattcaaaggtaccctttatgattggaggagagcatttagttacattaccagcctttaaagcagtacatgaaaagtacaatgatatatatgtaattcattttgatgcccatactgatttgagggaagaatataataatagtaaaaattctcatgcaacagtaattaaaagaatatgggatattgtaggtgataataaaatatttcaatttggtataaggtctgggacaaaagaagaatttaaatttgctacagaagaaaaacacacatacatggaaataggaggaatagatacatttgaaaatatagttaacatgctaaatggaaagaatatttatctaactatagatttagatgtattggatgcatctgtgtttccaggaacaggtacaccagaacctggtggtgtaaattatagagagtttcaagagatttttaagattataaaaaactctaatataaatatagttggttgtgacattgtagagttaagccctgattacgatacaacaggtgtatcgacagttatagcttgtaaaatcctaagagagttatgcttaataatatctgataaaattaaa

SEQ ID NO: 17224 - DNA, 432 bp, Clostridium difficile
atgaatcaagttgtattagtgggaaggttgactagagaccctgaattaagatacatcccaggtacaggaacaccagtggcatcctttacaatagccattgatagagactatgtaaaaaaagatggatctaaagaaactgattttatacctgttgaagtaatgggtaaatctgctgaattttgtgctaactacataactaaaggtagattagtagcacttcaaggatctataagagtagacaattatcagacacaatcaggtgaaaagagaacttttacaaaagtaagtactagatcagtacaagctttggatagtaagaataaatcggaaaattcatatagagagagtgctccagcttttgagccaagctttgaacctcaaggtttagacccacaaggtttccaagctatagatgatgacgatataccattt

SEQ ID NO: 17225 - DNA, 1482 bp, Clostridium difficile
gtgaatctgatgaactataataaaaaaaatgaagttttaaatcttatacaaatacttatagagggtattgattacataaaaaataataatttaagtgaatcaatagttaattcatctcttgaagctattaattatatgaaaaaatatataaataactctggaagaagcaacaaaaacttgttgaatttaattgatgaaacttatgtaaaaattttaagactttccatgtataaaaatataagacttattgaagattgtgaacttatcataagtaatttaaactatttatcaaatataatagaaaatagtctaaataaaaaaactaaaattgtatttatgccttataatgctaaaatgtggaatagtttagaaagtatctggaaatctgcggttttggatgagcagtgcgactgttatgtagttcctataccttattacaagttaattgatacgcctaatggtataactcagatatatacatatgaaggtaatgattttcctgaagatgttccagtaatacattatgatgattttgatttatctaaggagaaacctgatataatatatgttcataatcaatatgatgattgtaacaatgctacaatggtagatagtaattatttttcttataacttgaaacaatatactaatatgcttgtatatgttgcttatggaatacttggaacttatcctgttagtttttacttaaatttttatgaattgatagcatctagaaattttgataaggttattgtgcaatctcctgcatttgaaattatagcagaatgtagtggtataaataaaaatcaaatactaacaatgggatctccaaaatttgattctttaatttataatttaaaacagaagaatataaataaaaattatgaatctaaattaaagggtaaaataattttcttatggacaactaatctaatgaaaatacctaatggcaaagatggtgtcattgatgaaattgaaaatgtatttgatattattgaaaatagtcaagagtatggtcttatatatagaccacatccattagaacttgagtatgtaaaatctaaagttccagaatgttttaatagatacaaaactttgctagattcaatatctataaaaaataatattattttagatgactctgtatcttactatgaatcattcaacttatcccatgctttaataacagataggtcttctgtattaatagaatatattcaaacgaagaaacctatattaatttatgatatagatatggaacgtggatattatgattcaagaatattcgatatattttcaaattatgtagtaggagaagaagatatggatttaataaaatttatgaacttagtaaaaaataataatgattataagctaaatcaaagattaaattctttaaatagtgtactatcaaatacagatggaagttgtggtgaaaaaatacatactaatgtattagaatacgttttaaataaccatatt

SEQ ID NO: 17226 - DNA, 999 bp, Clostridium difficile
atgagtgaaaaaaaagttatatttagtggtgcacagccatcaggcaaaatgactttaggaaattatttaggagctataaaaaactggactgaacttcaagacaattatgattgttattatagtatagttgatttgcatgcaataacagtacctcaagaccctaaagttttaagagccaatactatagaattacttgctcaatatatagcttgtggattagacccagaaaaaaatactatatttatacaatcacatgtcaaagagcatgttgaacttatgtgggtattgaatactatgacttatatgggtgaattaagtagaatgactcaattcaaagataaatcacaaaagagtgaagcaaatctaaatgcaggtttattcacatatccagttcttatggctgctgacatattgttgtatcaaactgacctagttccagttggagatgaccaaaaacaacatttagaattagctcgtgatttagcaaatagatttaataatagattttcacctacttttgtagttccagaaggatactacccaaaaggtggagcaagagtgatgagtttgcaagagccaactaaaaaaatgagtaaatccgattcaaatgaaaatgcatttatactattagcagatgattcagattctataaagagaaagataaaaagaagtgttactgattctttaggtgttgtaaaatacaatgatgaacaaccaggtattaaaaatctaattgatatatattctaatttaagtaaaaagagtgtagaagagattgtaaacatgtatgaaggaaagggttatggcatatttaaagaagatgtggctgaagtagtatcagaagctttaagacctataagagaaaaatatgttgaccttcttaataataaagattatttagaaaaaatatatagtatgggagcagaaaaagccgaaaaacaagctagaaaaactcttagaaaagtttataaaaaagttggatttatagagagaagatac

SEQ ID NO: 17227 - DNA, 237 bp, Clostridium difficile
ttgttatattcaataatatttgttataatgttattgaattacaatacatataaaagggaggatttcaaaatggcatataaaattactgacgcttgtataagctgtggtgcttgtgaggctgaatgccctgttagctgtatatcagctggagacgacgcatatgttatagatgctggttcttgtatagactgtggttcttgtgcaggagcttgtcctgtagatgcacctcaaccagaa

SEQ ID NO: 17228 - DNA, 534 bp, Clostridium difficile
atgaagtgtacaaactttactttcaaaggagaggaaggtttagatatatatacatataaatgggaagatgaaaatataaaaaaaccaaaggcagttatccaaattgcacatggaatggctgaaactgcacaaaggtatgagacttttgccaaggtacttactaaaaatggttatatagtatatatcaatgaccatagaggtcatggaaaaactgcaaagataatagaaaatgttggacatttagctgaaaaagaaggatttagatgtcttgtagaggacatgtatactttaacaaatattataaagaaagaaaatgaagatttgccaatttatctatttggacacagcatgggttcatttgcaagtcaaagatatataatggattacagtaataatttagctggtcttatactatgtggttcaaatggaaagcaaggaatcattctaaatcttgctcatctgataatcaatcgtgagattaaaaagtatggaagacgttctaaaagtaataaaataaataatttgattaaaaaa

SEQ ID NO: 17229 - DNA, 1386 bp, Clostridium difficile
gtgggttatatggataggaaactggatgcttcccaagatttattatatgaagtaaaatcattaattgataataataaagtattggagttaagagaattaatagaggaatatcatataattgatatattcgatataatggaaaatttagaggaagacatgaaaattcaattatttgaagtacttcctttagatatggcatcttctatattagaagaaggtagtgtagagttttttattagtattttatctaaactggatgtagaacactcgaaaaatatacttgaacttatgtctcttggagatatggcagacaagttgagtgaacttgaagaagaagaaagagaacacataataaatcttttgaatcaagagaatgccgattatgtaaaagagttactattctatgatgaagattctgctggtggaacaatgaccactggatatatttctataaataaagatatgacagctcttgaggctatagaccatatgagagaagaagctgaagaagctgaaactatttattatatatatgtggttgatgatgaagaaaaactagttggagtattgtcattaagagaattaataatagctagagacgcaaatatagtagaagatttgatgagtgaaaatataatctctgtttatgtagatgaagatagagaagaagcagtaagattagtatctaaatacaatttaatagcaattccagtagtagacagacaagaaaaattaaaaggaataataacagtagatgatataattgatgtaatggaagaagaagcaactgaagatatgtataaatttgcaggaagttcagaacatgaaagagaagttgctgaaaaagaaaaccctacattgagagagcaaataatatcagcacttagaggacgattaccttggttaattattaccttagttggaggattgttggcttcgttaatactttctaacttagactatataatgaatcctgtatatgctccattagtattttttatacctgtagtaattggtatgggtggaaatattggaactcaatcatcatctgttacagtaataacattatctaataaggatttaaattttagcaatgtggttagagaaggtattgtaggtattattacaggtcttttgtgtagtataataacaggtattgtaatttactttgttatgagaaagttagacattgtattaattgtttcaatatcattatttataaatatggttttaggtgcaacaataggtgcgtttatgcctgttttattaaaaaaaatggatgcagacccatctacagtttcatcaccaattatatctacagctcttgatataactggtatagcagtttactttataataacaacggcattattgtcaaaaattgtt

SEQ ID NO: 17230 - DNA, 1554 bp, Clostridium difficile
atgtcaaaaacagctaaagcagcattgtggattatggcagccactatgttttcaaaagtattaggtttccttagagaacttgtacttgcaaatttctatgggacaggtatgtatgcagacgtatttgtattaacattaaatatacctggtttaatcatagcagtcataggctctgcagttgctacaacttatatacctatgtactttgagacaaagaaaagactcggagatgaaggtgccttaaaatttactaataatgttttaaatatatgctatataatggctatagtaatagctattattggtcttttatttacagagcaatttgttacagtatttgcagcaggatttagaaacgaccctgctaagttccaagcagcaatattatttactaaaataatgatttcaggagttttattcctgagtggaagtaagatatttagttcgtttttacaggtgaatgacagttttgtaattcctgggcttataggaatcccatataatattataataatagcagcaatagcactaagtgcaggtaaaaatgtatggatactgccagcaggagcattattggctatggcgagtcagctattgtttcaactgccatttgcgtttaagaagtcctacaagtataagccatatataaatttaaaggatgagtctataaaagagttagtcaacctagtattgcctatgttggtaggagtagctgttggacagttaaatatatttgttgaccgattattggcaaccactttgggtgatggaaagttgtctgctcttaactatgcaaataggctaaatgagtttgttatggcattatttgttacatctataataacagttatatatcctaaactagcaaaaatgtctggtaaagataataaagaaggatttataagcactattgtaaaatcttcaaattgtattatattggtggtgcttcctatatctataggagctattatattagcagagcctcttgttagaatattattccaaaggggtaaatttgatgcgttatcaacagaccttacatctatagcgcttagattatattcactaggtttattggcttgtggagtaagagatgtcttatatagggcattttactctctttcagatacaaaaacgccaatgataaatggaagtatagctttaataataaatatagttcttaatttaatattgataagaccattgggtcatgcaggtattgctatatcaactagtacatcaaacataattacagttatattattatttatatctcttaaaaagaaaaatggatattttggaggggataaaattataaagactggtctaaaaagtttggtagcatctggtgtgatggcagtagctactttattgatatataataatctatatgcatttatgggttcaggaacaattaaagaaattatatcagttggagctggagtattaggtggagcttctgtatatactgtattgatagttttatttaaggtagaagagatggatttagcttttgaatttttaagaaaaggaaaacaaaaactacttagaaga

SEQ ID NO: 17231 - DNA, 528 bp, Clostridium difficile
atgacagagcgagaaaaaatgttggcaggagaactttacgattgtggtgatattgagttgttaactcaatggcataaagcaaaagacctagtaagagattataaccaaacagattcctcggatttggaaaaaaaagaaaaaatattaaatgagttacttggtggtaagggtaaaaacttatggattactgcaccgtattatgtagattatggaaataatatttattttggaaataattgtgaagtcaatatgaattgtacgtttttagatgataataaaattatcattggggataatgcactaatcgcaccaaacgtacaaatatatactgcatttcatccaactaatgctggtgatagatttggtaatgccaaagaagatggttcatttgaattttgtaaaactcaaacagctccagttactattggagataatgtagttataggtgcaggaagtattgttacaaaagatattccaagtaatatgattgcatacggaaatccatgccgtattattcgagaaaataaa

SEQ ID NO: 17232 - DNA, 444 bp, Clostridium difficile
atgaaaatatctattggatgtgaccatggtggttatgaattaaaggaatatataaaggaaaatttaataaataaaggtatagaagttgaagatgtgggtacaaattcaaaagaaagtgtagattttccaatatatgcaaaaaaggtaagtcaaaatgttcaaagtaaaaaatctgatttaggcatactttgttgtggaacaggaataggtatgtctattgcagcaaataagtttaaaggaatcagagcagctgttgtttctgactgtttttcagctaaggcaactagagaacacaataatacaaatgtactttgtttaggagaaagagttattgggaaaggattagcaatgagaattgttgaagaatggttaaattcaagttataatggagaaagacatgcaagaagattacaaatgattgatgatatagaaaaagaaaattta

SEQ ID NO: 17233 - DNA, 647 bp, Clostridium difficile
aaaattattaaagtgcaaaaacctaaatttacaggagaattagaaattattgaaaatcttgaagatatacttgaagatatatttaatgatgaaaaaatatttaataaaattatagaaaatgaagttataagtgatttagattctgtaagagttagctttgaatcttgtatatttagaaatgtgtcttttgaaaattgtaatttaaaaaagattgatttacttgatgtggtatttgaaaactgcaatttatcaaatacattttttgatggaggaagtatatacagagttgaatttaaaaatagtaaattgataggagttagatttgatgattgtatacttaaaaacgttttgttcaaggatgttttaggtaagtattctaacttttcattctctaaatttaagatagtttctatcttagattcaaattttgaaaattctgtattcaagaagtaaaaggtgacaatctagtatttgagtatacaaatttaaaaaaagcaaactttaatggaactaaactttctggcatagattttactactaataatattgagggaattgagattggtatagatgatattagaggagcaatttttgatgtgtcacaagcaattgatttaacgaaattgatgggaattatcataaaatga

SEQ ID NO: 17234 - DNA, 1518 bp, Clostridium difficile
atggtgatggaaaagaagtatgtaatggcattagaccaaggaacaaccagttcaagagctatactatttaataaaaaaggcgaaatagtgaaaattgcacaaaaagagttcaatcaaatttatccaaaagctggatgggtagagcatgaccctatggaaatatgggggtcacaaagtggggtaatgagagaagttatagaaacagcaggtataagaccagaagaaattgcttcaatagggataactaatcaaagagagactacggttgtttggagtaggtatactggtaaacctatttataacgcaatagtatggcagtgtaggagaacgtcagaaatatgtgatgaacttaaaaataaaggattggaagaatcaataaaagaaaaaacaggtcttttaatagatgcatacttttcagcaacaaaagtaaaatggatattagataatgtagaaggagctagggaaaaagcagaacaaggagagttattatttggaactatagatacatggttaatatggaatttaactcgtggaaaagtacatgtaacagattactcaaatgcatctagaacaatgatgtacaatataaatgatttagaatgggatgaggatatattacgagaattgaacataccaataagcatgttgccattagtaaaaccttctagctatgtttatggtcatacagatgagcgcatgttatcaggagctaaaatacctattgcgggatgtgctggagaccaacaagcagcattatttggtcaaaattgtgttgaagaaggtactgcaaaaaatacttatggaacgggttgtttcttgcttatgaatacaggcagtaacatagttaaatctaagcatgggttacttacaacaattgcttggggagttgatggaaaagtaacatatgcattagaaggaagtatatttattggaggagcatctgttcaatggcttagagatgaattaaagataattgaatctgcaaaagatagtgaaatgtatgcaaatagggtagaggatactaatggtgtatatgtagtgccagcatttacaggtcttggagctccatattgggatatgtatgctaggggttcaattttaggacttacaagaggagcaaaaaaagaacatatagtaagagccacattggaatcaattgcttatcagacaaaggatgttttagaagcaatgcaaaacgattcaaaattaaaactaaaatcattaaaagttgatggtggagcaagtaataataattttttaatgcaatttcaatcagatatattaaatgtagatatagatagacccaaaatagtagaaactacagctttaggagctgcttatttagcagggttgtctgttggattttatattggaagaaatgaaattacttcaaagtggtcagtagaaaaagagtttaatccaaatatgagtgaagagaagagatgtaaattatataaaggatggaaaaaagctgtatcgagagctttaagctgggaaaaagaagatgaattggatatt

SEQ ID NO: 17235 - DNA, 3465 bp, Clostridium difficile
atgggacttaggtttgtattaggtagaagtggaagtggaaaatccacctatatactagatgagattaaaaaagaagctcaaaaaaatgaaacgacatcaattatacttttagttccagaacagtacacatttgaggctgaaaatagagtaagtaagctattcttaggaaaagaaaaagataagtatctaagagttagggtacttagctttaagacactaagtaatatagttttttctcaagtaggaggattgacagatgtaaatataaattctagtggaaaagcaatgatggtatatagagctattgaagatgtaagtgaagaattaaatgtgttttcaaaatcaaaatcgcagtctggttttgtaagttcaattacagatatgatatcagaaatgaaacaatataatataagtcctgaaatgttagaaaatatatctggagaattggataatgaaactttaagtttaaaattaaaagatataagtaaaatatataattcttttgaagggaaattgcatgaaaattatgtagatgctcaagatatgttaacttcattgacaagtaaaattgaattaagcagttatttagatggagcttgtgtttatatagatgaatttacaggttttacaccaaatcagtacaatgtcataaagagtatattaaataagtctaaaagtgttaatatctctttgactgtagatgatatcaactatattgggtacagtaaatctgatatgttttctagaacgaaatttacttattcaaaattgactcaattgtgcaacgaagaaggcataaaaatattgccacaagtaaatttaaacacaggtgttataaaaagatttgaaaaagttaaggaattacagcacttagaaagattttataatgcttatccatataaaatatattcaaatccaactgaaaatataaagataaaagagtttaacaatttatattcagaggtggaagagatagccagagaaattgtacatttagttagagataagaatgtaagatatagagatataaccattgctacaagagatttaaatagatatgattttttagtacactctatatttaatgaatataatataccaaactttatagataagaagagagaggcaaaaagtaatccaatagttattttaattatttcagctttagaaatgaagaatagacgatatgggtatgaaactatgtttaggtatttaaaaagtggacttataggaattgataatgatgatataaatttactagaaaattatgtgttggctaatgggattaaaggtaaaaaatggtttgatgaaaaatgggattatagaataacccaaagtctttcaggtcaagaaagtgaatttgaactggaattaaaagagaaaataaatgaaataaaaaatagagtattagagcctatagtaattttacaagaaaaattaagaggaaaaaatagagtaaaagaaatctgtagatatatatatgaatttttattagatataaatatgccagaaactatagaaagtttaatagtaaattttaaggataaaggggaacttgatgttgcaaatcaatactcacaagtttgggacatagtagtggacatattagaccaaatggtggaacttatgggtgatgaaataatttctttagaaaaatttataaaattaataaccttaggttttgatgaatatgaattagggctggttcctcctagtatagaccaggtacttgtaagtagtgtggatagaatgaaaaatccagacacgaaatatttatacctagttggaactactgatggtgtgtttccgctgattacaaaggatagtggaatattgagtgataatgatagggaaagtcttggaaacaaaggaatcgaagttgatattgatagtaagactaggagttttgaagaacagtttcttgtatataaagctcttacttcgacatctaagaatttaaccataacatatccaatatcagaccatgaaggtaaaacgcttagaccatcaataattatatcaagacttaagaagatatttccaaatatagaaaataaaagttatttagtggaagaaaataaaaacactgataaagatatacttaaaaaaataacggttaaatcccctacatttaatgaacttataaacgtaataaaaaattatgacagtgatggttacaatacagaagagattaatagtatttggttagatatatataggtactatttaaaagatgaaatctatagttctataacaaaaaaagttataaaaggtcttagttatactaatcaagttcataagattgaagagaaaaaaataaggtcattgtataaaagtaattctcttagcatatctaggcttgaaaaatatgctgaatgtccatttgcttattttatacaatatggtctaaaagcaaaaaagcgtaaagagtattcatttacaccaccagatttaggaacttttattcataatattttagataggttttcaaaagaacttttacaagataatttaacttggagagatattgatgaaaaatatatagaattaaagataggtataatagttgatgaaataattttaaagataccaggatatatattaaatagttctgagaggtataaataccttgcatatagattaaagaatatgttgacaactgctataactataattagtcagcaaataaaacaaggttcatttgaaccaatagattatgaagttaaatttggcgacaatggaaaatatccacctataaaaatggtgttagaaaatggacaagaagtaagtttaattggacaaatagatagagttgatgaatttgaagaaggagaaaataaatatataagaataatagattataagtcaggcaataagtccataagtctaacagaaatatattatggtctacaattacaattacttgtgtatttagatgcaatccttgaaagtgcaaaggatgaagatatgaatataaatccagctgcaatactatattgtagaataaataatccaatagcaaaatttaatgaagataaagatgatgaagaaatacaagaagcaatattaaaagaacttagaatgaaggggcttgtagtaaaagactctcacatagttaaagagatggataaatcattaatagatggagaaaggaaaaactctttagtaataccagtaggtcttactaaggatggaaatgtaggtaaaagtacttcagcaataagctatgaggatttcaaactgcttagaaaatatgtaaggcatgctataaaggatttatgtgaagaaatgttaagtggagaaatacgtatagctccatataaacataaagatggaacatcatgtgacttttgtgattactctgctatatgtcagtttgattcaactataaaagataacaagtataaaaatttaaataataagagtaatgaagagataataaaaatgatgaaaggagatgttaat

SEQ ID NO: 17236 - DNA, 1893 bp, Clostridium difficile
atgataaagtttgaagcaggaaaatatgatgttatagtagtcggagcaggacatgctggatgtgaagctgctttggctactgcaagaatgggatataaaactttgataataacaatgtctttggattccatagcattaatgccttgtaatccatcaattggagggactggtaaaggtcaattagttaaagaaatagatgccttaggcggtcagatgggattaaatatagacaagacatatatacaaagtagaatgttaaatactgccaaaggtccagcggtacactctttaagagcacaagcagataaatttaaatatcatgaagaaatgaaaaagacattagaagatgaaccaaatcttgatatagctatggatgaagttgtagaaatacttcatgaaggaaatgttgtaataggagttggaactaaactaggatgttcatttaaatctaaagctgtaatattggccactggagtttatctgaactcaaagatatatatgggtgaagttgcattttatgaaggtcctaatgcattggggtatgcaaaatatcttacagatagcttagttgagcttggtcttagaatgagaagatttaagacgggaactccagcaagagttcatagagatagtatagacttctctgtaatgtctttacaagagggtgatgaaaaagtaactccattctcatttatgaatgaaaatatagaaaaaaaacaagaaccttgttatttaacaagaactacagaagaaactcaaaaagttatactggataatttaaaaaggtctgctatgtatagtggagtaatagaaagtactggtccaagatactgtccttctatagaagataaagtagtacgatttagtgataaaacatcacatcaattatttatagaaccagaagggttaaatactaaagaaatgtatatacaaggaatttcaactagtttaccttttgaagttcaattagatatgtacaaaactataaagggacttgaaaattgtaagataatgagacctgcatatgctattgaatatgattgtgttgacccaactcaactaaaaataagtttggaaataaagggtgttgagaacttatttagtgcagggcaatttaatggaacttctggatacgaggaagcagcagctcaagggcttatggctggtataaatgcagttagaaagatagaaggaaaagagccatttgtattagaccgttcagaagcttatataggtgtcttattagatgaccttgttactaaaggaactaacgagccttacagaatgatgacatcaagagcagaatatcgactatatttaagacaagataatgcagatatgagattaactcaaaaaggttatgatataggattagttaaaaaagatagatatgaaaggtttctaaataaaaaggctgctgtagagaaagaatttgaaagactaaaaaatgaaagagttacaccaaaagaagtaaatagtttgttagaagaaaaaggagcaacaccaataaaggttggaatatctctatatgaatttttaaagagaccagaggttacttacgaattgcttgaagaattagggaaaggcgctggagatgatgtttcaagagaagttaaagaacagtgtgtaataataactaaatatgaaggttatatagagaaacaattgaaacaaatagaccaatttaaaaaacttgagaataaaaagctggatgagaaaataaattattcatctatagaaggtcttagattagaggctagacagaaactagatgatataaaacctatttcaatagggcaagcatctcgtatatctggtgtttctccagctgatatatcagttttacttatatacctagaacaaatcagaagaactagaggtggcaaaggtgaa

SEQ ID NO: 17237 - DNA, 3354 bp, Clostridium difficile
gaaagattaaatcaaaaccttgaagcaatttccatgcttaacagagtgggcagcagacaaagatcgcttgatagtacagctcaggaagttttagcaaggtatgtaggctggggtggactttccgaagtgtttgatgaagaaaaaggcggacagtggaaagaagcgaggagctttctaaaagagaacttatcgcaggcagaatatgaagctgcaagagaatctactttaacgagcttttacacaccgaaaaccataattgatggaatatataagacgctttcggatatgggatttaaacagggaaacattttagagccatcaatgggcatcggaaactttataggcaatatccctgatgaaatgaataagtccaagttttatggcgtagaacttgactcggtaagcggtcgaataggaaaactactataccctgaaagtgaagtgcagattaaaggactggaagaaacttctttttccaataacttctttgatgcggttatcggtaatgttccatttggagaatacaaggtaaatgacagggagtataacaaaaacaacttccttatccacgactatttctttgctaagtccattgataaggttcgtaacggcggcattatcgcctttatcacatcaagtggaacaatggataaaaaagatgaaagcgtaagaaggtatcttgcagcaagagccgagtttttaggagcgataagacttccgaacgacacctttaagggtgtggccggaacagaagtaacttcagatattatcttcctaaagaaaagggacagtatcagagaaagggatgaggactggattcaccttgctgaagatgaaaaggggtttgtatataataaatactttgtcgatcatcctgaacaggtactcggcacaatgcgtgaagtttcaggaagatttggaaacacacttgcgtgcctgccgaaagaaaatgccgacttaaaagagcttctgacaaaagcaagtgaagaaatatccaaaggatcaacttatgaagaaatagagcttttagatgatgaaattacttcagttcctgcaacggatgatgtcaaaaacttttcctataccgttattgatggtgaagtctattacagagaaaactcacttttcgtaaagaaagaagtaacggagaaaaataaggaaaagattaaggactatcttgaactgaatactgcccttaaagatgttatctacaagcagaaagaggactattccgatgatgaggtaaagaaagctcaagaaaagctcaatgaagtctatgacaacttttcaaagaagcatggctttataaataatttaagcaataccagagccttaaaagaggatagcaatttcccacttgtttcctccatagaaatccttgatgaagaagaaaattttaaggcaaagggcgatattttcagtaagagaaccatcacaaaggcaaagataatcgaccatgtagatacttctcttgaagctcttgtgctatctatgtctgaaaaaggttatgtggactttgactatatgggaagtcttacaggaaaagacagaccaacgttgatagaagaattaaggggagaaatctacttaaatattagagaagaacaaaacttttatagaccgttatcctttaacctcgaagatggagatttaccttttgcctgtgcaaatggcagcaattcatataaatatggttatgtaacaaaagacgagtacctatcaggaaatatcagagataagattgcgattgttgacagttatctatcaaaaattagacaaacagaaagagaactacctcatcttggatatgcggaagatggcaaagaaaaagaactgataagctatgagatgaaccgattggaataccaaaaggcagagcttaccaaagttttaccaaaggagcttgaagcaagtgagataaatgttcgtcttggagcaacttggataccgataaaagatattgaaaagtttatctttgaaacactgaaaactccgggctgggcaagatgggatattaaggttaaattttcaaatctcacaagcgaatggaatattgagggaaaaagcaaggacagaggaaatgaccttgctgaaatgacctacggtacatcaagggtaaatgcctataagctgattgaagatgccctaaatttaaaagaaacaaaggtatttgaccagattgtaaattcggacggctcaaaaacttctgtgctaaataaaaaagaaacgcttcttgcaggacagaagcaggagcttctaaaagaagaatttaagaattggatatttagtgatcaggaaagaagaaacaggcttgtaaagctatataatgagcgttttaactccatccgtaacagagaatatgacggaagtaacctttcttttgagggaatgaccacagaaattgatttaagatctcatcaaagaaatgctattgcaagaagtctgtacggaggaaatacgctgcttgcccatgtagtgggaagtggtaagacttttgaaatggtagcttccgcaatggaaagtaaaagacttggaatgtgcagtaaatctctttttgtcgttccgaatcacttgacagggcaaatcggcagagagtttatgcagctatatccgtcagctaatattatggtggcagataagaaagattttgagccgaaaaacagaaaaagatttatcggtaaaattgccacaggagagtatgatgccgttgtcatcgggcatacgcagtttgaaaaaattcctatgagtaaggaatatcaggagaaacatattcaggatcagattgatgaaatcattaactatgtggaggaatataagcatgatagaaatcagaactttacagtaaaacagcttgaaaagaccaagaagaaacttgaaacaagacttgaaaaattaaatgatgattttaagaaggatgatgttattacctttgaagaactcggcgtagataagctatttatcgacgaagcacacaattacaaaaatctctatctctacacaaaaatgaggaatgtagcaggtatcggtcaaagtgaagcatttaagtcctccgatatgtttatgaagtgtagatatatggatgaaatgacaaatggtaaagggatagtttttgctacaggaacgcctgtaagtaactctatgacagagctttataccatgcagcgttatcttcagtatgaaaacctaaagaaaaatcacttggagcattttgactcttgggcttctacttttggagaaacgcagtctgcttttgagctttctccggagggaacggggtatagagttaagacaagattttcaaagttttataatctgcctgagctaatgagtatgtttaaagaagtggctgacatt

SEQ ID NO: 17238 - DNA, 1227 bp, Clostridium difficile
ttgatgaaagttttattatcaggcggtggaactggagggcacgtgtatccagctatagctattgcaaacaaaataagagatgagcatccagacgctgagataatttttgttgggacggaaaagggaatagagtcagaaatagttcctaagtatggatttgaattaaagactgtaacagttcaaggttttaagcgaaaaatagatttcgataatgtaaaaagagtttttaagctttttaaaggtttggagcaatcaagaaagattgttaagaaatttaaaccagatatagttataggaactggtggatatgttagtggacctgttttatttaatgcatctatggggaaaataccagccataatacatgagcaaaattcttttcctggtgtaactaataagattttatctaaaacagttacaaaggtacttacaagttttgaagattcgcataaaagatttccagaggcagcagaagataaattagtttttacaggaaatccagttagaaaagaaattttattatcaagaaaaaatattgcaagaaagaatctatcaataagtgacgaaaaaagaatggtactttgctatggtggtagtggaggttcaagaaaaataaatgatgcaatgagacttgtaataaagaatatggtaaatgaagatatagcttttatatttgctacaggcaaaagctattatgatgaatttatgggaagtattagcgatataaatcttaaaccataccaaaaagttgtgccttacttagaagatatggcaaatgcacttgcagcaagtgatttggttataggtagcgcaggagcaatttcattagctgagataacggctcttggaaagccatctataataatacctaaagcttatactgctgaaaatcatcaagagtataatgccaagagtatagaaaaacaaggggcaggaattgctattttagaaaaaaatctaactccagagagcctaaatacagcagtatttaaacttttaggagatagagaacttttggttgatatggcaaatgcaagtaaaactataggtaagcctgaagccatagaccttatatatgatgagataatgaaagtatacaattcaacacaaaagtcaacttctaaaaaaacaaaaaaagaaaaagttattaaggaagtaaaagaaataaaaaaagaaacgactccaagtatagaaggtcaagctaaggtaataggaataaagaaaaga

SEQ ID NO: 17239 - DNA, 1374 bp, Clostridium difficile
ttgaaaacaatagttagaagacttattctctacgcagatggaatgcgtcctactcaaataatggtatctgggtttgctgcgattattgtaatcggagcattgttgttaacactcccgatagcgtcgcagagtggagagagtataggcttattaaatgctctatttacggctacttcagcggtttgtgttactggtctagttatggtagatacagcaacttattggagtttatttggacagatagttataataacattgatacaaattggtggtcttggatttatgaccgtagccacaatgttttcacttatggcacgaaaaaaaatacaactaagagaaagattattaatacaagagtcattaaatcaagctgatttatcgggacttgtaagacttacaagatttgtattaataataaccataacaatagagggaataggtgcactggttttatcaactgtctttattccacaatttggtttgtctaaagggatatggtatagtgtatttcacgcaatatcagcgttttgtaatgccggatttgacttgatgggcagtgtaagtggcccatttacatcgttaaattcttatgtaaacaactttacagtatcaatgactgtttgcgcacttatagtgcttggagggctaggattccctgttgtacttgatattgtaagaaaaagaagattttcaaaattaaatgtgcattctaaggttgtattgttttcaactgctacacttatttttgtgggtgcattatttatttttcttatagaatttaatcaaaaagctactatggcggacttgcctttaaagggaaaagtactatcagcaatatttcaatcagtaacagcaagaactgctggttttaatacgcttgatttagctactttacgagaaagtagtgtatttgtaatgataattttgatgtttattggagcatcacctgcatcaactggtgggggtataaaaacaacaacactagctgttttaatcattacagttagaagttttctatcaggaaaatcagatatagaagcttttgaaagaagattagctccatcaactataaaaaaatctcttggtatatttgtaatcagtatatcagcagttatttttggaacattgattatttcaataactcagcctaattttacattagttcaatcagcttttgaggttacatcagcacttgctacagttggttcaagtttagctggaactccaaacttaaatgctttaggtaagattataataataatctttatgtttatgggtagagttggttctcttactttatttatggctatactttctggtggtagaagaaagagtcaaccaatcagatatgcagaaggtaaaattatggttggt

SEQ ID NO: 17240 - DNA, 798 bp, Clostridium difficile
atgaaaagaattataactataaatacaaaccaattaaataagtcccttgagactaaagaactcttaactagaaaacttatcaatgctggctttgaagtgtattcagatatttatccagacacagagcttattatatcaattggtggtgatggctcttttttaagaacagttagagatttcgattttcctgagattcccataatgggaataaatacaggtcatctggggttttttcctgatattttaccagataagattgatagctttattgaagcttatacaaaaaaagattatattattcaagaaatgtcacttcttaatgcggaagtatatactactactagtggttctaatatgcttgctgtaaatgaggttgttataagaggagacaagtctaggactatacacctaaatttaagccttgataataaacatatacaaaattttagtggagatggtatgattatttctacttccacaggttcaacagcctataactattctgctggaggtagtattgttgatataaatcttgaacttatgcagattacacctttacatccgataaataccaatgcatataggtgctttacatcaagtataatatgttcaaatgaatctgttataaagattgcaccagaatatagatttgaagattctgtattgattgtcgttgatggagttgagcacagatttagacaaatcgaaaatataaaagttagtatatctgatgcaaaaataaaattacttagaatgtcaaactatgagttttggcatagagtatctgaaaaattttta

SEQ ID NO: 17241 - DNA, 900 bp, Clostridium difficile
ttgaatggaggaataaaaatgaaatttgtgactttttgtagtagcaatgaagaaaaaataggtgtatttaattcagaaacaaatagtatatatgaaattaatagtttaggattaagtaaattatatactgatatgaatgattttattgaaaacgtatctacaggagatttagaaaaaataaaaaacaattcatttgaaaacgcaaagtgttataagttagaagaagttaaattatgttccccaattgtaagacctaaaaaagatattatatgtttaggtctaaactataaagaccatgtcaatgaaatcccagatggagttataaaaaacgtagttatgccagattatccaatttatttttctaagagagcagacaaaataattggagtggatgataagataagcttacatggagatttggtagagaagttggactatgaatcagaacttgcagtaatcataggtaaagaaggtataaatatatcaaaagaagatgcttatgaatatatatttggatatacaatagtaaatgatataagtgaaagagcacttcaagataaacatgttcaatggtttagaggaaaaagcttagacacacatacatctatgggaccttgtatagtacataaagaagaatttgaacatcctttaaaattagatataagtagtgtagtaaatggagaagtaagacaagattctaatacagagtactttatatttgatatacctactataataaatgatttatcaagaggaatgactctaaagccaggagatataatttcaactggaactccagcaggggttgctatggggatgaatcctcaagtatatttaaagcatggcgatatagttgaatgtaaagtcgaaggaataggagttttaaaaaatatagttgat

SEQ ID NO: 17242 - DNA, 3384 bp, Clostridium difficile
atgaatgatgtttttttatatcctttgcaaaattcaaaagagtataaagatataataaactgtataaaaaatacaaaaggctcattattggttaatggacttttaccagtacaaaaacctcatatatcgtattctatatttaatgatttatcacgacaaatgatttttataacgagtagtgatttagaagcaaagaaagtatacgaagatttaagtttttatatggaagataaagttgaatatttaggttttcaagatatttatttttatcacttggatgcaaaggacagaaacgaagaagcaaagaaattaaaagtattgttaaaactagcaaataaagaaaaaatcattttagtaacttctattgaggcagttttaagaaaatacataccaaaacaagttttgctcgatagtgtatctcattataaggtgggagatagcttagacttagaaaagttaactgagaaattagtttcattgggatatgaaagagtttcaaaaatagaggggtttggtcaatttagtataagaggtggaattattgatgtattttcacttgaatatacaaatccaattcgtatggaattatttgatgatgagatagattccatacgaacttttgacgtatattcacaaaaatcaattgataaattgcaacaattctctataactccatctagggaatttatttatcccgaaaaaactacagatgcattagttaaattaaaaaaagaaacaactaaaaatactgatgaaggtacatttcaaaatatagattatatatcaagtaagacttattttgaaggtgtagagaactatatagattatatttatccagaagaaaacaaaagtatatttacttatttagcagatgatgcaatagtatttattaatgatataacgagacttaaagaaagatgcgaaaattatataaatgagtttagagaaaattataaattaaatcttgaaagaggtctggctattaaaaaccaaggtaaattgttatatcactatacagatttagagtacttagtaaaagacaagtctgtggtattaaactcgctattgccaaagtctataaataacttttctataaaatctataataaattttgaaagtagagaagttcctacatttaatggaaaggtagatttgcttgtagaagaattaaatcggctgaaatataatggatacaaaataattttagcaacaaataccttagaaagagcaaataaattaggaaaagatttattggacaaaggcttagaaacgaccatttctaaagatagagatattgaaattaaatcttcacaagttataattgtacctgcacacataaacagtggttttcagtataaatctataaagtttgttgttataacagataacgaaatgataggtgtttataaaagagcgtctaagactagcaataaaaaagttaaaaagggaaagaaaatagaatcctttttagatttaagtgttggagactatgtagtccatgaaaatagtggtgtaggtagatacacaggaattgaacaaattacagtcaatgctattaaaaaagattatatgaaaatagtatatcaaggtggagataatctatatgtgccaatagaccagatggacaaagtacaaaaatatattggtgcagaagtagaaaaagttaagttaaataagcttggaacaaatgagtggacgaaagcaaaagcaaaagttaaaaaagaaattgaagatatgacaaaagacttgattgagctttatgcaaaacgtgaaaaaatacaagggtataagttttcaaaagatacaccttggcaggcagagtttgaatcgttgtttccatatcaagaaacagaagaccaattaaaggctatagaagaaactaaaaaagatatggaatcaagtaaggtaatggataggctagtatgtggagatgttggttatggaaaaacagaggtagctattagaagtatttttaaagcttgtatggaccaaaaacaagttgctgtattggttccaacaacaatattggcccaacaacattataatacattcaaagagaggtttgaaaattatcctttgagagtagaagttttaagtaggtttaaaacaccaaaacaacaaaaacagattattgaagatgctaaaaaaggattagtagatattttaattggaacacatagaataatatccaaagatataaatttaccaaacttaggtcttgtagtcattgatgaagaacaaagatttggagtaaaacataaagaagctttaaagaaaattaaatctacagtagatgtacttacactttcagcaactcctataccaagaacattacatatgtctttaagtggaataagagacatgagtgttatagaagaacctccacaagaaagacatcctgtaataacatatgttacagagagtaaggaaagcgtaattcaagatgagatagagagagaattaagtagaggtggacaggtattttttgtatacaatagagttgaacacattgaagaaatggcaagtatgattcaaaaactcgtaccagatgctagagtggctgttgcacatggaagaatgacttctaaatcattagaaaatataatcctaggatttttaaataaagattatgatgtactagtctgtactacaataattgaaactggtatggacatatcaaatgcaaatacaatgattatatatgatgcagataaaatgggattggctcaactttaccaattgagaggtagggttggaagaagttcaagacaaggatatgcatatcttttgtatgaaaaagataaaactttaagtgagatagcggagaagagattaaaagctatcagagaatttacagagtttggttctggttttaaaatagcaatgagagaccttgaaataagaggagcaggaaatattttaggttctcaacaacatggtcatatggcagttataggttatgatttgtacgttaaaatgcttaatgatgcaattaaaaaagtcaaaggtgaacctattgtggaggaaattgatgttgaaatagatttaagtgtaaatgcatacattccagataattatatcaaagatgagttgattaaaattgaaatgtataagaaaatagcttctattgaaaacaaagaagacatgttggatatacaagaagaacttgaggatagattctctgatatacctaaaccagtccagacacttcttacaatagcttatataaaatcgttatgtaagatattaaaaatagaaaagataagacaattaaaagatgaaatattattagttccaataacaaagtatagaactaaacagaaaataggttataatatagttacagaattagaagaattattagaaaagatgtgcaaggtaaaa

SEQ ID NO: 17243 - DNA, 756 bp, Clostridium difficile
atggatagattttttgttgaaaaaaataatataaatctacaagataaaacttgcactatagaaggtgaagatgtaaaacatatttcaaaagttttaagatgcaaattaggtgagaaacttgaaatatgtgacaagaataataatgagtatatttgtgagataatgaatatagataagagtatagttaatttagagattttagaaaaagttgatataaatagagaatcagaacttaaagtaaggctataccagggacttccaaaagctccaaaaatggaaatgatacttcaaaaattaactgaagtgggtgtagaagaaataatattagttcaaactaagagaagtgttgttaaagttgatgacaaaaaagaagataaaaaatttgaacgttgggaaagaataatttatgaagcagcaaagcaaagcaaaagaggtaagataccaaaattaagaggtgttttaagttttaaagaagctttagaagatatgaaaaaaaataatgtaaatatttgcccttatgaaaatgaaagaacagtttcaataaaacatgcactaaaaaaatgtgattctaatatagatagtgttggaatttttataggtccagaaggtggattttctgaagaagaaatagaacaaatacaaaaaaataattgtaatgttgtatcattggggcctagaatattaagaactgagacagcttctgttgtagcatcaacaatagctttgtatgaactaagtgatttaggaggagaaaaa

SEQ ID NO: 17244 - DNA, 1170 bp, Clostridium difficile
ttgagtgtggaaaataaatcgaataaaaaagagttaaaaaaggttactgctaagacattaatagaaaaaggaaaaaagcaaggttctctgacacttgcagagataatggaagctttttcggagactgaacttgataaggatcaagtagaaaatctttatgagactttaggaaatttgggaatagaaataacagaaacaaaaaactataaagctgatatagatttttcggttgctgatgacgatttaagtataggccacttagatgaagatgcagaggcaatttcacatgatgactcttctgcaatagaaatagaaactgtggatttatctttaccaaaagggataagtatagatgaccctgtaagaatgtacttaaaagaaataggaaaaattcctctacttaaaccacatgaagaagtagaatttgctagaaggatgcacgaaggtgatgagatagcaaaacaaaggttagttgaagcaaacttaagactagttgtaagtatagcaaaaagatatgtaggaagaggtatgcttttcttggatttaatacaagagggaaatttaggtcttataaaagcagtcgaaaaatttgactatacaaaaggatataagtttagtacttatgcaacatggtggataagacaagctataacacgtgctattgcagaccaagctagaactataagaataccagttcatatggtagagactataaataagctaataagagtatcaagacaactacttcaagaacttggaagagatccaaaaccagaagaaattgcaaaagaaatggaaatgacagaagataaagtaagagaaataatgaaaatagctcaagaccctgtgtctttagaaacaccaataggagaagaagaagatagccatttaggtgactttattccagatgatgatgctccagccccagcagaggcagcagcatattctttattaaaagaacaaatagaagatgtacttggttcattaaatgatagagaacaaaaagtattaaagcttagatttggtcttgaggatggtagagccagaactcttgaggaagttggaaaagagtttgatgtaactagagagagaataagacagatagaagcaaaagcactaagaaaactaagacatccaagtagatcaaaaaaacttagagattatttagac

SEQ ID NO: 17245 - DNA, 1116 bp, Clostridium difficile
gtgatagcagtgaaaaaagcctataagtttagaatgtatccaaataaaaaacaacaagagttaattaacaaaacttttggatgttgtagatttgtatataataaatatcttgctaaaagaatagatgtttataaaagcgataaagaaacttttacttataaacagtgtagttctgatttgaccaatttaaaaaaagaattaaaatggcttaaggaacctgacaaattttcactacaaaacgccttaaaagatttagataatgcatataaaaaattctttaaagaaaaggcaggatttcctaaatttaaatcaaagaaaattaatagattttcatataaaactaactttacaaatggaaacattatgtattgtggtcaatatataaaactacctaaacttggtatggttaagataagggataaacaagtacctcaaggtagaatacttaatgctactatatctaaagaaccaagtggtagatattatgtatcattatgctgtactgatgtagatattgaagcatttgaaaatactaataatcatataggtttagatttaggaattaaagaattttgtatctcaagttgtggagaatttatagaaaatcctaagtatcttaagaagtcattaaacaaacttgctaaattacaaagagaattatcgagaaaaacaatcggtagtttaaatagaaataaagcaagattaaaagttgcaagacttcaagaacatatagctaatcaaagaaaggattttctacaaaaactatctactaaattaataaaagagaatgatattatttgcatagaagatttacaagtaaagaatatgattaaaaatcataaactatctcgctcaatttctgatgtgtcatggtcagaatttattcgtcaattagaatacaaggctaattggcatggtagacaaattgtaaaggtaggtaaattctttgcaagttcacaaatatgcaataaatgtgggtataaaaacgaggaagtgaagaacttaaatataagagaatggatttgtcctagttgtaatgaaactcacgatagagatataaatgcaagtataaatatattaaaagaaggattaagactaataacaattcaaaataaa

SEQ ID NO: 17246 - DNA, 918 bp, Clostridium difficile
atgatgaatattgtctcaataaatggattatcaaaaggttttggtaatcgaaagataatagataatttaaattttactgtaccagaagggtcagtctttgggtttgtaggtaagaatggtgcaggtaagactacaacaatgaaaatggtacttgggttacttgaaccagatagtggaactatagatgtttgtggtgagaaagtgacctatggaagaacaagttctaatcgtcatgtaggttatctgcctgatgttccagagttttacaactatatgagaccacttgaatatctttctctttgtggtgaaattacgggactttcaaaaaaagaaatacagataaggagtgaagagttgttatcacttgtgggtcttggaaatgaaaagagacgaataggtgggttttctcgtggaatgaagcaacgacttggtatagcccaagctttgctttcacgccccaaattacttatttgtgatgaaccaacaagtgcacttgaccctgttggtcgaaaagaaatattagatattatgcttaaaatcaaagactcaacaactgtaatattttcaacacatatactatcagatgttgaaagaatctgtgaccatgttgctatattaaacaaaggaagcattgcccttagtggtacactttcagaaataaaaagtatgcacggaaaggatagacttttactggagtttgcaagtaatgatgaaattcaaaagtttaagtctagtgatggtattaaatccttactaaaagattcagaagaaactaatatggaaattgttttgcatggtaaagatataaaagcaatacaaaaaacagttatatctacactcgcagaaatgaatctttgtccagtaaagatggaactaatagaattatcacttgaaaatttatttttggaggtagtaaag

SEQ ID NO: 17247 - DNA, 1077 bp, Clostridium difficile
atgtcaagaagaaagaaagggataagtttagtaatattagttgctataataagttcaatacttagtagttttctaacaataattttagttaaggacaatttagtaagtaaatctacaggaagttctacgccgatagttgtaaatgatgatggtaagagtcaaaatatttatcaagcagttgcagaaaaagctacgccatctgttgtaggtattacaacaactagtgttgatactagtaatatgtttgcaataccaactgaaacacaaggtgtaggaactggaatcatagttgattcaaatggatatatacttactaattctcatgttatatcagatggtcaagctacaagtgtaaatgtattattcaatgatggttcaacaacttcaggtaaagtagtatggtttgaccaacaacttgatttagctatagttaaggttgataaaactggactaacaccagcagaatttgctgatagtgacaaagtaaaagttggagatatatcaatagcaataggtaatcctcttggattagattttcaaaaaacagttactcaagggataataagtggattagatagaactatacaaacagaaaaaactaatatgactggtttattacaaactgatgcaagtataaatgcaggaaatagtggaggaccattgttaaatcaaaaaggtcaagtaattggtataaacacagcaaaagcttctcaagcagaaggattaggatttgcaataccaatcaatacagctaagagtatagttgaagaagtaatcaaaaatggaaaatatgaaaaagtaactttaggcataaaaggtacagatgtatcaaattatgaagcagcaacaggtacaaaattaagtactgataaaggtgtttatgttgcagaagtaatatctggttcatcagcagaaaaagctggagtaaaggtaggggatattataactaaagtaggagatacagatataacaggtatgaatgatttaaataaaaagttgtatactttctcaaaaggtgctagtacaaaaataacagtaaatagaggcggaaaagcagtaacaataaatgtgaatttc

SEQ ID NO: 17248 - DNA, 2409 bp, Clostridium difficile
atgagaaagtataaatcaaaaaaattgtcaaagctactagcattgttgacagtttgctttttaatagtgtcaacaatacctgtctcagcagaaaaccataaaactctagatggagtagaaactgcagagtattctgaaagctatcttcaatacctagaagatgtcaaaaatggagacacagcaaaatataatggagtaataccttttccacatgaaatggaaggtacaacacttcgaaataagggtagaagtagtcttccatcagcatataaatcaagtgtagcatacaacccaatggatcttggtcttactacaccagcaaaaaatcaaggaagtcttaatacatgctggtctttttcaggtatgtcaactttagaagcatatcttaaattaaaaggatatggaacgtatgacttatcagaagaacatttaagatggtgggcaactggtggaaaatatggatggaacttagatgatatgtcagggagttcaaatgtaacagccataggatatctgacagcatgggcaggtcctaagttagaaaaggacataccatataatcttaaatctgaggcacaaggtgcaactaaaccttcaaatatggatactgcacctactcaatttaatgtaacagatgttgttcgtcttaataaagataaggaaactgtaaaaaatgctataatgcaatatggttcagtgacatcaggttatgcacattattcaacatattttaataaagatgaaacagcatataactgtacaaataagagggctccattaaatcacgctgtagcgatagtaggatgggatgataattattcaaaagataactttgcatctgatgtaaaaccagaatcaaatggagcatggttagtaaaaagtagttggggagagtttaattctatgaaaggattcttctggatttcttatgaagataaaactctactaacagatacagataactatgcaatgaaatcagtatcaaaaccagatagtgataaaaaaatgtaccaacttgaatatgctggtcttagcaagataatgtcaaataaagtaacagcagcaaatgtatttgattttagcagagattctgaaaaacttgactctgttatgtttgaaacagattctgtaggagcaaaatatgaagtatattatgcaccagtagtaaatggagttcctcaaaacaattcaatgacaaaacttgcaagtggaacagtatcatattctggatacataaatgtacctactaattcttacagcttaccaaaaggtaaaggagcaatagtagtagttatagacaacacagcaaatcctaatagagaaaaatcaactttagcatatgaaactaatatagatgcatattatttatatgaggctaaagcaaacttaggtgaaagctacatacttcaaaacaataagtttgaagacataaatacatatagtgaattttctccttgtaactttgttataaaagctataacaaaaacatcttctggacaagctacttcaggagaatctttaactggagcagatagatatgaaacagcagttaaagttagtcaaaaaggatggacttcttcacaaaatgcagtattagtaaatggagacgcaatagtggatgctttaacagctacaccatttacagcagcaatcgactctccaattcttttgacaggaaaagataacttagattcaaaaactaaggcagagttacaaagattaggaactaaaaaagtttatctaataggtggagaaaattctttaagcaagaatgtacaaactcaacttagtaatatgggtatatcagtagaaagaatttcaggtagtgatagatacaagaccagtatatctctagctcaaaagttaaatagtataaaatctgtttcacaagttgcagtggcaaatggtgtaaatggacttgcagatgcaataagtgttggtgcagcagctgctgataacaatatgccaataatacttactaatgaaaagagtgagttgcaaggtgctgatgagtttttaaattcatctaaaataactaagtcttatataattggtggtacagctactttatcatcaaatttagaaagtaagctttcaaatccaacaagacttgcaggaagtaatagaaatgaaactaatgctaagataatagataaattctaccctagctcagatttgaaatatgcttttgttgttaaagatggttcaaagagtcaaggagacttgatagatggattagcagtaggagcattaggtgctaaaactgattcaccagtagttctagttggaaataagttagatgaaagtcaaaaaaatgtacttaagtctaagaaaatagaaactcctattagagttggtggaaatggaaatgaaagtgcttttaatgaactaaatactcttttaggaaaa

SEQ ID NO: 17249 - DNA, 2118 bp, Clostridium difficile
atgggaaaaatattagtgctagcagaaaaaccttctgttggaagagatatagcaaaagttttagggtcaaaaaatgaaaaaaatggttatatagaggggccaaagtatgtgataacttgggcactaggtcatttggttacacttgctgaccccgaaagttatggagaaagatataaatcatggagcttagaagacctgccaatacttcccaagcaccttaagactgttgtaataaaaaagagtggaaagcagtttaatacagttaaatcgcaaatgaatagaaatgatatagatgaaatagttatagcaacagatgcaggtcgtgaaggagaacttgtagcaaggtggataatagaaaaatcacaggtaaaaaaacctataaaacgtctttggatttcttcaagtacagacaaagcaataaaagacggatttgcaaaattaaaaagtggaaaagaatatgaaaatttgtattactcagcaatagcacgagcagaagctgattggattattggaataaatgcaaccagagctttgacaacaaagtacaatgcacagctttcttgtggaagagtacaaactcctactcttgcaatgttgcttaaaagagaagaagaaataagaaatttcaaacctaaagagtattatggattagaattaattgctacaaagggaaattcagatataaaatttatttggaatgataaaaacaataattcttcaacttttagtaaagaaaagatagaatccacattaaaaaaagtaaaaggtgtagacataaaaatatctgaagtaaacaagtcatataagaaaaaatattcacctgcactctatgatttaacagaattacaaagagatgcaaataaaatgtttggattttcagcaaaagaaactttatctataatgcaaaaactgtatgaacatcataaagtacttacttatcctagaactgattctagatatttaacatcagatattgttggaacattaaaagatagaataaaagctgtaaatattagtgattattcaaagatttgtaatagattattaaaaagcaatattatagctaataaatcgtttgttgacaattcaaaggtaacagaccatcatgcaataataccaacagaacagaaggtattcatgagtgattttagtgataaagagcgaaaaatatataatcttgtagtaaaaagatttttagcagtactatctcctccttttgaatatgagcagacaactataagtgcaactgtagaaggagaaatatttaaggctaagggaaacaaagtaataaatttaggttggaaagaaagttataaagatattgaagatgaagatgagtatgaaagtataccaaatgttttagaaaaagatgtacttaaggtcaagggattaaagataacttcaggaaaaacaaatccaccaccatacttaaatgagggaacattattgactgctatggaaaagaatggtctagggacagttgctacaagagcagatataatagaaaaattattcaattcatttttaatggaaaagaaaaataaagatatatatataacatcaaaaggaagacaattattagatttagttccagtagacttaaagacaccagaacttacagcttcatgggaaaagaaattattggatatttcaaagggaaaacttagtaaaaatacattcataaatgacatgaaagattattcaaaagatattgtactagaagtaaaaaatagtgataataaatttaaacatgataacttaactaaaaatagatgtccagaatgtggaaaatttatgttagaggtaaatggtaaaaaaggtaagatgttgatttgtgaagatagagaatgtaatactagaaaaactatatcacaagtaaccaattcaagatgtcctaactgtcataaaaaattagaacttcgtggagaaggtgaggggagaatcttcacttgtagttgtggatacagagaaaagttgtcttctttcaacaagagaaagcaagaagaaaaacagaaggcatcaaaaaaagatgttaatcaatatttaaaaaatcaaaataaaaatcaagagacatttaataatccatttgcagaagcattagctaagctaaaaaacaaa

SEQ ID NO: 17250 - DNA, 819 bp, Clostridium difficile
atgaatttaatagataatcatattcatactaatttttcaagtgatggaaaggattccatggaagatacaataaaaaaagctataagtattggtgttagatatttgacttttacagaccatttagaacatgatgaagatagaggattttgcataaattataatgactatgttccagtatttaataagtttaaagaaaaatataaaaaggacatagagttattactaggtgttgaagtgggttacagaaaacatctaaaaaatgaaatagaagaaataataaattctaatccttttgattttgtattgtgctcaactcatacaattgacaatgtacctgttccatcaaaggcgtattttaaaggtcttagcaaagaagatgcgtattataaatattttaatagcatacttgaaactaatcgtgaatttggagattacaatatatatggtcatttggattatatatctaggtatggaatatattcagataatagagttatatacaatgactttaaagatgttattgatgaggtcttaaagtcaataatcaataatgggagtggtatagagctaaatacttctggttatagatatggattaaatgctatacatccaaatgaagatattctaaaaagatataaagaacttggaggatttatagttactgtaggttctgattctcatagggtagaagatatatgtaaagattttgatgtggcctatgatatgcttaagtatcttgactttaaatatgtatctttatttaaagaaagagaaacttattttgtaaatatagaaaaagttaaatctaacaatatagct

SEQ ID NO: 17251 - DNA, 1563 bp, Clostridium difficile
gtgggggtaggaattatgaggtacaaaaaaagaaatatagataagtcaagtgaactttcatttcaatctctagcaaaatattttataactttctatatagtaattatattaattattctttctatgttttgtataaatacaatatgggttatgaaaaaagataatcaagatttattatctacaacgtcaaatcgtattgaagatagggtaggagaaacaattaagctattgaactctttgagtaaagataattacataatagataatagtgtgaatggcatagataaaagtaaagaactttcaatgtatagtgatgaatttgggtatatgatgatatgttttgttgataagaatataattgtgtgggatgaagaaggtggtaatattagtctagctggtcgtgattatatgcagaaactttttgcaacaaaaaaatatcaagttacagatagttttgcagcaggggctgatggaaaaactttaaactacactattgcatcacctataataaagaatggaaatgtagatggttgtgtatttgcagcaatttactttgatgagataaaggatatactcaaacaaggaaaaggtcaacagcaacagaatttcatattatttggaagtgaaaatcaaataatgaatttaacaagtgatgaaactgcatatggagagaagtatatgaagttatcgcagaaaacaaaatatcttggaaccaatgcaaaaaaagtagaaaaggatatgtttaataataaatcaggtgattattgggcttttgaaaatggaaaattatactttatgtcctataaaccaattaagaacacaaattggagtttattttgtaaagttaatttcttagatatttttgcattaaatttaattcctatgggagctattctatctgttataactttagtatttattattttgatttgtatggagaaaagcttcatgaaaaaacgaatggaagttattgatatgcttttaggttctgttcaagaattagaaaaacgtatatatcaaacagaaagacctagtgaagtagactttaaagaaattattcagctcacaagtaaaggtctgactgatggattaactggtgttgtaacacgtactgtattttttgaccaaatttataatcgtgttgaaatggaggaaaatgataaattatctgtaatttcatttgttgatttagatgatttgaaatgtattaacgacttatatggacatgaaattggggatatggttttgaaaaatgttggatatgtacttcgtgaatatgagataaaatataatggtttaattgggcgctatggtggagatgaatttgttatgttgttatctggttttacatcgagagaagaggtggaggatttattggatgagattgctattcgcttacacactgaagtactaacagatgatggtatcattcaaactcattgtagtgttggagctgtagtatgtagtgtaaaagacaataaagatatagataatttattaaaacaggctgatgaagctttatactatgttaaacgtaatggaaaaggtaattatcatttagtt

SEQ ID NO: 17252 - DNA, 1923 bp, Clostridium difficile
atgaaaataaaatttgttattatgccattggtgatatttttaatggtattatttgtggggtgtcaaagtacaaaagatacagaagttaaagcaaaagatacagaaattaaaatattagggacaggtgatttacattcaattttgacagactctatggtttcatatgtaaatgaggaaagggaaaagaataaaaatctgcttatggtagatgcgggagatttctatggtacacaaagtagagaaatgtgggaatggtcttctggaaaaaagttaattaatattaaaagaaatggtagagcagagtatgatgacataattaagagtagtaaagatgaagtacctatagttaaagatatggcaaagttgaaatatgatgctgtagttttgggagataatgaatttgtttcaaatgataagcaaagtcttgataaactggtttctgattttaaaaataataatatgccattggtatcagcaaatatatatgaacaatctggagaaaattatgtacaaccatatgtaatgaaaaatattaagacagatgagggcaatgtaaaagttggaatactaggtcttactataaaagaagtaggggaaacccttggtcttgaggattttgaaaaggataaaaaagctagagagcttggagaacaagctgattacaaagggaaattatatgcaaatgatttagtagaagatgcaaagaaatggataaaagttatggaaaaagaaagtccagacataatagttgcagttgtacactcaggggaagaacctaaaacagatagaaatccaggaaatagaataaaagagttagcaactacagtggatggaatagatgcaattgtagctggtcatactcatgaaaaaatagatgaacacaaatataaaaataaatctggagatgaagtaattgttacacaaccaggttggcatggagatagagtatcagagattaatttcaaattaaataaagagaatggaaagtgggacataaaggaaaagtctagtaaattaaaaataattgataaagaagtaagcatagttgctactgcagatttacattcacatttctctgataaattaacagttgaccttgttaatgaacgtagtaacccaattgaacctgttgtagtagatgcaggcgacttcttagaccctcaaacagatgaaatgactcaatggtataaagagtggaaaagtataagagataataatagtgataaaacgattagtagatgcccaatggtcatggatatgaatcagggaatgtatgatgcagtagtacttggaaatcatgaatttgtatctgaaaaagatgaattttggtcagatgaacgccttttagatgctgttatagaggattttgaacaggtggcaatttctgtgttatcggcaaatatatataggcaatctggtaaaaattatgttaaaccatatattataaaagatgtggagacgagtgaaggtaatgtaaaagtaggaatattgggacttactataaaagaagtaggtaaaggtcttaaaaatgtaaacttacaagagcaatttcaatataaggataaattgtatgcaaatgatttagtggaagatgcaaagaaatgggtaaaagttatgaaaaagaaaaaaccagatataatagttgcagttgtacattcaggagaagaaccaaaaaatccaaaacatccaggaaatagaataaaagaactagcaactacagtagatggaatagatgcaattgttgctagtcatactcatgaaaaaatagatgagcatgaatataaaaataagtctggagaaaaagttatagtgacacaaccaggtgagcatggtaaatattattctaaaattacctttaaagtaaataaagaaaagggttcgtggattattaatgataaattcagtaaaacaattgaggttgaa

SEQ ID NO: 17253 - DNA, 477 bp, Clostridium difficile
atgaatataagtatagtagtagtaggtaaaattaaagaaaaatatttaaaattaggtattgatgagttcaagaaaaggctttctaagtattgtaagttagaaattatagagttggatgatgaaaaagctccagagaatttgagtgttaaggaaatggaaattataaaagacaaagaaggaaagaaaattttagggaagataaagcataatagttatgttatagccttggctattgatggtaagggtttatcctctgaagaacttgctaagactatgagtgatttagcagttagaggtaatagtagtctctgttttataataggaggttctctagggctttctgatgaggttttaggaagggctgattataggttatccttttctaggatgacttttcctcatcagatgatgagattgatattgttagaacagatttatagggcttataggataaataatggagaaccgtatcataaa

SEQ ID NO: 17254 - DNA, 357 bp, Clostridium difficile
atgactaagaaaggaggaataacaatggaagcaaaagctactgctaaatacgtacgtgtatcaccaagaaaagcaggccaaatatgtgaccttgttagaggaaagaatgttgatgaagcattagcaatattaaagtttactccaagaggagcagcttcaataatagctaaggttgtaaaatcagctaaagctaacgcagaaaacaatcacgaaatggatactgaaaaattatatatagcatcaatagttgctaatcaaggaccaacaatgaagagattcatgcctagagctatgggtcgtgcaactacaataagaaaaagaacttctcatatagaggttgttgttaaagaaaaaaaa

SEQ ID NO: 17255 - DNA, 714 bp, Clostridium difficile
atgagaattaataagtatatagcttcttgtggaatagcatcaagaagaaaagcagaagaaataattcttggaggaagaataaaggtaaatggaagtgtagtaaaagagttatcttttaatattgatgaagaaaaagacatagtagaatttgataataaaaaagtaaaaccaagtgaaaattatatatatatagtattaaataaaccagagggatatataactacagtaaaagaccaattcaatagacccagtgtaatagacatacttaaagatgtaagggaaagagtatatccaatagggagattagattatgaaactagtggtttattaatacttactaatgatggcgatttaacatataagcttacccatccaaaacatgaaattgataaaacgtatgtggcaagtgtgaagggaattataagtgatgatgagataagacaattcgaaacaggactaaaaatagaagattacacaacggcacctgccaaaataagggtaactaaagaaaataaagaaaaaaattattcagtgtgtgaaataactatacatgagggtagaaatagacaagtaagaaaaatgtgcaaagctataaatcatccagttttaaatttaagaaggatttctgtggggaaaatagtattaaaagacaccaaagttggagaatatagatacctaacagaagatgaaataaaatatttaaaatcaataaaa

SEQ ID NO: 17256 - DNA, 1233 bp, Clostridium difficile
ttgactttattcttttatgatattattctagttttcatagcaaaagtttatttttttggaggagtgcctttaatgaacagagaaaaattagttgcttttatacgatatttatctttatttatattagttgtaagctatttgaaaaatgttgaaaatacattgtatccggtcataactatgataatattatttctaattataataaataatcaagttagatttttttctttatcaaatgagaataaatttatacttatttcttactttttagaacttatattaatttttatactttgtaattatacaaaaacttttaattcgatttactttgttcctttaatattagatatatcatttttaataaaggaaaaatataagtacatattgttctcttttgttataatatcttctcttattattagtttagataaaaatatatatttggcactggagtcaagctctatattgctaattataactgtactttctatatatatagaaaatgagaatttatcaaaattatacagtcaaaatctttatgataagcttagaatttctaaagatgaattaaaaaaagttaatgctgatttggaaacttatgcaagttctatagaagaattagcaattttaaaagaaagaaatcgaatatcaagagaaatacatgatagtgtaggacattctctttctacaacaataatacaattaaatgctatagaaaaactcttaaaagacaaacctctaatttatgacttagtacatgaacttagagaatttgtaactgaaagttttcaagatgtaagaagggctatatctgagttaaaacctgttgaatatgaaaattaccaaagtttatttaaaatcaaagaattagttaaaagctttattaagcttacaaatattaatgttaaattaactatttcaaaaaatacttggaacttatccagaaatcaatctatagctttatatagactcatacaggaatccctttccaactcatctaggcatggaaaggcaactgaaatcagaatttttattacattcaatacttcaaatcttataattactattagtgataatggtataggatgtggcaatataaaaaaaggaaatggacttaatagtatcaatgagagaatatatgaattaaatggtaaagttgaatttgataattctaataatggtttcacaattagagcttcttttcctaaattttcagggggtgatttttttgaa

SEQ ID NO: 17257 - DNA, 741 bp, Clostridium difficile
atgaagaataatgtaggttttgatagtagtttaagtaaatttggaattggtttgtttgaaactattagagttaaaaatggaatagcagtagatttagatatccatatagaaagaatgctaagctcaataaattgtttggatttagatataaactataaaaaagatttcttgataaatgaaattgttacatatataaaaaaagaaaatgtcattaataaagcacttagaattactgtttttgatgaaggttataatatatctattagggatattccatataatcaagagacgtatgagaaggggtttaaattagctatatctccaatagttagggggaatagtttaattcatagacataagactactaattattttgaaaacatatataccaaaaatatcgcaaataagactggttataatgatggtatatttttaaattcagaaggtgtaatattagaatgttctatgagcaatattttctttataaaaggagaaagagtgtacactcctagtgatagattaccgatattaaatggaataataaaaaaaaggattatagagatttgtgacgaattacatatagagttgatagaaaatgaaattaatatatcagaaattagtagttttgattttgtttttgtcacaaatagtcttatgggcgctataaaggttacagaaattgacaaaataaaatttaataaagaaaatgttgtttttgataaaatagtgaagttattagaa

SEQ ID NO: 17258 - DNA, 1227 bp, Clostridium difficile
atgtcttttctaaaaaaatttaaaaataaaagatttagaaataacagttttaaaagtaacaactttagaaatagcagttttggaagtagtggcttcaagtctaaaaataaaggttttaaaaacaatccctttaaaaataagagattcaaaatatatgcaggaatagcagtaatcatacttttaattctaggagttcttgcttatgttgattcgaaaaacactgaattacaagctaatgaaaattttatcgaaacatatactattcctgaaaatgaaaaaatctttataaatgggatggttgttcctaagcaaactaaggacttcaatatatctggagattatgagttaagtgatgttaatgttacaaatggtcaaaaagtaaatcaaggagaccttctttttactgctaaaaatccaactataatagcagaaatagatagtttaaaatcacaacttagtcaatacaaaaaacaaaaaatatcactttctgatattgctgaaaataaagatgctattgcttctataaatgcacagataactgctttaaactctcagatagcttctctggataaaaaagcttatgacagagttactgctccttttgatggcacagtatacttgaatgaccaaactggaaatccagaccaaccagtttcatttatgactattcaaggtctagagttttatatgaaaggacaagcaagtgaacaagatttacctaaaatgaagattgaccaaatggtcaatatactagttttttcaactgaccaaaagcttactggtagaataagttttatatctgataaaccatctactccaaatactgaaatgggagctcagcagaatacactatcttattatgatataaacatagcatttgataatcaagaaggattagtaaatggattccatcttcaagcatcacttgaagtagctaattcaagctttaaaataccagcatcttgtgtacttaaagacaacaaacactcatatgtatttaaggatttagatggtatattgaaaaagcaaattgtagatgtagcaagtcaaaatgatgattttgctgtagttagaggcggtcttgaacaaggcgatataataataaaacaccctactaaagaaatgaaagaaggagacccagttcaaggcgatggcgtaactgctggttctaataatggagatactactccaaacaaaaaagtagaagaagttactatggatgtgaat

SEQ ID NO: 17259 - DNA, 1371 bp, Clostridium difficile
atggagtgcttaacaataaaagagttagtacttgcaactaatgggaagttaatatatggagattataatgactgtgtaagtgatatagttatagatagcagggaggcaaatgcccaaaatgcatttgtagccatagttggagaaaatttagatgggcatacatttatgaagtctgcatatgatagtggatgtaaaacttttataaaaaatgaaagtaatggaataaaattagaaagttcggatataaatttaatagatgtaaaagatacatctttggctctaggagatatttcaaaatactataaagaaaaatttgatattccatttataggtgttacaggtagtgtgggaaaaactactactagagatatgatttactctgccatatctgcaaagttaaatatactaaaaaatgaaaaaaacttaaataatcattttggagttccattgactttatttaatctaaataaagaacatgagtgtgctgtaatagagatgggtatgtctggattcaatgaaataaaatatttagtggatatagtaaatcctaaaattgcagtcatatcgaatataggattatcacatgtagaaaaactaggttcacaagagggtattttgaaagcaaagatggagattacttcaaactttgatgaaacaaatactttaattgtaaatggagatgataagtttttatctacattaaaagaaaaagaacatgtatataagttaaaaacatttggctttaataaaaacaatgatgtttattgtgaaagttatactatggaagaggatagtttaacatttatatgtgtaataaatgggaaaaaagaggaaatatttataccaacaataggagaacataatatatataatgcaatgtctgctatattagttggtttgtgtctaaatatttctttagattatataaaaaaaggtttaaaaaattttaaagggacaaaaatgagactagacataataaaaaatgaaaaattaacaataattaatgattcatataatgctagtccagattctatggatgctgctttaaagatacttggaagatataaaggtagaagggtagcgatacttggagatatactagaaatgggtgaaatttcagagtatggtcatagattagttggaaaatcatctatgaataatactgatattataataactataggtgaaaattcagtgtttattggagaagaagcaaaacaattaggattcaattcagccaatatatatcactttgagaatagagaagatgtgtttaacaagttaaatgaattagtaaaaacaggagacactattttagtaaaaggctcaagaggcatgagattagaaaaaatagtcgaatatctaaataaa

SEQ ID NO: 17260 - DNA, 3204 bp, Clostridium difficile
atgcctaaattagatagtataaagaaaactttagtattagggtcagggccaataataataggtcaagctgcagagtttgactattcaggaacacaggcctgccaagcattaaaagaagagggaattgaagttgtattagtaaatagtaacccagctactataatgactgataaagaaattgcagataaaatatatatagaaccattaacaatagaatttatagaaaaaataatagaaaaagaaagaccagacagtttacttgcaggtatgggtggtcagacaggattaaacttagctgtagaattacatgatgctggtatattagataaatataatgtaaaagttataggaacatctatagaatctataaaaaagggcgaagatagagatttatttagagaagtaatgaaagaaataaatcaaccagtaatagttagtgatatagttacaaatttagaagcaggtcttgagtttgccaataagataggatatccagtagttgtaagaccagcatatacgctaggtggaactggtggaggtatagctgatactgaggaagaattaagagaaatactttcacatggactacagctaagtcctgttggacaagttcttcttgaaaagagtataaaaggttggaaagaaatagaatatgaagtaatgagagatggaaatggaaactgtataactgtatgtaatatggaaaatgtagacccagttggagttcatacaggagacagtatagttgttgctccaagtcaaactctaagtgatgaagagtatcaactacttagaaaggcatcaatagacataataaatgcaatagaggttcaaggtggatgtaacgttcaaatagctttaaacccacatagtttagaatatgcaataatagaaataaacccaagagttagtaggtcatcagccttagcatcaaaagctacaggatacccaatagcaaaagtagcagctaagatagctttaggttatactttggatgagatagaaaatgcagtaactaaaaaaacttatgcttgttttgagccaacattagattatgtggtagtaaaaataccaaagtggccatttgataaatttagacatgccaatagaaaattaggaactaagatgatggcaactggtgaaatcatgagtataggaagtaactttgaggctgctattcttaaaggtataagatcacttgaaacaggaaaatattcattggttcatgctccatcagaaggtagaacattagaagaattaaaggctagagtagtagtacctgatgatgagagactatttgacttagctgaaatgataagaagaggttataaagtagaaatgatatcagaaataactggtgttgataagtggtttataaataaatttaaatggatagtagaacaagaagaaaagttaaaagttctaaaaatagaagacttagataaagaatatttacatgaattaaagaaaaagggattttctgataaaggtatatctgacttaatgaagataagcccagaaaaattatatgaattgagaagtttatataatatacaaccagtttataaaatggttgatacatgtggaggagaatttgaagctctatcaccttattactattcaacttatgaacaatatgatgaggtagtagttagtgataagagaaaagttgtagtattgggttctggtccaataagaataggtcaaggaatagaatttgactattgttcagttcactgtgtaaaatctttaagaaaaatgggaatagaaactataattgtaaacaataaccctgaaactgtaagtacggattttgatacatctgataagttgtattttgaaccattaacagaagaagaagttttaaatataatagaaaaagaaaaaccagaaggtgtaatactacagtttggtggacaaacagctataaaattggctaagtttttacatgaaaaaaatatacctatactgggaacagactttagagatatagatgcagcagaagatagagaaaaatttgatgatttactagagagactagatataaatagaccaaaaggaaaaggtgtatggacaactaatgaaggtgttgaaattgctaaggagttaggttatccagtattagttagaccatcttatgtacttggtggtcaaggtatggaaataacttataacgaagaaaaactaattcagtatttggatgatgcatttgatagagaccataaaaatccagtacttatagataaatatctaactggtagagaaatagaagtagatgctatatgtgataaagaagatatattgatacctggtataatggagcatttagaaagagctggagttcactctggagatagtacaacaatgtatccaagtcaaaatatatctgatgaaataaaagaaaaaatagtagaatacactaaaaaaatagctttagaccttaatgtgcttggtatggttaatatacaatttatagaatttcaaaatgaattatatataattgaggttaaccctagagctagtagaacagttccatatataagtaaagtaagtggagtaccaatagttgacttggctactaagtgtatgttaggagctaaattaaaggatttaggatatggtacaggagtttacaaagagccaaaattagtatcagtaaaagtaccagtattctcaatgtctaaattatctaaagttgaagtaagtctaggacctgaaatgaagtctacaggagaagtcctaggtgtaggagaaaatttagaagaagccttatataaagggttcttggcagcaggtagacatatgtctgatgaaagaggagtagtacttgctactgtaaataatcatgataaagatgagtttatagagatagcaaaagatatgaaagaattaggatatacttttgttgctacagaaggaacagcgaagagtttaagagaaaatggaatagaggctgatatagtaaatagaattgaagaacctagaccaaacatattagatgctataagaaataaacaagttgatatagtaataaatacaccaactaaaggaaatgactctacaagagatggatttaagatgagaagaacagccattgaattttctactgaaataatgacatctttggatacactaaaagctttagtagaagttaagaagaaacatttaaacaaagataaattaaaagtttataatatagctgag

SEQ ID NO: 17261 - DNA, 3546 bp, Clostridium difficile
gtgaagaaggtgaatcagcagatgagaccaattagattagaacttacagggcttaatagctatattgataaacaagttatagactttgaaaaattaattgaaagaggtttgtttgggatatttggaactactggaagtggaaaatctacaatcttagatgcaataactattgctatgtatggaaatatatccagaaatacaaaagaatatataaacagtgtgtgcgataaggcaattatatcatacgagtttgagataggaagcaaaaacactagaagaagatacattgtagatagaaccattgctagaagcaaaacaggaacaaagacctctaatgctagattaatagaagtattgaatgacaatacccaaaatgttttagctgataaagttgtggaagtaaatgaaaaagtagcgcaggtcgtaggattaacggcaaatgattttactaggtcagtagttttaccacaagacaaatttaatgagtttctaagattatcacgtgcagatagaagagacatgttagagagaatttttaatcttgagaaatatggaagaagtcttggcgaaaaagtgaaaaagagaaaaaatatacagttacaaaatttaaaagatttgaaatcaaaattaagtcaatatgatggaattacagaggaagtatataacaatataaaccaagaattaatagagttaaaaaatttggaaaaagataagaataatgctttagacctagctcaaaaatcttatgaagaaagtaaaacagtatatgaagaacaattaaagttagaaaaaaatgaacttagaaaaaatgagcttgatttaaaaaatagtgagataaaagaaaagattgctcttgtagaaaatgatagtaacgctaaaaaggtagacccatacataagttcagttcaaaatctagaaaaaaagatagatgaagatagcttcgcagtaagtaatttagaaaagaaattagcaatattaaatcaggagcttgaagttacaaaaaatagatatgaaaaaataaacaaaattaagaatgaagaagtccctaaattgagtgaagaaaaaataagattgcaacaagcaataaaattagaagaagagttagttttattagatagagagttaaaagagctaaaagaaagtggaattaatttaaataagactaaagttgaattagaaaaagtaaagcaggtgtcagagtccagaaaagatgcagttactaaatctataaaagaagttgaaggaaagattgataaagtaaatataagtgcagaattaaaacaaaaaatatttctagcatatgaatacgagaaagattacaacaacgtattggaagaaaaaaatcaaaagctaaataaactagaagaaatactcaaagagacagaaaatataaatttaaaagttagatatattgataaagataagaatgatgtaaatcgtaatttagaaaatttatcacttcacttggatgttcttcttaaaaaatgtcctggtaagagtgctgatttacttttaaaatctgaatatgttactgaattaagaaataaagcaaataatactaaagaaaatgaaattaagaaaagcagtatacaagatgaattaaagataatacttgaaagtaagtttaatactgaaagggaagtaaatttactaaatgaaaaacttgaaaataatagaaagaacagagatgacttagaaaaagaattagaagaactaaagtatttaaatttagcctctgaacttagacgtgaattaaaagaaaatatgccttgtccagtttgtgggtcaaaacatcatgaaaatcatgatataactaagtatgatgaaaatatatcttttgtcaaagaaaaactggagaaattagaaaaagaaaaaataagtataagaaacaatatagaggaattaaatgctaaagtaagtgggtatttatctatagaaaaaatgaagactaaagaacttgaagatgtaaaaggaaaactaggggagattccatctagtcaattattaaaaaaacttgatgaagaacaaagaaaacttgcattgttaaaatctaatattcaggagtgggagaaagaaaaagagagtactgaaaataaagtaacattagctaaagaagaaaaaaataaaattgaaaaagaagaattaaaaataagagagagtctgaataattataagaaattaacaagagatttaaacatagaaatagaaggtttagaaaataaatgtaaaaaaattaaacaggaatacctaggattaaagacgattactaaagtctctaatctattgtcaaaagtaaaagaaataagggagaatgaaaaagaattagaattactaagtactgggcattcaaatttattaaaaaatagagactcactagatattaaaataagagaaaatgagagtaaactacatgaaatagagatagaattaataaaggctagagaattatatgtagaaaagaaattgagtagagataataagtataaagaagttattagcataacgaaaggtgatttagctaaaaatcttttacataatgttgaagaaaatatatgtaagatattagaacaagaagaatcaagtaagaaaaaattggaagagcaaagattagaatatgaaaaaaacattgctgaaaagcacaatatagatggtagacttaaaactgctaaggaacaatataaagaccaaaaatcaacactaaataaactattggcagaaaataaatttgaaagtatatatgcagtaaaaagagctttattagatactgatgcagtaaaaaaattgattgaagaaatactagagcatgaagaagaacaaaagttattatcatttaaaataaaatcatcaaaagaaaaattaaatggaagaagcataaagaaggagtactttgaacagttaaaagatgaaatttataatttgaaagtagaaataggaaatatatccaaagatattggagctaatcaaaatcagttaataacattaaaagactctttagataagataaatgattttaataaacaacttaaggtagttgaacacaatgtggacttattggaagaattagataaatgtgtacaaggaaataaatttgtagaatatgtttctacaaaccaattaaaatatatagcgttggaagcatcaaaacgattggatggaataacaaaaggaagatatgcacttgaaattgactcaacactaaactttgtaatgagagataactttaatggaggagaaagaagaagcattgatactctatctggtggagagacattcttgacatctctatcattagcacttgctctttcatctcaaatacaattaaagggaagtgcaccattagaatttttctttttagatgaaggttttggttcattagatagtgaacttttagaaattgttatagaatccttggaaagattgcatagtaataatctaagtgtgggtataataagtcatgtcgaggaacttaaaaatagagttcctgttaagctattagtttcatctagtgaggctggaataggttcaaaagtaaaaattgaatatagt

SEQ ID NO: 17262 - DNA, 1116 bp, Clostridium difficile
gtgatagcagtggaaaaagcttataagtttagaatgtatccaaataaaaaacaacaagagttaattaacaaaacttttggatgttgtagatttgtatataataagtatcttgctaaaagaatagatgtttataaaaacgataaagaaacttttacttataaacagtgtagttctgatttgaccaatttaaaaaaagaattaaaatggcttaaagaacctgacaaattttcactacaaaacgccttaaaagatttagataatgcatataaaaaattctttaaagaaaaagcaggacttcctaaatttaaatcaaagaaaattaatagattttcatataaaactaactttacaaatggaaacattatgtattgtggtcaacatataaaactacctaaacttggtatggttaagataagggataaacaagtacctcaaggtagaatacttaatgccactatatctaaagaaccaagtggtagatattatgtatcattatgctgtactgatgtagatattgaagtatttgaaaatactaataatcagataggtttagatttaggaattaaagaattttgtatctcaagttgtggagagtttatagaaaatcctaagtatcttaagaagtcattaaacaagcttgctaaattacaaagagaattatcgagaaaaacaatcggtagtttaaatagaaataaagcaagattaaaagttgcaggacttcaagaacatatagctaatcaaagaaaggattttttacaaaaactatctactaaattaataaaagagaatgatattatttgcatagaagatttacaagtaaagaatatgattagaaatcgtaaactatctcgcttaatttctgatgtgtcatggtcagagtttattcgtcaattagaatacaaggctaattggcatggtagacaaattgtaaaggtgggtaaattctttgcaagttcacaaatatgcaataaatgtgggtataaaaacgaggaagttaaggatttaaatataagagaatggatttgtcctagttgtaatgaaactcacgatagagatataaatgcaagtataaatatattaaaagaaggattaagactaataacaattcaaaataaa

SEQ ID NO: 17263 - DNA, 573 bp, Clostridium difficile
atgaaattattccttaaaggtgatagatgttatacagacaaatgtgctatagtaaaaagaaactatgctccaggtcaacatggccaaggaagaaagaaagtttctaactatggattacaattaagagaaaaacaaaaagttaaaagaatatatggagttttagagactcaatttagaaatttatatgaacgtgctgaaaatatgcctggtaaagcaggtgagaacttattaagtttattagagagaagattagataatgtagtttacagaatgggactagcatcttctagaaaagaagctagacaattagtgactcatggtcatttcactttaaatggaaataaagtagacataccttcattaatagttaaggttggagatgttatagaagttaaagagaaatcaagatcttctgcaaaattcaaaaatttagtagaagttaactcaagaatagctcctaagtggttagaagctaatgtagaaggaatgacagcaaaagtagttggtgttccaacaagagaagatatagatcttgagatagcagagcacttaatcatagaactttactctaaa

SEQ ID NO: 17264 - DNA, 147 bp, Clostridium difficile
atgaccactgtagccgagggaatagagaccagttttcaaaaagatttcttgcaagaaataaactgtgatatgttacaaggatacgtgttctctagacctttaccaataaaagactttgaaaaacttatgtttcaaaactcctccaat

SEQ ID NO: 17265 - DNA, 2031 bp, Clostridium difficile
gtgcaaaaagtgagcgtaaaagatgaaattaataaacttatagagacaataaactaccataatgaaaggtattataatcaagatagcccagaaatatcagattatgaatacgataagttaatgaaggagttaatttctttagaagaagaacatccagaactaaagagaattgattctccaacaaatagggtaggaggtaagccattagataagttcaatcaaattgtacataaaactcctatgttgagtttatcaaatgctttttcagagcaagatttgagagattttgataagagagttcaagaatatgtgggagaaaatgttgaatatgttgttgaatttaaaatagatggtctttctgtaggtctaacttataacaatggagagtttgaaaaaggagcaactagaggagatggagttgtaggagaagatatttctcaaaacttaatgacagtaaaaagcatacctcttaagataaatgataaaaaagaactaatagttagaggagaagtatatatatcaaaagataattttagaaaagtaaatgaacaacaagaagaacaagaacagccattatttgctaatccaaggaatcttgcagctggttcattgagacaattagacccaaaactaacagcaaagagaccattagatatatttgtatttaatatggaaaatatagaagaatacgatttagaaagtcacagtgaatcactagagtacttagaaaaactaggattttcagtaagtcagagttataaagtttgtaaaagtatagatgaagttattgagcatattgaatactggacagataacaggggtaatttagactacgaaatagatggtatggtaataaaagtaaacaatataaaacaaagagacgaaatgggatatacagccaaaagtcctagatgggcaattgcatataaattcccagcagaaaagaagaaaactaaaatagtagatataatagtagaagttgggagaactggtacaataacaccttcagcaattcttgaaccagtcagacttgcaggtactactgtaagtagagctacacttcacaatgaagattatataagagaaaaagatataaaaataaatgatacagtattagttcaaaaagcaggggacataatacctcaagttttagaagttataaaagaagaacgtactggagatgaaatagattttaaaatgccagaaaagtgtccagtttgttcagagccaacaataagattagaaggagaggctgctgtaaaatgtatcaatatgtcttgcccagcccaaataagaaggggaattatacactttgtgtcaagggatgcaatgaatatagatggattgggagaatctataattacactgctattaaatgaaaaaattattcaagatgtatctgatttatattatataaaaaaggaagatgtagtcgacctagagagaatgggcgaaaaatctgctgacaatttaataaattcaattgaaaaatcaaaagaaaatgatttatggagacttataaatggattaggtattaaatttataggagttaaagcagctaagatacttgcatataactttaaggatttagatgaagtaatttctgcaactagtgagcaactagaagaattagaggaatttggaagtataatggcaaacagcgttgtcgagttttttaaggaagacaaaaatatgaacgttataaacaagttaaaaaatgtaggagtaaatacaaaatcattggataatacaggtgaaaaagtagaaaaaatatttgaagggatgaaaatcgtattgactggtacacttcctacattaaaaagaaatgatgcaaaagaaatgatagaaaaaagaggtggaaaagctacatctagtgttagtaaatcgacaacatttgttttggcaggtgaagaagctggttctaaacttactaaagcaaatgatttaggaattaaagttatagatgaagagagatttttagaattattaaagttatcatcgaaagatgaagtaaaagctgtattagagagt

SEQ ID NO: 17266 - DNA, 315 bp, Clostridium difficile
atgataaaagttaaatattattataatgatgatttcttgttgcaaggtttttgtttaaagggacatgctgattttgctgaaataggctatgatatagtatgtgctgcagttacatctaatgctattgcagttataaattctttagacaaattacaaaagattgaatttgaaaaagtagtaggagaagaaggtcatatagagtgtatagtcaaagatacacatgtaaaagacgcacaattattactaaatcactttcaattagcggttaaagaaattaaacgggaatacccaaaaaatataaaaattttaaaaaag

SEQ ID NO: 17267 - DNA, 570 bp, Clostridium difficile
atgaacttagaaaatattaaccaaagactaaatcaaatgctaccagtggggaggcttagccattcaaaaaatgttgcaaaatgtgctgaaaaattatgtgagatttatggatgtgacaaagaaaaagcttacttagcaggaatgattcatgattgtgcaaagtatttaagtgacaaggaaatagaggattatgtaaataagtatgaaatatatttagacccaatagaggatggaaatcgttccttgtctcatagtgtaattggggcgtacatatgcgagtatgaatttgaagtagaagatgaagatattataaatgcaatcaaatatcatacaacagggagagaggacatgtctcttttagaaaaaataatttacatagctgatttaattgaagaaggaagaaaattcccagttgtagatacattaagagaattagcatatggagggaaacttgatgaagcacttttaacttcttttaataatactttaatgtttgtcatcaataaaaaagaagagatacatccaagaacagttatggcaagaaactatctaattaaagaaaagttatta

SEQ ID NO: 17268 - DNA, 2304 bp, Clostridium difficile
ttggaggtgagtgtgatggtaaataaagaggtaagaaaaatagatagtgaagccattgttactggaaaaccaatatatacagaagatttaatttttcataaagatgttttaacaattaagcttcttagaagtccacatgcttttgcgaagataaaaaacatagatataaaaaatgcattaaaggtaaaaggtgtagtaaacatattcacttacaaagatgttccaaattatagatattcaatggttggagagtcatatccagaagcatcacctcatgaccaattaatacttgaagacgtagttagatatgtaggagatgaagttgctataatagccgctgaagatgaaagggctgctattaaagctatgaaacttataaaggttgaatatgaagtaatgactcctatattggatgcaagagaatcggaaggaaataaaattttaatccatgaagaagatgatttgttttgtccatttgattttggattggatgctacaaaaaatattgtatcgagagaaaaaatgggtaaaggggatgtagaaaaagagtttaaagaaagtgatgtaatagtagaacattcttatatgactcaatcacaagcccattgtatgatggaaactcatagagcttatacgtatatagatacgaatggcagattagtagtaacttctgcaaaccaatcagcttatcatatgagaagacaggtttctaaagcactgggaatacctctttcaaaagtgagagtaataaaaccaagaataggtggaggttttggtggaaaaaacatagctgtaacagagatatatgcatcatttgtaacttggatgacaaaaagaccagcaaaactaatttatactagagaagaaacttttgcaatgactaatactagacatcagatgttttttgatataaaaattgggtcagataaagaaggaaacataaaagctatagatatgaaagcattgaataatacaggcgcttatggtgataatggaccttcagtttgctctgaatcaggtcataatgtacttccaacatataataatgtacctgcaataaaatttgatgggagaactgtatatactaatttagttccaggaggagcattaagaggatatggagcaacacaaggtacatttgcacttgattgtgcaattgatgaattagcgcataaacttaatatggacccaacagaaataaagttaaagaatattataaaaaaacaaactgaaggcggaataatgaattttccaataagaagttgtgcacttgatgaatgtataattagaggtaaaaaacttattggatgggatgaaaagtaccctgttagggatattggcaacaataaggtgagggctgttggaatgtctgtgggaactcatggttctggtatagccaacatagacatggcaatagtaaatatgaggatggatgaagatggaacttataagttgttttctgggtcttcagacttaggaactggttctgacacaatacttgcacaaatagctgcaaaagcattgaatacatctattgatagaatttccgtttatacaggagatacagatatgtgtccatatgatactggtgcatacgcttcttgtactacttatgtaactggaaatgctacaataaaatctgctgaaagtttaaaacaaaagatattaaaagtagcacagaagaaactcgatttaccaatagatgatttaatactatatgaagacagagtttgttatagtgaagatgtagagcagtttgttttgttaagtgaattaggaaaagaatctgttggtggtggaaatcaagaagttttatattcatctgaatcttatggtatacaagagagtgctaaaccattcttagcaggatttgctgaaatagagttagataaaacaacaggggagtttaaagtaataaattatgcttgttctacagattgtggtacagttatgaatcctgcacttgctagaatacaagttgaaggtggtgtaactcaaggtatagggcttgcaatgtatgaagaccctagacatggttctgatggaaagcttcaaacttctaatctattacaatacaaagttccaacaaaaaaagatataggaaacataattgttgattttgtagataattatgagccaacaggtccatatggagctaaatctttaggagaaatagttattcatacacctgcaccagcaatagcaaatgcaatatacaatgccacaggagttcgtataagagaacttcctataacttctgagaaagtttatatggccatgaaaaaattaaatcagggaggtaaa

SEQ ID NO: 17269 - DNA, 789 bp, Clostridium difficile
atggaaaatatagacccagtcggagttcatacaggagacagtatagttgttgctccaactcaaactttaagtaacaaagaatgtgcaatgcttaaaaaagcatctttagatatattaaatgcagtagaagttcaaggtggttgtaacgttcaatttgcacttaatccacatagttttgaatatgcagttatagagataaatccaagagttagtaggtcatcagctttagcatcaaaagctacaggatacccaatagctaaagtttcgtcaaaaatagctttaggttatactttagatgagatagaaaatgcagtaactaaaaaaacttatgcttgttttgaaccaactatagattatgtggtggcaaaaataccaaaatggccttttgataaatttaaaaaagcaaatagaaaattaggaactaagatgatggcaactggtgaaattatgagtataggaagtaactttgaggctgctattcttaaagggataagatctcttgaaacaggaaaatattcattagttcacacaccatctgaggagagaagccttgaggaattaaagaaaagagttgtagtacctgatgatgagagactatttgacttagctgaaatgataagaagaggctataaagtagaaatgatagaacaaattacaggtatagataaatggtttataaataaatttaaatggatagtagagcaagaagaaaaattaaaagttatgaaaattgaagatttaactaaagactatcttcttgaattaaagaaaaagggaacggagctggta

SEQ ID NO: 17270 - DNA, 1200 bp, Clostridium difficile
atgaccttaatattgagttattttaataaggataaactatctgtaaaaactttaaaaggcaatgtaaaagatatagggagagtaagtgtagtatatacacctaatataagcaaattttcttatgaggaggtaattataagtaaaaatggagtaagaaataatacaaacccaaaatcaagaattagaaatgattatttaaatattgacaaaaaatacagtgactttgttaatgataaaggaaaagaatttatatataaagatgatttgaatataggagaagcgtatacctctgttaagtctgatttagtacaaggaatgaatgctttaaatgattgtataaaggtttcaaataaaaatttaaaaagtggggtagaagaaaattttgatattaatttaaataagtctgattttaaagaaaatagttggaaaaccttatttaacaaaatatataaaggtaatttatatatggtaattagtgaaactaatatttcaggttctaaagtcaataatatttgtatattaaagatagatataaaaaataagtcttataaattattaaatagatttaatttaggattacagaatggagaacaacaaaatatcaatgaaattaaattttctattggaagtaaattatacttagaaatagtaaataataaaagtaaaaatggatatattgaaggacatgatagttactctaactttattatatatgatatagaagataacacttttaatataagtaataaatttatggataatctaaacaaagaaaagaatgcaaatccaaaggagattggcttattaagtaaaactaagctagattatatggtaaaaaacaataaattgaatcttatagttacggatatgagtaattccataactaatcttgtttatgatattaattctaatgagattaaattagaagattatgagatacttgatttaaaagtagattataatgaagcatcatctggagttaggaaagttaagctactggatgataagatatattctatttcaggtattaagaacagtatatcaggagaattaaaaggatttaaagggattattgatgtagtcggaactaagccagtaaaatttcaagtatttgatatgaaacttaaaaagaatatttatgaagctgagctaataaatggagatataagtttacaagaaaagttattttttgttgcaaat

SEQ ID NO: 17271 - DNA, 1335 bp, Clostridium difficile
gtgattaagatggaagatatgacgagaattcctcctcatagtgtagaatcagaacaatcaatattgggttctatacttctagataaagatgctataataacggttacagaaactataaagcctgatgatttctataaagaggctcacaaaataatatatgaatgtatgataactttaagtaataaaggtgagcctatagacttgataacattaacagaagaactaagaaaacaagggcatcttaatgatattggaggaatcagttatattacaagtctttctactatagtaccgacgacttcaaatgtaaaatactatgctgatatagtaaaagaaaagtctgtacttagaaagcttataaaagcttctaatgaaataataaatctaggatatagtggagcaactaagattgaagatgttttagaacaagctgaaaagagtatatttgatatatcacaggagaaaactagtgatgattttaaatctataaacttagttttgatggatgcctatgatatgatagaaaaattatacactaacaagagtgatgtcactggtataactactggttttaaagatttaaacaaaaaaataaatggtcttcaaaggactgatttaatattaattgcagctagaccagcaatgggtaaaactgccttttctttaaacttggttcaaaatgcagccttaaaaggtgatgcctctgtagctgtatttagtttagagatgtctaaggaacaattagtacaacgtatgttatcttcacaatctagtgtagaattaaaaaaaataaagactggaacacttaatgataatgattggcctagaattatagatgctatggcagtattatcagatgccaaaatacacatagatgatactcctggtataaaaatatcagaactaaggtcaaagtgtagaaagttaaaaatagaaaaaggactagatttagtgcttattgattatcttcaacttatggaaggtgaaggtaataatgaaagcagacaacaagagatatctaagatatcaaggtcactaaaaatattagcaaaagaattaaactgtcctgtagtagcactatctcagttatcacgtgcaccagaacaaagagcagaccatagacctatgttatctgatttaagagagtctggagcaatagaacaggatgcagatatagttatgttcttatacagggacgaatattatcatgctgattctgagagtaaaaatataggagaagtaataatagcaaaaaatagacacggtgaaactggttctgtggaacttgtttggcttggtgaagttcaaagatttggggataagttgagagaccta

SEQ ID NO: 17272 - DNA, 1914 bp, Clostridium difficile
atgggaaagaaaatgattctaggggtaacaggttgtccaactggaatagctcatacttttatggcagaagaagcattaaaaaattcagccagggaattaggctgtgacataaaagttgaaacgaatggagctataggtgtagaaaataagttaacagcaaaagatatcgaaatggcagatgcaataatagttgcttgtgataaaaatgttgatatggacagattcaatggaaagccggtaatagaagtacctgtcaaagaaggtatacataaagctaatgaacttatacaaagatgtattgatggaaaagtagctattagaaaaggaaacttatcaagcagtaaaattgcagaagaaggaagtttatcgtttggtcaaaagttgtataaagatttaatgaatggtgtatctcacatgttacctttagtagtagcaggtggagtacttactgctatatcatttttatgggggatttattcatttgacccaaattcagaacaatataatcaaatagcagctacattaaaatctgttggtggatattctatgaacttgatggttcctgtattggcagcatttatagctcaatctatatcgggaagagctggtatgttggcaggacttgttggaggaatgatatcatttgatacaggttcggggtttttaggtggaatcatatcaggatttttagcaggttacttagttaaactatttgtacatttgttaagaaaattaccacgacaattagaaggtcttaaatcgatttttataattcctattgtcagcgtaggtcttgtgggtatagcaatgttgttacttggtgggccatgttcagcacttaacaatgctatgatgaactttctatcggggttacaaaattcaagtcctataattttgggaatagtaataggatgtatgtcagcatttgatatgggaggtccagtaaataaagcagcatatgtaactggaactatgcttctaggacagggaaattatttatttatggcaggtgtatctgcagcttgtataacaccaccattggtaatagcaatagcatctactttatttaaaaatagatttacagaagaagatagagcagcaggattaatcaattatatactaggtagtactcatataacagagggggcaataccttttgcagcaaaaaatccattaaaagtgttgccagtacttatgattgcatcatcaatatcatcaattttaacttatataatgaaaatagaagtaccagctccacatggagggtttttggttctaggattagtcaataagccacttttatgggtagggtgtatatttgtaggttcattagtaggtgctgtactttatatgatggttacacctaaagtagtaaatgcgaaaaatactatagaaaatacaaatgcaacaaaagatgaacataaaaatgaaagtgcagaatcggaaaacgtatctaataatatctctttatatagcgaagaaacagtaattttagatgttaagggaaaaaataaaacagatgtaattgatgaaatgattggaatacttgataaatctggtgttcttttagataaaaagaagtttaaagaagaaatccttaaaagagaagaaatatcatctacaggttttggtatggggatagcgataccacatgcaaaaacagatgcagtaaaggtaccacgtgtagcagtaggtgtatcaaaagaagggtttgactttgaatcagaagatggaagcttggcacatattatatttatgatagcagctacagataatggtgataatttacacttaaaaacattatctcaactatcttcaaaattaatgaatgaagaatttttaaatgagttattaaatagcaaaacaagtagagaaatagtatcaaaattaaataacgaagaaatcaaatcagta

SEQ ID NO: 17273 - DNA, 504 bp, Clostridium difficile
ttgacaagggggaagcttaacatgagtgaggtagcaaaaaaagaagtaaaagttaaaaaaggaaatgtgatagatgcgtttattggaggagctagaaatggattccaaataagtacaaattcaatggctccaaatgtcatcttcggttttgctataatttctgtgttcaatttaacaggtcttttggatgtaatagggacaatatttacacctgtaatgagtatctttggacttccaggtgttgcagcaacagctataatgacaatatttatatcaatgggaggagcatctggagtaatcgcaggtttatttacagcaggtcaaataagtcaagcacatgttgcaattctattgccaatgttattgctttcaggagcgcagatacaatttatggggagacttttaggaacagctgagttaaaaactaaatattatccacatatgtttgttatagcaactttaaatggttgtattgcaatgcttataatgaattatttcgtagta

SEQ ID NO: 17274 - DNA, 1611 bp, Clostridium difficile
atgaatataacaaagtttgaagatttaccaataagtgagggaataaaaaaagctatagctgaaatggggtttgaagaaccatctcctatacaagcacagtctatacctgcgattttgtcaggtaaagacgttataggacaagctcaaactggtacgggaaaaacagctgcttttagtatccctatactagaaacaatagacccaaataatagaagtttacaagctgtagtgctttgtccaacaagagaactggcaatacaagtatcaacagaaataagaaagttagctaagtattcgcacggaataaagacattacctatatatggtggtcagccaatagatagacaaataaaatctctaaagagtggtgtgcaagttgtaataggtacaccaggacgtacaatagaccatatcaatcgtaaaacattaaagatggataatgtaaaaatgattatattagatgaagcagatgaaatgctagatatgggatttagagaagatatagaaatgattttaagtaagattccagaagaaagacaaacaactttcttttcagctactatgccaagaggaattttggaattaactaagagatatcaaaaagacccagagcatataaaagttgttagaaaagaacttacagtttcaaatacaaagcaatactatatagaaactaggtcatcaaataaattagaagtattatgtagattagtagatgtatatgaccctaaactatctgttgttttctgtaatactaagagaaaagcagatgaattggtaggagatttacaagcaagaggatattttgcagatgcattacatggtgacttaaaacagactcaaagagatatagtaatggataagtttagaaatggtacaatagatatacttgttgctactgatgttgcagctagaggtatagatgttgatgatgttgaatgtgtattcaactatgacttaccacaagatgaagagtattacgttcatagaattggtagaactggtcgtgctggtagagaaggtatgtcatttacttttgtatttggaaaagaaatgagaaagatgaaagatatagaaagatatactaaatctaaactaataaagcataatataccaacaataactgatgttgaagagaaaaaagtaggtactttctttgcacaagttaaacaaactatagaagaaggtcacttaactaaacaattacaatggttagaaggtttctgtaatgatgaagattatgcaatggttgatatagctgctgcacttgtaaaactatctctaggtgaagaaatgaaagaagaaataatagaagaaaaacctagaagagagcgtggagatagaaaaggtggtactggagctaaagatggtatgattagattatttatcaatattggtagaaatcaaagagtacaagcaaaagatatagttggtgctatagctggagaagttggaataccaggtaaagtagtaggtactatagatatatatgataagtatacttttgttgaaatacctaaaaaagatgcaaaaacagtaattgaaaagatgaaagatattaagataaaaggtaataagattaatatagaaaaagcaaataagaagaaaaaa

SEQ ID NO: 17275 - DNA, 2277 bp, Clostridium difficile
atgttaagtgatgcaaaaaataataggtatggtttgtccataattgctgtcataagtatcttagtaattacaatttcctgtttgatttatggttcaaggttgaataagacattaggtgaagaaacgaatcaatatctttcagaaatagcaaatcaaagcgtcaatgtgttaaaaaaacaaattaatggagatataaagttactagagtcaatttcaatatttattgaaggagaagagtcttttgaagtagataatatcctttctatactaaaaagacaagctattaatagttcatttaaaagaatgggagttattttaccaaatggtacagcatacactacagatggttatatagaagacttctctaaaagagattatttcttaaaatcaatgcaaggagaagtggttataacaggaaaattaaaagatgtaatagaagatgataaaaataccaatagtaatattaatgtatattctgtaccaatttataaagataatgaggttaaaggagttatatttgccacacatagtacgaagttgtatgaaaaaatactttctgtacctacatttaatggaaaaggatattcttatataactagaagtaatggtgatattgttttaaatccaagcagtaaaaacgccaactctactaaagaaaatttattttcttacattggcagaagtgattcaatatcaaaatctagtatcaacaatatgaagtcaaatataaaaaactttaaatcaggttcattaagttatagtatgtttggaaaaggatattatttaagttatgccccaataggaatcaatgattggtatcttttttctgaagttcctaaaactgctatatctgagaaatcatatgctattataaaacttacattatcagcatgtgtagtcttgattataatctttacggcattaacaatttatatactatttatacataaaaagagtaaggaaaaattggaagaatttgcttttaaagataacgttacaggtattggcaattcaaataaatttaatcttgaagggggaaaatttttatcctctcatgagaaaaagaatctagttttaatttattttgatatagataagtttaagctagtaaatgataggtttgggtatgaagaaggagatagagtattaaaggaaatagcagagataattaagaatatatttaaagagcaatctgtattttcaagaatttcaaatgacaattttgctataatatttgaaaagaaaaataatagagagtcaattatagaaatatgtgaacttatacgtaaaaaattgtcaatgataaaaacaagtttgggagtagaactcaatttaattccatccataggtgtatattttgttgaagagggagaaacaaatatttctacctgtcttgacaaagctatgattgcaaaaactacagtaaaaagaaaatatttaaaagtttatgagatttatgctgaaaatttaaaagaaactctcatagaagaacgtgatattgaacaagaaatgcatgatgctttaaaaaatgaacaatttaaagtttatttacagcctaaggttgatttatcaactactaaaattgtaggtgctgaagcacttgtacgttggcaacatcctaaaaaaggtctaataagtccaggtgtatttattcctatttttgagaaaaatggctttataacagaattggatatgtttgtatttacccaagtttgtaaaaattttaaacgttgggaaaatgaaaatttccccacatttcctatatcaataaacttatcaagagtacatcttgagaatccaggctttatttctgagcttgaaagaataacaaaagaatatgaaattgaaccaaatttaattgagattgaattgacagaaagtgcaatatttgacaatacaaaaatattatttaaaataatgcaaactttgaaatctgttggatttaaaatttctatggatgattttggttctggttattcttctttaaatatgcttaaagatatgccaattgatgtattgaaattagataggcaattctttataacagtgggaaatgcaaaaaagagtcaaattgtagtttcaagtattgttcaaatggcaaagcaacttgatataaaagttgtttcagaaggtgttgaaactgtagagcaagcagagtttttaaggtttataggttgtgatatggctcaaggatttttatttgctagaccaatgccaatagaagaatatgaaaaattaatattagatagatatagtttaaatagaaaagaaacaaat

SEQ ID NO: 17276 - DNA, 864 bp, Clostridium difficile
atggagttaagtgtagaacgtttaacaaaacagtataacaataaaattatagtagataaaattgactttaaattaaatgagggtatatatggatttttaggagaaaatggagctggaaaaacaactcttatgagaatgatttgcggaatattaagtcctacatctggagaagtaaaggtggatggtaaaaataatttggatatgggagaagattttagagatatgattggataccttcctcaaaactttggatactacccagattttactgccaaagaatttatgctatatatagcatcattaaaaggattaatgcctagctatgcaaagagaaaaacacaagaattattagaaatggtaggattatcagaggtaattaataaaaaaataagaacattttctggaggtatgaagcaaaggctaggatttgctcaaacactacttaatgaccccaaaattttaatattagatgagccaacagcagggctagaccctaaagaacgagttagatttcgcaacctaatttcagaattttctaaggaaaagattgttatattgtctactcatattgtgtctgatgtagaatatattgcagataaaattttaataatgaaaaaaggaagatttgttttaactggctcagtagaagaagtaacttcaaagataaaagataaggtatggaaatgtgtggtcaatgagaatgaaatagattatatgtctgatagatattgtttagcaaatatccatcattctggtggagttgcaaatcttagaattgtaagtgatataaagccacatgacaatgcatgcaatttaaaaccaacattagaagatttatatttatattgtttcaacgaagtacta

SEQ ID NO: 17277 - DNA, 903 bp, Clostridium difficile
gtgatacatgtgtcaaatgaatacgaagagtatcttatgaatgacaatctacatataaactggtatccaggtcatatgaaaaaaactaaggagttagtaaaaaataacttaaaattgattgatgtagtaattgaacttttggatgctagaatcccgtttagtagtaaaaatccagacatagacaggcttgtaggagataagccaagagttgtcgtacttaataagagtgatatggcagatagggataaattgaatcaatggattgaatactataagaaaattaatatcaaagctataccagtagatacaataaaaggcgttggtataaataagataatcgaagaatgtaaaaatgtaactagagaaaaaatgagttctttaaaagacaaagggagaaaagaaagagctatacgaataatgatagttggagttccaaacgttggtaaatcgtctcttataaacaaattaacaggtagaaaaagcactcaaactggagataagccaggagtaacgaaagggaaacaatgggttagattaaagggaaatcttgaacttttagatacacctggaatactttggcctaagtttgaagaccaagaagttgcattaaatttagcatttagtagagctataaaggatgagattttagatactgaaactttggctttaagacttatagaaaaacttatgaaaatagaacctgagaagttgaaagccagatataagttagattgtctaggagaaactccaattgaaactatggatatgattggccataaaagagggtttataacaggtaaaaaagaactagattatacacgcatagccacaactgtattaaatgaatttagagatggaaaaataggaaatataacattggaagttccagaaaacgttaaaaga

SEQ ID NO: 17278 - DNA, 2007 bp, Clostridium difficile
gtgggagatacaattttaggaaatcgatatgaaatcatcaggaagattggtgatggaggaatggcctttgtatatgaggctaaagacagattattaaacaggactgttgcacttaaagtacttagacctgaatttgtagatgatgatgaatttctaacaaagtttaaaagagaggcagaagcagtagcaagtctttcacatccaaatatagtaaatgtttatgatgttggtgaagatggaaaagttcactacattgtaatggagtttgtagatgggaagaatctaaaagagattatacaagatgaaggtatattagatgaatatactgcattagatataacaaaacaaatagctatggcacttagtgcagcgcacaaaaaggggattatacatagagatataaaacctcataatattctcatatcaaatgaaggaagagtagtaaaagtggctgattttggtatagccaaagctgtttcaaattcaacaatgactaatattggtagtataataggttcagtgcattatttttcaccagagcaagctaaaggtaaatttgtaactaataatgctgacctgtattctctaggtatagttttatatgaaatgttgataggaaaagttccatttaggggagatagtccaatttctatagcacttcaacacattaatgatgatatagactttacatcagaagaaaaagttaggattcctcaaagtgtaagaactacgataaaaaagcttacagaaaaatctagtgcagatagatatcaaactgctgaagaattgatagaagatatagagtatatagaaaaaaatattgatttagattttataaaagaatatgatgattttgcaactaagaaaattgatgaaaaagaaattaataaagttgtaaatccaacacttgcaaaaccagctcctgaaaaagtggttaagcctgttgaagtagctgatttggatgatgatgaagattactatgatgatttttatgaagaagatgatgatgaagaagaggaagagataatgagagctaaaaagaatcagagacctaagagtactccaagtaagagaactaagaaaaagaagaaaaaacaggaaagcccaaaatctagaagaagattaaaagtaattgcggctgttttgatactgatattgtgtgctcaagtattcttagcatataagtttttatttgctggagggtttggcaataaatctttgactgttcctaatcttgtaaatatgacattagaagaagctcaaagtgctgttgaaaaagaaggattatacctgagtgtaaaaagtgaagagtataatagtgaagttgatgaaaattgtataatatcacagacacctgaaggtggaagtacaaatgtcaaaaagggtgatactataaatgttgtcgtaagtaaaggttcaagtcaggcatctgttcctaatgtagtgggacttactttgagtaatgcaaaacaacttattgaagaaaataacttaaaagtgggaactgttaagtatgaatacagctcaatatataaagaaggtacagttttaagtcagagtccgggtgctggctcatcaagagctcaggaaggtgatgaggtaaacctatatgtaagcaaaggttcagaaaaatcaaatacacagactccaacagtaccagataaaaaaccaacaacaccagagaataatacaccaacagaacctggttcaaactcaggaaacagtggtggaaattcaggaggctcaaattcaggaaatagtggtggaaactcaggcaataatggaagtaactcaggaggttcaaactcaggaaatagtggtggaaactcaggaggctcaaactcaggagataatggaggaagttcaggaggctcaaactcaggagacaatggaggaagttcaggaggttcaaactcaggagacaatggagatagttcaggaggctcaaactcaggagataatggaggaacttcatcaggaactggcgcaaacattggtaaaacagaa

SEQ ID NO: 17279 - DNA, 555 bp, Clostridium difficile
atgactgaaaaagaaaaaatgttgtctgggaaaggatactatgcaaatgatgaattgttagtaaaagaaagagagtattgtaaaaaattaactagattgtttaataatactttagaggatgaatatgaaaaaagagaagatattttaagacaactatttggttcagttggcaagcaaataaatgtagaacaaaacattaggtgtgattatggatataacatacatgtaggcgaaaatttctttgcaaattatgattgtatttttttagatgtatgtaaaattgaaataggtgacaatgtaatgttagctccaaacgttcaaatctatacagcctatcatccaattgatgcacaacttagaaattcaggcatagagtatggttctcctgtaaaaataggtgataatgtatggataggtgggggagtaatcataacaccaggaattactataggtgataatgtagtaataggtgcaggaagtgtagtcacaaaagatataccaccaaatactgtagctgttggaaatccatgtagagtaataaagaaaatagaagaa

SEQ ID NO: 17280 - DNA, 2376 bp, Clostridium difficile
atgaatgagaaatcgttaagagttctagaatacaataaaataatagatttgttaaagaagaaagcctcatcttctttaggtctaaaatatatagaaaatttagtaccaaatactgattttgtagaagtgaaatctatgctagaagaaactagtgaagctcaatcaattattataaagagaggttcagtagggttggaaggtattcatgatatagaagataaggtaaagagagcttatataggtgcttctcttgacccaggaagtctgattatgatagcagataccttaagagtggctagaagattaagaaatagcttatctagtagtgatgaagaagattttaattatccaataatacaatctctatcaaattctctatatgtatacaaggacatagaagaccagatatacaatgctataattagtgaagtagaaatatctgacaatgcttcaagtatacttagagatatcagaagaagaatagcccaaaaaaatcaatccattaggtcaaaattaaattcaataataagttcaactacttatcaaaagtacttacaagatgcaataatttctctaagaggtgatagatttgtagtacctgtaaaatctgaatataggtcgcaagtagctggtatagtgcatgaccagtcatcttctggtgcgacactttttatagagccaatgactatagtagagatgaacaatgaattgaggcagttgaaactaggagagcaagaggaaatagaaagaattttatcagagctttctgctatggttggagaagtgagcgaagatttaatctctaatcaagagatacttggaagattggactttgcattttcaaagggaaaactttctatacagatgagaggaatagaaccaactttaaatgaggataaatatttaaacataaaaaatggaagacatccactgctggataaaaagaaggtagtagcaaatacaatttatttaggaagagatttccatacattggtgataacaggtccaaacacaggtggtaagactgttacaataaaaactgtaggtctatttgcacttatgacacaaagtggacttcatatacctgctgattatggaagtagtatgtgtgtatatgataatgtatttgcagatataggagatgaacagagtattgaacagagtctatcaacattttcatctcatatgacgaatatagtatctatattacaaaacgtaacagcagactctttagttatatttgacgagttaggagcgggaacagaccctgttgaaggagctgcccttgcaatagcagtattagaagatataaattctgtaggagctaaatgtatagctaccactcactatagtgagcttaaaaattatgctcttactaaatcaggtgtagaaaatgcagcagttgaatttgatatagaaactttaagcccaacatataagttacttataggtgttcccggaaaatcaaatgcgtttgagatttctagaaaacttgggctaagtgattatgtgatttcacgtgctaaagaatatataaatacagaaaacatagctttagaagatgtgttacagaatgttgaaaagaatagaatcaaagcagtagaagatagagaagaagctgaaagattaaaagaagagattgaaaaactgaaagtagagtatgacgaaaaacttgaaaaattggtcagtcaaagagataagatgattgaaaaagctaaatcagaagcattttcaattataagacaagctaaagaagaagtagatattataataaaagaacttagaagtcttgaacaagaaagagcttcaaaagaaaagaatcgtaagatagaagaacttagaaaagaattgaccagctctatgggaagtcttcagccaacagtaaaaagtatgatagttccaaaggtatcaaataaggagataaaagacttaaagccaggtgaagaagttaaggtaataactttaaatcaaaatggtagtgtagtttcagtagataaaaagagaaaagaagcagtagtgcaaattggtataatgaagatgactctaccttttaaatctttacaaaaaacacgcaaagatgtttcaacaaatgtaactaaatcaacgagaaacattataaggtcaaaatctggtagtgtaaaaaatgaagttgaccttagagggttaaacctagaagaagctataatggaagtagaaaagtatcttgatgatgcatatgtggcaggtttagagtctgtaacagtaatacatggaataggtacaggagtattaaaagcagggctacaagacattttaagaagaaatagacatgtaaaatcacaaagaggtggtcaatatggagaaggtggagcaggagtaacaattgttaaattaaaa

SEQ ID NO: 17281 - DNA, 771 bp, Clostridium difficile
atgggcaaagttatagctgtattcaatcaaaagggtggagtcgggaaaactacaacaaatgtaaatttaagtgctagcttaggaactttgggaaagaaaatattagtattagatttagacccacaaggaaatacaactagtggatatggtattaataaaaacgaagtagaaaatacaatctatgaaattatgttagatgggttacatattaaagaagcaataataagtactgaatttgagaatatagatgtagttccatcagctactgaactatcaggtgcagagatagagcttacatctaaaactaatagagagtatattttaaaaaattccataaaagcggtaatagatgaatatgattatatatttttagattgtccaccctcactggggatgcttacaataaattgtttaactgctgtagatagtgttttaattccaatacaatgtgaatattatgctttagaaggtgttagtcaattaatggagactataaaattagtaaaatcaagattaaatgctgatatagaaattcaaggtgttgttttaagtatgtttgatggaagagctaatttatcaatacaagtagttgaagaagttaagaaatactttaaaggtagtgtatatacaactttaattccaagaaatgtaagacttgcagaagctccaagtcatggaaaacctgtaatttattatgataaaagatgtagagggtctgtagcttatttggagttagcagaagaatttatagatttagaagaggaggaatgg

SEQ ID NO: 17282 - DNA, 738 bp, Clostridium difficile
atgaaggtgattttaatgaaaactatttctaaacaagaattagaaaaaacacttgagaaacattatttatggcttaaaaacaataatgctggagaaaaggcagatttaaaagaattaagattagaaaatatggacttaagaggatactgcttaagtaatattgacttttcgtggtctgaccttatcaatttaaatttagaaaaagcagatttagaaaactctatttttaataattcttatctttcggattgttcattaaaaaattctatattaaaaaatgcagacttaagtggtgcaagttttagattttgtgacttatctaactcagatattagaggagctaatttagaaaattccaatttagaatatgctactttaaatggagtaatatcagatgaaagtactcgtttttttaaattgtattgtcctgaaacaggagcatttataggctataaaaaatgttttaattttagaatggtacaattattaatacccagcgacgcaaaaagagtgtctgctacatcaaatgcttgtagatgtgataaggcaaaagtactgtcaattactagtgtagatggtaaagaatcttttaaaagtgctcgtgcatatgctgatgaaaattttatatatagagtaggagaaacgattgtagctgaagattttaatgaaaatagatggaaagaatcgactacagggattcacttttttttaactagagaggaagctattggttatcta

SEQ ID NO: 17283 - DNA, 279 bp, Clostridium difficile
atgtcaagatcaactaaaaaagggccttttgtccatgcaagacttttaaagaagatagaagctatgaatgctagtggaaataaagaagttataaaaacttggtcaagatcttcaactgtatttccacaaatggtagaaaacactatagctgttcatgatggaagaaaacatgttccagtatatataacagaagatatggttggacataaattaggtgagttcgttcctactagaactttcaaaggacataaggatgacgaaaaatctaataagagaaaa

SEQ ID NO: 17284 - DNA, 1365 bp, Clostridium difficile
atgtattttgtttctatgtttttaatgccattaaaaaaagagtataagttttatatacttggaggtaaaaaaatgaaaatagctatagctgggacgggatatgtaggtttggttacaggtgtttgtctagcagaggtaggcaatgaaaatgtagtctgtgttgatgtagatgaacaaaaggttaaatcaatgaaacttggaatagcacctatatatgaagaaggcctagaagaacttatggttaaaaattacaacagaggaagaatagattacactacagactataaaaaagcttatgaagatgtagatgtaatattaatagctgtaggtacacctgagagaagtgatggttcagccaacctagattatataaaggcagttgcaaagcaaatagctgaaactgtgacaaaagatactctagtagtaataaaatctacagttccaattggtacaaatgaagagatagaagattatataaatagaaacctaaaaaatgatgtaaaagtagagcttgcatctaatccagagtttttatcacaaggaacagcagtaaaagatactctacatgcttcaagaatcgttataggtgtagaaagtgaatgggctagagaaatattagaggaaatctataagccttttaatcaacctataatagttacaaatagaaatagtgctgagatgataaaatacgcatcaaataacttcttagctcttaaaatatcatttatgaatgatattgcaaatctttgtgaaatagcaggagctaacatagaagatgtagctttaggaatgagttatgatgatagaataggaagtaagtttttaaaggcgggaataggatatggtggttcttgctttccaaaagacacaaaagctcttcactggttatctgaacataatggttatgaattaaaaacagtaaaagctgcaatagaagttaatgaaagtcaaaaacttaaattagttagaaaggcatctaagttagtagagagctttcaagatatgaaggttgctgttttaggtttgacttttaaaccagatactgatgatataagagaggcaccatctataccaaatataaaatatttgctcgaaagaggggcaagagttactgtatatgacccaattggtgtaaataatactaagaaaatatttggtgactctatactttatgctgattctgtagatgatgcgatagaagatgcagagatatgttttataatgacagaatggaaagatgtattaaattatgatatacataagtataaggaaaagatgaaaaatcctttagtccttgatggaagaaattgttataaaattaaagatatggaagagttaggaattgagtattattcgataggaagg

SEQ ID NO: 17285 - DNA, 1344 bp, Clostridium difficile
gtgatatttatgattaatatagaaattcctaaaaaagtagactatataattaaagaattagaaaagaatggttatgaagcttatatagttggaggatgcgttagagattgtttattagaaagagttccaaacgattgggatataacaactagtgctagaccagaagtggtagtagaattatttgaaaaaacaattccaactggtatacaacatggtactgtaacagttatgattgaacatgaaccatttgaagtgacgacttatagaattgatggaaattatagtgatggtagacatccagattcaatagaatttacaaataacatagttaaggacttgtcaagaagagattttactatcaattcaattgcatacaattcaaagacaggattagtcgacccatttaatggctatgaagatatacaaaataagtatatacgttgtgttggaaatccagtagatagatttgaagaagatgcacttagaatgcttagagcagttagattttcagcacaactcaattttaaaatagctgaaggtactaagcaaagtattcataaaaaagcagatttgataaaaaatgtttctattgaaagaatccagacagagtttaataaaatattagtatctgattcatctaaattaaacttattaaaatcaacaggtttgttgaaatttataattcctgaaatatgtgaattagaagatgttactcaacacaatccatatcacatctatgatgtacaaaaacatactttaatagctacagaagtaattgaagatgaactgtatttaaaacttacaatgttgtttcatgatttaggtaaaaaagtaactaaaacaactgataaaaatggtgttgaccatttttatactcatagtagagaatctgtaaagattgcaaagaagattttgaaaagacttaagtatgataattatactattaataaagttttaatattaatacaatatcatgattatagaatagaacctaaaaggaagataattaaaaagttattaaataaacttgaagatgttggattatttgaagatttaataaaagttaattgggctgatacacttgccaaaaatccaaagtatgcaaaacaaaagatattaaatcttattgagtgtgaaaaagaatttaaacatataataaatcaaaaggagtgctttaatcttaaagatttagctattaatggaaaagatttgatatctataggtataaaaccaggtaaagatataggatatattttaaataagatgcttgaaatagtcataaataatccagagttaaatgaaaaagaaatactaaaagaaaaagcattaaatatatatacattt

SEQ ID NO: 17286 - DNA, 1050 bp, Clostridium difficile
gtgaagtcagttagattctatggtataagagacacaagagtggaggatgtggatgtaccaaaaatattagaaaaagatgatgtaataattaaagtaaaagtagctggaatatgtggttctgatatatcaaaatattcaaagacaggtccacatatggttggagaaattttagggcatgaattttctggagaagtggcacaggttggtaaagaagtaaggagttttaaaataggagatagagttgctgtttgtccagctatgccatgttttgaatgtgatgaatgtaaaaaaggcttgtattcaagatgtaataatgtagcaataataggaaataaagaacttggaggttgttttgcagagtatacaaaggtgaaagagagaaatttaataaaaataccagatgagataagttatgagactgccgctgcgctagaaccagtatgtatagcaggacatggtctttttaggtcagaagctaaagttggagatacagttgtagtacttggtacaggtccaataggattattttcaatacaatgggcaaaaatatttggttctacaaaaataatagctgtggatgtatttgatgagaagttagacttggcaaaagagttaggggcagatatttgtataaatgcaaaagaaaagaatattgtagaagaaataaaaaggttaactgatggagatggtgcagatattgttattgaatcggctggtactccactgacatgtggtcaagtactgttgctagctaaaaagggaggtacagtattgtatgcaggtgtaccatatggggatgtagctttgactagagagcaatttgaaaagatagtaagaagtgaattaactgtaaagggaacttggtttggaaactcctttccattcccaggaaaagaatggagtgctggattgtatcatatgcaaaagggtgatatgaatgttgaaaaattagtaacacatagaataaatttagaagaagcaccagcttattttgaaaaagtatacaaaagggatattttctttggtaagataatgattaatatagataat

SEQ ID NO: 17287 - DNA, 1626 bp, Clostridium difficile
ttgaacattataataagtctaatgggtggattaggtctgttcttatatggtatgaaccttatgggagaaggtcttcaaaaatctgctgggacaaagctaaaaaagataataaaactacttactagtaacctatttatgggagttttggtaggtacaggagttacagcagtaatacaaagttcaagtgctactactgtaatggttgttggtttcgtaaatgcaggaataatgactttaaaacaggcaataggagttataatgggtgctaatatagggactactgttacagcccaattggtatctttcgacttaactggtatggccccagtagcattaggtgtaggtattatactttatttatttggaaataagcctagaataaaaaatatagccgaaatacttataggttttggtatattatttacaggtatggattttatgaagatggcagtggagccactaagagactatcaaggatttactgacttacttgttacatttggtagatatccactacttggattattattgggatttgggattacagcaataatacaaagttcaagtgcatctatgggtatgttggttgcactggcagcagaaggtctagtgccattatcagcagcactgccaattctttatggccaaaatattggtacatgtgtaacttcactgttatcaagtattggtgctaacaaaaatgcacgaagagcagctatgatgcatctaatcttcaatgttttaggaacggtgatattcttaatattcttgaataaaccagtagtaagcatggttacaagttgggacccaagcaatgttgcaagacaaatagccaatacacatacattgtttaatataatatctgtattgatacttttaccatttacaaatcttattataaaactagctataaagcttgttcctgatagagcaggtgatatagatgaagatgaaactaaaactattaaatatatagatgatagaatgatagaaactccttctatagctcttgcaaatacgataaaagaagcacttcgtatgggtgagaaggcgaaggaaagcctaaatgcatctatggaagctttagtagaacattcaactgaaaaaatagataagacatataggcgagagagattaatcaatgatttacagaaagctattttaaattatttacttaaactttcaaaagcacctttagatgatgattcaagagaagttgtggatactttgtttaatacagtcaatgatatagaaagaattggtgaccacgctaaaaatatagctgaattatcgcaagttgcaatagattcaaatatttctttctcagaagaaggacaatctgaacttgatgttatgtataatagagttgtttcagcatatacttatgcattagaatcaatgagaactgataatgttgatttagcttgtaaggttataaaaattgaagaacaagttgatataatggagaaatcttgtagagctaatcacatgtatagattgaacaataatctatgtagtatagaaaatggagttatttatttagacgtaataagtaatttagagagaatatctgaccatgctgtcaatatagcacaacaagttatagcaaagagattaggaaatgat

SEQ ID NO: 17288 - DNA, 1269 bp, Clostridium difficile
atggagtttattattagtttgctgagtacacctgctgttttgcttggcgtagttgcatgtataggattgattcttcaaaagaaatcagctgttgaagtatttacaggctcttcaaaaacacttatcggttttttgatatttggtattggtgcctctgctatgacaggagcacttcaaaatttcaataaactgttccaacatggctttggaattactggtgttatagcttcaccagaagcagctacagcacttgcacaaggtacatatggttttgcagtttcatgtacattaattcttggattcatattaaatttagtatttgcacgtattacaaagtttaagaatattttctttacaacaggtcatagtttgttcttttcttgtgtattagttttaattatgaaagcacatggatttgataatacaatcactattttaataggtggaactatcttagggtttatgtctgctgcactacctcaattctgtcaaccatttatgcgtgaattaacaggtggcgacgaacaagctattggtcactttaacatgattggttatggtttatcaggttatattgggcgtttattttcaaaacataaagatgatacaacagagactatagaatttcctaagtggttatcaatattcagagacttcttaatgggtctatccatagttatgttaatcttattttatattgcaacattaaaagctggtcaagcatttactcaagaaattgctggttcaacacattggttggtttttccgcttatagaggcatttacatttgtggcaggtatgtcaatattgatgtcaggtgttcgtatgttcttagctgaaataactgcagcatttgtaatcatttcagaaaagtatattccaggttcacgtcctgcgctagatgttccaacagtatttccatatgcaccaaatgcagttattattgggtttatatcagcatatgctgctggtctattagcaattgctattatggcatcatttcctagtatatttcctgtagtaattattccagctgctcacatatgttttttctcaggaggtacagctgcaatatttggcaatacttcaggaggatggagaggggctattgctgggtcatttgttgtgggattattacttgcatttttaccagttatactatatccagtttatggcactcttggtatagaaggagcaactttccctaatattgattacaatgtagttggttcgatattacataatattttacaatttataaaacctatt

SEQ ID NO: 17289 - DNA, 954 bp, Clostridium difficile
gtgaatttaagggaggtaactatggaatttcatcatgtatcagttcttttaaatgagtgtatagagaatttaaatataaagccagatggcgtgtatgttgactgtactatgggaggagcaggacattctaaagaaatagtaaaaaaactgtcagataagggattatttatagggtttgaccaagataaaaatgctataagcacagcaaaagagagattgagtgaatatgaaagtagagtgaagtttgttcacagcaattttgaaaatataaaagaggaattagaaaaaataggagtttacaaaattgatggtgtattagctgatttaggagtttcatctcatcaacttgatgaagctgatagaggattttcttatatgcaagatgcaccacttgatatgagaatggatgttaggtgtgagttttctgcatatgatgttgtaaatacttatacagaagatgaattaactaagataataaaagattatggagaagataactgggctaagcgtatagctaaatttatagttgaagaaagagcaaacaaaccaatagaaactacaggagaattagtagatgtaattaaaaaagctatccctaagaaagccagaatagttggacctcacccagctaaaagaacttttcaggcaatacgaatagaagtaaataatgaacttggagtaattacaaagatgataaatgatgcttcttctataatgaatgaaggtggaagaatatgtataataacattccattcattagaagatagaatagtgaaaaatgcatttaagcatttagcatcagattgtatatgtccacagcatttacctatatgccaatgtgataaagaatctgaggtgaaaataataactagaaaacctatattacctagtgaggaagaaatagaagtaaatccacgttcaagaagtgctaagctaagagtagcagaaaaaata

SEQ ID NO: 17290 - DNA, 3132 bp, Clostridium difficile
atgaatttaacacagacttccgttaaacgtcctctcacaatcataatggtctttttagtattaatagtttttggtggtattggatataaaaaaatgtcaataaatctaatgcctgatatagaaataccagttgtaatggtcatgactacttggacaggtgctggtcctcaagacgttgatgaacaagttagtcaaaaagttgatgaaagtttatctgccgtttcaaatgtaaaatctactatatcaagttcacaagaaagtgtttctatggtagttgctcagtttgaatttggaactaatttggatgaaataatgaatgatgttaggtctaaagttgatgcattacagaccagcctcccagatgatgcagctaaaccaacagttttaaagctggatatgaatgcacaggccataggtcaacttgtcatatctggaggaaatgaaaatagttcacaagccttaagaaaatacgctgaagatgtaattcagcctaaaatagaatccatagatggtgttacttcagcagaccttaaaggtggaaaaaaagcacaggttaatgtaatagctgacccagctgttctttcaaattatggagttagtttatccactataaaaggtgtcttatcctctagtaataaaacattcccttatggttcaattactcaaggtgaggataaaatagttttaagagcgattgataaattagaatccctagatgatataaaacagattcaaattcctgtaaaaggaggaaatacagttagattagataatctttgtagtgtagattatggatatgcagacaaagatagtatttatagatacaatggaaaagacagtttggtaatagatatttctaaacaacaagatgccaacactgtaaaagttatgcagagtgcatacaaatacgtagatgaattgaataaggaaaatcctcaatttaaaattaaaattgctaatgatacaagttcatacataagtgaatcaataaacagtgtaatgagcaacttgcttataagtgctgttatcgcatttattgtaatatttgctttcctaaaaagtgtaagagcttcactagttgttgcagttgcaataccaatttctataataggtgctatagcaattctctactttactggtgaaagtttaaatcttattactgcaagttcattggtaatttcagttggtatggttgttgataatgctacagttgtaattgaaaatatatttaaatataggaaaagtggcagattgagtcttgatgattgtgctattgagggaacaagaactgtaacaaatgcaatacttgcatcaacattgaccacaatagcaatattcttacctatcatgtttacagaaggtatagctaaaataacttttggggcattaggtaaaacactaatagcttcactagcattctcctttataggtgcaattacactcgttcctagtgtatttgcaaaattaagcagaggaaaaaatagtcaaaagatgcaagaaaaagatagtcctatatttgataaggtaagtgaagcatataaaaaattattaagtgtatgtttgagacatcaacgcttagttgtaatatcaagtttacttatttttgtagcttccttatttggaatgggatttataggtatggactttatgcctgcagcagacaagggtgaattatctatttctatagaacttccaaaaggtcttagcctagaatccaatgattactatgtatctatgactgagaaaaaagtctcagatattccagaaattaaaactttaataacaactttgacatcagattcaaataatagtaaagcaagtatagcaattgaattagaatctcaaaaaaatagaaaaagaactactgatgaaatagaaaaagagataattgatagagtggctactgtaccagattgtaaaataaatgtaagtcaaaacagtagtgttatgggtggagctggaggagcagacttcacattagaaatgaaaggtcctgatttagatgtattaaaaatactgggaaaagaagctgaaaaagaatttagctctataaaaggatttagaaatgttgaaacttctcttacagatacaacacaagaagctcaatttactatagataaacataaggctcaagaatatggtgtaaatactgctgaaattgcaggcatgttacgtacagcaataaatggtgactccgtaaccactgctactattgatgattacaaagtggatgtaaacctaaaatttaaagcagatactattgatagcttagaagatataaagcaactaaaagtaaactctgcaactggaaaagaagttcctcttggtgctttttcagatataaaaatggcagatggtctacaatctatatctaggactgatggagatttttctgtaaatataactgctacacttgacaatttagatgctggtactgctacaaaactagcactagaaaaaacgaataaaatggtaattcctaaagattactctataggtgttggtggtgaaacagaaatgatgaatgaatctatggcaagtcttggattttcaatggtcatagctatagcattagtttatatggtaatggtagctcagtttgaatcatttagtaaaccatttataatcatgttctgtgttccatttgcattcgttggagttgtgctttcgcttctagttagtggtcaaagtttaagtactgtcggtatgctaggtataatcttacttattggtattgttgttaataatggtatagttcttattgactacatagagcaacttagaaaaacaaatcgtaacaatgatttaattggtttggtttcaattggttgtgcagcaagattaagaccagtcttaatgactacagcaacaacaattttaggtatgttgccaacagcactatctcttggtgaaggtggagaaactatgcaaccactagccatagttataatgggtggtctaactgtatctacacttataactttggtgcttatacctactatatacttaatatttgataaatgggaaaataagttttcagacaaaatgcctaaaatatttggtaagataacagataaaataggaagtataaaacgtaaaataataaagaaaccaaaattgaaagctaaagtt

SEQ ID NO: 17291 - DNA, 276 bp, Clostridium difficile
gtgagaaattatgaattagtttatgtggtaaagccaaactctgatgaagaagtaagagaggctatactaaacaaagttaaggaagttgttgcaactgacggagaaatagttaaagttgatacttggggaactaaaaaattagcttatccaatagctaagtttacagaaggtttctatgtattagttaacttcaaatcagcagtagacgttcctaaagagatagacagaaacttaaagataaatgaaaacgtaataagacacatgatagttgttgct

SEQ ID NO: 17292 - DNA, 447 bp, Clostridium difficile
atgaaagttatattattaaaagacgtaaagggaactggtaaaaagggagaaatgaaagaagtaagtgatggatatgcaagaaatttcttatttcctaaaaagatggctgtgcaagcagatagtgtagcaataaaagaattaaatgaaaagaataaatctaaagaaataaaagcacaaaaagagtatgaagaagcagttttattaggtaagcaaatggaagaaattaatatagaaatatattcaaaagcaggagaaggtggaagattatttggttcaataacttctaaagaaattgctgagcaattaaagaaacaaaaagacatagatgtagataaaagaaaaatattattagatgaaccaataagatctttaggttcaacttttgtagaaataaaaatacatcaaaaagtaactactaaaataagagtggatgtaaaagaaaaacag

SEQ ID NO: 17293 - DNA, 786 bp, Clostridium difficile
atgtataatttaattaaagatgtaaaaaaattaaatccattggtaattcattatactaataatgtaactataaatgattgtgctaatgtaactttagctgtaggagcaagtcctcttatgagtttttcatatgaggaagtagaagaaatggtaagtgtagcaaactctgtagtaataaatataggaactatgaactcaaatatgttggatttattcctattagctggaaaagcagcaaataagtacaataaacctgttgttttggacccagttggagtatttgcaagcaaagcgagagcagaacttacaagtagacttttaaatgaagtcaaatttagtgttgttaaagggaatgtatcagaaataaagtttataggtggctttaatgtaaggggtaaaggtgtagattcatttgatgaagaagaagattctactgagataataagaaagattgctgaaaagcttgaatgtgtagttgtagcaactggaaaaatagatataataactaatggtaaaggtacatataaaataaacaatggaactgataaattaaaaggaattacaggaactggatgtatgactgctagcttgattgcaagttttatggctgttactgagaatatattagaagcagcaacaatgggtgttcttacaatgtctttaagtggggaattagctaatttaaataatccaccaataggtacatttaaagaaaatcttatgaatgctatttatcaaatggatatagatgctttaagtaaaaattctaatattgaatttttaaat

SEQ ID NO: 17294 - DNA, 1095 bp, Clostridium difficile
atgaaattatacatgagtgtaaaaactatgctaaagggtttaaaaagctcctttatacttaatttaatatattttttagctttacctctgattttatcttggtttcttggtatggttacagaaagcatgtttcaaaaccctataaaaacagaatctacccccattgttatatatgacaaagataacacaagattatcaaatgatttgacaaagtatttgaaaaatgatttatcttatatattaacagttaaaaaagatgattctaaggcagaattaaagcttactatacctaaaggctatgagagtagtttattaaatgaaaaatcaaatactctaaacatagaaaaacttggaactcgtgatgatattgcaatattgcttcaagatatattagatacttaccatgaaaaattttatttaaataattctcagaaaataagttcagaagatttttctaaattatttaataaaaattctattgatacttctataataaataacaatgttaaacagagctcttatgaatactttgctttagtttcactaggatttcttgtaataatttttataatgaacaatattttatcaaattatataagtgaatcaaagggactttcaaaaagactttattctatgcctataactagagtacaattcttaatttatgactttgtaggtttatggatttattcatttatattcttattattatatgttttattctttagaatacttggaataacatttaaaggtaattttgccatattgctcctactttgtgctttatcatcttattttatgacttcaatatctacctttgtaaccagcttttttagcaaaaaatacggtacagcaatagtttatgcattactctttttacagacaatttttggaggtatcttcagtatgataagtgatacatttactaagcttacaagtttatctcctacctatttaataggagaattgtttagtaattatgaaacatttaaaactatagattcaataggagatttaattttcacatgtttaattatctctacaatattaattgcacttgctattgtaaaggaaaaatataaatggagggaggtt

SEQ ID NO: 17295 - DNA, 225 bp, Clostridium difficile
atgatgaataagaaaagacgtaagaaaaaaagagtttgtcaattttgtgctgacaaaaacgctaaaatagattacaaaagtactcaaagattacaaaagtatataactgaaagaggaaagatattaccaagaagaatatctggaacttgtgctaagcatcaaagagaattaacagttgctataaaaagagcgagaaatatagcacttttaccatatacattagac

SEQ ID NO: 17296 - DNA, 885 bp, Clostridium difficile
atgaataaattagaaatagaaaatctttcaaagatatatggtaaaaaagtagcaaacgacaagattacagtaactctggaaaatggagtttatggtcttctaggaccaaatggagcaggaaaatctacattaatgaaacaaataacaacgttgataaaacctgatgaaggtcagatactttataatggtgaggatatatttaaaatggatgctgattatagaaatattttaggatatttgccacaagaatttggagtttataaaaattttacagcaaaagaatttttacagtatattggagctttaaaaggtttaaggggaaaatatttaaatagtaagataggagaattattagatttagtaggtctttatgatgtgagaaataagtctataggaaaattctcaggaggtatgaagaggagagttgggatagcacaagttttactaaacgaccctaagataatagtccttgatgagccaacagcaggtcttgacccacaagaaagagctagatttaggaatttaatagcaaaaatgtctagagataagataataatactttctactcatataatttccgatatagaatcagttgcaaaggaaacaataatgattaaagatggcaaactcctaatgaaaggaacacacaaagacatattaagtcacatggaaaataaagtatataatgttcaagttaaaaatgaatgtgaagttgatgatatacaatctaaatataaggttgtaagtattcaaagtgatattaattcaatagtacttagaattgtttcagaggatattccaagcgaggataatatacaaccagttcaagcaaaattcgaagatgtatacatgttttattttgatttagaagatgcaagggaggtg

SEQ ID NO: 17297 - DNA, 630 bp, Clostridium difficile
atgattgataaagaatctttaaaaaaatgtttaaagttgtatttagtaactgactctgaaatgcttaaaggtagagacttttataaatgtcttgaagatgcaatatcttctggaataacaactgtacaacttagagaaaaaaatgcttctggaagagagtttttaagaaaagctatgaaacttagagaaataactaaaagatatggtgttaagtttataataaatgatagagtggatatagcacttatttgtgatgcagatggagtacatgtaggacagagtgacattgatgttagagaggttagaaagcttataggaaacaataaaattctaggagtatcagcaagaactttagaagaagctatttgtgcaaaaaatgatggcgcagactatttaggtgtagggtctatattcacaacatctactaaattagatgcaaaatcagcttcgtttgaaactgttaaagaaattaaagaaaaagtagacatgccatttgtactaattggaggtataaatttagacaatatagataaacttaaatgtttagaaagtgacgggtatgctataatatcagctatattaaaagctgaagatatctctaaagaagtggaaaagtggacattaaaaata

SEQ ID NO: 17298 - DNA, 777 bp, Clostridium difficile
atggaggagaatatgaaaagaaaagttcaagtaaaaaatattactattggagaaggtagacctaaaatttgtgtaccaattattgggaaaaataaaaaagatattataaaagaggctaaagagttaaaagatgcatgtttggatattatagagtggcgagttgatttttttgagaatgtagaaaatattaaagaagttaaggaagttctctatgaattaagaagttatatacatgatatccctttattattcacatttagaagtgtagtagaagggggagaaaaattaatatcaagagattattatactactttgaataaagaaatttctaatacaggtttagtagatttaatagatgtagagttatttatgggagatgaggtcatagatgaagtagttaattttgctcataaaaaagaagtgaaagtaattatatctaatcatgattttaataaaactccaaaaaaagaagagattgtatctcgtttatgtagaatgcaggaattgggcgcagatttacccaaaatagctgttatgccgcaaaatgaaaaagatgtgttagtgctacttgaagctacaaatgaaatgtttaaaatttatgcagatagaccaataataacaatgtcaatgtcaggaatgggtgttataagtagactgtgtggtgaaatatttggttctgcattgacttttggagctgcaaaaagtgtttcagcaccagggcaaatatcatttaaagagttaaattcagtacttaatctattacataagagtattaat

SEQ ID NO: 17299 - DNA, 831 bp, Clostridium difficile
atggataatatagtaaaggtaaataatatttcgtttgagtatattacagatgaagcaaaacttaaagcaatagataatttaagcctagatgttaaaaaaggagaatttgttgcgataataggacataatggttctggtaagtctactttatctaaaaacttaaatgctattcttatgcctactgaaggaaatattcttattgatgatatggatactaaagaagaagaaagattatgggatataagacaaactgcaggcatggtatttcaaaatccagataatcaaatagttgctactatagtagaagaagacgttgcatttggacctgagaacttaggtatagaaccaaaagaaataagacgaattgtagaggagtctttaaaaagtgtaggtatgtatgatttaagagatagacagcctcatttgttatcaggaggtcaaaagcaaagagttgcaatagcaggaattattgctatgaggcctaaatgtataatatttgatgaagcaacagcaatgttagatccatctggaagaaaagaagttatgaaaacaataaaaagacttaataaggaagaaaatataactgttatacatataacgcactttatggaagaagcagtagaagctgatagagttgtagttatggaaaaaggaaagaaaatcttagagggaactcctagagaagtattcagtaaaataaagatgttaaaggaaatcggtttagatgtaccttgtatgacagagttatctagtttattaatagaagaaggtataaatattagtagtgatatattaactgtggatgagatggtgatggaattatgtcaatta

SEQ ID NO: 17300 - DNA, 2418 bp, Clostridium difficile
atgagcgtatataattttaaagaagtagaatcgaaatggcaaaaaatttggaaagataataatcagtataaaatggatactgcacaaactgaaaaacctaattattacacattagaaatgttcccttatccatctggaaaaatacacatgggacatgttagaaattattctataggtgatgttgtcgcaagattcaaaaaaatggaaggatataatgtacttcatccaatgggatgggattcttttggattaccagctgaaaatgcagctataaaacatgggatacatccgcataaatggacaatggaaaatatagaagaaatgaaagagcaattaaatttattaggtattagttatgattgggataaagaagttgcaacttcaacgccagaatactatagatttacacaagaaatatttttgaagtttttagagcatgggcttgcatataagaaaaaatcatatgttaactggtgtccttcttgtgagactgttcttgcaaatgagcaagttgttcaaggagcatgtgagagatgtaaagcaacagtattaaagaaagatttagaacaatggtattttaagactactgaatttgcagaagaattacttaatgacttagatacattagatggatggccagaaaaagttaaaacaatgcaaaaaaattggataggtaaaagtacaggagcagatttagtttttgatatagatggaactgataaatctatgacagtatttacaactagaccagacacaacttatggagttacttatatggtacttgctccagagcatgaattagttaaagaattggttgcagggactgaatatgaagcagatgttgaagcttttgttcaaaaaatgcatactatgacagaaatagaaagaacagcagctgatgtagaaaaagaaggaatgtttataggtagatatgttataaatcctttaaatggcaagaaagttcctctatggatagctaactatgtattagttgagtatggaacgggtgctataatggcagttccagcacatgatgaaagagatagagattttgctgaaaaatataatttagacataattgatgtaataacagaagataacaaaatgataaattcagaagaatttaatggattagatgcttcagaaggatttgaaggaataatcgataagttagaaaaagaaggtagaggaaagagaacaattaattatagacttagagactggttagtttcaagacaaagatactggggttgtcctatacctgtggtttattgtgatgaatgtggaatagttccagttaaaaaggaagatttaccagttcttttaccaacagatgttgaatttactggaaaaggggaatctccacttacgacttcaaagcaatttatgtcaacaacttgtcctcactgtggaaaaccagctagaagggaagttgatactatggatacattcgttgattcttcttggtatttcttaagatatgtggatagcaataatgaaaatgaaccatttagtaaggaattagttaatagatggcatccagtagaccaatatataggtggagtagaacatgctataatgcatttgctttatgcaagatggtttgtaaaggcatttaagagtatgggaatggtagacttcaatgagccatttaaaaacttacttactcaaggaatggtacttatggatggttctaaaatgagtaagtctaaagggaatacagtatctcctatggatataatagatgagtatggagcagatactgcaagacttttcgtattatttgcagcaccaccagaaagagatttggactggtcagagcaaggtgttgatggatgctttagattcttaaatagggtttatagattggttgacgagttagcagatgtggttaaaaaggatgtagagtttggagaattaaattcccaagataaggatatgagatatactatacactctacacttaaaaaagttactgctgatttaagtgaaaaattcggatttaatactgctatatcagctcttatggaattaataaatgatatgtataaatataaagagttagataatataaacgaagcagttataaaagaaggtgtacaaactatagtaactataattgcaccatttgcccctcatttaggtgaagaactatggactatgataggtaaagaaggaagtgtatttgatatagactggcctaaatatgacgaaaaagctttagtaaaagatgaaatagaagttgttgtacaagttaatggaaaagttagaggaaaattaactgttaactcaaatatatctaaagatgagatggaaaaggtagctttagaagatgaaaaaataaaaggattagttgaaggtaaaactatagttaaagttgtagctgtacctaaaaaactagtaaatatagttgttaaa

SEQ ID NO: 17301 - DNA, 474 bp, Clostridium difficile
atgaatttaaaaagaagcaatgaaaaacgagaagagtacagaaaaatgtattcagataaagaaagttttttaagtttgattcaaaattttacaagtgtctcaatagcaaaagaattaactcttaaaaatatagagttagaaacatcttttatatgtgaatataaaggaaaagaagttgatataatttataaggtattttctaaaagtggcaaagtatcacattatatagtgttagaatttcaaacagaaatggatactgaaattgtcccaagattgaaatcgtatagagaacaaatttggaaaagttttattatgaaaaaaagccttgaagaaatagaagataaaaattttaaacttcctaaagttataccagttgttttatatagtggacctgaaaggttaagtagaaaaaaaggaattttggatattgtagaatctatatcggagttcagtaataattctagtatgaaaaat

SEQ ID NO: 17302 - DNA, 1407 bp, Clostridium difficile
gtggaggtgagtattattttagttaaagatataaaacaagacatagaaagcatgcctagaaaaattttagatatatctttgatagaagataataaaagtgatttgactttttttaatatagaagaagaagacggtgatgaaacattaaaagcattaaaacagagttatgtgactacaaattataaagaagaaactctattaaacttgcaaggagctttaaattcaaagtcagatacaacgtctaaggagttaaaattagaatcatataaaagatataacaatgcattggatttagcatataaaaattatataactagtgccattaatatggttaataaagctctggagataaatcctaaagacattgatatactaaatcttagaggtcttttaaaattattaaaatgtgattttgctaaatcatttgagagtttttatactgctttatgttatgaaaataatcatatatctagaaaatatgtaaatctaatttcatctgaagattttaaaacttttttaggaagatacaatcattctataagatttataaatgaagaattaaattatgagtcaatacatattttagagaacataattgaagaagaacctgaactaatagagccatatgtaattttatctttgttatatgataaactaggtaatgtaaaaaagagagaaggatatttagacaaacttaaagagctagataaagataatcctgtatttgaaaaaaatgaagaagaaaaagaagaagaaaaagaagatacaagtaaaaatgaagaaataaaaaaagtaaaaagaaagaaaagtattttaccatatattatagttggctgtgttttaataggtatggggatatatttgattcaaagcaaaaagagaatagaaaacttgaataaccaaataagtagtaaagaggaaaagttaagtgaaactgataaaaagttaggagaaactagtaaaaaattagaaaaaacgaataaggaattaaatgaggttaaaaataaagaaccagaaagagagataactgtagctgatgaggaagatttatattatcaagctctaaatttaaagaaaaacaaagaatatgaaaaagccatagataattttaaaagtatagtttcttctggtaaaactaaaaaatatatttctgagtcaatatatcaattagcaataacaaataaattattaggaaataaggatgaagctataaaatattacaaaaaatatataaatacttatactaaaaatgaccagtattatgatgattcatattacgagttgggtatgctttattatgataatggcgatttaaaaaatgcacaacagactttttatagtttgagaagtgaagttccagacagtatgtataacaattcaaaaataaaagaaattttaagtgaaaaa

SEQ ID NO: 17303 - DNA, 591 bp, Clostridium difficile
atgataagtgattctatatcaaaaagacgaagtatcagaaaatataaaaatcaaagcatttcacatgaaactatagagaaaataattgaagctggaataaatgcaccttcatctaaaaacaggcaaccatggcgttttgttgtcatcactgaaaaggaaaaagaatctatgcttaaagccatgagcaaaggtattcaaaatgaaattaatgataatgggcttcttccaggaagtcgtcaacatatcgctggtgcaaattacacagttgaaatcatgaaacaagctccagtaacaatttttattttaaatatattaggtaaatcacctttagaaaagctatcccctgaagaacgattctatgaaatggcaaacatgcaatcaattggagctgcaattcagaatatgtcgcttacagctgtggaattaggtctaggtagtctttggatttgtgatgtatactttgcatatcgtgaattatgtgaatggttaaatacagatagtcaattagtggcagcaatatctttgggttatcctgatgaagaaccatcaagaagacctagattacaattaagtgatgtgactgaatggaga

SEQ ID NO: 17304 - DNA, 1581 bp, Clostridium difficile
atgataaatttagaagaaaagtatttaacacgaaaagacacatatatgataaaaattctagaatataatggacatattcgaaactggaaagttctctgtgaagaacttggaatcgattcttcattatgtagagatgagcgtgaacgagcaattttagtggaagcatataagacatggggatatgatatggcaaatcacatgcatggaatgtttgcttttgcattatgggatactgtggaaaagaaactcttctgcctaagagaccagtttggagtaaaacctttctattattatgagactgaaaatgggaagcttctctatggttcatctattcgtaagattatggagcaaccaggatttgtgaaagagttaaatgaagacatgttacagatttatatgtctttcacatatgtagcaggtgaaaatacatttttccgtggagtaaagaagcttatgccaggacattaccttgtctatcagaataaaacagtatgtattggtcgttattggaaacctgaatttcatcctgacaacagcaagtctattgaggaatggacggatgaaattcatacaacacttcagaaaattatgccagaggtaaaatcagagaatgaaactgcagagttattcctatcaggaggtgttgattcatcttatatattggcaatgtcagatatagaaaaaacaggttcatgtggttatgaggaagagcgttttgatgaatcaaaattagcacaacagacagctaatattcttgggtgtaaaaattcgagatatataattacacctgaagagtattttgcgtcagtaccttatgtaatgtaccatatggagcaaccaactggagatgcatctgctatcgtttttgctattggatgcaaggcagcagctgaaaacacaaatatctgttactctggagaaggagcagatgagttttttggtggatataatatataccataaggcagagtgttatggagagaatttgaagacattttatattggaaatacaaacattatgaatgagggtgagaaaagaaaaattcttaagaaatacaatcctgatgtgcttcctattgaagtggtaaaaggaatttatgaagaaacagaagaactagatacacttactaacatgtcaaatgtagatattcaaatatggttggaaggagatatttattttaatatagataaaatgagtactgcagttggattggaagtcagaatgcctcttacagatacaagaatatttgatattgcatccagaataccatcagaatataaagtgaaaggaaaagagaataagattgcctttcgtacagctgcatcaaaaacattaccagaagagattgcttttagaaataaattaggatttattgtgccaattcgtatatggatggctgatgaccaatataataaggacatccgagataaattcaatagtgagatagcagataaattctttaacatagatgagattaatgagatttttaatgactacattagtggaaactctgataattggagaaagatttggatgatttacacattcctagtgtggtatgaaatctattttgtaaaatgt

SEQ ID NO: 17305 - DNA, 795 bp, Clostridium difficile
atgattacaaatataaacagtaaggataatgaaaagttaaagtatacaagagcactattaaaatcaaagaataggaataaagagtcaaagttcataatagaaggatacagaatagtaatgcttgcacttgaatgtatggcaaaccttgattatgtatttatcaatgaagaatttgaaaataagaaagaacatgtaaaactattagaagatttggataaaaaaaacacaaagatatacaagactactaataaaaactttaaagaattagtggatacagaaaatactcaaggaataataggtgtagtttcatttaagaaaaaaaaattaagtgaaagtataaataaaaaagataaatttgtattgattttagacagaatacaagacccaggaaatatggggactataataaggactgctgattctgctggagtagatgccataatagcactaaagggatgtgtcgatatatacaacccaaaagtaattaggtctactatgggttctatttttgatatgaatataattgatgcttcacaagatgaaactgtggacatgcttaaatcattggattttaatatagtttcaagttacttaaatacagaaaatttttatgacaaaatagattatggctcaaaagtagcattggtgataggaaacgaagcaaatggaataaatgaagaacttgtatcaaagtctgatattttggttaagatacctatatatggtaaagccgagtcgttaaatgctgcgataagctctgctatactgatgtatgaaataaaaaaatacttaatt

SEQ ID NO: 17306 - DNA, 864 bp, Clostridium difficile
atgtcaattatagtaaagaatttaacacatatatataatgaagggatgccttttgcaagtaaggcacttgatgatgtttcttttgagattaaagatagagattttgttggtcttataggtcatacaggctcaggaaaatctacattaatacaacatttaaatggattactaaagccttcctcaggagaaatatttataaatgattttaatataacagataaaaacttgaatttaactgagattagaaaaagagtaggggttgtatttcaatatccagaataccaattgtttgaagaaacgattgataaagatatagcttttggaccctctaatttaggcttagaggagtctgagatacataacagggtaaaagcatcaatggaagctgtaggacttgattatgagggatttaaagacaaatctccttttgaattatctgggggacaaaagcgtagagtagcaattgctggagttatagccatgaacccagaagttctcatattggatgaaccaactgctggtcttgaccctggtggaagagatgaaatttttaacttaataaaagacttacatgaaaaaaagaatatgactataatactatcatcacatagtatggatgatatggcaaagttagcaaaaactttaattgttatgaatcatggtagcgtagaatttatgggaactcctagagaagtatttaaatcaaatgctagtaaattaaaagatataggattagatattccacaagttttagagcttgcattgaaattgagagaaaaaggctttgacatcagtgaggatatattgactttagaagaagcaaaacaggaaatattaaaagttgtgagaggacgaggattatgt

SEQ ID NO: 17307 - DNA, 219 bp, Clostridium difficile
atggctgcccaaaaaaatgacggtgcaaaaactaaaaaaaggtttagtttgtttggatacttaaaagaaactaaacaagaattaaaaagagttacatggccgacaaaaaaggaactgtttaaaaacacaagtatagttttaactgtagttatttcatgcactatattagtatggggtatagacactatattatctggtgcactagcgttattactaaaa

SEQ ID NO: 17308 - DNA, 1128 bp, Clostridium difficile
atgcctaaagaaaatttgaaaaaacaaattgacataaggatgaagactgaatttgatggagtagtgttttacactactatgcttttagtatttgtaggaatagttatggtgtttagtgcaagttttatacaatcttcatttaaacacaatgatgcgtactattttctaaaaaagaatgtaatatatgctgtacttggatttatagttatgattattacatcaagaatagattatagtttttggaagaaaaatgctacagcaattggagctatagcagtagtattattattgttagttttgacccctttagggatagaagcaaacggagcaaaaagatggttgggaataggagctttaacatttcaacctgcagaaatcgcaaagtttgctacaataatattaactgcaaaattaattgaaaaaaattatgataaaataaaatctttgacaaaaggtgttgtaccacttctcgtagttccagggatattttttgcgttgataatacttcagccaaatttgtcaacagcaggtactgtaattctagttacttttgtaatgatatttgttgctggaatggatatgaaaattgtatttgctatgatagggagtggggctgctttatttgctgcattagtaattgctgaaccctatagacttagtcgtgttacatcatttttagacccttttcaagaccctcttggtaaggggtatcaggtaatacaaggtctatatgcactaggttcaggtggattgtttggtctaggcttaggaaagagtaaacaaaagtatttttatataccagagccacaaaatgactttatatttgctataataggagaagagttaggattgattggttgtataatagttattatgctatttgtagttttagtctacagatgtgtaagaatagctttgaagacttctaatgtatttgcttgtatggttgttataggtataggtgcacaaattggaatacaagcagctttaaatatagcagttgcgacatcatcaatgccagctacaggtgtagcactaccatttataagttatggaggaacttcactcaccatctttatgggagctgtaggaatagtgttaaacatctcaaagcatgtcaaaattaat

SEQ ID NO: 17309 - DNA, 762 bp, Clostridium difficile
atgacatattttaactataacgacaaacagtgctactataatgaaattggggatggtacaccattactttttttacatggaaatacagcctcttccaagatgtttaatgatataatcgatttttataaagatgaatataaagtaatattaattgattttgtaggtcatggaaaatctcaaatggtcgataaattttctgctgacttatggtttgatgaggctatgcaagtgatatgttttttagaagcaatgaactataaaaaagtaaacataattggtagtagtggaggagctcttgttgcattaaatgttgcacttgagagacctgatttagtgaataaggtaattgcagatagttttgaaggagaagttcctctagagtcatttgtacaaaatgtgaaaatagagcgtgaagcatcaaagcaagatgatggtgcaaaagctttttatatttataatcaaggagaaaactgggaaaaagttgtagataatgatacagaagctatttttgaacattataaaactataggaaaattttttcataagcctctagaaactatgcaaccagaggtgcttttaacaggaagtagagaagatgagtttgtatctctaatatctagtgatttttttgaaaatactttttcattacttcttgaaaagattaaaaatggtaaaatgtatttgtttgataaaggtggtcatcctgcaattttatcgaatggattagatttttcaaatgtagcaaagaaatttttagaggaa

SEQ ID NO: 17310 - DNA, 612 bp, Clostridium difficile
atgtatcttatgttaattttaataagtagtttatgtgttattgtttattcttataaaataacaagtttatatatttttaaaaattttaagataggtattttgctatttttttactttttattttctcaaattatttttggattaataataagtgataatcaatttgattataagaatttcttgaattatattcttcttcctataatatcattagtatacatttatccttttttatgtgaagagtatggttggagatcttttttgcaaagtattttatttgatagatttggcaaaaaaataggtattgtaatggtaggcacttgttggagtttatggcacttacctttacaatttacactatatagtcctcaaactccaataattggagctatagcccatttgatatatggtattggactttctatatttttaggttatgtttatatgaaaactaagaacatatggttttgctctataatgcatgttctaattaatagcttaggattaattttcaatgattctgaaataattattaattaccatagtattatacaaagattgatatttatactattattttatactccttttctatttacaaaagaatataag

SEQ ID NO: 17311 - DNA, 369 bp, Clostridium difficile
atggcaagaatagctggggtagatttacctagagaaaaaagagcggagataggcttaacttatatatatggtataggtaaagcaactgctaacgaaatattagctaaggctgagataaatccagatactagaataaaagatttatcagaagatcaagttaatgagttaagaaaagttatagatgacgatttcttagttgaaggtgacttaagaagagaaattgctttaaacataaagagattaagagatataaaatgttatagaggaataagacacgctaaaggtcttccattaagaggacaaagaactaagactaatgctagaactagaaaaggtcctagaaaaacagtatctcgtaaaaagaaaaaa

SEQ ID NO: 17312 - DNA, 339 bp, Clostridium difficile
atgatatataatataaataataaaaataaaaataaatttgaggtgaatgacattatggaagaaaatataataaatttaatagacgaaaatggcgttgaaagccaatttgaaataatattaacattagaagcagaaggaaaagagtatgcaatattaatgcctttagatgatgaagaagctgaagaagctttaatctttagaattgatgaggatgaagaaggtgaaatcttaatacctttggaaagtgatgaagagtatgaaactgttgtagctgtgtatactgctataatggaagaagaaggtttaaattacgacgaagatgaatcaaatggacttaac

SEQ ID NO: 17313 - DNA, 3552 bp, Clostridium difficile
gtgagtatgatgaacagactaaagccaagaattttaggtattagtatcctgtttattattataattattttaacatgtggagctgttttcaagtttaaatttaaattagataataaattaaaagaaaccacacatacatatttgtctgagtttacagaacacaatataattaatctcaagacaaggcttagtggtcaatttgacatgcttgaatctattgctaacttcataggaaacttgaataatataaatgatgaaatggtgattgatttaatggattctgatgtaaagcgcagttctttaattagaatgactatctctacattagatggggaatgttattctaatgatggaattacccataatgttcaagatagagattattttaaaaaagctaaaaatggagaaaagaatatatcagaacctttaaaatctattgttaataataaagaaataatagttttatctaccccagtttataaaagtgggaaaatagttggtgttttaagtggaatttatgattcaaaaaagttaaatgagttattaggattatctgcatttgatgaaaaagcagatgtttttgttgcaaagaaaaatggagatatagttgctcaaaaaacaaataaaaatagaaagacgctatcatgtatatttcagctttttgacaaagataattgtgatgaagatgattgtctaaaaactataaaagaaaatatgaaaaatgataagtctggatattttaattataacttagataatgaaaaatttatgttaaactatcagccacttggagttaatgattggtatgttttttctgttgtgccaaataaaatagtatctattcagtcagagaatatatcttatgatgtatatatttttgcattagaaatactactagttatattgatttttataatatatatagcatgtattataaataataacaccaaaattattataaatgaaaaagaaaaatttaaagtactcactgataatatattaggaggggttaaaacctgtttaaaagatgaatatatgactatgacatatgtaagtcaggggtttttagagcttacaggttactcttgtgaagatttaaataaaatatttaaaaatagatttaaagacatgatttataaagatgatttagacaagtttaattgtattattctaaatcaattagaaaaacaagataaaattgaagttgaatatagaattgtaagaaaagatggaagtataatttggattttggagagaagtaagtctataaatgataataaaggaagtgagtgtattcagggagttttaactgatataacagaacttaagaaaatacaagaagaattagattcaaaaagatttgaaatacaggctatcaatgatagtattgttggtggaatagtgataactgagataaatgatgattttgatagtatatatttaaatgaaggttatttaaatatgattggatatacacgcaaacaactggaagatgagctaaataataaattaatcaaacttatttttaaagatgatagaacagaattaattaatagtataaacaaacaactcaaattaagtgatacatttgcatctgaacaaagagttgaaaaaagggatggtactattatatggattttattaaaaggaagaaagatgatttatgataatggaaaatctgtactttgttgtgttattgtagatattacttctgctaaattattagagcaagaacttaaaaagagtgaagaacgtcatgaaatcattctaaagcagacgcaaaatattataatagaatgggatatagaaaaagataaaatgaatatatcacctaattggtataataagtttaaatatgaccctataactgaaaacgcaacaaaaaatataattaaatcagtagatatatatcatgatgatatggataagtttatttcattaattaaacttacttcaaaaggtagtgaatatgaagagtgtgaaattagacttagaactagagatactatttacgcttggtttagtataaaggcaacaactttatttgataataatggtaaaccttataaagtagtaggaagtttgactgatattgatgaatcaaaacgagaagctgaaaagttaaaagaaagggcagaaaaagaccctcttacagatttgtataataaaaaagcatcacaatcacttatagaagagtacataacattggataaaaaaagaaaaggtgctttaatgattattgatattgatgactttaaaggaataaatgataatttaggacatttatatggggatgctgtattaagtgaaattgcaaatgacctaataaatctatttagagcaactgatatagtaggaagaattggtggagatgagtttattgtatttataaaagatatttctgaaacaagagatattataaataaagcagaagaattggtaaaaacatttgaaaggtcttttttaggtaaaggacgaaattataaaatatcattaagtgtaggaattgctaagtttccacaagatggtatggactatatgacactatttagaaatgcggatatagctctttactcagccaaagggaagggtaagaattgttatacattgtatgataaaaaaattgataaagtccaatatataactaatacaagaaatgcaggagatagtgataatgtagagatgtcttttaaagaacatatcacaaattatatatttgatatactatatgaatcaagtgatatagaagtggcagtaaatttaattctaagtattgtaggtaaacactttaatgtgagtcgcatgtatatatttgaaaattcagatgataatcgagtatgtaaaaatacatttgaatggtgtaacgaaggtgtaacctcggaaattaataatcttaaaaatatttgttacaaggatttaggcaactatcttttaaattttaatgcagatgggttattttattgtaatgatattgaaaatttaggtagtgatgtgaaaaaagtacttaagccacaaggcatacgttcaatattacaatgtaaaattttagagggtaatgaatttagagggttcataggatttgatgaatgttcatataatcgtatgtggactaatgatgaagtgaacactttgacatttatatctaaaacgcttagtatgtttttattaaaaatgcgtattcagagtaagctagaagagtctttaacaattcaaaaatctgtgatggataatatggatatatgggcatatgttgttgacaggaatacctatgaattactatttatcaataaaaaaatgcttgagtcagcaccaaacactcatgtaggtgatttatgttataaagcgatatggaataatcaagataaaccttgtaaaaaatgccctatgatatatttaaaagatggtgatgatacttataaatcattcatgcataataaaaagtttgaggtacaggcaaatataactacaactactttgaaatggtttgatggtaaagatgcatgtttaatatttggaagtgaaataactagtattgaagctgaagaaaatact

SEQ ID NO: 17314 - DNA, 186 bp, Clostridium difficile
atggcaaaagtatgtagcgtatgtggtaaaggtaaggtttctggaaaccaagtatcacactcaaataaacataataaaagaacatggtcagctaacttaagaagcgtaagagcgattatagatggagctcctaagagagtaaaagtttgtactagatgtttacgttctggtaaaattgaaagagct

SEQ ID NO: 17315 - DNA, 1020 bp, Clostridium difficile
atggattacaatgacttactaaaatcagctagagagaactttaatggaacatgtaaagtatgtaaaatttgtaatggattagcttgtgctggagatgttcctggtatgggtggtaaaggaagtggttcgtctttcattgaaaatagaaaaagtctagaaaaaataaagataaatatgagagtcatacataatgtttcaaagccagatacatccatagaattatttggtagaaaaatgagttctcctatattcgctgcacctgtatcaggtactatattgaacatgggtggtaaagtttccgaaaaagaatacatagagcctgttgttagaggttgttctaattctggaatttatgctatggttggcgatactaatgtagatacttttttactggataatttagatgtattgaaggataataggggaaatggaattgtatttataaagccttggaataattcaaagataatagataaaattagattgtctgaagaagcaggtgcttttgcagttggtgtagaccttgatgcttgtggacttattaataatcaatttcaagaaaatcctttttctcctaaaacaattgatgagattagagaattggttgaatccactagattaccttttattataaaaggaattatgactgtagatgatgctttgatggctgtagagtctggtgctagtgccattattgtttcaaatcatggtggaagagtacttgattatactcctggtacttgtgaggtacttccagatatagctaagtctgtaaagggaaagataacaatacttgttgatggtggagttaggactggtgttgatgtagttaagatgcttggattgggtgctgatgctgttttgatgggaagaccttttgttactgcttcttttggcggtggtcttgatggtgtggagttttttatagagaaggttaggaatgagttatgtgagactatgattttgactggttgtcaaaatgttaaggatatagatggtagagttatatggaatttattg

SEQ ID NO: 17316 - DNA, 1272 bp, Clostridium difficile
atgattaaactaaaaaaggttctttctttagttatggtagggattctatcagtatcaattcttgcaggatgttcaaaaaaagaagattctaaaggcaaagagggtaaagaaaaattagttgtatggtctgcaccattaacagaccatgatgcagatgcatggaagccgatatttgaaaaatttgaaaaagaaaataactgtgaaattgaatttcagatagtaccatgggataactacgcagaaaaatatgcaacagcaataagtgcaggtgaaggtccagatataggatacatgtatgcagagatgtttcctcaatttatagaaatgggtgcggtagaagatttaacaccttatttagaaaaatcaggaacttcagataattatctatacttagatgatgcaaaaatgatgggtggtatttatggtttacctatagaagctgctaatccaggcgtattgtactacaataaagatatactagaaaaattaggagaaaaacctccaaaaacatgggatgattttaaaagaatctgtgaaaaagcaacaaaagatactgatggagatggaaaaatcgaccagtggggtcttgcacaaggttggggttctaaagtatttggaagcttaaactggaactggtatccgtatttatggcaagctggtggagatatatataatgatgatttaaaatcagttaaatttaataatgcagaaggcttgaaagctgcaaactttataaatgatatgaaaaagtatattccagaagatgctttatcaaaagatagtaatgaaatgattgaaagtgtatttggaccaggaaaagctgcatttactataatgctatcctctgctgctacaagtacttttgataaatcattcccggatttaaactggggatatgtaacatcattagaagataagacagttggaagttttgcttcagtagatgatttaacattaatgtcagcatgtaaaaataaagaacttggatttaaacttcttgagtatatgctaagcaaagaatcaatggaagctttccacaaagaaatacctagagctccagttgctaaaggtgaaaaataccaaggagacccaagatttgaagaaatggtgacaagagataaacatatgtatagaccattgacagttggacctcatggagtagagatatatgaatatttatggaaacaacttcaaatgatgatagctggagacataactccagaacaagcactaaatgaatctgcaaaatatgcaaatggattactagcacaa

SEQ ID NO: 17317 - DNA, 1440 bp, Clostridium difficile
atgtcaatttataaatgtagtgtttgtggatatatttatgatgaatctaagaatgataaaacatgggatgaattaagtgaagattgggaatgccctgtatgtacaaaaggtcgtagttattttggaaagataagtactgtttactatgaagaagatgaaaagatagcagaagacatagttgaagatgaatctaaattaaatactgaaaaagagggagatttaaattacttaagtacatatttaagaagagatgatgaagttgagaaacatatggatataattcacgaaatggctgttacaggaaaatctataatagaacctatgagaactaaactaccagtaatttcttgggatgatattttaattatgggtgctcaattaaatccattacctttaaatgagcatgatgaagtaaatacaacaacaataataggaaaaaaagcaaagaaacctatgattatagaaaatccagtttatatttcccacatgtcatttggagctttgtctaaagaactaaaaatagctttagcaaagggtgcagcccaaaataagacagctatgtgtagtggtgaaggaggtatattaccagaagagaaggaagcttcatacaagtatatttttgagtatgtaccaaataaatatagtgtaactgaagaaaatcttaaaaattctgatgctatagagataaaaattggtcaaggaacaaaacctggtatgggaggtcatcttcctggcgaaaaagtaactgaagaaatagcaaaagtaagaaataagcctgtaggtcaagatgtaataagtccatcttgttttgaggaaatacaatccaaagaagatttaaagaaacttgtagatgaacttagagaagtttcagaagggcgtccaataggtgttaaaatttcagcaggtcatattgaaaaagatatggaatttatagcttatgctaaacctgattttgtaactattgatggtcgtggtggagctactggagcaagtccaaagttacttaaagatgcaacttcaattccaacaatatttgctctttatcgtgctagaaaatacatagatacacatggattagatatagatttggttataacaggtggacttcgtatatctactgattttgctaaggcaattgctatgggggctgatgcagttgctattgcaagttctgctcttatggcagcggcgtgtcaacaatatcgtatatgtggttctggtaagtgtcctgtaggagtagctactcaggatgaggaattgagaaaaagattacatatagaaaatagtgctaatagagtggcaaactttttaaatgtaagtttagaagaacttaagacttttgctagaatttctggtcataaagatatacatgatttaagtgttgatgatttatatactgttaactctgaaatatcaaattatacaaacatacagcatgta

SEQ ID NO: 17318 - DNA, 1390 bp, Clostridium difficile
ggaatttataacagtaaaagaattgtacagagaaaaagaacagtacatagggaagactgtaaaagtagctggatggataagaacatctagagtatctaaaaattttggatttatagagctaaatgatggaagcttctttaaaaatatgcagatagtatttgatgagaaagtagaaaattttaaagaggtaggaaaattagcaataagctcatctatacttgtagagggagagttagtatctacagaaggggctaaacaaccagtcgaaatacatgcaaaaagcatagttgtagaaggggaatcagatagttcgtatccactacaaaagaagagacatacgcttgaatatttaagaacgatagcacatttaagaccaagaagtaatactttttcagctgtatttagagtaagatcaatagctgcctatgcaatacacaaattcttccaagaaagaaactttgtatatgcacattctccaatcataacaggtagtgactgtgaaggtgcaggagagatgtttagaataacaactatggatttaaatgatattccaaaaactgaagatggcaaaatagactatactcaagatttctttggaaaagaggctaatttaacagttagtggtcaattaaatgccgagataatggcactttcttttagaaatgtttatacttttggacctacatttagagctgaaaactcttatacaggaagacatgcttcagaattttggatgatagagccagaaatagtttttgcagaccttgaagataacatggaacttgcagaagatatgataaaatatgttataagctatgtattagaaaatgctcctgaagaaatggaattttttaatagttttatagataaaggattgttagaaaggttaaataagatagtaaactctgagtttattagaataacgtatactaaagcagtggaattattaattgaatctgggcatgaatttgagtatcctgttgagtggggatgtgaccttcaaacagagcatgaaagatatataacggagcaaatatataattgtccagtgtttgttacagattatccaaaagatataaaagctttctatatgagaatgaatgaagatggtaaaactgttagagcaatggatttactagttcctggagttggagaaatcgtaggaggttctcaaagagaagaaagagaagatgtattgttagatagaattaatgaaatgggattaagagaagaagattattggtggtatttagaacttagaaagtttggtactgctactcactctggatttggtcttggatttgaaagaataattatgtatatgacaggtatgtctaacataagagacgttatacctttcccaagaactcctaaaaatgctgaattttaa

SEQ ID NO: 17319 - DNA, 1155 bp, Clostridium difficile
atgcaaagcttaactccagctcagcatgtaatcaaaattgtaaatgaagagcttacaagtttaatgggagatgtacaaagtaaagtaatgatttcctcaaagcctcctacaattttaatgatggttggattgcaaggtgcaggtaagactactacagcaggaaaacttggaggatattttaaaaagcaaggtaaaaaacctctattagtagcttgtgatatttatagaccagcagctataaagcaacttcaagttgttggagaaaaattggatatacctgtattcaatatgggagataaagaaaatccagtaaatattgcgaaagcaggtttaaaccatgcgattaaaaatgctaatgatttagttattatagatacagctggtagacttcatatagatgaagtacttatggatgagttaaagtctattaaatcagaagttaagccacatgagatacttttggttgtagattctatgacaggtcaagatgctgtaaatgttgcagaaagcttcaatgaggcacttggtgttgatggagtagtattaactaaattggatggagatactagaggtggtgctgcactttcaataagagcagttacacaaaagcctataaaatttatggggatgggagaaaagctagatgatatagaacctttccacccagatagaatggcatcaagaatattaggtatgggagatgtcttaagtttaatagaaaaagcacaagaaaatatagacttagagaaagctaaagaattagagcaaaaaattaaaaaacaagagcttgattttgaagatttcttacaacaaatggaacaaatacaaaatatgggacctcttgacaagatacttggtatgatacctggtatgggaaatgtaaaagaccaacttggagatgtagatttgaatggcaaagaaatgaagagaacaaaagccataattcagtcaatgactacatatgagagaagaaacccaggagtattaaatgcttcaagaaagaaaagaatagctaaaggcagtggaactagtgtacaagatgtaaatagacttataaaacaacttaatgaaatgaaaaaaatgatgaagatgtttgctggttcacaaaagagtatgaagaaaaggggcggcttaggcggtttacctttttttaaa

SEQ ID NO: 17320 - DNA, 1365 bp, Clostridium difficile
atgaaagagtatatcataaataatgttgaagaaataagagaagaattaattgatttatctaagaaaatatgggaaaatccagaattagcctttgaagaaaagtatgcaagtagcattcaaaaagaatacctaaagtcaaaaggatttaaaattgaagaagtagaaaatttacctactggatttatagcaagttttggagagggtaaacctgtgattggcatacttggagaatatgatgctttaccagagctatcacaatgtgtaagtgcagaaagaaagccattggtagaaggaaaagctggacatggatgtgggcataacctgttgggtgtagcaggtgtaggagcagttgtttctataaaaaaattaatagaagaaaataaatttaatggaacaataaaatattttggttgtcctgctgaagaagaaggtggaggaaagacagttatgtgtataaatggctgttttgatgatgtagattgtgcatttacatggcatccttttgatataaatgcaccttggagaggaggaagtctggcaaacttatctgtaaaatttaaatttaaagggataacagcccatgcagctcaagctcctcataatggtagaagcgcacttgatgctgttgaaattatgaatgttggagctaattatttgagagaacatgttattgactctataagaatgcactatgttataactaatggtggtggaagacctaatgtagttcctggatttgctgaaagttggtactttattagaggtaaaaaagcaaaggatgcagaacacgttcttgatagattaataaaagtagctcaaggagcagcaatgatgacagaaactgaaatggagtataaggttacagatggaatatatgactatataccaaaccaatgtttgactgatttagtttatgacaatatggtttttgttggttgccctaaaaatactcctgaagaagaagaatttgcaaaaaagttgtgtgatactcttactagagaagaaagattaggtgtagcaacatcattacaaaatgataaatctattgtagaaagttatatacacaaggaaatagttgacggtgacaaagataaaggactagctggttctactgatgttggagatgtaagttatgtaataccagtggctcaatttgcaatggcagcttggcctgttggaattgcaagtcatacatggcagtcatgttcatcagcaggttcaaatataggattttctgctatgataaattcagctaaagtactggcttgtagtgcttatgatgtatttatggatactaaaattattgatgaagcaaaaattgaatttgataaatcattagatggacaaaaatttaaaccattggta

SEQ ID NO: 17321 - DNA, 306 bp, Clostridium difficile
atgatgcgtgttaaaaaaggtgacactgttgtagttatagcaggtaaagataaaggtaaaaaaggttcagttttaaaggtatatcctaaaactagcaaagtgttagttgaaggtgtaaatgtaataactaaacatcaaaaaccaagtgctatgaaccaacaaggtggaataataaataaagaagccccaatacacatatctaatgtaatgccatttgatcctgaaacaggaaaaggcgttagagtaagatatgaagtaaaagatgggaacaaagtaagagtatcagcaaagagcggaaaagaatta

SEQ ID NO: 17322 - DNA, 651 bp, Clostridium difficile
atgtatcaattttttttaaagggtagagacccaataagcagtttaactcattttataggtgcttgtttatctcttttagcaactataattttagtttttcaatctgttacattacaggaaacttctctcttgatgatagtatctgtatcggtatttggactttcactaattgctttatatagtgcaagttcgtattatcattttttaaaggggacaccagaacaagaattgttttttagaaaagtagaccatgcaatgatttacgtattgattgctggctcttatacaccaatatgtctgaattttatggaaaaaaaagaaggcataatatttgttacagcaatatggatagttgcatttattggtataataataaaaatattttggatggatgcacctagatggttatctaccagtatatatttacttatgggatgggcaattgtttttgatataaatgcattcaattcaattcctaaggattgccttagactattaattatggaaggtgtatcttactctataggtgcaattatttatataattaaaaagcctaatataagtcctgagtttggatttcatgaaatattccatatttttattatgataggttctttatttcactttttagcagttttattgtatgtttta

SEQ ID NO: 17323 - DNA, 1548 bp, Clostridium difficile
ttgaggaaaattaattcacaggaaaaaaacaaagatagtggattattgatgagggcactaaatgttgtagagagagcaggaaataaacttccagacccagtaaccatatttttattactatgtataattgttgtaatattgtcagcagttatatctaatttaggagtagaagaaatacatccttctacaaaagaagttgtaaaggtagtaaatctactagagaaagagcagattcaatcatatttaggtagcatagttacaaactttcagtcatttgctcctttaggattagtactggttacaatgcttggagcaggtgttgctgagaaatctggatttatggaagtgttaatgaaaaagggtataagtaaagttccacaaaaacttgtaactgtagcaatcgtatttgcaggtatgttatcacatacagcagcagatgtaggatttataatattaccaccacttgcagcacttgtgtttttaggaattggaagacatcctcttgtaggtatgtttgcagcttttgcaggtgttgcagggggatttgcagcaaatgttatgcttagtactacagatgtattgttagctggatttacaataccagcagctcaaatgatggacccatcttaccaaggcaatccagcaatgaatctttattttgcttttatatcagcgatagttttaacttttgcaggagcatttgtaactgaaaaatttatagctcctcgttttacaaaatataatgattcaacaaatgataaggatatacaggaattgagtgaacttgaaaataagggtataaaatacgctttattatcattgttagttgtagtagtagtgatagttgccttatgtataggtgacaatgcatttatgaaagatccagagactggttctatactatctagtaatgcacctttaatgaaaggtatagttcctataatcactattatatttttaactccaggattagtgtatggaaaagtaagtaagaagataaaaagtgacaaagatttagtatctatgatgggtagtagtatgagtgatatgggtggatatatagtcctagcatttatagcatcccagtttattaatttatttaatcttagtaacttaggaacaattttatcaataacaggagcaaaattactagcagagtcggggatacctagctatggattgataataggatttatattgctatctggatttatcaatttatttgtaggaagtgcttctgcaaaatgggcgattttagcacctatatttgttcccatgtttatgctactagactttaatccagcattaactcaaatagcttatcgtattggagatgcttcaacaaatccaataagtccactttttccgtattttccagttatattggcctttgccagaagatatgataaagatataggtataggtactgtcatatcgaatatgattccatactcagtggtatttacattaatagaaataataatattgttactattcatgggtattggcataccattaggacctggtggaggaatatcttacgtttta

SEQ ID NO: 17324 - DNA, 1500 bp, Clostridium difficile
atgaacttaaaacctgaagaaataagttctataattaaacagcaaataaaaaattatgagaataaagttgagttgacagatacaggtagtgttttaacagttggggatggtatagcgagtgtatatggattagaaaaagctatgtctggtgagttgctagagttcccaggtgaaatatatggtatggcacttaacttggaagaagaagtagttggagctgttatccttggagatgacagtgaaataaaagaaggcgatatagttaagagaactggaagaatagttgaagttccagttggagaagctttaataggtagagttgtaaactcactaggtcagccaatagatggaaaaggacctatagcgtacacaaaaactagaccagttgaatctgaggcacctggtataatagatagaaggtctgtttatgaaccattacaaacaggaatcaaatcaatagattcaatgataccaattggtagaggtcaaagagagttaataataggtgacagacaaactggtaaaacatctatagttattgacactatactaaatcaaaaaggaaaagatgttatctgtatatatgtagcaattggacaaaaacgttctactatagctcaattagttagctctttagaaaaaggtggagctttggattatacaatagtagtttcagcaacagcatctgaatcagcaccacttcaatatatagcaccatatgctggagcagctatgggtgaagaatttatgtacaatgggaaacatgtacttatagtgtatgatgatttaagtaaacaagctgttgcatatagagaaatgtcattgttacttagaagaccaccaggacgtgaggcatatcctggagatgtattctatttacattcaagattacttgaaagagcagctaagttatctgatgaattgggtggaggttcaatgactgccttgcctataatagaaactcaagctggtgacgtttctgcatatataccaacaaatgttatatctataacagatggtcaaatatacttacaaccagagttattctattcaggtgtaagaccagcagttgaccctggtatatcagtatcaagggttggtggttctgcgcaaattaaagcaatgaaaaaagttgcaggaacattaaaacttgcatattcacaatatagagaacttgcagcattctcacagtttggttctgacttagatgaagatactaagaagagacttgctcaaggtgaaagaatcgttgagatattaaaacaaggtgagcatcaaccaataaaagttgaaaatcaagttatgataatatatgctgttataaataatcatttagaagatattccgatagataatatagctagatttgaatcagaattgtatgcatttgtagataataattatccggaaatatcaagaaaaatattaggtggagaagacttcactcatgatttaacagatgcaataaatgaatttaaagaaaagtttgttgttgaagta

SEQ ID NO: 17325 - DNA, 753 bp, Clostridium difficile
atgtcaaatataaaaatacaaatagacaaaactgtagaatggcttataaataaggttaatgaggcaaatgcaaaaggattaattgttggtgtatctggaggaattgattcggcagtagttgctaatttaattaaaaaggcatttccagaaaactctatgggagttataatgagcataaaaagtaatcctcaagatagagaagatgcacttaaggttatagagggatgtgatatagaataccttgatttagaccttatagaaccacaaagtgctatattagacatggtagtaggaaatttaaaagataaacatttatatagagaagaatatttaaagatgacagatgcaaacttaagagcaagagtaagaatgagtacaatttatacaattgctaacaatctaggatatctggttgttggtacagacaatgctgcagaaatacacacaggatattttactaaatttggtgatggtggagttgatattttacctattgcaaatttaactaaaggagaggtgtatgaatgggcaaaagagcttggtgttcatgaagatttaataaacaaagctccttcagcaggtctttgggaaggtcaaacagatgaagatgaaatgggaactacttacaatatgatagatgctgtgttagaaggtagattggatgaagttcctaaaagagaccaagagataattgaaagacttcatagattaagtgaacacaagagaaaaacgcctgcacaacctcctaagttc

SEQ ID NO: 17326 - DNA, 1299 bp, Clostridium difficile
atggaggagatgtctatggaaaaaatagttaatgatatattgaaagaagaagtttattatgagaaattgcaaaatggattagatgtatattttatgcctaaaaggggttttatgaaaaagtatgctattttggctactaattatggttcaaatgacttagaatttgtaccaattggagaagataagaaaattagagtgaatgaaggtattgcacattttctagagcataagatgtttgagcaacctgatggaggagatgcatttgataaattttcaaaattaggagtaaatgcaaatgcatttactaattttacaatgacagcctacttattttctgctactgaaaatttttatgagagtttagaacatctaattgactatgttcaaacaccttattttacagatgaaaatgttgaaaaggaaaaaggtataatagcacaagagataaaaatgtacaatgatgaccctgattggaatgtatactttaattgcttgaaggcaatgtatgtaaattatcctgctagaattgatatagcaggtactgttgatagtatatataagataactaaggaagagctatataaatgttataatactttctataatccaggaaatatggctttatttgttgttggtgacttagatgtagaaaaagttatagatgtaactaaaaagtcaaacaattacaaagtagacagactctctaagagtatagaaagattttatccagaagaaccagaaagtgtaaaagaaaaagaggttatagaaaaattccctatatctatgcctatgttcaacataggttttaaagatagcaatgttggtttaaaagggaaagaacttttacgtaaagagattgtaactgatatacttgtagggatgttatttaaaaaaggaagtaagctttatgaagatttgtatatgcaaggtttaataaatgaaaattttggagctggattttcgtctcaagtggattatgcttttagcataatagctggagattctaaagagcctaaaaaagtaaaagaaataattcttgattatatagaaaaatcaaaaaaagaaggattatcaaaagaagagtttgagagaactaaaaagaaaaaaatagggtcatttattaagtgctttgattctataaactttataggtaatagttttatatcttatgtttttaaggatataaatctattggattatttagatattattaaagatattacttttgaggaagttgaagaaagattaaaagagcattttaaagaagagtattgtgttatttctattgtagagcctaaa

SEQ ID NO: 17327 - DNA, 1347 bp, Clostridium difficile
atgggaaaaataaattttgattatagtaaagctacagagtttttttgtcaaaacgaaatagatgtcatgcaaccatatgtagatgttgcgcacgacatgttacataataaaactggtttaggaaatacttttttaggatggatagaccttcctaaaaattatgataaagaagagtttgacagaataaaaaaatctgctgagaagataaaatcagactcagatgttcttttggtaataggtataggaggctcttatttaggttcgagagctgctatagatatggtaagtcattcttttaggaatggacttaaaaaagagcaaagaaaggctccagaagtatattttgtagggcataatataagctcaacatatattatggatttattagatataattgaaggaaaggatatttctgtaaatgtaatatctaaatcaggaactactacagaaccagctctggcttttagaatatttaaagattacttagagaaaaagtatggtaaggaagaagcaagaaagagaatttatgcaacaacagatgcaagtaaaggtgcacttagacagttagctacagaagaaggatatgagacttttgtaataccagatgatgtaggtggtcgtttttctgtattgacagcagttgggttacttcctattgctgctgctggacttgatattgatgctatgatgaaaggcgcaaatgatgctagagaagcatttcaaaatcctgacttaaaaagtaatgatagttatagatatgctgttgctagaacaattttacatagaaaaggaaaagatgtagagttattagtgaactatgaacctcaactacattatgtaagtgagtggtggaaacagctttatggagaaagtgaaggaaaagaaaataaaggtttattccctgcttctgtagatttctcaacagatttacattctatgggtcaatacatacaagatggaaaaaggcttttatttgagacagtacttaatgttgaaaactgtaagagaaatataactataagttcagaggaagtagacttagatggtttaaactatttagcaggtaagactgtagattttgtaaatcataaagcttttgaaggaactctattggctcatacagatggaaaagtacctaatttagtaataaatatacctcaactagatgagtataattttggatatttagtttatttctttgagaaggcttgtggaataagtggatatttattgggagttaatccatttgaccaaccaggagtagaagcttacaagaaaaatatgtttgctttactaggcaaaccaggttatgaaaaagaaaaggaagagctagaaaaaagacttaaa

SEQ ID NO: 17328 - DNA, 1305 bp, Clostridium difficile
ttgagttggcaagaattgtatcaaagtaaattatgtagtgctacagaagctgtaaaacagattaaaaacggtgatactgtagtatttgcacattgtgtaggtgaacctcctgcactagtagaggctatgattgaaaatgctgaacaatataaagatgttgagattaaacatatggtaagcttgggtagtggtggatatactgctaagggaatggaagctcattttagagtaaatccaatgtttgtaagtggaaatgtaagaaaggcaattgaaaatggagatggtgattttacacctgcattcttccatgaagtaccaaagttgcttagagaaaaaagattaaaatgtgatgttgttttagcacaggtaactccaccagatgaacatggatattgtagcttaggaacatcagttgattatacttatgaagccattaaaactgctagaacagtaattgttcaagtgaatgaccagtttcctagaacctatggtgaggtagtccatgtatcagagtttgactatatagtggaaaaatcacaacctttatttgaactacaacctgcaaagattggagaagtagaagaagcaattggtaaaaattgtgcttcattaattgaagatggttctactttacagttagggattggtgggataccagatgcagttatgttatttttaactgataaaaaggatttagggattcattcagaaatgatttcagatgggactttggccctttatgaaaaaggtgttataaatggtaaatataaaaattttgataaagaaaaaatgacagttaccttcttaatgggtactaaaaaattatatgactttgcaaataataaccctgcagtagaggtaaaaccagtagactatgtgaatcatccagcaattataatgaaacaacataagatggtttctataaattctgctatacaagttgatttaatgggacaggtagttgcagaggctatgggacttagacaatttagtggtgttggaggtcaagttgactttatacgtggagtgtctatgggtgaagatggaaaggcaattatagctatgccttcaataactacaaaaaaagatggtacagtaatttcaaaaatcgtatctattgtggatgaaggtgcacctataacgacatcaagaaatgatgttgattatattgtaacagaatacggtatagcagaattaaaaggaaaatctcttagagaaagagcaagaaatttaataaatatagctcatccaagtgtaagagaaagtctagcagtagaatttgaaaagagatttaaggagaaatat

SEQ ID NO: 17329 - DNA, 456 bp, Clostridium difficile
atgtcaaatggaataatatctaaatttaagaattggatagttgatgaagaagaagattacattgaagatgaatatgaaagtggcatggacgatatagttcaagaagaagaaatgaacagtggctttagtactgcaaaagcaaataaaattgtaaatttacatacaactagccaaatgaaagttgtaatagttgaacctaaggtttatgatgaagctgcaactatagcagaccatctaaaacaaagaagggcagttatagtgaatttggaaggattgactaattctgaagttcgtaaatctatatttaactttatgaatggggcagtttatgtcttagatggaagtatacaaaaggtttctaaatcaatatttatactagctcctaataatgtggatatagatgcaaatatgaaaaaagaattagaaagtaaagcattcttcccttggcaaaataaa

SEQ ID NO: 17330 - DNA, 408 bp, Clostridium difficile
atgaataaaaagaaaatattagtgccaattgatgggacagaaagaagtatgcattctttggaatttataaaaggaatatttaaaaaagatgaagttgaagtagaaataatgaatgtaaaagaactagtatttattgatggcatatccctggctgaagagataaaaaattctgaaaatttaggaagaagaatcttggataaagcagcagagataatgggagagtatgatgttaaagtacattttacttttggatatccaggagatgagataattagaaaagcaaaagaagataatgtagattttatagttatgacaaaatctactaaaaaaggtcttacaagaatgataggttcagtaacagcaagtgtagttaaacaagcaaaatgtatagtgatgattgtaccggag

SEQ ID NO: 17331 - DNA, 2217 bp, Clostridium difficile
gtgaatacaatatatgtttttagtatcaggagaattttgaaaacaaaaattaaaaaatcaagtataatcagtttagtaattgcttttagtatggtatttactgcatttacaccaatagtatcttatgctgacgaagtgactagcaatgatacaatacttaatggagaagaacaatcaaatggtcagacaccagatgtagagaaaccatcagacggtcaggtaccaggtggggagaaaccatcagacagtcaagtaccagatggggagaaaccatcagacggtcaggtaccagatggggagaaaccatcagatggtcagataccagatggggagaaaccatcagatggtcagataccagatggagagaaaccatcagatggtcagataccagatggggagaaaccatcagatggtcagatgccagatggagagaagacatcagatagtcagacgccagatgtagagaaaccatcagatggtcagatgccagatggggagaaaccattagatgagcaaactccagaagaagaaaaaccattggaagaagaaatagttatagaggaaatgagtttaaaacaagatattgataaaattcttgatatgactttatctcaaataaataaaatagtatataacttttgggaagatgaagaagatgtaaaggcagatgaacaatcagaaattaaccaagtttttacttcagaagactcatttattagcttatggtatgacaaaaaagcaaaagtaaaaaattcttgtttactaaaagaaatagatggttcagatagaccttatcatgatttaagatttgatgatattacaaagactttaacttttgactatgtaataaagggtcttgtaggagcaagctcaaaagacgacaaatatgtaatagaaggtgaagatggagagcaaactgcattttgttacaataatcatttaagaccaccaagtagtaatggaaagagtccatatttaccagcagaagattttaatggtcaagaaaaccaaaatgaagaagcagttaaatctatactatatgcaggttctgaatttgatggatttggatataagcaacaatttaatttaggtggagaagaaaatgaattgatgacttactcagctactcaaagtgcaatttggattattcttggacaaatggatgaacaagaaagacttaagcagtatcaaggttctataaacctttgtgataaacttatagaaagagcaaaaactgaagaggaaagagctgagtatcagaagaagaaagaagtagcgataaatataaaagcttatttagaagcattgttaaaagcaggtcgtgaagagttaaagccaaataatacaggaaaacctagtttgagtaatggtttaactaagattaactttgaaaaaaatgaagatggtacttatgaaacagaagctgtagccttagtaggttatagtggtgtagtaaagttaagactaccagatggagtaactgcttatgatgtagatggtaatataataggtacaggcgaagtagaaatttcaacgcaacagaaatttaaacttaagagtgttggaaaaccagatgccaaagctaatatttctgctgtatcttatgattatatttttccaaaagctattcaatattataaggcagtgcttgatttaggacaaaaagaccattcatcttcattaccatctagcaagcaaaatttattaagttatacaatagagaaaaagaatggtcaagaagttaactttaatataggtttaccaacagatgatgatgatgttgtaaatccaccagtgccaccaatagatgatgatgttgtaaatccaccggtgccaccaacagatgatacaaatggacataagccaaaaccatcaccaccaatagatgatacagtaataaatccaccagtaccaccaatggatgatacaataataaatccaccagtaccaccaacggaggatgcagtgttaaacccaccagtgccaccaatggaggatgcagtgctaaatccaccagtgccaccaacagatgatacagtgttaaatccaccagtaccaccagtaagtgatacagtggaaaaaactccagaactatcaagagatgatacaatagtaaaatcaccaaaaacaggtgatgaaactcagctaatgtcatatgtatttattagcgtcattgcaatttgtggattagcgtatcaatgtaaaataaaaagaaat

SEQ ID NO: 17332 - DNA, 1209 bp, Clostridium difficile
atgagatttattcatacatcagattggcatctagggaagtccctagaaggccattctagaattgaggaacaagcaaagttttgtgaggaatttataaaaatagtagaatcaaatgaaatagatatggttataattgctggagatgtatatgatacttctaatcccccagcacaagcagaaaaactattttatcagactgtatcaagacttgccaataatggtcagaggtgtgtattaataatttcaggaaatcatgataatccagagagactctctgcaataacacctctagcacatgaacaggggatacttatatatggttatccattaagtgctacgatagaagctaagtataaagggtttgaaataacatatgcaactcagggatgtacaaaactgaatataaatggagaaaatattgtggttgctacattaccttatccaagtgaaaaaagattaaatgaagttttttcaagtgaagatgagtttgagaaacaaaaaaattattctgaaaaggtaggagatatatttagaagtttagaagaaaattttagaagtgatactataaatatagccgtatcacatatatttgtaataggtggagagagtactgaatcagaaagacctatacaattaggtggaagttttttagttgaaagaaaagatttgccagaaaaggctcaatatactgcactaggtcatttacataaacaacaaaaagcttccgaacgtttaaatgcatactattctggttctccacttcaatatagcaaggatgaaagagcgtataccaaaggggcatacatagtggatataaaagctggtgaaaaaccaataattgaagatgtatattttaataattacaaacctatagaagtatttaaatgtaatggaatagaagaagcactagatatatgtgagcaaaatcaagatagagagatttggtcatattttgaaataaatactgatgagataatatcacagaatgaaattaaaaaaatgaaggaactattaaaagacataatagaaataaaaccaataataacatcttgttatgaacaagaaagtgtagatataaaagaaaagtctatggcagagttgtttagagagttctattcttttagtaaaggtgtagagccaaaaggagaacttatggatttatttctagatataataagtgaagaaggtgaatcagcagatgagaccaat

SEQ ID NO: 17333 - DNA, 2391 bp, Clostridium difficile
atgttagtatctttaaaatggcttagagactatgttgatatagacatagatgtaaaagagttcgctgataaaatgacaatgacaggaactaaagttgaaacaatagattattatggtgaagaaatagaaaatatattggttggaaagattttagaaataaaacaacatccaaatgctgataagttggttgtaaccaaagtagatattggagataaagttgttcaaatagttacaggagctacaaatatatcagaaggagattatattccagtagctgtaaatggttctaagttacctggaggagttgaaatcaaacagactgatttcagaggtgaattatcagatggtatgatgtgttcagcagctgaactaggtatagatgaacattacattgaggagtataaaagaggtggtatatatattttagaccacgaagattcttatgaattaggaaaagatataaaagatgttttaggattaaaagatgctttaatagattttgaattaacttcaaacagacctgattgtaaatgcatgatgggtatagctagagaagcagctgcaactataggaacaaaagtaaaatatcctgaaatcgaagtaaaagaaagtgatgaagagatagatttcaaagttgagatagataatccagatttatgtagaagatatgttgctagaatggttacagatgtaaaaatagaaccttctccatattggatgcaaagaagacttacagaagcaggagtaagacctataagtaacatagtcgatataacaaacttcgtaatgttagagcttggtcaaccacttcatgcttttgatataaatcaagtagagactggaagaatagtagtaagaaatgctaaagatggagagaaacttgtaacattagatgatgttgagagaacattagacaaagatatgctagttataacaaatggagaaaaatcacttggtttagctggtgtaatgggtggtgctaactcagaaataacttctaatacgaagactgtactttttgaaagtgccaatttcaaaccagaaaacataagaatgacagctaaaaaagttggtattaggtcagaagcatcttcaagaaatgaaaaagacttagaccctaatcttgcagagatagcagcaaatagagctgcacaacttgttgaaatgttaggagcaggaaaagttttaaaaggtgttgtagatgtatatccaaataaaccagaacctaaaaaattggtagtaaatcctcaaagaattaaccacctattaggtgtagatgtaccaatggagcagtttgtaggaattttagaatcattagagtttaaatgtaatttggtagctaatgataaattagaaatagatgtaccaagctttagaacagatatggaacaagaagctgatgtatgggaagaaatagctagaatttatggatttgagaatataccttctgtacaattagaaggaaatacgacagcaggaattaaaacttcaaaacaaaaattcatggatgctttaaaagataattcaactgctgtaggattaaatgaaatattaacatattcatttgtaagccctaagggagtagataagataagagtaccagaaggtaatgcaaagagaaattttgttaaattacttaacccattaggagaagaaacttctgtaatgagaactactttaataccaaatatgttagatgttttatcaactaatgtatctcataaaatagaagaagtatctgcatttgagtgtggacatatattcatcccacaagattcagaattacctaaggaagaaaatagaatgtgtgtaggtatgtatggtaaagatgttgacttctttacactaaaaggaactatagaaactatacttgtaaatgtcggatttaaatgttatgaaattgaacctcaagataataatactaccttccaccctggtagatgtgctaaaatagtgtataataataaatatgtaggtacattaggtgaattgcatccagatgttatagaaaactacaatctaggtcaaagagtttatgtcgctgaaatagatattgactttgtatttgataattctgatagaacaaagaattatgttccattaccaaaatatccatctacatcaagagatatagctcttattgttaaagatgatgtatttgtaaaacaaatagaagatataataaaggaaaatggtcaaggattagtagaaagctacaagttatttgatgtttacaaaggttctcaaatagaagctggatacaagtcaattgcatattcaataacttatagaagtaaagataaaactctaacagatgaagatgtagctaaggtgcatgataagatattaagtgaattaagcgaaaaattaaatgctaacttaagatcaaat

SEQ ID NO: 17334 - DNA, 582 bp, Clostridium difficile
atgattataataggaaaaatatggttttatatggtatcgataggaataataggaagcttgatttctaaaaatatgggtgaattaaataaagttatattaagtgaaacatcaaaaggtatagagtttgcaataagtctagctggtatcatggcactctggatggggataatgaatatcgcaaaagaatcaggtttaattgaaaagataggtcaaaaactaaatcctataatgagaagattatttccttctattccaaaaggtcataaagcaatgtcttatatagttatgaatattgctttaaatatgttgggtgctggaaatggtgcaacagcatttggtttaaaagcaatgagtgagcttcaaactttgaataacaagaaagatacagccactaatgatatgattatgtttatggtaatcaatatatcatctatacaaataattccatttactataatcaaattaaggatggatatgggggctcaaaatccaagtgaaataatttttacgactttatttgcaaccataatatctacagcagtagcaataataacatgtaaattttttcaaagaagatataga

SEQ ID NO: 17335 - DNA, 111 bp, Clostridium difficile
atgaaggttagaccatcagtaaaaccaatatgtgaaaaatgtaaagtaataaaaagaaaaggaaaagtaatggttatctgtgaaaatccaaagcataagcaaaagcaagga

SEQ ID NO: 17336 - DNA, 690 bp, Clostridium difficile
atgaatactaaagtgcttgttatagacgatgaaatgcatatagttgagctattaaaattcaatttggaggtgtcaaattacgaagttagttattcatatgatggatttgacggatttataaaggctaaggaaattaaaccagatttaatacttttagattggatgttaccaaatataagtggaatagaagttttgagaaaaataagaagtgataaggacttaaaaaatattcctgttataatgcttactgctaaaaatatggaaaatgacaaggttgaagggcttgaaataggtgctgatgactatataactaagccatttagtataaaagagttgttagctaggattagttctgttttaaggagatataatttgactagcttaggtgaagaaaacaatatacttactacaggtaatttaaaactagatttatcaaaacatgaagttaccaaaggctctgaaaagatagagttaactcttaaggaatttgaattgttaaaattattaattcaaaataaaggaaaagtactttcaagaaattatcttttggataaaatatgggggtatgaatactatggagaaactagaacagtagatgttcatataagatatttaagaaaaaaaatagaagatgaagataaatcggaaaaatatatagagactataagaggtgtaggatacaaaatagat

SEQ ID NO: 17337 - DNA, 198 bp, Clostridium difficile
atgaaaaacggaatagtaaaatggtttaacaatgaaaaaggatttgggttcatatctgtagagggagaagatgatgttttcgtacatttctcagctatacaaaatgatggatacaaaactttagaagaaggcgaaaaggttagctttgatataactcaaggtaatagaggacctcaagctgaaaacgtaaatagaata

SEQ ID NO: 17338 - DNA, 1839 bp, Clostridium difficile
ttgaagattagaaggtatttaattttggtaattataattctaattacaacaagtcagagttttatttcttatgggctagagcgatttgaagaaataaccatttttcacactaatgatatacatggaagatatgctgaaggtgatgaccatatacaaataggaaatctagccacattgaaaaaagaaactccaaactcaattttagtagatgcaggagattgtttgcatggacttccaatagtaaatatggatagagggaaaagtgcaattgaattaattaaatgtgctggatatgactatattactcctggaaatcatgactttaattatggaaaagatagactgtttgagttatctaaaagtgctaatttaggagagcatactttaaaatttttatcatcaaatatttttgaaaatggaaaaaaagtttttgatagtaatgatataaaagaaatagatggaataaaaataggattttttggactctcaacccaggaaacaaagagcaaaactggatttaaaaatgtggaaggattagagtttaaaaatcctatagaaagtgcaacagaacaagtaaatgaattaaaaggaaaaggtgccaatgtaatagttgcaatatgtcatattggtacaaatagtttaagtaagccaaatagtatagatatagcaaatgaggttcaaggaattgatttgattattgatggacacagccacactaagtttgaaaatggtaaacaagtgggtgatacattgattgtaagtgcaggacaatatttagaaaatattggcgagataaaactaactctggatactaatgatgtagaaaatataaaaatagaaaataaatcagttagattaattggaaaagaagaagcattaaagtataagcttgactccgctgtaagtaaaaaggttgatgaaataaaagaacaacaagaaaaaatattagataaagttataggggtaactacaaatactctagatggttcatatgaaaatgtaaggacaaaagaaactaatttgggtaatttaataagtgacattttactagataaaactaaggctgatatttctttatttaatggagggaatattcgagatacgatagaaaaaggcaatataacaagaagagatattgtagatgtatttccttttaacaatactatagttaccaaagaacttacaggagcacagattaaagatgtattggagcatggagtaaaactttacccagaaaaaagttcagcctttttgcaagtgggaggaatttcatattactttaatcctaaacaaaaagaaggcgaaaaaataacaaatattcaaaaagaaggaaagccattagatttaaataaaaagtatgtagttgcaacgaatgattatatagcatcaggtggagatgaatttccttgtttttcaaaagagccaatactaaaggaatttggaaatttagagagtgcagtcattgaatatatagagtacaaaaaagaaatatcaaaaaatgtagatggaagaattggtattaaatctaaagatgagttaataagcaagaatcatgagagtgatttgatattaagtgaaaatgaaaaaaatatcaatgataatgaagagaatctatctaataatataaaaagttctgatagtgataaaaataaaagcttagataaaacaagttctagagaaagttctaatctaggaatatctaaaagagaagctaaagaaaaatctcctaaaacaggagatttaggtttttcaaatagtataattatatttatagtttcaagtacattgatatgtttattgaattttaatcaaaaagagttaaaggataaaaagtcaaaa

SEQ ID NO: 17339 - DNA, 2226 bp, Clostridium difficile
gtgagacatttgaaaaaaactaatagtttaaaagaaattttaaactggaataatatcaagaatttaagaccttcaaagggtttaaaaaatatattagaaatttttaaaagtgacctaaaagatatacgtggcaattatgccgtacttgtaatagttttaggtcttgcttttttaccatctctgtatgcttggttcaatataaaggcatcttgggacccttatggaagcactgctaatatgcttgtagcagtaacaaatgaagataaaggaaatgaaatagcaggacaaaagattaatgtaggagaccaattaattgaacaactcaaagataacaagagtttaggttggcagtttgtagatgaaaaaactgctcttgaaggtgttaaaaaaggtacttattatgcatcacttaagattccaaaaaatttcacaaaagatttgacatctttaattacagatgatgttaaaaaaggcgaaattatctatactgttaatgaaaaaataaatgcagttgcaccaaagattacagataaaggtgcttctacaatacaactacaggttaatcagactatagtaaaaacagttagtgaaatcgttcttggtatatcaaacggagttggtgcaggaattgaacacagtcttccaaaattgacaaaagttgaaaattcccttattgaccttcaaaagagatttgaccatataaataagactgttgatttagcttctgatgctacttcaaaattatctgatacagttaaagatattaaatctgatttacctacaattaaaaaaactctgaatgatacaaaactattatcaagtgacttaaaaaaattcttagaggatacaaatgataatttagacgaactttctcctcttattaagtctgacttaaatttaatggttgacctttcatcttctgcttcttctcttacattaaatttaattgatgcagtaaatagtggcagtgaagatgtacctaagttgatagataatttatcagaaaaactttctaatttgcaatctttaaacgatactttggtggactttttaactaaattaaaccaacttacatcaaataatagattggatgatgtaatagataatcttgaagactctagcaataaaatagattcatctatatcaacattaaatgatattaaaaacaaagttatatctggacaacaaccatctataagtgctttgaataatgttttaagtctatcaaatggtattggaagaattaatttaaatattttaaataattttgactcaaaaatatcaaaacctataaataatatatttgcaaacagtataaaagtagcaaatgatataattactgttttagataaggcagaagcaaaacttccaaaggttgaagaaatacttactacttctctaaaactttcaggaaatgcacaggaaagtatatcattgataagagaaagacttcctttagcaaaaggaatgttggatgatttgattgatactttaagcaaaattagtaatggtgaagatatgaaaaaattagtcagcttgcttgaaagtgatatattgacaaagtctaatttcttaaaagaacctgttgaggtgaaaacagagaaattatatccaattgaaaattatggttctgcaatgacaccattttatagtgttctttctacatgggttggtatattacttatttcagcactattgtctacatctgtacatggaaactataaaccttatgaaatttactttggaagaggccttacttttttaagtatagctcttgtccaaggttttataataggaactggagatatattattgttaggagtaacagcaaaacatccaattttattaatagttctgcttatgtttactagtatggtatttaactttatagtgtattctttagtttctgtatttggaaatgtaggaaaagcaattgcaatagtactattagtcgttcagattggttcttctggtggtacattccctatacaagttacacctacattcttccaaagaataaaccctataatgccatttacctatgcaataggtgctacaagggaagcagttggtggtatatatgctccaaatctaactaaagatatactagttctattactatttatgattctgtctatttgtttaaatgtacttctaaaaggacctataaatagagttataaaaccatttaatgataaattcggcgatagtaatttaactggtcat

SEQ ID NO: 17340 - DNA, 825 bp, Clostridium difficile
atgagagaccataaaggattaaatgagattgcgcgtatcataagaagagatatagtttcaatgatacatagagccaaatctggacatccaggagggtcattatcagtagttgaaatacttactgcgttatactttgatgaaatgaatgtggattcttcaaatcctaaaatggaggatagagatagatttgtattatcaaaaggacatgctgcaccagcattatatgctacattggctgaaaaaggctattttgataaggaagaactgaatggattaaggaagataggaaggatgttacaaggtcatccagacatgaaaggtacgccaggtgtggaaatatctactggttctttaggtcaaggtttttcagtagcatgtggtatggctatggcatcaaagttggataatgctccgtggaatgtgtatactttgcttggtgatggtgaggttcaagaaggaattgtttgggaagctgctatgagtgctgcacattataaacttgataatttaattgcttttttagataataatggacttcaaatagatggagatatagaaagcgtaatgagtttaggttcaatagttgataaatttaaagcttttggttggaatgtaattgagatagatggacatgattttgaccaaatatttgcggctcttgatatagctaaatcaacagttaaaaaacctacaatgatagttgcaaaaactataaaaggcaaaggaatatcttttatggaaaatcaagcaggatggcatgggacagctccaagtgatgaggagctagaaaaagccttgcttgaattaggaggtgctgacaatgag

SEQ ID NO: 17341 - DNA, 1287 bp, Clostridium difficile
gtggaagatttaaatagtatatatttttttattgttatgttgtccatagccattgttatattagctgtaagatacacaataacattaaggaaatatttaaaagagtttatatacgtctcaaaaaaagtaagtaataatgaatatcatgctaggcttaacatatcagccaaaggagaacttggcgaattagctagaaattttaatcatatgataaagaatatggataaaaccttagaagaagtacagtataaacatttacagttaaggtctatattaaagagtatatctcatggaattttagctatagatgtaaatggaaatatacttctgataaatgatgaagcaaaagaaatgataaagagtgaaccaaatcaattagttgaaggtcataatattaatgttgtaataaaagaagaagaaatattaaaacaaatacttcaatttattggttctaaagataatgaaactgctaatattactactaaagatgatatcgtatataagataaaagtagacccagtttatcttcagaatactaacaacgtaataataggttcgatagtaaatatagaagatattactaaaaaagttaaacttgaaaatatgagaagtgattttgttgcaaatgtaagtcatgaacttaaaacaccacttacatctataagtggatttgttgaaacactaaagtcaaatgaaaatatagatgtgaatactagaaatagattcttagaaataatagaaagcgaatcagatagattaaaaaggttgattgatgatatattgttgttatcatttgtagaaaataaagatactcttcttatggaaaatgttgtagtatatgatgtatttaaagaggtatatgaaataactcaacattcagctagtgaaaaaaatatagaagttttatataaatgtgatgataaatcaataagtatactatccaataaagactatataaagcaagtgttcttaaacctagttgataatgctataaagtatacccaagataatgggattgtacaagttgtagtgttaaaagatgaagaaaaaatcgtaattaaagttatagacaatggtgtagggataccaaaagaagatgtagaacgcatatttgaacgattttatagggtagataaagcaagaagtagggatgtaggaggaacgggtttaggattggctataacaaagcatatagtcaaatcactaaatggatgtataaaagtaaaaagtgaacttggcattggtagcgaatttatagttacaatattacaaaaaaatttccttaaa

SEQ ID NO: 17342 - DNA, 4296 bp, Clostridium difficile
atggaaagtattaaggaatatttggataagttagaaattaataatagtggtcttggaaagcaacttaaagaagtttatataaatagagtagtttattttaaggaagataagatagtttatttttatctaacttctaaagatattgtttctcatgaacttttagataaatttaaagaagaattgatgtataaactcgattattttaaagatatgaggatgaagataagatttactggtcttgaaagaaaatccaataaagatgttataaaaaaatattggaataatatattgtatatattaaagtatctttgtccatctattgcagggtggtataaacaagtagaatttctttgtttagaagaagaattaaaaataaaacttccaaaaggtatattttatgagcgattaatgaaaaaaaatgtaacttatgtacttaaaaccgtgcttagcgaagagttgggattagatttaaatataacaatagaaaaagctgttgatgaaaaggtaaataaagaaagactcataagaatcaatgatagagaaatggaagaaaaaattagggctttagaaattggaaaagttaataactgtgaagaaaatgaagaggaaagttatgtcattaagtctgatgtagatgaaaatttaatctatggagataatgcaaatgctatgattgaaaatatagttgaattaaatgcatcttctggaacagttgcagttgttggagatatatttgatgttgacactaaagaacttaaaaacggaaaaatacttatgatagcttcaattacagattatactagctcaataagctgtaaactttttttaacagatacaaataaggatggagtacttgaaaatgttaaaaaaggagcatacttaaaaatcaagggtgacatagtttatgatacatatcaaagagaaattagtatgatgattagtgggataagaaaagaaactagaatagagagagaagataaatcagaggaaaaaagagtagaactccatgcacatacacaaatgtcttctatggatgctatttgttctgttaaaaagcttgtagagcgtgcagccaaatggggtcattctgctattgctataacagaccatggtgttgtacaaggatttccagatgctatgaatgcaggtaagtcaaataatataaaaatactttatggagtagaagggtacttggttgaagatgattctctcattatagaggatgcaaatgataaagaactttcgcagacatttgttgtatttgacatagagacaactggtttttctaatacaaatgataaaataactgagattggtgctgtaaaaatagaaaactttaagattgtagatagatttagtgagttaataaatcctgaaaaagatatttcttataagatacaggaattgacaggaataactaatgaattaattaaagacaagccaaccattgaagaagttcttcctaagtttatggaatttgttggagatagtgtattagtagcacataatgcagagtttgatactggatttatatcgcaaaaatgtagggaacaaggcttgttatataataacaaaaaagtagatacacttatgttagcaagagtaatgttgccaaacttaaaaagacatagattaaatgtcgttgcaaaagaacttggtattcctcttttaaatcaccatagagcagtggatgatgctgaagctacagcacttatatttaataagtttttgcagatgcttacagaaaaaggtgcaaaaactctaagtgatgtaaacaatatacttggaaagattgattacacaaagcttagcacaaatcatataaccttgatagcaaaaaattctataggtataaaaaatttatataaaataatttcagatgcacatgtaaatcatttttttagagcaccaagaatccttagaagtgtattaaatgaatataaagaaggattaataattggttcggcttgtgaagctggggtggtttttcaagctgtaaagaaaaacgtgtctgatgaggaaatgaaaaaaataatagatttatacgattatattgaagtaatgcctatagataataatagatttatgattgataaaggagaagtaaaggacgaagaagagttaagggagttgaataggaaactaattgatacagccaaaaaatttgacaaaattccagtagctactggggatgttcattttttagacaaacatgaagctgtcttaagaaaagttcttaaatattctcaaggttttaaagtagatgaagaagaaacttatttacattttagaacaacagatgaaatgttggaagaatttagttatcttggagaagaattggcatatgaagttgtagttgaaaatagtaatctgattgccgatatggttgaagatataaaacctataccagatgatacttatcctccaattatagagggctcagatgtggagttaagagaaatgtgttacaaaaaagccaaacgaatctatggagacccaataccagaaatagttcaaaaaagactggatagagaattaaattcaataataagcaatgggtatgcagttatgtatattatagctcaaaaactggttgcaaaatctctttcagatggatatttagttggttcaagaggctcagttggctcatcttttgcagctactatgagtgatataacagaagttaatcctcttccagcacattatatttgtgaaaacgaagactgtaaatattcattcttttatgaaataggtgaatggggctcaggtgttgatttaccagacaaggattgtccaaagtgtggaagaaaacttgctaaaaacggtcatgatattccatttgaggttttcttaggttttgaaggtgataaagaaccagatatagacttaaatttctcaggaaattatcagccaacaattcataaatacacagaagaactatttggagaggggtatgtatatagggctgggactataggtactgtagcagaaaaaacagcttttggatacgcaagaaaatatgtggaagaaaataatataagtgtaccaaatgcagaagtacttaggctttcaaatggatgtactggagtaaaaagaacctcaggacaacatcctggtggagttatggttataccagactataaagatgtatacgattttacacctatacagtatccagcaaatgatacttcttgtggtgttataactactcactttgattatcattcaataagtggtagaatacttaaacttgatatacttggacacgacggtcctaccattataaggatgcttgaagatatgactggaataaatataacagaaattcctttagatgataaagagactatgtctctatttacatctacagaagcattaggtgttacaccagaagaaataaactgtcctataggttgccttgctgtaccagagtttggaactaagtttgtacgacaaatgttacttgacacaaaacctactacatttgcagaacttgtacgtatatctggtctctctcatgggacagatgtttgggtaaataatgcacaagacttagttagagaagatatagttggattaaaagatgttatatctacacgagatgacataatgaactatttaatatttaaaggattacctcccaaaatgagctttacaataatggagagtgtaagaaaaggtaaaggtttaaaaccagaacacattgaagaaatgaaaaaaaataatgttccagaatggtatataggctcatgtaaaaagattaagtacatgttcccaaaagcacatgctgttgcttatgtaatgacatcatttagaattgcatattgtaaagttcactatccagaagcattttatgcgacttattttacgacaaaagttgaggattttgatgcagatttaattgttaaaggattagatgctataaaatcaaaaataaatgaaattgagtcactgggaaatgatgcaaccacaaaagaaaaaggtatgttgaccgttttagaagttgctcttgaaatgtatgctagaggaataaaattattaccagttgatatatataaatcagatgcaactgagtttatagttgtaggagaaaaaacattacttccaccaatggcagcaatacaaggtcttggaggaaatgcggctataaacatccaaaatgaaagaaaaaatggtgaatttatatcaaaagaagatttgagaaagagaacaaaaatatcaaaaacggtaatagaaactcttactaatcatggttcacttgagaatatgagtgagagaaatcaattgtcattgttt

SEQ ID NO: 17343 - DNA, 903 bp, Clostridium difficile
atgaatatagtggttggaactaggggtagtaatctagcgcttatacaaacagaatgggtaataaatgaattaaaaaagaagtatccagaaattagttttgagattaaaatcataaagacaaaaggagatttaattcaaaatgtttcactggataaaataggtgataaaggattgtttgtcaaagaaatagagcaacaattattagatggaaaaatagacatagcagtacatagtatgaaagatatgccttcttatttagcaaatggactaaaatttgctcatacgcctaagagagaagacccaagagatgttctaatacttagagaaggatataaaaatttagatgatttacctcatggagcagtaataggaacaggaagtaaaagaaggaagtttcaattattgaaacaaagacctgatttaaatatagtacaagttagaggtaatgtggaaactaggatacgaaaaataaaagatgaaaacatgcatggtattgtgttggcagcatcaggaataattagagctaatttgcaagataaaataagttcttatttacctgttgatgttgttattccagcacctgcccaaggagctttagctatagaaattagaagcaatgatagtgcgatagagggaatagtaaattcactgaaggatgagaatacagaaatccaaatattggctgaaagaggttttttagatggtgtaaatggaagttgtcatattccaatggcagcttattgtgaaataatccaagataaaatacatcttactggcttatatggagattcagaaggaaaaaaagtagtaatcaagtctatagatggagatatttcttctcctagagagttaggtttaaagttagctaaacttgtattgaaggagtatgagaattatgaaggg

SEQ ID NO: 17344 - DNA, 1089 bp, Clostridium difficile
ttgtatttatgttataatttgtataaatatatttatttaggaggaaacaatatgaatttaaatttaactaatactataaatttaatgaaaaaatatttggacattccaagcccagctggatatactgaaaacgcagttttagaaatcaaaaaagattttgaaaatttaggtcttgacactattcttacaaaaaaaggtgcacttatagctactcttcctggtgaagatgattcaaatcaaataacaatatctgcacatatggatacacttggagctatagtaaaagaaatatcatctgatggtactcttaaataccataaagttggtggtggatgttgggcagctatagagggagaaaactgtactgttataactagaaaaggtaaaaaaatcagaggaagtgttgtatttaagtatgcttctactcatatatatggtcaaacaaaagctgccactgaaagaaatgaagaaacaatgattattagacttgatgaaaaagtatttacaaagcaagatgtattagatttaggaataagtgttggggattttgtatgcctagaccatagatttgaggctacagaatctggttttataaaatctagatatatagataataaatcagctgtagcaatggttcttgaaatatgtagatattttaaagaaaacaatttaacacctaagcatactactaacttttatataagtaattatgaagaaattggacatggtgtttctaaatgtttacctgaaaaaacaaaagaatttgtagcaatagatatagcacctactggaccaagtcaaacatctagtgaacatggtgtaactatagttgcaaaagataatttatcattatatgattttaatttaagaaacaagcttgttgatgttgcagaagacaataatttagactacgctgtcgatgtatttactttctatggttcagatgcttcagaagctattcgttggggagaagatgttcaaatagcatgtgttggtcctggaacaaacaatagtcaccattatgaaagaacacatatagaagctattgaaaatacactaaaattacttataaattatatgcttaaagaa

SEQ ID NO: 17345 - DNA, 843 bp, Clostridium difficile
atgtgtatcaaatttacaaaaagggagattgttatgaaaaaaatattgggaatattaggattagttgcatgtttaactttggggacagttgggtgcaatagtaatgaagacaaaaaagataatggaaaacaagaaaaaacaactaaaagtagtgattcagtagagttaaatatatcggctgctgcaagtttaaaagaagcaatggcaaagattgaagaagaatataaaaaagttgattcaaatgtaaaacttacagttaactatggagcatcaggctcattacaacaacaaatagaacaaggagcaccttgtgatttatttatttcagcaggtcaaaaacaaatgaaagttttggatgaagagaagttattagtttctgatactatgaaagatttagtaaaaaatgatttagttcttatttcttctgctgacagtagtgtatcaggtatgaaagatttgactacagataaagtgaagaaaattgctgttggtgaagctgaaagtgttccagctggtaagtatgcagatgaggtgttaactaatttaaatttaaaagataagttaaaagataagctagtatttgcaaaagatgtaaaagaagttttagcatgggtgcaatcaggaaatgctgatgttggattcgtttacttcagtgatactgtcaataatgataagataaaagtagttgaaaaaacagacgaaaaaactcattcgcctattacatatccagtttcagtaattaaagctagtaaaaacgtagatgctgctaagaaatttgaagaatttttattaagtgagtcaggacaaaagatttttgaagaatttggatataaaaaagtagaa

SEQ ID NO: 17346 - DNA, 342 bp, Clostridium difficile
atggactttaataggactaaagggttgaaaaaagactctgattttagaaaagtatataaacacggcaaatcttttgcaaacaaatatttagtaatatatatacttaaaaataaatcagattatagtagagtaggtatttctgtttcaaaaaaagtaggaaaagctattactaggaatagagtaagaagattaataaaagaagcctacagattaaatattgatgaaaaaattaagcctggatatgatatagtatttatagcaagggtatctagtaaggatgctacttttaaagacatagacaagtctataaaaaatttagttaaaagaacggatatttctatt

SEQ ID NO: 17347 - DNA, 873 bp, Clostridium difficile
atgagagattatgtactaagagcgacatcaggaaatggtcaagttagagcatttgtcgcaactactagaaatacagtagaagaagctagaagattacatgaaactacaaaagtagcaacagcagcacttggaagaacattaacagccacatctataatgggattaatgatgaaaaatgatagtgataaattgactgtaataataaaaggtggaggtccaattggaactattattgccacatcagactctaagggaatggtaaaaggatatgtaggaaatccacaagtagaggttgaagactatccaaatggaaagttaaatgtagcagcagcagtaggtacagaaggtgttgtaaaagttataaaagacttaggtcttagagaaccatataatgggacttatccattggtaagtggagaaattgcagaagactttacttattattttgctgtatcagagcagactccatcagtagtagctttaggtgttcttacaaaagaagatgaagtagagtttgctggaggatttatagttcaattaatgccagatgcagaagaagagactattgctaagttagaggaaaatgtagctaaattaccttctataactaacatgttaaaagaaggaaaatcaccagaggatatattaaatattgttttggatggtttggaacctaaaatacttgatacctgtgaagttgggtttatgtgtgaatgttcaaaagaaagagtaaaaactgctttggttgcaattggtaaaaaatcattggctcaaataatagaagaagataaaaaagcagaagttggttgccagttctgtaataagaagtatatgtatagtgaagaagagttgcttgaaattttaaaggaaatg

SEQ ID NO: 17348 - DNA, 987 bp, Clostridium difficile
ttgacaagggagaggagttttatgatgttaggaataacagagcttacgtacaccgcattgattgcgtttttaatagtaattataataggaccaatatttataccaatgcttagaaaatttaaatttggtcagacagttagagatgatggaccccaaacacatctagctaaaaacggaacacctactatgggtggaattataatgattgttgcaattctaataactggacttacaagagtaaaagttagtcatgatatggcagtaggtcttatatgtattgcaggttttggttttattggctttttagatgattttataaaaataaagctaaaaagatcacttggactaaaagcatatcaaaaaataatccttcaagttgcattatctttttatgttgctttttatcagtatacatcatcatcaagtgcttcacaacttatgataccatttacagattttgtgataaatgttggaatattatatataccaataatgatgtttataatcgtagcaatagtaaatgctgtaaacttaactgatggattagatggattagcatcaggagtaacattaatagtttctgtattctttatgctatttgcaagttctattgctggaaatacagaagtcgcagttttagcagcagcaactgttggagcatgtttaggtttcttaggatttaattcatatccggctagagtgtttatgggcgacacaggttcaatggcattaggaggtgcagttgtagcattttcagttctaactaactcagtgcttataatacctataattggaggaatttattttgcggaggctctatcagttttgattcaagttggatattttaaggcaacaagaaagagattctttaagatggctccaatacaccaccactttgaacagtgtggttggccagaaacaagagttgtatttattttttggattataacagttgttttagcttggataagtataatagcagtattt

SEQ ID NO: 17349 - DNA, 636 bp, Clostridium difficile
ttgagtaatcaaagaaaagattttgatattacaaatgatatgtttcaagaaagcattcctatcacaacaaaaattattcttgaagacatgccttcaaatgatgaattaaatcatgttttttcaaaaggttgtgaacgaaaaatgaaaaagagaaaaattgtattaatcacactactattaataggtgttttgttattaggaagtatcctatataatctttttttaggaaaaacagctaatatttcaatgctaaaggaatcttggaattttgatataccaatacctaacaaagaaattgaagtatttgatactcaagatagtattaatggagatggacaaagttattttattcaaggattttctgaaaaaaatttcaaaaaagtttttaatttaaaaggtggtatagttgtaagcaaagataatattaatgaaatagaaaaatatattgataaatttaaaagagattctgttaacattaataaaagtaataaaaataaaattgaagaagattttaaaaaatataagttagaagttaaaaaagatgataagtatatatataagagaaattatgagaactacgtagttttaattataaaaaaagatgaacaaaaattatacagtttaatatggaatcag

SEQ ID NO: 17350 - DNA, 1140 bp, Clostridium difficile
gtgaataatatgaaatgtttaattaatggaaagataatattaaaaaatcaaatcttagaaaataaagtattagtatttgatgaaaaaataattgatatagctgatagtgtaccaaaagattgtgaagttatagatgctgatggaaaatatatatctccagggcttattgatattcatatacatggaaacatgggaaaagatacaatggattcgactgatgaatctattgaaacaatttcaaaatcaattatgagacatggagtaacatcttttcttccaactacaatgactatggataaagaacatgtttatgatgcacttgaagttattaaaaaagcccaaaatagaaagcttgaaggggcacaagtattaggagcacatttagaaggaccttttataaatgagaattataagggagcacaaaatgaaaaatttataataaattcaaaatacgaatttataaaagaatataaagatgttataaaagttataacttatgctccagaaaaagatattgattttgattttactagagaaataaaaagatgtacagatatagttttatctattggtcatagtaatgcaaattatgaccaagctaaagaagctataaatttaggagtaactaatgtaactcacatgttcaatgcaatgactggtttaaaccatagagacccaggcgttgttggtgcagcacttacaactaatgtgtacagtgagttaatagcagatacaatccatataaataaagatttatttcaatttatactaaataataaaggaaaagaaagactgattttaataacagattctatagaagctggtggtcttgaagatggcaattattctcttggaggtcagaaagtcatagttaaggggaatgaagctagacttgaaaatggagcattagctggaagtgtgttgtctttaaataaaatggtatttaacttcttagataatacaaaccttaaagtgaatgaagcaattaatttagcttctttaaatccagcaacatctttgggaataaatgacaaaaaaggaagcttagaaataggtaaggatgcagatatagctgtatttgatgagaatttagattgtaaaatgacactttgcttgggggaagtagtatataaaaatata

SEQ ID NO: 17351 - DNA, 1155 bp, Clostridium difficile
atgcaaaaaataacagtgcctacatgggcagagataaatctagataacttaagatttaacttaaataatattaaaaatttattagaagaagatattaagatttgtggagtaataaaagctgatgcatatggacatggtgcagtagaagttgcaaaattgctagaaaaagaaaaagtagattacttagcagtagcaagaactgctgaaggaattgaacttagacaaaatggcataacacttcctattttgaacttgggatatactccagacgaagcttttgaagattctataaaaaataaaataactatgacagtttattctttagaaacagcacaaaagataaatgaaattgcaaaatctttaggagaaaaagcctgtgttcatgttaaaatagactcagggatgactagaataggtttccaacctaatgaggagtcagtacaggaaataatagaattaaataaattagaatatatagatttagaaggtatgtttactcattttgctacagctgatgaagtaagtaaagagtacacttataaacaagctaataattataaatttatgtctgataaattagatgaggctggtgtaaaaatagctataaaacatgtatcaaacagtgcagctattatggattgccctgatttaagattaaatatggtaagagcaggaataatattatatggtcattatccatctgatgatgtatttaaagatagattagaattaagaccagccatgaaattaaaatcaaaaatcggacatataaaacaagttgaaccaggtgtaggaataagttatggactaaaatacacaactacaggtaaagaaacaatagctacagttccaataggatacgcagatggatttactagaatccaaaaaaatccaaaggttcttattaagggagaagtgtttgatgtagttggtagaatatgtatggatcaaataatggttagaattgacaaagatatagacataaaagttggagatgaggttatactatttggagaaggcgaagttacagctgagcgtatagctaaagacttaggaactataaactatgaagtgttatgtatgatatcaagaagagttgaccgtgtttatatggaaaataatgagcttgtacaaataaacagttatttgctaaaa

SEQ ID NO: 17352 - DNA, 1068 bp, Clostridium difficile
gtgtccacagaaattacaaatgttaatgcgtttgacttaagtgatataagtgaaagtgataagaacgagaaaatagaaggtgaaggtttaaaaaaagctgctgtattattaatgacattagggccagatgtctctagcgatataataaaaagtttgcctgataaacaagttcaaaaaataggtttggaaattgcaaatatttcttcaatagcttctaaagaaagaagagaaatcttaaaagagtttgtagaaataaatagagcaaaagattatgttatagaaggtgggcttgaatatgcaagagagttattaagtaatgctttgggaaatgctaaagcaaacaaattacttgaaggtatatcaataaatacaagtacaaagccttttaaacatattatcaaactagatgtaaagaagatattagaaatacttaggaatgaaagtgcacaaactatagccgttttacttgcacatatggaaccagaaaatggggcagaagttttatcatatttagactttgatttacaaaatgaagtagctattagaataagttcaatgggttcaatatctccagaagtaataaaggtaattgaaagttcattagaagataaattacattcaataagtggtgatgattttaaggattatggaggagtgtctaccttagttcaaatattgattaattctgatagaaaaacagaaaagaatatcttgggaactattgaagaacaaaacccggatttagcagctcaaattaaatctcatatatttgtctttgaagatattgtcaagttagatgatataagcatacaaaaagtgttaaaagaagtaactatgaaagatttagtatatgccttaaaaggtgtggatgatgcgatttcagatgctatatatagaaatcaatcttctagggcagcagaggcacttagagaagaaatggaaatggttggtgttataaaggttacacaggttgaggctgctcaacaaaaaatagtaaatagtgtaagaaaacttgaaagagaaggtgccataactattgtaaggaattttggtgatgactttgttgaa

SEQ ID NO: 17353 - DNA, 1029 bp, Clostridium difficile
gtggtgttaaacatggagaaagtatgtgtattaggtactggaagctggggaagtgcattagctttagggcttgcaaaaaaaggtaatgatgtgagcatgtggactcgaaaagaggaacaagctaaaaaaataaacagaactaaagaaaatacagactatttaccaggagtattatttccaaataatataactataagtactgatatagaaaaaactataaaagattgtaaggtaatagttttagcagttccatcacaggctgtaagaagtacttgccaaaaaataaaaccatttataaaagaaggacaagttattgttaatgtagctaaaggtcttgaaaaagggactgggcttagattatcacaagtctgtgaagaagaattaccacaaaatccatatgtaatactatctgggccatctcatgctgaagaagtagcaagggatattcctactaccgtagtagttgcttctaaagatttaaaaatagcacagatgatacaagatttgtttatgagccctaaacttagagtttatacgaatccagacatagttggagtagaacttggaggagcattaaaaaatattatagcatttggagctgggatatgtgacggattagggtatggtgataatgcaaaagctgcccttatgacaagaggtattagtgaaatgagcagacttggaattgctatgggagctaatatgtctacctttgcaggtctttcaggtattggagatttaatagttacttgtacaagtatgcatagtagaaatagaagagctggtatactcataggtaaagggatgagtttagaagatactttaaaagaagtaaagatggttgtagaaggcataactgctactgaagtagcacatgatgttgctgaaaaattagatatagatatgcctataactaatgctatatattctgtaataaagaaaggttcaaatcctaaagaagttggaatagaactaatgatgagaagtaaaaagcatgaaatggaagaagtagttttaggtgatgatata

SEQ ID NO: 17354 - DNA, 2055 bp, Clostridium difficile
atggaaactaaaaaaacaaagtttattacaaaagatattttcaaaacttccattatagaagcttttaaaaaattaaatcctaaatacatgatgaaaaatccagttatgtttgttgtagaaattggatttatagtaacattgatacttacaatagtacctagtttgtttggtgatgaaggcaataacttaagagcttataatgggattgtaacaataatcttatttataacagtcctttttgcaaattttgctgaagctgtagctgaaggaagaggtaaagctcaagcagatacacttaagaaaactagaaaagatacagtagcaagggttatagatacgttaggaaatgaaaaaatgataagtgcaagtgagctaaaacttggtgatattgttttagtaaatgctggagaagttattccaaatgatggagaagttatagagggtatagcttctgtggatgagtcagcaataactggagaatctgcacctgtcatgagagaatcaggtggagatttcgcatctgttacaggtggtactacagttgtaagtgactggttaaagataagaataacaacaaaaccaggagaatcgttcttagataaaatgatagctcttgtagaaggtgcttcaagacaaaaaacgccaaatgagattgctttaaatactttattagtagggttaacacttatatttatggttgttttaatatctctttatccaatggcaaactatgcaggtgtaaagattccaatttctactatgatagctcttttggtatgtttaataccaactactataggtggattgttgtcagctattggtattgcaggtatggatagagtaactagatttaatgtaattgcaatgtcaggaaaagcagtagaagcttgtggagacgttgatactatgattttggataagacaggtacgattacttatgggaatagacttgcatcagaatttatagcagttggaaatgcagattcaaaagatttaataaattattctgttatgtgttcattaaaagatgatacaccagaaggaaaatctatagttgatttaggtatgaaattaggttcaacaggtaagacaaaagaggcagaggaagctgagtttgtagaattttctgcacaaactagaatgagtggtattaacttagctgatggtagagctataagaaaaggtgcttatgatagcataataaaaagagtaaaagaatctggtggtacagtgccagaagatttagaagaaaatgtaaatcgagtagctaaactaggaggaacacctttagtagtgtgtgtagataatgagatatatggaattatctacttaaaagatacagtaaaatcagggcttgtagaaagatttgctagacttcgagagataggaataaagacaataatgtgtacaggggataatcccttgacagcagctacaattgcaagagaagctggagtagatggatttattgcagaatgtaaaccagaagataaaatagatgcaataaaaaaagaacaattagagggtaaaatagttgcaatgacaggtgatggaacaaatgatgctcctgcacttgctcaggcagatgtaggtcttgcaatgaatagtggtacaacatctgcaaaagaagcagcaaatatggtagatttagattcagacccaactaagatattggaagttgttgaaataggaaaacagcttttaataactcgtggggctttgacaacatttagtatagcaaatgatgttgcaaaatattttgcgattataccagctatatttactcttgcaatacctcaaatggagatattaaatgtaatgaaactttctacgtcatttagtgcgatattatcagctttaatatttaatgctataattatcccatgtttaatacctcttgcaatgaagggagtaaaatatagacctatgaaatcacaagctatgttaatgagaaatatgcttatatttggtcttggtggagttatagtaccatttttaggaataaaattaattgatttattgattacacctttagtaatggttcttaatttaggt

SEQ ID NO: 17355 - DNA, 612 bp, Clostridium difficile
atgtattgtggtcaacatataaaactacctaaacttggtatggttaagataagggataaacaagtacctcaaggtagaatacttaatgctactatatctaaagaaccaagtggtagatattatgtatcattatgctgtactgatgtagatattgaagcatttgaaaatactaataatcatataggtttagatttaggaattaaagaattttgtatctcaagttgtggagaatttatagaaaatcctaagtatcttaagaagtcattaaacaaacttgctaaattacaaagagaattatcgagaaaaacaatcggtagtttaaatagaaataaagcaagattaaaagttgcaagacttcaagaacatatagctaatcaaagaaaggattttctacaaaaactatctactaaattaataaaagagaatgatattatttgcatagaagatttacaagtaaagaatatgattaaaaatcataaactatctcgctcaatttctgatgtgtcatggtcagaatttattcgtcaattagaatacaaggctaattggcatggtagacaaattgtaaaggtaggtaaattctttgcaagttcacaaatatgcaataaatgt

SEQ ID NO: 17356 - DNA, 747 bp, Clostridium difficile
atgttaaaagttatagcaactggttatgatggaaaaatgggtaagattttagccgatactataagagaagataatgaattagaattggtttgtgttgcagctagaggtctggatagctatgaaggcgaccttaaaatttatgaagatatgagtactatagttgaggaagctgatgtagttatagatttttctcatcactctaatttagataatatcttatcttacgttttaaagactaaaacacctttagtaattgctactactggatataatgatgacgaaatgaacaaaatacgtgaagcggctaaagttattcctgtattccaatcatataatatgtctcttggtgtaaatgtattagtaaaattggttaaagatgcagctaaattactagaaggatttgatatagaaataatagaaaaacatcacaacagaaaagtagatgccccaagtggcacagctgttatgattgctaacgctataaaagaggttttgccaaacgttgaaaataattatggtagatatggtcgtagtgcaaaaagacaaccaaatgaagttggtattcatgctataagaggtggaaatattgttggcgaacatgatgctctatttgctggagacaatgaggttcttacaataagccatcaagctcaatctcgtggtatctttgcaagtggttctatagctgctgccaaatacttagttaagcaaaaaccaggattttataatatggacagcatgttggga

SEQ ID NO: 17357 - DNA, 1272 bp, Clostridium difficile
atggataaattattagcagtagtacaatacattttaaatatgggaccgacagtaatactaccaataacaattgtagtactaggaatgatatttagaattaagtttacaaaagctttaaagtcaggtcttacaattggtataggatttgtgggtataaacttagttgtaaacctattaacatcaacactagggccagcggctcaaggaatggttgaaagattcggacttaatttaacagtaatagatgttggttggccaacaacagcatcagcaacatgggcttcaccagttgcaccaatattaataccagtttgtttattagtaaacttactattattatacttcaataaaacaaagatattaaacgttgatatatggaattattggcactttatagtagcaggtgcagttggatatatagtaacaggaagttatgtttgggctatattctgtgcaatactaatggagttattagtactgtttattgcagaaaagacagcaaaaaatgttcaggagttttatgatttagaaggtatagcattaccaactggttcaacagcttcatttgctccacttggatatttagtaggtaaatttgttgaaaaaataccaggaataaataaaatacaagcagacccagactctatacaaaaaagatttggtatatttggagaaccaatgatgatggggattatactaggtataatacttggagcacttgcgggatatgatgtagcaggaatattcaatgtaggtatatcaatgggtgcagtaatgttacttatgcctagaatggttagaatattaatggaaggtttaattccaatttcagaatcaataagagatttcttacaagcaaaatatggagacagagaactttatataggtctggatgcagcagtagcaactggacatccagcagttatatcaacagctcttatacttgttcctataactttgttcttagcagttatactaccaggaaacaaagttttaccatttggagacttagcgacaataccattttatatggcatttatagtgtgctttagaaaaggtaatatagttcaatcagttataacaggaacaatagtaatagctatatcactttatatggctacaaactttgcagatgttcatacacaattattacaacaagcaaatatgatgccaaaaggaacaacaatggttacaagtatagatacaggtggaaacttgctaaaatggggaatattgaaattatctcaattagtttcttcatttggaatattc

SEQ ID NO: 17358 - DNA, 297 bp, Clostridium difficile
atgtataagaatataaataaaaagcaacttaaagaaatgatgaaaaatgaaaaggatgttttattattagatgtaagaactaaagatgaatttaaggaatataaaatagaaaatgctataaatatatctttacaagagttaatcaataatatagatgaaatttacgattataaagataagaaagtagtagtttattgcagaagtggtcatagaagtgttactgcatgtaatttgttagctgaagaaggttttgagcatttatataatttaaattcaggaataattgattatatgagt

SEQ ID NO: 17359 - DNA, 1458 bp, Clostridium difficile
atgtttaatgaacttaaaacaaaagaaaatgtatataaaaatttaataaatggaaaatgggtagaatctaattcgagaaagccaatagaaatttactcaccaatagataattctcttgttgggaaagtacaatctatgacaaaacatgaggtagatgaggttataaaaaacacaaaagagagtataaaagtatgggctgaaatgcctgtatacaagagagccaatatatttcataaggctgctgatttattgttagaaaatatagatgagatagctaatatactggtacttgaaatagccaaagacataaaatctgcaagggcagaagttgagagaacagcagattttttaagatacacagctgatgtgggaaaaaatatggagggagaagccattagtggagataatttccctggtggaacaagaaataagatgtcttatgtttcaagggttccattaggtactgttttagctatatctccttttaattatcctgtaaatttatcaatgtcaaagattgctccagcacttattggtggaaatgcagtcgtattaaaacctgctacacaaggggctattagcgcacttcatgtggtagaaattatgagaaaagctgggataccagatggagtacttaatactattacaggtaggggtagtgagataggggattatgttgtaacgcataaaggaattaattttattaactttactggtagtactgaagttggtcagcatatatctaaaatatctggaatggtaccattattattggagcttggtggaaaagatgcggctatagtattagaagatgcagacttagattttgcagctaagaatatagtatctggagcgtattcatattcaggacaaagatgtacggcagtaaagagaattttagtacaagagagtgtggcagataaattagtcggaaaaataaagccattggtagagaagttgacaattggaaatccaatggatgaagtagttatcactcctcttatagataataaagcaactgattttgttcaagggttggttgatgatgcattacataaaggagcaaagttaataacaggcaatgttagaaaaaataatttattctatccaacattgttagataatgtaaatgttgatatgaaaattgcttgggaagaaccatttggtccagtacttccaattataagagttaaagatataaatcaagcaattgaaattgctaatcaatcagagtatgggcttcaatcatcagtatttacaagtgatattgataaggcattttatatagctgataaacttgaagttggtactgttcaaataaataataagactgaaagaggtccagaccacttcccatttttaggtgtaaaggcatctggtatgggaactcaaggtgttaagtattcaattgaggctatgactagacctaaggcagtagtggtaaatgttagggagttg

SEQ ID NO: 17360 - DNA, 1251 bp, Clostridium difficile
gtgttggaatcgcccaataatttgattcagattatttttttaatagtattacttatagggtctgcatttttctcagcatctgaaacggccttaatgtcgttgagtaaaatcagaatcagatatatgcaagatgaaggagttaaaggagctaagttagtaagttcattaatagaaaatccaaataagcttttaagttctatattggttggaaataacgtcgtaaatatagcagcaacatccatatcaacatctttgtttataggattaatgggagaaaaaggagtggcacttgctacagctgttatgacagtattagtattaatatttggtgagattactccaaaaacaatagcagcaaataattcagaaaaggtttctctattagtatctaaacctataaaagcaattatatttatattaagaccaatagtatggatatttaatataattacaaatattatatttaaattatttggtataacaaataaaggagctaaatcattcataactgaagaagagctaaaaactatggtaaatgtaagtcatgaagaaggcgtccttgaaatggaagagagagaaatcataaataatgtttttgaatttggagatatgcaagctaaaaatgcaatggtacaaagaatagatatggtagctatagatatggaagatagttatgatgagataatacaggtatttaaaactgaaaaattaagtagaatgcctgtgtatgaagaaactatagatgatattgtaggaatacttaatataaaagatattatatttttatctgatgaagaaatagagtcatttgatattaaaaattatatgagagaaccttttttcacgtatgagttcaaaaagataacacaacttcttgaagagatgaaacttgaaaaaagtcagatggctatagttgtagatgagtatggtggaacatctggacttttaactatagaagatttagtagaagtcattgttggagatatagaggatgaatatgatgaagaagaggatgaaatacaagttataaaagaagatgagtatattgtagatggaagtactaaaattggtgatgttaatgaacttattggtgtaaacttggaatctgaggagtttgattccataggaggttttataattggacacctaagcagattgccagaagaaaatgaagtaattgaagttgataatataagattttgtatagaaagtatagaaaaaaatagaattaaaaaaataagaatatataca

SEQ ID NO: 17361 - DNA, 1362 bp, Clostridium difficile
atgttacttttaattgttacgtgtgcaatatacatatggattggtttttatttttcaaaaaaagttaaaacagcatccgatttcctaatcgcaggtagaaatctgcctttgcctatactagctgcaaccattgctgctacatcttttggaggagggtgcttagttggtggagttcaatggggagctgaaagaggactttgggttggaatgtattctactataggtgcagctttagcttgctttataaatgcatttttcgcaggaaaattaagaagcttatcttgtgatataacacctgctgattatattgaaactagatatggtcatagtgtatttttaagagcttatcaaagtcttgtaacaccaatatctatactagctattatgggtagtcaattaatttcttttggttctgtatctactgcatttggtattccttatgatatagctgtaattataggagttatagttataattatatatacttatacatcaggaatgtggggagttgcagtatcagcatttattcaacttgctatttgtatagtgtttttgccaatagtagcttatataagcttaaaattagttggcgacaaccctttacttatgttacaatcaatggtaaaagaaccattctttccaggaaataaatcgattagtgattttatgtatacagttttaccattagttttaggctcaatattttcttatgaaagttttttaagatatcaatgtgctgataatgctaaaaatgcagttaaaagtagtgtaattgcaggatttatactattatttcttgctttccctataggaataattggagctattggtggtagtttatttccaaatatatcatctgttcaggttttacctcaaatgatatcgactactttgccacctttaatatctgtattattcttagctgctatattggctgccataatgtctactgccgattcattaatgacctcaatgagtgctattatatcaagagatatttataacaaattattacatcctaatatagaatttaatgatttaaaaaatactctaaagtattctcaaattgcatcagctttgacagctataataggtgcaatcatagcacttaaatttgatagtttattagaattattgttttggccagctccattatgtacaggtgtaatatttgcaccatttgtaattggtctttgctggaaaggtgctacaaaaaaaggagctatctatgctgttatagtaagtgttatattggcattattaaatatgattggtattcttactgtatttgacagaattttggttcctataataggtggttctattacaatatttatagttagcaaattttcaaaaaaagat

SEQ ID NO: 17362 - DNA, 348 bp, Clostridium difficile
atgaatgaaatgctaagagcaattgagcaagaacaattaaaaaatgaagttcctaattttggacctggggacacagttaaagtacacgttagaattatagaaggaaaaagagaaagaatacaagtattcgaaggtgtagtattaaagagacaaggtggaggagcaagagaaactttcacagttagaaaaatgtctttcaatgttggtgtagaaagaactttcccagttcactctccaaaaatagaaaaaatagaagttactagaaaaggtaaagtaagaagagctaaactaaactacttaagaggtagagtaggtaaagctgctaagataaaagaagctagaaataaa

SEQ ID NO: 17363 - DNA, 534 bp, Clostridium difficile
gtgggtgaagcagttaaaaaagaagttgtagaatggataaaagtgattgtcatagctcttgttttggcatttgcaataactcgttttatagtgccaacaatagtcaaaggagaatcaatgtatcctacattagttgaacgtgattatttgatagttaacagaattgcgtacaaggtaggagagccaaaatacaaagatataatagtattcaaaaccgacttaacagaggaaaatggaaagaaaaaagatttagtaaaaagagttatcggggttcctggtgaccatgtaaaaatacaagactccaaggtatatgtaaatgataagttgttagatgagacttcctatatacataataatcgtactgatggagatattgatatcgtagttccagaaggaaaattatttgcaatgggagataatagagaaaaaagtttagatagtagatacgatgaggttggattggtcgacgagcataccattttaggaaaggttctagtcagattgtatccattttctaagataggaactattgac

SEQ ID NO: 17364 - DNA, 2598 bp, Clostridium difficile
atgaaaaaaatagaattacttgcaccagtaggctcttttgattcattaaaagcagcagttcaaaacggagcaaatgctgtgtatttaggtggtaaagactttagtgctagagcatctgcaaataactttgatagaaatgagctgattgaggctgttaaatactctcatataaggggagtgcaagtctttgttactgtaaatacattgataaaacagtatgaaatagaagattttgtagagtatgtaaaatttttatacgatatagatattgatgctttaatagtacaggatataggaatggcaagacttataaaaaaactattacctgactttgaactacatgcaagcactcaaatggtagcacattccttagaagatgtaaaataccttcagagtgtagggtttgatagagttgttttagcaagagaattaaatgttgatgagataaaatggatttgtgaaaatacaactgtagatatagaagtttttgtacatggagctttatgtgtatgttactcgggtcaatgccttatgagtagtatgataggcaataggtctggaaatagaggtaggtgtgcacagccatgtagacaaaagtatgagttgatagatataaatacaggagaagtagtaaaaagtaatggagattatttgttgagtcctagagatttaagtactatagaagatttggataaaataattgaagcaggtgtattatctttaaaaattgaaggtagaatgaaaaagccagagtatgtagctactgtggtttcaggatatagagaagcgattaatgaatttgtagataagaaaaaaataagtatttctgaggaaataataaataatttgtataccatatttaatagaaagtttacaaaaggatatatattaggtgaagttggtaaggatataatgaactctaatagacctaataatcaagggctatatattggaaaagttttagattataatagaaagaacaaaagacttagagtaatgctagaaaatacgcttaagaaaggtgatggaattaacttaggtggaggtactattggaagaataataaaggatggagagataactacaatagcacataaaggggatttgatagaattagattttgttggagaagcaaagagaaatcagcttatatataagacttctgacagcgaattaatggatagagtacaagctacatttcagcaagataaagagttcataaaaactaatatacgtgcaaaagtgagtattaaactaggtaaaaagccagagctttttataagtgatttttgtggaaataaatcggtggtagaaggagacaaaatagttgaaaaagctataaaggtggctttaagtaaagaaaaaatagaaacacaaattcaaaagcttggaaatacaccatataagttaaaagagatagaaattgacctggatgaaggtgtaagtatgcctataagtgtgttaaatcaaatgagaagggattgtattgagcttttagatgaagaaagaataaagataaaagatagaaaatttaagaagaatagattaaaataccagccaaatagagtaaataaacagaaaaaacttgatacagttcctaagattagagttaaagttaagaacttggagcaattagaagcagtattaaattataatgtagatttaatctattatgaagatataaatacattatcaaaagctttacaaatggtctcaagtatttctatagattcaaatatttctatagattcaagtatttctatggatttagatacttcttcgtctttaggtactcctaaagaactaatgggttcaaatacaaataacatagatactttgtcaaatacaagtaaaatagatactttgaataagaatcactataatacagcagtcactgacaaaaaattaatctattcagcaccaaggattgttagaaataaagagtacaagcaatttgagatattggataatataaaaggaattaataaggttcaaattggtaactggggctctatggaatactttaagaaaaaagacttaaatatagattgctacttaaatgcattcaatagtgaaagtataaaccacttcaaagaagagggagcaagtacagtttgtttgtcacaagaactaaacttaaatgaaattaaacaaactttaaaatatacagatgtagaaattgaagcagtaatatatggatatgctcctatgatggttacagaatactgtcctatgggagtagttgttagggattgtaaaaaggacaagagagttgctaaatgtaaggaaagtagttatgctttaagagactttacggatgcaagttataggataacacaagatatattctgtagaagtacaatttacaattcgaaggttacttgtatgttggacaatctatatgagttagaggaaattggaatagatgtatttaggatagattttacagttgaagatagtgagatggttaaaaaggttattgaagctcacattgaggtattgagtaataattataaacttggaaaaaaggctacagacttgtataagaaattagatgaaattggaacagttgcaggacactactataaaggtgtagaa

SEQ ID NO: 17365 - DNA, 366 bp, Clostridium difficile
gtgttaaaaaaggctgataaaaatgctaatagacttcaaagacataagagagttcgtagaaaaataagcggtacttctcaaagaccaagattatgtgtatttagaagtgctaacaatatatatgctcaaataatagatgacacaaaaagagtaactctagttgctgcatcttctttagaagcagaagttaagagtgctgtcaatcatacaggaaacaaggaagcagctaagaaagttggagaattagttgctaaaaaagctgttgaaaaaggaatcactgaagttgtatttgacagaggtggatacttatatcatggaagaattcaagaattagctgaaggtgctagagaagctggtcttaagttc

SEQ ID NO: 17366 - DNA, 1512 bp, Clostridium difficile
gtggggaaaaaaataatgctacaaggaacagcttcaaatgtaggtaaaagtgtcttagtagcaggtttgtgtagaatatttaagcaagatggttatactgttgctccttttaagtcacaaaatatggctttaaattcttttataactaaagaaggattagaaatgggaagagcacaagtatttcaagcagaggctgcgaaaatagagccaatagctgatatgaatccagttttattaaaaccttctggaaataataaaagtcaagttattgtaagaggtaaagttgtaggagaaatgccttcttctaagtatcatgattataaattggagttagtagatgtgttgaaggaaacatttaatagcttaaattcaaggtatgatattgtagttatggaaggggcaggaagtaatgcagagataaacttaaaagatagagatatctctaatatgggtatggcagaaatagctgatgcacctgtaataatagtcggagatattgatagaggaggcgtatttgcctcattagcaggaacaatgcttttattaaatgaagatgagaaaagaagagtaaaaggtgtaataatcaacaaatttagaggaaaaaaagagcttttacaagatggtgtaaagatgctagaagacatcataaaagtacctgttataggagtagtaccttatacagatataaaaatagaagatgaagacagtgtaactacgagatttaagaaaaaaatgaataaaagtgatatacacatagaaataattagaaccccacatatgtcaaattttacagattttaatatatttgagacacaagaagatgtaagtattagatatgtagactatggagaatctttaggaaatccagatatattaataatacctggaactaaaagtactatagatgatttaacatatataagaaaaagtggtcttgaatcgcaaatcaaaaatttacatagtcaaggtaaattgatatttgggatatgtggtggataccaaatgttaggtaaaaaattaaaagacccttatcatgttgaaagtgaaattgaagaagttgatggaataggtcttttagatacagaaacaacgtttgagaaagaaaagactacaacacaagtagaagctactattgttgaatgtatcagtgaatacatgaataaccttaagggaaaaaaagtaaaaggttatgaaattcatatgggaattacaaagcgaggtaatgatgtaagaagtttagatttaataactaaaaaacttgataaagaagtgaattatactgagggaagtgtaaataaagaggggaatgtaattgggacttatcttcatggaatatttgatgaaataagctttacaagagcaattttaaacaatataagaaagaaaaaaggtttaggagaattagaaagcaaagtaaactcttttaatgaatttaaggataaagagtatgataagttggctgattttttaagagaacatttagatatagagaaaatatatgagattatgaaa

SEQ ID NO: 17367 - DNA, 513 bp, Clostridium difficile
atggaaaggaggataattatggaaaaagcactagtaggtataacgtgggaatttgtgttccaaattgttaatacttttataatatttttacttctgagaaagcttttattcaagccagtattaaatataattgaatcaagagaaaatgatattaaaagtgatttggcagaaggcgaaaaagcaaaaaatgaaggtttagctctgaaaaaagaatatgagtcaaaaatcaattttgccaaagatgaaggtcaagaaatcataaaacaagcaactataagagcagagcagaaatcagatgatatagtaaatactgcaaagaaagatgctcttgatataaaagaaaaagcaaacaaagatatagaacaagaaagacaaaaggttataaatgaaatcaaaaatgatatatctaacatagcactacttgcagcatctaaagttattgaaaaagatttagataaatctaaacatgaagaattgatagaaaactttataaaagaggtaggggaagctaaa

SEQ ID NO: 17368 - DNA, 1116 bp, Clostridium difficile
gtgatagtagtggaaaaagcttataagtttagaatgtatccaaataaaaaacagcaagagttaattaacaaaacttttggatgttgtagatttgtatataataagtatcttgctaaaagaatagaagtttataaaaacgataaagaaacttttacttataaacagtgtagttctgatttgaccaatttaaaaaaagaattaaagtggcttaaagaacctgacaaattttcactacaaaacgccttaaaagatttagataatgcatataaaaaattctttaaagaaaaagcaggatttcctaaatttaaatcaaagaaaattaatagattttcatataaaactaactttacaaatggaaacattatgtattgtggtcaacatataaaactacctaaacttggtatggttaagataagggataaacaagtacctaaagggagaatacttaatgctactatatctaaagaaccaagtggtagatattatgtatcattatgctgtactgatgtagatattgaagcatttgaaaatactaacaatcagataggtttagatttaggaattaaagaattttgtatctcaagttgtggagaatttatagaaaatcctaagtatcttaagaagtcattaagcaaacttgctaaattacaaagagaattatcgagaaaaacaatcggtagtttaaatagaaataaagcaagattaaaagttgcaagacttcaagaacatatagctaatcaaagaaatgattttctacaaaaactatctactaaattaataaaagagaacgatattatttgcatagaagatttacaagtaaagaatatgattagaaatcgtaaactatctcgcttaatttctgatgtgtcatggtcagagtttattcgtcaattaaaatacaaggctaattggcatggtagacaaattgtaaaggtaggtaaattctttgcaagttcacaaatatgcaataaatgtgggtataaaaacgaggaagttaaggacttaaatataagagaatggatttgtcctagttgtaatgaaactcacgatagagatataaatgcaagtataaatatattaaaagaaggattaagactaataacgattcaaaataaa

SEQ ID NO: 17369 - DNA, 993 bp, Clostridium difficile
atgaaaatggcaagaatgtattatgaaaaagatgtggatttagaggttttaaaaaataaaaaggttgcagttttaggttatggaagtcaaggacatgcacatgcacaaaatcttagagataacggtgtacatgtaatgataggtctttatgacggaagtaaatcagcacaaaaagcaaaagaagatggatttgaagttaagagtgtagcagaagctacaaaagaaagtgatttgacaatgatgttaatgcctgatgaaaaacaaaagaaagtttatgaagagagtgtaaaggataacttaaaagaaggtcagacattagcttttgctcatggattcaatatacattataatcaagtacaaccaccagaatttgttgatgttgtaatggtagctcctaaaggacctggtcacttagttagaaatgtatttacaaagggaagtggagttcctgcactatttgcagtatatcaagaccacactaaaaaagctacagagacagttttagcatatgcaaaagggataggagcaacaagagcaggtgttttagaaactacttttaaagaagaaacagaaacagatttatttggagaacaatcagtactttgtggtggaataagtgaacttataaaattgggatataaaacgcttgtagatgcaggttatcaaaaagaagtagcatattttgaatgtttacatgaaatgaaactaatagtcgaccttatatatgaaggtggatttgaaagaatgagatatagtataagtgacacagcagaatatggagattatgtatctggtaaaagagtaataactgatgctgcaaaacaaggtatgcaaaatgttttagaggatatacaaaatggaaaatttgcaaaagcgtggattaaagaaaatgaagaaggacgtgaaaacttcctaaaaactagagaagaagaatataatacagaaattgctgaagttggtagaaatctaagaagtatgatgtcattcttaaaa

SEQ ID NO: 17370 - DNA, 1347 bp, Clostridium difficile
atgaccagaagttatgatagaagtaatgaacagataagacctgtaaagataactagagattatacaaagtatgcagaaggttctgttcttatagaaatgggagagacaaaggttatatgcactgcatcagtggaagaaaaagttcctccttttttaagaaatagtggtactggatggataaatgctgaatattctatgctaccaagagcaacacaacaaagaaagataagagatgcatctaggggaaaaattgatggaagaacacaagaaatacagaggttaataggaagagcaataaggtctgttgtagacttgaataaattaggagaaagaactatttgggtagattgtgatgtgattcaggcagatggtggaactagaactgcatctataacaggggcatttgtagcagttgcagaagcaatatataaattatataaagcaaagacaataaaagagatgccaataacaaattttgtatctgcaattagtgttggtattgtaaatggaatacacatgctagatttatgttatgaagaagattctaaagcacaggtagatatgaatataataatgactgataagtgtgagtttgtagaagtacaggggacaggagaagagaaacctttttcgagagcagatttaaatttattgttagagttaggtgaaaaagggaataaagaattaataaggcttcaaagagaagctttaggtgaaatatcagatgagatattgggtatggattatggtaatgaagtagtgattgctactaataatgctcataagctagaagaaataggtgaaatcttaaaagattttgaatataaagtgtactctttaaaagatgttgatttagcaggtatagagatagtagaagatggaaaaacatttgagcataatgcgttgataaaagctagaacaatagcaaaaaagactaaacttatagcaatatcagatgattctggcttagaagtagatgctttaggcaaaaaacctggtgtttattcagctagatatgcaggagaacatgcaacagatgaagaaaatagaaaaaaactgttaaaagctatgcaaaatataccaatgagcaaaagaaatgcaagattcgtctctgcaatagcagtagtttttcctgatggaaaagaatttgtagtaagaggaatttgtgaaggaatgataggatttgaagaaaaaggtaaaaatggttttggatatgatagcttatttatagtaaaaggatatgataagacttttggtgaaatacctagtgttataaaaaattcaatcagtcatagagcgaacgcactaaaacttatgaaacaagagtttataaaaagggtagtgaag

SEQ ID NO: 17371 - DNA, 849 bp, Clostridium difficile
atggaaattaataaaaaacattttattcaagtatttttaacttgcttaatcttggtagtaatatgtgaatttatagggcaaagaactatagctattggaaaagcctctatagtactgttccctatgctttatgcagttataattggacttataataacaccagatttattaggtaaaaaaattaaagcacttaaaaaagtggttggagaaaaagaaataaatattgctggtgaagttgttggaattgcactagtaatgcttggtataaaatatggtactacagttggaccaaacattgacaaaataattcaagctggaccagcgtttatcgctcaagaatttggtcatatacttgcaccaatcgttgcattacctcttgcattaatgtttggaatgaaaagagaagctgttggagctactgcaagtataagtcgtgaaccttctttaggagttatatcagaaaaatatgggataaactcaccagaaggtagtggtgtacttggtacatatttaatgggaacagttcttggtactatatactttagtgtactaggttcaatatctatttatagtggtcttcacccatatgctttgggaatggcctgtggtgttggtagtggaagtatgatgacagcagctgctggttcattatctaccatggtaccacctgaaatggcagatacaatacttgcctatgctgcaacaagcaatatgatgtctagtataacaggaattatattcttagtttttgtatccttaccatttactaattttatgtataagattttagaaccaaaattttcgagaaataaaaaaactaaagaaattaaatctacagaaggagagtgc

SEQ ID NO: 17372 - DNA, 1992 bp, Clostridium difficile
ttgagtgcacgcaaatttagctatactttccttttatcatatatagaacaaattgggagggataacatgataaaagtaagttttacaccaaacaataaagaggtttattgtaatgagggggatatattactagaggttgcaagaaatgcagatatattcatagatgctccttgtaatggaaacgtgtcttgtgggaagtgtaaagtaaaattattgaatggaaaagttgatacagaaaaaacaagacatataacagatgatgagtgggagcaaggttatatactagcttgttgtacaaaggtaatatcagatatagaaattgaagttccttctaaagtatcatcttctatgcatggtatgaagatagaaggtagtaataaaaaagaggatagggaaatttttgaaagagctaaaaaaataattgaagaacataaccttcaatttaaaacaaatataaaaaagaaatacatagaaatggaagaaccaaatttagatgataatataagtgatgtagatagattggaaagatatgttagaaataacctaggatataatgaaatagattttagattggatatacttagaaaaatgccaactgtatttagaaagagtgattttaaggttacaataacatatgttcaaaaacaaaagaaacttacaatcataaatatagaacaaggaaataaagaaaattccttatacggagttgcaatagatattggtacaacttcagtagttgtttgtttagtagacctatactcaaaagaggtagtagataaagcatcttctggaaatgcacagataaaatatggagcagatgttataaatagaattatatattcaactaagaaaaatggattagagacacttcataaagctatagttgaggaaactataaatccactattaaaaacaatatatgaaagaaatggaatagataaggaagatgtagttacattagtggctgccggaaatacaactatgacaagtttattcttgggtgtgtatacagacttcttaagacaagaaccttacataccaccatttttaaaatctccaaaacttatgggtgaaaatgttggtctttttgtaaatgacagtgcatatgtgtacttagctccatctgttgcaagttatgtaggaggagatataacagcaggtgtattatcagcagggatatggtcaagtgaagaaaatgttttatttatagatttaggaactaatggagagattgtatttggtaataaagattatatgatgagctgtgcatgttcagcaggacctgcttttgaaggtggagggataagctgtggaatgagagcatcagcaggagcaatagagaaagtaattattgataaagatactttagagccaacattaaagattattgatgaatgtgcaccagttggtatatgtggttctggtataattgatttaatctgtcaaatgattaccaaaggtgtaatagatagaagaggtaaaatatacagggatttagataataagagagttagatttaatgagcatgagataggagagtatgtattagcatttaaagaagaatttgatttagaaaatgatatagtagtcaatgaagttgatatagataatttcatcagagctaaaggagctatatattcaggcgcatacactcttgtagatagtttaggtatggattttagtatattagatagggtttatatagcaggtggtataggaaacaacctagacatagaaaactcaataattatagggttacttcctgatatcgatagagaaaaatttacttatatagggaatagttcacttgttggttcttacttagctcttataagtaaagatgcaaaaaataaacttgaagaaataggtaatcaaataacttatgttgaacttagtgtatatccaagttatatggatgaatttatttctgcatgtttcttaccacatacgaatatagagcagttcccaacagcaaagaaattactagaagag

SEQ ID NO: 17373 - DNA, 765 bp, Clostridium difficile
atggaagagttaaaagattttttagaaagacagcttaataaaaaaataaatatctatccatatgaaaaccaaaagttagatgctagtagccatttagtcactttcaataatgctatttatgttattgattttctagataaaaataatctcgataatttaaaaggcaacttttatttaatttaccaatctcatatagactttgaatatctaaaaaatattttttataatttatttgaagatataaatataatacaacacaatggtttttttatagtaaattctaaatataacttagatattaatgtcactacacagaatataattgaaactgaaacttatcaaagtacttatctctgttatcttggtgaattagatgctaaagctgattttaattttagattacagttatgttctgatttactacctcatattataaaagacaacgctgaaaataagtttttaaatttgtttgaccttattagatataaaactttagatttaattaatgaggataatatactcaataaattaatagattttaataagattaaatctattgatgaagaacttctatatacaggaataaaatttataaataatgatttaaatatttctaagacatctactagtatgtttttacatagaaacacgctagtatatagattggaaaagattaatgagatacttgggtttgatttaaagaattttgaaaatgcaatgattttttatctaagtgtcaaatcttattttctctataaaaaaatt

SEQ ID NO: 17374 - DNA, 717 bp, Clostridium difficile
atgaaaccagaaaaaactcgtcaaggtataattaaagcatttaatgcagctatagaagggatattgtatacatttaaatttgaaagaaatatgaaaatacattatttaggttcagttgctgttcttataataagtttgttttttaacttttcaaaattagaaatgataatgttacttatgtccatatgtttagttgtagttgctgaaatgtttaatacagctatagaaaaagctgttgatttagtaactgatgaatatcatgttcttgctaagatagcaaaagatgttgcagctggaggcgttctagtggcagcactaaattcagtagtagttggatatattttgttttatgataagttgacagatatatctggaatattaatttataaaataagagaatcagaattacatataaccttgatatgtatattattggttcttatagctgttgtagttgtaaaagcattgacttctacaggtactcctctaaaaggaggaatgccaagtggtcatgctgccttagcatttgctatagcaactgcaattacacttatgactgaaagagtagttgcctctactcttgcatatataatggctgtattagttgcccaaagtagaattgaaggaaaaatacataccttttgggagactattgctggagctttgttaggtgtgttgatagctatattagtatttcagcttggaatgttctataat

SEQ ID NO: 17375 - DNA, 1296 bp, Clostridium difficile
atgactaaatttaaaagggggaattataaaaatatgaaaacaacggttgaaatagaaaatgatatcatattaggaaaagactattcaaacctaaaaagaggaattgcatttttttcaattgctttaatatactttttttattgctacaattttatggtgggtacttttattaaaccaacaatgatttatgctttagcagatgggggatttggtttttcattaaaacaaacagaagaaatatttgcagttatgtcttttggtacaattccaggtacatttatttttggggtgatttctacaaaaattgggaagaagaggactttaattagcgttgctttactgattggattgacaacatttataccaatgttatctcctacaaatattatgttatggaaaatagcacgtttgtgtacaggagtagtgttgggaggcgtatttggaacagctatgcctttagttgcagatatgtttccaagtaaatatcgtggtaagttagctgctatattaactgctttattttcattagcaatgatttttggtgggaaagtatatggcgttttaggtgatgcaaattggcaaatattgatgtatactgcgattataccacctatagttggagctatcttagcaatcttctttgtgccagatgatttggagtatacaaaggaattagttaaaaagggaaaagaaactggtgaaaagattagctatataagtatgtataagggaaaatacttatggattggattgggaacgattcttttatcaggtgcaaattttacagcatattcagcattttcaaataatgcaactacatacctagtgacaggaataggaatgtcagcagcagtggctgggtctatatatagtttacaaggaattggtcaattagtaggatatttattctggggttcaattgcagataaatttggaagaaaaataccttttataggtatggcattagcagcagtatttgtttttatatatacaaaattaggtggagataatacaacaacattctatatgatatcagtattactaggtgttgctgttggatattctggagcatggggagcatactacacagagttgttcccaagtaaatatcgttcgttgtcatctggtatgtcatttaatggaggaaggattatatctacgtttgcaatacctgctatagctggtacagcttctggtactttaggtatgatgactatcttttacatatcaatcgcagtctttgtagcaggtgctattgtatggttattcttaccggagacgttaaataataaaaaa

SEQ ID NO: 17376 - DNA, 1512 bp, Clostridium difficile
atgaaaattattgaaggaataaaaaaatattcaaatacagatagaacagcactaatgtgtaatggagataaactttcttataaagatttaaatgaatattcagatgctatatcagtatttctaaaggatgtatacaaagaagaagatactcctatagtaatttatggaaataaagaaaacatgataatggcatgtatgataggagctttaaaatcaggtagagcgtatgtgcctcttgatattagttttccaattgatagagtttttgaagtcactaaagagataaaaccaaaggtattatttaactttagtgatgaaagaaattttggagatatcaatgtaattgatatggataaattaaattatataataaatgaatatcagggaaaatcattagataaagaaaactgggtaaaagatgatgaaaatgcatatatactatttacttcaggaagtacaggaaagccaaaaggggttcaaataagttcaaacaatttagatagcttttcagattggataagcccatatctaaacatagatggaagtgaaaaagtaataatgaaccaaccagcatattcttttgacctttcagttacaacaatataccctggtcttatccatggagctacattattttcaatatcaaaagatgtattagcagactataaagaactatttagacaatttagtatctcagatatagctgtatgggtgtcaactccttcttttgcaggagtatgtataactgaaaaagagtttaatagtaaaatgcttcctaaccttgagtcaatgatattcataggagaagcactttcaaaaaatcttactaaagaacttatgagtagatttccaaacacaagaattatcaatggatatggaccaaccgaggctactgttggtgtaagtgtaaatgatatgactcaaaaggctatagatgatgaaaaaagtcttccagttggataccctatgtcaaattgtaaaataaaaatacttgatgaagatggaaatgagcttaaagaaaatgaaaagggtgaaattataataattggaccatcagtttctaaaggttacttcaataataaagaaaagactgatgaagtatttttctatgatgaaatagatggtgtaaagtggagagcttataaaactggagatatgggatatcttttagatggaaatatatattattgtggaagaaaagattttcagattaaattaaatggatttagaattgaaatagaagatatagaaaataatttgagaaaagtacataatgtaaaaaatgcagtagttttaccagtatataaggacgaaaaaattgcttacttaaaaggtattgttgagttaaatgaaaagaatgatttaagtaatattaaaaatgggatgataataaaaaaggaacttggaaagtatataccttcatatatgattccaagaaatatttcaataatctctgagtttccaacaaatatcaatggtaaaatagacagaaagaaacttatggaggaaatt

SEQ ID NO: 17377 - DNA, 1266 bp, Clostridium difficile
gtgctgtcaaaattaaaacaagcttggaagattaaagcagtaagaaaaaaagtaatgtatacacttatgatgatcgtgatattcagaataggtactactataccagttccaggcatagacactagtattatacaaaagatggtaggcggcaatagtctactttctctgtataatatgtttactggtggagcatttagtaacttttcactatttgctttaggtataagtccatatatcactgcatcaatcataatacaacttctaacagtaggttttgaaagtttagcagaacttcaaaaatctggtgaagaaggaaagaaaaaaatcaataagtacactaaatatacagcactagctctagcagttgtacaagctttgggaattacattaggaattgtaagaagtgctttaatatcaaatagtgtgttttttatcacaactgttgtaataacattagtttcagcaagtatgttagtaatgtggattggggacaaaattactgaaaaaggaatcggtaatggtagttcagtaataatatttgcaggtataatatcaagaatacctacagatgttattaaaatatcgcaacaagttaaatctggcgaagttgcaccttgggttatagtgattctagctgtagttatattacttacagtaacaggagttacatttatacaagaagcaactagaaagatacctgtacaatatgctaaaagagttgttggaagaaaaatgtatggaggacaaagttctcatataccaatgaaagttaaccagtcaggagttatgcctataatttttgctagttcacttttagctttccctcaaacaatagctatgtttatgggtccaaatgctcaggcttttgttcaaaaatacttaagtatggcaacagaacaaggattttggacatatagatcaattgagattctacttataattttcttctcatatttttatacaactgtatcatttaatacagaagacatatctaaaaatatgaaaaataatggtggatttataccaggtataagaccaggtgagcctactatggattatttaaatagaattttaactagattaactttagctggagctactttcttagcaataattgctatggtgccagctcttacaacacattatatgaaagtaaatatgagtctagctgggacttcattgctaatcgttgttggagttgctttggagcttaagagacagttagagtcaaacttagttatgagaagctatcaaggtttcttaaaa

SEQ ID NO: 17378 - DNA, 2037 bp, Clostridium difficile
atgttaagtaaggagattaatatgagaagaaatacaaaattattaacaacaggaattctttcaatggcaatcgtcacacctacaatggcatttgctactgaatctaatgctatggaaaataacgctgatttaaatataaacttagagaaaaaaagtatcgttttaggtagtacctcaaaagtcagtgttaagtttaaagaaaaaccagatgcagatagcattacattaaagtataaatgctatgatatgccattggatacaactttaaactacaatcaatcaactgagtcatatgaaggaactatcaattataataaagacccagaatatctaaatgtttgggaactacaagggataacaataaacagcaaaaataatcctaaaactttaaacaaacaagaactagaaaagatgggattaaatttaaaagactataatgtaacacaggaatgtataattgaagatataacttctagaaaagatgtaaataaatatttaagaaaaacttctgcacctattacagaacttacaggaagtgatagatacgaaacagcagttaaaataagtaaagaaggctggaaaaatggttcagataaggtagttataataaatggggatgtaagtatagatggcattatatcaactccactagcaactacatataatgctccaatacttttggttgaaaaaaacaatgtacctaatagtgtaaaatcagaattaaagcgtttaaatcctagagatgtaattataattggagatgagaatgctatttctaaaactactgctaatcaaattaaatcgactgtaaatgctagtcaaacacgtctaaagggctctaatagatatgagacatctttattgatagcaaaggaaatagataaaaatcatgatgtggaaaaagtatacataacaaatgctaatggcggagaagtggatgcacttactatagcagcaaaagcaggtcaagacaagcaaccaattatattaactgataaaaatagtattacagacaatacatataaatggttaaagagtgaggatttacaaaatgcttattttataggtggccctcaaatgatatcaacaaatgttataaataaggtaaatgatataactaaagataatgttactaataatagagtatatggagcagatagacacgaaacaaatgcaaacgtaataaaaaaattctatacagatgatgagttagaggctgttttagtagctaaatcagatgtacttgttgatgctttagcagcaggtccattggctgcgaacttaaaatctccaatacttataacaccaaagacatatgtatctgcataccataaagaaaacttagaagctaaatcggcaaataaggtatataaaataggtggaggattgacttctaaggtaatgagctctatagcatcatcattatctaaacacaatacgactccaacagaaccaggaaatagtgggggcaagacagttatgattgacccaggacatggtggttcggacactggaacaacaggtaaaccattagggggtattagagaaaaagactatacattaaatacttcacttgcgacaactgaatatttacgttcaaagggattcaatgtaataatgacaagagacacagataagactttatctcttggaaatagaactgctttatctaactctttgagaccagatttatttacgagtatacactataatgcatctgatacaactgggaatggtgtagaagtattttataagcttaaagataaagatggaggaactactaagactgtagctacaaatatattaaatagaattttagagaaatttaatctaaaaaatagaggtgcaaaaacaagaacactatcaactgaccctacaaaagattatttatatgttttaagaaataatgatatgccagctgtacttgtagaatgtgcatttttggataatgagaaagatatgagtttacttaatacatcaaataaagtaaaagaaatgggtacacaaataggtaaaggcatagaagattcattaaaa

SEQ ID NO: 17379 - DNA, 1842 bp, Clostridium difficile
atgcaaaagagaattttaagaaattttatatttacgggtaaaaatattttaagtaaacttgtttttataataaaatataattttagtacattaattttatttgaattatttcataaaggattagccttattttttatatggccatctattagatatatatttgatattttaataaaaagtttacatatagtctacctaaatatggataattttataaaagttttgaccaatcccatgtcaatagttctgataatactatcagttataatactagctttttatgcattttttgaatttacctctgtaattatttgtttaaataaatcgataaaatatgaaaaaatagggttatttgaactctttaaaatatcatttgagaactctataaaattgttatatcctaaaaatatactattatttatatttgtgatattaataattccattagtaaatacagttttaatttcagggtttataggaaaaatacaaataccagagtacatattagattatataaagtctgatataattttaaatataatctatatgatttttcttttaataatatatatttcggttattagatggatttttagcattcatgagataactttaaatacagaaaattttaaaagagcaagaaaagaaagtgttaatcttataaagggaaagattataagaacaattatttattcattaatattatctttagtagtagctattattggatatgcgatttatcatagtggaattatatttataggcatatggactaaatattgtactgatatggaatttttgaagaatgtatttataaatagatgtattgcatttgaagaatattttagattgattttatcaatattcatttttatattggacattggatttatctcagcaacttattatcaatataaaggagtaaatatttctaaaaataatattaaaaaagagaaaaaatctatatcaaaaattgtttttaatttagtattaatattattgatttcttatatagagtcagttgcattttcttcacatataaatggtatgtttaatacgtcattttcattttatacaacagcaattgctcatagagcaggagctgaaatggctccagagaatactttggcagcaatagaagaagcttcaaatgctaaagctgattatgcagaaatagatgttcaagaaactaaagatggagaacttattgtacttcatgattcaaactttaagagaactacaggagtagataaaaatgtttgggatgtaaattataatgaagtaaagacatatgatgcgggaagcttttattattatggaaaaggttattatgatgaaaagtttgttggggaaaagataccaacactcaaagaaatgataaaatattctaaaggtaaggtgaaattattaatagaaataaaacttaatggacatgaaaagggagacgtagtaaaaaaagttgttcagttaattaaagaaaataattttgaaaatcaatgtatagttgcatctatggataaaactatattacaaaaagtaaaaaaactggatgagaatttattgacatgctattttatggcaattgcatatggtgatttttcaaagttaaattatgttgatatatatggaattgaatcaacttttgttaataaaacagtagtagaaaagattcataaaatgaacaaaaaaatcttcgtttggactgttaatagtgacagtttaattgagaaaatgcttgacctaaatgtagatagtattattacagataatccataccttatagagagtgcaatttattggaagaaaaatggatttattagtcaagtgtcagattatttattt

SEQ ID NO: 17380 - DNA, 831 bp, Clostridium difficile
ttggaggttgatatgtacaaattaatcgcactagacattgatggaacaatattaaatacacaaaaaaggattactcctgaagtctttgagtccattcaggaggcaaaaagggctggggcaaaagtagttataacaacaggcagacctcttcctggtgtaaaagaacttctaaatcaactaaatttaacagatgaaggtgattatgttatatgctttaatggagcaattattcaagaagttaaaagtgagaaaatcatacatgatgtagaaatgagtttagatgattttgattttatatataataacgtttgtaaaaaatataagactaaaatacacataaatacaatgacaaatttaattacaccaaatgaaacgcctggcaaatatacacttcatgaagcgaaattaaataatatagaagtcaaatatatacaaaaagataaaattgatgaatctattaaaatctgtaaaattatgatagttgatgaaccagaaagattggaagaaatcatacagcaactacctaaaaatttattcaataaatatactatagtaaggtctgctcctttttatctagaatttttaggtaaaactactaataaaggaactgctcttaaaacattatgtacgaatctaaatatacctatagaaaatgctattgctgttggcgatgaagaaaatgaccaacatatgataaagtatgcaggtcttggtgtggctatggggaatgcacgtaatagtataaaggaaattgcagattatgttactgatactaataatgaaaatggagttgcaaaggttataaataaatatatacttaataaggctatc

SEQ ID NO: 17381 - DNA, 1179 bp, Clostridium difficile
atgataaatagactaaaaaataataccaaaataaaaataatatcatttttaagtgcaattgcattatggatgtatgttatggctgtagttgaccctgaagaaactaaagggtttgaagatatacctgtatctataagtaatatgagtgatttaaaggataaaaatcttgttatatatccagacgaaaaattaacagcagatgtatatataaaaggtagtttatcaaaggtacaaagtgttaaaaaagaagatatacatgtatatggaaccattgaagacccaatacaaggacagaaggaagtatatttaaaagcaaatattcctcaaggtgttactctagaatttaagcatgatgttttagtagtaaatcttgaaaaaaacataaaagaaaaaagagatataaaggtagaagtaagtggaaattcaaaaagaaatataaataaaattgaacttagtaaggaatttgtcgatgtatcaggtccaagaactctagttaaagaagtcaaaagtgtaagagctaatctagatgttggtaatgagacagatgatttttctaaaaaattgcaattaataccattaaatagtgatggaactaaggttgaaggagtaacattaagttcatcctttgtgactgcaaagatagagctattgaaggaaaaaattgtcccaataagagtaagtctaaatgataataaagataatgatgtactgaaaaactataaattaagtaaggaacaagttacaataaaaggaaagaaagaagatatagacaaaataagttatattaagacaaaacctattgacttagctgatttggctaatggtgaagaaaaagaagttagcttagaaattccagagggtataactcttgaggatagctctataacaattaaattaaatgatacaaaacaattgagtgcagaatttttatataatgcgggagatattgaattaagaaatatcccaacaaatatggataatccaaatgtaatttctgatgtagatataaaagttgttgtagagtcaacggaggatttgagtaagttaaataaaaaagatatttcattatatattgatttatcacaaggccctgaggaagatagtaaatataaaataaaatatgaaacaacatatcaatttaaaaaaataaatatagaacctaatattgttgaagtggaa

SEQ ID NO: 17382 - DNA, 969 bp, Clostridium difficile
ttgaaaaaagaagagagtttattaaaagtagaaggtcttaaaaagtactttgaagttaaatctggattatttgataaggaaattaaatgtgtaaaggcagtagatggaatttcttttgatttaaaaaaaggagaaactttggctatagttggagaatcgggatgtggaaaatcaactgcaggaagaaccattcttagattaattgaaaaaactgaaggtaaagttgaatttaatggtgtagatatatataagttagagaaggaagaacttagaaagttaagacccaaaatgcaaatgatatttcaagacccatatagttcattaaatccaagattaaatgtggaacaaataatatccgaggcagttatagaacataatttagtgccaaagaatgaaataaaagataatatattaaatgttgtagaaagttgtggtctttctaagtaccatttaaatagaaaaccaggtgagttttctggaggtcaaagacagagaataggtatagcaagagcattagcattaaatccagaatttatagtttgtgatgaacctgtttctgcactagatgtttctattcaatctcaaattataaatttacttatggatttacaggataaatataaactttcatatttatttatatctcatgatttgagtgtagtaaatcatattgcacatagagtttgtgttatgtatctaggttctataatagaaattgcaactaaaggagaactttacttacattctcaacatccatatacaaaagcgcttatgagcgcagtaccaatacaagaccctacaattaagaaaaatagaattatattaaaaggagacataccatctccaacaaatccaccaagtggatgtaagtttcatacaagatgcccttattgtaaggaaatatgcaaaaaagagattccagttttaaaagaaatatcaagaaatcattttgttgcatgtcatctagta

SEQ ID NO: 17383 - DNA, 159 bp, Clostridium difficile
gtgcgttgtgcttgtgggaacacatttgttgctggttcaactaaggacgaaataaaagttgaaatatgttcagagtgccatccattctatacaggaaaacaaaagaacatagaaaaaggtggaagaatcgacaaattcaagaaaagattcaaaatggac

SEQ ID NO: 17384 - DNA, 867 bp, Clostridium difficile
atggataacaatttgattaccattgaaaaaactttagattatatagaaaaacatcttttagatgagatgttagatttaaatgtaatttctaaagagataggctattcaaaataccatttacatagaatgtttacatcagttgtcggatttagtgtacataattatatacaaagacgtagacttactgaagcagcgagaatgctaatttttacagaaaaaccaattattgagattgctttaatctcggggtatgatacacaacgctctttttcaagagggtttaaaaaaatgtttaaacgtagtcctaatttttttagaagacatcaagattttttaccactacaattaaaatttgatattcataatagaaaaaaattacgtggagatatggttttagatgttaaaaaagttaattgtgcagatataaatattgttggctattctggtaaagtaagaaaaggatttcatattattggaaaatgctggagggatttgcataaaaataaagagatgatagaaaataaggtagatttaggttttttaattggagttagtgattatagcaattttaaagagattgagaatactcctacatttacatacattgcaggtgctcaagtagctacttttggcaaattacctaatggaatggaaaaattcgtattaccgaaaagtaattatattgtttttacttttattgggaaaaatgaggatagtatgcaaaatgttgtagaatatatctatcaagaatggttccctaattcaagttgccagtttaatgaaaataatttatatgactttgtaaaatatggagaaaaaactgatgagaatggtttgagtgaaattcagttttgggttccaatcatt

SEQ ID NO: 17385 - DNA, 2064 bp, Clostridium difficile
atgaaaaattatcttttatttgaaatcggtgttgaagaaatgccatcaagatttgtaggcagtacactagaacaattaaaaaacaatcttagtaaattatttgatgaaaatagaatagcttttgataaaataaatgcgtatgggacaccaagaagacttactttagtagtcgaaggattgagtgatagacaaaatgatttagaagaggaaataaagggtcctgctaagaaaattgctgttgatgcagaaaataatttaacaaaaccagcattaggatttataaaaagcaaaggattaagcgaatctgacatatattttaaacaagttggaaaagaagaatatatatttgcgactataaagcaagatggaaaagaaacttcagaagtactaaaagacatattaccagagactataaaatctgtagtattcccaaaagctatgcgttggggaggaaaaaatcttaaatttgcaagacctataagatggatagttgcattgttaaatgataaagtattagagtttgatttagaaggaataatatcttctaatgtaacaaaaggtcatagatttttaggtgaaagtacaatagaagttgattctatagaagattattttgaaaaattagaaaaaaattatatagttttagaccaaaacaagagaaaagaaatgataagaaaacaatgtatagaagtggcaaattctttaggtggagaagttgaatttgatgaagatttacttgaagaggtaacttacttagttgaatatccaactgctttttatggagaatttgatgtggattatataaaactaccaaaagaagttgttataactcctatgaaacaacatcaaagatattttccagtacttaaagaaggaaaactgttacctaactttatagctgttagaaatggtgattcttacagaatagacaatgttaaagctggaaatgaaaaagttttagaagcaagacttgcagatgctttatttttctatagagaagatactaagagaaacttagaaagctacatagaaaaattaaaaactgttgtattccaagtaaaactaggaactatttacgacaaaactttaagacttgaaaaattaagtgctgatatacttgatagtttaggtttagtagatgaaaagacagatactataagggctgctaaattatctaaggcagatttagttactggaatggtaggagaatttgatgaattacaaggttttatgggaaaagaatacgcaaaagttggaggagaaaatgatgttgtaagtgaagctatttttgaacattatcttccaagatttgcaggagatatacttcctaagactaatgcaggagttgccttatcaatagctgataagttggattcaatagcaggtttctttgctataggaatacaaccaacaggttctcaagacccatatgctttaagaagacaagctttaggtatacttagtatacttatggacagaaaagttgctgtggatataaaagtacttattgaacatgctttagacaattattctgaattagattttgataaagaagaagttgttgagcaaataatgaatttcttcaatgagagagtaaaaaatctatttaaagatttaggaataagatatgatgttgttgatgctgttttaagttctgatataaatgatgtttctgatatgcatatgagagctttagagcttaataattggctagaaaaagatgaattagtggagatgcttactgcatttaatagagtttctactctagctcaaaaagcagaaagtgataaaattgatgaatctttattaaaagaagatgctgaaattaaactttacaatgaatttaaacaagtaaagataaaagttaatgaattattaaaggataagaaatatggtattgctttagatgaatttgcatctttaagaccagtagttgataatttatttgatacagttatggttatggataatgatgaagctattaagaacaatagacttgctttacttaaacaagtatatgatactatgctagaaatttgtgatttatctaaaattgtttataaa

SEQ ID NO: 17386 - DNA, 711 bp, Clostridium difficile
gtgataataatgggttctattaaagataatttgtctgagataagaaacaaaattgataaagctgcaaaaaaagtagatagagacagcaaagagattacccttttggcagtcacaaagactgttgatgtagacttagttaatgaggcaatgagggaaggaatcacttctgttggtgaaaataaaccccaagaattagctagaaagtatgatattataggtgacaaattaaactggcacctgataggaactttgcaaaccaataaagttaagtacataatcgataaagtttgtatgatacactctttagatagaattgcattatgcgaagaaattcaaaaacgtgcagaacaaataaacagagaaatagattgcttagtacaagtgaatatatctaaagaagagtctaagcatggacttgatagagaagaagttgtagactttgtcaaagaagtgtcagaaaaatataaaaatataaaaataaagggtctaatgacaatggcaccttttatagaagatgaagatgagataagaggtgtatttaaaggtcttaaagatttatcaaaacaaataaaagaactaaacatccctaatgtagggatggatgttttgtcaatgggaatgagtcacgattatgaaattgctatagaggaaggggctaccattgttagagttggaacatcaatctttggagaaagaaactacaataaaaaa

SEQ ID NO: 17387 - DNA, 120 bp, Clostridium difficile
atgttaaatatagatgaaataaaaaaattaataccacatagatatccatttttattagtagacaagattacagagctagaagttgggaaaagagctgttggtataaagaatgtaacagtt

SEQ ID NO: 17388 - DNA, 423 bp, Clostridium difficile
atggctaaaaaagttataggtcaaataaaattacaaatacctgcaggaaaggctactccagcgccaccagttggaccagcattaggacaacatggtgttaatataatgggattcacaaaagaatttaatgctaaaactgcagatcaagctggaatgataataccagttgttataactgtatatcaagatagatcattcagttttataacaaaaactccaccagctgcagttttaattaaaaaagcattaaacttaaaatcaggttctggagaaccaaacaagaaaaaagttgctaaaatgacttcagctcaagtaagagaaatagctgaattaaagatgcctgacttaaatgctgcatcagtagaagctgctatgagtatgatagctggtactgctagaagcatgggtgttgtaatcgaagac

SEQ ID NO: 17389 - DNA, 1014 bp, Clostridium difficile
atgggttattacaatgataatgataataataaaataagacgtaaaaaaattagtaacaacaaagatagtaataaaaaatctaaacattcttatacttcggcaaataaaaaaaataaaagtcctaatacaagttccagtaaaagaatgagtgaaaaagtagattcacagaatcttataaaaagagatagagatagttttacaagagataatgtaagacctttaaatacagattacaatcaaagagaaagaagaagagtcgagtataaacaaagagagaaaaaattaaaaagtaaaaaaagaaaaaaacaaaaaaggattagaatagttagggcattattatctattatgttagttgcactaattatattttcagtggcaggtgcaatatttacagtttcagctataaaagggtcaccagaagttactaaaaagttaattaggtctaaatatataagtagtgaggttgtaagtataaaacaaatgccaaatgatttaaaacatgcaatagtttccatagaagatgagagattttataagcataaaggagtagatgttatttctctagttaggtcagtattaaacaatgtgtttacagatacaacacaaggtgcaagtactatagatatgcaagtttcaaaaaacctgcttactagtaatgataaaactatgaagcggaaaataagggatatgtataatgctaagcagatgaataagattatgactaaggatgaaattcttgaagcatatttaaataatatgtatctaggtaaaaatgcatatggagctgcaaagggagctgaagtctacttcggtaaaaaagttagtgaattaaatttagctgagtgtgctatgttagctggtatgacaaataatcctgcaaggtatattgaccatggagaggctaagaagagacaagtgattgtactgtataagatgcatcagcttggttatataactgataaggagtatagaatagcaaaagctgatgacactccatttaaatcagaaattgat

SEQ ID NO: 17390 - DNA, 762 bp, Clostridium difficile
atggaattaatcgataagataaaaatgagtgtaaaagatttggatttattttatggtgataagcaagcattaaagaaaataaatatggatataaaagagaataaggttactgctttaataggtccatctggatgcggaaaatcaacttttataagaacgttaaatagaatgaatgacttaatcgaagatgtaacaattaaaggaaacatttctgttgatggagaggacatatatacctcagatgatgttataaatcttcgtactaaagtaggaatggtatttcaaaagccaaatccatttcctatgagtatatatgataatgtggcatatggtcctcgtacacatggactaagagataagaagcaattagataaaattgtagaagaaagcttaaaaggtgcagctatttgggatgaggttaaagacaggcttaaatcatctgcactaggactttctggtggtcaacaacagcgtatatgtatagcaagagcaattgctatgagaccagaagttattcttatggatgaacctacatctgctttagacccaatttcaacattaaaagtagaggaacttatagaggatttaaaaaaagactacacaatagtcatagttacacataatatgcaacaagctgctcgtatatcagatgaaacagcttttttcttaaatggagaggttatagaatttagcgatacaaaaactatgtttaccactcctgtagataaaagaacagaagactatataacaggtagatttggt

SEQ ID NO: 17391 - DNA, 864 bp, Clostridium difficile
ttggaggttgatatggctttaaatataagaaactatagcctattatgtaatcaaggaacagctaaatttaatgaagatgtagtcggtataaatccatttggggcatgggttttagatggtgctacaggacttaatggaaaaaatttagtgtcaactgaaagtgacgcaaggtggtatgttcagtggtggaataggtatttatataaaaatataaataaagaagaatcattaaagagtattattaatactggaataatagaagtaaaaaaagagtatgaactaagattaaatgggtttaaggttgaaaaattagatttaccatctagttctatagttgttgtaaaatttcatgaaaataaagtagagtattttttattaggagattgtgctttgtttattaaaaatggagattccaaagttataaaagataggagtatttgtaaatttgataatactgtatttgatgaaatgagtaaactttctaacttggaagagatggcttttgatgagattagaactagtgttatggatacaatagtaagcaatagattgaagaaaaatacaaaagagggctattggatattggattttgatgaggaagctgtggaaaattctatatatggatacattgaaataaaaaaagattttcaattgatgctaacgagtgatggttttacaagtgcatgtgatagatataatctaataaaagaagaagaattgatacgtatagcagaaaaatttggtataggatatatacataataaagtaagggattttgaagataatgactataaagcggttaaagtgccaagatttaaagtaaaagatgattcatcttgtttatatttagatatatataatgat

SEQ ID NO: 17392 - DNA, 192 bp, Clostridium difficile
atgcctaaaatgaaaactcatagaggtgcagcaaagagattaaagaaaacaggaactggaaagttaaagagagcaaaagcttttaaaaaacatatattaactaaaaaatctgcaaaaactaaaatgaacttaagaaaatcaactttagtaagtgatggagatgctaagagaatagcacaattattaccatac

SEQ ID NO: 17393 - DNA, 915 bp, Clostridium difficile
atgatagtaaaatctagattagtaggtttagaaaaaaatgacaataatggcaataagacaaaatacgtaattgaaaaagtagcaaaaaatatttttctacttagtgctttagtagcagttgcaagtttacttttgataataggattcgtattttataaaggattaagaccatttatatttgaaggatattcatttatagactttttaactggtgcagattgggttccttctgccaataaatttggaatatcatctatgatagtagcatcaatatttgcaacacttggagcacttgttataggagtacctgttggtatattaacctctgtatttatagcagaagtagcacctaaaagattagcaaaaataatgtcaccagcagttgaacttttagcaggtataccttcagtattatatggtgtatttggtcttgcagtgatagttccaactatacaaagtatatttaatcttccaaaaggtcaaagtttgttagcaatagtaatagtattagcagtaatgatgttaccaacaataatatctgtatcagaaacagcaataagagcagtaccaaaagcatacaaagaaggttcattagcacttggtgcatcaaaaatagaaacaatattcaaagttgtattacctgctgcaaaatctggagtattagccgcagtagtgttaggagtaggaagagctttaggtgaaacaatggcagtaatacttgttgcaggcaactcaccagttatgccaactgcaataacagatagtgtaagaccacttacaactaatatagcacttgaaatgggatacgcatttggtacacatcaagaaatgctatttgcaactggagtagtattgtttacatttatattaattttaaacttagttttaaataaactttcaaataaggcggtaaat

SEQ ID NO: 17394 - DNA, 420 bp, Clostridium difficile
atgagtaaagtattgaatgagaataatatatttttagggttagatagtgtttcaaaggaagaagctataactttagcaggaagaaaattagttgaaaatggatatgtaaaagaagaatatataccagcaatgttagaaagagaaaaagtaatgactacatatatgggaatgggagttgctattccacatggtgtaaatgaagcaaaaaaagaaatattatcttctggaatagttatattacaattccctaatggtatagattttgatggagaaaaagcatatttattaataggaatagctggtgttggagatgaacatttagaaatactatctaatatagcagtagttttagatgatgacttaacagaaagactaaaaaattcaaatgacaaacaagcttttatggaagcttttgccaac

SEQ ID NO: 17395 - DNA, 693 bp, Clostridium difficile
atgagatttcatataatgacactttttccagaaatatttaattcttacatggatgaaagtataatgaagagagcagttgaaaaaggtataattgaggttcatatatataatataagggatttttctaataataaacataaaaaagtagatgattatccatttggaggaggagcggggatggtaatgactcctcaacctatatatgacacatataagcatataataacaactcataatataaataacccaagtgtaatttatcttactccaaaaggtaaggtatacaatcaatctatggcaaagcagatgtctttaaaagaagatataatactactatgtggtcattatgaaggaatagatgagagaatcattgatttaatagttactgatgaaatttcaattggagattatgtattaactgggggagaactcccagcacttataatgatagattctatatcgagattaataccaggtgtattaaaccaagaagaatcatttgaagaagaatcatttaaagacaacttattggaatatcctcattacactagacctagagattttgaaggattaaaagtaccagaagtgcttttatcagggaatcataagaagatagatgagtggagaagagaagaatctataaggataaccaaagaaagacgatttgatttatataaaaagtctaatgaaaaa

SEQ ID NO: 17396 - DNA, 1377 bp, Clostridium difficile
atgaactttaaagctataatccttgctgctggcaaaggaacaagaatgaagtctaaatacccaaaagttatacataaagtatgtggaaaagaaatggttaaccatattatagatgtttcaaaaaaatcaggggtaaaagatactgtcgtgattttaggacatgaagctgatgtagttaaagaaaagcttgcagaagaaattataatagccatgcaaacagaacaacttgggacaggacatgctgtaaagatggctaaagaatatattaatgatgaagatacaatagttgtactttgtggagatactccacttataaaagaagagacactaaagagactatttgaatatcatatagaaaataaatatcatgctacagttcttacaacaagagttggaaatccaacaggttatggtagaataataagagataagaagggtgaccttcttaaaatagtggaacaaaaagatgcaaattcagaagaaaagatgataagtgagataaactctggaatttattgttttaatggaaagagtcttagagaagcactagatttgctaaataataacaattcacaaggtgaatattatttgactgatactgctaaaataatgagagataaaggattaaaagttggtgcatttgcaggttcaactattgaagaacttatgggcgttaactcaagagtagaattatcaaaggcagaagaaattatgagacgaagaataaatgaatctcatatggtaaatggagtaactataatagacactaactctacctatatagaatctgatgttatgataggcaatgatactataatatatccaggtgttatgttacaaggaaaaacaaggataggttcagattgtataattggaatgaattcatctataacaaattcagaaataggtgatggtacagaaataaaaaattcaactataattgatagtaaggttggagaaaattctactgttgggccatatgcatacttaagaccaaagagtgacttaggaaataatgtaaaaataggcgattttgtagaagtaaaaaatgctattatagaagatggctcaaaagcatctcacctttcttatataggagatgcacatgtcggtaaaaatgtaaatattggatgtggagtagtatttgtaaactatgatggtaaaaataaatttaaatcaatagtaaaagacaatgcgtttataggttcaaattctaatttagttgcaccagtagttgtagaagaaaaaggatatatagcaacaggttcaacaataacacatgatgtcccagatggtgctttggcaatagcaagagaaagacaagttatcaaagaaggatgggtagaaaaaaagaatcaaaaagacgaccaaagtaag

SEQ ID NO: 17397 - DNA, 1389 bp, Clostridium difficile
atggaaaaagcagtggaaaactttgaagatttaagtaaggaatacattaatggttatattgagagagcaagaaaagctcaaagagagtttgaatgttatactcaagaacaagtagataaaatagtaaaaatagttggaaaagtagtgtattataatgctgaatatttagctaaacttgctgtagaagagactggaatgggagtatatgaagataaggtagctaaaaataaaagcaaagcaaaagttatatataacaatttaaaagataaaaaatcagttggtataattgatatagatagagaaactggaataacaaaggtagctaaaccagttggagtagtagcggcaataactccttgtacaaatccaatcgttacacctatgagcaatgcaatgtttgcacttaagggaagaaatgcaattattatcacacctcatcataaagcaattggatgtagtacaaaaactgtagagatgattaatgaagaattagaaaaaataggagctccagaaaatttaatacaaatacttgaccaacaatcaagagaaaatacaagaaatttaatttcatcagcagatgtagtaattgccactggaggaatgggaatggtaaaagctgcgtactcaagtggaaaaccagcacttggtgtaggggcaggaaatgttcaatgtatcatagatagagatgtagacattaaagaagcagtacctaaaatcatagcaggaagaatttttgataatggtatcatttgttcaggtgaacagtcagtaatagtagcagaagaaatgtttgataaaataatggatgaatttaaaaataacaaaggttttatagttagagataaagtacaaaaagaagctttcagaaatgctatgtttgtaaataaatctatgaataaagatgcagtaggtcaatcagttcatacaattgcaaaaattgcaggtgttgagataccagaagatacaaaaataatagtaatagaagctgatggaccaggagaagaggatattattgcaaaagaaaaaatgtgtccagttatatctgcatacaagtataaaagttttgaagaaggtgtagctattgcaaaagcaaatttaaatgtagaaggaaaaggacatagtgtatctatacattcaaatacagttaaaaatatagaatatgcaggagaaaatatagaagtatcaagatttgttattaatcaatgttgtgctactagtgctggaggaagtttctttaatggtcttgcacctactaatactctaggttgtggttcttggggaaataacagcatctctgaaaatcttgattataagcatctaattaatatttctagaattgcttattatatgccagaaaatgaagtccctacagatgaagaactttgggga

SEQ ID NO: 17398 - DNA, 1401 bp, Clostridium difficile
atggaaaagaaaaaaataggcctatggagtttggtatttatgaatgtatcagctttatatggtataagatggatagctaaatctacagcatcaagctttggtttaggattaggtgcaatacctatgtggttattattctcatttatatactttgtaccaggagctttaatttgtgctgaattagcttctacatatcaaaaaggtgatggaggtctttacgattgggttaaggaagcctttggagaaaagtatggatttttagtttcttggttaaactggacagctaaaatattttggtattcttcatttttaactttcttagcagtaaatgtttcttatacaataggaaatccagcccttgctgataataagatgtttgtacttatattatctttaataatattctgggcattatctcttatagcaactaaaggaataagttttacaaaaatatttactaatacaggtgcattaggttcaacaataccaagtgctatacttataatattttcatttgtagcagtatttgtattgaaaaaacatgatatagcttctacatacacaatagcttcaatgactccaaaacttaatatggatgcatttgttgctatatcagctataatgtttggtttagcaggagcagagactgctgctaacttcataacagaaatagataagcctgaaaagaacttccctaaggcaatattaatatcagctggaatagtagcttcattatatgtattaggttcaattgcaataacaatgataataccaccagaccaaattactgcttctaaaggtgtattagatgcactttctgctgtttgtgcgtctttaggaattggttcttggttggttcaattaatagcttttggtatagctttttcagtattaggagcaatagttctttacatagcatcaccaataaaaatgttatttggtagtgttaaaaaaggaatatttccagatagtttagtagaggtaaatgaacacaagataccttctaaagcagttatacttcaagcaataatagttactataatactattggtgactacattaatgccttctgttgatgctatatacaatgttcttgtaactatgacagcattaactgcattattcccatatgtattgttatatgcttcttatattaaactaagaaaagagagaccagatgaaattagaccttatactatggcaaaatcaacaagtacttgcctaggtttagcaaaaatggttttagttgtaactgtagtgggtatattattatctgcagcaccagttatgcctacatttgctgaaaatgttatatatgagatagagatgattggtggaggtcttctagttatattatctggtctatggttatggaatagatatgaaaagaaaacagctaaa

SEQ ID NO: 17399 - DNA, 1770 bp, Clostridium difficile
atgaaatggatatatgatgattatgaatttgaaaatagagctaataacctatcatggacaatagctggtgattacaatgaaagtatagatatatcagaaaaagattactcttcaaaagaaataggtctatatttcgcaataattgcaggtgctagaagaaagtatgtagattgggatatagttaaaaaatatcttacaaatagaataagaaaaggatacaacaaagatgttatactaggtctaattcaagttatattaaatacaatagttgaagaaaaggtcattaaagacaggccagggatagaagacataagaagaaatgcttataaagatattgtttcacgttttaccaaaatacacaatgataatattatggataaaattaaatacacatttgtactttatagtatggacaagcacccagcattagatagtatgactagaagaatagttaatgatataagaaatatagataccaatcaagatattatggagattttaaaagcattagatgttatatatttaacttattttgaatacatattaaatggagaagaaaatagtcttattgatgaaaataatgtagaaagtgtagaagtaaattttgatacatttgctgatttcatgtatgaagaactttatagtgatgaagaagaaaatattattgaaagtgatatagattcaatatcttcatccatgcttgtagaaggtgtaggggattttgatgattctaaatgtagcaattcagcagaccgagttatatatgttgatgaagacactgcaaataagatatattcaaaaatagaacattattatggaaaaacttatttgagtaaaggtgaaattaaaaaaattgagacacaaaattgtagaaatgttcatgaaggttgtagaatacactttacagatggagttcttagaagtgagtgtaataatgtatttcaactaaaatatgtaacaagacaaaaagaaaataatttaggaaaatttagagaacatgctagaatgtatagacagcaaataaagagattaaaagaaagtctgtcaagaattttaatagaagaaaatgctaaaagtagagtatattctgattgtggtactatattagccaatagagcttggagagttggtagaagtaataataataaaatattttataaagatatagaaaatgaaaaagggaaatacgttattgatatattattggatgcaagtggctctcaaagtagaaatcagggaaatgtggcaattcaagcttacataattgcaaatgctctaacagaagttggcataccaaatagagtgatgggattttctagttttttagactatacaatattaaaaagatttaaagattatgatgatagtataaaaaatagtgaaaatatatttgaatatttttgtgctggtaataatagagatggtttggcaataaaatctatatgtagtggtctaataaatagagatgaagaaaataaaatcctgatagttctcagcgatggaagaccaaatgatgtaaagataggaaaaagtagtgagagaacattaagaggagaaaaggcttataggggtatagttggtttgagagatacagccaatgaagtgagaaaagctagaaagcaaaatatattagtattaggagtatttacaggaaaagaatcagaacttgaagctgaaagattaatatatggaaatgattttatatattcaagagatataactagattttctgatgtagtttcaatgtatttaaagaagataattagaaat

SEQ ID NO: 17400 - DNA, 1863 bp, Clostridium difficile
atgcaaagtgtaatagaatataactcttgggataaaaattttaaggctccgtttggagctttaaaatttgatgaggaattgaccatttgtgttaaagtaaatgagggatacaatatcaagtctatttccctagaaataaatagagaagaagaaatgagaacaataactttaaatgaagaattagataatgataaacttggaaagtgcttttgtggtaagattgaaaagtttgatggtacaggtgtttatttttattactttaaagttgatgttgaaatggatggtcaaataaagactttattttatggaaaaaacagagataatggatattcttgtgaatataattatagtgatattaataaatatcaaatcactgtttataaagattttaaagtaccaacatggtacaaagaaggaatactttatcatatatttgtagatagattcaataatggaaatcgtagtggtaaggttgataatcctaaaaaaaatagtttcatatatggaaattgggaagatacacctatgtacataaaggatagtcaaggggatgttataagatgggatttccatggtggaaatttaagagggataatcaataaacttggatatttaaaaaaattaggtgtaagtatactatatctaagccctatatttgaagcctctagtaatcataagtatgatacaggtgactataaaaaaattgacccaatgtttggagatgaagatacatttaaagaacttattgataaagcaaaagaaaaaggtatatcaatagtattagatggagtttttagtcatactggagcagatagtaaatattttaatatgtatggaaactataatagtttaggagcatatcaatctaaagaatctccatattattcatggtatatgtttgaagaatttcctcaaaaatataaaagttggtgggatgttaagacattgccaaatataaatgaattagaacatagctatatggattatataatatatgacaatgatagcgttataaataaatgggtaaatatgggtattaagggctggagactagatgttgcagacgaattaccaactaagtttataagagagttaaaaaaggaattaaaaaaggcagatgatgactcaattcttataggtgaagtatgggaagatgcatcaaataagattagctatggtcagagaagaagttatttattaggtgaagaattagattctgttatgggttatccttttagaaataacatgttttctttcttaaaaggagaaattaattcatatgaactttgtaatagatatatgcagattaaagaaaattatccaaaagaatcatttaggtctaatttaaatttaattggaacacatgatgttacaagagctaaaacggaattaaatgatgatgtagatttagtgaagcttgctgtagctatacagatgacatttgaaggagtaccatatatatattatggagatgaagcaggtctttgtggaggtgttgacccagataatagaagaacttatccatggaaaaatgaagacgaagatatgcttaatttttatagagatgttataaaaattagaaataagaataaacttttaagttctggaaatacagaatttatatatactaataatgattctgtattttcttttattagagttaatgaaaataatgatagaatgttaattttagtaaatagaagtgaaaatgtggaaagtatatcattatgtatagagagtagttttattgaggaaatacctataaagtatagtcttaaaaatgcaaatagtactatacaaattgaaaataatgagttgaaagtagatttagactctaaatcatttagaatttttagagtaaat

SEQ ID NO: 17401 - DNA, 1188 bp, Clostridium difficile
atgaggatggtgtttatggacaaggttaaatttttaataaatatgcttttggctttttttatatatccatttaataagcataagtttaatggtagagatatctggcttataggtggacattcaggggatatatacaatgataattcaaagtttttttatgagtatatgctaaaagaacataatgatgtagaaacttattgggtagtaaataaagacagtaaagtatttgataaaattccaggcaaaaaattaataagaggaagtgtagaaaactatctgtattattacaattcaaaagctatagtattttcacatgcaccatcagcagatatagcaccatacaattttgctgtacctgttcttaattattttcataaaaaaacgataaaagtgtttttaaatcatgggactataagttttaaaaaaagaaaacctatgaacaaaaagttcaaaaatattatagataacctatataaaagctataatatagttacagcaagttctgaatttgaaagaaatgttatggtaaatgattggggaatgttagatgactcagtttatataattggaaatgcaagatatgacaatttaccaacaaatgaagttgcacaaactcgagatatattatatactcctacatggagagattggataaaatttagttcaggaaaatttacggatacagattattttaaaaatataatgaattttttaaatgatgacaaattaaataaaatattagatgagaaagatataaatgtaaaaatttatatgcatcatcttatgcatgagtttatagatgatataaaagaaaatataacaggaaaacgaattgtgtttttagataaaggggtaactctagcaaatgaaatcagaaaatcagctgcaaatataactgattattcaagtgtagccatagactttttgtatatgaatagacctattttgttttaccaattcgatttggatgaatatatggaaaaagttgattcatatatagatttaaaaagtgaaatgtttgggtctttggcttataataatgatgaagccgtgaataaacttattgatattattgaaaataattttgaggttatggataaccaaaaaaatgaaagaaataagtttttcagatataatgataataagaactgcaagaggatatatgattgtgtattaagtaaaattaaa

SEQ ID NO: 17402 - DNA, 1464 bp, Clostridium difficile
ttgtttattaattatactggaggagatatttctatgaaatctaatcaagaatttttatggggaggggcagttgctgcccatcaagttgaaggtggatataataaaggtggaaaaggaataagtattgcagatgtgatgactgcaggtactcatactatttcaagaaagataacagatggagtaattgagggtttaaattatcctaatcatgaagccattaatttttatgaaaattataaagaagatattagattatttgctgaaatgggatataagtgttttaggacaagtattgcttggactagaatttttccaaagggcgatgaatcaactccaaatgaagatggattgaaattttatgatgatttatttgatgaattattaaaatacaatatagagccagtaataactttaagtcattttgaaatgccttatcatttagtaaaaaactatggtggatggagaaatagaaaattaatagatttctttgtaaacttctgtgaagtggtaatgaatagatacaaggataaagttaagtactggatgactttcaatgaaataaataatcaaagtataactacaaatcctatttatgcatttactaactcgggaataatctatgaagagcaggaagacaaagaagaagttatgtatcaagcagttcattatgaatttgtagcaagtgcaaaggttgtgaagataggtcatgaaataaaccctgagtttaaaattggatgtatggtggcagctatgccaagttatccttattcttgcaatccagaggatatgattaaatttgtagaatctaatagagaacaacttatgtttactgatgtacatgtaagaggtcattatccaagacatacactaaaattatgggaaagaaaaaattataatttagatattacagaggaagataaaaaaatcctaaaagaaggaatagttgattttattggatgtagttattatttaactactgtagtaacagctgataaaactatgaaaacaacaggtaatgactcggcaggaaaggctgatgtagttgaaaatccatacttaaaaatttctgattggggatggaatatagaccctgtaggtctaaggttttaccttaatcaactatatgataagtatgaacttcctatattcattgttgaaaatggatttggagcagaagatgtattaaaatcagataatactgtagatgatgattatagaatagagtatttggctagtcatataagggaaatgaaaaatgccattgaaattgatggtgttgatgttatagggtatactgtttggggatgtatagatccagtatcatttacaacaggagagatgaaaaaaagatatggatttatatatgtagataaaaataatgatggaagtgggactcttaaaagatataaaaagaaatcttttgattggtataaaaatgtaataaaatttaatggagaaatttta

SEQ ID NO: 17403 - DNA, 189 bp, Clostridium difficile
gtgcctctaccaacagaaaaacaagttgtaactatattaagagctgtacataagtacaaatactctagagaacaatttgaaataagaactcataaaagactaatcgacatagctaatccaacacctaagacagttgactcattaatgagattagacttaccagcaggtgtagatatagaaataaaatta

SEQ ID NO: 17404 - DNA, 906 bp, Clostridium difficile
atgttatataataacgcattagagttgataggaaacacacctgtagtaaggctgaataatttaggctgtactaatgggtgttctaacatatatgtaaaattagaaaaagtaaatccagcaggaagtataaaagatagagctgtttatgaaatgttagagggcttagagcaaagaggagaattaaaaaagggagatgtactagttgaagcaactagtggaaatactggtattgcattatctatgataggaaaattaaaaggatatgaagtagtaatcgtaatgcccgaaacaatgagcgttgagagaagagatttaatgaaggcttatggagcaaatttggtgcttacagatggtaaagctggaatggcaggttccatagaaaaagcaaatgaacttttaaaagaaaatccaaactataaaagcctaaaacaatttgaaaataaagataatccaaatgcacattataaaacaacagcagttgaaattatgaatgatgtcaaagatttagatatattcgtatgtggagttggaacaggtggtactttaataggaactgcaagatatttaaaagaacaaaatccaaatataagagtaattgcacttgaaccaaaaaaatctccagctatatcagaaaacaagactggacctcataaaatacaaggaataggtgctaactttgttcctgaaaattatgattctagtgtagttgatgaagtaatattagtagatgatgaagatgcatttgatacagttaaattacttgcagcaaaagagggaattttagtagggatatcttctggagcaaatatatttggtgctatagagatggcaaaaaagtatccagataaaaagatagttacagtagctccagatggagttgataagtatatgtctatgggaatattt

SEQ ID NO: 17405 - DNA, 1176 bp, Clostridium difficile
atgaaagatgtagtaatcgtatcagcagtcagaacacctataggaagttttggaggtgtatttaaaaatacttcagctgttcaacttggaactatcgctgttaaagaagcgatatcacgtgtaggacttaatttatctgaaatagatgaagtaataattggaaatgttcttcaaacagggcttggacagaatgttgctagacaaattgctataaatgcaggtataccaaattctgttccaagctacacagtaaataaattatgtggttcagggcttaaaagtgtccagctagctgcccaatcaatcacatctggtgaaaatgatgtggtaattgcaggtggtactgaaaatatgagtcaagctccttatatcgttccaactgctcgctttggtagtaaaatgggtaacataaccatggtagatagtatgctaacagatggccttattgatgctttcaatcagtatcatatgggaataactgcagaaaatattgcaactaaatttgaatttactagagaaatgcaagataaattggcattagaaagtcaaaataaggctgagaatgctataaaaaacaaccgctttaaagaagaaatcgttccagtagatgttttaatacgtcgaggaaaaatagaaactattgataaagatgaatatcctaaattaggtatgacatttgaaggtttatctaaacttaaacctgcattcaaaaaagatggtactgtaacagctggaaatgcctcaggtattaatgatggtgcggctatgttaatactaatgagccaacaaaaagcagacgaactaggtattagaccacttgctaaaataaaatcctatgcttcagctggtgttgaacctgaagtcatgggtactggtccaatccctgcaactagaaaagcactgaaaaaagctggacttagcatcaatgatatagacttaatagaagcaaatgaagcgtttgctgcccaagcattagctgttaaaaatgaacttcaaatagattcatcaaagttaaatgttaatggtggtgcaatagcattaggacatccaataggagcaagtggagctagaatacttgttaccttaatttatgaaatgcaaaaacgtaaagttgaaactggacttgcaacactttgtattggtggtggtcaaggaatatcaatggtggtttcacga

SEQ ID NO: 17406 - DNA, 990 bp, Clostridium difficile
ttggaggttgttatgattttcgatggacattcagatacttgggcagatgtaacaataagaaggcttaacggggaaaaagatgtatttagaagaatccatcttgataattttaaaagagcaaatatagaaggagctatttttgtaatatggatagacccaccatatgataaagagcctgaaaaaagagttaaacaaattataagctctataaaagatgaaattgaagatatgaaagatgttgtaaacatagtaaaaaaatattcagatatagataaaggtataagtgaaaacaaaataaatattttaattggtcttgaaggattaagccatattggaagaaatatagatttactagattatttttataaagaagttggtgcaagacatgcatcattaacttggaatgaacagaatgaacttgctacaggatgtttaggggatgaaaatcgtggtttaactgaaataggtaaaaaagcagtcaataaaatggaaaaattgggcatgatagtagatgtgtcacatttaaatgaaaaatcattttgggatttaatgtctgttgcaagtaagccagttatagcttctcattctaatgctaggagtttatgtgatgctaaaagaaatcttacagataatcaattaaaagaaatttcaaatacaggtggattagttggaataaatagttttagaggatttactaatagcaatcctaagaagcaagatttaatacatttggttgaccatatagactatatggtaaatcttataggtatagaacatgtatcttttggttttgattttagtgattacttagggaaagagactataggttcttttactggaaatgctagtgtgccaagtgtagatggtcttgaaagcacacatacagcacagaacatagtagtagagcttgaaaatagaggttataaaaagaaagatatagagttaatctctagtggtaatttttataggctctttaaagatatactaaaa

SEQ ID NO: 17407 - DNA, 279 bp, Clostridium difficile
gtgactgtaatggcagttaaaataagattaaaaagaatgggagctaacaaaaaacctttctacagaatagtagtagctgattcaagagctccaagagatggaaaatttatagaagaaataggatactataatccaatttctgaacctaaacaagtaagaataaatgatgaaaaagctataaaatggttagctactggtgctcagccaacagaagtagttaaaaaattacttgtaaaaaacggagtaatagaaaaattcgaagcttctaaacaagcaaaa

SEQ ID NO: 17408 - DNA, 2277 bp, Clostridium difficile
atgaactttgaaaacacaaaaaataaaaaaataatagctactttactattgacacttcttttaatcgtgtcattaacatgtgtcacttttattatgaatctaaataaagtaacacataatgaaacagaacgatatcttgtagaagtttcacaaggtatttccactacaattaatgtgaaatgtaaaagtatatttaggacactatattctatgggagatacttattttgagattaatgatagtgaaaaagaagtcaatagatacttatcaaaaaaattaaaattatttgaatttgattggttaggtattatagattctaatggaaattttgtaagtgcccttaaagatacaggtaatgttaaaggacaagacttttatagaaaagcccttcaaggcaaagaaacaattactcctgttaaatcacaatctggtacatatggaattttatattctgtaccactatacaatggcgataaaattgttggagctgttgctgcttggaatactattgatactatgagaaatttattaagtgtagaaagctttcatggtgaaggattttcccaaattatcgaccaagatggaaattttattgtaagttcagcaaacaaaaatgctccaaaaaatgtggtaaatttttttgacatgattaaacaccaaggaaaacaggttgataaaaataaacttgaagaaatgaaaataaacttaaaaaagaacaaaactggttctatgtattatacattaaatgatggtatttctaaggcaatgcattatcttccattacaagaagaaaacttatacctcctttcaattgttccaacaaaaacagcaagtgcacagtttgatttacttctaaaaaaagcaatcttcatcaatattttaattgttatactatttttattgcttattatattgattatgtttataaatcaaaagaacagggcacaacttataaaaatcgcctatgtagactctgtaactaaaggttacagtaaagcacgttttgatattgaagctaaaaaaattatacagtcatcttcatcagaaagctattcattggtatctataaatattcagaaattcaaacttattaatgattcttttggtagtgaagcaggagataaaacattaaagtacatacatgatgtcattagtaattatctagaaccaggagaattgctttgtcgagtttctaatgaccagtttaatgtacttattaaaactattcctcaaaaagaaattcttaagtacatagaaaatatcaccaatgatattaatagtttcaataaaaatgaagaatgtaaatattttatagctctatctataggtgtatataaaattgatgacccaaatctacctttagtttcaattcaagaccgtgcaaatgttgcacgaaaaaataataaaggaaacattggaaatcatccactttatacatgtgttttttatagtgatttagagcgtttaaaaatgattaaagaaaaagaaatggaaaatagaatggaggaagcattaaataataacgaatttatagtatatcttcagcctaaaataagcctcaaagataatactattgtaggtgcagaagcattagtaagatggcaagacccaaataaaggtcttataccaccagacgagtttattcctttctttgaaaaaaatggttttattacaaaactcgaccactatgtttttgaaaaagtatgcagtatgataagaaaatggatagataatggagaaactccaatacctgtttcagttaatttttcacgtgctaatttaaataatatagattttttagaaaaatacagaatgcttcgtaataaatacaacattcctgctaagctcttagaaattgaattaactgaaacacttgtatttgaaaatctccaaaaattaattaatataatagaccaaatccatgaagaaggttttcaatgttcactagatgactttggaagtggatactcttcactcaatatgttaaaagaaataaaagttgacacattaaaacttgaccgtgctttttttagctcacctaatgcagataatattgctgaaaatcatgtaatagaatctatagttaatttggcaaaaaaattaaatatgaatagtatatcagaaggtgttgaaacaatcttgcaaatggattatcttaaaaaaattaattgtgatatgatacaaggatatgttttttcaaaacctctgcctcaagaaatatttgagaaaatgacttttggaaaaaaactagaagaaaccagtatggatagttccgtt

SEQ ID NO: 17409 - DNA, 1095 bp, Clostridium difficile
atgaaattaggtatagttggtttaccaaatgtaggtaaaagcacactatttaacgcaataactcaagcaggtgcagaatctgcaaattaccctttttgtacaatagacccaaatgtgggagttgtatctgttccagatgaaagattaaacaaactacaagaattatataattctgaaaaaatagttcctactgctatagaattttgtgatatagcaggtttagttagaggagcttctaaaggagaaggtttaggaaataaattcttatcacatataagagaagttgatgcaatagttcatgttgttagatgttttgaggatgaaaatgttgtacatgtagatggttctgtagacccacttcgtgatatagaaactataaacttagaattaattttctcagatatagagattcttgaaagaagaattaataaaactcaaaaagctgctaaggctgataaaactttaggttctgaacttgatttattaaaatcaataatgtctactttagaagaaagtaagtgtgtaagaactatggaatttacagaagatgaacaaacattcgtaaattcattggatttacttacatctaagcctgtaatatatgcttcaaatgtatcagaagatgatttagctgataatggagaaaataataaatatgttcaacaagttaaagcatttgcagaaacagaagatgccgaagttgttgtagtatgtgcacaaatagaagcagaaatttctgaacttgattctgctgaagaaaagaaagagtttttagaaacattaggtcttgaacaatcagggcttgataagcttataaaatcttcttatgctttacttggtttaatttcattcttaactgctggtccaaaagaagttagagcatggactataaaagttggaagtaaagctcctcaggcaggaggaaaaatacattctgatatagaaagaggatttatcagagcagaaacaatagcctttaatgatttggttgagcatggtactatggctgctgctaaagaaaaagggttggttaaattagaaggtaaagaatacatagttaaagatggagatgtaatattatttagatttaatgtt

SEQ ID NO: 17410 - DNA, 291 bp, Clostridium difficile
atgattaggaatcgtaaactatctcgctcaatttctgatgtgtcatggtcagagtttattcgtcaattagaatacaaggctaattggcatggtagacaaattgtaaaggtgggtaaattctttgcaagttcacaaatatgcaataaatgtgggtataaaaacgaggaagtgaaggacttaaatataagagaatggatttatcctagttgtaatgaaactcacgatagagatataaatgcaagtataaatatattaaaagaaggattaagactaataacaattcaaaataaa

SEQ ID NO: 17411 - DNA, 891 bp, Clostridium difficile
atgttcaaatcaggttttgtcagtatagtgggtagaccaaatgtaggaaaatctactttaatgaataatgtagttggagaaaaaatagctataatgagtgataagcctcaaactacaagaaatacaatacaagcagtatatacagatgaagaaatgcagatagtattcttagatacaccaggtattcacaaaccaaaaaataaattaggtgaatttatggtaaaggcagcaacagaagcttttaaaaatgtagatttaatattatttgtagttgatgattctaaaaaaataggtcctggagatagaaagataatagaggatttaagaagtgttaagacaccaataattttagttgtaaacaaaatagaccaactagaccaaaaagatgagctatttgatataatcaaaatgtatgatagagaaggcatttttaaagaaatagtaccaatatcagcattaaaaggaaagaatacggataccttaataaaagttatacaaaattatttagaagaagggccaaagtattttccagattatatgattacagaccagccagaaagagtattaatagcagaacttataagagaaaaagttcttcactatcttaatgatgaaatacctcatggtgtagctgttgaaattgaaaaaatgaaagcgagaaatgataaggaaatagtagatgtatctgctgtaatatactgtgaaagagattcacataagggaataataataggaaaaaatggtaggaaactaaaaggaataggtaagtcagcaagacaagatatagaattgcttttaggttcacaaataaatcttcaattatgggttaaagtcaaagaaaattggagaaatttacaaaattatataaataattttggatataatgataaa

SEQ ID NO: 17412 - DNA, 414 bp, Clostridium difficile
atgaatacaataactttagttggaagattagttgcagatgctgagctgaaatatcttccaaattcgggtacacctaaaattttatttagggtagcagtagatagaaaatacaaagatagggaaggcaaaaagaaagttgattttataccttgtgaacagttaggaaaacatgtagaaaatcttgtacagtatcttacaaaaggtaaacagatatatgcttttggagaattaaatatagataattacaaagatgaaaatggttgttggaaatctattactaaggttaatgtaaatgctttagaattgctttcaagtaaagaggatagtaataatcatgaaaaacaacaggaatatataccaccaggattagacccacaaggttttcaagcaatagatgatgacgatatacctttt

SEQ ID NO: 17413 - DNA, 1977 bp, Clostridium difficile
ttgagaaaagtaaagaggataagtaagaaaaggctggtactcgttcttattctagcatgtgcattgtttttttgccttgttattaggactgggtatctacaacttatgaagggaaattggttgagtacaaaagcactagaacaacaaacaagagatataccaatagaacccaaaagaggaactatatatgatagaaatatgaaagagttagcagtaagtgtaactaagtatactgtttggtgtaaacctgtggaagtagaagataaaaaagaagcagccgaaaaggtagctgagattttggatgaagattataaagatatttacgctttaataagcaaaaaaaatatggctcttgtaaaagtaaaaagatggatagatgatgataaggcaagtcaaataagagatgctaaattaagtggaatatgggtggcagaagataatcaaagatattacccatatgggaattttgcaccatatgtgttaggacatacttcttcagatgcaacaggtatatctggtgtagaaatgcaatatgataaaaagttaaaaggaaagcctggaaaacttatagtaagtactgatgcttcaggaagagaaataccacaaggaatggaaaaatattatgagcctgtacaaggtaatggtcttgtgttgtctatagatgaagtaattcaacactatactgaaaaagcagtacagaaagcttatgagttaaataatgcaaaaaaggttactgcaatagctatgaaccctaaaacaggtgatatacttgctttagcatcaaaaccagattatgaccctaatgactcaaggacgccaatatatccatattatcaagaagaacttgaaaaatataatgataaagataaaataaaaggctattatcaaatgtggagaaatccagcagtaagtgatacatatgaaccaggttctacatttaagcttattacatcttccagtgctcttgaagaaggagtaattaaagatggagaaaaattcacatgtacaggtagtgtaactgttggaggaagaaagattaaatgttggagacattacagacctcatggaacacaagaatttaaacaagcagtacaaaactcttgcaacccagtatttgttgagttaggaagcagattaggtgttggaaaaatgtatgattatatagaatcatttggtcttatggataagacaggtatagatttaccaggagaagctaagggaatactgtataacgaaaaaaatgtaggaccagttgaattggctacaatatcatttggtcaatctatatcagtaactccaatacaacttataacagctatatcatcaatagctaatggtggagatttaatgcaaccaagagtggtaaaatcttatactgacaataaaggaaatataactgaaacagtaaaaccaaaaaaagtaagaagtgttatatctaaagaaacatctaaaaaaatgttagaaattgcagaatcagttgtaactgaaggtggaggaaagatagcatatataccaggttatagacttggtggtaaaacaggtacagctcaaaaagttatagatggtaagtatgctccaggaaaatatatatgttcatttgttggaatagcaccttgtgatgacccgcaaatagtagttcttgctattgttgacgaaccaacaggagtaagtgcatttggtagtactacagcaggaccaatagtgaaagaaataatgaatgactctttaaaatatttgggagttaaaccagtatataaagaagaagaaaaagctgagtatgaaaagaagcaagttaaagtgccagatgtaagaaatctaaaaataggagatgctgtaaaggcattggaggatgcgaagttaaaaccagacttagatgcagatatagaacttccagaagatacaaaggtaaaggatatattcccaaaacctggagtaaaagttaatgaagactcaagtataaccctatattttgaaaac

SEQ ID NO: 17414 - DNA, 1368 bp, Clostridium difficile
atgaaacaaaaatggatagtattgattatcatctgtattggtgtatttatgtctactcttgatggaagtatactaaatatcgcaaatcctacaattgctgctgactttaaaattaacatgtcacaaattcagtgggttgtaacagcttatatgcttgttgtaacagctactatgttatttttcggaaaacttggtgataaagtaggttcaaatcgtctatacacattaggattttttatatttacaataggttcttttctgtgtagtatgtcaaacaatttatcaacattaatttcttcaagaatctttcaggcagttggagcaagtattttaatggctactgggcttggtatagtttccaatgcatttccagcaaatgaaaaaggaaaagctataggaatcactggagctgtagttggtataggaaatatgagtggtcctgtaattggaggtataattttagaacattttggatggccttctatttttattatcaatatacctattggtattatagcagtctttcttggcattaaatttctgcctaaacctgttttggatgaacaaaacaagagctttgatattccaggtcttctacttttcgcatcttgcactacgcttatattacttgcaatgaatgagaagggtaatacaagattgtatttaggtataacagcacttataatcttcttattgttggcattaagagaagtaaaatttgaacaaagctttattgacctacctctatttaaaaatagaaactttactgtaggcaatatcattggagtagcttgttattttcctcaaatggcagtatcttttctacttccattttatttagaacaattaaaaaatttatctcctatgatggctggttatgtaatgactgtacatccacttattatggtacttatagcacctattgcaggttcactttctgataaacacggtgcaaaaaacattctaacagcatctttttcatttatgaccatctcactagttggaatggcacttttaaaagcagattctccattgtatcttttaattgtatgtttagttatttttggacttgggctaggagcatttagttcaccaaacaatagtagtattttagcagatgttcctcctcaaaaacagggatacggaggcagttttcttgcaactattcgtaatttatcatttgctcttggaacagcattttttagtagtttttttgcacaaagtcttacatacaatcaaaagtttaaaagtcacacatcagcctatgttatagctagcaatcagtcttattggattgcagcatcagtatgttttatagggcttatactaactgttttctttatgagaaaaacagataaatctatttct

SEQ ID NO: 17415 - DNA, 1158 bp, Clostridium difficile
atgaaattaaacaaaacactattggcaatagggatgtctgtttcattattgattgctagttgtccaacatcaaacgctcttagttctattaattcaataaaaggtacaaataagtatgaaacagcaggtttaatagcagataaacaaaattatgatattgcaatacttattaattctgaaaatggattatctgatggattgtcagcaagtggattgtcaggagctaaaaatgccccaatattgttaactaagaaagatacaatcccttcagaaacattaaaaagattagaaaaggtaaaagaagtatatctaatcggaggaaaaaattcgataggagcatcagttcagaaaatattaagtgataaaaaaataagcataaatagaataagtggaactgatagaatagatacaagtcataaagttgcaaaagaaataggaagagtaagtacggttaaaaaagtaatattaactaatgcttttaaaggtgaaccagatgctatgagtgttgcttctatagcagttagagataaatctccaatagtattaactgatggaaacactacaagttttgctacagatggattagaaacttatgcaattggtggaaaagtcagtattagtgataagttaataaatgaaactaaagcaacaagaataggtggagtagatagatacgatacaaataaacaaataataaataaattttataatggctcaaaagaattttacatagcaagtgggactgatttagtttattctttagttggttctacaattgcacaaaaaacacctatagtgttagttggaaatggaagtaataagagtatattaaaaaatgcaagtaaaataactgctattggaaatattgatgatgttgttataaaacaatgtttaaatataactaataatgttggggattcaaatacaggtattgtaaaagatactaattcaaataatacgaacaaaccaagtaatgagcctagctctaataatcctggattaactgataaaagtacagtatatgtaactcctaatggaaaatcatatcatctaacaaaaaattgttctacactaaaaagaagtaaaacaataaataaagtaacattaaaacaagctaagtcacaaggtaaaatagacccttgtaatgtttgtgtaaaa

SEQ ID NO: 17416 - DNA, 540 bp, Clostridium difficile
atgtcagaattacaagaagcaagttggtatgtagttcatacctattcgggacatgaaaataaagttaaagctacaattgagaaagcagttaaaacaagaggtatggaagactgcataagacaagtagttgttccaacagaagaagtagtggaaactactaaaactggaaaagaaaaaactagacaacgtaaagtttatccaagttatgttttggttaaaatgataataactgatgaatcttggtatgtagtaagaaatactaagggagttacaggtttcgttggacctggttcaaaaccagtgccattaagtgaagacgaagtcaaagctatggggatagacacaacagatcctaaagtagtaaatagcgatattgattttgaaataggagatacagtaaaagtatctcaaggaccatttagtggacaaataggtaacatagaagaaattgacttagaaaatagagaagtcaaagtatgcataaatgcatttggtaaaaggactctatttgtaatagagcttgaaggtatagaaaaaatc

SEQ ID NO: 17417 - DNA, 492 bp, Clostridium difficile
atgattagaaaagcgaatatgaatgatttagaaagcattatgaaaattataaaatctacagtggaagaaatgaagacttataataatacacaatgggatgaaaactatccattagaaaaagactttgtttcagatattaagaaacaagatttatatatttatgaagtggatggagaagtagcagggtttatatgtcttaattatgaagagccagaagaatatttaggcttaaattggtcatctaataaaaaagcaatggtaatacatagaatggctgtaaatccaaactttagaaagacaggaatagcatctaagttagttgattttgctgaaaaattagctgtagaaaacaatgtatcatacttaaagagcgatacatattcaataaactcaaaaatgaatttattacttacaaagtgtggttttataaaaatcggagaaatgagttttttaggaaaggagaaatctttctactgttatgataaaatatta

SEQ ID NO: 17418 - DNA, 216 bp, Clostridium difficile
atggccaaaaaagatgttatagaattagaaggtacagtttcagaagctttacctaatgctatgttcaaagttaaactagaaaatggacatgagatattatgccacatttctggaaagctaagaatgaacttcataagaattcttgaaggtgacaaggtgaatgttgaactttctccatatgaccttacaagaggaagaattacttggcgtaagaag

SEQ ID NO: 17419 - DNA, 162 bp, Clostridium difficile
ttggaggtgtatcagatgagagttaaagtaactttagcatgtacagagtgtaagcaaagaaactacaacactactaagaataagaaaaacaatccagacagaatagaattacaaaaatattgtagattctgtaaaaagcatacaactcataaagaaacaaaa

SEQ ID NO: 17420 - DNA, 819 bp, Clostridium difficile
gtgagcaatatggaatacgaaaaatggaatgagatactagcaccttatgaacatgcagtagaggaattaaaaataaaatttaaaaatataagaaaagaatatttagcaaaaggtgaatattctcccatagagtttgtcacaggtagaacaaaaaaaatatcttccataatatctaagttaaaaaggataaatgcaaaagatatagaaactgaaattgatgatattgctggtataagaataatgtgccagtttgttgaggatatatatgctatagttgatttgataaaagtaagaaatgatatgactataataggagaaaaagattatattacaaattacaaagatagtggttatagaagctatcatgttataataaaataccctataaactccattgcgggttcaaaggaaattatatgtgaaatacaaataagaactcttgcaatgaatttctgggctacaatagaacattcattaaaatataaatatgaccattacatacctgagactcttgctgaaaggcttagaagagcatctgatgctgcctttcttttagaccaagaaatgagtgaaataagagaggacataatgaaagctcaggctatgtaccaaatgaagtctatagctattagagatactctaaatagaatacaagagttatatgacttgggtgatacacataaagctatgcagtaccaaagaaaacttgatagaactgaaacagataaaaatataactgaaattttggaattaaaacaagaaatagatatattactagagcaatataaggatactaaggtagatgataaagtagttcag

SEQ ID NO: 17421 - DNA, 768 bp, Clostridium difficile
atgagagctataatagtggaagatgaatttccagcaagaaaggaattgagatattttattgaaaataaaagtggaatagaggtagtaagtgaatttaccaatggtatagaggtgttagactttattcaggaaaataaaatagatgtaatttttttagatataaatatacctcatcttgatggaatgctacttgcaaaaacattaaatcagtttaaatcaagacctaaaattgtttttataacagcatatgaaagttatgcagtagatgctttttctttggatgtatttgattatatattgaaaccatattctgaagagagaattatttctatgctgaataaattagaaaaaagtgagatgagtgatattgaactatctaatgtaaatagtaatttatacaaatataagaaggaagcagtaaatcaggagatagaagaaataacacataaaattagcctttggaaaggtgataaattagttgtaatagatattgatgatatatattactgtgaagctaatgaaaggcagacatttatatatactgagaaagaaaagtttatattaaaagaaggcatatcagaagtcgaaaatcttataaatgataaaacattttttagaacacataggtcttatatcgtaaacttaaccaaagtaaaagaaattataccatggtttaataatacatacatattaaaattaaaaaatagtgattatgaagtaactgtaagtagaagcaaagtaaaagaatttaggctgttaatgcatata

SEQ ID NO: 17422 - DNA, 1704 bp, Clostridium difficile
atggattataagaataattatgagatgtggttaaattctccttattttgatgaacaaacgaaaaatgagctattaagtataaaagatgatgaaaaagaaatacaagatagattttataaaaatttagagtttggaacaggtggtttaagaggtataataggagcgggaactaatagaatcaatatttatactgttagacgtgcgacactgggcgttttaaattatatcatgaaaactcaaggagaagaaggtaagcaaaagggaatagttatagcacatgatagtagatacatgtctagggagttttgtatagaagtagcaaagactttaagtgcttatggtgtaaaggcttatatttttgaagaattaaagcctacaccagaactttcttttgctgttagatatttaaagtgtgctatgggaatagtaataacagcaagtcataatcctaaagaatacaatggatataaagtatatgactcagatggtggtcaaatctgtatagatatggcaaatgatataatagcagaagttaataagattgatgattacagtactattaaaagtatagattttgaagaagctttatctaaaaatttaataactatattagataatgaagtagatgatgagtttataaaagctgttaagaaacaagttttaagacaaaatataatagatgaatacgggaaaaaattaaaaataatatatacacctattcatggtacaggaaataagccagtaagaaaagtcttaaatgaatgtggttttgaaaatgtaatggtagttaaggagcaagaattgccagattctaatttttcaacagtaaagtatcctaatcctgaagaaaagtcagtgtttaatatagctattgaaatggcaaagaataatggcactgatttgataataggaacagaccctgattgtgatagagtaggtatcgttgtaaaagattcaagtggtgaatatgtagtcttaaatggaaatcaagtcggttcacttttagttagatatatattagagagtttagttgaagaaaataaacttcctaaaaacaatcctacaataataaaaactatagttacatcagaactaggtgcaaaaatagcaaaggcttataatgtagattgtttaaatactttaacaggatttaaatttataggagaaaaaataaaagcgtttgaagaaagcaatgatagaagttttataatgggatatgaggaaagctatggttacttaattggaactcatgctagagataaggatggtgttgtatcttcacttatgatatgtgaaatggcagcatactattcttcaaaaggtatgaacttgtatgaagctttgatagatacatataataaatttggatactacaaagaggacttaaagtcagtaactttaaaaggcatagatggaataaaaaaaataaaagagatgatgctttactttagaagtgttaaaatagataatgtggctgatgtaaaagtagataaaattttagactataaagatggtgttgatgatttacctaagtcagatgtacttaaatttttacttgaagatggttcttggatagctataagaccttcaggtacagaacctaaaattaaattttactttggagcaaattcagacaatcaagaagatgtagaatttaagttgaacaatttaatatcttatatattaaatgtagtggattctata

SEQ ID NO: 17423 - DNA, 1101 bp, Clostridium difficile
atggggggaattatgagtataaacgaaattataatctatgtaatggtagtcttcatggtacttggagctatagataaatgtataggtaacaaatttggtcttggagaacaatttgaagaaggtataatggcaatggggtcacttgcagttgcaatggttggtgttatatgtttagcaccagttcttgctgatgtattaagaccaattgtagtaccagtatttaatatacttggagctgacccagctatgtttgctggaagtttattagctaatgatatgggtggtgcgccacttgcacttgaacttgcgaaagaccctaatgctgggttatttggtggattaatagtaggggctatgatgggacctacaatagtatttataataccagttgcgcttggaataattgaaaaagaagaccaaaaattcttagcaacaggaatacttgcaggtataataacaatacctattggagcattcgttggtggattagttgcaggattcgaggtaatgatggttcttagaaacttagtgccaataataatatttgcagtagttatagcacttggattattaaaattcgaaaatgctatgataaaaggattcacatactttggaaaaggtgtagtaatagttataactttaggacttgctgctgccatagttgaagctttaacaggaatagttgtaatacctggaatgaaaccaatcagtgaaggtatagaaatagttggagatatagcaatagttttagcaggagcattcccattagtgtttgttataacaaaggtatttaataaaccattaatggctttaggaaaagttcttggaatgaatgatgtatcagcagcaggccttgttgcaagtttagctaactgtataccaatgtttggtatgatgaaagatatggacaatagaggaaaaataataaatgtagcattctctgtatcagcagcattcgtatttggagaccacttaggatttacggcaggatttaattctaatatgataacaccaatgatagttgctaaattagttggtggtataacagcagtattgttagctatggttattgcaaataagacactaaagaaggagaatgta

SEQ ID NO: 17424 - DNA, 588 bp, Clostridium difficile
atgaaaatagtctgcttaggagacagtttaacgtatggatttggagtatcacgaagtaattcatggacaaacattgtaaataaagagactcgattagaaatagtaaataagggtataaatggtgatacaacaagtggtatgttagctaggtttaatgaagatgttgtaaaaaattctcctgatatagtttttataatgggtggcaccaatgattttattgctggtgcgggaaatgaaattattaattctaatataatggctatggtgcatcagtcatattcaaaaaatattatacctataataggtataccattaaaaccagatattccaaatgttagggaagattggagttgttttactgattttaatatagtatctcaaaacttagaatcatatagttattggataaaaaaattttgtatgacatttaatactaatttcgtagatttttattcagaatataataaaaatatggaactagaaggatataaaaaattatattttgatgggttacatccaaccaaagagggtcatagaataatggcagacatttttattaattcaattaataagtatatagaagagtta

SEQ ID NO: 17425 - DNA, 135 bp, Clostridium difficile
atgagtaaaagaacttatcaaccaaaaaagagacaaagaagtaaagaacatggtttcagaaaaagaatgaagacgtctaacggaagaaacgtgttaaagagaagaagagctaaaggaagaaatagattaactcat

SEQ ID NO: 17426 - DNA, 684 bp, Clostridium difficile
atgaagtatagttacaaaaaatgcataatagattctattttattgatgtttatagttcaaatattaaggatgattttgaattatgtacttctaagtcaatttgaatttactcttgaaaattttaatattataaacttaatttcttttacattagttggtttatcgttaattttatttttaaaagataattctttgtataacaaggttagaaatagaaaaatcacagaagcttttgaagaaaataaaaacaatatacttattgaaaagtgtaagctgatactttttgttgtggttttatctttagcaataattgtaacttattgtactaagggatatgtactttttaatgtaactatgatgactttgtctgtattgatagttccaatatttgaagagttattttttagagaatatatatggaactatctaagtaattttataaagtcaaagagtaaaattatctgtataacatctatactatctggaatttataatataggatacatagatgttataagaaattatgtaatattgtataacaattcaagctacacctttgaagttattatttcaaaaattatgataggtactgtttttggtattgtacttggattagttaagtataggtttagagatgtagggttttgtatattattgaggagcttatttgctatatttattagg

SEQ ID NO: 17427 - DNA, 1341 bp, Clostridium difficile
atgaggaggaaaaaaatgggaagtaatgaactgaaaaagactcttggcgtatcagcagcattatcaactgttgttggttccgttataggagcgggcgtattttttaaaccacaagcagtctatacattaactggaggagctccaggtcttggtatattggcatggttaatagctggaatcataactataacagctggtcttacagctgcagaggtatcagttgcgataccaaaaactggtggaatgatggtatatataaaagaaatttatggagaaaaattaggttttttaactggatggatgcaaattgtattattttatccagggatgatggcagcattaggtgttatatttggagaacaagcatcagcactaattggtagtccatcacttttacttccaatagcaattggaattataataatagttgcagggcttaatatgttaggttcaaaaactggaggagtcatacaaactgtttctacaatttgtaagttaataccacttattttaataatggttgttggatttattaaaggtggtggaaataatccaatacttacacctatggttggtgaaggattaagcctgggtagtgtactaggtcaagttttaattgctatattatttgcttttgatggatggatgaatgttggtactttagctggagaaatgaagaatcctggaaaagaccttccaaaagctataataggtggattgtcagttgttatggctgtttattttataataaatttagcgtatctttgggtattaccagctaatgaattagcaaattatgcttctcctgcatcagcagttgctgaagttatatttggttcaatgggtggaaaaataatatctgtaggtatattaatttcagtgtttggagcattaaatggatttttactaactggttcaagggtggcatatactttagctacagataagactttaccaaagtatggtatattttctaaattaaattctgctcaagttccagcaaatgcaatagcattagtatctgttattgcatctatatatgctttgtcaggtcaatttaatttattaactgacttagctgtatttgctacttggatattctatgtattaacttttataggggttatgaaacttagaaagactcatccaaatataccaagagagtataaagttccattatatcctattgttcctataatagctatagcaagtggtatatttgttgtagttaatcaattgtgttttgcaggtatgaaaactactatgatatctataggaggtcttgtaataacagctataggcttaccagtgtatgcttatatgactagaggagtaaaaaga

SEQ ID NO: 17428 - DNA, 1149 bp, Clostridium difficile
atgaaaaaggcaattcagtttggagcaggaaatattggaaggggttttattggaggcttgttagttaagtcgggttatcatgtagtatttgctgatgtaaatgagtatatattaaactcaataaacaaagataaaaagtatactatacacataagagatgtagaatgtatagatgaagtaattgataatataagtgcggtttcatctataaaagaagaaataatagatgagattgtacaggctgaaataataactacagcagttggacctttagttttgactaaaatagcctctacaattgcaaaaggtataaaagctagaaaagaaaagggattaacaagtaatctaaatataatagcatgtgaaaatgcaatatacgcaagttcttctttaaaagaagaggtacttaagtatttaaataaggaagaagtagaatatttagagatgtatgttggttttccaaactgttcagttgatagaatagttcctcctggtaaaaacgaaaatcctcttgatgtaacagttgaaaatttttatgagtggaatgttgaaaaacaaggatttaaaggggaaataccaactatagttggaatgaatttagctgataatcttatggcttatatagaacgtaaattgtttacactgaatacaggtcatgctataacagcttatataggatatttaaaaggatataagactatagaagagagtataaaagataaatttatctgtgatatagtcaaaagtgcaatggtagaaagtggagaaggattgattaaaaaatacaattttgactcagaagtgcactataaatatattgataaaattttaaatagatttaaaaatccatatcttaatgatgatgtattaagagtcggaagggaaccattaagaaaactaagtgataaagatagattgattaaacctttaatgacagcaaaatcatatggattatcagttgataatttgattcttggaataggtgcagcgcttcattataataatagtgaagatactcaaagtgtagaattacaagagttgataaagtctattggggtaaaaaaagctgttgctaaaatagctaatataagcaatgacgaagaacttttaaataatatcgaaaaaagttatatatttatgaaaaattta

SEQ ID NO: 17429 - DNA, 3096 bp, Clostridium difficile
atggatgtaataaatttaatagatgagttggatgaaattgtatatgtttcttctttagatacatatgaacttttatatattaatgaaattgggaaaaaggcaatgggacttaatgatatatcccatttaaaatgttataaagcattacaggggaaagattctccctgcgaattttgtacaaactctattttaaaagaagatgaatattacatatgggaaaatacgaatactcgaacaaatagacattttatattaaaggacaagttaattaaatgggagggcaaacatgcacgattagaaatagctcttgatattacagaaaaggaagatataagtaagtcaatagcagaaaaattagagataaaggagttattagttggatgtattaaacatcttataacagaatctaatttttctgatgctgtaaatcttgtattaaccaatattggtaaatttcataaagctgatagagcatatgtttttgaagtatcagaagatagaaaaaaagtaactaatacatatgaatggtgcaatgaaggtgttgatgaacaaaaacaggcactaacaaatcttgatattaatgaattaaagaattggtttttattattcgaacaaaaaggttttgtaataattgatgatatagaaaatataaaagaagaacagccaatagaatatgaaattttaaaacctcaaaaaattgaaagtttaatgacatcttcactaaaacaagatgataaagtagtagggtttattggagttgataatccacataaagctgttggagatacctctcttttgacatccctatcttattttttattaactgagatgaaaaaaagaaaagtagaaaataaattaaattatatgagctactatgacttcttgactggtgcatataatagaaataaatatattaagtatatagataattttcaaaaaggaaaagttaaatccataggagttgtatttgtagatataaatgggttaaaagatattaatgataactttggacatgctaatggcgattctgctattgtgtcagcatgtgtaataataaaaaaatactttcattcttataatgtttaccgtattggaggagatgagtttgttgtattatgtgaagatatatcaaaacaactatttgaagaattagtgagttggttaagtgaagaatttaaggatgagatgatatatagtgtagcagtgggcagtatttggagtgacgataatattgatatacataagctaattaaagttgctgatgagagaatgtaccaagataagaagaggtattataataagaacaaacttagaaataatgaaatgaaagtaattagtgacttagctgattcgacgaataatattttatttaaacataaagagttagttgataaggtttattttgatgatttaatgataaaagggtattctaaggcttatgaaaaattagcttataatacatatgatataattttatctatttgcattgatacgaatttaattactccaatttatcaatcagagagcaatatttttagttttcctataaaggaaaatcttgaaaaaactttttcatacataaaaaaacatttaattcatcctgatgatataatattatttaatgataaccaccttctaaaatctcttgatagtcttaataatagcaagcaagacgatttagaactaaattttgagtatagacgtttaggaatagataaaaagtactattgggcattaatttatatgttaaagattagtagtaaaaataagttaggtgagaaacaaacacatattttagttgctataaaaaatatagattatcttatgcaactacataaaaaccaaaaagatacattaacaggactatacaattatgaaagtttttgtgaacaaataagtttaatgcttaaaagatatcctgacaagcgttatgcaattataatgatggatatagataagttcaaggtaattaatgacatttatggagttagaggaggagataaagctttaatatatgttgcagagttgattcaaaaaaacattggttctaatggtatatgttgtcgtatgtatgcagatgtattttgcattttttatgagagttactctgatagagatattcataaggtaatttataagattaaaaatagcttaaatagaaaaaaatttgaatatatgttagtaccatgttttggggtttatagaattttggataatcatattccaattacaaatgcgtgtgaaatggcaggatatgctcacaaaaaagtaaagaaacaaagtatcaataactatatattttatgatgatactataagaaatgatgcacttgaagaaaaacagatggaaagggaaatggaatacgcacttgaaaatgggcaattccatgtatatttacaacctaagtataatcttaatgcaaataaaattgttggtgcagaagcattggttagatgggttcatccagaaaaaggtataatacctccaattaaatttatttcactatttgagaagaatgggtttattatcagattagatatgtatgtatgggaacaagtatgttctttgattagaaaatggatagatttaggtgaagagccagttcctatctctgtaaatgtatcaagattacatttgcataatccacattttaaagaaattgttttaagtttaataaataaatatagtataccaaaatcttttttagaattagagcttacagaaagtttatttattaaaaatataaaattatttactaagataatagccgaccttagaatggatggtattgttttaaatatggatgactttggttcagcatattcttcattaaatatgttaaaaaatattaatattgatacattaaagatagattgtggtttctttaatgaggaaggaatcacagacagagaaaaaatagttttaaagcacactatagccatggcaaaagatttagatatggatgtagtggcagaaggtgtagagacaaaagaacaagctgaatttttagtgactttagattgtgtggtaattcaaggttattattattgtaagcctattccaagtgctgattttgagaagttactttatcaaaaa

SEQ ID NO: 17430 - DNA, 1251 bp, Clostridium difficile
atggaaagcaaaaataatgttaaaagatttttgataatattcatattggcatttggaacaacagctatgtatagtttaccatatatgaaatcatcattttatgacccaatgcaacaagctttagcattaagtcatacacaaatagggaacttattgagtttatatggattagtaggaatggtatcttattttataggaggatggtttgcagatagattctcagttagaaaattaataactttttctttaattgcttcaggaatacttggattttatttctctacattcccatcatatagtatgatacttttaatatttgtattatggggatttacgacaatattaaccttcttctcagcctctgttaaggttgttagaatgcaaggaagtgagtcagagcaaggaagaatatttggtttttatgaagggttatcaggtgtatcaggtacattaatttcttttataggtctttatttctttggtaaatttgctgaaataacagtaggattcaaatatgtagtatggttatattctgcagcatctataatatgtggtatacttctatttttcttagtagaagagaaaaaagatagtggagcatcagatgaaggattaagtattaagtcattgttaaaagtagttacaatgccaaaggcttggttaattggtcttataatattttcaacttatttagtattctcaagtttaacttatttaagtccatacttatcagaagtttatgtaatgccaatgactctagtttctgctttatcaataataagaacttatgttataaaaatgggagcatctccagttgctggtgttataacagataaagttggttcatctataagagtaatgtttgtaggatttatattaatgacagtaagtacagctgcttacttggttattcctaagagtacaggatttatatggatagctgtaataaacatgataatactaagtgtaattttatttggatttagaggtatatactttgcatctgtttcagagtctaatatatctttagaaactacaggagcagtagttggatttgcttcatttataggattttctccagatgcgttttattacactattgcaggtaattggttagataaatatggacaaacaggatatacatatatatttattttatctgtagtatgtgcagttatagggatatttgctacttatgctttaaataaaataaataaaagagaaaataaaggtttaaacaataaaattgct

SEQ ID NO: 17431 - DNA, 771 bp, Clostridium difficile
gtgaaaaaggggaaaatgatgatgaataaagtacattttgtaggagcaggacctggagataaagagctgataacattaaaaggatacaaattattaagtaatgcagatgtagtgatatatgcaggttcacttgttaatcctgaacttttggaatactgtaaagaagattgccaaatacataatagtgcacatatggatttacaagagataatagatgttatgagagaaggtatagaaaataataaatctgttgtaagactgcaaacaggtgatttttctatatatggttcaattagagaacaagtggaagatttaaataaattgaatatagattatgactgtactccaggagtaagttcttttttaggggcagcatcatctttaggggttgaatatacagttccagaaatttctcaaagtgtaattataacaagaatggaaggcagaactccggttccagagaaagaatcaatacaatcatatgctaagcatcagacatctatggtaatatttttatctgttcaagaaattgagaaagttgtgtctaaattactggaaggtggatatccaaaagatactcctatagcagttatatacaaagcaacttgggcagatgaaaaaatagttaaaggaactttaagtgatatagctgtaaaagttaaagaaaacaacataaataagactgctttaataatggttgggagatttttaggagaagagtataataattcaaagttatatgataaggatttcaaacatgaatatagaggg

SEQ ID NO: 17432 - DNA, 738 bp, Clostridium difficile
ttgaaaaaaagaagaaagttaaatacgaataatgtcatgataattttagtttttatacttatgttatctttttgtatatgtataattgtaaaaagtgatttatttgatgtaaagaaaatagatgtaattggaaataagagggtgaccaaatcaaatataatgaaagaactaaatgtaaatctaaatgaaaatatttttgcatacaattttaaagatatgaaaaataaacttataaaaaatccatatatagaaaatgtggaaataaaaagaaaacttcccaataagataattataagtttaaaagaaaaagaaatatttgcagtattaaaagatgaagataattattgttatatagataaaaaaggaaatttattggaagaactaagaggttctaatgaaagtaaaaaagacttgatagtagatgtagattatagcattgatgataataaatctataaaatttaaaaattataaaactaaggagaatgtatttaaaactttaaattatttaaaagaagaaggaatttatagaaaaataaattatgtaaacttaaaaaaagaaagcaatatagaaatgcttacaagaagtaatataaaaatcttactttctaatgatgataacttagattataatatatctagggtaagtaaaattctgattgacctgcaaaataaaaatactaatggagggactataaatcttaactatggaaagttggcagtgtatagtccagaagga

SEQ ID NO: 17433 - DNA, 432 bp, Clostridium difficile
atggacccagtaatttttattatagcatcacttattacagtgtatttattaaatatttttcttggatacttacagcttaaagattttaataaaaattatattgaactaaaaagaaaaggaagagtggcaattggcagaaaaaaaggaagaatttcatcgggtacaattgtgttgatacttataaatgatgatggtgtgattgtcgagactagaaaaatgcaaggtgttacagtattggcaagagtaaagtcatttgaaggtttggtaggaaagagcttagagtatatagaaaaatcagatttaactgtttacaataaactacttaaaaaagcaatactagatgcagtcaaacagtacataacatttgagaaaaataaatgtgaagatacaaataatctgagtactgatgaagagtgtaggatggaagtagtt

SEQ ID NO: 17434 - DNA, 234 bp, Clostridium difficile
atgaaatatatgaaagagctagttgtagatatagctaaggctctagttgataatcctgactcagttgttgttgaggaatttgaagataatgatggtatcgtcttaaagcttacagttgctcaagaggatatgggtaaggttattgggaagcagggaagaatagctaaagctataagaactgtcgtaagatctgttgcaaatagagaaaatataaaagtttctcttgagatagta

SEQ ID NO: 17435 - DNA, 858 bp, Clostridium difficile
atggataaaaggagggaagctgcaatgtcttacaaagtaattaatgtcataactgctattgactatatagaggagcatttatcagaaaagctggatttagatatagttgctaatgctgttcattactcaaaatatcacctgcatagaactttcacaacttctgttggtctaacaatgcatgattacataaagcggagaaagttgacagaagcagcaaaattattggtattttcaaagaaaccaattattgaaattgcattgatagctggatatgaaagtcaacaggcattcacttctatatttaaagctatgtataaaaaatctccaaataaatataggaaagaacaagaattttatcctttgcagctaagatttgttttgaaaaaagataacctatttttaaagaatgtactagagttggaaaaagaaattaaacttgcaagtatgtctgacataccattatggatgaatttagtgagattagtcatagatggatttcccaatttgcaagaggaagaatatatatatcaattagaacagtatattttagaagaaagagctttaatattaaaacttaataatgtcgctattgcaaatatggtgtttaatagagaaactagaagtattgatttttttggaatacatccacagtatcgtaattcagacattgcacaagtgtttttgaagaaagttattgaagatttcttgatagatacagatatttcaattactacctttcgagagggtgacaaagctgatacaggacatagagatatgataaagaagttgggctttgcagaagcagaattgcttgtggaatttggatatcctactcaaaaatttattcttcctttaagt

SEQ ID NO: 17436 - DNA, 1014 bp, Clostridium difficile
atgaaaattaaggtaggaatgaacggatttggaagaataggaagagctgtattaagaatagctcaagaagaattaggagataatatagaaattgtacccataaatgcaagagcaacaacagaatctttggcacatttatttacatatgattcatgctatggaacttttagaggtgaagtagaggcaaaggatgaagacactctagtagtaaactctaaagagataaaaatattaagatataatgacccagaagaattaccttggaaagaattgggggttgatatagtaatagaatcaacaggattatttacacaaagagaaaaggcagaaaaacatattaaagcaggagcaaaaaaagtaattataacagctccaggaaaaaatgaagatataactatagttatcggagttaatgagaaagaatatgataatgaaaagcacaatataatttcaaatgcatcttgtactacaaattgtctagctccttttgctaaagtattggacgaaaaatttggtatagtaaaagggttaatgactacagtacattcatatactaacgatcaaagaatattagataaaagccataaagatttgagaagagcaagagcagcggctgaatctataatacctaccactacaggagcagcaaaagctgtgtcaagagtactaccacaattagaaggaaaattaaatggtttttcacttagagtaccaacaccaacagtttcacttgttgatttagtgtgcgaacttaaagaaaacgttacatctgagcaagttaactctgtgttaaaagatgctgctgaaggagaattaaaaggtgttttaggatattgtgacaagccacttgtttctatagattataaaggagattcaagatcatctattatagacgctctatccacaatggttatagaagacaatatggttaaggtagtttcttggtatgataatgaatggggatattcttcaagaactgttgacttagtaaaatatgtagctgaaaaattaaaa

SEQ ID NO: 17437 - DNA, 666 bp, Clostridium difficile
atggaggaacgtcttatgaaggtagatccacttacaactcaagtatatgactatatatcaaagaaaatccaaaatggagaatatgaagctaatcagagaattactgaatctgagatttgtaaatctatcggagttagtagaacaccagcgagagaagcattaactaggttagcaggtgaaaatttactagaaaaaatacctaataagggatttgtagtaaaagaatttcaggaaaaggagaaattagacacctattccgtaattggagtattggatgcgttagccggttcttcagcattacaaaatttaactgaatcagacctagtaaaaatggaagaattaacagaaatgatggcggtctctataaagtataaaaattacaatagctatttaaaattaagtaatgaatttcacgatatatacataactaaatcagataatcaggtgttagtaaatctattgaactctttaagatataattttatgtcaaagtcatatactagtgataatgaagatgagttatataaaatgttgacatacagcaataatcaacatattgaagtagtaaaatctatgagggagaatgatttagaaaatgttgaaagagttttgagagaacattggaaaacgatacctatagcagagatgaaaaaagagaagctttta

SEQ ID NO: 17438 - DNA, 863 bp, Clostridium difficile
tatatttctaactacttatcaaagagtattagcatagttgattattctacacttgaactagaaaaagaaatagtattagaagataatatatatccacaccatttttgcatagaaaaagaaaaaaatttaatatacatacctagttcaagtaatgggatactctatgtcttagatttaagtaatgataaaataattgatactgtctctataggaggaagtcttagtcaagttgtacttagcgataatgaattgtttgtggcaaatgaagattctaatagtatatatgtactagataaaaacacattaaatccaataggaattattggagttgataatatgccacatggatttgactttgatagagaaagcaaaaagttatatgtaccgtgtataaactcgatagtatgtatagatacaattaataaaaatatacaaaagaaaataaatatggactttagagcttggcatatagaacttgataaacaaaagaaagaaatgtatatatcaacacttgatggaaagcttataataatagatgaagtaagcatggatataaaaaaggtattatatgaatttttattaccagtagaaataagatttaattatagtggcaaaaaagtttatgttgctgatttgggttataataatgtaagaattttagattatacaacgagtagatacattggaaatattgaaataaatgggattccccaaggattagaaatatctaaagatgaaaagttactatttgtatcagatacacaagaaaattcagtaaaagtttatgaaactgcaaataacaaattaataaaagaaatcaaggtaggaaaagagcctacaactataatttgtttgtaggcttt

SEQ ID NO: 17439 - DNA, 2217 bp, Clostridium difficile
atgacagggagaaataaaagttttacattaattacaattctttttttaacatcattatttttgacaatggggtatatctatatagaagatacaaaacatcttcttatgtcagaggcaaaaatacatataaaagaagttgcagtacaaggctctcaactagcacaaagacaaattgaaaaagatttagatgttttaaatattttttctaactattatgcttcaaatccagatatacctaatgaggaaaaaatgaaaaatcttttagatgaaatggaaaatcaaaaattttacactatggcaatagttgatataaatggtaatgctgaaaataccaaaggcgataagttttcagtgaaagatagagaatttttcaaaaactcaattaaaggtaagaagtatgtttcaagtccatatgttgatgaagtaaataagtctataaagaagattgctatttcagtaccattattaaataatgataaagtagttggagttttatattgtacttacaatatcaatactctgatgaaacttattaatatatctttttatgaaaataatagtatatcttatgttgtaaaaaataatggtacaattatccttcatccacaaggggatagcctatcaaaaaatatttataaattgttaaaacaggataatgatattcaagaagtaaatagattaaaaaaagaattgcaagaaaataaaacaggtgcaactgtattaaatatgttggaagaaagaagatatttaggatatgccactatggataatgggaatagtgaaaataattatataaaagactggaatttaattttttcaattccagaaactgttgtatttagtaattcaaaacaaataatcaacagagctgtatatgcagtgttatctattgtattaatatttattgcaattattttttatataatttatataaaaaaatctaatgaaaaagaaatattaagtttggcttatgaagataaagttacatatataggaaatcaaaataaattttatagagaatgtagtaagtatcttttagataaaccatctttaaattatattatagtatattttgatattaataactttaagatgattaatgatacttttggatatgaatttggtgacaatttattaattacaatagcaaaagctttaaaagaagaattaacagaaggtgaggtatatgcacgactttcaagtgattattttgcaattttctgtgattataaaaatggaagaaataaaattataagaaaacttgataatatacgaagtaatattgaaagtaatttgagtatagtctttgaaatttctctgtgtgtgggtatttattttgttgaagaaggtgaagtagatattcaaaaggctgtaaataaagcaaatatggctaggtctgttgctaaaggtaaaaatataaattatgctatttataatgaagatgttaggaataagcttagtgaggaatcaatgattttagatgatataaaaatagcattggtaaaaaatcaatttgaagtgtattatcaacctaagttttcacttgtaactggagaaatgatagggagtgaagcactaataagatggaatcatccagaacatggttttataagtcccgcagtatttattccaatagcagagaaaagtaagttgattttaaaaattgggagatttgtatttgaaagggtttgcaatgatttatatgaatggaaaaagcaaggtaaaaagatagttccagtttcagtaaatttatctagggtcgagttgtatcaaccagatattgtaaaatttatcaataaaacaataaaaatgtataatttaagttcagatttcattgaaatagagataacagaaactgtggctattaatgagttaaatattttaaagaatgttttaaatgagttgaggacgtatggattttctatttctatggatgactttggtacaggatattcttctattagttgtttaagagatatgccaattgatatattgaagctagataagtcttttcttggtggcattgaacatgatgagagaagtcgcaatatagcaaaatcaatagtgtctctagcaaaatcactagatttagttgtaattatagaaggtgttgagagtaaagaacaagctgagttaatgaaacaatttggatgtgatttagttcaaggattttattttgcacgaccaatgccagctaagaattttttagatttactt

SEQ ID NO: 17440 - DNA, 1350 bp, Clostridium difficile
atgaatatacactttataggaattggcggtatcagcatgagtgcattagctgaaatatgtatcaataaaggttatcaagtttcaggttcggattcaaacgaatcatacctattagacaaacttagggaccaaggggcaactatttatattggtcagaaaaaagataatatatcagatgatgtaaatatggttgtttatacagcagcagttcatccagacaatgaagaacttgtggctgctaaagaaaaaaataaattggtaatgaacagagcgacttttttaggccaaatcatgagggaatataaaaattctatagcagtttctggaacacatggaaaaacttctacaacatctatgttatctacaatctttgaatatgcagacttagacccaactatactagttggtggtaacttaagtatgataggtggtaatgttaagataggtaattccaaccactttataactgaagcatgtgaatatgtagatagtttccttaattttaacccaaagatatctatagttttaaatgttgaagaagaccatcttgattatttctctggaatagatgaaatcaaggcttcttttaacaaatttggaaaattattacccccagaaggctatttcataataaatggcgatgatgaaaatattgatgacatattgtatgatgttaaagctactattataaaatacggcagagattctgacaatgatgctgtaataaaagatattcactttgacaatagtggtcatggaatatttagaatagaatatgagggaagagatttaggagaatttgaactttctgtatatggtcttcataacatatacaatgcttcttctgccataatggcagctcttgtttctggtattgacttagagactataagaaaaaatataaaaatttataaaggtgtcggaagaagatttgaaactaaagggtattataagaatgctttagtagtagatgattatgcacatcatccaactgagttaaaagcaactttagctgctgccaaaaaattaaaaaaatcaactttatggtgtatcttccagccacatacttatactagaacaaaatctcttttaggtgaattttcagaggcattctatgctgctgataaagttatcataacagatatatatgctgctagggaaaaagacccaggagatatacattctaaggacttggttgagaaattatatcaaaacaatgtagatgccatctatataaaagaatttgaagatatagtaaaatacttacgtgaaaatgttaaggataatgatttagtaataactgctggtgctggtccaatttataaggttgcagacttgttggttgaaaaa

SEQ ID NO: 17441 - DNA, 2559 bp, Clostridium difficile
atggtagaatttatattaaatggagagaaagttgttgcaaaagaaggcaaaaaacttttagacttccttagagaagatatgaatataacttcagttaaaaatggatgttcagaaggtgcttgtggaacatgtatggttataatagatggtaaagctactaaagcatgtgtatttaaaactgataaattagctgggaaaaacataacaactatagagggattatcagagagagaaagagatgtttttgcatattcttttgctagtcaaggagctgtacaatgtggattttgtattccaggtatggtaattagttcaaaagcacttatagacgttaataataatcctactgaagatgatataaagaaagctttaaaaggcaatatatgtagatgtacagggtatgtaaaaataattaaagctgtcgatttagcagcaaagatttttagagaaaatatagatgtgccaaaagtaaactgtaagggtctagtaggtgaaaatcttcctagagttgatgcagttggcaaagcacttggatattctgaatatgtagatgatatgagaattgagggtatgatttatggttcagcagttagagctaagtatcctagagctttagttaaaaaaatagatatagaagaagcaaaagcttatccaggagttgttgcagttctaacagctaaagatattccaggaactataaaggtagggcacttaaagaaggattgggatactttaataccagaaggtgaaataactagatacttaggagatggaatagttttagtagcagcagaaactagagaagcgttagaagaggccaaaaagctagttaagatagattatgaggaattaacaccattaagtactacagcagatgcacttagagaagatgctccaaagatacatgagacagggaatatacttgttaaggaacatttagtaagaggaaacgctaaagaaaagatagaaaattcaaaatatgttgtaactaaaagatatactacacctgctacagaacacgcatttttagagcctgaatgtgcagtagctggtccttatgaagatgatggagtaataatctattcaacagaccaaggggtgtttgccactcaacatgaatgtgcagatatgttagggttaccatatgagaaggtaagagttataaacaaaatggtaggaggagggtttggtggaaaagaagacatgagtgttcaacaccatgcagccttacttgcataccatacaaagagatttgtaaaagtacagttaacaagaaaagaaagtattattgttcatccaaaacgacatgccacagaaatggaatttacgacagcatgtgatgaaaatggatacttaacgggtatgaaggcaacgataatatctgacacaggtgcatatgcctctcttggaggaccagtgctacaaagactgtgtactcatgcagcaggaccatacaattatcaagatattgatataacaggaacagcagtatatactaataaccctcctggaggagcatttagaggatttggagttacacagagttgttttgcaactgaatgtaatctaaatttacttgctgaaatggttggaatatctccttgggagataagatataaaaatgcaataagacctgggcaagttttaccaaatggtcaatttgcggatgaaggaacagcaatggcagagacactagaagctgtaaaagaagagtatgaaaagcatccacgtgcaggtatagcttgtgctatgaaaaatagtggggttggagttggtatacctgatgttggaagatgtagattggtgataaaagatggcaaagttcacataagaacaagtgcttcttgtataggtcaagggcttggtactgttatgactcaagtagtttgtgaaactgctagcctacttcctgaaaatatagtgcatgaagttccagatactcatttaacaccagactctggtaatactacggcttcaagacagacagtatttacgggagaagcaactaaggttgcatcaaataagttaaaagaagctttagactctggcaaaactttacttgatttagagggagaagagttttatggagaatatgaaagtattacagataaaatgggttgtgacaaagaaaatccagtaagtcatgttgcttatggatatgcaacacaagttgtaattctggatgaaaatggaaaattagaaaaagtagtagcagcacatgatgttggaagagctataaatccaatcagtttagaaggtcaaatagaaggtggagtagttatgggtcttggatatgctctaaccgaagattacccagtagtcaactctgttcctacagctaagtttggtacattaggtttatttaaatctacagatataccagaaatacaagctttaatagttgaaaagaacaaagatttattggcttatggggcaaaaggtgtaggagaaatttgtacagttcctactgcaccagcagtacaaaatgcctattatgtatttgataaagaatttagaactgagctaccactacaaaatactccatatagtaaaaaaaag

SEQ ID NO: 17442 - DNA, 1857 bp, Clostridium difficile
atgaagagatttttgaggagaattatcttagttttatttattttgttgatttttataagttttatttctattaaattaattcataatgttggagattatggaaaattgattaattatgttgggattgttcgtggagctagccaacgtctaactaaactagagatgaatcatcaaccaaatgatgaattaatagaatatattgatgaaatcctacaggagttgattacagggcatggagattatggtttagtaatcactgattgtaatgaatacaatgaggacttacttttattagaaaaaaagtgggaagatttaaatattgaaattaaaaaagtaagaatgaaagaacagaataaccagttattaagtataagtgaagagtttttttctcttgcaaatgatacagtgtttaaaatagaaaacttttctaaagaaaaaagtaattacttaatgactttaataataattatatctattataggtatattagcatgtatcatattgattttacaatatagtaaaaaaatggttagactggaaaaattaaatgtagatttaaaaaatattgcatataaagatgaactaacaggagtaaatactatagaaaaatttaaattggatgcaaatcaaaatatttgtatacataaggataagaaatttgctgtattctatattgattttgaaaactttaaatacattaatgatatatttggatatgattatggtgacatgatactgaaaagatatgctaatcttatgatgaatgacatagggaaatatgaaatatttgcaagagaaattgcagatagatttgttgcgttaagatgctatgtagataaggaagatttagtggtaagacaacgagatgtagacaatgaactaattaatataacaaatgaaattaaaaataaacatagtattactgttgttagtggaatttgttgtattgaagatgtaaatgaaaaattaagtatagatggtttaataaatagagcaaattttgcacaaaaaactgttaagaataaaccaggtactaattatgctttttataatgacagtattcgtaaaaaaatgattgaagaaaatactatcaagagtagaatacatgaagctattgaaaaaagagaatttatagtttatttacagcctaaagttaatttacatagtcaaaaaataaattgtgcagaagctttagttcgttggcttactccagataaaggtattatatcgccagcaatatttattccagtacttgagaagaatttttttattgccttagtagataagtatgtttttgaggaggtttgtaaatggattagaaagaggttagatgaaaataaaccttttgttcagatatcagttaatgtttcaagaatacaattttataacactaaatttgtagaaacttattccaatatacaaaataaatacaggatacctaaaaatactatagaaattgaatttacagagagtgttgcttttgagaatcaaaaacatcttttggaaattatacatgatttgcatgaaaatggatttacttgttctttagatgattttggaaaaggttattcgtctttaagtgttttaaaagatttaccatttgatgttttaaagcttgactctatgtttttcaaggctagtttagataaagataaagagaaaatagtaataaaaaatattgtacatatgttaaaagaacttaatatcacaactgttgctgaaggcattgaatgcaaggaacaagttgaatttcttagggatattgggtgtgatttagttcagggatttgtattttataaaccaatgccaatattagaatttgaaaaaatattggataaagagtttgtttataatagc

SEQ ID NO: 17443 - DNA, 627 bp, Clostridium difficile
atgagcaaagtggtagagacaaaccatccattaatacaacataaattaactttaatgagagataaaaatactggttctaaagactttagagagcttttaactgaaattgcaatgttaatggggtatgaaataacaaaagatataccattaaaagatgtagaaatagaaactcctattcaaaaaacatcatctaaagtagttgcaggtaaaaaattagcaataattccaattttaagagcaggtcttggaatggtagatggattagtgagcttaatgccagcagcaaaagttggacatgtaggactatatagagacccagaaacattaaaaccagttgaatattattgcaagcttcctcaagacataggagaaagagatataatagtagttgaccctatgcttgcaacagggggttctgctgtagcagctatagatttacttaagtctaaaggagctaaaagtataaaattagctaatttagtagctgcaccagaaggtatagcagaagtgcaaaaatatcatgatgatgttgatatatatgttgcatcagttgacgaaagattaaatgaacatggatatataattcctggtcttggtgatgctggagatagattgtttggaactaaa

SEQ ID NO: 17444 - DNA, 222 bp, Clostridium difficile
atgtttaataaagttgtagaaataataatagagcaattaggagtagaagataaagaaataactatggaaacatcattaatgaaggatttagaagcagattcattagatgcagtagaaataataatggcacttgaagatgaatttggtatagaaataccagatacagaagcagaaaacttcaaatctataggagatatagttaagtatatagaagctaataaa

SEQ ID NO: 17445 - DNA, 915 bp, Clostridium difficile
atgatttatacagtgacattaaatccatcaatagattatatagttaagctagatgagctaaagacaggaagtacaaatcgtgtaaaagaagaatacgtttatccaggaggaaaaggtataaatgtatctcgcatacttaaggaacttggaaatgataacacatctttaggttttataagtggttttactggagaatatataataagaacattggaagaaaaagaattgaagacagattttataaagataaaaagtggtttttcaagaataaatgtaaaaataaaggcgttaaaggaaactgagattaatggacaaggtccaaatatagatgatgaagacattgatactttatataaaaaacttgataagctaaatcaagatgatattttaatattggcaggaagtataccatctactttagatgaaaaactatacgaaaatataatggctagattagaaaaaaagaatataaaagttgtagtagatgcaactaaaaatcttcttcttaatgttttaaaatacaaaccttttctaattaagcctaataacgacgaattagaagaactatttggtgttaaattaaattcaattgaagacatggtaaaatatgctagaagtttaaaggaaatgggagctataaatgtcttggtatcaatgggaaaaggtggagcattgttgattacagaggaagaagaagtgcttataagtgatgttccaaaaggaaaagtaaaaaattctgtaggagcaggtgattcaatggtagcaggatttatatctgggtatttgaatactgggaaatatgattatgctcttaaattgggagcagcttcaggtagtgcaactgctttttcatatgacttagccaaaagagaatacattgataaattggtaaatgagatatctgtaaagaagttt

SEQ ID NO: 17446 - DNA, 381 bp, Clostridium difficile
atgaagggaagattgcccaaggtgagtactaattgtgaaataaagcgtggtgatttatattacgctgatttaagtccagttgttggttcagagcagggaggcgttagacctgttctgataatacaaaatgatgtaggtaataaatatagtcctacagttatagtatcagctataacatctcagattaataaagccaaattacctactcatgtagagataagttccaatgaatatgggcttaataaagactcagtaattcttttagagcaaattagaactatcgataaaaagagactgagggaaaaaattggttgtctagatgaaaatatgatgataaaagtagatgatggacttcaaataagtttaggattgtttactttt

SEQ ID NO: 17447 - DNA, 1698 bp, Clostridium difficile
atgcaagattttaaggtggcaatatcaaattgccttaaagaaaaaatagaagatttatcgaaagaagagatagaggcacttatagaagttccaccaaataaggatatgggggactatgcttttccatgctttaaattagccaaagtgtttagaaaagctccaaacatgatagcaagtgaattggcggaaagtatagaaccaagtggagagataacaaaagtaatacaattaggcggatatgtaaatttctttgtaaataaatctcaattagcagaaactgtaattaaaaaagttttagacgaaaaagaaaattacggacatagtgattttggaaaagataaaactgtaatagttgaatattcttctccaaatatagcaaaacctttccatatagggcacataagaactacagttataggtaatgctttatataagatatatgattcgcaaggatacaagactataagaataaatcatttaggtgactatggaactcagtttggtaagttaatagtggcctttaaaaagtggggagaaaaagaagtagtagagtctaatccaattccagaattgctaaaattatacgtaagattccatgatgaagctgaacaacacccagaaatggaagatgaagcaagagcatggtttaataaattagaaaatggtgacgaagaagcacaagaattatggcaatggtttagaaatgagagtttaaaagagtttaacagagtttataaacttttagatatagaatttgattctttagcaggagagagtttttattctgataaaatgaacagagttatcgaactattagaagagaaaaatcttttaaaagagtctaaaggagcaagaattgttgatttagaagagtataaaatgccaccagcacttattactaagaatgatggttcaacgttatatatgacaagagatttagctgctgcaatatatagaaaagaaacttatgattttgacaagtgtatatatgtagttggttctcaacaaaacttacatttccaacaatggtttaaggtaattgagcttatgggatatgattgggcaaaagatttaattcatgttggatttggtatggttgcacttgaagaaggtactatgtcgactagaaaaggaagagtagtatttttagaagatgctttaaatcaagctatagataaaactaaggaaattatactagctaaaaacccaaatgctaaaaatgtggatgaaatatctaagcaagtaggtgttggggcagtagtattccaagagttatctaatagtagaattaaagactataccttctcttgggaaagaacgcttagttttgatggtgagactggaccatatgttcagtatacacatgctagatgctgtgcagttttaagaaaagcagaagtagaagtgacttctgatatagattatagtctattagctgatgaagatagtgcagaagttcttagagttatagaatcattcaataagaatattttacttgctctaaagaaaaatgagccacatatagtgactagatttatgctagatttagctcaagcgtttaataaattttatcatgacaatccaattttagtagaaaatttggaaataagaaaagcaagacttgcattagttttagcaacaaaacaaactttagaaaattctctgaaattgttgggaatgcacgctcctgaaagaatg

SEQ ID NO: 17448 - DNA, 951 bp, Clostridium difficile
ttgtccatgatagaaatagaaaagccaaaagtagatatagttgagcttagcgaagactatagatatggtaagtttgttatagagcctctagaaagaggatatggaataactataggtaacgcattaagaagaatattattatcatcattaccaggtgtagcagtgaatgctataaaaatagatggagttcttcatgaattttcaacaatacctggtgttaaagaagatgttactgagataatattaactttaaaagagctttcagcaactatagatggtgaaggaagtagaacacttaaaatagaagctcaaggaccatgctctatcacaggtgcagatataatctgtcctccagatgttgaaatattaagtaaagatttagcaatagctacattagatgataatgctaaacttaatatggagatatttgtagataaaggtagaggttatgtttctgctgaagaaaataaaacagagaatgttccaataggtgttttacctgtggattcaatatatactcctgttgagaaggttagttatcatgtggaaaacacaagagttggtcaaaaaacagattatgataaattagtactagaagtttggactaatggtagtataaatcctcaagagggaatatcattagctgcaaaggtattagttgagcatttaaacttatttatagacttaactgaacatgtaagtagtgttgaaatcatggtagaaaaagaagaagatcaaaaagaaaaagttcttgaaatgactatagaagaattagatttatcagttagatcatataactgtttaaagagagcgggaattaatacagttgaagaattagctaataaatctgaggatgatatgatgaaggttagaaacctaggtaagaagtcattagaagaggtaatacaaaaactagaagaacttggattgggattaaaaccaagtgaagaa

SEQ ID NO: 17449 - DNA, 5253 bp, Clostridium difficile
atggacaagggggaagaaaataaaatgaaaataccaaagaagattgctgcaatgcttacagttacaatgatagctggaagttcaacagcaggcatagctagtgcacaaactgtggcaacaaatttaacagggcaagaaagatatgaaactgctgttaaaataagtcaagatggatggaaaaatgctgatgaggtagtaatcgtaaacgactcatctatagcagatgctctatctgcaacaccatttgcaaaagcaaaaaatgctccaatacttttaacaagtaaagataaattaaatgataagacgaaagcagaaatacaaagattaaaagctaaaaaagtatacttaataggtggaacttctgtattaagtacaaatatagaaaaagaaataaaagatttaaaaatatcttttgagagaatctctggagctgagagatatcaaacatccttagaattagcaaagaaattagatgctataagtgatgttaagaaaatagctgtagttaatggtgaaaaaggacttgcagatgctgtaagtgtaggagcaccagctgcacaaaacaatatgccagtaatacttgctgattctaaaaatggaacagcagttgcagacaaatttataaaggatgctggaataactcaatcttatgtagtaggtggagagagttcaatttctgaagctgttaaaaataaactaccaaatagtacaagactaggtggaacagatagaaatgatacaaatgcaaaagtaataaaagaattttataaaaagacagatttaaaaaatgcttatgtaactaaagatggtatgaataaacaagaccaacttatagatgcactagcagtaggtgtattaggtgctaaaaatcaatcaccagtagttttagttggaaagaacttatcagcttcacaaaaatctctagttaactctaagagttttgataagataactaaagttggtgggaatggtaatgagacagcatttaatgaaatgaagtcattacaagaagtaaaaacagttgaagccaaaacaatttctgaattaaaatcagctatagataaagctactgctaatgatgttataaacttcaaaccaactagtgaggttaaagaagcatttacaatacaaactgataaagcagtaacagtaaacttaaatggtacatatacaaagactgtgactatcaacatgcctaatggtgatgtaaataactatgcaaaagtggatgatgtagttatagatgatgtaaaagatggaacttttgttaactatggaaaaataactaacttaaaggttaatgataaaaatggagccaagatagaaaataattctaaaggtgagattggtagtttaacagtagcatctggagcaagtcaagtaaaagtgactaatggtggtaagataactacagttacaaataattctaaagggactactatagataataaaggtacaataagtagtgttaagggagataattctccaacaataagtggaaatagtccaagttctaactcttcaggaggaagttcatcaagtggaggttcttcaggaggaagtagtggaggaagttcttcatcaaaggtaggtcaaataaaatttagtgcaacagataaacaaataaaaatggcatcaggagataagacagtagatccatcagataacacatatatactaaaattaacaaatgggacagtaaaagatggagatgtaaaagctaatgttaaagtagcaggattaccatcaggactagattatacagcagtaggaaatagatcagcaaatacaataacaattacagtatcaggaacagcaagccaatcaatacaaaatgatttaaataatgtaagtgtgctagttaaagcaggagcagtatctggaacaggagctacagattcaattgcaaatacaacatttgaaattaaaaaatatgtggcgccagcaataggtcaattaacttttgatgcaacagataaacaaataaaaatggcatcaggagataagacagtagatccatcagatgacacatatgtactaacattaacaaaaggaacagcaaaagatggagatgtaaaggctaatgttgaagtaacaggattaccatcagggttagattatacagcagaaggagattcatcaacaaatacaataacaataacagtatcaagaacagcaagccaagcagtacaaactgatttagataatgtaagtgtgttagttaaagcaggagcagtatctgaaacaactgccacagattcagcagcaaatgcaacatttgaagttaaaaaatatgtggcagcgccagcagtaggtcaattaacttttgatgcaacagataaacaaataaaaatggcatcaggagataagacagtagacccatcagatgacacatatgtactaacattaacaaaaggaacagcaaaagatggagatataaaggctaatgttgaagtaacaggattaccatcagggttagattatacagcagaaggagattcatcagcaaatacaataacaataacagtatcaggaacagcaagccaagcagtacaaactgatttagataatgtaagtgtgctagttaaagcaggagcagtatctgaaacaactgctacagattcagcagcaaatgcaacatttgaagttaaaaaatatgtggcagcgccagcagtaggtcaattaacttttgatgcaacagataaacaaataaaaatggcatcaggagataagacagtagatccatcagatgacacatatgtactaacattaacaaaaggaacagcaaaagatggagatataaaggctaatgttgaagtaacaggattaccatcagggttagattatacagcagaaggagattcatcagcaaatacaataacaataacagtatcaggaacagcaagccaagcagtacaaactgatttagataatgtaagtgtgctagttaaagcaggagcagtatctgaaacaactgctacagattcagcagcaaatgcaacatttgaagttaaaaaatatgtggcagcgccagcagtaggtcaattaacttttgatgcaacagataaacaaataaaaatggcatcaggagataagacagtagatccatcagatgacacatatgtactaacattaacaaaaggaacagcaaaagatggagatgtaaaggctaatgttgaagtaacaggattaccatcagggttagattatacagcagaaggagattcatcagcaaatacaataacaataacagtatcaggaacagcaagccaagcagtacaaactgatttagataatgtaagtgtgttagttaaagcaggagcagtatctgaaacaactgctacagattcagcagcaaatgcaacatttgaagttaaaaaatatgtggcaccagcaataggtcaattaacttttgatgcaacagataaacaaataaaaatggcatcaggagataagacagtagacccatcagatgacacatatgtactaacattaacaaaaggaacagcaaaagatggagatgtaaaggctaatgttgaagtaacaggattaccatcagggttagattatacagcagagggagattcatcagcaaatacaataacaataacagtatcaggaacagcaagccaagcagtacaaactgatttagataatgtaagtgtgctagttaaagcaggagcagtatctgaaacaactgccacagattcagcagcaaatgcaacatttgaagttaaaaaatatgtggcaccagcaataggtcaattaacttttgatgcaacagataaacaaataaaaatggcatcaggagataagacagtagacccatcagatgacacatatgtactaacattaacaaaaggaacagcaaaagatggagatgtaaaggctaatgttgaagtaacaggattaccatcagggttagattatacagcagagggagattcatcagcaaatacaataacaataacagtatcaggaacagcaagccaagcagtacaaactgatttagataatgtaagtgtgctagttaaagcaggagcagtatctgaaacaactgccacagattcagcagcaaatgcaacatttgaagttaaaaaatatgtggcaccagcaataggtcaattaacttttgatgcaacagataaacaaataaaaatggcatcaggagataagacagtagacccatcagatgacacatatgtactaacattaacaaaaggaacagcaaaagatggagatgtaaaggctaatgttgaagtaacaggattaccatcagggttagattatacagcagagggagattcatcagcaaatacaataacaataacagtatcaggaacagcaagccaagcagtacaaactgatttagataatgtaagtgtgctagttaaagcaggagcagtatctgaaacaactgccacagattcagcagcaaatgcaacatttgaagttaaaaaatatgtggcaccagcaataggtcaattaacttttgatgcaacagataaacaaataaaaatggcatcaggagataagacagtagacccatcagatgacacatatgtactaacattaacaaaaggaacagcaaaagatggagatgtaaaggctaatgttgaagtaataggattaccatcagggttagattatacagcagaaggagattcatcagcaaatacaataacaataacagtatcaggaacagcaagccaagcagtacaaactgatttagataatgtaagtgtgctagttaaagcaggagcagtatctgaaacaactgctacagattcagcagcaaatgcaacatttgaagttaaaaaatatgtggcaccagcaataggtcaattaacttttgatgcaacagataaacaaataaaaatggcatcaggagataagacagtagacccatcagatgacacatatgtactaacattaacaaaaggaacagcaaaagatggagatgtaaaggctaatgttgaagtaataggattaccatcagggttagattatacagcagaaggagattcatcagcaaatacaataacaataacagtatcaggaacagcaagccaagcagtacaaactgatttagataatataagtgtgttagttaaagcaggagcagtatctgaaacaactgctacagattcagcagcaaatgcaacatttgaagttaaaaaacatgcgtcagatccaatatcaacaataggaaaaatatcttctgggctatcaagtttatttaatatattaaaa

SEQ ID NO: 17450 - DNA, 2217 bp, Clostridium difficile
atgaaaaaaagagaaaaagtatttgatgggctagtttttaagcatatattaatcttattaatactattagttttgattgatttaacaagtaccatcatatatgcaagtaactctatggaaattacttctagaaatatgattgaggcatcaaaaagagaacttgaaaactatttagaagtaaacatatctttattaaaagctcttagtcaagatgatagattttctaatggtgaaacatcactaattgaaaagggaaaattattaagtccatatcaaaaggaatataatctttttatgattggtataacagatacaaaaggaaatgcttcaagtacatatagggaaaatgttaactcaataaaagataagcctagttttgagaaagcaattaaaacaaagcaagtagtagtttcagatattgaagtcagtaatgtaacaggtgacaaagtatttatcatatatgtaccaattgtaaaaaataatgagatgattgggaccatttttgcttctttttattttcaagatgtaaataatttaataagtagaagcaattttgatgattctattaaatttctaatgatagataaagattatactattatttctcatccaaacaaaaaatatgtaaatgataaaagtaagatgcttgatttagaagggaatattataggaaccactaaaagtgaaatcttaaaaaatataaataaaaaatgtcaaggtgattttttatcttgggataattggagattatataatgtaaaatatacgaacataaagtggactaattggactttagtatcaaaatgtaatatatttaagaactttaaaaatctaatagttaattttatgataaagttgtatttttatatagtaatatttatgatattgtggaaattaagtaatgctaaattaatagaacaacttaaaaaattggcttattatgattctttaagtggaataaaaaataaagaaaagtttagaaaagattctatgtatattttaaagaattattatcaagataatttttacttagtacaattggatgtcaataaatttaaatatataaatgagatgtttggatatgctgaagggaataagatattaattcatatatcacaagttttaaataataatacaaataaatatgaaatttgtgctaggatggataatgaccattttatattgttgattgcttgtaacactgaagatgaacttttaaatagattatctaaaataaataaagaaatttgtaacttaaatactactaactcatctaagtataaaattgttatgtcaagtggaatatataagattactaaaaaggatgatattaaaaagattgacttgttaattgatagagcaaatattgcagcaaaaagtaaaaaggaaaaatatgaacattcatattcattttttaatgaagatacaagaaatcgattgtacaaggaaaaacgattggaagataatatgaataaagctttagaaaaaggtgaatttatagtatattatcaacctaagtatagtttagatgatgtaaatgaaattgaaggagcagaagccttgataagatggaatagtccagaatttgggtttatttcacctatagattttgtacctttatttgaaaagaatggttttattgtaaatattgatatgttcgtgtttgaagaagtatgcaaaacattaaacaagtggataaataaagggtatactcctgtaccaatctctgtaaatatgtctagagttcatttatatagggataattttatagaaaatataactgatttgataagtaaatacaatatatctcctgagtttattgaacttgaactaacagaaagtgttgtgtttgataatttaaatatattgattgatataatgaaaaagattaaagagataggattccttatatcaatggatgattttggttcgggatattcatctttaaatctgttaaaagacctttcttttgatattttaaaattagatagaggatttttaatcgaaacaacagatacaaaacgtggaaaaattattatttctaagattgtggaaatggcaaaagcgattgatattaaagtaatctgtgagggcgtagaaacttatgaacaagtagagttcttgaaagagataggttgtgataaggttcaaggatacttatttgctaaacctatggtattagatgaatttgaaaagcacttaaactttaaatttgat

SEQ ID NO: 17451 - DNA, 3114 bp, Clostridium difficile
gtgatttacatggcgaaatttaagccattggtagacagttctgtaaaacaagcagaagcacaagtttttgattattggaaagacataaatatacttgaaaaaactttagaaaaagggaaagatgacccaagtttcgtattctatgaaggacctccaacagctaatggaaatcctggagtacaccatgttttatctagaacgcttaaagattcagtttgtagatataaaacaatgtctggttatcaagtaaagagaaaagctggttgggatacacatggattaccagttgaaatacaagtagagaaagagttaggtcttactagtaagcaacaaatagaagaatatggaatagctgaatttaaccaaaaatgtagagagtcagttttctcatttgaaaaacaatggagaataatgactgagagaatggcttatgaagttgatttagataatccatatataactttagataataactatatagagtctgtatggtggatactaaacaaattcaacaaagaaggatatatatatgaaggacataaaatacttccttattgcccaagatgtggaactggtcttgctagtcatgaggttgcacaaggatataaagaagtaaaaactaatacagttatagctaaatttaagaaaaaagatgctgatgaatacttcttagcatggacaacaactccatggactttaccatcaaacgtttcattaacagtaaatgctgatgtagattatttaaaagttaaaaaaggtgatgaggtatattatgtatctaaacctttagctgataaagtactaggtgaagattatgaagttttagaagaaatgaaaggtaaagacctagaaggtttagaatatgaacaattaatgccttttgtagaagttgacaaaaaagcattttttattacagtaggagattatgtaactactgaagatggaactggtatagttcatacagcaccagcatttggtgaagatgactacaacacaggtaaaagatatgatttaccagttattcaaccagtagatgaaactggtaaatttacatctactccttgggaaggtagatttgtaatggaagatgggctagatgttgaaataataaaatggctagcttctgaaaataaattatatagcaaagaaaaagtagttcataattatccacactgctggagatgtcaaactccattagtatactatgcaaaaccaagctggtatatagagatgactaaacttaaagataaattaatagaaaataataatggtgtaaaatggttcccaagttttgtaggagagaagagatttggaaactggttagaaaatctaaatgactgggcaatatcaagaactagatattggggaactccacttcctatatggagatgtgaatgtggtcatacagattcagttggttcaagagctgaattagctgaaaaagctatagaagatgtaaatccagaaacagttgaacttcatagaccatatgtagatgatatacacttaaaatgtgaaaaatgtggaaaaccaatgacaagagtaacagaggttatagactgttggtttgatagtggggctatgccatttgctcaacaccactatccatttgaaaataaggaaaactttgaccaattgttcccagctgactatatatcagaaggtatagaccagactagaggttggttctactcattacttgcagtatcaacatttgtattaggaaaagcaccatataagagtgttttagttccagatcttgtacttgataaagatggtaagaaaatgagtaaatcaagaggaaatacagtaaatccaatggaattatttgaccaatatggagcagatgcattaagatggtatttactatatgtttctccaccatggactccaactaaatttgatatggatggattaaaagaaatccaaagtaaatttataggtactatgaagaatgtatataacttctttactttatatgcaaacacagatgatataaatccaactgaattttttgtagaatataaagatagaccagaacttgatagatggatattatctaagttcaataatttaatgaaagatgtagaagaaaatttagctatatttgagttaaataaaactttaagaatgatacaagattttataaatgatgatttatctaactggtatataagacgttcaagaagaagattctgggcaactgaattaacagaagataaaaaagcagtgtacaatacaacttatgaattgttacatggtctttgtagagctatagctccatttgcaccatatatgtcagaagaaatgtatagaaacttaacaggagaagtatctgttcatttagctgaatatcctaaatgtaatgaagagttagtagatactaaattagaagaaaaaatggatttagctaaaaacttagttactttaggtagagcttcaagagaagtagaaagaataaaagttcgtcaaccattacaaaaagtgttagtagatggtaagtttgaagatacaataagtgatgtagttgatttaataaaagaagagcttaatgttaaagaggtaatatttgctaaggatttagatgagtatatgaactttagtttaaaaccaaactttaaggaagcagggccattattaggttctaagatgaatttattcgttggagcattaagtaaattaaatgctcatgaaactgctaataaacttgaaaaaggtgagactttaacagttgatttagatggtgaagcttttgaatttaataaggatttagtattaataggtataactgctaaggaaggatttaatgtatctgttgaaaacaatctttttgttatactagatactaagctaactgaagagttaattaatgaaggttatgctagagaatttatatctaaagtacagcaattaagaaaatctaataactttgaagtattagataatatagtaatagaatactgtggtgatgatgaaattgctaaggctgttgaccattttaatgaatatatcaagtctgaaactttagctttagaaataaacagagtagatgataaatctttagaggaacaaaacttaaatgaccatatgacaggtataaaagttataaaaaaa

SEQ ID NO: 17452 - DNA, 636 bp, Clostridium difficile
atgggtataattacaaaaatagaacaacaaaaaagaaatgatgatagagttaatatttatgtagatgataaattttttattgctatatttaaagaacttgtttatacatttaatttaaaaaaagggaatgaaataaatgaagaagaattaaaacctattttagatgatgaaatgtatataaaagctaaaaataaagcattaaatattttatctcatgctgaccaatctgaaaaaaaattaaaagaaaaactatcatcagaatttgatgaaaatataattgagagggtcatagattttcttaaaagttataatctcgtaaatgacagtgtattagctcaaaaaattgttaacacaaatgttaacctaaataaatgtggcaaaaacagaattaagcagaatttatataataaaggtatcaatagaagtacaatcaatgaagcagtatctgaattagacaaggacactgaatttgaaaatgctatgtatctagcaaaaaaaaggtatgaaagagtaaagaaagaagataaaaagaaaatatatcaaaaaatttctcaacatctttcctataaaggctttgattatgatattattaaaagagttttaaacaaacttttaaattttgatgaatacgatata

SEQ ID NO: 17453 - DNA, 644 bp, Clostridium difficile
aaatttaaaatctatagagagatattagttgactggaataaaaagatgaatcttactggaatagaagatgaaaaagaagtgtatataaaacattttttagactctatttcagctgtaaagaatggatatataaaaaatggatgtctataatagatgttggtacaggtgctggttttcctggaataccattgaaaatatgtttagatagcttagaacttactttgttagattcgttaaataaaagaataaactttttagaggaagttagtagagtactagagttagataatattacatttatacatggaagagctgaagattttggtaaaaatgaagactatagggaaaaatatgatgttgctacggcaagagctgttgctggattaccgattcttatggaattttgtgtaccatttgtaaaagttggagggtattttatttgcttaaaaggtccgaatgctaatttagagctagaagaatcacaaaaggctattgatgttttaggattggagtatattgaaaaaatagatgtagagttaccagaggtagatttaaatcataatatattagtttttaaaaaagtgatggaaacaccagttaagtaccctagaaaagctggtaaaccagccaaaaatcctattaag

SEQ ID NO: 17454 - DNA, 1455 bp, Clostridium difficile
atgaaagaatacaatagtttgttgatagatatatctaaaaaaggtaggaaagcatactcacttccaaagttagatatagatgatataaaaatagaagatatgattgaccaagatatggcaagacaaagtgagttgaatttgccagaagttggtgaattagaattagttagacattatacattattatcaaataaaaactttggagttgatacaggtttttatcctttgggttcttgtactatgaaatataatcctaaaataaatgaagatatggcagcacttccaaactttactggaatgcatccataccaatcttcggatacagctcaaggttctctttctttgatgtatgatttatcaagaagacttgcagaaattacaggtatggatgaagttacactacaaccttcagcaggttctcatggtgagtttacagggcttatgattataaaagcatatcatgaaaatagaggtgaccataagagaaccaaagtgataattccagattctgcacatggaacaaatccagcaagtgcagctatggcaaactttgatgtgattcaaatagcatctgataaaaatggagctgtagacataaatgtattaaaagaggttttgaatgatgaagtagcagctcttatgcttactaatccaagtactcttggtttatttgaaaaaaatataaaagaaatagctactcttgtacatgaagcaggaggacttttgtactatgatggtgcaaacatgaacgctattatggggataacaagacctggagatatggggtttgatgtggttcatcttaatcttcataagactttttcaactcctcatggaggtggaggtccaggagctggtcctgttggagttaaaaaagaattagtaccttttttaccaataccagtaattgaaagaaaagaagataagtatgtactaaattatgatagagaaaaatctattgggaaaattaaaaatttctatggtaattttggagttcttgtaagagcttacacatatatactaactatgggaagggatggacttaaagaggctagtgaaatggcagttttaaatgctaattatataaaggaaagtataaaagatgattatattttgccaatagataccttgtgtaagcatgagtttgtattaggtggattgccaagaggagaggccaatataaaaactatcgatattgcaaaaagactactagattatggataccatcctccaacaatgtactttcctcttattataaatgaggcacttatgatagaacctacagaaagtgagagtatagagacattagatagttttatagaagctatgaaaagtgttgctaaagaggcaaaggaagaaccagaactattgaaaactgctccacataatactttggtcaaaagagtagatgatgcaagggcagtaaagaaacctatactaacatggtcacaaaga

SEQ ID NO: 17455 - DNA, 1353 bp, Clostridium difficile
atggacttaaaaggaaaaaaagttttattagtaggacttgcaaaaactggtatatctacaattaaacatttagataaattgggtgcaagtataatcgtaaatgatataaaagatgaaaataaattgagaaatatacttgatgaattgaaatctataaatgacataaaatacatattaggacatcacccagaagatgtagatgatatagatatggttgtagtgtctccaggtgtaccactagacctaccattcatattgaaattaaaaaattcaggcaagtatataattggtgaggtagaattagcttttaaactatcgaataatccaatttttatagggattacaggtacaaatggaaagacaactacaactagtttggtaggagaaattttttcaagagcaaaacgagatacatatgtagttggtaatataggaaatcctgtaatagatactatagaaacttcaagtgaagagtctgtgttagtaactgaactaagcagttttcagcttgagagtatagatgaatttagacctaaagtaagcgcaatattaaatattacagaggaccatttaaatagacaccatactatggaaaaatacatagaagcaaaggcaaatatatttatgaaccaaactgttgaggatttctgtgtattaaactatgatgatgagatagtaaaatctttagctgataaatgcaatgccaaagtaatttacttttcaagaactaaaaaagtaaatggaggagtatatttagaaaataatgacataataatagatatagatgataaaatcaaatttctaaataaagatgatgtaagtttacctggaggtcataacttagaaaattgtatggcagctatagcaatagcatatgtctgcaaaattgatttagaagttataaaggatgtacttatgacatttaaaggagtggaacacagacaagagtttgtaagaaatttagacaatgtaatatatgtaaatgattcaaagggaactaatccagattccactataaaagctatacagtcttatgatagacctataatacttatagcaggggggatggataagggaagtaattttgatgaacttcttgaaactgcaaagtcatatgttaaatcattggtcttattaggagaaactgcatcaaatatagaaaattgtgctaaaaataaaggatttaatgacatacatatagtaaaagatatggaagaagcagttaagacttcttatgaaatttcaaaaagtggagatatagtgcttctttcaccagcttgtgcaagttgggatatgtatgaaagttttgaagtaagaggaaaagacttcaaagataatgtaaacaatttaaaa

SEQ ID NO: 17456 - DNA, 1320 bp, Cornyebacterium diptheriae
gtgtctgcgatttttcaggcattccgagatgcggatcttcgcaagaagattctgatcaccatcgcgttgatcatcttgtaccgaatcggtgcgcagatcccgtctccgggtgttgattacgcgtcgattagcggtcggcttcgtgagctgacgtcggactcttcgagcgtctactcactgattaacctgttttcgggcggagccctgctgcagctgtcaatctttgctattggtgtgatgccatacattacggcgtcgatcatcgtgcagctgctaacggttgtgatccctaaatttgaggaactcaaaaaagagggacaatccggtcaagcaaagatggatcagtacacgcgttacctcaccttgggtcttgcgttgctgcagtcctcgggcatcgttgctcttgctgaccgtgagcagctgttgggtagcggtgtttcggtgctgaaggaagaccgtaacctgtggaccttggtcatgctggtgttggtcatgtccgctggtgccatcttggtgatgtggctcggtgagatcatcactgagcgcggtatcggtaacggcatgtccctactgatcttcgcgggtatcgcaactcgtattccttctgatggcgccaacatcttgagttcttctggcggcgttgtgttcgctgtggttcttgttgctgtgatcgtcttggtcgtgggcgtggtcttcgttgagcaaggccagcgccgtattccagtgcagtacgcaaagcgcatggtgggacgtcgtcagtacggtggctcttctacctacctgcctcttaaggtcaaccaggctggcgttatccccgtgatcttcgcatcctctttgatctacatgccagtgctgatcacccagatcatcaactccggctcccacgaggtttccgataactggtggcagcgcaacgttattcagtacctgcaaacgccatcctcatggcagtacatcgtgttgtactttgcgcttatcattttcttctcttacttctacgtttccgtgcaatacgaccccaatgagcaagcggacaacatgaagaagtacggtggtttcatcccaggaatccgcccaggtcgtcctacggcggagtatcttggatatgtgatgaaccgactcctgttcgtcggtgcgctgtatcttggcatcatcgctgttttgcctaacatcgctctcgacttgggcgttggggcaagctctgctggatcaacaccattcggcggtactgcaattttgattatggtttccgtggctttgacaaccgtcaagcagatcgaaagccagctactgcaaagcaactacgaaggacttcttaaa

SEQ ID NO: 17457 - DNA, 2892 bp, Cornyebacterium diptheriae
atggctgctaagactgggaacaagcgtctggtcatcgtcgagtctgcgacgaaggccaaaaagatcgcaccgtatcttggcgatgactacatcgtcgaggcatcggtcggtcatatccgtgacctgccgcggggtgctgcggacgttcccgctaagtacaaaaaggagccatgggcgcgcttaggcgtgaacaccgacaaaggctttgagccgttgtacgtggtcagcccagataaaaagaagaaggtggccgatcttaaagccaagctcaagcttgtcgacgagctcttcctagccacagaccccgaccgcgagggtgaagccatcgcctggcacctgcttgaagtgctcaagcccaaggtgccggttaagcgcatggtgtttaacgagattactaagcctgcgattcttgccgctgcggaaaacacccgcgagctcgacgataacctcgtagatgcccaagaaacacgtcgtatcctcgaccgcctctacggctacgaggtatccccagtgctgtggaagaaggttatgccgcgcctgtccgccggacgcgtgcagtcggtggctacccgcgtgatcgtggagcgcgagcgcgagcgcatggcgtttatatccgccgattattgggatgtggaggcggaattcgataccggcaagcctgcacaagatagcaacccaacctcctttacgggccgtttgacggctttggacggcaagcgcgtggctaccggccgtgactttaacgaccgtggcgagctcaaaggcgacgcggtggtcgtcgacaagcaacgcgctgaggccctcgttgaggagctaaccggtgttgcgatgagcgtgaccaaggtagaagaaaagccttatacgcgccgcccttacgcgccctttatgacctcaaccctgcagcaagaggccggccgcaagctgcactacacctccgaacgcaccatgcgtatcgcgcagcgtctgtacgaaaacggccacatcacctacatgcgtaccgactccaccaccttgtcggaacaaggcctcaaagccgcccgcgaacaggcaatttccctgtacggtgccgactacgtggcagacgcaccacggcgctacgaccgcaaagtgaaaaactcccaagaagcccacgaggcgatccgtcccgcaggtgagcgatttgccaccccaggcgacctccacggccaactcgacgcggaggaattcaaactctacgagctgatctggcagcgcaccgtggcctcccagatggcggacgctaagggcacctccatgaaggtgaccatcaccggcaacaacgccgaattctccgcaaccggccgcaccatcaccttccccggtttcttgcgcgcctacgtggaagtcagcacacttgccgacggccgcgacgtcgccgacaacgccgagagccacctgccgcgcctagctgaaggcgacggcgtagaaaccaagaacctcgaagccgacggacactccaccaacccaccagcgcgctacaccgaagccagcctggtcaagaagatggaagacctcggtattggccgcccatcaacgtatgcgtcgatcatcaagaccatccaagaccgcggctacgtgtactcccgtggcaatgccctcgtgccaagctgggtagcattcgccgtgatcggcctgctggaaaagagcttcgcagccctcgtcgactacgacttcacctcctccatggaagacgaactcgacgagatcgcagccggccacgaaaacggtgcccactggcttaccggcttctacttcggtgatgctgaagcctccgacgccaaagcagagtcaattgcccgccacggtggtctgaaggcactcgtcggcgataacctcgaacaaattgacgcacgcctcgtcaactcgctgccactgtttaaagaccaagaaggtcgcgacgtcaacgtacgtgttggccgttacggtccttacctcgaacgccaggtcggcgtcagtgaagacggcgagccggagtatcagcgcgctaacctctcggattcgaccactccagacgaactcactctcgaactggcagaaaagctctttgccaccccgcagtccggccgtgagctaggccgcaaccccaagaacaaccgcatgatcgtggctaaggaaggccgctttgggccctacgttaccgagctagtcaacgacgacgagcgcaccgaggtagaagccaaagccgaagagatcgtcgccgctgaacgtgaggcagaagacctccagcgtgccgcagagggcaagcgcgcaaagaactggggtaccaagaccgcagcagcgcaaaaagaaaaacgcatcgctcagatcatcgaggaaaccctcaaaccaagtaccgcctcgttgttcaagacaatggagccctcttccgtcaccctcgacgaagcactccagctgctggccctaccacgcgaagttggcgttgaccccagcgacaacgaagtgatcaccgcccagaatggtcgctacggcccatacctgaagaagggcagcgactcgcgtacccttgcgagcgaggaccagatcttcagcatcaccctcgacgaagcacgccgcatctacgcggagcccaagcgtcgcggtcgcggagccacctcacaatcggtaatcaagcaactcggtgacaacgacgtctccggcaagcccatgtcggttcgcgacggccgcttcggcccctacgtcaccgacggcaccaccaatgcgtcgctacgccgtggcgacgaccccacgcagctcaccgaagcgcgcgccaatgagctcctctccgagcgtcgcgccaaagaagctgccgacggtggctcatcgaagaaagcgaccaaaaaagcctcgaaaaagaccaccaagcgcgtggccaaagcgggtgctcgcaagaagaaa

SEQ ID NO: 17458 - DNA, 543 bp, Cornyebacterium diptheriae
atgcgactcgtacttcttggacctcccggtgctggcaaaggcacccaagcggctatcctctccgaaaagctgcgcattcctcacatctctaccggtgacctattccgtgccaacattggcgaaggcaccccactgggtaaggaagcaaaatcttatattgatgccggcaagcttgtgcctaccgacgtcaccgcgcgcatggtgaaggctcgcctccaaaaagacgacgcagaggttggattccttcttgacggcttcccacgcactgttgagcaggctgagatcctcaaggaaatgctgaaaggattcggcgttgagctcaacggtgttattaactacgaagtcgctgaagatgtagtagttgagcgcatgcttgctcgtggccgtgcggacgacaacgaagacaccatccgcacccgtctgcaggtttaccgcgacgaaaccgcaccacttatccgccactatggtgacgacatcatcaccatcaaggcagaaggtagcatcgaggacatcaatgctcgcaccctcggagcactgggcaag

SEQ ID NO: 17459 - DNA, 428 bp, Cornyebacterium diptheriae
ggtaccagaatatcaactggttatccatcgactacgcctgtcggcctcgccttaggtcccgactcaccctgggaagattagcttaacccaggaacccttagtcatccggcggaaaagttttccacttttcattcgttactcatgcctgcattctcactcgcacacactccacaccatcaagtcacccaggtgcttcacagcagtgcacgacgctcccctacccaaccaacaaaacacattgttgactgccgcggcttcggcggtgtacttgagccccactacattgtcggcgcagaaccactcgaccagtgagctattacgcactctttcaaggatggctgcttctaagccaacctcctggctgtcttcgcgatcccacatccttttccacttagtacacccttaggggccttaaccggcgatctggg

SEQ ID NO: 17460 - DNA, 368 bp, Cornyebacterium diptheriae
atgctttcagcggttatccctcccgtacgtagccaaccagccctgccactggcgtgacaactggcacactagaggtacgtccgtcccggtcctctcgtactagggacagccttcttcaagtttcaacgcgcgcggcggatagagaccgaactgtctcacgacgttctaaacccagctcgcgtgccgctttaatgggcgaacagcccaacccttgggacctactccagccccaggatgcgacgagccgacatcgaggtgccaaaccatcccgtcgatatggactcttggggaagatcagcctgttatccccggggtaccttttatccgttgagcgacaccacttccacaagtaggtgccggatcactag

SEQ ID NO: 17461 - DNA, 216 bp, Cornyebacterium diptheriae
atggctaaggaaggcgcaatcgaggttgagggtcgtattatcgagcctttgccgaatgcaatgttccgagtcgaactcgataacggacacaaagtacttgctcacatcagtggcaagatgcgtcagcactacattcgtatcctccctgaggatcgcgtagttgttgagctgtctccatacgacctcacccgcggtcgcatcgtttaccgctacaag

SEQ ID NO: 17462 - DNA, 366 bp, Cornyebacterium diptheriae
atggcacgtctcgctggagttgaccttccgcgcaataagcgcatggaggttgcactcacttacatttacggcatcggcccagcccgtgccgctcagctgctcgaggagaccggcatctccccagatctgcgcaccgacaacctcaccgacgagcaggtttctgctcttcgtgacgttatcgaagcaacttggaaggtagagggtgacctccgccgtcaggttcaagccgacatccgtcgcaagattgaaatcggctgctaccagggcctacgccaccgtcgtggtctgccagtccgtggccagcgcaccaagaccaacgctcgtacgcgtaagggtcctaagaagacgatcgccggaaagaagaag

SEQ ID NO: 17463 - DNA, 402 bp, Cornyebacterium diptheriae
atgcctccaaagactcgcagcactgcacgtcgctctggtcgtcgtgtagttaagaagaacgtggctcagggccacgcttacatcaagtccaccttcaacaacaccatcgtttccatcacggatccttccggtgctgttatcgcatgggcatcctccggccacgttggcttcaagggttcccgtaagtccaccccattcgctgcacagcttgctgctgagaacgctgctcgcaaggcaatggatcacggcatgaagaaggtcgacgtattcgttaagggcccaggctctggacgtgagaccgctattcgttccctccaggctgctggcctcgaggtcacctcgatctccgatgtcactcctcagccattcaacggctgccgcccaccaaagcgtcgtcgcgtt

SEQ ID NO: 17464 - DNA, 603 bp, Cornyebacterium diptheriae
atggctcgttataccggcccagcaacccgtaagtcccgccgcctccgcgtcgacctcgtcggcggagacatggcattcgagcgtcgcccataccctccaggacaggctggtcgtgctcgcatcaaggagtccgagtacctcttgcagctccaggagaagcagaaggctcgtttcacctacggtgttctcgagaagcagttccgtcgttactacgcagaggctaaccgtctgccaggtaagaccggtgacaaccttgtcatcctgctcgagtcccgtctggacaacgtagtgtaccgtgcaggtcttgcacgtacccgtcgtcaggctcgtcagcttgtttcccacggtcacttcaccgtgaacggtaagaagatcaacgttccttcctaccgcgtctcccagtacgacatcatcgacgttcgcgagaagtcgcagaagatgatctggttcgaagaggctcaggagaacctgcttgacgctgttgtacctgcatggttgcaggtcgttccgtccaccctgcgcatcctcgtgcaccagctgcccgagcgcgctcagatcgacgttccgctgcaagagcagctcatcgtcgagctttactcgaag

SEQ ID NO: 17465 - DNA, 1014 bp, Cornyebacterium diptheriae
atgctcatttctcagcgcccaacccttaccgaggaatacgtcgattccgctcgctcgcgcttcgttatcgagccacttgagcctggcttcggctacaccctaggtaattcgctgcgtcgtaccctgctttcgtccatcccaggcgcagcagtaaccagcatcaagattgatggtgtgctccacgagttcaccaccatcaacggtgtgaaggaagatgtctccgacatcatcttgaacatcaagggccttgtgctttcttctgactccgatgagccagttgttatgtacctgcgcaaggaaggcgctggcgttattactgctggtgacattgagccaccagcaggcgtggagattcacaacccggatctgcacctcgcaacccttaatgagcaggggcgtctggacatcgagatgattgttgagcgtggccgtggctacgttccagcaactctttactccggcccagctgaaatcggccgtatcccagttgaccagatttactccccggtattgaaggtcagctacaaggttgaagctactcgtgttgagcagcgcaccgactttgacaagctgatcatcgacgtggaaaccaagaactctatggctccacgtgacgcactcgcgtctgcaggcaagacccttgttgagctgttcggcctcgcacgcgagctgaacaccgcagccgaaggcatcgagatcggaccttctccacaggagaccgagtacatcgctgcttacggcatgccaatcgaggatctgaacttctctgttcgttcctacaactgcctgaagcgccaggaaatccacacggtcggtgagctcgcagagtgcaccgaatccgatctgctggatatccgcaacttcgggcagaagtcgatcaacgaagtaaagatcaagctcgctggcttgggtttgaccctcaaggatgctccagaggacttcgatccaactcagctcgatggctatgacgctgcaaccggcgactacatcgacacggatcctgaagaaaccgag

SEQ ID NO: 17466 - DNA, 471 bp, Cornyebacterium diptheriae
atgcctacccctaagaagggcgcccgtctcggcggttccgcgagccaccagaagaagattctggctaacctcgcttctcagctgatcgagcacgaggcaatcaagaccaccgacgccaaggcaaagcttctgcgcccatacgtagaaaagctgatcaccaaggctaagggcggctccgttgcagatcgtcgcaacgttgctaagttcatcaccaacaaagagatcgtcgcaaagctcttcaacgagctggctccaaagtttgaaaaccgtgagggtggctacacccgcatcatcaagctggagaaccgcaagggcgacaacgctccaatgagccagatctccctcgttctcgaggagactgtctccgcagaagctacccgtgccgcacgcgctgctgcttccaagaaggctgaagagcctgcagaagctgtagaagcagaagcaccagctgctgacgaggcagaagagaag

SEQ ID NO: 17467 - DNA, 1674 bp, Cornyebacterium diptheriae
gtgtcggaaacgccatccgtgtggaacgagacgtggaatgagatcaccaatgaactcattcagctatctcgcgaacccgaaagcgagattccacgaatcactgctgaacaacgcgcttatctcaaactcgtccgacctgcggcttttgtcgaaggcatcgccgttttacgggtaccgcactcccgcgccaaggagacgattgaaacccatttggggcaagcgataacctccgtgctctcccgtcgtatgggacgcccctttactgtggcagtcaccgtcgaccccacgttggacgtcatccaagatttgccgcatgacgtgccagaacagcacattgttcagcaccacgtgcccgagcacccccactactcgccggtatcccaagggtatccaccgcactatgctccggaacagtcggaatacaacaccgagtattccgacgagtacccctctggttgggctacttaccacgtgcagaccccacagccatcgcaatcttcgcagtcggcacagcagcaaccagctcaacgcatgccggatcgtcgtcgttatgctgagcagcagcaagttccacagcgttccgaagaaccagttatggggcaacgccgcgcgagagaaaagccagctcacgacccagatcgcaatggttcattgaatccgcgctacacctttgacacctacgttgtctcagattccaacaaacttccgtggtcggcggcgtgggctgtcgcagaaaaacctgcgcgcgcatacaacccactgtttatctggggcgattccggtttgggcaaaacccacctcatgcacgcaatcggtaactacgcccaagagctcgatccaaagctcaaggtcaagtacgtttcttccgaagagttcaccaacgattacatcaattcagtgcgtgatgaccgccaggaagcatttaagcgccgctaccgtgacctcgatattttgatggtcgacgatatccagttcttgcagggtaaagagggcacccaggaagagttcttccacacattcaatgctttgcagcaggctgataaacaaatcgttttgtcttcagaccgcccgccaaaacagctcactaccttggaagatcgcctgcgcacgcgcttccaatctggcttgatcgcggatatttacccaccagatttggaaactcgtatcgctattttgctgaataaggcatcggcggaaggcattactgcagatcgtgatgtattggagcttattgcgagccgtttcaacgcgtcgattcgtgagctcgaaggcgcgttcattcgagtatctgcctatgcgtcgctcaacgaggcccccatcaacatggccacggcacaggaagcactgcgcgatatgatgcctgagcaggcagatatcgaaattacggcaggcatgattatgtcggtgactgctgagtacttccacattgacgtcgatacgctcaaaggcagcggtaagtcgcgttcggtggctcatccgcgacagcttgcgatgtatctgtgccgtgagttgacggatttgtcgttgcctaagattggtgagcattttggtggcaaggaccatacgacggtgatgtatgcgtaccgcaagatcggtaaagagatcacggaaaagcgtgatacttacgacgagattcagcagttgacgcagcagattaagagctctgatcgcgcc

SEQ ID NO: 17468 - DNA, 1215 bp, Cornyebacterium diptheriae
gtgatcaatcacatcgaggagccctcaagcatggacgcacacgctgtctcattccgggtcgaaaaagacgacctttccggtgcggtgagctgggttgcacgtaatttgcccaccaaacccacgcagccggtcttgcgcgcggttgtcatcaccgccgatgacgagggactcgagttcgctggttttgattacgaagtttctacaaaagtccatatcaacgcggatgttcgccagccaggtcgtatcgccgtagccggcaagctgatgtcggacatcatcggcaccctgccgaacaagaccattgaggttttcgtcgaaggcactcaggtgcaggtcgtatgcggttcttcccgcttcgagcttcccctgattcctctcgacgagtacccaccgttaccacagttgccagcggtaaccggtgccatcgacccgaatttgttcacggatgcggtgctgcaagttgctgcggccgctggtcgcgatgagacgcttccaatgctcacgggtatccacatggagatcgacggcgagaacgtcaccttgaccgcaacggaccgtttccgtcttgcgttacgacgtttcacctggtcaccggctaatccagaagccaaggcaaagctgttgatccctgcgaagaacctttcggataatgctcgcagcctcgattccggttccactgaacccgtcgagatcgccgtgggcactggcgaaaacatcggtgctgaaggcctgtttggtattcacatcgataaccgccagaccaccacgcgcatgctcgacgcggacttcccgaatgtcagcccgctgctgcccaaggtgcataacgcaatggccagcgtggaaatttctgcgctttccgacgccatccgccgcgtagccctagttgctgagcgcaacgctcagatccggatgcagttcacccgtgacgaggttattctctctgctggtggttcggatgcaggtcacgccgaggaatccgtgccttgtgcttttaccggcgaccaagaatttttgatcgctttcaactcggcatatctgcgtgatggcttgagcgtgatccggactagccgtgtagtcttcggtttcacggagccatctcgccccgcaattatgattccggagcccgagacgctgccggaagcaagcgctgatggaacgtaccctacgccagataccgaattcacctacctgctcatgccagttcgactgccagga

SEQ ID NO: 17469 - DNA, 2055 bp, Cornyebacterium diptheriae
gtgcacgcttccgtggcaaccgctgaacatgaatatggcgcctcatccattacgatcctcgagggtctggaggccgtccgcaagcgtcccggtatgtacatcggttctaccggtgaacgcggcctgcaccacctagtgtgggaggtcgtggataactccgtcgacgaggcaatggccggttatgctacccacgtcgatgtgaccctgcttgccgacggcggcgtggaggtcgtggataacggccgtggtatccccgttgaaatgcacccatctggtgcgccgaccgtccaagtcgttatgacccagctgcacgcaggtggcaagttcgactccgattcctacgcggtttccggtggtctacacggtgtgggtatctccgtcgtgaacgccctgtctacccgtgtggaggcagacatcaaacgtgatggcaagcactggctgcagaacttctccatggccatccctgatccgctggtcgagggcggtaatgctcgtggcaccggtaccaccatccgcttctggccagatgcggagatctttgaaacgaccaccttcaagtttgagacgatcagccgacgtctccaagaaatggccttcttgaacaagggtctgaccattacgctggtagacaagcgcgttactgacgaggaacttgaactcgaagcgatcgccgaagaaggcgacaccgctgaaaacgtttctttggaccaaatcgatgtcgatgccgacggcaacatcgatgcacctgctgcaccaaagaaacgcgagaagaagaaggttttcttctacccagatggtttgaaggactacgttgcacacctgaacaagtccaagcaggttatccaccccaccatcatctccttcgacgccaagggcaacgaccacgaggttgaggtggcaatgcagtggaacaacagctactcgcagagcgtgcacaccttcgctaacaccattaacacgtttgaaggtggcacccacgaagagggcttccgtgccgcgctgacgtcgttgatgaaccgctacgctcgtgagcacaagctgctcaaggaaaaggaagcaaaccttacgggtgacgactgccgtgagggcctttccgccgtgatctccgtgcgcgttggtgatccgcagttcgagggccagaccaagaccaaacttggaaacactgaggtcaagggctttgttcagcgtatggtcaatgagcacattgctgattggctggatgctaaccctgcagaagccaagacgatcatcaacaaagctgtgtcctcggcccatgcgcgcgtggcggctcgtaaggcgcgcgatttggtgcgtcgtaagtcggccaccgacctcggcggcctgcccggtaagctcgctgattgccgctccaaggacccagaaaagtccgaactgtatatcgtggagggtgactccgcaggtggttccgctaaggctggccgtgattccctctaccaggcaattcttccgctgcgcggtaagatcctgaacgtggagaaggcacgtttggacaaggtgcttaagaacgccgaggtccaagcgatcatcaccgctttgggtaccggcattcatgatgagtttgacattaagaagctgcgctaccacaagatcgtgctgatggccgacgccgatgtcgacggctctcacatcgcaaccttgctgctcaccttgctgttccgtttcatgccacagctgatcgaagaaggccacgtctacctcgcgcagccaccgctctacaaacttaagtggggcaagggtgagccaggctttgcttactctgatgcggaacgcgacaccttgcttgctgagggcttggcgcaaaaccgcaagatcaacaaggacgacggcatccagcgttacaaaggtctaggcgagatgaacgcctctgagctgtgggaaaccacacttgatccgaagtaccgcgtcctgcgtcgcgtggacattaccgacgcacagcgtgccgacgagatcttctccatcctcatgggtgacgacgtatctgcacgccgtagctttattacccgccgtgctaaggacgtccgtttcttggacatc

SEQ ID NO: 17470 - DNA, 2568 bp, Cornyebacterium diptheriae
atgagcgacgatcttctcggtggtgacggctacgaccgcgtccacccgatcgacctcaacgaggagatggagaccagctacatcgattatgcgatgtcggtcatcgtcggccgtgctttgcctgaggtccgtgacggactcaagccagtgcaccgccgcatcctctacgcgatgtacgactccggctaccgccccgaccgcagctacgtaaagtctgcgcgcccagtctcagacaccatgggccagttccacccccacggcgactccgcaatttacgacaccttggtgcgcctcgcccaagactggaacatgcggtaccccatggtcgacggccagggtaacttcggctcccgcggcaacgacggccccgcagctatgcgttacaccgagtgtcgcctgaccccattggctatggagatggttcgcgacattcgcgagaacaccgtggacttctccccgaactacgacggcaagacccaagaaccagacgtattgccatcgcgcgttcctaacctgctgatgaacggctccaacggtattgccgtcggtatggccaccaacatcccgccgcataacctgcgcgaacttggcgacgccatcttctggctgctagacaaccccgaagcagacgaagcgtcggcgctggaagcctgcatgaagtatgtcaagggccccgatttccccaccgcgggccagatcgtcggctcccaaggcattaacgacgcctacaccaccggccgcggctccatccgcatgcgcggtgtcacttccatcgaggaagaaggcaaccgtcagatcatcgtgatcaccgagctgccctatcaggtcaacccggacaacatgatctccaacattgcggagcaggttcgcgacggcaaactcgcgggcatctccaagatcgaggacgaatcctccgaccgcgtgggcatgcgcatcgtggtcaccctcaagcgtgacgctgtgccgcgcgtggtactcaacaacctgtacaagcactcccagctgcaaaccaacttcggtgcgaacatgctgtccatcgtggatggtgtgccacgcaccctgcgtctcgaccagatgctgcgccactatgtgacgcaccagatcgaagtgatcgtgcgccgcacgcagtaccgcctcgacgaggcggaaaagcgcgcccatatcttgcgtggtttggtcaaagccctcgacatgctcgacgaggtcatcgccttaatccgtcgttcgccaaccgtcgacatcgcccgcaccggcctgatggaactgctcactgtcgacgaaatccaagcagacgccatcctggctatgcagctgcgtcgcctagctgccctcgagcgtcaaaagatcgtcgacgaacttgccgagatcgaactggaaatcgccgactacaaggacattctggcccgcccagagcgtcagcgcgctatcgtgcgtgacgagcttgcggagatcgtcgataagtatggcgacgaccgccgcacccaaatcatcgccgcaactggcgatgtcaccgaagaagacctcatcgcccgcgagaacgtggtagtcaccatcacctccaccggctacgccaaacgcaccaaagtggacgcctacaagtcccagcgacgcggcggcaagggcgtacgcggcgccgagctcaaacaagacgacgtggtccgccacttctttgtcagctccacccacgactggatcctgttcttcaccaactttggtcgcgtctaccgactcaaagcctacgaactaccagaagcatcgcgcaccgcccgcggccagcacgtggccaacctgctggaattccagccggaagagcgcatcgcccaggtcattcaaatccagtcctacgaggatgccccctacctcgtactggcaaccgcgcagggtcgtgtgaagaagtcccgcctctccgactacgagtccaaccgctccggcggacttatcgccatcaacctcaacgaaggcgacaagctcatcggcgcagcactatgcgacaacgacgacgacctgctgctcgtctccgaagaaggccagtcgattcgcttcaacgccaacgacgaccaactgcgccccatgggccgtgctaccgcaggcgtgaagggtatgcgcttcaagggcgacgaccaactgctggcaatgacagtggtcaagccggatgcattcttgctggtagctacctccggcggctacggtaagcgcacctccttggatgaatactcaccacagggacgcggcggccagggcgtgcttaccttcaagtacacgccaaagcgtggcaagctcatcgccgcagttgttgttgacgaagacgacgagatcctagctatcacctccgctggcggcgttatccgcaccgtagtgaaccagatccgcccgtcgtcacgcgccaccatgggcgtgcgcctcgtcaacctcgaagatggcgtcgaactgctcgccatcgaccgcaacgtggaaggcgaaggcgaagaagccgccgaagccgtagccaccggagctgtcgacggccccgccgaacgcggcaagcaaaccgaagttgacctcggcatagataacgccgacgaggaggcc

SEQ ID NO: 17471 - DNA, 1280 bp, Cornyebacterium diptheriae
acaaggataaggcggttcttcactaccctggtggcgagtatgagatggatatcatccatgcaaccgagggcaacgatggtgttgtactggataaattgctgtcccaaaccggcatggtcacttttgaccccggctatgtaagcaccggttccactgaatcgaagatcacctacattgacggcgacaacggcatcctgcgccaccgcggctatgacatcgcggatctagcggaaaacgcaaccttcaacgaagtctcctaccttctgatcaaaggccacctgccaaccgttgatgaactccacaagttcaacaacgaaatccgtcaccacaccctgctggacgaggactttaagagccagttcaacatcttcccacgtgacgcacacccaatgtccgtgctggcttcctccgtgaacatcttgtccacctactaccaagatcagctcaacccactcgatgaggagcagctagacaaggcaaccgttcgcctgctggctaaggtcccaatgctcgcggcttacgcataccgcgcatccaagggcgcaccatacatgtacccagacaactccttgaatgctcgtgagaacttcctgcgcatgatgttcggttacccaaccgagccatacgaggttgacccagtagtagcaaaggcactggataagctgctcattctgcacgcagaccacgagcaaaactgctcaacctccaccgtccgcatgatcggttccgcgcaggctaacatgtttgttgctgttgctggtggcatcaacgccctttccggcccactgcacggtggcgcaaaccaggccgttttggaaatgctcgaagagatcaaggccaacggcggcgacgctaccgactttatgaaccgcgtgaagaacaaggaaaaaggcgttcgcctgatgggcttcggccaccgcgtgtacaagaactacgacccacgtgcagccatcgtgaaggaaaccgcacacgagatcctcgaacacctcggtggtgacgaacttttggatcttgccatgaagctcgaagagatcgcactgagcgacgactacttcgtatcgcgcaagctatacccgaacgtcgacttctacaccggcttgatctaccgcgcaatgggattccccacggacttcttcaccgtcctctttgccatcggtcgtctgccaggctggatcgctcagtaccgcgagcagttggcaaccaccaccaagatcaaccgcccacgtcagatttacaccggagaaaccttgcgaaaggtcactccacgcgagcagcgctaa

SEQ ID NO: 17472 - DNA, 441 bp, Cornyebacterium diptheriae
gtgtctacttaccacccaaagagcggtgacatcacccgcaagtggtacgtcatcgacgccactgacgtggttctgggtcgtcttgctacccacgcagctgacttgttgcgcggcaagggcaagcctcagtttgcaccgaacgttgactgcggcgatcacgttatcgtgatcaacgctgacaaggttcacgtttcctccaacaagcgcgagcgtgagatgcgctaccgtcactctggctacccaggtggtctgaagaccatgaccttgggtcgttcccttgaggttcacccagagcgcgtggttgaggagtcgattcgtggcatgatgccacacaaccgtctttcccgcgcttctgtgaagaagctgcacgtgttcgcaggttctgagcacccatacgctgctcagaagccagagacctacgagttcaagcaggtggcccag

SEQ ID NO: 17473 - DNA, 1503 bp, Cornyebacterium diptheriae
atgacccgaacgaccgcacacgagctcatagcccaggttctcgacaccgattcttttcatagttgggataccgcaccggtctatggggatatctcagaaagctaccaacaattccttgccaaggcccgcgaaaaatcaggggtagacgaatccgtaatcacaggtgagggcactgtttatggccaccgcgttgccgtggtcctcagcgaattcaacttcctcggtggctctatcggagccgctaccgcccgacgcatcattgcagcaattcacaaagcaactgaacagcgcctaccgctccttatttcgccttcttcaggcggtactcgtatgcaggaaggcacccccgcttttgccctcatggtatccatcaccaccgccgtgtaccgacacaaagacgcacacctgccctacttggtgtatcttcgcaatcccacgactggtggcgttatggcttcttgggggtctgcgggccacttcactttcgctgaacccgatgcattattgggttttctgggtccgcgcgtcgttgagctcaccactggtcgcccgcttacccaaggtgtgcagtcgggtgaaaatctggccgaaaaaggagtcatcgacggcgttatttccccacgggagctacgcgcgtcgctgaaaaagattgtcgaggtcattctgagccccgcagacgtgaccgcaacaccccacagcgacccctgccaaatcgattctgatcgccacagcgtatgggagtcgattgagactactcggcatattgatcgacccggcgcgcgcagcatcatgcatgccatcggtcgcgataattatgttcagctttttggcagtggcgacggccgacgctcccccgctgtgattgtggccgtggctcgtcttgcggggcgcagtgctgtgattattgctcaggatcgtcatgcgcagccccctcatgccaccacggagcttggcactgaggcattacgctgcgctcggcgcggcattctacttgcccatgagctgcagcttccgttgatttctattattgatactccgggtgctgagctcagcgactatgccgaagagcatggtttggcaggttcgattgctcgtactctcagtgagcttgtgtcggtagatgttccgacgctgtctctcattttgggccaaggctgtggcgggggtgctttggctatgcttccggcggacaaggttcttgcgacttctcatgcatggttgagccctcttcctccagagggcgcctctgcgattatttatcgcgatacgtcccatgcggcacaaatgatggaggaacagcaagtttcggcggtaacactcaaagaggttggcattatcgacgccattatcgacgaacctgtcgctgcgcatcagcatcctgacgcttttgcgacttgtgtgcttgagaaggttactgcggctctcgccgaactggatgattctcccgcggtgggacgcgagtcccgtttacagcgctacgaaaagctcgcccacacattgatc

SEQ ID NO: 17474 - DNA, 531 bp, Cornyebacterium diptheriae
gtgagtgatcagaacgtaaccgagaacttcgaagcagacgcagctgacatcgctgctgcagctgcagctaccgaagagttcaccaacaccattggtgacgtcgttgcacctgaggctgaggttgagaccgcagctccagttctgcacgaaggcccaatccagaccgttggtcgccgtaagcgcgctatcgtgcgtgttcgcatggttgaaggctccggccagttcacctgcaacggccgtacccttgaggagtacttccctaacaagctgcaccagcagctcatcaaggctcctctcgccctgatcgaccgcgatggtcagttcgatatccaggcaacgctgaccggcggtggcccaaccggccaggccggcgcattccgcctagctatcgctcgtgcactcaacgtgtacaacccagcagatcgcgcagccctgaagaaggctggcttcctgacccgagacgctcgtgcagtcgagcgcaagaaggcaggtctgcacaaggcacgtcgtgcacctcagtactccaagcgt

SEQ ID NO: 17475 - DNA, 870 bp, Cornyebacterium diptheriae
atggtgaccatgaaacaacacgagaacatcattcccaccatcacgctcaatgatggtacggaaatgcccgcgattggttttggtacatataagttgcgtgaacaagatgcctatagggcagtgcgtagcgccatcgaggtggggtatcgccatattgatactgcttctttgtataagaacgaagaggaggtaggccgtgcggtggctgacgcgatcactgcaggcgaggtagctcgtgacgagctttttatcaccaccaaggtgtggaatgacatgcacggggaccagctcacgcagcgctcgttccaagaatccctccaccggcttggcctagattacatcgattgctgcatggtgcattggccgtggccgcaaaaggggctctacgtagaatcctttgcagcattggcaaagattcaggggttggggcagctgcagtcggttgcggtagctaatttctatcctgaagttctgcgcgagatcgtcgcggagactggtattgcgcctgtgttgaatcaggtggaattgcatcctggtttttctcaagccgagcagcgcgccgtggaccgtgaattgggagtggttacggaggcatggtcgcctttggggcggggtgattcgctgaacgcggaggctattacgttgatcgcgcagtgttatgagaaaacgccggcgcaggtgacgttgcggtggattcatcagttgggttgctctgtggtgcctaaatcggcgaaccctcagcggcagcgtgagaacctcgacattttcgattttgagctcaacacggaggacatgaacagcattacatcgctcgacgagcaaggtggtcggctgtttgttgatccgcacgacttcccaggcgaggtggag

SEQ ID NO: 17476 - DNA, 1350 bp, Cornyebacterium diptheriae
atggagggcatgactcgactttttggtactgatggtgttcgtggtttggccaaccggaaattgacggcgttgctcgcactgaagctaggcgcggcagcagcggaagtgttgaccaaagataacaggagcacgagtcgtcgtccggtggcagtagtgggccgtgacccccgcgtatccggcgaaatgctggccgccgcgctgtctgcaggcatggccagccgtggcgtggacgttttgcgtgttggcgtgctgcccacgcctgcagtggcttatctgacggacttctacggtgctgatatgggtgtggtgatttctgcgagccacaaccctatgccagataacggaatcaagttcttttctaaaggcggtcacaagttacccgattcggtcgaggacgagatcgaaaaggttatggaaaccatcccagatggcggtccgaccggacacggtattggtcgtgtgattgaagaggctgtcgatgcccaagaaacgtacctcaagcatctcaaaggtgcggtaccgcgcagcctcgagggcattacagtagtggtggactgcgctaatggtgcagctagtgaggttgccccactagcttatgctgccgcgggcgccaaggttattccaatccacaatcaccccaatgcgtacaacatcaacgattcttgcggctcaacgcatatcgaccaggtacaagccgccgtgctcgagcacggtgctgatctgggacttgctcatgatggcgacgcggatcgctgcctggcggtagatgctgaaggcaacgtggttgatggcgaccaaatcatggcgatcctagctcttgctatgaaagaaaacggtgagctgcacaagtctacgctggtagctactgtgatgagcaaccttgggctgcggttggctatgaaagaagccggtattgaattgcgcactacaaaagtgggtgaccgctatgttcttgaagaactcaacgctggtggctttagcctcggtggtgagcaatccggccacatcgtgctgccagaccacggtacgaccggtgatggcacattgacagggctgtccctcatgtcgcgtatggcagaaactggtttgtcgttgaaggtattggcctctgcgatgactgtgctgccacaggtgctgatcaacgttccagtttcagataagaccattatccaaacgcaccctgatgtcgttgcagcgatggaacgcgctagtgacgagctgggcgaggatggtcgcgtactgctgcgcccatccggtacagaagaactgttccgcgtgatggttgaggccccaagtaaggagacggctcgtcggatagccgcagatctggcttcggtggtggccaagatt

SEQ ID NO: 17477 - DNA, 1146 bp, Cornyebacterium diptheriae
atgaacctgctcgaaactcgcatctcgtgcgacgccattgctgcgaacacgcgacgtttaaaagacatggttgctcccgctcagctcatgtgtgttgtaaaagctgacggctacaatcacggtgccccagaagttgctactgtgatggcgcgtaacggtgccgaccaatttggtgtcgcaacgcttgcggaagcacatcagctacgagacgcgggtatcactctccccatcctgtgctggatctggtcacccgagcaggacttttccgccgccattgaccgtgacatcgacttagccgccgtcagcatggatcacgttcgtgcactgatcgcagaggctatgcgtcgtcccgcaggtacccgagtgcgggtgaccgtgaaaattgacacggaacttcaccgatctggaattgacgaagcaaactggacagaagcctttgagcttcttcatgcttgcccccaagtcaacgtcacgggcgtatttagtcacttggcatgcgcagacgacttggaatcggactacaccgaccaccaagcagaggtatttcgcagggcgatttccgcaggtagaaacgtaggcctagaccttcctgttaatcatctagcggcatcgccagcaacactaacccgccccgacttgcactttgacatggtccgacctgggcttgccctctatggtcacgaaccgatagcagggctcgaccatgggctgcgcgaagccatgacatggattggttcagtaacagtggtcaaacccatcgcggcaggccaaggaaccagctacaacatgacatggcatgcgcccgcagatggctacctctgcgtggtgccggtgggctatgcggacggattaccgcgcaacgtacaaggacatttagaagtaacgatcgccggcacgcgctacccacaagtagggcgcgtttgtatggaccagattgtggtattccttggcgataattcccgcggtgttgcccctggtgatgaggcaattatttttggtccaagagatacccaagcgatgaccgtcacggagctggcctgcgctacgggaaccatcaactatgaaatcttgtgccgcccgaccggacgaagccatagaacctatagtgctcttgacgccgttgcgcccacgcaccctactgaaagc

SEQ ID NO: 17478 - DNA, 1656 bp, Cornyebacterium diptheriae
gtgtttacaccagtcatagataccgtgggcggtagcctcggtctctcggcgctatgcgcgatcctgccgctaatcggcttcttcatattcttgatggtgctcaagatgaaagcccactgggcggcactctcaagcgttggagtggcgcttcttgttggtattttcctcttcaagatgcccgctaacctcgcacttctttcctttgctgaaggcgtagctttcggtttattcccaatcgtttacgtcatttggatggcggtttggatctacgatctcaccgttaaatcaggtcgttttgaagaccttcgtacgatcttctccaagatcggccgtggcgatatgcgagttcaggccatgcttattggcttcgcatttggcggcctattggaagcacttgctgggttcggcgcacctattgcgatcgtcgcggcaatgctacttgccattggtcttaagccgatgaaggctgttcttgtcaccttcgttgcaaactgtgcgcctgtggcattcggtgccatgggtattcctgtgacgactggtggtcttcttactcagatcccaggcgagcaagttgctgctatggccggacgacaggtttccctcattgccttaatcgtcccgttcattttggcactgatcatggatggcacccgtggcgttcgccagacttggccaatggcccttttgctgggtatcaccttcggtggtggccagttcttggcatctaattacttctcctacgtgcttaccgacgtcgtcgcgtgcctgctttccctcatctgcggtgttgcgttcttgcgtgtctggaagccaaagactccagaggatcaagcttctgagattgatgcctcgaccattcacctgtctgctgatcgggcattccttgcgctgttcccatatcttctcgttgtcgtggtgttctcgatcaccagcttgtggaagataggcgttaacatcccagctgctctgaaatcgacagatattaaggttcagtggcctggacttcatggtcacttggtcaaccaagccggcgagccaattcctaacaccatttttaacttcaactggttgtctactcctggcacgatcctcttcttctgcggtttgatcacagttctcgtgtactccgcagcggctaagaacagcaatggtgcatacccaatgtcgttcaaagcgggctttagccaattggctgaaggtgcctacaagatgcgcttctccgctttgaccattgctgctgtgatgggtcttgcttatgtgatgaacctttcaggccagactgcttctattggtgcctttttggcagctaccggcactatcttcccactgctttcgccgctgctgggttggattggtacatgggtgacaggatctgcaacttctgccaatgcgttgtttgcgcaaatgcagtccaccaccgcaacccaggtgagtgtaagcccaactctactggtgggtgccaacaccgctggtgcaaccttgggcaagatgatgagcccgcagactctgaccattgctgccaacgctgtcaacatggaaaacggcgaacgcaagatcatggctcaggcgtggaagtactccctcggacttctggtctacatctgcatcattgcgtaccttcagtccaccccaattctcggatggatggttgtgggc

SEQ ID NO: 17479 - DNA, 1650 bp, Cornyebacterium diptheriae
atgacacctgcggatctttctcaactaattaaacaaacagcaattgatgttttgtcggcgcgtgagctcgacaccacggtgctccctgaaactgtcgtggtggagcgcccacgcaacccagagcatggagattatgcaacaaacgttgctcttcagattgctaaaaaagttgggatgaatccgcgagagttaggccaggtgcttgccgactccctcgctgccaacacggcaatcgacgaggcgtcgatcgcaggccctggctttattaatatccgcttggcggcagccgctcagggtgagatcgtcgcgaagattttggaggcgggtgcaaccttcgggcattccgatctttatcaggggcgtcgcgtcaatcttgagtttgtgtctgcgaacccaactggcccaattcacttggggggaacacgttgggcggcggtaggagactctttgggccgtgtattggaagcctccggtgcacaggtcacccgtgagtactacttcaatgaccacggacgtcagattgatcgctttactaactcgttggtggcttcggccaagggggagccaactccagaagatggttacggcggagattacatcaaggaaatcgctgatgcagtagttgcgcagcacccagatgtgttggctctggccgaagcggatctcaatgaaaggttccgtgcaactggtgttgagatgatgttcgcgcacatcaaggaatctctccatgagtttggtactgatttcgatgtgtacttccacgagaactcgttgttcgaatcgggagcagtagataaagctattcagacgctgaaagacaatggcaacctgtatttcaatgagggcgcttggtggcttaagtcctctgaatatggtgatgacaaagatcgcgtagtgatcaagtctgatggcgatgctgcttacattgccggtgacattgcttatgttgcggataagttcgaccgtggtcatgacctgtgcatttacatgcttggtgcagaccatcacggttatatttctcgtcttcgtgcggcagcagctgcgatgggttacgagccttccaacgtcgaggtcctcatcggtcagatggttaaccttgtgcgtgacggcaaggctgtccgcatgtctaagcgcgcaggcaccgttattaccttggacgatctggtggaagcaatcggaatcgacggtgctcgatactcgatgattcgctcttcggttgattctagcttggatattgacttgcagctgtgggagcagcaaagcagtgataaccctgtttattacgttcagtatggtcacgcacgtttgtgctcgattgcacgtaaagctgctgatctcggtatcaccgcaatcgatcctgacctttcgcttttgactcatgaccgtgaaggcgatttgatccgtacactcggtgagttcccagctgtagtgaaggctgcagcagagctacgcgaaccgcaccgcattgcgcgttttgctgaggatcttgctggtacgttccatcgtttctacgattcctgccagattttgcctaaagtaggcgagtctgctgagcctattcacactgcacgtttggcgctggctaacgcgacgcgtcaggtattggctaatgcgctgaggcttgtcggagtatctgcaccggagcgtatg

SEQ ID NO: 17480 - DNA, 924 bp, Cornyebacterium diptheriae
atggctatagagctgccggtaggtaaaaaagtaacggtcacggtgccagcatcgtcggcaaacttgggcccaggctttgacactttgggtttggcattgtctttgtatgacaccgtggaagtggaggtgactgaccacggtcttgaagtcgaggtttttggtgaaggccaaggagagcttccccttgatggttcccaccttgttgtcaaagcaatccgtgcgggattgaaggctgctgatgtacaggtacctgggctaagagttgtctgccataacaacattccgcagtcacgtggtttaggctcgtctgcggctgctgctgttgccggtgttgcggcggcaaatggtctagctggattcccgcttgacgacgcccgtgtggttcagctttcctcagcattcgaagggcatccagacaatgccgctgcttcagtactaggaaatgcggttgtttcatggactgaaattccagtcgacggacgtactgaaccgcaattcaaggcggtgacgattaacgtcgatagccgaattaaagcgacagcgttggttcctgatttccatgcgtcaacggaagctgttcgtcgagttttgcctagcgacgttactcacctagatgcgcgatttaatgtttcgcgttgtgccgtcatgacagtagctttgcagcaccatccagagctgttgtgggaaggtacccgcgatagactgcatcagccgtaccgtgcagatgtcttgcctgtgacggcggaatgggtcaaccgactccgcaatcgtggctatgctgcctacttgtctggggctgggccgaccatcatggtgcttcatactgagccagttgacgaggctgttctcaatgacgcgcgtgaagctgggttgcgtgtgctgtccttggatgtagcagatgctgtatcggtgaaagtcgatgcc

SEQ ID NO: 17481 - DNA, 1050 bp, Cornyebacterium diptheriae
atgattgttcttggtattgagtcgtcgtgtgatgagacgggtgtggggattattgatttggccgatgacggcacgatgacgattgtgggggatgcggtggcgtcgtcgatggagcagcatgcgcgttttggtggtgtggttccggagattgcgtcgcgtgctcatttggagtcgatgattccggtgatgaaggaggcattggcgcaggcgggggtggagcgtcctgatgcggtggctgcgacggtgggccctgggttggctggtgcgttgttggtgggggcgtcggctgctaaggcgtatgcggctgcgtggggtgttccgttttatggtgtgaatcatttgggtggccatgtggcggtggcgaatttggagggggaggagttgccgcattcgattgcgttgttggtgtcgggtgggcatacgcagattcttgaggttcaggcggtggggaagccgatgcgggagttggggtcgacgcttgacgacgccgccggcgaggcttatgacaaggtggcacggctgcttgggttgggttacccaggcgggccggttgtggataagcttgctgctcgcggtaatcgtaaggcgattcgtttcccgcgtggcctttcgcgtgccgacgatctgcgtggtgagcaccgctatgatttttcgttttcgggtgtgaaaacgtcggtggctcgttacgtggagtctgcggagcgcgagggccgtgtgatttctgtggaggatgtgtgtgcgtcgttccaggaggctgtggtggatgtgttgacgtcgaaggccatcatggcgtgtaaagatacgggtgcttcggtgctgttgcttggtggcggtgtggcggcgaattcgcgattgcgggagttggcggcggcgcgatgccaaagtgcgagcatcgagttgcgggtgccgagctttaagttatgcacggataatggcgtgatgattgctgcggtggcgtctcagttgattcatgagggtgcgcagccttcgggcttgtcggtgggaacggatacttctttggaagtggaaatcccgttggtgcattcgctg

SEQ ID NO: 17482 - DNA, 2061 bp, Cornyebacterium diptheriae
gtgactaatacagataacagcgcacagcgtaatctcgctgctctgcgtttgcccgaactgcgcaaaattgccgcagaaatgggcctgaaaggtacgtccgccctgcgtaagggtgatctaatcgcggctattaacggtacctctgccgctcatccaacatctgtggccccctcggaagagaacaaagcagatgcaccaaagaaggaacgtccagcacgtcgtcgtgcgactaagcacgttgcccaagatgccggttccgagccagcgccagtggtaacagaagttgctgcgcctgcagaacagaatcctgcgccaaaacaagaaaaagaagctccagctggtgagtccgagcgtcagccacgccgtcgtcgtgcagtaaagacgtctgtgaaaacaacgcaggaggaacccactgaggttcgcgtagcagaagctgcagaagctactgacaaatcttccgaagagcagtccgctgaggcaggttctgaggataaagataactaccactacgagtctcgttctgccgctcgacgtgcccggcgtaaccgtgctcgtcgtgagcagcgcgaatacaatcgccctggcactaaagatgagagcgaagcatctcagccagaaaatgagaactctcgcaacgacgtcgcaccagaatcctctaaggtagcagacaacagcaacgagcaagctcgttctgatcaagctgatcaacccaccaagtcggactctaacgacaatggtcgtgaggataaccgtcgtggcaatcgacacgagcgtggggagcgtggcgatcgtggggaccgcaaccgtcgtaatcgtcgtaatcgtcgtggccgtgaccgtgatgataaccgtgataatcgcgaaaataacaacaacgaaccacgtgaagatgaagtcttgcaaaatgttgcaggcatcttggacatcgtggacaacaatgttgctttcgtgcgtacctctggttaccacgccggtgctgctgacgtctatgtgaacaaccagatgattcgccgcttgggattgcgttctggcgacgcaattgtgggccaagttcgtatgaatggcgaaaacaatcacggcggacacaaccgtggccgtaaccgccagaagtacaacccattggtacgcgttgattcagtcaacggaatgacggtggaagaagcaaaggcacgccctgagtttgccaagctcaccccgttgtaccccaaccagcgtctgcgcctcgaaaccgagcctaaggttttgactacccgtgtgatcgatttgatcatgccgattggtaaaggtcagcgtgctttgatcgtgtctcctcctaaggctggtaagaccacgatcctgcaaaatatcgcaaacgctattgctaccaacaacccagagtgctacctcatggttgttttggtggatgagcgtccggaagaagttaccgatatgcagcgttctgtgaagggcgaagttattgcatcgaccttcgaccgtccaccaagtgagcacactgctgttgcagagctcgctattgagcgtgcgaagcgccttgtggagcagggacaggatgttgtagtactcctagactccattacgcgtcttggccgtgcctacaataacagctcacctgcatccggccgaattctctccggtggtgtggactctaacgcgttgtacccaccaaagcgtttccttggtgcggctcgcaacatcgaaaatggtggatcgcttacgattatcgccacggccatggttgagactggttctgccggcgacaccgtgatcttcgaggaattcaagggcaccggtaacgccgagctgaagctggatcgtaagatttctgagcgccgtgtattcccagctgtcgacgtcaacccatcgggtactcgtaaggatgagttgctgctggctccggaagaagctcgcattatgcacaaactccgccgcatgctttctgctttggataatcagcaggctatcgatttgttgatcaagcagctcaagaagaccaagtccaatggtgaattcttgatgcaggtagcaagttctgcgccgatggctgcggatgctgaggaggac

SEQ ID NO: 17483 - DNA, 1068 bp, Cornyebacterium diptheriae
atgtctcaggtttctgcagttgacgacatcgtctcggaataccaaggcattgaagcccaaatgtctgatccagagacgatgggtgaccaaacgctattccgtaagctatccaagcgttattcggagttgcagcccatcatcaacgtaaacaacaagttggtgcaggctcgtgacgaccacgaagccgctgaggaaatggcctacgaggataaagagttcgccgctgaggccgaacgtcttgccgaagaaatcgtttctttggaagaacagctcgctgatctgcttgcaccacgcgatcctcacgatggtgatgacattgtgatggaagtcaaagcgggtgccggtggtgaagaagctgcacttttcgctggtgaactcgtgcgtatgtaccaacgctacgcggaaaagcatggtttcacggtcgaggttctgggcttgtctgaatctgatttgggtggcgtcaaagatatgaccttgtccattcgctcgaagactccatctcgtgatggtgcgtggagcgtgttcaagtttgaaggtggtgttcaccgcgtacagcgtgtgcctgtcactgagtctcaaggccgcatccaaacatcggcagcaggtgtactggtctaccctgagcccgatgaggtagctgaggtcgagatcgacgacaaggatttgcgtgtcgacgtctaccgttcctcgggtaaaggcggtcagggcgtgaacaccacagactccgctgtgcgtattacgcaccttcctacggggttggttgtgacctgccaaaaggaacgttcgcagatccagaacaaggctcgtgctatgcaggtgctcgctgctcgtcttcaagctatggcagaagaacaggcagaagcagaagcagctgagggtcgcgctgcacagattcgtactatggaccgctcggaacgaatccgtacctacaactggccagagaaccgcatctcggatcaccgcattggatacaaggccaataacctggactccgtactcaacggtgatcttgatgatctgttctctgcgttgcaggcagcagagcgtgccgagaggctcgaggcggaa

SEQ ID NO: 17484 - DNA, 816 bp, Cornyebacterium diptheriae
gtgctagctcaggcattacacaaggcggaggccattctcgctgaggcgggggtggcctcgccgcgtaacgacgtccaccttatggcggcgcatttactgaactgccaacctatggagttattccttaaaggcgatcatgatgttccagagaacttctgggaatgggttgagcgaaggaaaaaccgtgagccactccaacacattctccaagtgacgtggtttggcccattggaacttcatgtgggcccaggtgtttttattccgcgtccagaaactgaggtgctagccgattgggcagttcgtcatactgactccgaggacatcgtggtcgatttatgcactgggtcaggggcgttagcagcttacattgcgcacgaacatcctgagtgctcggtatgggctgtggaactatctgatgcagccatggcatttgctcgtagaaatcttcctgaccgagtccatctggttcaaggtgacgttacagatccagagatcttagatcacctcagtggggcagtagatctcctcgtgagtaatccaccctatgtgccattaagtaatgatttagagcccgaggtgtaccaagaccccagtatggcggtgttttctggtgattcgggaatggacactattaacgccatgattccagtgatttaccggctgttggctcctggtgggctcgtgggcatcgagcatgatgatttaacgtctgagctaacgcaacaggcgctcatagatcatggtggatttagtaacattgaaccgctgaaggacctcactggccgcaataggtttgtggttgcgagtaagattctc

SEQ ID NO: 17485 - DNA, 501 bp, Cornyebacterium diptheriae
atgctgcgcgcgatttgggctcagtccactgatggggtgattggcgatggcaacgacatgccctggcatgttcccgaagacctcgcctatttcaaggccaccactttgggcgaacctgtgattatgggtcgcaccacgtggactacgatcccagaacgcttccgcccgctgccagggcgtcgtaactttgtgctctcctcccgagcacccggcgcgtggagcacgggtgccgaggtcgtcactgcaatccccgagctcgactgcgatgcatggatcatgggcggcggcgccgtctacacaagcacacttccgctggtagacgaggtagtgatcacgcttatcgacgtcaccctcgctcccgtactcggcgacgcagcagtatatgcaccagccctcgacgatagctttgaggttgttgaggaatccccatggcagcaatctgcttccgggaccgtgctgggtactccggcccgctataagttccaaaggttgcgcaggcgt

SEQ ID NO: 17486 - DNA, 1892 bp, Cornyebacterium diptheriae
gtatggtggcgcatatctggggtatcggcaccagccgatgcccctcagctattcccagaattgctcagtcttgcccgcgatcgccttctcgccgcccttatcgttggagcatgcctaggtgttggcggcgtcctgctgcgtaccgccacctctaatccattagcggatccccacatcactggagtcaacgccggagccgcgtttggtgcagtagcttcgagctttatcaccggttctgctaccggcgcctatctattgcctggggcgctcatcggtggggccttggccgcaggttttaccatctcgttgagcgtgcgcggtgccggacctgaactcagtggcgcccatgcagtgcaaaaaatggtgctgctgggtattgctgtctcggcagtatttagtgccttgaccgccatctttttggttctcgatgaagcacaattgactaccattttggcgtggcttaatggtcgcctcgccggagtacgtatgggcgatctgtggccagcgttgtgtgctttcgtgatgctgtttccggtacttgttgctgggggaagagctttcgattctctcgggacaggagacgtcgtcagtcgcgcgattggtgcgcatccggcgcgggtgcgggccttggcgattgtggcctcggtggtgctaaccgcgacatgtgtagctgccgccggccctattggttttttgggcttgctggctgcggtagtggcacaacgtatcgctgggcgagcgcatcgacgtagccttgtggtcgctgctgctgttggcgccaccacactgctagtcgccgatactgtcgggcaagcattgtgggctcctgtggaaacgcccgtgggaatcttgacaggtattgcaggtgtcccgctattgctgtgggggattcgttcgctggggtcgggaacgaagaggcagggtaagtaatggcgcagaaaaagacatttgttatcgctcttgttgtgagtactgcttgcttggtgttggcatgcttgttgggcatggctattggggcggtgcaaaaatctctgcccgaggttgttgctgggctcatcagtggcgaaagcttgtattggcgctaccgcatgccgcgcatcgtggtgggagtactagcgggtgttggtatggcagtatcaggcagtttgctgcagacgtcgttacgcaacccgcttgcggcccccgatacgctggggatcacggccggtggtgggctcgctgccgtagtggcgttgcttggctttgggcagctgtcgccgcttgcgctcaccccgatcgcctttgtgggatcgctgctcggtgccgtggtggttttgttggcagcagggaagtcgatctttgatccggcacggttggcgcttacaggtgttgccgtgtctgtggggcttgccgccgtcacccaactgctgttggtacgcgttgcccctgaagcgggtgcggcgatgacgtggcttaaaggctcgctttatgccagaacgatggccgatgcgatgacagttgcccccgtagttgtcatcggatgcgttgtggctttaatcggtgcaaagcactttaatgcattagcgcttgacgacgcgatgatgacgagcattggcgtgcgtagtcgagccttgcggttagtgacactgggcgtagccatcgcatgtggctctgctgccgtggctgcggcaggcgtgctcggattcgtcggattgattattccgcatgccgcgaagttactggtagggcaggccttatcgcgccaaattcctgtggctgcggtggcgggtgctgcgctagtggttgctaccgatgcggtcggccgatgggtattcgcgccaacagaaatcccggtaggcgcgctcatcgcgatcgttggtgcgccgtactttatttacttagttcatcgcgtg

SEQ ID NO: 17487 - DNA, 837 bp, Cornyebacterium diptheriae
ttgcccgctatcgacttgattgtgaatatgagcaccaacaacaccataaaaaccccgtatgaagaccttcttcgcacaatccttgaacagggctcccacaaagacgaccgtaccggcaccggtacaaccagcctttttggccaacagatgcgtttcgatctcaccgaggccttcccactcatcaccaccaagaaggtgtattggaaaggtgtaatcggagaactcctctggttcctgcaaggctcctccaatgttcgctggctccaaaagcgcaacattcacatctgggatgaatgggcttccgaagaaggcgaactgggacctgtttatggtgttcaatggcgcagctggcctacccctgatgggcagcatgtggaccagatcgcccaagcactagatatactcaaaaacaatccggactctaggcgcaacatcgtctcagcgtggaacgtggccgatctcaacaatatggcgcttccaccgtgccacttgttgttccagctttatgttgccgatggaaagttgagctgccagctctaccagcgcagcgcagacatgttcttaggtgttccgtttaatatcgcctcctactccgctctcacacatatgctcgcacaacaagcaggccttaaggtcggcgagttcatttggactggcggcgactgccacatctacgacaatcatcgcgagcaggttctcacccagctctcacgtgaacctcgcccctaccctcagttgacattgcggaaagcctcctcgatcttcgactacgacttcgacgatttcactatcgagggctacgatcctcacccagcgattcgtggcgaggtagcagtg

SEQ ID NO: 17488 - DNA, 810 bp, Cornyebacterium diptheriae
atggaccgtaattccacagcaacaatgccgcaacagtccttgggctgtatgtcgatgtctgcagggtacggggcagaattgattgttcgagatgtttcgctcgacgttccagcgggcaagattaccgcgttgatcgggccaaacggtagcggaaagtcgaccctgctgaaggtgcttggcaggcagctgcgtgcagaaagcggccaggtgacgttggatggccgagatattgcggattttggtgcgcgggagttcgcacggaatcttgcattccttccgcaacagccggtggtaccagacggcatgacggtgcgtgagcttatttcttttggacgctatccatattcgggcgcgtttgcgtcgttaagcgcggcagatcatgctgccattgagcgggctgctgcggcgacgagtatcactgagtttttggacgccgatgccatggcattgtccggtgggcaaaaacaacgcatgtggatcgcggtcacgctggcgcaagaaaccggaattttgcttctcgacgaacccacgaccttccttgatcctgcgcatcaattggcgattcttgatctggttcatgagctgaatcagcaaggccgcacgattgtgatggtgttgcatgatatggcgcatgcggcaaagtattccgaccatgtggtggtgatgaaaaatggggaagttttgcagcaagggccaacgcagtcaacgttgaattctgggctgattgagcaggcttttggtatttctaccatgatggtgaccgatccagagacgaatcgccaacttccgattgcctatggcatcaaacga

SEQ ID NO: 17489 - DNA, 926 bp, Cornyebacterium diptheriae
cttaccatcactagttagtgttttagatcacccatcaagttgtagttcccctcatgctccaacgcacagccaccaccaccggcgtcttattcatcatcgcctcctgctgctcactccaaatgggagcagcattcgccatccaactcttccccatcgccggcccatgggccaccaccttcgcacgactgtttatctccggggccatactcctcgccatcacgcggccgtcgatacgcgacttcgaccgcagccaatggtcagccatcatcgtcttcggactcaccatcggcgcaatgaacaccaccttctacgccgcactctcccgaatcccactgggcaccgccgtcaccatcgaattcatcggcccacttactctctcagcagtgctttcgaaaagcgcacgcgacctcctatgggtcctcatcgccatcgccggcatcagcctcttcggctgggaaagcctcttcggcaccggaaacctagaccccatcggagtcgccttcgtcctcatcgccggattcttctgggccatgtacatcctcgccagcgccaaagtcggcagactcatccccggcagcggcggactcgctctcggcatgctcatcggcagcctcattccactccccctcggcgccgtcaaccttcccctctttttcacaagctcccacctcatcgcgcttgccatcggcaccgcaatcctcgcctccctaattccctactccttcgaaatggccgcgttacgacgtctcccctccgccatattcggaatcctctgctccctcgaacccgtcttcgcagcattcttcggctggctactactccaccaacccatcagtaccatcagcgtgatcgccatggcgctcgtcatcaccgccagcgcgggaaccacaattaatgcgaaccggaaaaacacgccaaaagtttct

SEQ ID NO: 17490 - DNA, 1167 bp, Cornyebacterium diptheriae
atgggtgctggtgccggtgttgccggtgtgcccatgcgtgagcttgcactgatcattctcgttgcagcttcgctgacgtttttgaccacggggatagttcgctacgctgtggtcaaaagcgggcgaatgggcgaaatccgtgagcgagatgtccatacccagcccaagccgcgtcttggtggtgtggcgatgttttctggttttatcggcgcagtattcttggccgaccagcttccagccttgactagagggtttaagccggtcactccggagatgagcgccgttttctgggccggtgcgattatcgtcatcgtgggtattctcgacgatctgtttgagctggacgcgattactaaacttgcgggtcaagttctaggtgcggccgtcatgagcatcttggggcttacatggactttggtctatctgccatttggtggtggctcgacgcttgttcttgatcaggttgcttcaactttggttacggtgctgtttacagtcactttgattaacgcaatcaactttgtggatggcctcgatggtttagccgctggtttgggcatgatcgctggtttatctatcttgttgttttctatgacggttctccacgatcaaggtggcatggtatcggcatatccaccagcaattattgcggcttccctcgtgggcatgtgtgcaggatttttgccgcacaactttgagccggctcgcattttcatgggtgattctggctccatgctcatcggattattgcttgcggcagcgtcaacgtcggctagtggcaagatcgatatgagtctgtacggcacagttgacgtgatcgccttgatgtctccgatcattgtggtgatagcggcagtctttattccgatgcttgatttggtgatggccattgtccggcgtgttcgcaaaggaaaatcaccgttttctgctgataagatgcatctgcatcaccggctattgtctttggggcatacgcataggcgggtcgtgttggtgctttatctttgggtgtccgtggtcgcttttggtgcggttgcgttctcgattgttccccccgtttttgccaccgttggtgtgattacggctatcgtgttcgcagtacttgccagtagggggccggtcatacgtgcccaaaaggaagcgcatcgtcgtgaacatccgctctca

SEQ ID NO: 17491 - DNA, 940 bp, Cornyebacterium diptheriae
caggccatgtcccctgcgatcatcatgctgatgtgcgacggagtccgtgatgattgcagagagttttcagacgtccatcgcaccgcatgcttgatttcaggtatatgcggcccgaaactgggagagaacgctgagcgttacaactttggccatgaagggcgagtttcacgcgccctccttggatcacgaatttttcccggatcccatctggttcgccgatgtggcgaacggttggttcacaatcgaccgtctgatgttcgtccgcctgcttatggcgttggtccttgtaatcttcttcgcagtcgctatgcgtagcccgaagcttgttccttccggcttgcaaaacgttgctgaataccttttggacttcgtccgaattcacattgcagaagacattctgggcaagaaagagggcaaccgcttcttgccaattctgtccaccattttcttcgtggttttgttctgcaacctgccttcggtcattccattcctgaacatttcgccaaacgcgcgcattggtatgccactcgttttggcgctgttcggttacattgccttcatctacgcaggtgctaagcgctacggcttcttcaagtatgtgaagtcttcggtggttattcctaaccttccgccagttcttcacttgctcgttgtgccactcgagttcttctcgacattcgttctgcgtccggccacactgactcttcgtcttatggccaacatgctcgcaggacacatcattctggtgcttcttttctctgccacgaacttcttcttctggcagctgaatggttggactgcgctgtccgccgtaactttggttgcggggatcgcgttcacgctgttcgagatgctggtgattttcttgcaggcgtacatcttcgctctgctttctgccgtgtacatcgaactggcgttgcacgccgacgaacactgaccc

SEQ ID NO: 17492 - DNA, 564 bp, Cornyebacterium diptheriae
atgacgaacgtcattaaatacctcgctgaaggcgaggcactaccgctggaggatcaccctagcgtgttgctccctgcgagctacgacatcgtctggtcgctcgtcgtgttcattatcgtcctgatcctcttctggaagttcgttcgtccgaagtatcaggaagtcctgaccgaacgtgaggaccggattaagggtggcattcagcgtgcagaagctgcacaggctgaagcaaaagctgctcttgagaagtacaatgctcagctcgccgaggcacgtgccgaagcagcagagatccgcgaagaagctcgtgcaaagggcaagcagatcgaagctgaaatgaaggcaaaggccaccgaggagagcaaccgcatcatcgagtccggtgagaagcaattggcagcacagcgcgagcaagttgtcactgagcttcgtcgcgagatgggccagaactcgatcagccttgcagagcgtctgcttggagaccagctctccgatgacgtcaagcgttccggcacgatcgataagttcttggctgagctcgacaccgtgtctcccgcaggaaag

SEQ ID NO: 17493 - DNA, 4446 bp, Cornyebacterium diptheriae
gtagcaacctggtttagcgatgtgtttgcccagcccacggtggtgcagcgtcaagcgtgggcggctatttcggcgggggagaatgcgttagtggtagcccccacaggttcgggtaaaacactcgctgccttcttgtgggcactcaacgagcttgttcaagggtcgggtcaaacggcgttgctcagtaggcaggctgcaggatcagcagaagtcgaggcatcacgcgccaagggggtcaaggttgtttatatttctccgttgaaggccttgggtgtggatgtggaaaacaatctgcgtgcgcctttgacgggcattaatcaggtggctgctcgcttaggtattgatcaaagcgatatcactgtgggtgtgcgctccggagatactccggcgagcgagcgcagcaaacaggtacgtaacccaccagatattttgattaccacgccggagtctttgtatttgatgctgacgtctaaagcacgatctattttgaccaccgttgatacggtgatcgtggatgaaatccacgcgatggcgggcacaaagcgcggggtacatttggccttgagtcttgagcgccttgagcacctggctgcgcaaccggtgcaacgaattggtctctctgcaacggtacgtcccctcgacgtagtggcgaggtttttgggcggggatcgccctgtggaggttatcaatccgccgttggagaagaagtggcagctagcggtgcatgttcctgtcgatgacatgagtgatttgcccacacccgaaccagtaagtgagattggggaagccacaatcgacgatccgttggggttgactacccagccggaaggttttgccgaatccgctcttcccgctcagggctctatgtggacgttcattgaacaagatgtcttcgatgaggtgatggaacaccgctctaccttggtttttgttaactctcggcggactgcagagcgcctgaccagcaggcttaatgagctatacgcgcagcgttttcagcccgaggcgttatcgccggcgttacgacgcccacctgcgcagttgatgaaaagtatcgacatcgccggcgaagccacagcgattattgcccgtgcacatcatggttcggtgtctaaagacgagcgcgcccttaccgagaaaatgctgaagcaaggtgagctgcgcgctgtggtgtcgaccagttcactggaactaggtatcgacatgggtgcagtggataaggtcattcaagttgagtcgccaccctcggtagcctcggggcttcaacgcgtggggcgtgccggtcacgtggtgggtgcggtatcgcatggttcgttttatccgaagcatcgcgcagatcttgttcaaaccgccgtcaccgtaggtcggatgaccgaggggcttatcgaggaactccacgttcctactaatgcccttgatgtgctggttcagcacacggttgctgcggttgctatggatgatcttgatgttgaggattggtacgcaacggtggtgcgcgcctatccctatcgcgatcttcctcgtgaggcttttgatgcagctattgatctcaccgctggggtgtatccctctactgactttgctgagcttcgtccgaaggtcatctacgaccgtataaccggcactctcagcgcacgccccggcgcgcagcgtactgcggtgattaatggtgggacgattcccgatcgtggcatgtttggtgtgtttttggtcggtagcggagaatctggtgcgcctcgcagggtgggtgagcttgatgaggagatggtgtatgagtccagggtgggggacgtgtttacgttgggggcgtcgagctggcgtattgaggagattaataaggatcaggtgttggttacgcctgcgccggggcatacgggcaggttgccgttttggacgggggatcaggcggggcgtccggcggagttgggtaaggcgttgggggcttttcgacgcaccctagtcgctgatcccagtgtggttgagggcatggggctggatgttcgtgcgcggtcgaatgtggttgcgtttattcagcagcagcaagagtccacgggagtagtacctgatgaggtgacactggtactagaacggtttcgtgatgaattaggcgattggcgggtggtgcttcattcaccgtatggcaggggggtgaatgctgcgtgggctttagtagctggtgcggcattttcgcagcgtactggtatggatgcccagccggttgcctcagatgatggcattgtgttgcgggttccagaatcggatgctgaacctggtgcggatctgtttgagattgatccggacacggttgaggagttggtggcccagcaggtgggcaactcagcgcttttcgctgcgcggtttagggaatgtgcggcgcgggcgttgttgttgccgagtcgcacgccaggtaaacgtgcgccgttgtggcaacaacgacagcgtgctgcgcagttgttggatgtggcacgaaagtacccgagttttcctattgtgttggaaacggtgcgggaatgtttgcatgatgtttatgatcttgatgcgttagtggagctagctgctgcattgaagctgcgtaaggtgcgtatcgctgaggtgacgacgcagcagccgagtccgtttgctacgtctattttgtttagttacacgggcgcttttatgtatgagggcgatagcccgctggcggaaaagcgtgcagctgcgttggccttagacccagcgctgcttgccaaattgttgggcacagtagagcttcgagatttattagatccgacaattatcgctgaggtggatcaagacgtgcggcggcgttcgcagcgtcggcgtgcacacaccgccgaacagttggttgatgcgcttcgggttttagggccagttccgctaacagagattcctgcgatcgccgaggtggacgtgcccgctgtgctccaggagctcgggcgccgagtcatggaggtgcgtattgctggagtagcgcatcttgccttggctgatgatgctgcgttgcttcgggatgcgctaggtgtgccggttccgccggggatcccagcgcaggtcgatacgattactgacgcggtggcacagttggtgactcgttgggctagggcacgtggaccgtttgtactctcagatgttcaaagtgctttcgggttggccgctggggtggcacatggggtcgtcgatacgctgcacaagagcggtgtggtgacgatggggcgttttcgggctggtgttgaccagtcggagtatatggctcctgaggttttaaagatcattcggcagcgttcgttggcggctgcgcgagccgaaacccagcctgtatcgcagtcggcgctggggcggtttttgccacagtggcaacaggttgctgcgatgggacagcaaccgcagctgcgcggtgctgatggtgtgtttgcggtggtagagcagctcgccggtgtgcggctgccggcatcggcgtgggaaacgatggtgttgccgcagcgggtgagtggctatcaaccaagtgatcttgatgagctcactgccaatggagaagtggccgttatcggtgccggaagtgccggtagctcggacccgtgggtgatgctcgtccccacggactatgcagctcagctgattgatgcgcccgacgtggagactttaagcccgatccaacaacaaatcgttgagattttaagcaacggtggtggctatttgataagcagcatccgagaccagatacttggcagcgatacagatgtgcgcactgctatctgggagctttttgagctggggatgataagcccagatggcatggctccgatacgtgcgcgactcagcgctggaagtggggcaagttccgcgcatcgtgcgaagcgcacgccggcccgcgggcggttacgtatgggccgaacgcgttttgcgcaatcccaccaatcagggatcgccgccgatatggtggggcggtggtcgctgactatccccgctgataccgatgccactgcgcgctctgttgctcacggagaagcctggttggatcgctatggggtggtcactcgtggcagcgtggtcgcagaaaacaccttgggcggatttgctttggcgtacaaggtgctttcacgttttgaggaagctggtaaagccatgcgtggttacctcattgatggtctaggggctgcccagttttctacgccggcggttatcgatcggttgcgcggactaggagatagcgatgatgtgactggttggccatcgggtaccaccgatcctgaggtgtatgttcttgccgcagctgatcccgcgaatccttacggggctgcgttgccgtggcccgaatcgggccccacccgtgcagcgggcagcatcgtcgtgcttatcgacggcctcctcatcgcccatctcacccgtggcggtcgcacgttgacagtattcgatcttcctaccggaatcgaggtagccgatgtcatg

SEQ ID NO: 17494 - DNA, 819 bp, Cornyebacterium diptheriae
atgcacgcagcgagccgcgaagcactagcacgcgttacctctgacctcgacaaggcattgtgggaggccaaggaaaacgctatcgctactgcagcgcacactggcgcagagcttttcgacgtcgtcgaggttctggatggcgaccgcgcactgcgcgttgctgtcgcagattccgcgaagtctgccgaagatcgcgctggattggtttctgctgtgttcgccggaaaagtcagccctgcgacgctagaggttctcgttacctctgcacgcgaactgtggtctaaccctcgcgaattccgtgatggtctggtcacgttgggccgccgcgcacttctccgttctgctgaaggtcaaggacaattgggtcaggttgaagacgaactcttccgcctctcccgcattttggacaaggagccagagttgactctcttgctcgatgaccgcagcacagacggtgcaaagaagcgtgagctgctggcgaaggtgctgtacggcaaagtcactgctgtgactgaagcccttgcactccaggttattgggcgtcgtgagtccaatgcgatcgacgatattgatgcgctatctaaggaggctgctgcattgcagggccactccgtagcacacgtcgtaagcgcaggacgtctcaatgacgaacaaaaccaggcactggcacagaagctagagcgcatttatggtcgtgcgatgagcatccactctgaggttgatcccagcctcctcggtggtttggtcatccgagttggcgacgaagttatcgatggatcgacctcgggcaagctcgagcgtctccgcgcgaacctcgcg

SEQ ID NO: 17495 - DNA, 1659 bp, Cornyebacterium diptheriae
atgctggaagaaactaccgagagcaggaagaacatggcggagcttacgatctcctccgatgagatccgtagcgcgattgcgaactacacctcgagctactccgcggaggcctcccgtgaggaggtcggcgtggtcatttccgcagctgatggtattgcccaagtttcgggcttgccttcagttatggcaaatgagctcctcgagttccctagcggcgtcatcggcgtcgcacagaaccttgacaccgaccgtatcggcgttgtggttttgggtaactacgaaatccttaaagaaggcgacgaagtcaagcgaaccggcgaggtcctctcgattccggttggcgagaagttccttggtcgcgtcatcaacccactaggccagccaattgacggccttggcgctatcgaggctgaggaacagcgtgtcctcgaactgcaggcaccttctgtgctgcagcgtcagccagtcgaagagccaatgcagaccggcatcaaggctatcgatgcaatgaccccaatcggtcgcggtcagcgtcagctgatcattggtgaccgcaagactggtaagactgcagtctgcatcgacaccatcttgaaccagaaggctaactgggagtccggcgataagagcaagcaggttcgctgcatctatgttgcagtcggccagaagggctcgaccattgctgccgttcgtcagaccctagaagagcacggtgcgctggagtacaccaccatcgttgctgcaccagcttctgattccgcaggcttcaagtggttggcacctttcgcaggtgctgcattgggccagcactggatgtaccagggtaaccacgtcctggttatctacgatgatctgaccaagcaggcagaggcataccgtgccatctccttgctgcttcgtcgcccaccaggacgcgaagcttacccaggtgacgtcttctacctccactcccgtctgctggagcgtgctgcaaagctctccgacgacatgggcgcaggttccatgacggcacttcccatcatcgagaccaaggcaaacgacgtttctgccttcattcctaccaacgtgatctccatcaccgatggtcaggtattcctcgagtccgatctgttcaaccagggtgttcgcccggctattaacgtcggtgtgtccgtttcccgtgttggtggcgcagctcagaccaagggtatgaagaaggtttccggttcgttgcgtctggatctcgctgcttatcgcgacctcgaggcattcgctaccttcgcatctgacctcgatgctgcttccaaggctcagcttgaccgcggtgcacgtttggtcgagttgctcaagcaggcagagaacgcacctcagtctgttgagcaccagatcgtttccatctggcttgcaggcaacggccacttcgataccgttcccgtcgaagacatccgtcgcttcgagtttgatttgatcgatcacctgcacgctgctgtaccacaggtattcgagcagattgccggcggcgctcagctgtctgaggaatcccaggctgcgctcgtcgctgcaaccgaggattttaagcgcaccttccagaccactgatggcacccccgtgattaacgagccagaggtcgcggcattgtctgcagaccaggtgaagaagaacacgatttcggtgaagaag

SEQ ID NO: 17496 - DNA, 1614 bp, Cornyebacterium diptheriae
gtgagggattatgcgggcacgtcaggtaagattttggccgtgacgcagcaaacttcccaaaaacacaatccagtcttggttgtagactttggcgcgcaatacgcccagctgatcgctcggcgcgtgcgcgaagccaacatctactccgaggtcgtcccgcataccgccacggttgaagagatcaaggccaaaaacccggcggcgttaatcctgtccggtggcccatcatcggtttacgccgacggcgcaccatcgcttgacccacaggttctcgaactcggcatccccgtcttcggcatctgctacggcttccaagctatgacccacgccctaggcggcaccgtggccaacaccggcaaccgtgaatacggtcgcaccgaaatgaccgtcgatggcggcattctccacgctgacctcgaagaaacccacaaagtatggatgagccacggtgacgctgtctccgttgcaccagagggattcgttgtcaccgcccactccgaaggtgcacccgtcgcagccttcgaatgcgccgaaaagcgcatggcaggcgtgcaataccacccagaggttctgcactcgccacacggccaagaagtcatggtgcgcttcctcaccgagatcgccggccttgagcaaaactggaccgcagccaacatcgccgaagagcttatcgacgcagtctgcgcacaggtcggaccagaaggccgcgctatctgtggtctttccggtggtgttgactctgcagtcgcagcagcactcgtccagcgcgccatcggcgaccgcctcacctgcgtattcgtcgaccatggcttgctgcgtgcaggcgaacgcgaacaggtccaaaccgatttcgtcgccgcaaccggcgcaaaactcgtcaccgttgacgagcgcgaagcattcctgaacaagctcgcaggtgtcaccgaaccagaagctaagcgcaaagccatcggcgcagaattcatccgctccttcgaacgcgcagtcgccggcattctcgacgacgcccccgaaggctccaccgtggactttctcgtccaaggcaccctctacccagacgttgtagaatccggcggcggctctggtaccgccaacatcaagagccaccacaacgtgggcggcctgcccgacgacgtagaattccaactcgtcgaaccactacgcttactgttcaaagacgaagtacgcgcagtgggtcgcgaactcggtctgcctgaagaaatcgtcaaccgccagcccttcccaggccccggcctcggcatccgcatcatcggcgaagtcaccgaagagcgcctggaaacactacgcgcagccgacctcatcgcccgcaccgagctgaccgcagctggcctcgacagcgaaatctggcagtgcccagtagttttgcttgccgacgtccgctccgtcggcgtccaaggcgacggccgcacttacggacatcccatcgtcctacgccccgtctcctccgaagacgccatgaccgcagactggacccgactgccctacgacgtgctcgagaaaatctccacacgtatcaccaacgaggtctcagacgtcaaccgcgtcgtcctcgactgcacctccaagccaccaggaaccatcgagtgggaa

SEQ ID NO: 17497 - DNA, 1641 bp, Cornyebacterium diptheriae
atgtccttcgatgttacgaccactgagccatgggctacgctctctgagcgctacaccgccatgaaggcaaccactcttcgtgatttgtttgctagcaaccccaaccgcgcgcaggagttgagcttcgaggcagcaggtcttcatgtcgacttgtccaagaacttgatcgatgccgaaaccgtggctgcgtttactgcgctggctaaggcctctggtatgcgcgaaaaaatcaaggccatgtttgatggtgagcacattaacaacaccgaagaccgcgctgtgcttcacaccgcacttcgccttgcagtcgatgccgagcttaacgttgatggccaagacgtagctgcagatgtgcacgaggtactcggccgcatgcgcgactttgctacgtctttgcgtaatggctcttggcgcggttactccaaccacaccatcaagaccattgtgaacattggtatcggcggatctgaccttggccctgcgatggcaacgaaggcgttgcgtacttatgcaacagccggtatcaacgcgaagtttgtttccaacgtcgacccagctgatatgcatgcggttctcgacgagctcgatccagagtccacacttttcgtcgtcgcctccaagacctttaccacccaagagactctggctaatgcccacgcagcgaagcgttggctggttgcagctgccggtggggatgaatctgcagtggctaagcactttgttgcggtatcgacgaatgcagaaaaagtcgcagagtttggtatcgacaccaagaacatgttcggtttctggaactgggtgggtggtcgttactccgtagattccgcaattggcttgtcactgatgtctgttatcggaccgatggacttcatgcgattccttgatggcttccgtgccatggatgagcacttccgaaccgccgattttgagtccaacatccctgtactcatggggatgctcaacgtgttctacaacgatttcttcggtgcagaaacgcacgcggttctcccctattctcaagatttgggtcgcttccctgcttatctgcaacagctgaccatggagtccaacggcaagtctgttcgccacgacggtagcgctgtgaccaccaacaccggtgagatctactggggcgagccaggcactaatggtcagcacgcgttcttccagctgattcaccaaggcaccaagctgattccggccgacttcattggttttgcgcgcccgaaggaagacctgcctactgccagcggcgaaggctccatgcatgatctgctcatgagcaacttcttcgcacaaaccaaggttttggcttttggtaagactgccgaagaaatcgctgcagaaggcgtttctccagaacttgtagctcacaaggtcatgcctggtaaccgtcctaccaccaccatcatggctgaggaacttacacctttcgctctcggcgcactgatcgcgctctacgagcacatcgtgtttgtcgaaggcgtgatctgggacatcaactccttcgatcagtggggtgttgagcttggcaagcagcaggctaatgatctagccccagctgttgccggcgaggttgctgttgactccggcgatagctccaccgatgcgttgatctcttggtaccgctcccaccgcggc

SEQ ID NO: 17498 - DNA, 1503 bp, Cornyebacterium diptheriae
gtgcggtgcatagtgggaactatgacgcatacaacacaaacactcgatgatcgcatccacgaactactgcaacgaatccccacggagctttttatcgcagggcaattccaacctgcccacaacggtgcaacactgagcgtgaccaatccctctgacggctcagaacttgccacagtggcgtcggcaagcgaaaaagaagcacgcgcagccctcgacgccgctgaaaaagcccaacccacatgggccgcgacacccgcacgtgaacgctcagaaatccttcgtcgggcctacgacctagtcatcgagcacaaagacgaccttgccatgattcagtccctagaactaggacgcgccctgccagactccgaagcagaggtaacctacgccgctgaatttttccggtggttcgcagaagaggcagtaaggattcgcggcgactaccgccacaatcccaccggaaatgcccgcattattacccaccagcagccggtaggcccctgccttgccatcaccccatggaactttccgcttgcaatgggcgcacgcaaactcgccccagccctagcagcaggctgcaccatgatccttaaaccagcatcaaaaaccccactgaccatgctgtacctagcacaactgttggcagaagcaggagttccccacggtgttgtctccgtgctgccgaccgcaaacgccagcgtggtatccgacctattgcacgatgcgcgcatccgaaaactcacctttaccggctcgaccgcagtaggacaaaaactcgccgcgatggccgccgaacacagcgccgccgtatcccttgaacttggagggaatgccccctacatcgttttggacgacgccgacatcgacaccgcagcgcaggcggtcgctgtagccaaaatgcgaggcgccggccaagtatgcatcgcagccaatcgcttcctagtacatagcagcatcgcggaggaatttacacagcgtgtagtaaacatcatgcgcgggttcacccaaggaccagccaccgcgccgggcgtagatttcggtgcgctttccggcgacgatcaagtcagcaccgtcaccacgcttgtcgacgatgccctcagccgtggcgctaccaagcttcttggtgatcttcccaaggggttgccagaacacggaagctactatccagcaaccgtgcttgtggatgtccccgaagacgccgacattcactgcgaagaaatctttggtccagttgtcgttatctctacttttgatgatgacgacgaagcagtcgcacgtgccaatgacacaaagtttggtcttgccgcctatgtgtttggcagcgatctacagcgagttctcaacgtagcagaacgtgtcgatgccggaatgattgctgtgaacaaaggcgcgctgtctgatcccgcagcaccattcggtggtgtcaaagaatcaggtcttggtagggaaggtggcttcgaaggaataggagagttcctcgaaaccaagcttatttcgttaccgctt

SEQ ID NO: 17499 - DNA, 2484 bp, Cornyebacterium diptheriae
atgaacaacaacgaacccttctctcagtctccctttggaaccaacgcagcagcggcgccgtcgacgagcatggcatcgcaagcgaatccgtttctccgccaagctcagcccgtatcgcagtacaccggtgccgacctcaccgaaggtctgaatccgcagcaaaaagcagcagtggagcattatggatccccgctgctgatcgttgcaggcgctggatctggtaagacatctgtgctgacacggcgaattgcctacttgatgcgtgttcgaggtgtacaaccgcagaacatcttggcaattacgtttaccaataaagcagcagcagagatgcgtgagcgtgtcagctctttggtggggcctgtagcccagcgcatgtgggtatcgacattccactccacgtgcgtgcgtattttgcgggaacaggcacagcttgttcctgggcttaacactaatttcacgatctatgactcggatgattccaagcgattgttgtccatgatctccaaggatttcagcttggatattaagaagttcacaccacggttgctggcaactggaatttctaatcttaaaaatgagctgatcgatgccgaccaagcatgcgctgatgcggaaagcacgaagaatccctatgagactacgatcgcaagcgttttcgctgaatatcaaaagagactacgagcgtcgaacgccgtcgattttgatgacctcatcggggagacagtacggattttccgtgagcacccgccggttacggaatactatcggcgtaggttccggcacgtgcttatcgacgagtatcaggacactaaccacgcgcagtatgcattaattcatgagcttgttggaagtggacctgatgctagcgagttgtgcgtcgttggtgactcggaccagtcaatttatgcgtttcgtggtgccacaattcgaaatattgaggaattcgaacgcgattaccctaatgctgagacgattctgcttgagcaaaattaccgttccacccaaacgattcttaatgctgccaattcggtgatcgctcaaaatgagaatcgtcgagaaaagaaattatggacagctctaggcagcggtgatcccattgtcggatatgtcgccgacaacgagcacgatgaagcccgttttattgccaatgaggtcgacgcgttggctgataaaggggtggcatattccgatattgctgtcatgtatcgtacgaacaactcttctcgtgctgtagaagacgtctttatgcgaaccggcataccgtacaaagtcgtaggcggtacccgcttttatgagcgtaaagagattcgcgacatcattgcttatcttcgtcttattgataaccccgatgatgcggtgtctttgcgtcgaatcattaatactccacgccgaggcattggcgataaagccgtagcatttctgtcactccacgcagataaccacaacgtaggcttccacaaagcattgctagatgccaccgaagataaagtttccatgcttggcgcacgtggccgaaatgctgtcactggattcgttgacatgatgaaggggattcgcgaagaggccgcaaacaaagtcaatgaagtgaccgggatgcctgatatcggagatatggtgtcctacattttggacgtcaccggatacaaagccgaattagaaaaaagcaatgatcctcaagatggtgcaaggctcgataacctcaacgaactggtatcagttgcccgagaattctcctcagaagctgccaaccaagtagcctatgagcgcatgggggcggagaaccaagccccagagatcccagagttaagcgaaggcgaagcagcgccaggtagccttatggccttcctagagcgcgtgtcgttggttgctgatgccgatcagattccagataacgaacaaggcgtcgtcacattaatgacactgcacaccgcaaagggccttgagttccccgtcgtgttcctcaccggctgggaagacggtcagttcccgcatctgcgtgctctaggagagcctaaggagctagcagaagagcgtcgactagcctatgtcggtattacgcgtgcacgccgaaccctctacttgtcccgcgcgatgcttcgatcctcgtggggaaatccagtgaccaaccctccgtcacggttcttatcagaaatacctgatgaactaatggattggcgtagagaagaaccagaacactcctatgacaacagctggggtatgggctacggttcatctaattcgcgttcttatggatcccagaactctcgttcttatggttctccgcgaactcccaagttacctaagcattccaacaagccggcaatagcactcaacgttggtgatcgtgtaaaccatgaaaagtatgggcttggcacagtaaccaaggtagacaagatggctcccgcagattctgtcaccattgactttgggtcgtcaggaacagtgcggctaatgctgatcgggtcagtgcctatggaaaagctc

SEQ ID NO: 17500 - DNA, 675 bp, Cornyebacterium diptheriae
atgaccacacacatcctcgccgccgactggtcccgactcggcgacaccttcaccgaagcaatcctggacaccctcatcatggtttccgtcactctcgtagtcggcggactcctcggcctcggcctcggcgtgctcctctacaccactcgcacaggcggaatcctgcgcaaccggttcgtctacaccgtcatcaacatcttggtgaacttcgtacgccccatcccattcatcatcatgatcaccgcattcgggccactcaccctccgcgtcgtaggcaccaccatcggacgcgaagcagcaatgttcatcatgtccattgccgctaccttcgccgtcgcccgcatcgtggaacaaaacctcgtcagcatcgacccaggtgtcatcgaagcagcccgcgctatgggtgccagcccctggaagatcatcacctctgtgatcatccccgaagccctcggccccctcgtcctcggctacaccttcatcttcatcgccatcgtcgacatgtctgcaatggccggctacatcggcggcggcggactcggagacttcgccatcgtctacggctaccgcgcctacgactggcaggtcacctacgttgccaccttcgtcatcatcctcatcgtccagattgcccaactcttcggtaactggctatccaagaagatcatgcgtcga

SEQ ID NO: 17501 - DNA, 870 bp, Cornyebacterium diptheriae
atgaacttcacgaaattccggacagcattgtcgattctttccgtaactgtcgttgcagcgaccggtttggttgcgtgctcgggcggttcttccgatgccaacaccatcaaaattggtactacggactctacaaagaaggcgtgggatgtatggaaagacaaggcgaaggaacagggcatcgacttggaggtcgtggacttttctgatttctccacgccgaaccaggcactgtcgcaaaaccgactcgatgtgaacttgttccagcatttgaaattccttgcggaatataacgtgaagtccaagtccgatttggtccccgtgggatcgacggagatcattccgttggcgttgttctggaagggtcacgattctcttgacggtattgaggggcaatcggtggcgatccctaacgatcccacgaaccaagctcgtgccatcaatgttctagtggctaacaaactgatcacgttaaagacccctgggatgagtactcctaccccagcggacgtcgatacggcgaagtcgaaggtgacgctcacgcctgttgaggcggcgtcggcgcctgcggcatatggtgagggcaagccagcaattattaacaacacgttcttggagcggtccggcattgatgccaagactgcggtcatccaagatgatcccgcatctacggaggccgagccttacattaacgtcatggtgaccaccaaggagaacaaagataatcctcggtgggctcagctcattgagttgtggcataccgatgaggtgcaaaaagctctcgcggaggattctaaaggtacctctgtggaagtaaagcgtagccccgaagagcttcaggccatcctggatcgcctcgaggctgaggtgaag

SEQ ID NO: 17502 - DNA, 870 bp, Cornyebacterium diptheriae
atgaaactccgccgcagcgtcgctttagtctccgcctctcttatcgcagcaaccggacttgttgcttgctccaactcctccgatagctccgatcagacaaccgttaagatcggcaccaccgacggttccaaaaagtcatggaaggtattcgaggacaaagccaaagaagccggcatcaagctcgacattaaaaacttctccgattactccacccctaacgacgccctcgcacaagaccagctcgacgttaacctcttccagcacctcaaattcctcgccgagtacaacgtcggaaagaatgctgacctcaccccagtaggcgctaccgagatcgttccactcgcactgttctggaaagaccacacctctctcgacggcatcgagggcaaatccgtagccatccctaacgacccctccaaccaaggccgcgctatcaacgtcctcgtccaagccaagctcatcaccctgaaaaaagaaggcctgatcaccccagcacctagcgacgtcgacgaggcaaaatctaaggtcaagctcacccctgttgatgcagctcagaccaccaccgcctacggcgaaggcactccagccatcatcaacaactccttcctcgaccgtgccggcatcgaccctaaactctccgtattccaggatgaccccaactccgccgaagcagagccatacatcaacgccttcgtaaccaaagccgaagacaaagacgacgccaacatcgcaaaactcgttgaaatctggcactccaaggaagttcaagacgctgtagccgaagactccaagggaacctccgtcccagtccagcgcaccgccgaagagctcaaaaagatccttgatcgcctcgaagcagaccaaaagaag

SEQ ID NO: 17503 - DNA, 831 bp, Cornyebacterium diptheriae
atgacgaatcgagagctgatattacggcctgcggtcctgtttgccccagcgaataggcctgagattattcccaaagctgccgcccgtgcagatatggtcatcctagatttagaggatggggcgggctctattgatcgcaaccaagcgtacgccaatattcgcaacgcgggtttggatccgacaacaacatttgttcggattgtaggaccagaagatcctcaccatgctgcggatctcgcgtttgttaagaccacagagtattacaacgtgatcgtgccgaagatcggcgctgctctccccgaaggccttgatggcctcaatgttgtaccgattattgaaaccccattggctgttatcaatatagcctcgattgctgcggatccccacgtggtcgggttgtactggggtgctgatgatcttacgatcgcgctcggcgggttgtattcgcgtcggcgtatcgacgagccccagccttcctcctacagggcacccatcgagtatgcacgcgtgcagacgctgctgcacgctgctgcgaatggtaaatgggcattggatgcggtctatcaggatttcaaagacctagatggcctctatacagaggctttggactctgcacgcatgggatttgctgcgtatccatgcattcatccgaaccaagttgatgcggtccggcgggctttcgcacctagcgcagagcagttggagtgggcgcagcgtatcgctgaggaaacgaaaaaacaccccggagcttttcagctcgacggggagatggtagatacgccgctcattgcgttggcacatcggttgctgcagcgtcacgctgcagtggat

SEQ ID NO: 17504 - DNA, 246 bp, Cornyebacterium diptheriae
atgaagcgcaataacataaagaaggcgcggatggagcagtcccgccgccccaagaagaaccctcttaaggccgcaggcatcgagaaggttgactacaaggacatcaacacccttcgtcagtttatctccgatcgccacaagattcgttctcgccgcgtaaccggcctgacgccgcagcagcagcgccaggttgcaaccgcagtgaagaacgcccgtgagatggctctcctgccgttcaccagccgc

SEQ ID NO: 17505 - DNA, 303 bp, Cornyebacterium diptheriae
atggctaagaagtccaagatcgccaagaatgagcagcgcaaggaagtcgtcgcccgctttgcggagcgccgtaacgagctcaaggcaatcatcaagaacccgaacacctctgatgaggatcgtctcgatgcacagttcgaattgaaccgccagcctcgtgacgcttccccagttcgcgtccgtaaccgtgactcccgcgatggtcgcccacgtggcttcctgcgtaagttcggtgtttcccgtgtccgcatgcgcgagatggctcaccgcggtgagcttccgggcgtccgtaagtccagctgg

SEQ ID NO: 17506 - DNA, 264 bp, Cornyebacterium diptheriae
atgaagaaagatatccaccctgattaccacccagtggtattccaggatgcaggcactggccaccagttcctgaccaagtcaaccgctaccagtgaccgcacggttgcatgggaagatggcaacgagtacccattgatcgtcgttgacgtgaccagtgagtctcacccattctggaccggtgcacagcgtgtcatggacaccgcaggccgtgttgagaagttcaaccagcgttacggtgcactcgctcgccgtaagaagaacaag

SEQ ID NO: 17507 - DNA, 1284 bp, Cornyebacterium diptheriae
atgacaaatccacagaaccatgatgacgcccgcacttcacccaccgccgatcagaccgcagcgtttgatcgggtggagaatccttacggaaatgctcacaacgtgcaagaagaacgactaactgagcaatcgcagccgttgggggctcaggaaccccccgtaccgctggagccggagacgtcgaaacgcgaaaagcgacgcgtcagcatcggcaccgctgttgctatgacactggttgctgccattgcttctggcacgttgactggggtttattccacaaaccgtgcgggtaattccggctccactacacgcacgcaggtagcggaatccttgcgtcagccagtatctcaagatcatccagctcccgttgagggatcggttgaagacgtcgcagcaaaggtattgccttctgtcgtatcgattttggtggccactcgaaacggctccgctgaaggatctggctccattatttccgaagatggctacgtgatgaccaacaaccacgtggtggcaggggctgaacaaggggcagcgcgaatatctgtgaccttgaacgatggctctgagcatcctgctgaattgatagctggcgacccaaacacagacgtcgcagtaatcaagatcaaagacgtcagcggcttgcctgttatgaagttcggtgattccaacaacctcacggttgggcaacaagtggttgccgtgggttcgccgctggggctttcggctacggtcacatctggcatcgtgtcagcgctgaaccgtccggtgcgtgcaggcggctccgaaacaggacaatcgtcgcttatcgacgccgtccaaaccgacgcagcaatcaacccaggcaactccggtggcccgttggttgatgccaccggagccctcatcggcatgaactccgtgattgcctcgctcagcgcaggcggcaagtcggaatccggatccataggcctaggctttgccatcccttccaactttgctcgtcgcgtagccagccagctcattgagaagggttatgccacccaacccatgattggtattcagctcatttcgaacgcgaacgccaaaggtgctgtaatcgccgatgttcagcctgatggtccaggcgctcacgccggattacgagcaggagaagtgatcaccaaaattaatgaccgctatgttgatagcgccgatgctttgatcgctgcggtacgaagcagcgattttggtcaaacagttaagctcaccgtccgtggggaaaacgaccaaaacgagcgacaggtcgacgtaaccctcacaggcgaa

SEQ ID NO: 17508 - DNA, 1098 bp, Cornyebacterium diptheriae
atgcgagttctagcagcaatgagcggtggcgttgattccgcggtggcggccgcccgtgcagtcgcagccggacacgatgtggtgggtgtacaccttgccttatctcaagatccgcaaacggtgagggaatcttcacgaggatgttgctcgttggaggactctgctgatgcgcgccgagtatgcgacaagcttggtatcccattttatgtctgggatttttctgatcgtttcaaagaagatgtgattgatgatttcatctcttcgtatgaggcgggagaaactccgaatccctgcttgcggtgcaatgagaagatcaaatttgctgccctcctagagcgaggcattgccttgggttttgatgcggtggtgaccggtcattatgcacgtttgactcagccggttgatggcggcgatggctatctgaggcgttcgattgatccggacaaagaccagtcctatgtgctgggagtcctcggagctcatgagattgcgcattgcatgttccctgtaggcgacaccgtgaagccaaagatcagggaagaagctgctgccatgggattttcggtggctaagaagccggattcttatgacatctgctttattccagatggcaacacccaggcatttttgggacgccatattgggctacgtcctggaatgattgtggattctgatggcaatgagctaaaagaacacgatggggcctggaattacaccatcggtcaacgtaaagggcttgacattaagcagcctgcggctgatggtaagcctcgttacgttacgaacattgacgctgcaacgggaacggttaccgttggatcgcgtgagaacctgaaggtgattgcgttgactgctgaccggctgaaatacttgcacccagctatgacaggtagctttgaggctgaagtccaagttcgtgcccatggcagtgtggttgcttgtagcgtgatggtcaacgagagtgacgacaccatgcgagtggaattgcataccccgttgtctggtgttgctcgaggccaagccgccgtgatctatcttcctgatgacgatggcgatattgtcctaggatctggcacgatttgtgccactgaacaccag

SEQ ID NO: 17509 - DNA, 2031 bp, Cornyebacterium diptheriae
gtgactgataattttgctgatctacgccgccagtgggacgaccttgccgaacaagttcgtcaccatagagatgcctattacaaccacacccctgaaatctcagacgcggagtttgatcagcttttccgccagctgcagcaattagaacaggaacatccagaattagctgtgccagagagccccactttgagagtcggtgctccagttgaacagagttctttcgacaatgttgagcaccttgagcgcatgctcagtctggacaatgtttttgacgctgccgagcttgatgattggttgcagcgaacccccagtgctacgtatcttactgagcttaaaatcgatggtctgtctatcgatttggtctatcgttctgggcggcttgagcgtgcggctactcgtggcgatggtcgggtaggagaagatgttactgctaacgctaaagttattgaggacatcccgcatcgtcttcagcattctgatgcatacccagtgccagaacttgtagaaatccgtggcgaggtattcattgccgtagaagatttcgctttagtcaatgaacaacgccaaaaagaaggcggaaagccgttcgcaaacccacgtaacgccgctgctggatcgctgcgacaaaaagatactgaggccgttcgcaagcgtcgtctgaagatgatttgtcatggaatcggtgcttcagaaggatttgaagcagatacccagttcgatgcatataaagccctagaagcatggggtctgccagtatcgccgtatacaaaacgtgtccactcggctcaagaagttcaggagcgcgtgacctactgggcacagcatcgccacgatgcgactcatgagatggacgggttagttatcaagatcgattcctttgcagaacagcgcgcgttaggatctactgcccgcgcgcctcgctgggcaatcgcctacaagtatcctccagaagaagtgaccaccaagcttcttgatattcaggtcggcgttgggcgtaccggcagggtgacaccctttgccgttatggaccctgtgttcgttgctggatccaccgtagagatggctacgttgcataaccagaccgaagtaaaacgaaaaggcgttcttatcggcgataccgtggttatccgcaaagccggcgaagtgatcccagaggttctcggtcctgttgttgaaaaacgtgacggtagcgaacgcgaatttattttcccgacactatgcccagcatgtggaacacgcctagcgccacaaaaagaagacgacgccgactggcgatgcccgaactcccaatcatgtccagcgcagttgtcctcacgtcttacttatctagctggacgaggcgcatttgatatcgaagccctcggagaaaaaggagctgaggatcttattgcctccggcgtgcttatcgacgaagcccagctgtttaacctgacggaagacgatcttaaacgcaccaaggtgtacaccaccaaagccggtgcgcttaacgcaactggtgaaaagttgctggccaaccttgagtctgcaaagcatacggatctgtggcgtgttctcgttgcactgtcaatccgacacgttggaccaaccgcagccagagctcttgcggtacgttatcgaagcctcgaagcattacgggctgctgatgtggaggacattgctaatactgagggcgttggtgcgattatcgcacagagcttcgcgcagtggtttgacgtgccatggcacagaaatatcgtagaagtatgggctgatgctggtgtcacaatggcggattcggaggcagatatccctgaccaagttctagaaggattgaccattgtagtgaccggttctttggtcgatttttctagggattccgctaaagaggcaattgtttctcgtggtggtaaagcaagcggctcggtttccaagaagaccagttacgtggtagtgggtgagaacgcaggtagcaaggaaacgaaagcccgtgatctgggattgcgtatcctcaacgaagacgagtttaaacagttgttagcaaacggcaccgtc

SEQ ID NO: 17510 - DNA, 588 bp, Cornyebacterium diptheriae
gtggctatgtccgacgctttaacactcactgccgccaaaaaaaatgccagaaatcgcatacgagctgctcgattagcccgcagcacagctgatttacatgccgataacgctgccatcctcaatcagttgaccgccctcattcgcacaatcaatgccacacgcgccgccgcttatatgcccgaagtcacagagcctggcggggttgattttgccgacaatctcacaggaattctgtccgaactgtggatacccaagtcgctccccaaccgccaactagtatggggacactactccggcggcgattcagttgagcgtggcactttcggaatattagaacccaccaccccatcccgcagcagtgacatcctccatgacgtggatctcatcatcgttccggccctcggcataacccccagcgggcgacgactcggccaaggagccggctactacgaccgcgcactagccggagttgctaccccgactgtggcaatactcttcgactccgaagtcaacaccactatccccttcgagcctcacgacgccacctgcgattggatcatcacccccgagggaaccaaacaggtgact

SEQ ID NO: 17511 - DNA, 753 bp, Cornyebacterium diptheriae
ttgggggcaatgcgtttggctgtgattacggcgccgaaaaagcaggaagtgttggatcacttcaacaggttcccagagctggaagcaacgttggaaagtcgtggcaagaaggatcagctggcaaaggttgtgcgtgctgctgaactgattcagccggtttctgtggttcaagagactccgcttggtctggggcatgcagtggggttggcggaaagcgtgttggatgacgatgaagacgtcgtagctgtcatgcttccggatgacttggtgctgcccatgggcgttgtggaaaagatggtggaggtgcgtcgccagctgggaggctctgtgctgtgcgctttcgatgttcctcgtgaagatgtgtataactacggcgtctttgatattgaggagtgcgattacgacggcccttaccaagtcaagagtgtgaaaggcatggtggaaaagccagccgtagaagacgcaccttcgacgtttgttgcaacaggtcgttatcttttggatcgtgcgatttttgatgcgcttcgccgtatcacccctggtgcgggcggtgagctgcagcttactgatgctattgcgttgcttattaatgaggggcatccagtccacatcttggttcacgatggaaagcgccatgatttgggaaatcctggtggttatatcccagcggtggtggattttggtttgtcggatccgacgtatggcccacatttgaagaaggtcctgcgtaccattttggaagagcacggcgct

SEQ ID NO: 17512 - DNA, 297 bp, Cornyebacterium diptheriae
gtgcctgagatttcgcgcgatgaagtcgcccacttggccaagctgtctcgtttggcgttgactgatgaagaactggatcgatttgccgagcaaatcgacggaattatcggaaacgtgagcgcagtgcagcaggtagcagcagaaggcgtggagcctatgagccacccgcactctattaaaaccacgatgcgtgaggacgtcgttgaacagatcctcactccagaacaggcgcttgatcaagcaccagccgtcgaccagcagcgcttcgtcgtgccacagattttgggggagcaagat

SEQ ID NO: 17513 - DNA, 1482 bp, Cornyebacterium diptheriae
atgaataaatacctcgtaccagattccggacttacttccttgtccgctgccgaactggcagaaaaaatccacagccgcgaagtaacctctcgtgaagttacccaagcgcacttggatcgcattaatgacgttgatggaactctccatgcgtttctccacgtaggtgttgaggaagcactggctgcagccgatgccgtcgatgagtccttggataagggagaagccccagcatcagcacttgcaggtgtcccactagcgttgaaagacgtcttcgttactaccgacgcacccaccacctgtgcttccaagatgctcgaaggctatgttgctccttacgacgccaccgttaccaagaagatccgcgaggcgggaattcctatcttgggtaagaccaacatggacgaatttgccatgggctcttctacggaaaactccgcctatggtccaacattgaacccatgggatatcgagcgcactccaggcggctccggtggcggcacctcagctgcacttgcatctggcgaggcgccattgggtatcggcactgataccggtggatcgattcgccagccagcagccttgactaacactgtgggtgtcaaaccaacctatggcacggtttctcgctacggcctagtggcttgtgcatcttctctcgaccaaggtggccctactgcgcgtaccgttttggatacagcattgctgcacgaagtcattgctggtcacgataagtacgatgcaaccagtgttaatcgtgcggtagctcctgtggtagctgctgcacgcgaaggtgctcgcggtgatcttaaaggcaccaagatcggtgtggtcaagcaatttgatcgtgaaggttaccagccaggcgttttggagcagttccacaagtctgttgagcagcttactgctcagggagcagaaatcgttgaggttgattgccctcactttgatgacgcattggcagcgtattacttgattcttccatgtgaagtttcctccaacctcgcgcgttttgacggtatgcgttacggtttgcgtgagggcgatgacggaacgcactctgcggaagaagtcatgtccttgtctcgtgcggcaggtttcggcccagaggttaagcgtcgaatcatcttgggcacctatgccttgtctgttggctactacgatgcgtattacttgcaggcacagcgcgtacgtacccttattgcacaagacttcgcagtggcctatgacaagtgcgatgtgttggtctccccaacgactccgaccactgctttcaagctcggcgagaaggtatctgatccattggctatgtacaactttgacttgtgcaccttgccgctcaaccttgctggcttgtgcggtatgtccttgccatctggtttggcacctgattctcagcttccaactggtttgcagattatggctcctgccttccaagacgatcgtctttacaaggtaggcgcggcattcgaggttggtcagaag

SEQ ID NO: 17514 - DNA, 1413 bp, Cornyebacterium diptheriae
atgttgagcacagcaactaaatctgacactcagtatcccaccatgccgttgccggaaaaagaggcatggcctgcactaattgcattgtgtattgggttttttatgatccttttggatcaaaccatcgttgccgttgctactcctgcgctgcaagcggatcttcatgcctcctacaacgaggttatttgggtaacgtcggcctatttgctgacttttgctgtacctctgcttatcacagggcgactaggggatcgattcggtcctaagaatatttacatcattggcatggtgatctttacgcttagttctcttgcctgtggttttgcgccaaatatgatgacgttgattatcgcccgtgcggttcagggtatcggtgcatctatgctgacgccacagactatgagcgtgatcaaccgtgtgtttgctcgtgaacgtcgtggtgcggcgctaggaatctggggcagtgttgccggaattgctagccttgctggcccgatcttaggtgggtttattactgcttgggtcggttggcagtggatctttttcatcaacgtgcctatcggcgttgtgtctgtatttgctgttgcccgctttgttccgcgttttaagccaactgagcgcagtatcgacggtttgagcatggtgctttctgtcgtttctgtttttgcgttggtgtttgccttgcaacaaggtgaatctgctggctgggcatggtggatttgggttgtcatggttgttggtattgcggtgggcgtactgtttgcgtatcagcaaaatcgtgcagaagccaagggaaaagatgcgcttatgccactttcgcttttccgtgtacgaaacttttctctcggaaacattggtattgctgcgatgggctttactattgctggcactccgcttccgatcatgctgtaccttcagcaggttcattcgcttacaccgcttcaggccggcttgttcatgatgccccaagcattgatttcggcgtttttctctccactcatcggccgctggtctgatcattattcgactagcaaattggcaggttttggtttttctacgatggctatggggcttgttttgatcgcagcggtcatgattattgatgtcaatctgtggtggttggttccggcatttatcgtttatggattgggcaatgcttttgtgtggtcgccaaactctacgtcgaccatgcgtgatttgccgcttcatcacatgggtgtgggatctggcgtatataacacgacacgacagattggttgtgtgattggttctgctgcgatcggtgcagtactgcagtggcgcattatggcgggggatatgggtgctgcttatgggcagtcgattattctcggcgcggtgatgctagcggttggatttgtttctgcgatgttggcgcaagataagccccgccgt

SEQ ID NO: 17515 - DNA, 1062 bp, Cornyebacterium diptheriae
atgaaatctaaactttttcctctcctcgtccccatactcggtgcatccatcgttctggctggttgtagtaacgccgatacttctaagcaggctgagtccaaaggtggcgtgaccatcaccaactgtggcaaggaagttacctacaccaaggcagacaacttgtttgtcaacgatggcaacattatttccattgctcttgctgccggtgcagcagataacgtgaaatatgtcagctccgttcaacgcgataaggagctgttgcacgctaagtacggcaaagacattgataaagctgaagacgttgctaaagagtatccgtcattggaatctatcgttgccaagcaccctgatatctttgttgccggttggaactacggcttctctgaagaaaagaatctcacacccgatgcgctgaaagatcaaggtatcgattcctatattttgagtgaatcgtgccgccaagaaggctccgagaaacgcggcttgtacgatccttgggaagccgtcaagatggatatttcgaacatcggcaagatcaccagccatgcagataccgcagactcagtggtcaaagatatcgattctcgtctggaaaccttgaagaaggctccacaagccgataaagcaccaactgcatttgtgtttgattctggtaccgatactgtatttacctcgggtaagtttggcgctccgcaggcgattatcgaggcagctggtggccgcaacggtgctgaaaacgtagaagatacttggaccactgtgagctgggaaaacctcgctgcatcgaagcctgatgtctttgtttttgttgattacccaggccaagagtttgaagagaaaatagcggcattgcgcagtaatccagcgactaagaacttgccagctgtcaaggaaaaccgctttatcaatttgccatatgccatgtggacttccggcccactcaacattgatgctgcagagcagatgcgcaagggctttgaaaagttcggtctcgttccaagctctgaaatcaagccttccttggaacttcctgcgtctgtgccaggccaaaactactacaag

SEQ ID NO: 17516 - DNA, 873 bp, Cornyebacterium diptheriae
atgactgaccagcccattattgactaccgcttcctagagcccctgccgcgtggcattattttggcggcgactccgctaggaaatattggtgatgcctcgccacgcttggctcaagcattagctcaagcgcatgtggtcgcagctgaggacactcgacgcacgcgtgctctcgctcaggcgttgggcgtggaaattacaggtcaggtgctcagcaactttgatcacaatgagcaaggtcgtgcgcagcaacttgtcgagatggcacgaacacacaccgttgttgtagtgactgatgccggtatgcctatcgtgtcggatcctggattcccgttggtggaagcagcacataaggcaggtgttccagtgacatgtttccccggaccttctgcggtgccgaccgctttggcgttgtcggggcttcatgtaggaaaattcgcctttgatggattcgcgcctcgtaagcaggggcagcggcgtgcttggttggaatctttgcaacaagagcaacgtgcggtgtgcttttttgaatcgcctcatcggattgcggcaacgcttgccgacgccgccgaggtgctcggtgcgaagcgtcgtgcggccgtagcgcgtgagctcacaaaaacctttgaggaggttcgccgcggtgggctaggagagcttgccgagtgggcggcaaagggaataaagggggaggttagcgttgtgatcgagggagtacaacatgtgcagcatgaagatgtacactccttggttgcagtagtggaagagcgtgttttggcaggtgaaaggctaaaatctgcgtgtggtgaagttgctgcccactatggggtgagcaagaaacaactgtatgatgccgtcctcgaatcacgtgctgag

SEQ ID NO: 17517 - DNA, 1026 bp, Cornyebacterium diptheriae
atgcgaattgcgactcttacatccggcggcgattgccccggcctcaacgctgtgatccgcggcattgtccgcacatgttctgagtacggctcgaccgtcgttggataccaagacggctgggtggggctcatggaagacaagcgcattcaactatatgacgatgaaaacatcgatcgtatcctgttgcgcggcggaaccattttgggtaccggccgccttcaccctgacaagtttaagtctggtcttgaccagattaaggcaaaccttgaggatgcaggtattgatgcactgattcctatcggtggcgaaggtacactcaagggtgccaaatggctatctgataatggtattcctgtagttggcgtgcctaagacgatcgacaacgacgttaacggtacggactacacttttggctttgataccgcagtctctgttgctacggatgctatcgaccgactgcacaccacagctgagtctcacaaccgtgtgatgatcgttgaggttatgggtcgtcacgttggctggattgcgctgcacgccggcatggcaggcggtgcgcattacacagtcattcctgagcagccatttgatattgcagagatctgcaaggcaatggaacgccgcttccagatgggtgaaaagtacggcattatcgtcgtggcggaaggtgcattgcctaaggaaggcacgatggactttgtcgagggcggcgtcgaccaatttggccaccaaacgtttaatggcattggtcaagtaattggtgaggaaatcaagaagcgcctcggccatgacgttcgtaccacggttttgggtcatatccagcgtggtggcacacctacttcttatgaccgcgttttggctacccgttacggtgttcatgccgcacgtgcgtgccacaacggcgattacggcaagatggttgcgttgcacggtgaacatatcgatctgattccgctcgaggacgcggtagatacgctaaagactgtcccggaaggacgctaccgcacagcacgcgccctgtttggc

SEQ ID NO: 17518 - DNA, 1830 bp, Cornyebacterium diptheriae
atgaataaccgtgttctcgtttctgttgcttggccttatgccaacggcccgcgccatatcggccatgtggcgggctttggtgttccttctgatgtgttcgctcgctaccagcgaatgtcgggcgcagaggtgctcatggtttcaggcacggacgagcacggcaccccattgttggtacaggcagataaagaaggcgtatcagtcaaggagcttgctgaccgctacaaccggcagatcgttgaagacctcgctggtctagggttgtcctacgatctgttcacccgtaccaccactcgtaatcactacgctgtcgtgcaggacttgttcaagggcctgtatgaaaacggctacatgatcaaagagacaacgatgggtgcagtgtcgccatcaacaggtaggacgctgccggaccgctacattgaaggaacctgtcctatttgtggggcttcaggagctcgtggcgatcaatgcgataactgtggtaaccagcttgatccagcggatttgatcaatcctgtatcgaagatcaacggtgaaacaccaaagttcattgaaacggagcatttccttctcgatcttcctgctcttgcggatgcactggctgcgtggttgaaggatcgcaaagactggcgccccaacgttttgaagttttcgctgaatctgttggaggacctgcgtcctcgtgctatgagccgtgacatcgactggggtattccgattcctgtcgagggctggcaggacaacggagcaaagaaactctacgtgtggtttgacgcagtggtgggttacctatctgcttccattgagtgggcttatcgcactggcgatcctgaggcatggaagaagtggtggaacgatccggagtcctctggttactacttcatgggcaaggacaacatcacgttccactcccaaatttggcctgctgagctcttgggctaccaaggcaagggagctaaagctggttcggtccacagcttgggtgagctgaaccttcccacagaggttgtgtcttcggagttcctgacgatgtcgggctcgaaattctcctcatccaagggcattgtcatttacgtcaaggacttcctcaaggaattcggcgctgatccgctgcgttacttcatcgccgttgcgggaccggaaaacaacgacacggacttcacgtgggatgagtttgtccgccgcgtgaacaacgagcttgctaacggttggggcaacctagttaaccgtacggtttcgatggcgtataagaacttcggtgaggttccaacacctggtgagctgacggaatcagataagaagattctcgctcaggccgaggaagcctttggtgttgttggtgaggcgctggcacattctcgctttaagcagggcattacgcacgctatgcatattgttggcgaagcgaatgcttacattgcggagcaagagccatggaagcttgctaaggatgagtcgcagcgtgagcggttggctacagtgctgtggactgctttgcaggttgtgtctgactgcaacgtgcttcttaccccgtacttgcctcacattgcccagcaggtgcatgagacgctgggacgcgatggcgtgtgggctgctaaaccacagatcgttgaggttactgacgacatgcccgttgaacctattggcgtgggtattccagaggctggtcagacctaccctgtgattatgggtgactacgcagcacagcaggcacggtgggctcgtatcgacgttcaacctggtactgcactatcgaagccgaagccgctcattgccaagttggatccagagcttggagaaaccggccctgagtgggctccagttaatccg

SEQ ID NO: 17519 - DNA, 1503 bp, Cornyebacterium diptheriae
atgactgctgcgatgtatgacctgatggattacgacgaggtcctagagaagttcgatccggtaatgggtcttgaggttcacgttgagttagcaaccgaaaccaagatgttttcggcaccgtctgcacatttcggcgctgaaccaaactccaacgtagacccagtatcgttgggcttgcctggtgcattgcccgtcgttaatgctaaaggcgttgaatgggctatcaagatcggtctggctctcaactgcaagattgctgagtcttctcggttcgcccgaaagaattacttctacccagatcagccaaagaactaccagatttcgcagtacgatgagccgattgcttatgacggctaccttgacgtagtgcttgacgacggaaccccgtggcgtgtggagatcgagcgcgcccacatggaagaagacaccggtaagctcacccacttgggtggtgccgacggccgtatccacggtgcgacagcttcgctcgtcgactgcaaccgcgcaggtatcccgcttatcgagatcgtgaccaaacctatcgaaggtgctggcgagcgtgcgcctgaagttgctcgcgcatacgttggagctcttcgtgatttggttaaggccttgggggtttccgatgctcgcatggatcaaggctccatgcgttgcgacgcaaacgtttctctgcgtccagtaggaactgttgagttcggtacccgtaccgaaactaaaaacattaactctttgaagtcggtggagcaggctgttcgttatgagatgcagcgtcaggctcaggtcctagaagatggcggtgagatcgtccaggaaactcgtcactatcaggaaaccgatgggtcgacttctaagggacgtccaaaggaaacggcagaggattaccgctactttaatgatcctgatctgccaccagtgattgctcctaaagaatgggtagaggagatccgtgccacccttccggagcttccgtggattcgtcgtgctcgtattcaaaaagagtgggggcttaaagacgaagaaatgcgtgacttggtcaacgcaggtgctttggatctgatcgttgagacagtcgaagctggtgcatcggcatctgaggcacgctcgtggtgggttgcttacctttcacaaaaagcaaacgagtctggagttgaacttgattccttgtcaatcactccgcagcaggtagctcgcgttgctgcactggtgaaggaaggaaagctgaccaataagctggcgcggcaggctgtagacggagttcttgccggtgagggtgacgtcgatgaggtcgttgctgctcgtggcctcgaagtggttcgtgatgatggagctattgaaaaggcagtggatgaagccttggccgctaatcccgatattgttgagaaatacaaggctggaaacaccaaggtcaccggcgcaattgttggtgcagtgatgaaggctacgcgtggcaaggctgaccctgctcaggtaaataaactgattgcagagaaactcgca

SEQ ID NO: 17520 - DNA, 852 bp, Cornyebacterium diptheriae
atgtcaaaaaagaagcctcgtccgattcctgttccagccgataccattccagggcttatcgacgcccacacacacattgcctcgtgtggtgcaacggaacaggatgaagtagatgctttcgtgcaacgagctcttgctgccggtgttgagcgaatctgtaccgtaggcgacgggttggcggaggctgaatttgcgcttcaagcagcgcagatgaattctcgtgtgtttgcggcatgcgctatccatccaacacgcgctcgtgagcttgatcaagcagcccgtaaccggttgactgagatggcccatgatccgcgctgtgttgcaattggagaaaccggtattgatacctactggattactcacgaccccgacaacaccgctgatcttgaaactcaagaagaagctttgcgatggcacattgatctagccgttgccactggtaaagccttgatgattcacaatcgtgagggcgatgaccacctcatgcgtattcttgaggattcgcctcagccgccagaaactatcctgcactgtttttcctcaccgattgatgtggcgaagcaagcccttgatcgtggatatgtgttgagttttgctggcaacgtgactttcaaacgtaacgaggagctacgtgaggctgcgcggatagctcctatttcacagttgctgattgaaactgacgccccttacatgactcccgagccttttcgaggtgcacgcaatgagtcggcattgattgggcatacagcgttgtgcgttgccgcctcccgtggggaatcggtggctgactgcgttgcgggaatatctgcgacatttgatcgtgtgtatggtgtggacacctcgtttggggcg

SEQ ID NO: 17521 - DNA, 1095 bp, Cornyebacterium diptheriae
atgacttactcacggcaagcagcgcaggtatatactcctgcggttcaacggtacgaggatatggaataccggcagtgtggtcactcgggccttcgactgccagcaattagcctaggtttctggcataactttggtgacgataagccgctagctaatcagcgcgccattgttcgtcgcgcgttcgaccgaggcattacacattttgatctggcaaataactacgggcctccagaaggttcggcagagatcaattttggaagaatcttccgagaagatttggcccgccaccgggatgaaatcgtcatttctaccaaggcggggtggaacatgggagcaggtccatacagttttggtggtagccgcaagtacttgatggattcactggattcttcacttgatcgcctagggcttgatcacgtggatattttctatcatcatcgtccagatccagatacgcctttggaagaaactgcatatgctttgcgagacatcgtggcatccggcaaggctcgctatgtgggaatttcctcctatggacctgaactaaccgcagagatctcggaaattctagctggtgagggctgcccgctgctgattcatcaaccgagctattctatcttgaaccgctgggtagaagaaccaggtgaagatggcgagaacctgttagagtctgcggcgaataacggactgggtgttattgcattttcgccacttgcacaggggcttttaactgacaggtatctcgagggcgtgccagtggattcacgggcagcagcagggaagtccttgggcaaagagatgctcaacgctaaaaatcttgacatggtgcgtgcactgaatgatttagcgttacgacgtggccaaacgttggcacagctggctattgcgtgggtgctgcgggaacaaggcgattatggggccacaacggtaaccagtgcgttgatcggagcatcgtcggtagcgcagttggatcaaaatctgggagctcttaataatcttgagttcagcgttgaggaacgcaattatattgacactgttgccaaggacgctggaattaatatttgggcgggtgctactgcctcgaaggttcacgat

SEQ ID NO: 17522 - DNA, 885 bp, Cornyebacterium diptheriae
atggaagatcaggcatctgcgcagttattgggaccggtggaaattcgtcagttggcggaaaagctcgacgttactcccaccaaaaaactgggacaaaactttgtccacgatccaaacacggtcagaatgatcgtttctgcagccgaccttaactccgatgatcatgtcatcgaagtggggccaggacttggatctttaactcttgccttgctcgatacggctcaaaaagtcaccgcggtcgaaattgatccccgccttgcacagcagctaccactgactgtcgcagaacgcgccggccagtttgctgaccgactcaatctgatccacaaagacgcccttactgttgcgccggatgacatcgatcacccgacagccctagtggcaaacctgccctataacgtgtcggtgccggtgctgcttcacctattgcagattttccctaccattcgccgcgtgctggtgatggtgcaagcggaagtggcagatcgtcttgccgcagaccccggcaacaaggtttatggcgttccgagcgtaaaagcctccttctacggaaacgtccgtcgcgctggttccatcggaaagaacgtcttttggccagcacccaagatcgaatccggcctagttcgcatcgatgtctttgatcctgaacaccaaccgtggccagtgaccgatgacatgcgtaaagctgtgttcccgctgatcgactcagcctttgcacaacgacgcaagactcttcgtgcagcactcagcgggcactttggctcagggccggctgcagaggaagcgctgcgcaccgcgggaatcgaccccatcctccgtggggaaaaactcgatattgctgacttcgttcgtcttgcccgcgtcaccgccgcccaggagcaggca

SEQ ID NO: 17523 - DNA, 879 bp, Cornyebacterium diptheriae
atgaatccgcttcatttagaaaccttgctcgcaataatcgacgaaggcagcttcgaagatgcggcttttgcattaggaatttctccttcagcagtaagtcagaggattaaggcgttggagcgggagactggtcgagtagtggtacgccgtacgtcaccagtcactgcaactgatgccggcgaggtactggtgcaatcggcacgacgtatggcacttctgcaggccgaaacaaacgctcagttgcggggaagaattgagcggattccattgtctgtagctgtcaacgcagattctttggccacatggtttcgccgggtgatggcaagtgtggcggagatggataacgccacattgcatatgcgtatcgaggacgagtcgcattcgttgtcgttgttgcgtcgcggagatgtccttggcgctgtaacgggggaaaagacacctgtatctggttgcgactcgatagcgttaggtgcattccgatattttgcagtggcaagtccgaagctgttggatcgctacaccatagacggtgctgttgattgggagcggatgccagtattgcgatttggccctcgggatgggcttcaagaccgtgatattaagcgtcgtcttggtgaagttccggcagggcgacgtgttaatgagatcccttcatcggaggcattcatggaagcggcccgtgtgggattgggctgggcaatgctccccgatattcaagcgttaccgcttttggattctggtgaggtagtgatgctagatagcgaggtgcacgaagttccgctgtattggcagcgatggcggttggaatctccagccctagagcggttgactcaagcggtagtggatgcagccctcgagggactacatccactgtctgcc

SEQ ID NO: 17524 - DNA, 1080 bp, Cornyebacterium diptheriae
atgtcaacaaccactatagttgttgatatgtccacacaatatgagaagtacacatccacagaaaatggcggcgaattcatccgcgatacccaatacatcgacgaccgaatcgtcgatagtgtctctgcccctactccactagaagacggacacaccctctggcctgcagaacctcgacgttatcgcctagtagctgcacgagcctgcccatgggcacaccgtaccgttatcactcgacgactcaaaggtcttgaagatgtcatctcgctaggcctcgtcggaccaacccatgattggcgctcatggaccttcgaccttgacccaaacgaagtcgatccagttttaggaattcctaggcttcgcgacgcctacctaaaacgttttccggactatccgcacggaattactgttccagccattgtggaagtagctactggaaaaattgttactaacgactacccgagcatcgtctgtgatctcaatgatcaatggagcaaatacgaacgccccggcgcacctgatctttatccagagaccctacgtgaagaaattgatgccataaccaagcggatattcaccgaagtaaacaatggtgtataccgatgcggtttcgccggctcccaagaagcctatgacaaggcctacgatcgactgtttaccgctgttgactggctagaagaacgtttatcccaccaacgttatctagtcggtaaacacatcacgatcgcagatatttatctctacaccaccttggtgcggttcgacgccgtctatcatggccacttcaagtgcaaccgaaacaagatcactgaaatgcccaacctctggggttacctacgtgatctgttccagacacccggttttggagacaccaccgatttcacagaaatcaaacagcactactacatcacgcatcaagacgtaaacccaacccagatcgtacccaagggaccaagtttagaaagcttctttagccctcatggtcgtgaaaaactaggcgatagccccttcacggaaggtgtgaccccacctggagaaatttcctacgaagagcgtcttaagaataagatcgacggccaa

SEQ ID NO: 17525 - DNA, 2205 bp, Cornyebacterium diptheriae
atgactactatcccaaattttgcagagtatccagcatctcctgaggaccagaacgttgcggactcaagtgcgcttgagcaacaagtttggactacgccagaaggcattgatgtcaagcgtgtatataagcgcaatgaccgaaatgacagtgtgcctgcgcagcagctggactcgtacccaggtatggcgccgtttatgcgtggaccatatccaaccatgtacaccaatcagccatggacaattcgtcagtacgcaggattttccactgctgctgaatcaaatgctttctatcgtcgtaacctcgcagcaggccagaaaggtctgtcagttgctttcgatttggctactcaccgtggttatgactcagacaatgagcgcgtagtcggcgacgttggtatggctggcgtcgcaatcgattcaattttggatatgcgccaactttttgaaggcatagaccttggaaaagtatctgtctccatgacgatgaatggcgctgtgcttccagtgcttgctctctacatcgtcgttgcggaagaacaaggtgtcgcacctgagcagctagccggaacaattcagaatgacattctgaaagagttcatggttcgtaacacctatatctacccaccaaagccttcaatgcgcatcatttcgaatattttcgaatacacatcattgaagatgcctcggtttaactccatttcaatttcgggctaccacattcaggaagccggtgcgactgctgacctcgagctagcttatacacttgctgatggtattgagtacatccgcgctggtaaaggcgttggcctagatgttgataagtttgctcctcgactttccttcttctggggtatttccatgaatacgttcatggaaattgcaaaacttcgcgctggccgtctactttggagcgaactggtcgctaaattcgatccaaagaaccctaaatctcagtcgttgcgtacccactcacagacttctggttggtcgctgaccgcccaagatgtctacaacaatgtggcacgtaccgctatcgaggcaatgggtgcaacccagggccatacgcagtctttgcacaccaatgctcttgacgaagctttggcactgccaacggatttctctgcacgtatcgcgcgtaacacgcagctgctgcttcaacaagaatctgggaccacggcaccagttgatccatgggccggttcgtattacatcgagtggctcactgagcagctagctgagcgagctcgtgcccacatcgaagaagttgagaacgctggcggaatggctcaggccacgatcgaaggtattccaaaactccgcatcgaagaatccgctgcacgtactcaggcgcgtattgattccggccgtcaagctttgattggtgtgaacaaatatgtcgtcgaagaggacgagcagatcgaagttctcaaggtcgacaacaccaaggtacgtgcggagcaactagcaaagcttgagcagttgcgcgctgagcgcgatcaagctgaggtcgatcgatgcctgaaagcactcaccgaagccgctcgcatcgaagaaaaggaaccaggcaacctagatcagaacttgcttaaactagcagtcgattgcgctcgcgctaaggcaactgtgggtgagatttctgacgcactcgaagaggtattcggccgtcacgaggctgaaattcgtacgctctccggcgtgtacaaggacgaagttggaaaggagggcactgtgggtaatgtttctaaggcaatcgctatggctgatgcttttgaaactgaggaaggccgccgtcctcgtatcttcttggccaagatggggcaggatggtcacgatcgcggacaaaaagttgttgcatctgcatatgctgacctcggcatggatgtcgatgtcggaccactgttccagaccccagcagaggcagcgcgtgccgcggttgatgcggacgttcacgttgtcggcgtttcttccctagctgcaggtcacctgaccttggttccagctctcaaggaagagcttgccaagttgggccgtgaagacatcatggtcgtcgttggtggcgttatcccgccaggagatttccaagaactttacgacgatggtgcagtcgctatttatcctccaggaaccgttatcgcagatgctgcgatcgatatgctggaaaagttggcggctaaccttggtatcgacctcaaggtcgacgaagcg

SEQ ID NO: 17526 - DNA, 1839 bp, Cornyebacterium diptheriae
atgtttccacttcgttcacgagtaaccactgttggccgcaacgccgctggagcccgcgccctttggcgagctactggtaccaaagacaatgagtttggcaagcccattgtggctattgtgaactcctatacccaattcgttcctggtcacgtgcaccttaaaaacgtaggagacattgtcgccgaagcagttcgcgccgcaggaggcgttcccaaagaattcaacaccattgcagttgacgatggcatcgctatgggacacggcggaatgctctattcacttccttctcgcgaaatcatcgcagactccgttgaatacatggtgaatgcacacacagcggacgccatggtctgcatctcaaactgtgacaaaatcacgccgggcatgctcaatgctgctttgcgattaaacattccagctgttttcgtctctggtggaccgatggaagccggcaaagcagtcgtagcagatggcatagcccacgcccccacggatctgatcaccgcaatcaccgcatcagccaaagacagcgtgaatgatgatcaattgttatccattgagcaatctgcatgtcccacctgcggttcttgctcaggaatgtttaccgctaattcaatgaactgcttgactgaagctctagggctctcattgccaggaaatggcacaaccctagcaacgcacaccgcacgtcgagagctttttgagacagccggaaagctagtcgtagacctatgccagcgctactacggagaagaagacgaatccgttctaccgcgaaacattgcaacaaaaaaggcctttatcaacgcaatggctcttgatatggcgatgggcggatccacaaacacagtgttgcacaccctagcggccgcccaagaaggagagattgactttgatctctccgacatcgatgcactttctcaccgaatcccatgcctttctaaagtcgcacccaacggcaattaccacatcgaagatgtccatcgcgcaggaggaatacctgcaattttgggagaattacgccgacgcgatctcctagaaaaaggtgtgcacaccgtactgtacaaggaaatggattcatggcttgatgactgggatatccgtggtggaaaggcaacagacaaggccatcgagctcttccacgcagcgccaggcggcgtccgcacgaccgagccattttctcaatcaaatcgatgggattcactcgacacggatcaggcccgtgggtgtattcacgacgttgaccacgcatactcggccgatggtggcctagttattctgcgcggcaatcttgcccctgacggagccgttgtaaaagccgccggcgttgacgaatcgatctggactttttccggcccagcacgcgtcgtggaaagccaagaagaggccgtgtcgatcatcctagacaagcaggttcaaccgggtgatgttgtcgtgattcgatatgagggaccagctggtggccctggtatgcaagagatgctccaccccacttcctttttaaagggtgcaggtttaggaaaagcttgtgccctgatcaccgatggccgattctctggtggtacttctgggctttccattggccatatctctccagaagctgcacatggcggcctgattggactggtggaaaacggcgacacaatcaccatcgatattaggaaccgcagcctcaatctagatgtcgacgatgccgtgatcgaacagcgtcgtgcagctatgttggaacgtgaaaaaccatggaccccaaccaaccgcaatcgacctgtatccaaggcattgcgcgcgtacgcatccatggcaacatccgcagacaaaggcgccgtacgtcagttagac

SEQ ID NO: 17527 - DNA, 798 bp, Cornyebacterium diptheriae
atgactccacgcatcattgtcacagatatggacggcaccttactcaatagcgagcacgaaataccggcgcgcttttggccgcttctcgacgagatgcacgagcaaggaatcgtgttcgctccggcaagcggccgccagctctacactctgttggatcaatttgcgcaggccggaaaagatttaagtgtgatcgcagaaaatggcaccgtggtctatcacgagggcgagatcatttccgtgaccaccatcgaccccgaggtagcgcaccgcgtcattcgtaccatggcgcacagcgatctcgactggggcgtcgttgtctgccgtgtcgacggtgcgttcattgcgcgtggcgacgtcgagttcctcaccgaaaccgtgcgctactacgcaaaacttgatgtggttgacgacctccacagcgttgtcaacgatcaggtcatcaaactcgccatctattccttccccgatgctgagacagtagcagcccctgctctcgccgaaagcgtgggcgaccataccctcgctatctccggggcgcattggatcgacatcatgagtccccacgcgaacaaaggcgtcgcactccagcaactagcagacaacctcggagttcccattgagcacaccgccgccttcggcgactacctcaacgactacgaactgctccacactgccggaaccgcctatgccatgtccaacgcacaccctgatattaaagacattgctgatcacgtcgtcggttccaacgatgaagaatcagtgctcacaacaatccacagcctcctgaccgcagcaaag

SEQ ID NO: 17528 - DNA, 1956 bp, Cornyebacterium diptheriae
atgttgcaacatgtcagtccccgcaattaccacaaggagcttgatgtcgtggcatcctccactcagcccaatcagcccacaccagcgacgttagcccgacgtgcgcaggtattaaagccggagcgaatgaccggtgcagacgcaatcgtgcgatcgttggaagaactcggaatcgacatggtctttggccttccaggcggcgctgttttgcctctttatgactcgttgtatgcatcgaccaaattgcgtcacgttcttgtacgtcatgaacaaggcgcaggtcatgccgcaactggatatgcacaagctactggaaaagtgggtgtgtgtattgcaacgtcgggtccaggtgcaacgaaccttgtaacgcctatcgcggatgcgcacttggattcggtgccacttgtcgctatcaccggacaggttgggcgctccctcttggggtctgatgctttccaagaagccgatattcgtggtattacgatgccggttactaagcacaacttcatggttacggatgtcaacatgattccgcaggcgatcgcagaggcattttatctggcggcttccggtcggccaggaccggtgcttgtcgacattcccaaggatattcagcaggctgagatcgacttccattggcctccaactattgatttgccaggttatcgtccggtgactactccgcatagtcgacctgttgaacaagcagccaagatgatttcacaagctcgtaggcctgttctatatgtcggtggtggcgttattaaggcgaatgcttctcaagaacttcaagcatttgctgaacacactggaattccagttgttactactttgatggcattgggtgcgttccctggctcgcatgagctcaatatgggcatgcctggaatgcacggaaccgttccagctgtgggagctttgcaaaagagcgatcttctcatcactatcggcgcgcgtttcgacgatcgtgtcacgggtgcactggcatcatttgctcctggcgcaaaagttattcacgctgatattgatcctgcggaaatcggcaagatcagagcagttgatgttccaattgttggtgacgctcaagaagttttgaccgcgttgcttaatgtctacaaagacttggatctgccacagcctcggcatgagcgttggctgcgatacctcaatggtttgaagagcaattatccgcgtggttgggaaaagtctgacgacggcatgattgagccgcaggcggttattagggcgcttgctaagacggttggtactgatgcgatttatgctgcaggtgttggacagcatcaaatgtggtctgcacagttccttgactttgaaaagccacgtacgtggctcaactctggtggcttgggcacgatgggttattcggttcccgcagccctaggtgctaaggctggttgcccagacaaagaagtttgggcaatcgatggtgatggttgcttccaaatgactaatcaagagcttgcgacggcagctgtggagggcatgccgatcaaagtagctcttattaataacggcaatctaggcatggtgcgccagtggcaaacgctcttctatgacggtaactattcaaataccaagctccgcaatcaggggcagtatatgccggacttcgtgatgctggcggaatctttgggctgtgcagctttccgtgtgacggaggagactgacatcgttccgacgattgaaaaagcacgagcgattaacgaccgccccgtggtgatcgattttattgttggtgaagatgcacaagtgtggccaatggttgcagcaggacattccaattctgacattgaatatgctcatgggctccgtccgcttttcgacggagaaagctctgctgctgagactccagaggatatcgacgatgttattgatgaggcaacgcttctcgcacttgaggcgcaaaaacgtcacctagaacctaaagaaaatatc

SEQ ID NO: 17529 - DNA, 522 bp, Cornyebacterium diptheriae
atgcaacagcaagaaacgtttcggcacatcctcagtgttctggttcaggatgttgatggcattatctctcgtgtatctgcaatgtttacgcgacgtagttttagtcttgtttccttcgtgtctggcaagactgaaatgcatggaatcaacagaatcaccattgttgtggatgcaagtacacaagatattgagcagatcaccaagcagcttaataagttgattccagtgttgaaagtggtgcgccttgatgaggacgttactgtagcgcgtgcattaatgctggtgaaagtatcggccgatgcgtctaatcgtccccaagtagttgatgctgccaaaattttccgtgcgcatgttgtcgacgtcgccccagattcggtggttattgaggcaaccggcaataaaggtaagttgcgcgcattgcttgatgtcttggagccttttggaatcagggaattgatctcttctggtcagatcgcactgaaccgaggatcaaagacaatggcaccgcaaagttcacgttcc

SEQ ID NO: 17530 - DNA, 1011 bp, Cornyebacterium diptheriae
atggctatcgaacttctttatgatgcagatgcagacctgtcgatcatccaaggccgtaaagttgccgtgattggctacggctctcaaggtcatgctcacgcgcagtgcctgcgtgattccggtgttgaggttgttatcggtttgcgtgaaggctctaagtcttccgaaaaggcgcaggaggcaggttttgaggttaagtccaacgccgatgcggctgcgtgggcagatgttatcatgctgctcgctccagacacctctcaagcagagatctttagccatgatattgagccaaatcttaaagacggcgatgccttgctgttcggacatggtctgaacatccacttcgagctaatcaagcctgctgtcaatattactgttggcatggttgctcctaaggggccgggtcatttggttcgtcgtcaattcgttgacggcaagggtgtgccatgtctgattgccgtcgctcaggatccaaagggtgagggtaaggatcttgcattgtcgtatgctgctgctattggtggtgcacgcgcgggtgttattcctacaaccttccgtgaggaaaccgaaactgacttgtttggtgagcaggttgtactttgtggtggtcttgagcacctaatgatgaaaggctttgaggttttggctgaagccggctatgcgccagagatggcatactttgaggttcttcatgagatgaagctcattgttgacctcatctgggagggtggcattgagaacatgaactactcgatctcggagactgccgagttgggtggttatgttgctggtcctcgcattatcactcctgaggtcaaagagaatatgaaggctgtgttggctgatatccagtcgggcaagtttgtccgtgacatggttgctgatgttgaggctggtcagcctgagcttaagcgttaccgtgaagagatcgccgcgcatccaatcgaggctacgggatcgaaactgcgtgatctgatgagctgggtaaagaatccgctcgatgagactgcc

SEQ ID NO: 17531 - DNA, 1632 bp, Cornyebacterium diptheriae
atgagttctgttgcgcaagaagcccatcgccgtcgtacatttgctgttattgctcaccctgatgctggtaagtcaacgctgacggaggcgttggcgttgcatgcgcatgtgatcagcgaagctggcgcggtgcacggcaagggtaatcgtaaggcgactgtctctgactggatggagatggaaaaggatcgtggtatttcgatcgcttcgtctgcgctgcagtttgagtatgcccccgagggccattctggcgaaccgttcatgatcaacttggtggatacccccggccacgctgatttttctgaggatacgtaccgtgtgctgactgcagttgatgcggcagtcatgcttatcgacgcagccaaaggcctcgagccgcaaactctcaaacttttccgtgtatgtaaggcccgcggtttgccgatcattactgtgatcaacaagtgggaccgccctggccgtactccgctcgagcttgtcgacgaaatcgtcaccgaaatcgatctccaacctactcccctgttttggccggttggcgacgccggtgatttccgcggtcttgcacgcattaaccccgatggtgaagcagaagaatacattcgattcctgcgcaccgctggtggatccaccattgccccagaggagcactacacgccggaggaagcctcctcccgtgaggaaacggcatgggacactgctgctgaagaagtcgaactgctggcggcggatggagctgtgcataatcaagagctcttcttggagtgcaccacctcaccgctgatctttgcctctgccatgttgaacttcggtgtgcatcagattttggatactctctgcgagctcgcaccgcagccgcatggccgagaatcagatgagcgtgctgtagaggccgcaactggtgcttttgattcctcacgggaagttactgacgagttctctggcgttgtgtttaaagtacaagctggtatggacaaaaatcaccgcgactccttggcatttatgcgtgtggtttctggcgagttcgatcgtggcatgcaggtaacgcatgcacaatctgggcgtagtttttccacgaagtacgccctgactgtgttcggccgtacccgttcgactgtggaatcggcgtttcctggcgatatcgtgggtcttgttaacgcgggatcgttggctcctggcgacactatctttgctggtcgtaaggttcagtatcctccgatgccacagttcgctccagagcacttccgcacactgcgcgcaaagtcgctaggaaaatacaaacagttccgtaaggcattggatcagttggcagctgaaggcgttgttcagatcctgaaaaatgatgcgcgtggcgacgccgcccccgtcatggctgctgttggccccatgcagttcgaggtcatgatggctcgtatgcaaaacgagtacaacgtagaaaccgttgccgatcccatcccatactctgttgctcgtcgcaccaccccagaaacagctacagagctggcaaagcaacgcggcgtggagatcttcacgcgtaccgacggcgaactggttgcactgtttggcgacaagtggaaactcgccttcatcgaaaaagagcaccccgaattcgagctgctccccatggttgctgat

SEQ ID NO: 17532 - DNA, 615 bp, Cornyebacterium diptheriae
atggctgattacaccaccattgctgcacaaccccgtaacgaattcggcaagggcttcgctcgtcgtctccgcgttgcaggtcaggttcctggcgtcatctacggcgtagacgttgaggctccaatccacttctccatcaaccgtctcgagctgcacgctgttctccgcgcgcacggcgttaacgccatcatcgagctcgacatcgagggcgagaagcacctcaccatgatcaagcacgttgatcagaacgtcttgaccctcaacgctgaccacgttgacctcctcgccatcaaacgcggcgaaaaagttgaggtcgaggttcctgtagttctcaccggtgagaccgcaccaggcaccaccttggttcaggatgctgacgttgtcctcgttgaggcagacgttctctccatcccagaagagatcaccttctccgtcgagggcctcgacgtagattccaaggttctcgcaggcgacctcgcaatgccagccaacacctccttggttgcagacgctgaaaccgttattgcttccgtcaaccatgaagaagttgctgaagaagcagaagagactgaaggcgaagacgccgaagaagctccagctgcagaaggcgaagag

SEQ ID NO: 17533 - DNA, 978 bp, Cornyebacterium diptheriae
atgacttcgcacaactggaccgcgaaccagaagaatttgatggtattaactggtcgcgcccacccagagcttgccgacgccgtcgcaaaggaactgggcgtagaaatcacccccaccaccgcacgcgactttgccaacggtgaaatcttcgtccgcttcgaagagtccgtccgtggctgcgacgcattcgtcctccagtcacacacccagccactcaacaagtggctgatggagcagctcatcatgatcgacgccctcaagcgtggatccgccaagcgcatcaccgcaatcctgccgttctacccttacgcacgtcaggacaagaagcaccgcggccgcgagcccatctccgctcgcctcgtcgcagatttgctccgcaccgccggcgctgaccgcatcgtctccgtcgacctgcacactgaccagatccaaggcttcttcgacggtccagtcgaccacatgcacgcgatgccaatcctcacggactatatcaagggcaagtacgatctcgacaacgtcgttgtcgtctccccagacgccggccgcgttaaggtcgctgaaaagtgggccaacacactgggcgacgcccccatggccttcgtccacaagacccgctccgttgacgttgccaaccaagtcgtcgccaaccgtgttgtcggcgatgtagctggcaagaccgccatccttctcgacgacatgatcgacaccggcggaaccatcgccggcgcagtcggagtccttcgcgacgccggtgccgaagacgtcatcatcgcctgcacccacggcgtattctccggcccagcccgcgaacgcctctcccagtgcggcgccaaggaagtcatcaccaccgacactctgccacagtccaccgaaggctgggacaacctcaccgtcttgtccatcgcaccactgctggcaaagaccatccacgaaattttcgaaaacggctctgtgaccaccctcttcgagggccaagct

SEQ ID NO: 17534 - DNA, 849 bp, Cornyebacterium diptheriae
gtgattgcgtgcaaaattgcaccaccatcacaggcattcggtaggatcgcctctatgcgttttggacgaattgccacacccgatggaatgtgtttctgcgttgttgagggcgatgatgcccaagcaatctgcaaagaaattgaaggaaccccgtttaccgagcctaaatatacgggacgacagtggaagttggacgaggtgcgcttgctcgcacccatgctgccttccaagattgttgccattggccgtaactatgctgaccatgttaaagaggtctttcaaaagagcgctgaacatctgccaccaacgctgtttttaaagccaccaacggccgtcgtggggccaggtgctgctattcgaattcccgagtttgctaccaaggtggaattcgaaggtgagctggccatggttattgctaagccttgtaagaatgtaaagaaagaagactggaagtctgtagtcttaggcttcactatcatcaacgatgtgtcgtctcgcgacttgcagtttgctgatgggcagtgggcacgtgcaaagggcattgacactttcgcgccactaggtccgtggattgagacggatattgattcgattgaaaccgacaatcttcccatcaaagcacacctgacacatgatggcatcacggagactaagcaggactctaattccaatcagatgattatggatctcggtgagatcatcgagtttattactgcttcgtttacattgctgcctggcgacgtcatctgtactggttcccccgcaggtaccgcggcgatggttcctggtgacttcattgaaatcgaaatcccaggcattggccgactaggtaatccggtagctaaagcc

SEQ ID NO: 17535 - DNA, 447 bp, Cornyebacterium diptheriae
atgaatctggaatcaatgtatcaagaagtaattcttgatcattataagaatcctcttcatgctggtctgcgggaatcttatgatgcagaagtgcatcacgtaaatccttcctgcggcgatgaaattactcttcgtgttcacttgtcggaggacggattaactgtacaagacgtatcttatgatgcagaaggttgctctattagtcaggcatcgacatctgttatggcagaagagatcgttggtcagccagttgacaaagcgctagaaaaacttgccgaattcgaaaaaatgattacttcacgtggcaaagaagaaggcgatgaggacctgattggtgacggaattgcgtttgcaggtgtttcaaagtatccagctcgtgtcaaatgtgcattgctgggttggaaggcttttcaagcagcaacgtcagaagcattggaagggaaagta

SEQ ID NO: 17536 - DNA, 633 bp, Cornyebacterium diptheriae
atgggaccaaacggttctggtaaatctaccttggcatacaccttgtcgggtcatccgcgctatgaggttacggatggtgaagtactactcgatggcgaaaatatccttgatatggacatcgatgagcgtgcacgtgccgggcttttcttggctatgcagtacccaactgagattcctggtgtttccatggccaatttcttgcgttctgcagccactgctgtacgcggtgaagctcctaaactgcgtgaatgggttaaagaagtaaaacaagcccagcaggatcttaaaatcgataaagcctttaatgagcgttcggtcaacgaggggttctctggcggagaaaagaaacgccacgaagtcctgcaacttgatcttttgcagcctaaattcgctgtgatggatgaaacagactccggtcttgacgtggacgcattgcgcattgtttctgaaggaatcaaccgttaccaagaaaaatctaacggtggtattttgatgattactcactacaagcgcattttgaattatgttcagcccgattttgtccacgtgtttgccaatggccagatcattacctccggcggtcctgagctagctgatgacctagaagcaaacggctacgaccggttcttggca

SEQ ID NO: 17537 - DNA, 1491 bp, Cornyebacterium diptheriae
atgaacattatgtctgatgttcgtgtacgtttttgtccgtcgccgaccggcacgccacatgttggtatggttcgcaccgctttgtttaactgggctcacgctcgtcacactggtggcaagctcatttttcgtattgaagatacggatgcagcccgcgatagcgaagagtcttaccaagcgattattgattccctgaagtggcttggaatggactgggatgagggtgttattgttggtggccctcatgaaccttatcgtcaaagccagcgtatggacatctacaaggatgtcttggaaaaactgaaagaggctggctttgtctaccctgcgtactcgactgctcaggaagtggaggagcgtcacaaggctgcaggtcgcgaccctaagttgggctacgacaactatgaccgtactttgactgatgagcagatcgctgcatttgaggcggaaggtcgtcagccagtgtggcgtttacgtatgccggagcgggattggaagtggaacgatctggttcgtggtgagatcgagttcaagagctctacacagcctgactatgtggtggcgcgttccaacggtgcaccgttgtacaccttggtcaacccagttgatgacgcattgatgggcattacccacgtgctgcgtggcgaggatctcttgccttcgacacctcgtcagttggctctttacgaggctcttaaggtcatcggtgtagctcagcagacccctgagtttggccacctgccgttcgttatgggtgagggtaacaagaagctttccaagcgtgatccacagtccaacctgtttaatcaccgtgatgccggcatcatcccagaaggcatgctgaattacctggcattgctgggctggtcacttgctggtgaaaaagacatcttctcggtcgatgagcttgtagaaaacttcgatgtgaccaacgtgttggcaaacccagctcgtttcgaccagaagaagcttgaggcgataaacgctgatcacatccgtcttcttgagcctaaggatttcgagcagcgtttgcgtgcatatctcaccgagtacacggacttcccaacagattaccctgcagaaaagtttgcaatcgccgcagagttggtgcaaacgcgtatcaagatgcttggcgacgcatacggtttgctgagcttcctagcgattgccgatgaggatctcaccttggacgagaagtcggcaaagaagaacctcaaggagacagcaattcctgcgctagatgctggtattgctgcccttgaaggggtagaggagtggaccactcctgccattgaggctgctttgcataaggcgctgattgaggatcttgacctcaagcctcgtgttgcttttggtgctctgcgtgttggtatctcaggccaggctgtgtcgccacctctgttcgagtcgatggagctgttgggtaaggagtcaacgttgactcgtttgcgtgctacccgtgaggtcaccccgtaccaggttgctgctgaa

SEQ ID NO: 17538 - DNA, 1188 bp, Cornyebacterium diptheriae
atgtctccatcgcttgatttttatgctcaccaacgcaacgtggagtggcatgaacgaggacttgagcgcacacccgcgcagttttattcacctcaaactccacacgcaataatcgataatcgccctatgctgctattttccagctctgattatttaggccttagcgaacatcctttcctaaaaaacgccgcaatccaagcaatcagctctttaggtacaggatctgggggctcccgattgaccactggcagcagcattcaccgcagcatcgaaattcatctcgctcaatttttcggctcccccgacgcagtgtttttcgcttccggctatcaagcaaatgtcaccatcatctctacacttgcaggaccacattgcaccatttattcagattcactcaatcacgcttccatcattgacggttgtcgactcagcaagtctcaagtaaagacttttcccaccggagattatgaagctctcgatgccgcattagctcattgtgatactacgaattcgcttattattaccgacgcggtgttttccatgtctggcacaatcgcagatctcgaacagttacgccaagtagcagcccgacacggctcatggttacttatcgacgacgcccacggaatcggttgcttaggaaacgcagggcgtggcactgcgcatttgttcccccacgcaccgaccgatttctcgcaagaagtaatcgtcggtacgtcaagtaaagcccttggaggcgaaggcggcttcgctttatgctctgaacaggttgccaccttgttacgcaatcaagggcgcgggtatgtcttttcgaccgctccagcaccagcgacgatggcaactaccgatgctgcgctgacagttctagaacaagaaccagatcgtattcggaggctccaatccaatattgcgtacttcgcacagcgaagctcaaacgtagtcccatttcagaaaagcggctttttctcccctatcatttcgtacacaattggagacgaaaatgaagcactgaagtctgcacagctgcttcgcgataatggattttttatcccagcaatcaggtacccgacagtaagccgtggaagtgccatgttgagaataacgatgaccgcaatgcattctcaccacgatattgatcaactagctgatgcactcaatcaattagaaagtcaccgtttagataactcc

SEQ ID NO: 17539 - DNA, 795 bp, Cornyebacterium diptheriae
atgcccaaacttaatgagccttttcaaagcacggtatcccgcttcccagctggaattttcgagccacatcctgttcaagcatcaatactcaaaatgctcacgtcgcaaggacgcattgaagcgaagctctttcttcgacatggcgaacaaatattattaagctttgtcattcctgttattagcattgtcgcaatctcgttcttacatattgtggacgaaccaactcccttgcttgtgactctcccagtcatgctcacgatggcgtctctaagttcgggtttcacaggacaagcaatttcgctagcattcgatcgtcgttatggcgcactccagcgagttggtgccagcggggtcccttcatggacgatagtgttgggcaaagttattggagtcttaacagtcagtatcctccaagtcttagtgatctcttgcatagccttcgctttagggtggcgtgtaactcctagcgcttatttttgcggaatggcagtgttcttcctcggagtcgcaacttttactgccctcggtctgctgatgggcggaacgctatcatccgaactagttctgggattggcaaatctcatttggttcggcttaattggcatcgtgtcgtttgttgtatttagaaacggttctgagtcatccacttggatgtccattgtcccatcagttgcagtaggtaaaggtatgtccttggcattcgcaggcattgttccaatcaaggaatgcgtcatcttattattttggcttgttctaggtgccttgggcgctacccgatggttcaaatttaatagc

SEQ ID NO: 17540 - DNA, 2100 bp, Cornyebacterium diptheriae
gtgactttatctccggagcttcaggctcttacctcccgtcactaccctagcgactgggacgacctcgatactcaggcagttgacacagcacgtgtactcgctgccgatgcagtccagaattgcggttcgggccacccaggcactgcaatgagcttggcacctctggcttacactcttttccaacgtgtcatgaatgtcgatcctgcggatccgcattgggctggtcgcgatcgttttgtgttgtcatgtgggcacacttcacttacgcaatacatccagctttacttcggcggttacggcctcgaacttgaagaccttaaagccctgcgtacttggggcgcattaactcctggccacccagaataccgccatactaaaggcgttgaaatcacaactggcccattgggtcaaggcttggcatcggctgttggcatggcgatggcctcacgacgtgagcgcgcgttgttcgatcccactgcggcagatggtgcatctccattcgaccactatatttatgtgattgcttctgatggcgaccttcaggaaggtgtcactgcggaggcatgttcgcttgccggaactcaaaagcttggaaatctcatcgttttctgggatgataaccggatctcgatcgaagaagatactgagattgcattcaacgaaaaggttgtcgatcgttaccgtgcttataactggcaagtaatcgaaattgacggcggcgaaaacgttgaagcgattgaaaaggcagtcgcagaggctaaagccgatacttctcgtcctacttttatccgcgtacgtaccgttattggctatcctgcgccaacaaagatgaataccggtgctgtgcatggtgctgctcttggtgctgaagaagtcgccggaactaagaaagcactcggttttaatcctgaggaatccttcgcggtagctccggaggtcatttctcatacacggaaacttctagagcgaggtgctcaacgacatgctgagtggcgtgagcatttcgaatcttgggcggaaacaaaccccgaaaataaagccctctttgaccggatggcttcccgcgaacttccagatggtttcgatgctgatctaccttcgtgggagcctgatgccaaaggcgtcgcaacccgcaaggcttctgaagctacgttacaggcactcggtgcaacgcttccggagctgtggggcggttctgccgacctagcaggctcgaacaacactgttattaagggttctccatcgtttggtccatctacgatttctacgtccacatggactgctgagccaggtggacgtaatctccatttcggtatccgcgaacatgccatgggcgcaattatcaatggcatttctctccacggtggaacccgtccttatggtggaaccttcctgattttctcggattacatgcgccctgctgttcgtctggctgccttgatgggaaccgacgcatactatgtttggacacacgattccatcggattaggcgaagacggccctactcatcaacctgtcgagcagcttgcatcgctgcgtgctattcctggtgtttcgatgcttcgtcccgctgatgctaacgaaactgctgcggcttggcgtgcggcactcctgtataaggaaggtcctaaaggtctagcccttacacgtcaaaacgtccttgttctcgaaggaacaaaagaaaaagcgcgggatggtgtctcacgaggggcatatgttctcgttgaaggatctaagaaaactcctgacgttattttgatggcttcaggctccgaagtacagcttgcagtcgaagcggctaaaactttggaagcagaaaagattgcagctcgagtcgtgtctgtgccttgcttagattggttcgaggaacaagacgccgcttatcaagaagagatacttccgcaggcggttagcgctcgcgtatcggtggaagcgggtgtcgctttgtcttggtatcgccatctgggcacccatggtcgggccgtgtcccttgagcacttcggcgcatctgctccgtatgagaagctcttcagtgaatttggcataaccactgaagcagttattgctgcagctcgcgaatcacttgctgctgctcagcaa

SEQ ID NO: 17541 - DNA, 759 bp, Cornyebacterium diptheriae
gtgaatcccgcgcaatggaatgctaatattcatcttatgggaaagattaacacagatcctgctgcaacaagcggcattaaggttctcgaccgcgctgtctccatcatgctcgcagtcgcggaacgtccactatcgctcaccgaactgtgcgacgtgaccaatctcccccgagccacagcacacagactggccacagcgctagaaacccataacatcctgacacgtacctccgatggcaaatggaccatcggcgcagtcttgagctcgctcggggccggtagctccaccaagcttatcgacgtagccaccccgatcatgactagcctcatgaacgaaactggcgaatccgtgcagctgtaccaactcgcaggcgcaacccgtgtatgtattgcagcccaagagcccaccattggactacaaaacaccgtccccgtgggcacacgactaccactgaccgctggatccgcagcaaaggtctttcttgcctactcctcccctacattgcgcgatgccatgctggcatcgggggcgcagtttacccccgaagaccttgaagaggcccgcgaccgcggctggtcggaatcgattagcgaacgcgaagttggcctcgcaagtatttctgcccccgtcttcgacagcgaaggtcttttcatcgccgtactgtctatctccggccccaccgagcgcctgcgcccatcaccttccacactatggtcacagcaactaaccgaagctgcggcacatctatcgcaatcactc

SEQ ID NO: 17542 - DNA, 1080 bp, Cornyebacterium diptheriae
atgaccgcaattgaccaactcaaaaatgtgggcacttccacttggcttgatgacttatctcgtgatcgtcttcaatccggcaacctcgccgaacttatcaagagtaaatctatcgttggcgttacgacgaacccagcaatctttgcagctgctatgagcaaaggaactgcatatgattcccaaattgaaaagctaaaggccgctcaagccgatgctgattccgctgtctacgccatgagcatcgacgatgtgcgcgcagcttgcgacgttttttctgaaatctacgccgaatctgaaggcaaagatggccgcgtaagtattgaagtcgatcctcgaatctccgaagatcgagatgccacgatctcccaagctcgtgaattgtggaacaaagtaaatcgaccgaatgtcatgatcaagatccccgctactcgaggatcattgccagcaatcactgatgcattggcagaaggtataagcgttaacgtaaccctcattttttcagtagcacgctaccgtgaagtcatcgctgcgtacattgaaggtatcaaaaaagcagcagaaaacgggcttaacgtatctcaaattcattcagtcgcatcgttctttgtgtcgcgtttggacaccgaagtggacaaacgtctggaacaaattggtagtgacgaagcactttcactgcgtgggaaagcaggtgtggcgaatgctcaacgcgcttacgctgtcttccttgaagcattccaagctgcagatctacctgtaggagctcatgttcaacgtcctttgtgggcttccactggcgtaaaaaacccagattattcgcccacgttctatgtttctgaactcgctggcccagacaccgtcaatacgatgccggaatctaccatcgacgctgtgctagccgcagatgatattcatggtgacacgcttagttccagcagcgattcggcaaatgaaatatttacacgcatttctcaaaccggcattgattttgaagatgtgttcgctgtgctggagcaagagggcgtcgataagttcgtagcggcatggagcgatcttcttgattcgatggaatctcgcttgaag

SEQ ID NO: 17543 - DNA, 1452 bp, Cornyebacterium diptheriae
gtgattcgattcatgaccagccccatgacatcgaaggattcaaaactcacgctcgctgaaaaagtctggcgtgaccacgtcgtttctcaaggagaaggcgaccaaccagatcttatcttcattgaccttcaattactgcatgaagtcacctcacctcaggctttcgacggtctgcgcatggccggacgtacactgcgacacccagaactgcacctagccaccgaagaccacaacgttcccaccgagggaatccacaacggctccctgctagaaatcaacgaccttgtctcacgcacccaggtagaaaccctgcggaaaaactgcgaagaatttggagtgcgcctccacgccatgggcgataaaaaacaaggcatcgtgcaccaggtaggcccacaattaggtgccacccagccaggcatgaccatcgtgtgcggcgactcgcacacctccacgcacggagccttcggtgctatggcctttggtatcggaacctctgaggtagaacatgtgatggcaacacaaacgctgtcgctaaaaccatttaagaccatggccattaatgtcaccggcgagctgcaaccaggggtcaccgcaaaagacctcattttggcggtcatcgcaaccatcggcaccggcggcggacaaggccacgtgatcgaataccgcggtgaagcaatcgaaaaactgtccatggaagcgcgcatgacagtctgcaacatgtccatcgaagcaggtgctcgcgccggcatgatcgcccccgacgagaccacattcgactacatcaaaggccgcgaaatggcgcccaccggccaagactgggacgacgccgtggcctactggaagaccctgcccaccgacgaaggagccgaattcgataccgaaatcactatcgacggctccgcgatcacaccatttatcacatggggaacaaacccaggccaaggcctaccgctgtcaagcgtcgtgccctcgccagaggacttcccaggagataacgaaaaagtcgcagccgaaaaagcactcgcctacatgggactaaccccaggaaccccactacgcgacattgccatcgacacagtcttcctcggatcctgcaccaacgcccgcatggatgacctccgcattgcagccgacatcctgcgcggccgaagcatcgccgactccgtgcgcatgatggtcgtcccatcctcaaccatgattaaagagcaagcagaggcagaaggcctagacaagatcttcatcgaagccggcgcacaatggcgtaccgcaggatgctccatgtgtctaggaatgaaccccgatcaactcaccccaggcgagcgctgtgcatccacctcgaaccgcaacttcgaaggccgccaaggcccaggcggacgcacccacttggtatcaccagcagttgccgccgcaaccgcaatcaagggaaccctggcaagccccgccgatctggac

SEQ ID NO: 17544 - DNA, 2061 bp, Cornyebacterium diptheriae
atggcacatctcattgaggcagcccccaacccccaccagcctttcgtcgtgactgcaggcgttgcggtcggcgctgctatgcgggaactggagctacctaataaaggtcctgaagcgatcgtttgtgtaaaggatagtgaaggcacactgcgtgatctgtcttttgtgcctgagcaagatagtaagttcactccagttcctgctaatactgaagatggacgtacagtcatccgccactcgtgtactcacgtgttggctcaagccgtgcaagcagaattcccaggaacaaagttgggcattggtccagcgattgaaaatggcttttactatgactttgatgttgcagagcctttcactccggaagatcttcaaaagcttgaaaaacgaatgaagaaaatcgtcaagcaagggcaaaaatttgagcgtcgaattttcgcatcggttgccgaggctgaagaagctctaaagaacgagccttataagcttgagctgattcgcgataaaggaaacgttgatccaggctcggatgaggctacagagattggcgctggtgatctcacaggctattacaacgttaacccacgtacaggtgaagtggattggtacgatctgtgccgcggaccgcatgttccgacaaccaagtacattccagcatttgctttgacacgatcgtcagcagcatattggcgtggcgatcaatctctagcaggtttgcagcgcatttatggcaccgcgtgggagtctaaagaagcgcttgaagaataccagctgatgatggccgaggctgaaaagcgcgaccatcgtcgtctaggtgcagagcttgacttgttcagcttcccagatgaaatcggatctggttttccggtgttccaccccaatggaggaattgttcgtctagagatggaggaacattctcgccgtcgtcatatcaacgcaggatattcctttgttaataccccgcacatcaccaaaggtgatctgttcaagaaatcgggtcacctagatttctatgctgatggcatgttccctcctatgcagcttgatggtgaggttgacgaggaaggaaacgtcgtaaagcaggctcaggactactatgcaaagcctatgaactgcccgatgcacaacctcatcttcgcatcgcgtggtcggtcttaccgtgagcttcctctgcgcctctttgagttcggtacggtttaccgttatgaaaaatctggcgtaatccacggacttactcgtgcacgtggttttacccaagatgatgctcacatttactgtactgaggatcaacttgagcaagagctcacatcagtactcgatttcattatttcgcttcttcgtgactacggcttggatgacttttatcttgagctttccaccaaggatccgaacaagttcgttggttctgatgaaatttgggaaaaatctacatcgattctgcagcgggtagcaactaaatctggtctagaactggttccggatcctgctggagcagcattctatgggccgaagatatcggtacaggctcgagacgctatcggtagaacttggcaaatgtcgacagttcagcttgacttcaatctcccagagcgattcaacttggaatacacatcttctgatggttctaagaagcgtcccatcatgattcaccgtgcgttgtttggctcaatcgagcgattctttggtgtcttgctggagcattatgccggtgcattcccagcgtggttggctcctcaccaagtaattggtattccagtggcagattccttctctgagcatttggagaaagttacagggatgcttcgtgacaatggcgttcgcgcgagcgtggatacttctgacgatcgtatgcagaaaaagattcgaaatcatacgaccggtaaggttccatttatgctccttgcaggtgcgcgcgatgttgaagctaatgcggtgagcttccgtttcctcgatggcacacagattaatggggttcctgttgataaagctatcggcgtgatcacgcagtggatctcttcgcgaaataacaaacagccaagcgaagaaactgtgaaaaaactggtg

SEQ ID NO: 17545 - DNA, 1452 bp, Cornyebacterium diptheriae
atggttatttttggtgtaactggtgatctcgctcggaaaaagctcctgccagcgatctatgatcttgcacacaggggcctattgcctgcaggtttcagtcttgtcggctacggtcgacgaggctggtctaaggccgactttgaaaattacgtcaagcaagcagttgttgccggtgcccgtaccgatttccgcgaaaatgtttgggcacgacttgccgaaggtatgcacttcgttcaaggcaatttcgatgatgatgcagcatttgatagtttggcatcgcttttggcggatcttgatcagacccgtggaactgccggtaactgggccttttatctctctgttccaccagattatttttcggatgtttgccatcaacttcagcgctcaggcatggctacagccgagggcaattcatggcgtcgcgtcattgtggaaaagccttttgggcatgatcaagaatcagcacgtcagctaaacaacttgatcaattcagtattccctgaaaagtcagtatttcgtatcgaccactacttgggtaaagagacagtgcaaaatattatggcactgcgctttgcaaaccagctatttgatccgctctggaattctcactatgttgaccatgtccaaatcaccatggctgaggatatcggtctaggcggtcgcgctggttactatgatggaatcggcgccgctagagacgttatccaaaaccaccttattcagctgttggcgctggtagctatggaggaacccgtagcttttaccccacaagagcttcaggctgaaaaaatcaaggttcttcgtgccactcgcccagtagaaccttttgctaaaacaacagcccgagggcaatattcgcgcggttggcagggatctgagctcgtccaaggtctacgagaagaagacggatttgatcctaattccggaactgaaacttatgctgcctgcacactcgagataaattcgcgtcgttgggccggtgtgcccttttatcttcggactggaaagcgtttaggacgccgggtgactgagatcgcccttgtattcaaggatgcgcctcatcagccatttagcgaaggtagccgtcattcccaaggccgcaacgtcgtagtgatccgagtccagcctgatgagggtatgctgatgcgttttggttccaaggttcctggtaacacgatggaagtacgcgacgtcaacatggacttctcgtactcagaggcatttaccgaagaatcaccggaagcctacgaacgactcattctcgatgcacttctcgacgaagcaagtctcttcccaacaaatgaagaagttgagcttagctggcagatcctagatccgatattgaacttctggtctgatcgtgggcaaccggaagaataccccgctggcacctggggcccagctggtgcagacaagatgctggagcgcgaaggtcgcgcttggcgtcgacct

SEQ ID NO: 17546 - DNA, 1218 bp, Cornyebacterium diptheriae
atgagtcgccgtggatttcttactggtacagctggagttgcagccgcaggagcattaagtgcgtgcacagagcctgcgcatgatgcagatgctgtgggtgtagatcaaacagttgcccaagaaatagagccattcgacggcatccatcaatctggaattgccactccagcacaatcgcacctcatagtgctgggacttaattgccgtgcgggagtggattctgctgcagtgcgacgtttgttgaccctgtggaccgaggatgctcgggagttaactcaggcgcgaaacccagtgggtagccttgagcccgagatgacctcgtcaccttcacgtttgacagttactgctggtgctggcgcacggctattcgatattctcgggaagtcggaaatgaagcctgcatggctgaaagatattccagtcttttccaaagacagacttgatccgcgttgggggcaaacggatcttgtgctacagatttgttcagatgaccctatgaccgcagctttcgccatgcggcatatgacccgatcgggatctgattacgctgaagttaaatgggttcaacagggatttttaaacgctcggggtactttgcaaaaaggcgaaactccgcgaaatctttttggccaaaaagatggcacaattaatcctcacactgctgaagaatttgataagcaggtttggattgacaatgaagatgattccccacgttggatgcgcggtggaacgtgcatggttgtaaggcgtatttcaatgaatttggacacttgggagcgtctggatcggcaatccagagaagttgcaattgggcgcgatatcgtagaaggggccccactaagcggtgggaaggagcacgattctgctgactatgaggcagttgatgaatatggtcttccgaagattgacgctcgttcccacatggcactagctacgccaccttcagatttgcctaatcagcggctccttcggcgtgcgtatacttacaatgaaaccccgatggttggtactgatcagctatcgaatgctggccttgtgttttgttgtttccaaaaggatccgcgtaaacaattcattccgattcaacagcgcttagacgctagcgatcgtttgaatgagtggatcaaacacatcggttctgcggtgtacgcgattttcccgggcaccgatcaaaagaaaacggaagcttccatttggggtgccgcgttgttcgattcc

SEQ ID NO: 17547 - DNA, 1014 bp, Cornyebacterium diptheriae
gtgcgaattaggaggcaagtgatgaagatcggtgtgatgggtgccggttcttggggaactaccttggctaaagtcttttcagacgcaggctgtgatgtcaccttgtgggcacgtcgtgaagaagttgcccgagaaatcaacaccgagcacacaaattccacctatcttcgaggtattgcgttgccgcacaccctcacggccacaacgcagccaacgcaggcgctgtgcgatgccgatgtggttgtcctcgcggttcccagccaaacattgcgtggaaatcttgctgaatggtgtgcggatattccgcaggatgctttgttgctgagcttggcaaaaggcatcgaaaaagagacatttttgcgcatgagtgaagtaatcgcggaggtaacgggtgcgcaacctgacaaagtggctgtcttgtcaggtccgaatctggctcgagagattgcagaggaacaaccagcagccaccgttattgcctgcacaaacgagaaaaatgcccagcgtatccagcatgctttggcggctccttatttccgtccgtataccaacacagatgtcatcggttgcgagatcggcggggcttgcaaaaatgtgatcgctctcgcctgcggtatggcatctggcagggggctaggagagaacactctggcaacgttgatgacgcgtggtctagcggagatctcacgtttgggagtagccatgggtgcagatccgcgaaccctatcaggtttagctgggttgggagacttggtagctacatgttcatcgccgttgtcacgtaaccgaacctttggtgcccgtttgggtgaaggcaagactttagacgaagcccgtgcagcgacaaacgggcaagtagccgaaggagttatatcctcgcaatctattgcgcggctagcagattccttgggggttgatatgcccattacccgtgcggtatttggagtatgtcatcgtgaccaaaatgttgccgacatggtggctgcattgatggggcgtaccaagaaatctgag

SEQ ID NO: 17548 - DNA, 1095 bp, Cornyebacterium diptheriae
gtgagccaaaatctttcagcacagaactcttcagaaactcctcgtattaaagttgccatcatctatggtggtcgtagctcagaacactccgtgtcgtgtgtgtctgccggcgctatcatggcgcaccttgatccgcagcgctacgaggtgttcccagtaggtattacgcacgacggtgtgtggactgtgggggaatcagatccaagccggcttaagactgtcgaccgcgtgatgcccgaggttcagttcacaagggaagtatcgctgtcggtcaacccaactaccgctggcgaactatgcttcgaggatggatcgctttatgccaaagtcgatgtagttttcccagtcttgcatggtcgctttggcgaagacggtacgatccaaggcctatttgagctatctggtgtgccttacgttggaactggtgtgttgagctccgcctgcggaatggacaaggaatttactaagaaactcatggcggctgaagggctgccagttggcaaggaagttatccttcgcggctcagaaacgttgactgaagaacataagcgtgagcttggcttgcctgtgtttgttaaacctgctcgtggtggatcatccattggtatttctcgtgtagctgattggagcgaatgggacgcggcattgagtcttgcacgcgagcacgattccaaggtgatcgtcgaggctgaaattgtgggtgtagaagtcgaatgcggcgtgcttgagcgtatcgacggttccctgatggcgtctgttcccgcccagctgcaagataccgatgagggtgacgaaggtttctatggttttgataccaagtacctagacgatgtggtcaccgctcacattccagcgcccttcgacgcggaaactactgcgttgattcaagagctgtcgctgaaggctttcacagctttaagctgccgtggtttggcacgcgtggacttctttgtcaccgaccatggacctgtgctcaacgagatcaataccatgccaggatttacccctatttcgatgtacccccaggtattcgaggcaacaggtatcggttatgcgcagctgctcgataacttgatcgagcaggccttgcacaaa

SEQ ID NO: 17549 - DNA, 1215 bp, Cornyebacterium diptheriae
atggctattaaaactcttaaagatctcttggcagaaggcgttgaaggacgccacgtgcttgttcgttcagatttcaatgtaccgctgaacgatgatcgtgaaattactgatgctggacgtattaccgcctcgctcccaacgatcaaagcattagttgacaacggtgctcgagtaatcttgatggctcacttgggccgccccaagggagaagtaaatgaaaaattctcactggctcctgtagcggaggcattgtctgaagcccttggacagtatgtcgcactcgcaggcgacgtcgttggtgaagatgctcatgaacgcgcgaacggtctcaatgacggtgacgttctgctccttgaaaacgttcgctttgatccacgcgagacctcgaaggaagaagctgagcgtggcgaatttgcggatcagcttgtcgcactcaccgctgaaaatggtgctttcgtatccgatggctttggcgttgttcaccgagctcaggcatcagtatttgatgttgcgcagagattgccgcattatgcgggaacactcgtggaaaaagagctagaagttcttggaaacaaggttgcctctgctccagaacgtccttatgcggtcattctaggtggcgcaaaggtgtctgacaagcttggcgtgatcgaagcgctagcaacaaaggctgacaaacttattattggtggcggaatgtgctacaccttcttggcagccaaaggtatcaacgtgcaaaagtcgctgttgcaagaagaacaaatcaacaagtgcaaagaacttctagaagcatacgctgataagatcgttcttccagttgatctggtagcagctgcagagttcgccagcgatgcagaaaataagatcgttgcaattgacgaaatccccgaaggctggatgtctcttgatgtcgggcctaagactgttgagaagtttgctgaggttctagcgacatcaaagaccgtattctggaatgggcctatgggcgtttttgagtttgaaaacttctcagccggtacccgtggcgtagcagaagctattatcgcagctacggctaatggtgcattctctgttgtcggcggtggcgattcggctgctgctgttcgacttcttggtctagacgaggatggattcagccatatctctactggtggcggagcatcacttgaactcctcgaaggcaaaaaccttcctggcgtttcggtgctcgaaagc

SEQ ID NO: 17550 - DNA, 1002 bp, Cornyebacterium diptheriae
gtgacgattcgcgtaggtatcaatggttttggccgtattggtcgtaacttctaccgtgcaattactgagcgcggtgctgacatcgaggttgttgcaatcaacgacctgactgataaccacactctttcacatctattgaagtatgactccatccttggtcgtttgggcaaggaagtcagctacgatgatgaatccatcaccgtcgatggccatcgcatggttgtcaccgctgagcgcgatcctaagaaccttaagtggggcgagctgaacgttgacatcgttgtcgagtcgactggcttctttactgatgctaatgctgcgaaggctcatattgaggctggcgcaaagaaggtcatcatttctgcacctgcaaagaatgaggatgcaactttcgttgttggtgttaaccacaccgactacgatcccgctaagcacaacatcatctcaaacgcttcctgcacgaccaactgcttggctccaatggctaaggtattggacgagaagttcggtatcgtcaagggcttgatgaccaccatccacgcttacactggtgatcagcgtctccacgatgcaccacaccgcgatcttcgccgtgcacgcgccgcagctcagaacattgttcctacttccactggtgcagctaaggcagtagccttggttcttccagaactgaagggtaagctcgacggtttcgcaatgcgtgttccagtaatcactggttctgcaacggatttgaccttcgaaaccacaaaggaagtttccgcagaagaaattaatgcggcaatgaaggaagcagctgaaggcgagctcaagggagtcttagcttacaccgaggatccgattgtttccaccgatatcgttaccgacgctcacgcatcgatcttcgatgctggcctaactaaggttattggcaaccaagttaaggttgtttcttggtatgacaacgagtggggttactccaaccagctcgtttctctgaccgaatacgtcggtgagcgtctc

SEQ ID NO: 17551 - DNA, 1041 bp, Cornyebacterium diptheriae
gtggcctactatcgaaaccacaccggaccccaccaccgaggagtacccaccaccgtgactgaagaacacatccgaaacaaccccaccctcaaagaagtcggcgaacaagccgccatcaatgtcatcacagcacacgcaccaagctcccgcaatggcgatgacgcagcagttcttagtcacgcaggggctaactccagggcagtcgtcaccaccgacatgctcgtagaaaaccgacacttccgcctcgactggtccaccccagcagaaatcggccgcaaagccatcacccaaaacttcgccgacatcgaagcgatgggagcgcgccccgtcgcagcccttctagccatatccgcacccgcatacacacgattgcagttcgtctccgacctagcacgcggaatcgcagaacgcgtgagcgactactcagcagaacttgtcggcggcgacatcaccgacggcgacgccatcgtcttatccgtcacagccgtaggccaactcggtggatcactacccgaacttgccctcgaccgtgcccgctctggtcacactgtcatcgtcagtggagtgataggcgaatcagccgcaggactagccttgctcaacagattcggtagagacggtgtccccgaacgattcatgccactagtatcagcacactgcgcaacctacgtccctgaaggacgaggctttgtcgcacgtgccgcaggcgtatcctctcttaccgacaactccgatggcctcatcgtggatctgcgcaccatggcccgcaaatccggcgtagtcatagacttggaccccagcgccatccaacccagcgcactgatgcgtgaagcagccgaaattctcgaagaagacccatggcactgggtcctaggcggtggggaagaccacacacttatgggaacaacagcgcacgcagtacctaccggattccgaaaaatcggcacggtaatcaaacgcagcaaccaaccaactcacgctgccggcgaagtcctcgtcggcggcgaagcaccagcatacgacgacggatgggtgagcttt

SEQ ID NO: 17552 - DNA, 984 bp, Cornyebacterium diptheriae
gtgggagctctttctgctcaagttaaagatgaactgatcaaggtgtcatctacaaaacagaggtctcgcatcgccgaacttgcttcgatcattagatttgctgggtctattgattctgcgctcggaaagactgtaatagaaatcgaactagataacgaagccgttgcaattcgtgttgcgaaagaaatagaggagttatttgctatttctgccaagttggtggatttagggccgatggcaacacgtcggactccacgacatgtggtacgcatcgccgaggatgcagaaactttgattcgtcgagttgggttagtaactcgtagcggccatgcggtagtagggctaccgcctcagataatatctggatcaatttctgatgctgaggctgcgtggcgtggtgctttcttggctgcaggccagctttctgacccaggtaggacttcaggtttggaagttgcatgtccttgcctagaagcatctttagctttggttggatgtgctcgcaggttgggtttgtcagctaaacccaaagagactcgtggggtagaaaaagttgtcattcgagatggtgaagcagttggggcattgctatctcgaatgggagcacataaaacgcgacttgtgtgggatcaaaaacgagcacgaagagaggcgcgacctttaggaaaccgattagctaattttgatgacgcaaatctgcgtagatcggcgcgagcggcggtagctgcggcagcgcgtgtggaaagagctatgacaattcttggtgatgatgttcccgaccacttggcccaagctggccaattgcgtgtacaacatcggcaggcttccttggaagagctaggccgattagcggatccccagatgaccaaagacgctgtagctggaagaattcgcagattgctgcatatggcagataaaaaggcttctgacatgggaattccggatacatcagtagtcgtaactgaggaacttctggacgacttc

SEQ ID NO: 17553 - DNA, 969 bp, Cornyebacterium diptheriae
gtgaataaactagacacctcgcaacttaaaatcgcgagtatggggggagggcacggcctatttcaaaccctccgtgccgttcggcagcttaatcctgcaagtatcgacgcaatcgtaactgtggccgatgacggtggttcatcagggcgaatccgtcgtgagttaggacagattcctcctggcgatctacggatggcccttgcagcactcgctccttttgatgatgaaggtttgcaatgggaaacgctcctccagcatcgctttggtgggcatggggcactagctgggcacgcagtaggcaaccttataattgctggtctgtgcgataccttaggaagcgaaattgccgctctagatgcagtagcaaaagtcatcaaagctgaaggtcgcgtattgccagcatgcgctgagccattagaaattgcggcagaggtatcaggcttagatgatgatccacggattatgcgagaagtcattgggcaagttgcagtcgcatcaacgccaggtactgtacggcgtgtccgtcttattccagaaaggccagaggcaactgaggaatcggttgaagctattgaaaacgcggatttggtgacgttaggacctggttcatggttctcaagcgttatcccgcatgttttggttccaggaattcctacggcattggccaccactaaagctttgcgggtagtagtgcttaatttaagtccagagccgggagagacagcaggatttaccgctgaacggcatatccatatcctgtctcaacatgcccagacgttgagagcagatgtgattttagtggacgagggactaatcccgcacaaaggcgaaagagtccatctggaacgagctgcagcggtgcttggagcacagatttcgtatcatgatttaagtgaaaccgatcccagcggccgacgaattcatcgccatgatcccgcaaaattagctgaagcgttacgtttacagctt

SEQ ID NO: 17554 - DNA, 885 bp, Cornyebacterium diptheriae
atgagaactgatgtcgagcctagaactgaaatcccaccagtagtaattacaggtctgtctggcgcaggattgagttctgcagcccgcgtgcttgaagatatgggctggtatgtgactcaaaacatcccatcgcaatttgtggtccaactcgttgagttgtgcgccgatccgcattcaccagtcgataaaatcgccatcgtttcagatgttcggtcgaaggaattcagcggtagcttggaagaagtaatttcggagctttccggactcggtttaaaaccattggtcgtattcatggatgcgcgaaatgacgtcttgatcaagagatttgataatttgcgacgaactcaccctcttcagggaagcggcactttgctcgtgggaatcgaacgtgaacgcgaaattatgaatcaaattaaagagtctgccgatgttgtcatcgacacttcagatctatcaattcatgatcttcgacgtagcatcgaactcaacttcaacggaatcgctaataagttacagcatgttacggtgcaatcctttggctttaaacacggttctccacgtgacacagatttgcttatcgacgttaggttcttaccgaatccgttctgggtacctgaactgcgtccgtttagaggtacggacaagcctgtgtctgattacgtattggcagacgaaggcgcgcagaaattcctcgacaatttcacgcgaatgctacgggacatgcgccccggttttaaacatgaaggtaagaactttattactgtttccgttgggtgcactggtggacatcatcgatcagtagctatagctgaagaattagcgcgtcgtttgagagaggttccggaccttgatgtcagcgttaatcaccgagatatcgccagaaat

SEQ ID NO: 17555 - DNA, 465 bp, Cornyebacterium diptheriae
gtgagcaaagagggactgcccaatgtatcttcggtagcaggagcaggtcttgttgtcggaatagtctccgcaacgtggaatgaaaagatctgtaatcagctccatgctgaagcgattcgcacggcaaaggactgcggtgcaaaagtcatcgaaacacgagtgatcggtgcgctggagctaccgattgtagtgcaaaaactcgctcagacctgtgatgcggtggttgctaatggttgtgtgattaaaggtggcactcctcattttgactacgtttgcgactcggtaactgaagggcttacccgaattgctttagatagtggagtaccagtcggtaacggagtgcttactactttgaatgaagaacaggcgattgaccgcgctggttttgatggttccactgagaataaaggagcagaggcaaccattgcggctatgcatactgcgcttgttctaagggatttgccg

SEQ ID NO: 17556 - DNA, 1314 bp, Cornyebacterium diptheriae
gtggatataacccgaagcggtacgcctcataacaacgaggcttacccgatagatcagcagaataacgatcatccaggggtgactttggatagcatcgaaagggccatcgcggatattgcgaatggaaagcctgtggtcgtagtcgactcagaagatcgtgaaaacgaaggcgatttaatttttgcggctgataaagcaacgccagagttagtagcctttatggttcgatattcttcgggttatatatgtgcctctttgacgtcagaagagtgcgatcgacttcagcttccgccaatgacatcccataacgaggatgcgcggggtaccgcatatgccgtcacggtagacgcgaatacaggaacaactggtatttctgcaacaagtcgtgcagatacgttgaggaaacttgccgacagtcaattcggacctcaagatttcacgcgtcctggccatgtggttccactgcgtgcgaaagcaggaggtgtgcttgaacgggcagggcatactgaagcggctgtcgatctagctcgaatggctggcttgaatccagcaggcgtcctgtgtgaagtcgtcagcgaagatgatcccacagacatggcacgagcacctgaactacgacgatttgcggatcgacatgatcttgcacttatttcgattgaacagcttattgagtggcgacgtaggtacgaattacttgttgaacgagccgtgtcaacacaactgccaactgagttcggacggtttaccgcggtcggctatcgtggaatcgttgacggtgtagaacatattgcgctagttgcaggcgatattacttctgatgagggcaaggatgttctccttagagtccattctgaatgcttgaccggagatgttttgggttctcgtcggtgtgactgtgggccgcaattacaggcgtcccttcgtgctatttccgagcgagggcgcggagtcgtggtgtacttgcgtggacatgaaggacgtggaatcggattacttcacaagcttcaggcgtatcatctgcaagatgaaggggccgatacggttgacgcaaataaggcattaggcctaccagttgacgcccgtaattactctgttgctgcacacattctacgagatcttggcgtgcagtcggtatgtttgctgacgaataatccagaaaaatcccttgaactggaacgctatggggtcaaagtaactggacgagagcctgtcaaagtggaagtgcacgaagataatattcgttatttgaccacaaaacgggatcgaatgaaccatgatctgccatggattgccgaatacaaaaaggagcaaagc

SEQ ID NO: 17557 - DNA, 606 bp, Cornyebacterium diptheriae
atgtttactgggttaatagaagaaatcggaacgattactggaatggaagagcaaggagactcactcgttctcagcatttcagcaccggcacttatggttgatgtgaagcaaggcgattcaatttcagtcaacggtgtgtgcttgaccgttgttatttgtgacgcgactggcttcacagctgatgtaatgagggagtctctcgatcgttctagtctgggtcaactccgaaccggcagctacgtaaatctggaacgcgccatgcgtgcggatgctcgcatgggagggcatatcgtgcaaggtcatgttgatggcactggtgtgctgttgtctcgggatcattcggaacattgggatgtattgcgatttagtcttccagcagatatttcgcagtatgtggttgaaaaaggttcgattgctgttgacggaacttcattgacggtgtcgtcgataagcgaacctcttgcagaaaatcattggtttgaagtttcgttaattcccaccactttggagcacactacgctcggtgagctaaaactacgtgaggttgtgaatttagaagtagacatcgttggaaaatatgttgaacgaatgcttgcaggacataaa

SEQ ID NO: 17558 - DNA, 1578 bp, Cornyebacterium diptheriae
gtggcagccactgagaattcagaatcttccgcaacggcaaccgctgaaggcacagcgtcttcaggacaaggcttggcgaatgctggcgaggcatcctctgccactgtaaaaaaggcagccaagaagaccgctgccaagaaaaccgcacgcaaggttgcccgcaaagttactgcagttaaagtagctgcaacaccaacagtaacaagctctgctgaatcagctacagccgagccagcaattgagttgccttcatctgagccagtcaaaaaagctgctaaaaaaacggccaagaaaacggctaagaaggtcgctaaaaaggcagcaaagaaaactgccaagaaaacgacagcaaagaagagcactcgcaaatccgctaaaaaagttgctgctccagttcctgaagaagcgacccaatccagcgaagagtccgaggacgagctcgaatcgctagctggcgaagattcagatgaagattatgatccgcatctggatgaatttgacgacgacgatgagatgcacaccgacgagctcggagaagatgactcttccgatgatgattcagatgaggatgagggttcttcagtctgggatgaggacgagtcggcggcattacgtcaggcacgtaaagatgcggagctttctgcgtctgcagactccgttcgcgcatatttgaaacaaatcggcaaggtagccttgctgaatgccgagcaagaagtttctttggctaagcgtatcgaggcaggcctctatgccacttaccgcatggagcaaatggaagaagcgtttaataacggggataaggaagcaaaacttactccagctgtcaaacgcgaccttcgtgcaattgcaagagacggacgcaaagccaaaaatcatctactagaagcaaaccttcgtctggttgtgtcactcgctaagcgctatacgggccgtggcatggcgttcttggatttgattcaagagggcaacttgggtcttattcgtgctgtcgaaaagtttgattacaccaagggctacaagttctccacatacgctacttggtggattcgccaagcaatcacgcgtgcgatggcagatcaggcccgcaccatccgtatcccggtacacatggtcgaagtcattaataagctcggacggattcaacgtgagcttcttcaagatctcggtcgcgagcctacccctcaagaactcgctaaagagatggatatcactgaagaaaaagtccttgagattcagcagtacgctcgcgagcctatttctttggatcaaaccatcggtgacgagggtgatagtcagctcggagactttattgaagattctgaagctgttattgcagttgatgccgtttcgttcacgttgttgcaggatcaacttcaagatgttctccatacgctctccgaacgcgaagctggcgttgtcaaactccgcttcggacttacagatggaatgccaaggactttagacgagattggccaggtctatggcgttactcgtgaacgtattcgtcagattgagtccaagacgatgtcaaagctgcgtcacccatctcgttcacaggtactccgagattatctcgat

SEQ ID NO: 17559 - DNA, 1068 bp, Cornyebacterium diptheriae
gtgccgcttagtgctgagttgccgttaaacaccatttatgcggaaactacggttattggcactgaaatgaactttatttatcctgcggtcattgcagcagttcaagaaggagaaaaggcttggggaactacacaccctaaccctccggttggggcagtggtgctgtctagcaatggctcgattgtgggaagggggcatacccaaccacctgggggctctcacgctgaaataatggcattgaggcaggcaggggagaatacaaaaggtggcacattagtggtcactttagagccatgtaatcactggggaagaactggtccctgcagtcatgctatttctgaatccggtattgagcacgtagtttatctcatgcaagataccggttcgctagagaaaggcggggcggaatatcttcggcgccaaggattaaaggtgacctttttaggcctcagtgttgctgctcttattccttggcaagcatctaaagatcgtggttggccgtatgttgtagggaaaactgcccacactctggatggctttgttgctgctgaagaccacagctccaaatggataactggcagtgcatcgcgtgattacgccaatcggcaacgacggcattttgatgcgatcattgttggaactggcactgtcaaagctgataatccagctttgacagctcgaaaagacgatggcaccttattgccgcatcaaccgctcaaagtggtcatcggaacgagtaaaatttctgagggtacgcagttagcacgatcgggatttgtgcagttttcaacgatcgaagaagcattggtacaactttgggaccgaggggtgcgttatgtgctggttgaaggcggtccacatttattacatggttttttaacgagcggtaatctcgaccagttacattcgtatagtgcgcccatgcttttaactcgaggagtttcccttctacaagaggaggagaagaaatctgcggaaagtgctaatactacgattgcaagtgcattaagaggaagtcctcaatccatttcgatgctcggggacgatattcttcaagtaattaatatt

SEQ ID NO: 17560 - DNA, 1140 bp, Cornyebacterium diptheriae
gtgatcgcagaatgttcttcacgggaacttgaagctttaaaaccggaagtgcgggcagcgctgcgcctaggcgcctatcagcttttatacacacgggtaggtgctcatgcagctgtagatacaaccgttcgaatcatggaagcaatcggtcaagatcgtgcaaaaggatttgtcaacggtgttctccgtacaatttcaagaacttctcctcaatcgtggatcgaaaaattaactccatcgggtgaggttgagtcaattgcctttcagcatgcacaccccgcttggattgctcgaagtttttcccagatagttggaatgaacgagctggaggctgcattatcagcagattctgagcgtccaaaggtgcacttggtagcacgcccaggggagatgagtgcagaagaacttgcgcttattgttggaggcgatgaaggtaagtattctccctatgctgtttacctagaatctggtgatccaggagcgctggaaccagttcgtgaaggtttggctgcggtccaagatgaaggcagtcaactaattgcgagagcagtgaccgaggctccaatacatggagaagatcaaggaaaatggcttgatctgtgtgctggtcccggcgggaaagcagcattacttggcgcaattgcacgtattgacggtgcgacagtggatgctgtcgaagtgagcaagcaccgtgcgaagttgatcgaaaacattgttcgcggtttgcccgtcaaagttacagtaggtgacggacgctccccaggattggcgccaggatatgaccgagtattagttgatgcaccatgttctggactaggagcattacgacgccgccctgaagcgcggtggcgaaaacaagaaactgacattgaggaactgacaaagctgcaatcgcagttgctcgaatcggctttacggcttgtacgaactggtggaatcgttgtctactcaacgtgttccccagatttaagggaaacacgacagattgtggatcgaatacttcgttctcacgaagttgaagagcttaacgctgcggagctcgttcccagtatggaaaacactggtgaatacaagtcggtacacatgtggccacatcgacatggcacagatgcgatgtttttcgcagtgctgcgtaaaaaa

SEQ ID NO: 17561 - DNA, 2742 bp, Cornyebacterium diptheriae
gtgggtttatgccaaattgcctgttcggagggtggattcgggcaaatgttagatgtactcgttacactggccatcgtgacttccaatgcgaaccgactcatgcttatcgacggccactcgatggccttccgtgcgttctacgcgctgcctgcggagaacttctctacatcgggcggacaggcgacgaatgccgtttacggatttttgtcgatgttgtcgtctctgctcgttgaagaaaagccaacccacgtagcagttgcgttcgacgttggccgccaaacatttcgaaccgagatgttccctgaatacaaagcgcagcgtgaggctgcgccaccagaattcaagggacaggtggaaattattaaagaggtcctagagactttgggaatcaccaccttggaaaaagaaaattttgaggcggacgatatcatcgccacgttggctaccgcagcgggtccacttggttttgatacgtatatcgttactggtgatcgcgattctttccagctagtaaacgaatcaaccacggtgctgtatcccatgcgtggtgtatctgttcttcatcgtttcaccccagaagcggtggaagaaaaatatggattaactccagtacagtatccagatttcgcggcattgcggggagatccttcagataatttgcctaatatcccaggtgttggtgagaaaaccgctacaaagtggatcgtccaatatggaaatctggattccttgcttgctcatgccgatgagattaagggcaaagctggtaatagcttccgagagcgtttagatcaggtgcgtatgaatcgcactttgactgagatgatcaaggatctcgaacttccttatgctccagatcagctcgagcgcaaacccgctgatgcgtcggcaattgcatctaagtttgatgaacttgaatttggatcgaatctccgcgatcgagtaatccatgcagttgatgcgcaagggaacgtctctgaagagtctgaagaatacaagcctgaagtcgtcatcgaccatgaaaaactagcatcatggcttgccactcgtgctgggcagtcactggcattgtatgtgcgaggccatggtagtcccgccagtggtgatgctgagtcggcggcgatcgtcgataagcaattccatgctgtagcgtttgatttcggtgaccttgacgccgatgacgaccaagcatttgcgcagtggattgctagtgattcgcctaaatacctacatgaagctaaagctgtatttcatatgctcgcaggcaggggctacactctcaacggcatcgagcatgataccgcaattgcggggtacttattgcgccctggccagcgcacgtatgatctgaaagacgtgtatcagcgccatttgcaacgtcaactaggcggcggttctagcgagagcggtcaactatcgttgcttgacgcacctgatgctcaagaacttgttgacagtgctgtagcgattttggagttaagtaaatcgcttactgcgcaactacaagctatcgacgcatatgagctctatcgggaaatggagcttccgctcgttggcgtgttggcgcgcatggaggcaactggaatttgcgttgatgtggccacattgcgggaacagcgagacatatttgttgagcaggttaaagaagaagaaagcgctgcccgggaactcgcgggggacgagactctaaatctgtcgagcccaaagcagcttcaagtagttttatttgacacattagggcttcctaagactaagaagaccaagactggatactccacggcagcaaaagaaatagaatcgctggctgttaaaaatccacatccgttccttgatcatctcttggcgcatcgagagttccaaaagatgaaaaccactctagacggcctcattaaagcagtcggagatgacggtcgtattcacactacgtttaatcaaactgtcgcctcaactggtcgtttgagttcaacggaaccaaacctgcaaaacattcctgtgcgtactccagcaggaaggaaaattcgctctgcttttgtggtaggacaagggtataagtctctgctgacggcagactattcgcagattgagatgcgtgtgatggcgcatctttctgaggatccaggtttgattgaggcttatcaaacgggtgaggacctccacaattttgtgggttcgaaggtcttcgatgtgccagttgatcaagtaactcctgaactacgtcgccgagttaaagcgatgagctatgggttggtctatgggctttctgcatttggtctttcccaacaattaaacatccctgctggtgaagccaaagtgatcatggaaagctacttcgaacgattcggaggggtaaaacgatatcttgaccaagtggtcgaacaagcccgaaaggatgggttcacatcgactttgtttggccgtcgacgttacttgccggagctttcttcggataatcgagtggcacgtgaaaatgccgaacgagctgcattgaatgctccaattcaaggcacagcagcagacattattaagattgcaatgctgcgtgtcgacgcccgccttactgcagaaaactgccaatcgagggtgcttcttcaagtccacgacgaattggtgctcgaggtagcttcaggtgaacaagaaaaggttcaacaacttgtagaagaagaaatggacgccgctatttcactgcgcgtaccgctggaggtttctgcaggtgtcggtacaaactgggaagaagctgcgcat

SEQ ID NO: 17562 - DNA, 1539 bp, Cornyebacterium diptheriae
atgccaagggtatgtggtgttttgagagacgcgttcctgtccatcaacgattcctacattattttcggagcatttatacatatgccaaccaacaacgtccctcaggttgcgattaacgacatcggaaccgctgaggatttcctcgctgcagtcgacgcaaccatcaagtacttcaacgatggtgacatcgtcgagggcaccgtggtcaaggttgaccatgatgaggttttgcttgacatcggatacaagaccgaaggtgttatcccttcccgcgagctgtccatcaagcacgacgtcgatccagatgaggttgtcgaagtcggcgaccagatcgacgcacttgttctcaccaaggaggacaaggaaggccgtttgatcctttccaagaagcgtgcacagtacgagcgtgcatggggtgctatcgaggagctcaaggagaaggacgagccagttaccggtaccgttatcgaggttgtcaagggtggcctcatcctcgacatcggactgcgtggcttcttgcctgcatccctcgttgagatgcgtcgtgttcgcgacctcgatccttacatcggtcagcagatcgaagcaaagatcatcgagctggacaagcagcgcaacaacgttgttctgtcccgtcgtgcatggcttgagcagacccagtctgaggttcgctccgagttcctgcaccagctgcaaaagggtcaggtccgcaagggtgtcgtttcctctatcgtcaacttcggcgcattcgtcgatctcggcggtgtcgacggcctcgttcacgtttccgagctttcttggaagcacatcgatcacccatctgaggttgtcaccgttggtgacgaggttaccgttgaggttctcgacgtcgatctcgaccgcgagcgcgtttccctctctctgaaggcaactcaggaagatccatggcgcgtattcgcacgcacccacgctgtcggccagatcgttccaggtcgcgtcaccaagctcgttccattcggtgcgttcgttcgcgtcgaagagggcatcgagggcttggttcacatctcagagttggcccagcgccacgttgaggttccagaccaggttgttaacgtcggtgacgaggcaatggtcaaggtcatcgacatcgaccttgagcgccgtcgcatctccttgtccctcaagcaggctgacgaggattacaccgaagagttcgatccttccaagtacggaatggctgactcctacgacgagcagggcaactacatcttccctgagggcttcgatccagagaccaacgaatggctcgagggcttcgacgagcagcgtcaggcttgggaggctcgctacgctgagtctgagcgtcgcttccagctgcacactgttcagatcgagaagaaccgcgttgctgccgctgaagctgcagcagcaggcgaagctaccaactactcctctgagtccgctgaggcagctccggccgcagctaacaccgaggcagaaggtggctccttggcttccgacgagcagctcgccgctctgcgcgagaagcttgctggtaac

SEQ ID NO: 17563 - DNA, 1230 bp, Cornyebacterium diptheriae
gtgtctgaaactgctgcctccggcttgcgtttgtttactagcgaatcggttaccgaggggcatccagacaaaatctgcgatgcgatctcggacaccatattggatgccttgctgagcgttgatcctcacgctcgcgtggctgtggagactgtcaccacaacaggtttagttcacgtcgtgggagaagttcgtacctccggctacgtggaaattccaaaattggttcgtgacaaactaattgaaattgggtttaactcttctgaggttggcttcgacggtcgcacctgtggtgtgagcgtatccattggtgaacagtctcaggaaattggtgctggtgttgatcagtctcatgaggttcgttcgggcgagaatacagatgcagatgaccaggctggagcgggcgatcaggggttaatgttcggctacgctacgaacgagacagccacgttgatgcctttgcctattgatttggcgcatcgacttgctcgtcgcctgactcaggtgcgtaagacctctgttgtttcccatttgcgtcctgatggaaaaactcaggtaacacttgcgtatgacgaatcaggtcgcccggtacgtttggatacggtagttgtttcaactcagcatgatcctgatgtaacccaggaatggctgtttgctcagattaaagagcatgttgttgactgggtgcttcgcgattcaggcttggagtccacactcgatatcagcggttattcattgctggttaatccatcgggttcctttgttgttggtggccccatgggcgatgctgggttgacgggacgaaagatcatcgtcgatacctatggcggcatggcgcggcatggtggcggtgcgttctctggaaaagatcctagtaaagtagaccgttcaggtgcgtacgctatgcgttgggttgctaagaatattgttgctgcgggattggctgatcgagcagaggtacaggttgcttatgcgattggtcgtgcaaaacctgtcggtttgtatgtcgaaacttttggaacggccaaatttggtttgacggatgaacagattcaagatgcagtattgcacgtgttcgatcttcgtcctgcagcgattattcgagagttggatcttcttcgtccgatttatgctggtacggccgcttatgggcatttcggacgcgatgatctgaagctgccttgggaaaatacggatcgagcagaacagttacgtgacgtgttgtctttaggc

SEQ ID NO: 17564 - DNA, 1533 bp, Cornyebacterium diptheriae
atgcgtacccccttaagttccgtctcacctcaattggttcaacgattccacgagctgggttttacaccttcgtcaattcgaaattttcttggacgcccaggctttgcggcaatcagtagaggcgaaccggcttctgtgctctatgccatgagagaaaacgaagactctgatttctatcctttgatcgcaacgtttattcttcatcgcccagtggctgccgaggcattgcatcgagttctaggtggatcgttaaccgatcaattgacggaaactggtgttctcgaaattgtcgatgcatcgaaagcgtatctcaccgcaaaaatcgatattcgttggcttgagcttgaagatgacctattttgggtattttccgacaccgacgcttcaatgattgccgaccatgttcctggcaaggatcatgtcctcggcgttggggcggcaagtctttcactactagccactaccccgcgttcaccagttaattctgttttggacttaggaactggttccggtgtgcaggcactaggacaattgagacatgctcgatcagtcacagcaaccgatgtacatccccgagctctcgatttcgcggaggctacgtttgctggagcgcatttcgatgtagaaattctcgatggttcttggttcgaacctattaagaatcggaagttcgaccgcatcgtagccaacccaccttttgtggtaggtccacccgaaattgagcatgtttatcgggactcaggtcttgatttagatggtgcaacggaaacggtggttcgtggagcagtagatcaccttcattccaatggcacggcacaccttttggggtcatgggtccataaaaatggcgagtctgttgcttcgcgtgtcgcagagtggattcccagccacggcgtaatcgcttggtttttgcagcgcgacacggtggatccaattcaatatgtcaatacttggttacgtgacgagtctatcgatccccgctctgaaattggttttaagcgaacgctgtcatggttggaccatttttcgagagctaaagtcgaagctgtgggatttggctatgtagccatccaacgtgtcgatgattccattccttctgaagtttattttgaggagttgacgcatcaggttgacgattacctcggtgatgagattgaagagttttttgtgcgtgtggattggcttcgtgaaaaaaaccgtgacggcatcgcacagtcacagttttatctacggccaggggttgcgaaagaatccgtttcagtcaccgacattgactctggaatgggatttacacatctcaaatatcgaatcacgcggactgaaggtccacgctggagccatgaggttgacgaacacattgtttctgtcatcgctggattacatcctgaaggcttgacgcttgaagacgtcgccacgctttatgcggtcagtaatgggcttgacgacgagtcctttgttgatgccattattgatccagtcgtggcccttgtccgccacggtattcttctaccagccgagatcacaaagggatgg

SEQ ID NO: 17565 - DNA, 3354 bp, Cornyebacterium diptheriae
atgccaaagcgcaatgacatcaaacacgtcctggttatcggttccggtccaatcgttatcggacaagcgtgtgagtttgactattccggaacacaagcgtgccgagttcttaaagaagaaggacttcgcgtcactttgatcaactcgaatccggcgacaatcatgacggatccagagtttgctgatcatacatatgttgagccgattgagccggaatatattgaaaagatttttgaaaaagagatcgctgagggacaccccgttgatgctgtcttggcaacacttggtgggcaaacggcattgaatgccgctatcaaattagatcgtcgcggatctctcgaaaaatacaacgtagaactcatcggtgcagacatcgacgccattgagcgcggcgaggaccgccagaaattcaaagatatcgttgcgaaaattggcggcgaatcagcgcgttcccgtgtatgccacaatatgcaagaggtatatgacaccgttgaagagctcggccttccggtagttgtacgcccttccttcactatgggcggtttggggtccggacttgccttcaatcaagaggatctcgaacgaattgccggcggtggactcgcagcgtctcccgaagcaaacgtgcttattgaagaatcaattcttggctggaaagaatatgagcttgagctcatgcgtgatggtgctgataacgttgtggttatttgttccattgaaaatgttgatgcactaggcgtacacacaggtgattctgttactgtcgcacctgctttgactctgactgatcgtgaataccaaaagatgcgtaatcaaggcatcgcgattattcgtgaagtaggggtcgacaccggtggatgtaacatccaatttgcggtaaatccacgtgatggtcgtttgatcaccattgagatgaatcctcgtgtatctaggtcatccgcccttgcatcgaaagcaacgggattccccatcgctaagattgctgccaagttggctatcggatacacgctggatgaaattactaatgacatcaccggtgttacgccggcggctttcgagccaacgctcgattacgtagtagtcaagtctccgcgctttgcgtttgagaagttcacaggatccgacgacacattgactacaacgatgaagtccgttggtgaggcaatggctcttggccgtaattacatcgcggcgttgggtaaagtcatgcgttcgctagaaaacaagcaagttggtttctggacaacaagtgatgaattctttgctggggatcgcgctaagaatcttgacgcagtgttagaagatctgaaacgcccgacagaagggcggatgtatgacgtggagctggctcttcgccttggcggctcaattgaagaagtacatcaagcgtctgggcttgatccatggttcttggcggagcttcagtcattaatagatttccgagaatccttgatgaaggcaccggtgctggatgagccgttgcttcgaaaagccaaattcttcggattgtctgaccgccaaatcgcggcccttcgtcccgaatttgcaggggaagacggcgttcgtcgcttgcgatggtcattgggagtacggccagtatttaagactgtagatacgtgcgctgcagaatttgaagctacgactccataccattattcagcatatgaactcgatccagctgctgaatcggaagtacgtcctcaaactgaaaaagacaagatcatcattttgggatcaggtccgaaccgaattggccaaggtattgagtttgactactcatgtgttcatgctgcgctcgaactttcacgcgtggggtatgagacagttatggttaactgcaacccagaaaccgtgtcgacagattatgacaccgctgaccgtctgtatttcgagccactgacatttgaagatgttatggaggtctaccacgccgaatcagaatctggacatgttgccggtgtgatcgttcagcttggcggacaaactccacttggactagccgaaaagcttcgtgatgcgggtgtcccggtcattggtactactccagaggctatcgatctagctgaagatcgaggagaattcggtgaagtattgcgtaaagcgcaattgccagctccagctttcggtaccgctacatcatttgaggaagctaaaactgttgccaataacattggttacccagtattagttcgtccatcttacgtcttgggcggccgtggcatggaaatcgtatacgacgaaaattccttgcacgcgtacatcgagcgagctaccgagatcacgagtgatcacccagtgctcgtggatcgctttttagataatgcgattgaaattgacgttgatgcgctttgtgatggcgaaaatgtctaccttgctggtgttatggaacacattgaagaagctggtattcactccggtgactctgcttgtgcgctgccacctatgacgctaggtgccgaagatatcgaaaatgtccgtcgctcaacagaagcgttggcacatggtatcggcgttaaaggattgatgaatgttcaatatgccttgaaggatgacattctttatgtgattgaggccaaccctcgtgcatctcgtacagtgccttttgtctccaaagctacgggtgtccacttagcaaaagcagcagcgcgaatcatgactggggcaacgattcctgagcttcaagcggagggaatgattccaaccggttacgatggtggttctttgccagagaattcgccgattgcggtgaaggaagcagtacttccgttcaatcgattccgtcgtcctgatggcacaatgttggatactttgctaagtcctgagatgaaatcaacgggcgaagtcatggggctggctgataattttggtgctgcatatgctaaggcagaacaggcggcttttggtgcacttccaactgaaggcactgtcttcgtatcagtagcaaaccgcgataagcgtactttgattttcccaattcagcgcctagcttcacttggattccgagtactggcaacatcaggcacagccggaatgctacgtcgcaatggtattgaatgcgaagttgtattgaagcagacccaagtgcaggaagcacgacaaaacggcactgaggggcagcgttccgtagtggatatgattaaagccggcgaggtggacctcattcttaatacacctgcagggtcttcaggagcgcgtcacgacggttaccagattcgcgcagcggcagtcaacgttggcgttcctctggttactaccgtgcaaggtgttactgcggcagtacagggaatcgaagcgcttagggctggtgagctcagcgttcgagcgctgcaagagctagatcattcggtgactcga

SEQ ID NO: 17566 - DNA, 1179 bp, Cornyebacterium diptheriae
ttgatatccgtgtacccaaaaacaaaagtgaaaggcgacagagtgacgtcccaagatcgaagtgaagccgtacttgtgttggcagatggccgcatatttaaaggagagtctttcggcgcggaaggagcgactctaggcgaagcagtttttactacggcaatgagtggttatcaagagaccatgacagatccgtcgtatcaccgtcagattgtggtagctacggctccgcagatcggtaacaccggctggaatgatgaagacggtgaatcccatggtgacaagatttgggttgctggtcttgtgattcgggatttgtctacggctgtatctaactggcgcgcaaagcgcagcttggaagatgaaatgcgcgaacagaacattgtcggaatttctggtgtggatacacgtgcaatagtccggcatttacgtaatttcggttcagtcgctgcaggtattttctcaggagaggcggcgaagcagcctcatgatgagctcattgagatagtaaaatcacagccttcaatggcaggagcagacttagctagcgaggtatctacccaagaagcttatgtcgtagaaccagacggtgaagcactttataccgttgttgcttatgacatgggtattaagacgaacactcctcgtaatttctcccgtcgtggaattagaacggtagtcgttcctgcaaatactcctgcagaggacatcgctcaatataaccccgacggtgtttttgtatccaatggtcctggcgatccagctactgccgatgtgatggtagggatcgtgcaagaaattctggcacagaaaattccatttttcggaatttgctttggcaaccagattcttggtcgtgcactaggaatgaacacctacaaaatgaaatttggccaccgtggtatcaacgttcctgttttgaatcatctcactgggaaaattgatattacagcgcaaaaccatggatttgcactagaaggcacagcgcttgagcaatttgacacgccgttcggccctgcccatgtaacgcatacttgccttaacgacgacactgtggaaggtgtagcgctggtgaatggtttggcttactcagtgcagtatcaccctgaagccgcagcgggcccgcatgatgcaaatcctttgtttgaccagtttgtcgagcttattcaagcaaataagaaa

SEQ ID NO: 17567 - DNA, 1344 bp, Cornyebacterium diptheriae
atgagtactcaaaattatccagcaactggccgactcgccgagccggaatatggcactctgctagtcaaaaacgtgaagatctacggagagggtgagcctgtcaacgtcttgatcactgatggggtgatcactgacactcacgctggtgatgtaaaagcagatcgtgaagtagacggccaaggcggagttttgcttcctggccttgtagatattcacgttcatcttcgagaaccaggccgcgaggatactgaaacaattgcgactggttcagctgccgctgcgaagggcggtttcacggctgtattcacaatggcaaacacaatgcctgtaatggatcaaccgattatcgcagagtcagtgtggcataaaggccaagatattggactttgcgacgttcaccctgtcggatcgataacaaagggtcttgagggcaaagaaatcaccgaatttggcatgatggcacattctcaggccaaggttcgtatgttctccgatgacggaaagtgcgtcgataatccactgatcatgcgtcgagcagttgagtatgcacggggtacggatgtgctactagcacaacattgcgaggatcctcgattgactgacggggcagtcgctcacgaaggcgcaatggcagccaaactcggtttgggcggttggccacgcgttgcagaagagtcgatcgtggcgcgagatgcaatcttagcccgcgattatggcgggcgtatgcacatctgtcatgcttcaacacaaggaactgttgaacttgttaaatgggcgaaagaacatgaaattccactgacagccgaagttactccgcaccatttattgctaactgatgaacgactcgccacatatgacggtgtaaatcgtgttaatccgccacttcgtgaaaactccgatattctcgcattacgtgacgcattgctcaacggaactattgactgcgtagcaactgaccatgcaccgcacgggtccgaagataaatgttgcgaatttgaacatgcgaaaccaggtatgttgggcttggagacttccttagcagtggttgcagcagtcttcgtggaaactggactcgcagattggcgttttgtagccaaagtcatgagtgagcgtcctgcagaaatcgtcaaacttcctggccatggccggccaatcgcagtcggtgagccagcgaatttaacgatcgtagatccaggtgccaagtggactgcttcgggtgaaaagatggcgtccaaagcaacaaatacgccatatgagggcatggaatttaatgcgcgggtaacgaccacgattttgcgcggtcgtctgacctgtgtcgatggtgaaccaactcaagcacgagcg

SEQ ID NO: 17568 - DNA, 594 bp, Cornyebacterium diptheriae
gtgtctatcttgactgttggcgaaaagttcccagagtttaacttgacggcgctcaagggcggtgacctgcacgacgttaacgcatctcagccagaggactacttcgaaactgtttctttggacaagtacgaaggtaagtggaaggttgtcttcttctacccaaaggatttcaccttcgtgtgcccaactgagattgcagctttcggcaagctcgacgaagagttccaggaccgcgacactcagatcttgggcggctccattgacaacgagttctcacactttaactggcgtgctacccacccagagctcaagaccgttccattcccattgttctccgacatcaagcatgatctgatcaaggctcttggtgttgaaaacgaagaaggcgttgcagatcgtgcaactttcattatcgatcctgacggcatcattcagttcgtatctgttactccagatgcggttggccgtaacgtagatgaggttcttcgtgttctcgacgcacttcagtctgaagaggtctgtgcctgcaactggcagaagaacgacccaaccaagaacattgataagttcgctgagcttgagaagggcctcaac

SEQ ID NO: 17569 - DNA, 600 bp, Cornyebacterium diptheriae
atggtgtccgcctctgcgatcggatactacggacatgcgcgtggagacgaaattcttgatgaaggatccactcaaggcgacgacttcctagccagtgtgtgcgaggaatgggaagcagccagccgcacggatgcgacctcaaataagcgtatcgtcaacattcggacgggtgtggtaatgagcggtcgtggcggaatgcttccagttcttaaagctgtgttttctgtaggacttggtggaccatttcgcggcagcaatccgtggatgtcatggattgctattgacgatctctgcgatatttatattcgtgctgtgcttgatccaaagctttcaggtgctatcaatgcagtagcccctaatccaatcaaaaatcaagattttgtcgatgcacttgcgaaagagctcaagcgaccggcaaaaatgacgatttcatctttaggtccagcaattctgcttggacaacagggggcaaaggaattagccttagcggatcaacgcgtccagccacgtgttttaaacaatttggaccaccactttcgctatgtcgatattcgtagttgcctggcacacgaactcggtggcgaaaaccttctcgatatt

SEQ ID NO: 17570 - DNA, 597 bp, Cornyebacterium diptheriae
gtgaaccctgaagatgaaaatacctctcagacgaaaaaaccggctgaggaattgaagtctcaagagactaggtcttcttggaaacgtcgtggtagccgctacaaagcgcgtaggcgtgcggtggatattctttttgaggcagaaatgcgggatatcgaccccgttgctatcgttgaagaccgagttgtgctttcgcgactaaacggaacagacgtgaatcaagttcctagctacactaaagaaattgtttctggtgcagctatggagctggaccgactcgatgaactgattgcagcccatttggccgaggattggtcgttggagcggatcatgactgttgatcgcgcaatccttcgcgtcagtgtctgggaattgatcttcaatcccgatgttcctttggctaccgcaattatcgaaggcgtagaactagcgagtgaatattcaacggatgtatcaccagcatacgttcacgcgcttctcgacagtatcgctaagaatattgacgaatatcgcgccggctcggtgacacctgttgaaaacagcgaagccgaagcggctggttatccagttgaagaatcaatcgaagaagactcacag

SEQ ID NO: 17571 - DNA, 1086 bp, Cornyebacterium diptheriae
gtggaacagcaggaaaagcgtggcacagtccgtaaggctctgcttggcagcgtcatcggttttggtggcctagctcttgcgggttgtgacgttgaggctccaggtggcccattgggtaccgctttgggattcgggtggccaaagggcattaccccagaagctacctcgatgtacaacttctgggtttgggtttgggtaacggcatggattatcggctttatcatgtggggcctgtttatctatggcatgttctcgtggagcgcaaagcgcgcaaagaaagctggcaaggatgaattcccgcgccagactcagtacaacatcccattggagcttgtactgaccatcgtgccaatcatcattgttatggcattgttcttcttcacggtgcaaacccaggacaaagtcacggcaatggacaaggatccaaaggttaccgttgacgtcaccggataccagtggaactggaagttcggatatgcaaaggttgccggtgagctttccccaaccggttccgattatgttggcaccgatgagaagcgtcaggaagcagctgagaagaccaagtttgatcagggcggcgacaatccgaacccgattaacggtcgttccaagacggatacctcttaccttcacttcaacaagattgaaaccttgggtacctctgaagaaattccagttttggttcttccttccaatactccagttgaattcgatctagcttctgcagacgtatctcacgctttctgggttcctgagttcctcttcaagcgtgacgcatacaaccacccagagcagaacaagcagcagcgtaggttccagatcgaaaagattgaaaaagaaggcgcattcgtgggccgctgtgcagaaatgtgcggtacctaccatgcaatgatgaacttcgaaatccgcgttgtatctcctgagaaatttgctcagtacctcaagttccgtaacgataatccacaggcaaccaactcggacgcattgaagtcgatcggtgaggctccatacgcaaccagcacccacccattcaactcggagcgcgctacgcgtgacggtgcgaacttcgacgataccgctgcggcg

SEQ ID NO: 17572 - DNA, 1920 bp, Cornyebacterium diptheriae
atgtgtggacttctaggcatgctctccagcacaggacaggccagtaagtatgcagctgctatagaaagtgctttgccgtgcatgcaccaccgaggccctgacgaagcaggtacttggcatgacgaccatgcagtttttggctttaatcgcctatcgatcatcgatctcgagcattctcaccagcccttgcgatgggggcctgaaggcgagcccgaccgctatgccatgacttttaatggcgagatctacaactatgtagagctacgaaaaaaacttcaagacctcggctacacctttaacacttcaggcgacggcgaaactattgctgtcggtttccaccactggggtgcagatgtagtgcttcacttgcgcggaatgtttggcatagccatctgggacaccaaggaacaacgtcttttcttggcccgcgatcaatttggcatcaagccgttgtactttgctactaccgaagctggcaccgttttcgcctcggagaaaaagtgcatcttgggtatggcagatgctattggtctagatttaggacttgaccaacgtgctatcgaacactacatcgatcttcaatacgttccagagcctgaaagtcttcatcagcacattcgacgcctggagtctggctgctttgctttcgtttctgtgggaggcaatgtcgagcagactcgttacttccgtcctcagttccccgcacaagaattcccaaaggacaaggaacaggatctcttcgatcgaatcgccaaggccctagaagatagcgtcgaaaagcacatgcgtgccgacgtcactgtcggttctttcctgtctggcggcatcgactccactgcgattgcaactttggcaaaacgccataatccgaatctgttgacattcactacaggatttgaacgcgaaggatattcggaagtcgatgtggctgcagaatccgctgctgccattggagtagaacatatcgttaagattgtctctcccgaggaatatgccaatgccattcctcaaatcatgtggtacttggatgatccagtagctgatccctccctagtcccactattcttcgttgctcaagaagcccgcaagcatgtcaaagtggtgttgtcaggcgaaggagcagacgaactatttggtggttacaccatttacaaagagccgctttctcttgctccatttgaaaagattccttccccgctacgtcgcggtcttggcaaagtagccgaagttttccctgacggaatgcgtggtaaatccttgctccaacgcggttcgatgacgatggaagagcgttattacggaaatgctcgttccttcaattttgatcaaatgaagcgcgttatcccatgggccaagaaggaatgggatcaccgcgaagtcaccgcaccgatctacgcccagtctgagcacatggaccccgttgcgcgaatgcagcatttggaccttttcacgtggatgcgcggcgatatcctcgtcaaggccgacaagatcaacatggctcactccttggagcttcgcgtcccgttcttggataaggaagtatttgaggttgctgaaaccattccttatgacctcaagattgctaacggaacgaccaaatatgcgttgcgtaaggccatggaacaaatcgttccgccgcacgtgctacaccgcaagaaactcggattcccagtgcctatgcgccactggctagctggcgatgagctgttcggttgggctcaagacaccattaatgagtcgatgaccgaccaatactttgacaaggcagcagtcttagcaatgctcaatgagcacaagaatggtgtatctgatcattcccgcaggctatggacagtccttgcctttatgatttggcacggaattttcgtcgagcaccgcattgatccaggcatcgagaaacgcgattatcctgtgtaccta

SEQ ID NO: 17573 - DNA, 1692 bp, Cornyebacterium diptheriae
ttgaataacgtgatgacagacacaattattaagggtactggcgtagtttccggtgtccgttatgccaaagccgtgtggattagcccgcggccaaagctgccccaggcaggagaggttgttgacgaagctgatcgtgctcaacagctagataacttcgttgcagcggcagatgctgtggcacaacgccttcttgatcgttccgaacatgccgagggtgcagcctcggaggtgctaaaagctactgcaggaatggtcaaagaccgcggctggcagaaggccgtcaagaaaggcattcaaggcggacacccagctgagtatgcagttgttgctgcgaccaccaagtttgtttcaatgtttgaggcagctggcggtgtaatggcggagcgtacaacagaccttcgcgatattcgcgatcgcgtgattgctgagctacgaggagatcttgaacctggacttccagatgttcatgagcaggttgtgcttttcgctgatgacctttcccccgcagataccgcagccttgaataccgactattttgtcggtcttgtaactgagttgggtggtccaaccagccacaccgcgattattgcacgccagctcaacgttccttgcattgtcgcaaccggtgagaaaattcacaagattgaagttggtacagacgtgcttatcgacggtgcattgggcaccgtgactctcgacgcagatcctgaaaccgctcgtgcagctgaactggaatcgcgcatgctagctgagcgcatcgcgcagtggaaaggaccagccgaaactaaggacggtcatcgagtgcagctacttgcgaacgtacaagatggaaaagctgcacggatcgctgcaacggagagtcaggctgaaggtattgggttattccgtactgaaatgtgcttcttgaccgctacagaagaaccaagcgttgatgaacaagcggctgtctacaaaaaagttttggaacaattcccagattccaaggttgttgttcgttcgctagatgccggttctgacaaaccagttgcctttgcgtctatggctgacgagatgaatcctgctctgggcgttcgcggccttcgcgtagcccgtgctaatgagtcattgttgactcgccagttggacgctatcgcacaggccgctcatgagcttggtcgagatgagaattccccaacttgggttatggcacctatggtggccacaacacgagaggcacgctggttcgcagggctttgcgcagaacgaggattaaccgctggtgcaatgattgaggtccctgcagcgtcgctaatggcagataagctcatgccatatctggatttcgtctctattggtaccaatgatctcacccagtacaccatggcagcagacagaatgtctcctcagcttgcatatctgacagatccatggcagcccgcagtgttgcgtttgattaagcacacttgtgaagaaggcaagcgttttaacaccgctgtgggtgtatgtggcgaggctgcagcagacccattgttggcatgtgtccttactggtttaggcgtcaattcgctgtcagctgcatcgacggcgatcgcgggtgtgggtgcacaattggcatctgttgattttgaaacatgtgtccgtgctgcagaagcagctgtcaatgcagaaggtgcaattgatgcacgagcggctgtgcgtaaggtattgcagcct

SEQ ID NO: 17574 - DNA, 963 bp, Cornyebacterium diptheriae
gtgattctgacgtttaccccaaatcccagcatcgataagaccctccagttggattccgtacttactcgaggcgcagtacaacgcttatcaggcgtacaaacagttgcaggaggaaaggggataaatgttgccgttgctttagcaaaggcgcaggccgacaccgtagcgctttacccagcccacccagaagatccatttaataagctgatccgagagtcccaaattccagcgcaaagagtgacaatccgcggtgaagtgcgaataaacacgacagtgactgaacctgacggcacaaccacaaagctcaatattcaaggcccgcaaattcacgaggacgagttacaagccttgcagaaaaacctcctagaacgcacggcacgttgttcatgggcagttctcgcaggttccttgcctccaggagttcctactgactggtatgtacatctgacaaaattgctcaacgctcgccatccctcgctgcgaattgctattgacacttccgacgtaccattgcaaaaagttggggaatcattcggcaactgtgcactgtcgctaataaaacccaatggtatggaacttggtcaacttgttgggcttgatggctacgttttggaaaaagaagcagcgcaaggaaacttcgaccccgttgtcagcgcagcccgtaaagcaatcctccaaggtgttgaaaatgtgctcgtaactctaggcgctgctggcgccgtattagttactaaagatcatgcgtggaaagctacgcccccacccattactgtcctttctacagtgggagctggggacgcctccttagccggttttattcttgcgtcggaagatgggctgcctccggaaaaatgcctagctcaggctgtcgcttacggcgcagccgctgctagttttgcaggcactcacatgccatatcctcatcaaatcgacgtcaatcacacacctgtcactctcctttcc

SEQ ID NO: 17575 - DNA, 1209 bp, Cornyebacterium diptheriae
atgcttcgttggacaactgctggagaatcacacggacaagcattgattgcaatgctcgaacacatgcccgctggtgtgcctattagccgagaggaaatttcctttcaactaggcagacggcgtcttggttttggacgtggggcacgaatgaaatttgaagctgacgaggtaagcattctgggtggtgttcgtcatgggtatacgattggcagcccaatcgcaattatggttggaaacactgagtggccaaaatggacgaccattatgtctgcagatgcaattgacgagtctgatcctgatgttgccgcagctatgtcttctggacgcggagcccgtctgacgcggccccgtcctggacatgctgattttgcaggaatggtcaaatataatcatgatgaagctcgaccgattttagagcgatcctcagcacgagagactgctgcgcgagtagctgcagccacagttgcacggagctttctgcgtgaaacgcttggcgtggaagtattctcgcatgttatttccattggtcgctcggaaattgatcaaacagtttgcccaacatttgaggacttaggaaggattgatgattctcctgtccgttcagcttcagcacaagcggaagcgagcatgatagatcaaattaatgcagctaaaaaacaaggagatacccttggcggcattgttgaggtcatcgttaacggccttcctatcggcttaggctctcatatttcaggcgaggatcgactagatgcacagcttgcagcggccctcatgggcatccaagcaataaaaggcgtggaaatcggtgacggatttgaagaagcccgaaggctaggttcagaagcacatgatgagattgtgttgagggacggcgtagttgcacgacaaagtaacagggcaggtggcatcgaaggtggtatgaccaatggagaaagccttcgagtacgtgcagcaatgaagccaatttcgaccgtgcctcgagcattacaatccattgatatggattctggtaaacgtgctactggaatccatcagcgatctgacgtatgtgctgttcctgcagctggtgttgttgcagaagcaatggttgcgttggttttagcgcgagcagtgttggaaaaatttggtggcgattccttagccgagacgaagcgaaatatcgctgcttataacgaatacgttaaaacccggattgcattcgatggtgag

SEQ ID NO: 17576 - DNA, 867 bp, Cornyebacterium diptheriae
ttgccaggtcattttatactgaccattatgattcactttcgagcagccgtcttaggacaccccattgagcattccttatctccgttacttcataacgctggttatgcggctttaggtctttcgcaatggtcttatggacgatttgattgtgattcacagcagttatctgaattagtcgataaatgtgatccatcatttcagggtttctcagtaacaatgccgtgcaaatttgaggcgttagaatacgcaacgtcggtaagcgaacgtgcacagagaattggctctgcaaatactttggtccgagctgaaaatggctggtatgcggacaacacggatacagagggggttcgcggtgccttggagatcctttttagtgatcggggcggtgctgcggaggcactcaaaaatacaagggcaatagttgtcggtgctggaggtacgtctcggccagcaatctggacattaggtactttaggcgtcgcagaaatagttgtggtcaatagaagcgatcgtcgtgaagaattggaaccagttctagaaggggaacccaccaaaataagttttgttgggtttgattcaaatcttcggtcacacgcgcagtcagcttcagtggttatttcgactgtgccgtctgttggggtgtcagattatattgatgacctagtgcatgctccagttctcgatgtcatttatgatccgtggccgacaccattaatccaacatgctcaaaagaaaggcgtgccgtgtataggtggacacataatgcttttgcaccaagctttgagccagtttgaacaatttacgggggtaaaggcacctcgcgaagcaatgcaaaaagcactgtttgaccacctgtttggggacaat

SEQ ID NO: 17577 - DNA, 1953 bp, Cornyebacterium diptheriae
gacaattcactcatcgccctcgcccctgcttaggatagcgataaaacatcaatcatcaaggagctttatcatgtaatgaaaacagctggagttacggatgacgtcgacacgctgattgccgataccctcactcgcgaagaatctggcagcaccgcactcccccaaggcgttgcgattccgcattgcagaacgtcagccgtagcacatcctgtgatcgcttttgcatcactaagcaaacaagtgcttttcgacggttcccaaaatcctgtggatttagtctttctcattgtagttccactcgatgcgaaaagagctcacctcaaaattctttcaaccttggcgcgagcattgatcaatcaatcagccgaagcatccttgcgtgctgcgactactccaacacaggtagaagcaattatttctgcatcgctagattcaaaaactgcaatgcggaaaataatgcaccgagttctcctataaggattgcggcaacaaccgcatgtcctactgggatcgcccatacctatatggcagcggatgcacttacctcggccgcgaaagcacgtggcgacgcctcattgttagtagaaactcaaggcacttctgacaactcagtattaagtgaaaaagagatcgcttcagctgatgttgttatctttgcagccgatgtgggagtgcgtgaccatgagcgattcaaaggaaaacgaatccttgaatgcagcccacgacaagctatccgcgaccccaacgacacccttagcgccgcaatcgcactcaagaattcttcaagaaatacgacagttcgaccacatgcaactcatcgtgtagcagcaacagcctacgatttagaacgaaaaatgcgccacgctgcgatgactggtgtttcctacatggttccgttcgtagcagccggcggattactgttagccctcggatttcttttgggaggctacgacatagctgctggatggcaggcaattgccattcagcattcgttcactgatctgcccagccacgatgtggtcatcgatatagcaacaggacagtcgtatcatttcagcgctctggccttttgctttatcttggcgctgtggcttttgctatcgactcaatgtcaatgcaatttattgtggctgcactttcaggatacattgcgtttgctatcgctggacgctcaggaatagctccaggttatatcggcggtgcggtatcagtcttcgttggcgcaggatttttgggcggattagtcaccgggctactgtctggaacgcttgcatggtggctttctacgaggcgggttcccgcacttatctcgtcgcttatgcccatagtaattgttccgctcatttccagtcttttgtgggtttgatcatgttcttagttttaggcaaacccctttcattgttgctgttatccctccaaaactggctggcaggactatcgggttcttcagccatcattcttggggcagtgctgggacttatgatgtgtttcgacctcggtggccctgtaaataaagcagcatatttatttgttaccgcaggcctgtccaccaatgaacctgctgcgcttcatattatggcggcagtcatggtcgcaggtatgctccccccgattgcactttctttagccaccattatggataaaaaagtgtttacagataccgaacgagaaaacggaaaatcagcgtggcttttaggactttccttcatttctgaaggagcgatccctttttaccgcaggtgatcgattagggtgataccatcattgatgattggaggcgcatcagctggcgcaatttccatggggaccgcgactggctcgcatgctccgcatggcggaatttttgtactctttgcgatttctccagcgtggacattcctcttagctctactcattggcgtgattgtttccgcgctcatcgtcattctcttaaagcgtatgtggcgcgttcca

SEQ ID NO: 17578 - DNA, 264 bp, Cornyebacterium diptheriae
atggcttccaagaccgtttctgtcggatcctccgtcggcctgcatgcacgcccagcgtcgattattgcagaggcagccggtgaatttgatgaggatatcttcctcaccatcgaaggcgaagacgatgatgagactgatgcagcttcgtctcttatgatcatggctttgggtgcagagaagggcgataaggttaccgtcacctccgaaaaccctgaggctgttgagaagatcgcagctttgatcgaaaaggatctcgacgccgtt

SEQ ID NO: 17579 - DNA, 513 bp, Cornyebacterium diptheriae
atggtagttcaaccggatattcccggagataacgatcctgggatggggcgacgactcggcgttgatgtaggtacagttcgaattggattagcaatgtccgattctggtgctcgtatggcaatgccattcgaaacactcgcgcgtgaaacaggactcaaagacagtgataagcaagacattgacagaattgcagaagtaatttgtgacaatcatatagtagaagtagttgtcgggcttccgcgagatctaaaaggaaatggctcaaaaagcgtcaaacatgccaaagatgtcgcttttagaattcgacgtcggatgcataaaaacgggtgggaacatgttgcagtgaaaatggctgatgagcgtctaaccacagtggttgcaacacaagctctcagagcctctggtgtttcagagaaaaaggggagaagggtggttgaccaagccgcagcagtagaaattcttcaatcttggttggatgcccgaatcaacgtactagagaatcggacaatcccg

SEQ ID NO: 17580 - DNA, 2664 bp, Cornyebacterium diptheriae
gtgcagacccatgaaattcgggaacgctttactaatcacttcgtcaaggctggacacgaagctgttccaagcgcgtcgttgattcttgacgacccgaacctgctgttcgtcaacgcaggtatggttccgttcaaaccatacttcttgggtcaacagaacccaccgtttcctaatggcaccgcaacgtcgattcaaaaatgcgtacgcacccttgatatcgaagaagtaggtattactacccgtcacaatacgttttttcagatggcgggtaacttctccttcggtcaatactttaaagaaggcgcgatcacacatgcgtggcagctgctcactggaacggtcgctgaaggtggcttggggttagatcctgagcgcctgtgggtcacggtctaccttgatgacgacgaagctgcagaaatctggaacaaaaagattggtgttcctagcgaacgcatccagcgactaggcatggcggataattactggtcaatgggtatcccaggcccttgcggtccatgctcggagatttactatgaccgtggtcccgaatatggtgctgaaggtggtccaattgctgatgacaaccgctacatggaaatctggaatttggttttcatggaaaatgagcgtggagaaggcatcggcaaggataattttgaaattgtcggaccgcttcctaaaaagaacattgacaccggaatgggtattgagcgtgttgcttgtatccttcagggagtagacaatgtctacgaaactgatctgttgcggccagttattaatgttgcagaagagctgaccggagcaacttacggtacgaatgacgacgataacattcgtttccgtgtgattgcggaccactctcgtacgggcatgatgcttattcttgacggagtgactcccggaaatgaaggacgcggatacattctgcgtcgcctgttgcgtcgcatcatccgatctgctcatttgcttggtgctaagggtaagacgcttgaaaagttcatgaacaccatcatggatacgatgactccctcatatccagaaattgcggataaccgtgagcgtattcttcgagttgcgatcaccgaagaaaaggcattccttaaaactttggcgtcaggaaccgagcttttcgaagacaaagcagaccaggtaaagaattccggaaataaagttcttgatggtgcagctgcttttaagcttcacgatacctacggtttccccatcgatctgacgcttgagatggcagctgaagcgggactcaacgttgatattgaaggctttaactcattgatggcggagcagcgcgcacgagcaaaagccgacaatcgcgctaaaaaacatgggcacgctgatttgtccatataccgtgaatgggtagatgagcatcctacagtctttactggctatgatgagctcacgaccgattccaaggtattgggtctattgtccgccggcaacaaggttaacgaaatcaaagccggtgaagaagtcgaagtaattctggaagcatctccgctttatgcagaagcaggtggccagttaggcgaccgcggtcaaattctcatgggcgacacggtgctaaaagtcaatgacgtccaaaaaattggaaagaagctctgggttcataaggctactgtggcacagggcggactgagcgttggcgatgtcgtaaccgcacaggtagatagtgactggcgccatgctgctcgacaagcacacacaggaacgcacttgatccatgctgctctccgccaggtacttggtcctactgcggttcaggctggttctatgaacaagcctggctatcttcgctttgactttaactacactgaaagcttgacgccacggcagctggaagaaattcagaacataactaaccaagccgttgactccgattgggatgttaataccattgaaacctctctcgaggaggcaaaagcaatgggagcactggccttgttcggtgagaattatggatcggaagttcgtgtgatcgaagttggtggaccattctccatcgagctgtgcggtggtacccacgtaacacattcttcgcaaatcggtcctgttgcaattttgggtgaatcttctgtgggatcaggcgtacgtcgcatcgaggcgtacacaggactcgattccttcaagtacttggccaaagagcaagcgcttgtagaaaacatcgcatcctccatgaaagttaagccggaagagttaccagatcgtattgctgcattgactcaaaagcttaaagacgctgaaaaagctattgccgatatgcgttcggctcaattgatggcccaagctacgggactagttgcaggggccatagaggtcaatggggtcaaacttgttgctcagcgagtctctgatgtggaaaacatgggtgatctgcgttctcttgctgcagatattaaacaacgcttagacgatgttcctgcagtggttgctttggtgggcgaagacgcctccggtaaggcaccatttgttgtcggcgctacaaaggctgctgtttccgcaggatataaagcgaatgcatacgcaaagatcctaggacagtacattgaaggaaatggcggtggaaagccagacatggctcaagggtctgcacgaaactctagtggattcgatcaaggaattgcagctgtaaaggcagagatgtcagca

SEQ ID NO: 17581 - DNA, 1113 bp, Cornyebacterium diptheriae
ttgaagtccatgagctctattacgtttaagaaaatcgatcatccgaacccaactccagcagacaaagtacaagaaattgttgccaaccccggctttggcaagtatttcaccgaccacatggtcactatcgattggaacgaaactgaaggctggcacaatgcacaggtacagccatatgcgccagtgtccttggaccctgctgcctcggtgttccactacggacaagcaattttcgaaggcctgaaagcctaccgccatgccgatggcaccatccgtaccttccgtccggaagcaaatgcggcgcgtttccagcgctccgctcagcgtttggctatgccagagcttcctatcgaggtctttatcgagtcaatccagcagcttgtctcagtagaccacgactgggttccagcagccggtggtgaggaatcgctctatctgcgcccattcatgatcgctaccgagaccacgttgggtgttcattcctcgaagtcttaccgctattttgttattgcttcgccagccggtgcctatttctctggtggcatcaagcctgtgtccgtatggctgtctgaagattacgttcgtgcagctcctggtggtactggtgcggctaagttcgcaggtaactacgcagcatcgctcatcgcacaaacccaggcagcagaaaaaggctgcgatcaggttgtatggctcgatgcaatcgagcacaactacatcgaagagatgggcggaatgaacctcttcttcgtcatgggcaaaggggatcaggctcacgtgattaccccgaagctgtccggttcactgcttcctggtgttacccgtgattctttgcttcaggttgctcgcgatcttggctacaccactgaagaacgcttggtgtctaagggcgagtgggaagaaaccgctacgagcggagctatgagcgaagcatttgcttgcggtactgcggccgtgattaccccagttggatctgtgaagtccacccatggtgagttcttggtaaacaacaacgaggcaggttcgatcaccatgcagcttcgtgaggcacttactggaatccagcgcggcagcgttgctgatactcacggatggatgcacactctcgtagaggcg

SEQ ID NO: 17582 - DNA, 1356 bp, Cornyebacterium diptheriae
atggactctctttttgattctccagtccaaactgctcggtcatctagtgattcagatgctcataactttttcaaagcagggccgtatgcaccattggcagcacgcatgcgccctcaatcgttggatgaagttgtggggcaacgccatctgttagattctgggaagcctctacagcggctaattgctggatccggtgatgcctctgtgattttatatggacctccaggaactggtaagaccacgattgcttcgttgataagtgctggtactggccatgaatttgttggattatctgcattaaattctggcgtgaaagaaatcagagaggttatcgatcaagcaaggcgaaatcttattcatggaaaacggacggtcttatttatcgacgaggtccatcgtttttccaagacgcaacaagacgccttacttgctgccgtagaaaaccgaacagttttgttggttgcagctacaactgaaaatccttcgttttccgtagtggcgccgttgctttcgcgttctctcattttgcaattaaaacctttaactcacgacgatattaaaaccgtgttgttacatgctttgcaagataaaagaggtcttgataatcgaatcactatttctgacgaagcgttggaacaactagttctcctttcaggcggcgatgcacggcgttcattaacttatttagaagcggcatctgaatctttagccgatggggaagagctaacgcctgagatcattcggcacaatgttgacaaagctattgttcgatatgatcgcgatggagatcagcattatgacgttgtgagtgccttcattaagtcgatgaggggctctgatgtcgatgctgcattgcattacctcgccagaatgattgatgcaggagaagacccccgttttatcgcgcgtcgtcttgtgattcacgccagcgaagacgtcggcatggcggatcctcaagcgttgagcgtagcagtagcggcgagtcaagcagtcgctttgattggtatgccagaagcacgtatcaatttagcgcaggcaactattcacttggcgacggcgccaaaatccaacgctgtgataactgcgattgatgctgcgctggcagacgtaaagcaaggtaaaacaggcccagttccagcgcatctgcgtgatggtcattatgcgggtgccaagcaactgggaaacgccgttgggtataagtacccgcatgatgatcctcgaggaattgtcgagcagcaatatatccctaacggacttgaggatgttgtttattatcgcccaagcgagcatggggcagaacaacggatcgagagttacttaggcaagttgcgtaggattgtacgagggcaacgtcga

SEQ ID NO: 17583 - DNA, 1284 bp, Cornyebacterium diptheriae
gtgagtacagcatcttggggttggaccctacacggagatggcaagaccatcgcaccaggcgcagttgttgcacctgaagaacggctcagttggagccgaaccatcggcattggaatgcaacatgtgatcgctatgtttggcgctacattgttggttccaactctcactggatttcctgtcaacaccaccttgctattctccggaattagcacgatggtgtttcttcttattacgagaaatcgtcttccttcgtatctgggaagttcctttggattcatcgcacctttgatggcttctcaaggagaagggattggcgtacaactcggtggcgttgttgcgactggccttgccttaattctagtgggctttattgttaaatccgcaggccggaaagtaattgatttggttatgccgcctgcagtaactggcgccattgttgccctgatcggcctcaacttagctccaagcgctgctggaaactttcaatcgcagcccttagttgcagttgtaacactagcgagcattttgctttttacggttgccggacgtgggatggttgctcgcctaggcattcttattggtgtaattattggttgggtttttgccgctataaccggcaaccttgctgaaggcgcgagtgatagtgttcgggaggcggcttggattggtttcccacaatttcatacgccagaattcacaacacacgctattttagtaacgctgccagttgttattgttttgattgctgaaaacgttggacatgttaaagctgtgagcgaaatgacggggcgtaacctcgatgatttagctggtgatgctttgattgcagacggtatcggaacaacctttgccggtgcattcggtggctcaggaactacgacatatgccgaaaatatcggtgtcatggcggctacgaaagtctattccacagcggcctactgggtagcagcgcttacagctgtggtgcttgcgttcattccaaaatttggagccctaatttttactattccaactggagttcttggtggcgctgcattagttctttacggattgatcggcatgctcggtgttcgtatctggcaagacaataaggttaacttcaataacccagttaacctcacagcagcagccgtggcgcttatcgccggtatcggtaacctcaccttagtgatcggtgggattgagcttcaaggaatcgcgtggggttcaatgggtattatcgttttctatcctgtactcaagtggttgtatcttcgtgtgggcgaaggaaacaacgcacgtttc

SEQ ID NO: 17584 - DNA, 1500 bp, Cornyebacterium diptheriae
gtgagcgcacagttctcactgccggcgaccggactagctactcaactcgagttgtctaagaaactccccgaggatattgatgctcttgtcgtcccaacgtttaagggcgaggatggtcttgaactcgcagccagcggtttgttcgatgaaaaccttgagattgccatttgggatttactcgtagcagtcggagccactggtaagcagggcgaagttgtacgcatcccatccatcgagggcattgaggtcgacttcatcgtcggcgtgggcttgggggataacgattcgcttgacgacgacaccctgcgtcgtgcagctggcgatgcagctcgaagcttggcgggtgttcagcatgttgctacgacgttgggagctttcggtctgcaacctgctgttgagggctttgcactgggtgcttataactacaccggcgtgcgctcgaagcaaaagaagccgctgcctttggaaaaggttacgttcatttcccttggtgataaaaaggctgcgaaagaagaattcaccgtaggccagattattgcggaatctgtggctttgtgccgcgatctagtcaatgcgccttcctctcatctctacccagagtcctacgcggcgattatccgagacactgccgagaaaatcggcctcggtgtagaaattttggatgaaaagaagctggagaagcagggctttggcggcattttggccgtgggtaccggctcctcccgtaaacctcgtttggtccggttgacctgggcaccaaagaaggccaaaaaatccatcgcgctggtgggtaaaggcatcaccttcgataccggtggaatttctctcaagccaggcgctggcatggacgacatgatctccgatatgggcggctctgccaccatggtggccacgatcattgctgcggctcgtcttggagtaaagctcaatgtcacagcaactatcccgttggcggaaaatatgccaggcggcaatgctttccgcccaggtgatgtgattacccactatggcggaattacctcggaaatccttaatactgatgctgagggccgcttggtgctcgcggacgctattgcacgcgccagcgaagacaagcccgactatttgctgaacgtcgcaacgctgacgggtgcacaaatcgttgcactcggtgatcgcacctccggagttatgggatccgatgaattccgtgattcggtagctctcaccggtcgtacagttggtgaaccagcatgggcaatgccgctgccagaggaaattggcgaggacgtaaaatcccctgttgccgatatccgtaacgtcaccggttctcgttccggcggcatgatggcagctggctggtacctcagccacttcgttggcgaaggcatcgaatgggctcacgtcgatattgcgggacctgcctacaacaaagcgggcgtctacggatacattcctaagcgcgccacgggtgtacctgtacgtacattcgtgcaggtgctctctaacctcgctgagcag

SEQ ID NO: 17585 - DNA, 1797 bp, Cornyebacterium diptheriae
gtgttgcgcactcatctcgcaggtgatcttggtaaagagaccgccggccagacagtcaccctcacaggttgggtttcacgccgtcgagatcatggtggtgttatcttcatcgatctccgtgattcttccgggctggttcaggtcgttttccgtgaaaacgatgtagctgagcaggcacaccacctgcggagtgaattctgtatcaaggtaaccggtgaagtagaggctcgtccagaaggttccgagaaccccaatcttgcttcgggtgcaatcgaggtcaacgtcactgacttggaaatcctgaatgaagctgcaccattgccattccaaattgatgatgtttctcaggggggcgaagttggagaagagacacgccttaagtatcgttacctagacttgcgtcgcccgaaccaaggtgcagccttgaggttgcggtcgcaagctaataaagcggcacgtaacgtactcgattctcacgattttgttgaaattgagacgccaactctgacgcgttcgactccagaaggtgcccgtgactttcttgtcccagctcgtctcaagccaggatcatggtatgcgctacctcaatcgccgcagctattcaagcagctcttgatggttgcgggcatggagcgctactaccaaattgctcgttgttatcgagatgaggattttcgcgctgaccgtcaacctgaatttactcagctcgatatcgagatgagctttgttgatcaagatgatgtcatcgcattggctgaagagattgtttcttcgctgtggaagctcatcggatatgagattcctacaccgattccacgcatgacgtatgccgatgctatgcgtctatatggttcggacaagcccgatctacggttcgacattaagatcgttgagtgcacagacttcttcaagaacaccactttccgagtgttccaaaatgaatatgtcggtgcagttgtaatggatggtggagcttctcagccacgtcgtcagcttgatgcttggcaagaatgggcgaaacagcgcggagctaagggactcgcatacattttggtcggcgagaatggtgagcttaccggcccagtttctaagaacatcactgacgaagaacgtgctggtattgcagcccatgttggcgcaaaacctggcgattgtattttctttgctgctggtgagactaagagctcacgcgcgctcttaggtgctgctcgaaacgaaatcgctaagaaacttgacttgatcaaggaaggcgattgggcatttacttgggtcgtagatgcaccgttgttcgagccatcatcggatgcaactgcatcaggagacgtggcacttggtcattcgaagtggactgcggttcaccacgcatttacttctccgaagcctgaatggctagattcttttgacgagaacccaggagaagcaactgcttatgcttacgacattgtctgcaacggtaatgaaatcggtggcggttcgattcgtattcaccgtcgtgatgttcaagaacgagtctttaaagttatgggcatcacggaggatgaagctcgcgagaagtttggtttcttgcttgatgcctttgccttcggtgctcctccacacggcggaattgctttcggttgggatcgtatcgtctcgttgcttggcggattctcctcaattcgtgacgtaatcgcgttcccgaagtcaggtggcggcgttgatccgctaaccgacgctcccgcaccaattccccttgagcagcgtcgagaaactggcgtggatttcaaaccaaagaaaaagactgacgagtccgcagtc

SEQ ID NO: 17586 - DNA, 2019 bp, Cornyebacterium diptheriae
atgaacctatttcatatcggtacggaattccgcagattcggacacggaaaactacctcccatagcaattgtcgttatcatgcttatgcccttgctcttcggcgggttatttgtttggtcttactgggatccaatcggacatctcaacaaattgcccgtagcagtagtcaactcagataccggagtgaccaaagaaggcaagaccatcaacgcaggtgaacagatcacccatagtcttgtcgatcaacaacaagcaaaatttatagaggtctccgccgaccaagctcgcaaaggaattgcggacggcacctactacttcgctatcgaattccccacagatttttctcaagccgccactagcgtaaaagatccccagccgcatcaagcaaaacttaatgctgtttacaacaacgccaatggctttttagctacaatgttgggcaaccaagttgtaggacgcgttctcgccgcagtaaatgagaatcttggatcacaagtagcaaaccaactccttgtcgggtttaataccatcggccaaggccttggcgctgcagcagacggcgccggtcaactcgcagacggatcccataaagctcatgatggtgccgacaagctcgcagacggatcaacacagcttaacaatggactccaacaagcaaacgacggagcacacaagctttacgacggcgcaggccaacttgaccagggaattcataccgcgagtaacggcgctgacgcactcgccgacggactaacaaaactcaacgcagccaccgataccctcggaaacggcgcgggtcaagtatctgcgggcgtcgataagctcgtgggcgtcgcacaacaagcgagcgatgcccaagcgcaattgacagttccactggtcaatctgagtgcccaactacgtgccacaggcataccccaagcgatcgacctcgctaacagtgccgacggcattattaactccatcaacgcagccggaatcggtcctcaatcggatatgatgactcaactttcgaaactgcgaaacggggcatcggaaatacaccgacagctttccgaccccacggcacaatatcgcgcaggtataaattcagcaacggaaggtgctcaaaaactttccactgggttgcatcagttgtctgacggctccgaaaagcttgttataggtaccaagaccctagccgatggcacgaccaaactttcagcaggatctcaacagctgacggtgggggcatcgcaacttagctcaggattagttcgtcttgatgaaggagcttccgaactgtccctcaagctaggagagagcaaagacaaaattccgcaattccctgatgacacgatcgcagactcagcgcgaaacgtatctacacctgtggccgaaaacgttgccagagattccctctcgctttttggattagggctcgcacctatgtttatcgcactgggactattcatgggcggcaccgtaaccttcatgctcatgcgtccactacaacgacgtgtagttgattcaggcgtaacaccattccgcgttgttctagcctcctatatacctgcagtcatcgtgggattttgccaagcaaccattatgttcttagtgcaacgctatgccattgggcttcacgctcacaacgaattccttctgtgggcagcgatgtgcctgacatccatgtgcttcatggcgataacccaaggactcaacacagtattcggctctactgtcggacgcgtattgtgtatcgcatttatgtcgctacagattgtatcttccggaggactatacccaccggaaacacaaccagcaccactgcgctggttccataccttcgatccgatgacatactcagtaaatatccttcggcaagcgatttacccaacagatgtagctttagaccatcgagcagtacaaggtgttagcgtcttgatcttcatcggtgcacttttcctgctattttctacaattgccgcaatgcgagaacgacaaatgaagatgaaagatttccatccagaagtagcggta

SEQ ID NO: 17587 - DNA, 1947 bp, Cornyebacterium diptheriae
atggcgcactccgttgtaatgcctgaactgggcgaatccgtcaccgaaggtaccatcacccagtggctgaagtccgttggtgacgcggtcactgccgacgagccgttgctcgaggtatctactgacaaggtcgacactgaagttccttcgcctgtctccggtgtcttgcttgagatcaagtttgaggaagatgacaccgtagacgtcggagacgttattgcgattattggcgaagaaggcgacgctccagctgccaaggaagagccagcagaggagccaaaagctgaggcaccaaaggctgaagcagctgactccaccgacgtagtcatgcctgaactcggcgagtccgtcaccgaaggcaccatcacccagtggctgaagtccgttggcgacaccgtcgacgttgacgaaccactcctcgaagtctccaccgacaaggtcgacaccgaagtcccatccccagtcgctggcaccatcctcgaaatcctcttcaacgaagacgacaccgtcgacgtcggagacgtaatcgttcgcgttggcaccccaggatctgctccagcagccaaggaagagccagccaaggagccaaaagccgagacaccaaaggaagagccaaaagctgaggcaccaaaggctgaagcagctgactccaccgacgtagtcatgcctgaactcggcgagtccgtcaccgaaggcaccatcacccagtggctgaagtccgttggcgacaccgtcgacgttgacgaaccactcctcgaagtctccaccgacaaggtcgacaccgaagtcccatccccagtcgctggcaccatcctcgaaatcctcttcaacgaagacgacaccgtcgacgtcggagacgtaatcgttcgcgttggcaccccaggatctgctccagcagccaaggaagagccagccaaggagccaaaagccgagacaccaaaggaagagccaaaagctgaggcaccaaaggctgagccaaagaaggaagctcctgccaagaccatcaacaacgagaacgtcccttacgtcactccgctggtccgcaagctggctgacaagcacggcgttgatctgaccactgttgaaggcactggtattggtggacgcatccgcaaacaggatgttttggctgctgctggcgttggcgcagcccctgcagcacaggttgctcctgcccagccagtttctgcagcatccaccaagtccgtggatccagagaagcagaagctgatcggtacaactcagaaggtcaaccgtatccgagagatcaccgcgcgcaagactgtggaggctttgcagatttctgctcagctcacccagctgcatgaggtcgatatgactaaggttgcggaactgcgtaaggccaacaagccagccttccaagaaaagcacggtgtgaacctcacctacttgccattctttgcaaaggcaattgttgaggctttggttgctcacccgaacgtcaatgcgtcctacaacgctgagacaaaggagatgacctaccacgctgatgtcaacctctccatcgccgttgacaccccagctggtctgcttacccctgttatccacaaggctcaggagttgtccttgcctgagctcgctaaggcaattgtcgatttggctgaccgtgctcgtaacaacaagctcaagccgaatgatctttccggtggcaccttcaccattaccaacattggttctgagggcgctctcagcgataccccaatcttggttccaccacaggcaggtatcttgggtaccggcgctattgttaagcgtccagtagtcatcacggaagatggcatcgattcgattgctattcgccagatggtctacttgccacttagctacgatcaccagatcgtcgatggtgccgatgcaggtcgtttcttgaccaccatcaaggatcgccttgagactgcaaacttcgaaggcgacctcgaactctcc

SEQ ID NO: 17588 - DNA, 711 bp, Cornyebacterium diptheriae
atgcagctgaattactcgaccatcactggtgtgacccgtgacgatcttgaagatgaaggcgcttggctatatgcagaagttgttcgcaagattcatgagctcaatccccacaccggcgtagaaaacctcacccctgatttctccggcaagcctgacttgttgcaagaggttttcgaggctcgccccgaagtttttgctcacaacctcgaaacggttcctcgcatcttcaagcggatccgccccgctttccgttacgagcgctccttagacgtgatccgccaagcccgcgattttggattggttaccaaatccaacctgatcttgggcatgggagaaaccgtcgacgaaatccgtgatgccttggttgacctgcactcggcaggttgtgacatcatcacgattacccaatatcttcgtcccggcccgatgtaccatcccatcgatcgttgggtaaaacctgaggaatttatcgatcacgctgattttgcgcgtgaacttggatttggtgctgttatgtcggggccattggtacgttcttcttatcgtgccggaaagctttatgccgaggctctcgcggctcgcggtgagtccttgccagaaaacttggctcatttggccacgactgccgatggcagtactgcgcaagaagcaaataccttgttggaaaagtacggtccttcccaagacacccctgtagtgtcgtcgaaggct

SEQ ID NO: 17589 - DNA, 1116 bp, Cornyebacterium diptheriae
atggcgccaagaaaaaatagtaagacgcagcaaccaactggagataatcgcaagaaagcgctcgatgcggctcttgcgatgatcgaaaaagattttggtaaaggtgcggttatgcgtcttggtgacgagaatcgtccgccgattagtgctatctccagcggtaacactgctatcgacgtagctttaggaattggcggctttcctcgtggacgtatcgttgaggtatatggtccggagtcatcgggtaagaccaccgtcgcattacatgctatcgcgcaggctcaaaaagccggaggtattgcggcttttattgatgctgagcatgctctagatcctgattacgcacgcaaactgggtgtagatactgatgcattgcttgtttctcaacctgataccggcgaacaggctttggagatcgcagatatgcttgtgcgttctggtgctattgacatcattgtcatcgactcagttgcagcattgactccaaaggcggaaattgaaggcgaaatgggagatagccatgttggccttcaagctaggttgatgagtcaggcgctccgtaagatgactggtgcgctttataactcaggcactacggcaatctttattaaccagcttcgtgagaagatcggtgttatgttcggttcgcccgaaacaacgaccggtggtaaagccttgaaattctatgcctcagttcggtgtgatgtccgacggattcagacacttaaagatggtcaagatgccattggtaaccggactcgcttgaaagtggtcaaaaataaggtttcgccaccgtttaagatcgcagaattcgacatcatgtacggtgagggaatttcacgagaatcttcgattattgacctgggtgttgataacggaattatcaaaaaatctggttcttggttcacatatgaaggcgaccagctcggacaaggaaaagaaaaagtacgtctctatcttaaagaaacgccagaactggccgatgagattgaagacaagatcttcagagcgcttcatattggaaaatacgctgcattgaaggatgctgacgatgcgctgactgatgatccagtagacatggttcctaacgtagatttcgatgactcagatgacgat

SEQ ID NO: 17590 - DNA, 1269 bp, Cornyebacterium diptheriae
gtgagtaaaaagaagctgcagacgatccaagcccctaaaggcgtgccagactatattccaccagtttcccccgaatttttaggggtgcgtgatacttttgcccaccaagcgcatctggctggttatgagcacatcgagctgccgatctttgaagacaccactttgtttgcccgtggcgtcggtgaatcgaccgatgtggtaacgaaggaaatgtacacgtttgcggatcgaggggatcggtcggttacgcttcgtcctgaaggcacagccggtgtgatgcgtgcagttatcgagcacaatctcgatcgcggacaacttccggtcaagctcaactactatggtccgtttttccgctatgagcgcccgcaagcgggtcgttaccgccagctgcaacaagtaggcgttgaagctatcggagttgatgaccccgctctcgacgcggaagttattgcacttgcggaccgctctctcaaggtaattggcttgaccggttaccgtttggagcttacgagccttggcgaccatacgtgccgtccgcaataccgagaaaagctccaagaattcttgtttaagctgcctttggacgaagaaactcgtcatcgtgcggagattaatccactgcgagttttggacgataagcgtccagaaattcaagagatgaccgtagatgcgccgttgatgttggataacctgtctgattcgagtagggaacacttcgagcttgttacgggaatgctggatgacctcaatgttgcctatgtagtcaatcctcgaatggttcgcggtttggactactacaccaagaccacatttgagtttgttcatgacggtttgggtgcacagtcgggtattggaggcggtgggcgttacgacggcctcatggcgcagttgggcggccaagaactttcaggtatcggctatgcactgggagtggaccgttgcttgcttgcgcttgaagcggaacaaaagcgagtaaccgatggctctcgagtgaacgtttttggtgtggctatgggttcggcagcgaagcgcgaaatggttcggatcatcgacgcacttcgttcagctggtatcagcgcagatatggcctatggtgatcgcggtttgaaaggtgcgatgaaaggtgcggaccgcgctggagctcgttttgctcttgtgttaggggatcgtgagcttgaaaacaattgtgttgctgttaaagatctagctcaacaagggcaacgcgatgtatcccttgacaatttgatcttggagattcagtcagcgttg

SEQ ID NO: 17591 - DNA, 1434 bp, Cornyebacterium diptheriae
gtggcttttacttccaccgaagacgtcattaagtacatcaaagaagaaaacgtcgagtttcttgatattcgcttcaccgacgttccgggccgtgaacagcgcatcaccatccctgcatcgatgttcaccgaggaagctgctgaagatggcttcgcattcgatggttcctccatccgaggatttaccaccatcgatgaatccgacatgaacttgcaccccgacattgctaccgcaatggtcgacccattccgcaaggctaagacactgaacatgaagttctttgtccacgacccattcacccgcgagccattctcccgtgacccacgtaacgttgcccgcaaagccgagcagtacctggcttctaccggcattgctgacacctgtttcttcggcgcagaagctgaattctacgtctttgacaaagtcagctacgaaattgaaggcaaccgctcccactacgaagtcgactccgacaacggttggtggaaccgcggcgtagaccaaaacctcgatggcacccataaccgcggctataagaccccattcaaaggcggctacggccagtgcgcaccatacgacaccctcgaagatcttcgcgacgagatgacactcaccttgcgcgacgcaggctttgacattgagcgccagcacccagaatgcggtaccggatcacagcaagagatcaactaccgattcaacaccctgctccacgctgccgatgatctacagaccttcaagtacatcatcaaaaacaccgctttccgcaacggcaagaccgcaacgtttatgcctaagccactggcaggcgacaacggctccggcatgcacgcccaccagtcactgtggaaggacggcaagccactgttccacgatgaggtcggctacgcaggcctttccgacatggcccgctactacatcggtggtattctgcaccacgcaggcgcagttttggcgtttaccaacccaacgcttaactcctaccatcgcctagtccctggcttcgaggctcccattaacctcgtgtactcccagcgtaaccgctcggctgcgatccgcattccgatcaccggctccaacccaaaggcaaaacgcatcgaattccgcgcaccagacccatcaggcaacccatacttcggtttcgctgccatgatgctcgcaggcctcgatggcatcaagaaccgcatcgagccacacgctcccgtggataaggatctctacgagctaccaccagaggaagccgcttccatccctcaggcaccaacctccctcgaggcatccctgaaggctttggaggaggacaacgagttcctcaccgacggcgatgtcttcaccgacgacttgatcgacgcctacatcaagctcaagtacgataatgaaattgcacctgttcgcctgcgcccaaccccgcaggagttcgagatgtacttcgactgc

SEQ ID NO: 17592 - DNA, 612 bp, Cornyebacterium diptheriae
atgatgcaatccatacctttaggcacatatgttcctggagaatcagttgtccacaaaacgccgccactggttaaactcggcattctgattgtctttatcgttgtctcgactatatggggaaccactccccttcgagcactaagttcctgtgttgtggcagtctcgctttacttcgtggcgaaaatccctttgcccgtggcatggtcacaattgtggcttcccttgccagttttactaactctgggcgcatttcaatggtggcaacgtggagcgttctattcatcaagtttagttcttactatctacgcaggtttaatggctgcggtgctcgtcacgctcacgtcgacgcttgcatccatgatggatgcgcttgaaactgcactccagcccctgaaaaaatatggcttcccagtagaatcagtagtcttggccttttcgctcacgctccggcttctgcctctaatgctcaacaccgttaatgaggtccttgatgcccgaaaggcacgtggtgttgcgttctcactgacggctctcggtacccctgtgatgattcgttccattaatcgagctcgatcgattgcggatgctctaatggcacgcggagctggggac

SEQ ID NO: 17593 - DNA, 837 bp, Cornyebacterium diptheriae
atggcgaatccattttctaaagcatggaaatacctcatggctttgtttgattcgaaaattgaagagaacgctgatccaaaggtacagattcaacaggctatcgaagacgcccagaggcaacatcaagagttgtctcagcaagctgcagctgtgatcggtaaccagcgtcagttggagatgcagctcaaccgtcgtctcgcggaaattgaaaaactccaaggaaatacccgtcaggcaatccagttggctgacaaagctcgtgcagagggaaacattcagaaggcaactgagtatgaaaatgctgcagaagcgtttgcggctcagctcgttactgctgaacaaggcgtagaagataccaaacagcttcatgatcaagcgctccagcaggctgacgcagcgaaaaaggctgtagagcgtaatgctatggttttgcagcaaaaggtggccgagcgtactaaacttctgagccagctcgagcaggcaaagatgcaggaaaaggttgcggagtctattcagtctatgaattcgatttccaaccgtgacacccctaatcttgatcaggttcgtgagaagatcgaacgtcgatacgcaaatgctttgggcactgctgaactagctcaaaactctgttcagggacgaatggcagaagtggaacaagcgggaattcaactcgcgggtcattctcgcctagaacaaattcgtgctgagatgtctggtggtcaactaggtgccgggaattccgccacgcaacagtcgattgaatctgcacaacaggctacgccaagtgctgctgatgatgcggtagcgcggaaaatgcgtgagcttcgcggagaagct

SEQ ID NO: 17594 - DNA, 3762 bp, Cornyebacterium diptheriae
gtgttttgcgaaagaagagaacccaaacggttaatagctggttttatttcgattctcctgactgcagttctagggatttctttaacttcagccgatgcagttgcacaggctgatgaaattaatcttgcgcaaaaagctgttcaagaacaagatgcgcgtgagtttgcgacaagtatgcttgacacctcttttgaggcgtcacgccaggccgcagttatagcgcttagtggatcagaccaagattggaacgcgtattttaacggtgggagggaagaggcccaactccaagacttgcgccaaatcctgacaacactcgcgacagttggtggcgaaaatgttcaaaccgaggcaaaccgtctgctccagtcaggttctgttgaagaaatcagtagctttattgacatagggtggcaagatgctcagcttaaagatgatagggcgcaggcgtggcaagctgcacaggctgaggaaggcacaagtcttaagacagctgcagataaagcactacgagtagatactgccgaggcgttaagtgatttcgttgcgggtggagaagatgaagcacgcgcaaatgataagcgtagggaagtttatgccctttctgactccgagcttcccactgtgtctgctaatgctgctgaagcccttcgtattggaactgatacagccattgatgaattcttgcggtatggacagtacgtagctgccgatcaagatgccgaacatatgaccgtgtcgcagcttgtcgatttaacaatccaggaatctaagacagccacggatgagaataataaagcttggatgcaagcagatcgcgctgctcgcgctgctgaagctgcacgaatcgctacagaaaagtctcgcgatgaagctttagccgcagattcagcacagcagcgagccggcaacgcggccgctgctgctggtcggctagcttcccagtctgccaatatggcagaccaagcagtcgccgcttcacacgaagcacgagcagcattaagggaaacagcagctgcactagctcgtgcagcagcagcctcagcacgcgcccaatcggcagcagcgcacgcagcttctgcagcaaatgcagccgcctacgatgccaatgctgctcatggggcacgaatagcagccgaacaagcaagaaacgcggcacaagcagcagagcaatcccaacaagcatttcggtacgcagaagaggccgcaggatttgcccagtcagcagggcaggcggcgggatcggccgcaagaaatgcggatgctgctgccgcagcagcaaccgaagctgccaatgcagcaggagaaagccaaggggctgctgacgaagcccgcgctggtgctgcccgcgcgcgtgcagcagcagggcgtgctcgtgccgcagctagtgaagtcgaccgccttgttgcaaatatccgttctctagttgaacaaactcgacaagcagccaaagaagcagccgagcacgctaacaactcggctcaatcagcagatgatgcggctcgcgaagccggaaatgctcattacgcagctcaagttgccggtcgacatgcgcaattttctagccaatctgccgagcgagcacgaaacaacattcagcttgcaaaggacattcacgagcaagcaacaaattctgcgcaggaacgactccaagcagaacgtgcgtttcttaaagaacaagcacgactagctcgcgaaatccaggatgttgcagatagcaaaaaagcacaggagaagcagcggaaagacgatctcaccactcaaatgaatgagcttcgttcctcacttcctgccaacgaaggcgagttcgaccctactgacgaagccctgtcaaacttacgccaactagcacttaatgcggctcaggttggcagcccatctgtggcgggagcggctaaagttgcgcttaccggaaacaccgacgctgacctcatcgagtttgctttcaatgcttatccggatgcgctttttgaagacaatctcaatctcgttaatcactgggcattattcgatccaaatgaagaccttcgcaatgctgcggatgaagctggctatgaagacgatataactcttgacgaattcgtaaatattacagctccgcagatgcgccttcctggccttgtcaaaaaggcttgggaacttcgtgatggtgctgggcctcaggttcaggctgccgctgattctgctctcaaagaaggaactcctgatgcactcgatgaattcgtcaatggcgatggttacgaaaaagcacgctatctagatcaagtacagcaagcttatgagctaaccgacacgggtggacctgaggttcaaatcgcggcagaagctgctgtcacgggagaccgtcaacagctcgatgaatttgtctcaattgggcagtaccgccgcgccattctcgatagccaacgtgacgcacataatgcagaaatcaacgcacttcttagtgctggccagaatgcagctgaattagcctcacaagaagcagccaatgcacaggaggcttatacccgggcgacaggagatgcccaacgggcgatacagtacgcaagcgaagcccaaaaatgggccggaagtgcgcaacagtcagcacaactagcgcaggggcaccttgcttctgcacaaaagtcactgtcattcgcactcgagcaacaacaacgagcacaccaagcggcaaacgcagcagcagctgatgcagcacaggcaaccaacaacgccgaccaagcagcttcctacgcagctaccgcacaagtcgcagcacaatctgccgcacaatctgctacagatgcccggcaatcagcaaatgcagccggcaacgacgcacacctagcctctcaagcagcaaatgatgcatattttgcggcatgggaaaaggaaatggcagagctagaacaagcccgttctgtacaggctgaaggcttagccaacgtagaatcaaccagcatcctgcagaagatcaaagacatcatcgggaaagaaagtctcgatcttatccttgatctcatcggagttactgatgttctaaaatgctttcatggcgaaatctctggatgtctgtggacggcagtagggcttctcccaattggaaaagctggaaaactaatcaaagccctaccggcagttcgaaagctcatcggaagagccaaagatatcaaacgggccattgagtactcacccatcaaagcagcactcgacgacgcgctcatcccggcagcttgcgcaacactacgactatcaaacgttaggtttcgcaacactgcagcacatctcggaacgtaccgaacaccagccccaggccaacattcctatgcgattgttgcctctaagtgtaagtatcctccaactgtcaaagcgatcaatggaaggtttcccatcaacggccaatatgctgggggaaagtggcgaaatggcgatccagacctaatgccaaaagattggtcgtatggagatatctactttactgatgaaggattcccaatatttgatcgatttgttgcccaatttgatgctaatgctatgactttcaaccccgaagctatgccgcacggcaaagtaccggatgtaaccattactcctaccggaagaagctacaaagacattcgtgccgctgatgcagtactggggattgatagaagatatcggaaagaacatggtctagtgtggcatcaccatcaggacacaggaaggatgcagcttataaacaaagatgtccacgacgcagtaaaacatactggcggatacgcaatatggagtaaacctctcaacgtg

SEQ ID NO: 17595 - DNA, 588 bp, Cornyebacterium diptheriae
gtgagtgtgaaacaggagcgcgaaaatacgtcagagcacagcacaccatctaattggaacgttcctaatgtgctaacgagtttgagaatcattgtgattccgttgtttgcatggtttgttcttcaaagtgatggtcacatcacgcgatggttatggtgggcttttggaacctttgtggcgttgatgatcactgacaagcttgatggtgatattgcacgcgccaaaaatctggtcacaaattttgggaaaattgcggatccgattgccgataaagccctgatgattaccgctttagtcactctcaatatcattggtttagtaccgtggtggataacgattgtcatcgtcgtacgtgagctcggtattactttgtggcgtttctttgagctcaagaaaggcaacgtggtgccggcaagtaaggggggtaaaattaagaccactttgcaggcttttgccgtggcactctatctcttgccgttgcctgatgcggtgcagccgattcagttctttgtaatgctgtgtgcggttgtggtgactgtcgtaacgggagttcaatatctaatcgatgctaagaagctaaaaaatgct

SEQ ID NO: 17596 - DNA, 1005 bp, Cornyebacterium diptheriae
atggaagtaaatggtgtgacatgggtgatcaccattgcggtgattgcaggttttttcgtatttgatttcttttctcatgtacgtaccccacacgaaccaacgcttaaagaatcagcactgtggtctgtattttatgtcgtgctcgcttgtgcgttcggcgtgtttttgtggctgacgtggggagaacctggcaaccctcatcaacacggaatcgagtttttcaccggttatgtaaccgaaaaggctctgagtgttgataacctctttgtttttgcgctcatcatgggcgcatttaaaattccgcgacagtatcagcagaaagtactgttgattggcattgctttggccttggtctttaggcttgtgtttattctgctcggagccgctgtcatccaagcatggtcggatgtgttttatcttttcggcatcttcttgctttacaccgcactgaagcttatttgggacgaggtaaccgataagccggagactgatccaagtgacatgcgaattatcaaatggttgcgcaaagtcgtgcatgttaccccgaattatgagaaggatcatctctacattcatcaaaagggtaagtttgcattaacgccgttgtttatcgccctcgttgcgattggcatgattgacttgatgtttgcattcgactcgattcccgcaatttacggtattactcaagagccatacgttgtgtttactactaacgcttttgcgctcttgggattgcgccaaatgtatttcttgctggatgggctattagatcgtcttgtctatctggcttatggcctcggacttattctggctttcatcggtgccaagttgttgttacatgcaatgcatgaaaataagcttccattcgtcaatggtggagagcccattgctgttccagaaattgccacacactggtcgcttgttgtgattgtaggcattttggcgatcacgattgttgcctcaatcattaagtcgaagcgtgatgatactcaaggtgttgttcga

SEQ ID NO: 17597 - DNA, 2769 bp, Cornyebacterium diptheriae
gtggctcggacgctgcatagggaacacgacgatgaagaattcgatgccgtggacgatgcgttctcttctgaagaaactgttgtcacaaataggaaaagaaaaccgtcaagaatgacgaagactaaaaaaaatctctttgatgacgacatcgaagatcagcacgatgattttgatgaggaagccggcttagggcgttttacgttagcgcttagtgatgaatccgtcgatagtattggtttaatccttattgcattggcattcatcgtgggagcctcggtgtggtttgatatcgcgggcccaattggtgctgcgattgcagcaggcgttcacttcgtcattggggcgggggcattaattctgcctttggcgcttgtcgcaatagccattgccttgatgctgggtaagctgcccgagcctgatcatcagccacgactggtattagggacaagcgtgatcgccatttccatgcttggcctcattcacttgtttgcgggggaccctgcggactggcaggggcgtacgcatgcgggaggaattgtaggtgcctattcgggtggaatgatcgctcgcgggttttctgtttatctcgctattccgcttttggtgctcgtgattatttatggtgcgctgcgcattaataacgtcacggtgaaagagctttttgaagctatccaagataccgtacaaggtcttcgtgacgactcggaggacgaagacgatccactttatgccgatgccgacgcagagatcgaggctcgaagccgtggagaaaaactgcatcgtccacaaccacggcgcgaaaagccccgtccggctccagagcggagacgaatgagtgcgccgcttgtcgacgacgtcgacgaagacgtggtttctcgcccgcttttcgacgaccccagcacagcgcagtcacaaaagagttctgttgaaactcagcgtgctgcgcgagatgtatctgagaccgacgaattccctgcagtagatgagcctactgtcgtagttccgcgaaagccgagcgctccgcggatgagccttccacagaccccagttactgatgtggaagctgcagcagatgtggttgcggctgggcgaaaagccgttcaagatgctgttaaggcccgagaatcccataacgtgggtgcagcgctggctccttctactccggctcaaccatatgaggcaccggaatcgcattatgctgtgccaagtacacagctattaattcctggaaaagaagcaaagacccattcagaggcgaatgatcggatgatcgaagctatttctgatgtgtttgctgagtttaaagttgatgcccatgtcaccggtttctctcgtggtccaacagtgacacgatatgaagtggagctgggacctggtgttaaggtttcaaagatcacgaatttgcagtcgaacttggcttacgcagttgcaactgacaacgttcgacttttgacacctatccctggtaagtcagcggtgggaatcgaagtccccaacacagatcgcgaaatggtccgcttgggtgatgttctaaattcggagagtgtgcattcggatcatgatccgatgttgattggacttggtaaagatattgaaggcgacttcgtagcacattcagtgcagaagatgcctcacttattggttgcaggttctactggttcaggtaagtctgcatttgttaactccttgctggtgtcacttcttactagggccacaccggaagacgttcgtctcatcctagtggatccaaagatggtggaattgacaccatatgagggaattccacatctgattacgccaattatcactcaaccaaagaaagcggccgcagcgcttcagtggttggtcgaagagatggagcagcgctacatggacatgaagtccacgcgcgtgcgccatattaaagacttcaatcgaaaagttaagtcaggcgaaatccaagcacctttgggatctcagcgggaataccatccttatccttatatcgtctgcgtggtcgacgagcttgccgacttgatgatgaccgcacctaaggagatcgaggattccattgttcgtattacgcaaaaagcacgtgctgcaggtatccacttggtcctagctacccagcgtccttcagttgacgtcgttacgggcttgattaagaccaacgttccgtcgcgactcgccttcgcgacgtcctctttgactgactcccgagtgatcctggaccaagctggtgctgaaaagctgatcggtatgggtgatggtttgtttatcccgcagggcggacgtccacagcgtatccagggtgcttttgtaactgatgaagaaatccaagcagtcgtggatgctgctaaggctcaaggcgagccaaactacaccgaaggtgtaaccgaagataaagccgctgaagctaaaaaagatattgatgccgatattggcaacgatctagaagatctattgcaggcagtggaattggttgttactgcgcaattagggtcaacttcgatgttgcaacgtaaattgcgtattggcttcgccaaagccggtcgccttatggatttgatggaaacacgtggcattgtgggaccatccgagggatcaaaagcccgcgaggtcttggtcaaacctgaagagttagagacaactctgtggatgattaaaggtgctaagccagaagatgctccaaaggaggatgattggcaatcagcagactcaggagtttctgatgcttcggatccatcgcatggcgaacgtgctgcgtataacccttcaagtaatgctttt

SEQ ID NO: 17598 - DNA, 2238 bp, Cornyebacterium diptheriae
atgcggagcatgtcagctcgattggccagaagccttaccggtaacagggttcgggtgaactctgtactggagcccatgctggcgattcatagggaatttcatcctaaagcagatgcggaggtgctcaatcgagcctatgcaactgcggaacggcttcatgacggagtattccgaaagtcgggggacccttatattactcatccgctggcggttgcaacgatcgcagcggaaatcggcatggataccactacattggtggcggcgttactccatgacacagtggaggatacggattactccctagaagatctcacagctgattttggcgctgaagtagctcgtttggtcgatggtgttaccaaacttgataaggttgctttgggagctgctgctgaggcagaaacaatccgaaaaatgattgtcgcgatgagccaagatccacgtgtattggttatcaaagtagctgaccggctgcacaatatgcgcacaatgcgcttcttgcctccagaaaagcaggctaaaaaagcgcgtcaaacccttgaggtcattgctccattggctcaccgcctcggtatggccagcgtcaaatgggaacttgaagacctctccttcgctatcttgtaccccaagaaatacgatgaagtcgttcgcttggttgcggatcgtgctccttcacgagaccgctaccttaatcaggtcattgcgcagctgacttctaccctcaaagaaaatcatattgatgctgaagtgatgggtcgacctaagcattattggtcgatctaccagaagatgattgttcgaggtaaggacttcgatgagatttttgacctcgtaggtattcgggttctcgtcgataatgtgaataattgctatgcggcaatcggcgttgtccactcattgtattcagctatgcctgggcgatttaaagactatatctcttcacctaaattcggtgtctaccagtcactgcacacaactgtcatgggggatggtggcaagcctcttgaggtacaggttcgtacccatgagatgcactacaatgccgagttcggtatcgctgcacactggcgttacaaagaaaccaaaggcaaaaatagcggtgaacaggccgaaattgatcaaatggcgtggatgcgccagctgctggattggcaaaaggaagccgcagatcccaatgagtttttggactctttgcgctacgacctgacaagtaaacaaatttttgtgttcactccgaaaggcgacgtagtcaatctgccagttgactccacacctgtcgattttgcttatgcagtccacactgaggtggggcaccggtgtattggtgcgaaaatcaatggaaaacttgttgcgctggagtccaagcttaaatctggtgatcgggtagagatttttacttcgaaagatcaaaatgccggtcctagccgcgactggcaagatttcgtggtatctcctcgagcaaaagcgaagattcgccaatggtttgccaaggaacgtcgtgaagaatatctcgaagttggtcgcgatgcgctagcaaccgaggtgcaacgtggtggtttgccaatgcaccggctgttcaccgcacaatcaatgaagcaggttgctactgaactgcattaccctgacgttgatgcgttgtacacagcgattggctcaggctcgatctccgcagcacatgttgctaatagactcattgctgcatttggtgatactgaagacgctgaaaatactttggtatcgcgtacaccatttagcgagcttgtgagctcaaagtctcaagtgaccgataagaatggcattctcgttgagggaagtcctgatgttatggccaagttggctaaatgttgtatgccagttccaggcgatgagatcttcggttttgttactagaggtggtggtgtttccgtacaccggactgactgcacaaatgcggatagcttgcgtaatgaaccagagcgcttgattaatgtccagtgggcctctgaaggtggaagcgtttttgcagctactttgcagctggaagcgctggatcgtgagggattgctgatggatctaactcgagtgatcaatgagcaacgtgtacaggtagtagcgatgtcatcacatgcttcagatgaccatgttgctacggtacgttttactttttctgtctcagatactaaacagctgggatcgcttatgactcagcttcgtaatacagaagcagttttcgatgtttaccgtgtgacttctgggggt

SEQ ID NO: 17599 - DNA, 681 bp, Cornyebacterium diptheriae
atgtcgtattcacagcatgatcctcatgtcgcagcactcttggatcacacatccgagttgcccgccgccgagcgcgcctatctctatctaaaacaacagatcactcacggccacctcagcgacaatgacatgatcagtgaaggcgacataggcaaagtactcagtttgagccgcacgcctgtacgtgaagcatttctcaggctagaaaccgaagggttcttgcgtctctatccaaaacgtggcgccttgatcgtgccactcggagcagaagacatccgcgacatttacgagtcccgttacctcatcgaggctcactcagcccaaaaagttgcgcaactaccaagcgcacaacgcacggcgatcgtcgcagcgctagaagccaccatcgaaaagcaagaagaggccttaagccgcgaacgactcgacctctataccgacttcgacgcagagtttcatcaacacatcatgaaagctgctggcaacgaaattctggcgcacctctacaacagcttgcgggataaacaagcacgcatcacctcacgtatcgtgacccgcaacgctgacaacgcccaagtgtttgtccaaggccataaacaactaactttggcaatccgcgacggcaatagcgacacctaccaacaggttctttctgaacaccttgccacttcgcaacatcagttt

SEQ ID NO: 17600 - DNA, 2052 bp, Cornyebacterium diptheriae
atgactgaacctcgtagccgtgcgcgcaaggttacccgtaaagctggacctccggaagctgcggagacgccagttttccaagcacctgattctactgcgacggctgagccggcagattctgccgtaaagaactccgaaaaggctgaaaaagattcttctgcggagtcttcacgaaacaaccgcggacgcaacgctcagcgcggtggtcgtaatcgtcgtggaaatggttcttctaatcgttcttcacaatcgaagaacaaccagtccaacaatagaggacgacgcacccctgtgaaatcgatgcagggtgcagatcttacgcagaggctgcctgagccacctaaggctccgaagaatggtctgcgcatttatgccttgggtggtatttctgagattggtcgtaacatgaccgtcttcgagtacaacaatcgtttgctgatcgttgactgtggcgttttgttcccgtcatcgggtgagccgggagtggacctaattcttccggactttggaccgatcgagaataagctcgacaaagttgatgctttggtgattactcacggtcacgaagaccacatcggtgcaattccgtggctgcttaagttgcgtccggatatgccgattttggcttccaagttcactatggcattgattgctgcaaagtgccgtgagcatcgtcagcgtccgaagctcattgaagtgaacgagaaatcggatataaaccgcggtccgttcaacattcgcttctgggcagtcaaccactcgattcctgattgcctcggcgttgctattaaaactggtgccggattggttattcatactggcgacgtgaagcttgatcagaccccaccagatggtcgcccaaccgatttgcctgcactttctcgcttcggtgatgagggagtggatttgcttctttgtgagtcaaccaatgcaactgttccgggattctccggttctgaagcagacgtcgctccaactttgaagcgcctgatcagtgatgcaaagcaacgtgttatcttggcgtcattcgcatcaaacgtctatcgcgttcaggcagccgttgatgcggctgttgctgcgggtcgtaaggtagcgttcaatggacgctccatgattcgaaacatggaaatcgccgagaagatgggctatttgaaagcacctcgcggcaccattgtcagcatggatgatgcagccaagatggcgccgcacaaggttgtactgatcacaactggtacccaaggcgaacctatggcagctttgtcgcgtatggcacgtcgtgagcatcgacaaatcactgttcgcgatggtgatttgatcattctgtcgtcttcattggttcccggtaacgaagaagcagttttcggtgtaatgaatatgctgtcccagattggtgcgactgtggtaactggccgtgatgccaaggtccacacctcgggacacggattcgccggagagctgttgttcctatacaacgctgctcgtcctaagaacgtcatgccggttcacggcgaatggcgacacctgcgggctaacaaggaactggctatttccaccggtgtggaagcagaccgagttgtattagctcaaaacggtgttgtagttgaccttgttgatggtcgtgctcgtgttgttggtcagatgcaggttggacacctttatgttgatggtgtgaccatgggcgatattgatgctgaagttttggaagagcgtacttccttgggtgaaggcggcttgatcgctattaccgcagttattgattcgcgtactgctcgattgcttgagcgtccgacagtccaagccaagggattctctgaagacgcagtagcgatgatgccagaggtaactgagctggttgaaaagacgatgaacgatctggctgcagaaggcgaaaatgatccatatcgtatggttcagcagttgcgccgtcgtgtttcacgattcgtcgagcagaagtggcgtcgtaagccaatgattatgccaacggtcatcccgactacatcagcgaccatcgatatcgatgacgctgatgtgcgtgcgagccgcgaaagtcag

SEQ ID NO: 17601 - DNA, 1446 bp, Cornyebacterium diptheriae
atgaaatatatttcaacgcgcgacgcatcatcaacacctgctcattttaccgatatcttgcttggtggacttgcccccgatggtggtctttacctgccagaacagtatccacaactgaccgaagagctgcttgagcagtggcgtacgttgttagaagacaaagggtatgcggcactcgctgctgaagtattaaagctatttatcgacgacatctccgcggccgatattgaaaaaatcaccgcccgtgcgtacaccacgcccaagttttctgatgaagacatcgttccagtgacaaaactggagaacaacatttatatcggtcatctttcagaaggcccaacggcggcatttaaagacatggcaatgcagttgctcggcgaacttttcgaatatgagctagggcgtcgcggcgaatccctgaatatcctcggtgcaacctccggtgacaccggatcgtctgcggaatacgccatgcgtggccgaaaggggatccgcgtttttatgctcacccctgcgggacgtatgaccccattccaacaggcacagatgttcggtcttgatgacccaaatatctttaatatcgcgctcgatggtgtattcgacgattgccaagatgtagttaaagcagtgtcgggggattcggaatttaaaaagaactaccgaatcggagcggtgaactccattaactgggcacgtcttgtagcacaagttgtgtattacatttcttcttggcttcgcgttaccgatagcaacgatcaaaaagtgagcttttgtgtaccaaccggcaacttcggtgacatctgcgcagggcatattgcaaaacagatgggtcttcctatcgatcgccttatcgttgcaacgaatgaaaatgatgtgctcgatgagtttttccgcaccggcgattaccgtgtacgcagctctgcagatacgtatgaaacgtcttctccgtccatggacatttcgcgtgcttctaactttgaacgctttgtatttgatcttctcggacgagatgcaggcagagtagctgatctatttggtgtacaagtcaagcagggtggattcagcttggctcaggacccagcattcgccgaggccgcgaatcgttacggatttgcctccggtaaatctacccatgctgatcgcgttgccacgattgcagactgctacgaaaatcgtggcatgatgatcgaccctcataccgcggacggtgtgaaagtagcacgagattgggcctgcgatattgattcgccaattgtctgccttgaaactgcgcttccagttaagttcgctgacactatctgcgaagcaacaggacgcgaacctgagatgccagagcgctttgccaacatcatggatgctcaacgtcgtgtaactgatcttcctaatgacgtatcagtggtcaaagacttcattgtgactagcatcgaggaaaccgaaaaaactcag

SEQ ID NO: 17602 - DNA, 744 bp, Cornyebacterium diptheriae
atggcgatcaaagtaggcgtattaggagcccaaggccgagtcggacaagcaattgtcgccggtgtaacggcggcttatgatttggaacttgttgctgaggttgatcgcggcgatagtcttgatgtgcttgtgcaatcgggagcggaagttatcgtcgatttcacaactcctgactccgtcatggacaatctagagttctgtatttcacacggaattcattgcgtcgtgggaaccacaggttttactcctgagcgtttagaaatcgtcaaaaaatgggcggaagaaaagggcaacactggtgttcttattgcgccgaattttgctatttcagctgttctcactatggcttttgctcgtcaagcagctcgattcttcgattccgcagaagtagtggaatgccatcaccctaataaattggatgcgccatcaggcaccgctattcacacagctgaaggtattgcgcaggcgcgtcgtgaagccggaatgccaacacagcctgatgccaccgaacaatctcttgacggtgcgcgcggtgcagatgttggtggtgtgaaagtccacgcggtaaggatgaccggaatggtagctcatgaagaagtaatttttggtggtcctggtcaatcgctaacgattcgccaagattcttacgatcgaacctcttttgtgccaggcgtattggtcggagtgcgaaatgttgctcagcatctcggtcttacggtcggacttgagcactacttggacatc

SEQ ID NO: 17603 - DNA, 2265 bp, Cornyebacterium diptheriae
ttgagcacaaagccttccaacgtcgtctttaacattgacgaggaatttggaatcaccgaggcaatcgcaaccatcgataacggtgattttggaaagcgcaccatccgttttgagaccggccagttggcacgccaagcagacggatcagttacaacctatcttgacgacgacacgatgttgttggcaacgaccacggcatctaatcagccacgtgaaggattcgatttcttcccgctgacagtcgacgttgaagagcgtatgtacgcagctggtaggatcccaggatcgttcttccgtcgtgaaggccgtccttccaccgaagcaatcttggcttgccgtttgatcgaccgcccgttgcgccccacctttgttaaggggctacgcaacgaagttcaggtagttatcactgttctttccgtaaacccgcaagacatgtacgatgtcgtggcaattaacggtgcctctgcagcaactcagttgtcaggtttgccggtttctggtcctgttggcggtgtccgaatggcactgatcgcagacgatgctcaccctaaggggcagtggattgctttccctactcatgaacagcatgaacaagcactctttgagctcgtcgtagcaggacgtattgtctcgaagaagcaaggtaaaaagaccgttgatgatgttgccatcatgatggttgaggctggtgctactgagcaggttgtagatcgagttaaagctggagctccagctcctacagaatctgtggttgcagaaggtcttgaggctgctaaaccattcattgaggttctttgccgtgcgcaggctggattggccgagcgtgcagccaaggaaacccaagaattcccactcttcccgccatacactgacgttgtttacgatgcagtggagaagaaggtttctaagaaactgcgttcgttgctcacgatcaagtccaagcaagatcgtgatgaggcaacgaatgcttacatggaagaaatcgaagcagatctgattgcccagctcggatctgatgatgaggcggctgcatctaaggcaattcgtgcagcatacaatgctgtaatgaagaagattgtccgtcatatgatcttgacggaacacttccgcatcgacggtcgcggtgtcaccgatattcgtgatttaggtgtggaagttgacctcatcccacgcgctcatggttcgtccttgttcgagcgtggcgagactcagattctgggtgtgaccactctcgatatgctcaagatggagcagcagatcgattcattgactccagcaacttcgaagcgttatatccaccactacaacttcccaccgtattccactggtgaaactggccgtgttggctcacctaagcgtcgcgaaattggccacggtgctttggctgagcgtgcactggttcctgtgatcccaagtcgtgaagagttcccttatgcaatccgacaggtgtctgaggctttgggctcgaacggttctacctcgatgggctctgtatgtgcgtccaccttgtctttgtacaacgcaggtgtaccgttgaaagctcccgttgctggtattgcgatgggcttggtgtctgatgaagtagacggtgagactcgttatgtcgctttgactgacatcttgggtgcagaagacgcctttggtgatatggacttcaaggttgctggtactcgccagttcattaccgctttgcagctagatacaaagcttgatggcattccttctgaggtgcttgctcaggcgctatcccaggcgaatgatgcgcgtaacaccattttggatacgatggcagaagtaatcgaaactccagatgagatgagcgactacgcgccacgtattactgcgattaccgttccagtgaacaagatcggtgaggttatcggtccaaagggcaagaccattaactctattaccgaagaaactggcgctaacatttctattgaagaagacggcacagtttatgtttcggccgccagcggtgctgctgcagaggctgcaatcgaaaagattaacgctatcgctaacccacagctgcctaaggtcggagagcgtttcctcggcactgtcgtaaagaccactgcatttggtgctttcgtatccttgctgccaggacgcgatggactggttcacatctccaagcttggtggtggcaagcgtatcgaaaaggttgaagatgtagtcaacgtgggagataaactcgaggttgaaatcctagatattgacaaccgtggcaagatttccttggctccagtgaaaaacgaggac

SEQ ID NO: 17604 - DNA, 267 bp, Cornyebacterium diptheriae
atggctttgagcactgagcagaagaaatccatcttggctgagtacggccttcacgagaccgacaccggttctccagaggctcaggttgcgttgctttccgcacgcatcaaccagctgaccgagcacctgaagttccacaagcacgatcaccactctcgtcgtggtctgctgttgttggttggtcgccgcaagggtctgctgaagtacttggctgacaacaacgttgatcgttaccgtgacctgatcgcacgtttgggtctgcgtcga

SEQ ID NO: 17605 - DNA, 1035 bp, Cornyebacterium diptheriae
ttgtcgacaatcacaaggcctgagtctgcgagggcatcattcatagatgacagtctatggcttaaagtggatcaggtggacatttggcacagattagaagatattccagcagacttgaaagcctcagttatcaccattggcgtattcgatggtgttcaccgtggtcaccgaacccttgtagcagcagcgactgatcgagcacaagcattgggagttcctagtgtgctcgtgacgtttaacccgcatccgttgtcggtcctgcgacctgacaagatgcctccattgctgggaacggtaaatcagcgagcagatttagcagaatctttaggcgttgatcacatgttcgctatgaatttcactgcggaactctcgcacttgtcgcctgaagaattcttctgttctgtgatcaaagacaaactcaatgctcaagcaatagtagtaggaaagaattttactttcgggtacaaagctgcgggtacgacagacactctgaaagcattaggggagaagtacggagtcgagatctacgtactggatctactgacggaaaatggtgatgtagtgtcctccaccgctattcgatcggatttgctggagggggatattcgccgtgcgaactggggccttggccgtgaattctctgtccacggcgatgttgtgcgtggagccggtcgtgggggcaaagaactcggttttccaactgccaacctttattttcctgatagtatcgcgttgccagaagacggcgtctatgcaggttggctcactgttacttcttcggcgcccattgatggcgacatggtgcgtggggtgcggtatccggctgcaatttcagtcggacacaatcctacgttcggcgataagcgtcgcagcgtagagtcatttgtactcgaccgccatgccgatctttatgggcattccatagtcgtagagttcgttgatcggattcgtccgatggtcaaatttgatggcattgatgagttgcttgttgctattgaaaatgatgtaactcaaacgcgtgccatattgcatatc

SEQ ID NO: 17606 - DNA, 900 bp, Cornyebacterium diptheriae
atgaatgatgccctcgcagactcaggccttgtgattgtcgacaaaccccaaggaatgacctcccacgacgttgtttctaaaatccgtcggaccttttccaccaaaaaggtgggtcatgccggaaccctcgaccctatggctacaggagtgctcgtattaggactagagcgcgggaccaaattcctagcacatatggttgcgtctacaaagtcctatacggccactattcgtctcggtgctgctactactaccgacgaccgtgaaggcgaaacgatcacttcagcttcaccagatcaactggcaggaatcaccgaaaccaagatctccgatgccgttaagcagtttcggggatctatcatgcaacgtcctgccgcagtgagcgctatcaagatagatgggaaaagagcgcatcaacgcgtacgagaaggtgaaaaagtagaaattccagcacggccggtcaccatttctcggtatgacattttagagattcgtcgagacgcagctttcatcgacatcgacgtagaagttgattgttcttccggaacctacattcggtcactagcccgtgatctcggcgaagaactcggagtaggtgggcacttaaccgcgttacgacgaacacaggtaggaccgtttacgctcgataatgctgtaacactcgaaaaattggaagaaaacccacacgtatctttgacccttgaccaggcattagcagcgagctacccagttctttctgtttcagaaaaagaggcgagtgatctcgccatgggcaaatggctcactccacgcggtctgaaaggaatccatgcagcggtcgatcctcatggacgtgctatcgccttggtaaaagaacaaggcaaacggctagccaccatatttgtggcacgtccatcgaccctt

SEQ ID NO: 17607 - DNA, 1131 bp, Cornyebacterium diptheriae
atgaaggtcatcatcgaggcagacggcggttcccgaggaaaccccggaatcgctggatccggcacacttatctacaacgccgatcgctcccaagttctcaaggaatactcctatgtggtgggtaaagccaccaataacgtagcggaataccatggcctgctcaacgggctacgtggagcagcggaactcggagccaccgaagtatcggttcgcatggattccaagctggttgttgagcaaatgtcggggcggtggaagatcaagcacccagacatgaaagaactggcactggagtgtaagaaagttgcctcgtcgataggttccgtaagctacgagtggattccgagaagcgaaaactctcatgcggatgcacttgctaacaaagcgatggatgctctagctgaaggtgctgcagttggatttcttgaattagaagaacctgcagcgaagactgattctgaagaaaaggtagtcgaaactgcaacatctcctgcggtgtggaatggggcgactacccaggcgacgcgtttcgttttactgcgccacggtcaaacagcgatgtcggcggcccgccaatatagcggtaggagtaaccccgagctcaccagtgttggccttgaacaggcgcgccgggctgcggcatttattgggcgtcgtggcggaatcgatgcgatcgtggcctcgcctttgcagcgttgccagcagaccgcccatgaagtctctgaacaactgggtggtatgccagtacgcactattgatggcctgattgagatggattttgggcagtgggatggactgtcgttttctcaggcacacgaggctgatccagaacttcatagcgcgtggttagatgactcgcgaaccgcaccaccaggtggagaatctttacagcaagttcaccgcagggtgaagaaagttcgtgaagaattagaacgcaaatatgctggtaaaaccatcgtcgtggtaagtcacgtgactccgattaaatccattttgcgtcaagctttggatgcctccgcgtcgatgtttcatcgtatgcatttggatttggcgtctatttcggtcgctgagttttactccgatgggccaacgtgcgtgcgaagcgtgaacgatacgcattatctctacggg

SEQ ID NO: 17608 - DNA, 1533 bp, Cornyebacterium diptheriae
atgatcgcagaaagttctcctctgatggacttagtggatgtttcacggtggcagttcggtattacgactgtgtaccactttcttttcgtaccgctgacaatcggcttggctccgatcgtcgcagcgatgcaaactgcttggtttattaccaagaaagacatgtggcttcgttctacaaagttctttggcacactttttctcgtgaacttcgccatgggcgtagtcactggcattgttcaagagttccaatttggcatgaactggagcgagtactcccgctttgtgggagacgtattcggcgcacctcttgcgctcgaaggtttgattgccttcttcatcgagtccacattcctaggattgtggatttttggttggggtcgcctccccaaggcagtccacttggcgtcgatttggttagtcgcgatcgctgtcaacgtgtcggcttacttcatcatcgtggccaactcgtttatgcagcaccccgtcggtgcgcggtttaacccagaaacgggtcgtgccgagctcgtgtcgttaggcaagcttttggccaaccccaccgctttggctgcatggccgcatgcggtaaccggttccctgctcaccggtggcacctttgttgctggtatcgctgggtggtggatgattcgtgagcgtctggcacagcggacagaggatgctgcgttttggcgtaagaatttccggttgggtgcatggaccacgttggctagtgtggcgggtttgtcgctcaccggtgatatccaaggcaagctgatgtttgttcagcagcccatgaagatggccgctgcggaatcactgtgcgagacagagctcgatccttcgttctcggtgctctcggtaggtacgcacaataactgcgagtccgttaagcacttgatcgacgtgccgggcgtgctcagtattttgtcgcagaacaagctcagtggcgtcaccctagagggtgttaatcagctgcaggaaaagtacgaggctttgtacggtcctggcaactacgttcccaacttgtttgtcacctactggtcattccgcgcaatgatcggcctgatggcggcgtcggtagtgttggcgatcgttggtttatggatgactcgcaagggtcgcattccgcaactgcgctggttgggtaccgcagctcttatcgctgtaccgttcccgttcttagctaactccgctggttggatctttaccgaaatgggtcgccagccgtggatcgtggctcctaatccggaggctacccccggcagccctgacggcgaagatctcattcatttgatcgttgactttggtgtttcctcgcacccgacttgggtggtctggacttctctgattggtttcaccttggtgtatggatcgcttgcctgcgtgtggttctggctgatgaagaagaaggttgtggccggagccagcgaggattcttcaagcatgcttggctatggtcctcacagtagcgatcacgacgaatcccctgccgatgatctgttgcacctcggcgctcatgctacggaaggtaaggag

SEQ ID NO: 17609 - DNA, 1149 bp, Cornyebacterium diptheriae
gtgcaggtgactttgacgatcggctccctagcactcgactccgtagtagcgcttgcccccatggcaggcgtaaccaacattgcgtttcgtactctctgtagagaacaagaactcgaacgcaccggaaccgtatcggggctctacatctgcgagatgattaccgcacgcgccctcgtggagcgcaacgagaaaacactccacatgaccacctttggtccgcaagaagatattcgctccctgcagctgtacaccgttgaccccgagtacacctacaaagcggccaagatgatcgcagagaacaacatggccgatcacatcgacatgaacttcggctgccccgtgcccaaagtaaccaaacgtggtggtggctccgcactcccatacaaacgtcgactatttggcaacatcgtcgcagccgccgtcaaaggcgttgaaggaacagacatccccatcaccgtaaaattccgcatgggcattgacgacgaccacctcacctacctcgacgccggccgcatcgccgccgaagaaggtgccgcagccgtaaccctgcacgctcgcaccgcagcagagcgttactctggcgacgcccactgggacgctatcggcaccctcaaagagcacatgcgtgactccgggatccccgtcctcggcaatggcgacatcttcaaagccgaagacgccaaagccatgctcgacgcctccggctgcgacggcgttgtcgtcggacgcggctgcctcggccgaccttggctattcgcaggaatctccgcagccctgcgcggcgaagaactcccgccagaacccacgctgggcgaagtcacccgcattatctaccgccacgcagaactcttggcagaacacgacggtgaaaagaaagccagccgcgatatgcgcaagcacatgggctggtacatgcgcggcttccccgtaggcggtgaattccgcggcgccctcgcaaggatcaactcgcttgctgaactccgcgaggtgcttgcccccttcgcagactccaatgccctagcagccgactccgatagcgcacgcggacgccaaggctcacccgctaaagttgcactccccgacggctggctcgccgaccccgacgacgccacggtgcccgaaggcgctgagatcatgcactccggcgga

SEQ ID NO: 17610 - DNA, 1818 bp, Cornyebacterium diptheriae
gtgattggtggcgtacgccttcctgatggtggcggcgcaacgatccgtttggcacgcggtgcttcgctttctgacttcgccgagaagatcaatgctgatgctgctgctttggtgcaagcattgttcaacttgggcgagatggtgaccgcaactgcctctgtcaacgaagaaaccttgcagctgctgggcgaggaaatgaactacaaagtagaggtcgtctctcctgaggacgaggatcgtgagctccttgagtccttcgacctgcagttcggtgaagatgaaggtactgaagaggatcttgcaaagcgtcctccagtggttaccgtcatgggtcacgttgaccacggtaagactcgtcttttggacaccatccgtaagacaaatgttggttctgatgaggccggcggaattacgcagggtattggtgcataccaggtaacggtgaacatcgatgatctttcccgcaagatcaccttcttggatacgccaggtcacgaggcattcacggctatgcgtgcacgtggtgcaaagtccacagatatcgctgtactcgttgttgccgctgacgatggcgttatgccgcagacagtggaagcaatcaatcacgccaaggctgccgatgtcccaatcgttgtcgctgtgaacaagattgataagccgggtgcttcgccagataagatccgtggacagctgaccgaatacgggctggtcccagaagaatacggtggcgacaccatgttcgtggatatttctgcaaagcaaaacatcaacattgatggcctgcttgaggcagttttgcttaccgccgacgcttccttggacctacgtgctaacccagacatggatgcacagggtgttgctatcgaggctcacctcgaccgcggtcgaggaccagtggctacggtgatcgtccagcgtggcaccttgcgcgttggtgattctgtagttgcaggtgacgcatatggccgcgttcgtcgcatggtcgatgagtacggaaacgatgtggaagaagcaggtccatctcgtccagttcagatgcagggcctcaacggtgttcctggagctggcgacaacctcttggtcgttgaagacgaccgcgtggcacgacagatcgccaaccaacgtaatgcgcgtaagcgcaacgcattggccgcgaagacacgcaagcgcgtatctctcgaagacctagattccgtcctgaaggaaacttcaaccctgaacctgatcctcaagggcgacaatgctggttctgtggaagctctggaagatgcacttctcaagatcgaggttgacgacgaagttcagctcaacatcattgaccgtggcgtgggtgctgtcacccagaccaatgtgagcttggcagcagcttctgacgctgtgatcattgcgttcaacgttcgcgcagaaggcaaagctacagaagaagctaatgctgagggcgtagatatccgctactacacggttatctaccgtgcactggaagaagttgagcaagcacttaaggggatgctcaagccaatttacgaagagcgtgaaattggtcgcgccgaaatccgcgctattttcaaggcgtctgccgttggccttatcgctggttgcatggtcgagtcgggcaaggtacgtcgtaacgcatcgatccgtctgcttcgcgacggtaccgttgtggctgacaatgccaagatcgagtccttgcgccgcgaaaaggatgacgcaactgaggttgcggccggatacgaatgcggtatggtcctgtcctacccagatatccaggtaggcgacatcattgaggtcttcgagcaggtcgaggttcctcgcacc

SEQ ID NO: 17611 - DNA, 996 bp, Cornyebacterium diptheriae
gtgaatattgacgtccaagcgctgaaagcaattgaagcggatagaaacatcgctgttgatgaattgcttgaaacaattgcacgggctcttctgtttgcgtaccaagagtacaaagacacaaatacggttgaaaattcccgtgcgcgcgtggacatcaattcggtgaccggccacgtttcggtcatcgtctccgagcttgatgaagacggtgtagtcaccactgaatacgatgacacccctgaaaattttggacgcgtgggagcccaagcagttcgcgatgccattgttcgtcgtttgcgtgaagcggaaacactgaaagcatatgatgcctacagtgaatacgaaggtcgcgttgtgtcaggtatcgtacaagctgatattttcgccaacgaaaaaggtatcgtagttatccaccttggaaccgaggttgacggccaagacggaattttaatccctgcagaacaaattcctggtgaaagctttaaacacggtgatcgcgttaaagcctacgttgtaggaattaaccgcaccccacgtgatcttcagatcaatctttcacgtactcacccagaattagttcgacgattgtttgaactagaagtaccagaagttgctgatggatctgtagaaatcatcggtatcgctcgtgaagcgggacaccgttctaaggtagcagtgaaggcgacggtcaagggactaaacgctaaaggtgcttgcattggaccacgtgggcagcgcgttaacaacattatgaatgagcttggcggcgaaaagatcgatatcatcgacttcgacgatgatccagcgaagtttgttggtaatgcgcttgcaccatcaaaagtcgtccatgtagaaatcactgatgctgaagctcagaccgctcaggtaactgtgcctgactaccaattgtcattggcgattgggaaagaagggcaaaatgcacgcctagcagctcgtctgaccggttggaaaatcgacatccgttcagatgcaagc

SEQ ID NO: 17612 - DNA, 1755 bp, Cornyebacterium diptheriae
atgattacacgtctttctacacttttccttcgcactctgcgcgaagaccctgccgatgcagaagtaccaagccacaagttgcttgttcgtgcgggatacattcgtcgaacagctcctggtgtatatacttggttgccgctgggacttcgcacgttgcgcaaagtagaaactgtcgtgcgagaagaaatggatgccattggagcgcaagagcttttgttccctgcgctgttgcctcgtgagccatatgagcagacacatcgttggaccgaatacggtgattccctattccgcctgaaagaccgtaaaggtggcgactatcttctcgggccaacgcatgaagaaatgttcgcctcggctgtcaaggacatgtattcgtcctataaggatttcccagtcaccttgtatcagatccagacaaagtatcgtgatgaagagcgccctcgtgccggtattcttcgtggccgagagtttgttatgaaggattcttattcctttgatatgtctgacgctgggctagaagattcgtatcagcgccatcgtgaggcatatcagcgaatcctcgatcgtctcggtgtggaatacgttatttgtgctgcaacttcgggcgctatgggaggctcggcttcagaagagttccttgctgtaagtgacaatggcgaagatactttcgtacgtgccactgaagggccatatgctgcgaacgtcgaggccgtagttactcagccgggagtagagcgtccgctcgaacaagcacccgaggccgttgagtacgaaacgcctaatgctgaaaccattgaagcgctagttcaatgggcacagtctgctggcgttaccgttgaagatcgttctgttgcagcggcagacacattgaagtgtttgttggttaagatcacccagcctggtgctgaagaagcagagcttgcgggcattttattgccaggtgatcgtgaagtagacatgaagcgccttgaagcctccgtcgagcctgctgaagttgaattagcctccgaagaggacttcaagaacaatccattcttggtcaagggctacgttggcccacgggctttgaatgcccacggtgtgaaggtattggctgatccccgcgttgtgagtggaacttcatggattgccggtgcagatgccgttgaacaccatgttgttggcttgactatgggccgtgactttacggttgatggatacatcgaggctgctgaaattcgtgagggtgacccagcgccagagggacaaggtactttgacacttgcgcgtggcattgaggttggacacatcttccagctggggcgcaagtacacagaggcattcgatgttcagatcttggacgagtccggtaagcgcgccatccctacgatgggttcctacggcattggtgtttctcgattgatggctgttcttgccgagcagcgccatgatgaaactggcctgaactggccgctcgaggttgctccttaccaagtgcatgttgtggttgccaacaaagacaaggaagctattgaagcaggcgatgcacttgtggcagctcttgactcacatggcattgaggtgttgttcgatgatcgccctaaggtgagccctggcgtgaagttcaaagacgctgaactactcggcatgccatttgttgtggtcttgggtcgtgcattcaaagatggcaacattgagctacgtgaacgtggccaggaaacagtcttggtgtcggcagatgagatcgtcgatacggtcgtggctaaactgaaccgt

SEQ ID NO: 17613 - DNA, 654 bp, Cornyebacterium diptheriae
ttgcaacaagcagatgttattttggcagatcatctggggccggctagtgagcttgctcaattatgcgatgtatccacgaaggacatcattgatgtatcgaagttgccgtatggtaagcaggtggctcaatctaagattaatgaactcttgattgagcatgctcaagctggcaagaaggttgcgcgactcaaaggtggcgatccttatattttcggtcgcggttttgaagaactccaagcgtgtgccaagcatggaattgcgtgcgaggtggttcctggtgttaccagtgcggtgtcggttccggcgctggctggaattccgattactcaacgcggtgtagttcattcctttaccgttatttctgggcatgtccctccgcagcatccgcagtcgctaaatgattgggaagcattagcccgcacaggaggtacgttgtctgtgattatgggcgtgaaaaacgctggtgccatcgctcaagcgcttatcgacgctggtcgaggcgctgataccccggttgcggtcgtgcaagaaggatcgacagaaaaccaaaagtcgtttaaaacgactttggctcagttggggcaagcgatgaaagataatgacatcaagcctccagctgtctatgtcattggtgaggtggcaggccttcaggcc

SEQ ID NO: 17614 - DNA, 498 bp, Cornyebacterium diptheriae
atgccaattcctaagattcagctggaccatctcaatatttattacggcgatttccacgcggttcgagacgttaacctagaaattcttgcaaaccgagtcaccgcctttatcgggccgtcgggctgcggaaagtccaccgtgctgcgttcgatgaatcgcatgcatgaggtcactcccggcgcgcgtatcgacggccgcgtgcttctcgacggccgcgacatctatgcatccgatgcagatccagtgatggtgcgttcctccgtggggatggtgttccaaaaagctaacccatttcccaccatgtccatcgccgacaatgtagtcgctggtctgcgcctaaccggtgttaaggacaagaagcggctggctgaggtcattgagcgagctctgcgaggggcaaacctgtgggaggaagtaaaagatcgccttgctaagccaggtggtggtctttcgggtggccagcagcagcgactatgcatcgcgcgcgcgatcgctacc

SEQ ID NO: 17615 - DNA, 1023 bp, Cornyebacterium diptheriae
atgacctctacgctgcccacgctgaggcaaacagacggcacgttacgcccgcagtcacctgagcaaccgaccaagcaccacacccctaagcgacgtcgatacgccgaccgtatcctcgaagggctcacgcgcggctccgccatcaccatcatcaccgtggtgatcgccatcggcgccttcctactatggcgcgcgatccccgccatcagtaatcacccaggcggcctgctcggtttcctcacctacgccggcaactggaacgtggcaacaacctccgccatgctgttcggaatcccgaacctactggccaccacagtgctgatctccgcgctggcgctcatggtggcaatgcctgtggcgttgggcgtgagtatcttcctcaacttttattccccacgcatgctccgcacaccactgggttttctcgtggacatggtggcagccgttccgtcgatcgtgttcggtctgtggggctggcaggtccttgggcccgcgctctccggcgtctatgaatggctagcccgcgtgactaatggatttttcctcttccacgtttatcccaactcgccggcctttgctaccggccgcaacatcctgaccggtgctgttgtcctctccgtcatgatcttgcccgttatagccgcaaccacccgcgaagttcttgccgctgtgccgcgctcccacgtcgaggcagcgctcgcactcggggcaacaaaagcagagatgatccgcatggcagtgctgccctttggccgcaacggtttcatcgccgcctccatgctgggacttggccgcgcactaggcgaaacgatggctatctacctcattgtttccccatcctcgcagttccgcttctcgtttttcgacggcggcaccaccttcgcaaccgcaatcgcgaatgccgcgccggagttcaacgacgacctgcgcgccggggcatacatcgccgcaggcctcgtgctgttcattgtcacctttgtggtcaattcgctggcgcgcttgatcgcccagaagtcttctcgt

SEQ ID NO: 17616 - DNA, 1050 bp, Cornyebacterium diptheriae
atgttcgcgtttggcgataaggtgggtggcgtgcgcgctcttattgttagcaacccgaactcgacgacgcagtccgccgagatgtttcggcatgtcattccaacattgcgcgcagtgcctggcctggagcttcgcgcccagatgacccactatgcgggacatgctcgtcacatgtgtgaaaacctcaccgtagaggattatgatgtcgtcattgccgtaggcggtgatggcacggtcaacgaggtcattaatggcctgctaggcgatctaccttcggccccacccgcgttggcggtgatccctactggttctgccaatgtgtttgctcgcgcgctgggacttcctgcggatccggcacaagctgctgaggtgttagcggacgcgctgcacaagggcagcacgcgccggattaatttgggtaagtggggctcgcagtggtttgcggtcaatgcgggctttggtattgatgctgatgtgatcgcctcggtggaaagagtgcggcgtcgcggatttgctgcgacgccgctgcgctacgctcatgctgcgatacgttcgtggctgaagttgcaccggcatgcgcctcggatgagtgtgcgggccataaaccgcaatggtgaggaatttgtgcatgacgatctccccattgtgattgcttccaacactaatccgtggacatttttaggcccgttgcctgtggtgaccaatccgcgtaattcttttgatttgggtttgagcttgtgggcgattactgatcttcgtggcattggtggtgtggcttcgatggcacaccttgtaggtatcggacacaataaggtcattgccgatgtgttgcagcgtcgtacgctgatgtttgatgatgccactgaggtcagcatcgtgtgccacaagaaccaacgcttccaagctgatggcgaatatgtgggccagtttgatgaggtgacgttaaaagcagtggcggacgctattgaggtttatgcaccgacggagccggtgaaaccaactccgttatccatgctcaaagtgggtttgagtttcttcgatccacgcttg

SEQ ID NO: 17617 - DNA, 1050 bp, Cornyebacterium diptheriae
atgctgtccaaccgcgaatccaaaaaaatagcggtcattgtcaatgacttttcagaaatcaacattgatgcagctctcatcgcaggtgaagggcatctcgaacgcggcgaagacaaatttgttgaactaaccaacggctgcatttgctgcacgcttcgcgacgacctcgtccagtccgtcggcgcactagcatcaagcggcgactacgatcacatcgtgattgaatcaacgggcatatccgaaccaatgccggttgccgccaccttcgaatgggtatgggacgatggaactcgcctagccgacattgcaccgatcgacacgatggcaactcttgttgacgcttctcagttcctgacctacatgggcaagaaaacctacctcactgaccgtgatctaggtgtaaccgaagacgacgaacgaacaattgctgatttgctcgttgatcaagtggaattcgctgacaagatttacatcaccaaatcagacctcgtcgatgacgagcgataccatgccaccaaagcactcgtgcgtcgtatgaatccccgcgcaagtatcgacaaacttgtcaacggtcgagtcatcactgccagcggtgaaaaccgaaatgccattaatgacctcctcggagccatgtgctacgacgaagaaactgcgcggacctatcaagggtatgttgcagaactagataatccacacaccccagaaactgaggaatacggaattagctctttcgtattcaaaggagatcgtccctttgaccggcagcgcctcatagccgccttacgctcaactcgtggcatcgtgcgttccaaaggacactgctggatttccgaccgcatcgatatggtacaggtatggcaccaagccggacctgacctacggattgcgcctgcaggctactggcaatcagccggaattacaccctcaaacgaaattgtcgtcattggcgtaaattttgatcacgctcaagcccagcaacttctcaatgacgccatgctcagcgattccgaagtacaacaactgctgagcaccgccgatgcagccaagagc

SEQ ID NO: 17618 - DNA, 405 bp, Cornyebacterium diptheriae
gtgagcgaacttgttggattgatccatagagaccttcgaccgctgagtatgcgagaggctgaggtttcgctatctatacaaaatgtcatcagtgcgtactatgacggccggttcgcacggattctcacagtgccgcttttgcaacaggctaccgattttcggatgtctgtatggtctgcacttcgaagaattccgagtggttcgccagtatcgtatgcaacgttggcgcggatgagcggacatgaaggtgcggttagagctgcggcgtcggcatgcgccaacaatccggtggcattatttgtgccttgtcatcgtgtaattcgttctgatggttcttacggtggatttcgctatggtcttgccgttaagcgttcgttgttaacgcgagaagttgcacataataag

SEQ ID NO: 17619 - DNA, 1176 bp, Cornyebacterium diptheriae
gtgaagacgtgtctgtcgccatgtccttcattatgcccgctgaagcacgcgcatttgggatgtacgatctattttgtgacaaatcctgaatcactcgctacatattccagcccccttttgaacctgcctggtgcggcagaacctcaaggtggcaacgagattcccgaatacaccggtgtcgcttggcactacggccagcctctagtagagcagcgctactttgaacgcagcggcgggtttgtcgatcgttcgcatcgcggcgtgctgtgtataagcggcgaggatgctgcggtgtttttgaacaacttggtgtctcaaaaacttatcgatcttcctcacccttgggctggtgaggcgttggatttagatatccaaggccatgttgtgcaccacatggaaatcatcgccaccgatgaggtgttctatgtgcatgttcctgcagctcagttggaatccttgcacacctttttcacgcggatgatcttttggtcgaaggttactatcgaggtgatcgacgcggcagtgatcagtgttatcagtgcgcagcatcttgatgcactcgtcgacgttcctctccccgaggcattagcggttagccctgttattgatttttcgttgccgcgtcgcgacatcctagttccgcgtgccagcctcatggcggtagcggctagtttgcaggagcacggtttccagccggctggcatgatggcttataccgcagcgcgggtgcgttctgtgcaacccgtgatgagtttggacatggatgcgacaacgattccgcatgaggcggcgtcgttaatcggacggggtgaccacattggtgcggtgcatcttaacaaggggtgttatcgcgggcaagaaactgtggggcgggtggaaaacttggggcgttcgccacgagtgcttgtcatggtgcttatcgacggctccgcgcccgagcagcctcatcctgctgcgccgcttacggccggtggtcgcacggtgggattccttggcactgtggttgatgatttcgagctcggccccattggtcttgcggtagtgaagcgttcagcgctgaagtctgccaccttgcaggctggtgacgatgtggcgcttagtattgaccccgactccctgccacacgacgatggtgagaaagctggacgcgtagcaatcaacaaattgcgtggactg

SEQ ID NO: 17620 - DNA, 801 bp, Cornyebacterium diptheriae
ttggttgagtcgtggcctgtagaacagtgttctgcagctgtagtgacatctgatgaggtaactaccgcaggcgatggaaacatacgctatgaactcgcaagcgtgaccaaactcctgtctacctatgcggtcctcatcgccgttgaggaaggcgcgtttgctctggatactccatgcggacccgagggcgctacagtgcggcatttacttgctcatgcgtcgggtgtgggctttcggagcaccgacgcgtgcaaggcgccggagcagcgtcggatttattcttcctatggctttgagcttctggccgacgtgatcgctcatgaggccgatatgccgtttgcgcagtatctcgacgaggcagtgtgccagccgataggaatgacacatactcagttgtggggttcggctggacatgagagctattccacggtcaacgaccttgtgctcttcgcccgtgagattttgcagccatcattgatcgcgcaagaaacacttgttcaggcatgtactgtccaattcccagagcttcatgggatcgtgccaggctatggcatgtataagccgtgtccttgggggcttggatttgagatcaagggggagaaaaatccgcactggacagccgcggtcatgccacacaccacggtggggcattttggccaagcaggaacgtatttgtgggtagatcgagaatctcagcgtgcaatggttgcactaactaatcgttccttcggggattgggcaaagccgctgtgggctgaaacaaacgctggagtgtgggaacacctcgatcaattaaacctc

SEQ ID NO: 17621 - DNA, 1497 bp, Cornyebacterium diptheriae
atggcagactccaccactgcgcaacatgtcaccgacgaggtcgatgttgcgctcatcggtgccggcattatgagcgctacgttgggtgcaatgcttcgcaccctagaacctggttggacccaggttatgttcgagcgcttggatgcccccgcgcaagaatcttcttcaccttggaataacgcaggtacaggtcactcggcactatgcgagctgaactacacgcctgaggtgaaggggcgggtacaaattgacaaggctttgggcgttaacgaaaagttccaaatttctcgtcagttttggtcttaccaagtaaatgaaggcgttttgccttcgccacgtgagtggatcaacccagttccacacgtatccttcggacgtggcgaggatcaagttgcttatttgaagaagcgctacgaggcgcttgctgcgcaccctttgttcccgaacatgcaatatacggatgatcgtgccaagttcgctgaaatgctgccgcttatggctgatggtcgtagcgagtttgaaaaagttgctatttcatggaccgacgctggtacggacatcaactatggttcccagacgcgtcaattccttaaagccgcagagaaaaatggcaccgagatccgttatgggcacgaagttaaagacatcaagcgtgatggtgctaagtggcgtgtgacggtcaagaatgttcataccggagatacccaagttattcgcgctaactttgtgtttgttggtgctggcggcatggcattgccattgctgcagaaaacaggcattgtggaaatccgtggttggggcggcttcccagtttcgggtcagtggctacgatgcactaatcctgacattattgaacagcatgctgccaaggtttatggcaaggcatcaattggtgcgcctccgatgtcggttccacaccttgacacccgtgtgatcgacggtgaaaagggcttgctgtttggcccttatgctggttggactccgaagttcttgaagaagggctcctatttggatctctttaagtcgattcgtccgaccaacttgatgtcctacttgggtgttggtgcacaagagttcggccttaccaagtacctcatcacggaggtcatgaaggatcaggctgcgcgcatggaatcgctgcgtgaatacatgcctaatgcaaaggatgaggattgggagctggtcactgctggtcagcgtgtgcaggcaattcagcctgttgttggtcctcgattctcgactcttgcgtttggtacttcattgatcaactctgctgacggctccgtagcgggaatcttgggtgcctcgcctggtgcgtctatcgctccagctgcaatgcttgagctgctcgagcgctgcttcggtcagaagatggtggaatggggtccaacgatcaaagacatgatcccttcatacggtatccgtttggcaacggatcagaagctcttcaacgagatctgggatcacacccaagcaactttgcagcttgataagaag

SEQ ID NO: 17622 - DNA, 694 bp, Cornyebacterium diptheriae
gcccatgaccacaacgccaccatcccccatggtcgaataccgccgatggatctacgaccgcggcccccgccccatcacccgcggctggttccacctcgtggcctcgtggtgcgcactcgtctccggctccgtgctctccacctacgccttcatctaccgcccctggccacaagcactcggagttctcacctacgccatcggtgtagtcgccctcttcggagtctccgcagcctaccaccgcggccgctggaaaacccccgaagcagtcgcatggtggcgccgcgccgaccacgccaccatcggagtatttatcgcctcgacctacacccccttatgcctgattgccctgccacaatcactctgggtgctctacctcgcatgggcaggagccgcaggcgcactcatcctcagcatggtgtggatcactcacccgcgctggctagccgcaagcatatatattgcgctgggatggctcatcaccccactgatccccgcactatggcgggctgaaggggcagccgttgtgtggctgctttttataggcggaatcgtctactccgcaggcgctatcgtgtacgccatgcgctggccaggtagaaacgccaccatcatgggctaccatgagatttttcacgccgccacaatcgtggcagcaattattcacctcgtagccgtatggatggtggtcgtcccc

SEQ ID NO: 17623 - DNA, 1896 bp, Cornyebacterium diptheriae
atggcaggcaagggtcgaataccagatagtgacattcaggcgattcgtgagcgaacccccatcgaggaaatcgtaggggaatatgttcagctcaagcctgccggagcggactcgttgaaaggtctgagtccgttcaaagaagagaaaacgccgtcatttcatgtgcggcccaaccatggatacttccactgcttttccaccggaaaaggcggcgacgttttctccttcctcatggagatggaacagctaactttcccagaggctgtagaagtctgtgccgaaaaaatcggctaccagatcaattatcagggtggaaccaccggggctcgacgcgaagaaccaggaacacgcaaacgccttattgaggcaaaccgtgtagcccaccagttctatcgccaacaattagaaaccccagaggcagcagttgctcgccaattcctcttggacaggggattttcacagcagcatatctatggctttgagtgcggttatgcacccgaaggctgggataccatgaccaaatttatgctgcgtaagggctttgaattcaaagaacttgaagcagcaggcctatccactatggggcgacgcggcccaatcgaccgcttccatcgtcgattgctctggccgattaagtcggtgtccggtgatgtgattggtttcggtgctcgcaagctctttgacgacgacaaactcggcaagtacatgaacacccccgagacgttgttgtacaaaaagtcgaaagtgctctttggcctagatctggcgaaaaaatctatcgctagccaacaccaagctgtggtcgtggaaggctacacagatgtgatggccatgcatgcagcgggaatcactactgcggtggcagcctgtggtacagccttcggtgaagaacacctacaaatcctgcgtcgatacatgcttgacgacgcctacttcgctggatcccttatctacaccttcgatggtgatgaggccggacaaaaagctgctatgcgtgccttcgagggcgaccaaaaattcagtggacagtcctatgtggctgttgcccctgacggcatggatccatgcgatctgcgcctagcaaaaggtgatgcagcggtgcgtgatctcgtagcacagcgagtccccatgttcgaattcatcattcgaactttgatttcggaatatcccttggactcagtggaagggcgactccaagcgttgcgacgtgccgtgcccattgtggcgtcgatacgcgaccgtgctctaaaaactgaatatgccagattgcttgccggctgggtgggttggcctgatcctaacgaggttttgcaacaagtccgagccgaagaacgccgacctaaaacccagcctcgccagcgcagggcaacccgtatcgactctaatagtcagccagcgatgattcagtccatgttggtcatgccggaccgaaaagagccacggctatggccgcagcgagaggccctcaaaatcgcgctacaataccctgaacacgcaggggagtactttgatagcctccccgacgatgcgtttacccacgagtcctatgcggcagtcaggaaagcaatcgtggccgctggtggatgcagcgatgcgattcgtggttccacgtggctcgacgctgtccgtgacaatgtttacgacatggtgggcaaatcgttggtctctgagctggccgtagaacacatcattttggacgagtgggggctcgcagcccacacagataccacgctggcgcgattgatggaacaacgcatcggcaaccaaatcgcccagctcaaaggggcaatgcagcgcatgcgtccttcagaagatatgcaagcatataactctttgtttgcggatctcgtggctctggaacaaacccgccgtgaacttctagaaaagatttttaaa

SEQ ID NO: 17624 - DNA, 1785 bp, Cornyebacterium diptheriae
ttggaatatcgaggatacgattctgcaggcgttgccgtagttgctgacggtgctgtgagcttccgtaaaaaagctggcaaggtgcaagccctagaacaagaactggaaacaagccccatgccgcaatcgtgcctaggtattgggcacacgcggtgggcaacccatggtggccctaccgatgccaatgcgcacccacatgttgtcgatggtggcaagcttgccgtcgtacacaacggcatcattgaaaactttgctgaactaaaatccgagctattgggctttgggcacaacttcgtctcagaaacggataccgaagtagccgcaacccttctgggacacatttttaataatgaagctaacaaagacctcactcgtgccatgcagctgacctgccagcgcctagagggagcttttacccttctagcaattcacgcagaaactccggatcgcattgttgcagcgcgtcgaaactccccacttgttatcggcgtgggcgagggcgaaaacttcctcggctccgatgtgtctgggtttatcgactacaccaagaacgccgtggagatggataacgaccagatcgtgaccataactgccgatggctaccacatcaccgacttccagggcaatcacgccgaaggcaagccatttgtggtggagtgggacgcacaagctgctgaaaaaggcggctatgagttcttcatggaaaaagaaatccatgagcagcctgctgctgttcgagataccctcatggggcgtttcgacgagtccggcaagctcaccctagatgagttgcgtatcgacgaatctacgctgcgcagcattgacaaaattattgtgattgcttgcggtaccgcagcatatgctggtcacgttgcacgttatgccatcgagcattggtgccgtatcccaaccgaggtggagcttgcacacgagttccgctaccgcgaccccattgtgaatgagaaaaccctcgtggtgactttgtcacagtcgggtgaaactatggatacgctcatggctgttcgccacgcacgcgaacaaggtgcgaaggtgattgctatttgtaacaccaatggttcttccattcctcgcgaatcagacgcctgcctatacacccatgcaggaccagaaattgctgtggcctccaccaaggcattcttggcacagatcaccgcaacgtaccttttgggcctgtacctagctcagctgcgtggcaacatgtttgctgacgaggtcaatgctgttctgggtgagctccgcactatccctgacaaagtatcggcagttcttgatggggtagaagaccaagtaaagaccttggcgcaggacatgaaggatgcaacctcggtgttgttcctcggccgccatgttggtttccctgtggctctagaaggcgcactgaagctcaaagagttggcctacttgcatgctgaaggttttgccgccggtgagctcaagcatggtcctatcgcactgattgaggaagggcagcccgtcttcgttatcgttccgtcgccacgcggtcgtgattctttgcatgcgaaggtcgtgtctaacattcaagaagttcgcgcacgtggtgccatcacgatcgttatcgcagaagaaggcgatgatgctgtggaggcatacgcaaaccacatcattcgtattccacaagcgccgactttgatgcagccactgttggccaccgttccactgcagatttttgcatgcggtgttgcggcagccaagggattcgacgtggatcaaccacgtaacttggccaagtctgtgacggtggag

SEQ ID NO: 17625 - DNA, 1383 bp, Cornyebacterium diptheriae
gtggcacagaacaatgtcattgacacggtcgtcaacctctgtaagcgtcgtggcctcgtttatccctgtggtgagatctacggtggcacccgatccgcatgggactatggtccattgggaatggaactgaaagaaaacattaaaaagcagtggtggcgcacctttgtccaggcacgtgcagacgtcgtaggtctcgactcgtccatcatcttgcctcgtcaggtatgggttgcctccggacacgttgccacctttaccgacccactcgtagaatcccttcatactcacaagcgctaccgcgccgatcacctgatcgaagcgtatgaagcaaagcacggccatgcgccagaaaacggcctagctgatgttccagacccagaaaccggccagcctggtaactggaccgaaccacagatgttctcaggtttgatgaagacctacctcggccccgtggacaacgaacaggggttgcactacctgcgtccggagaccgcacaaggcatctttgtaaacttcaagaacgtgatgaccacggctcgtatgaagccaccattcggtatcgcgcaggtcggtaagtccttccgaaacgaaatcaccccaggtaacttcatcttccgtactcgtgaattcgaacagatggagatcgagtacttcgtgccagaagaactggccgatcagaagttcaacgaatgggtcgatgactgctggaactggttcgttgatctaggcatcaacccagacaacatgcgccgcttcgacgttccagaagaagatcgcgcacactactccaagggcaccatcgacatggagtacaagttcggcttccaaggaaacccttggggcgagctcatgggagttgcaaaccgcaccgactatgacctcggctgccacatcaaggaatctggcgaagacttgagctacttcgaccagaccaccggtgaacgctacgtgccatgggttattgagccttccttcggtctaacccgtgcactcatggctttcctcgtcgacgcatactgcgaagacgaagcaccaaacgccaagggtggtgtggacaagcgcgttgtgctcaagctcgatccacgtcttgcaccagtcaaggttgctgttttgccattgtccaagaaggacactttgacaccagtcgcagaagaagttgccgcaaaactgcgtcagttctggaacgtcgactacgacacctccggtgcaatcggtcgtcgttaccgtcgacaagacgagatcggcaccccattctgcgtgaccgttgactttgacaccctcgaagataacgccgtgaccgttcgcgaacgcgacaccatgacccaagaacgtgtggcactcgccgatctgcagtcttacctcgcagctcgtctgatcggctgc

SEQ ID NO: 17626 - DNA, 1437 bp, Cornyebacterium diptheriae
atgagctacgtggctgagaagaagaagatcgcaaacgtcctgtccaaccgctacgcctctgctgagctcaccgaactgtggagcccagaggcaaagatcctcctagaacgccagttgtggatcgcagtaatgaaggcccagaaaaatctgggtgttgatattccaacagaagcaatttctgcttatgaagcagtgatcgaccgcatcgatcttgacagcatcgcacagcgtgagaagatcacccgccatgatgtgaaagctcgtatcgaggagttcaatgctctcgcaggctacgagcatattcataagggcatgacctcccgcgacctcaccgagaacgtggaacagctgcagatctaccgttcgcttgagatgatgcgtaacaagtcggtgtctgttgccgctgctatcgcacagcacgcagcacagtaccagtccttggtcatggctggccgctcccacaacgtggctgctcaggctaccactttgggtaagcgttttgcctctgctgccgaggaaattttggttgctattgaccgcgttgaggatcttctgagccgctatccactgcgcggtattaagggccctatgggcaccgcccaagacatgcttgatctcgttggtggcgatgagtccaagcttgccgcattggaaactcaaatcgcagatcacctaggtattgcccgcgtgttcgattcagtgggacaggtttacccccgctccttggacttcgatgcggtgtctgctctggttcagttgggtgctggtccatcctcgttggctcacaccatccgtttgatggctggcaatgagacggtgactgagggctttaaggaaggccaggtcggttcctcggctatgccgcacaagatgaatgcgcgttcgtgtgagcgtgttggcggcctgcaggtgatcttgcgtggttacctcaccatggtggcggatctttctggtcagcagtggaatgagggcgacgtgttctgctcggttattcgtcgtgtggctcttccggatgcgttcttcgcgctggatggcatgtacgagacattcctcacagtgttggctgagttcggtgctttcccagcgatgattgatcgtgagcttgagcgctacctgccattccttgctaccactcgtattctgatggctgctgttcgcgtgggtgttggccgtgaaactgcccatgaggtgattaaggagaacgctgtggcggttgccttgaacatgcgtgaaaacggtggtgagcaagacctcattgatcgccttgcggcggatgagcggttgccgatgactcgtgaacagttggatgaggcgttggctgatcgacatgcctttattggtgctgcagaatcgcaggttgctcgcgttgttgaccgcgtgaatgatctggttcgtcgttatccagcggctgcccagtacacccccggtgacattctc

SEQ ID NO: 17627 - DNA, 1134 bp, Cornyebacterium diptheriae
atgtttccgagtgatcgtagccacgttgacccgtttcgagtgatgcagattttgggggaggcgcagtcgcgtgacgatgctctgctgttgtgcgtggggcagccgtcgacgggcgcgccgcgggcggtaattgagcgcgtccattcgcgtatcgacgcctctgcgctcggttacactgccaccttggggatccctgagcttcgtgaggcgattgctcagtggcatgctcagaagtatggcattgatacggctgctcgcaatgtggtggtgaccactggatcatctggcgggtttgttgccttgttcttggcggccctagaccatggtgatccgattgctatgacacgccctggttatccggcgtatcgcaatgcattgacggctctaggcgcaaagattatcgatctgccctgtggcgcagaaactcgcttccagcccacggttgagatgctcgaggcgtgcgtcgaaaagccgaaagcgctgattgtgaccagccctgataatccttcggggacgatcattgatggtgctgagctagcgcgcattactgattggtgtgagcgcaactcctgcctgctgatctccgacgagatctaccacggcatcacctatgggcgtgagtgccacagcgcacgggagtactccgataaagcagtggtggtgggctcgctgtcgaagtacttttctatgaccggctggcggctaggctggctcattgttcctgatgagctggtagaagcccttgataatttgcaagctaatcttgccctgtgcccgccggcggtgtctcaagaagcagcactggctgctttcggccctgaggcgcgcgccgagttggaaagccatgttcagcgctatgcccgtaatcgtgcgttgcttcttaaacggcttcctgagttggggctgggcaagtgtgcgccgccggacggtggcttctacctttacattgatgtatcggagcacaccgatgattcggaggtctgggtgcgtgaactgctcaacgccaccggtgtagcacttgctcctggtgtggacttcgaccccgttgacggacatcgttttgttcggctgagtttctgcggagaatatgaggaaattcttcaagcatgtgagcgtttgcgcacgttcatgcca

SEQ ID NO: 17628 - DNA, 735 bp, Cornyebacterium diptheriae
gtgaccaagcaactcgtacctccacagattccgcaagagttcctcccgcggcacatcgcgctcgtcatggacggcaacggacgatgggcaactaatcgaggactcaagcgcaccgaaggccataagcgcggtgaagctgttctcctcgatatggttgacgcttgtatcgctatgggtattccgtatctgtctgcctacgccttttccaccgaaaattggcggcgctctaccgacgaagtccgcttcctcatgggatttaaccgcgacgtcctgcggcgccaacgtgatgcccttaacgcaaaaggagtgcgagttcgttgggtaggacggcgcccacgactgtggcgcagcgttattagagaattggaagctgcagaagagctcaccaaggacaacaccaccatgacgcttgctatgtgcgttaactacggtggccgcgcagaaatcgtcgatgccgcccgtgagatcgctcgtcgatcagcagtcggaacactacgccccgaggagatcactgaagattccttcacgcagttcctcgacgagcctgatatgcccgatgttgatttgttcttgcgcccatcaggggaaaagcgcacatctaatttcttgttgtggcagtctgcttatgcggaaatggtgtatcaaaacaaattgttccctgattacacacctgaggatttgtttgcagcagtcgaagaatatgctctacgtgatcgccggtttgggggtaccaaa

SEQ ID NO: 17629 - DNA, 1332 bp, Cornyebacterium diptheriae
gtgcgtaagactcctgctcggctcgttgccggttgttttgcagcgttggtgctgttaggcactgtgctgttgttgttgcctgtgtctcgtgaaggccatgcccaggctgacgtcgttacggctctttttactgcgacgtcggctgtgtgcctgacggggctcacggtggtggatactgccacctattggtcccactttggtcaattggttattttggcgttgatccaagtgggtggtttgggcattatgaccttaacgacgttcgccggctgggtgctggtggggcgtatcggggtcaaggggcgcttgaacgcggcggcggaggggcgtggtcgtgaactaggggaggtaactggcctacttattgccactattggttttactcttgtggtggaatctgcggtggctgtggcgttgaccttgcgttttcacgctatgggttttgattggtgggcgagtctgtgggagggggttttccacgcggtttcggcctttaacaatgccggttttggtttgaggtctaataatttgatgccgtatgtgggcgatggttggattattttgcctatctcggcagcggtgatcgtaggtggtttgggttttcccatgctgttggagttgcatcggcgggcaacgtttcgccgtcaaggccaagcgattcgccggatgtcgttgacttcgttgtttactattgcgggcacgattgtgttgctcgctgctggcaccgtgggcattgcggtgttggagtggcgtggtgtgcttgccccgtttgatggtccaacgaagatgctggctgcatttttccattcggtgacctcgcgtacggcggggtttaattcgattgatatgtcgcagttgcatccgacgagcttgctgctcacggattcgttgatgtttattggtggcggttctggtggtaccgcaggtggcatcaagatcactactgttggcgtgttgttggcagtgatggttgcggagatccgtggtgatgatcagattctgattcggggacgacgcattccgaaccgaactgtgcgccaagcgttggcggtgaccatgttggcggtgctcacggtgggcgtcgctgttggcttggtgctggttttggcccctgagtttggtgttttagatctgtcttttgaggtggttagcgcttttgccactgtgggtttgagcacgggtattacgggctcgttgccgagtgctgcgcagttggttttggtggtgttgatgtatgccggcaggatcgggccagtatccttggtggcggcgctggctgcgcgttcaagtaagaggcagtattcctatcctgtagaaaggctgatcattggt

SEQ ID NO: 17630 - DNA, 822 bp, Cornyebacterium diptheriae
ttggtaggggagaagattgcgatcacggctaaccagccggagacaacgcgacaccccattcgtggcatcgtgcatcgcgaggatgcgcagatcatcgtggtagatacccctggtttacataagccacgcacgttgttgggtgaacgccttaacgaggttgtgaaagatacctatgccgatatggatcttattgccatcacggttcctgctgatgagaagatcggcccaggtgatcgctggattcttgatgcggtaaagaaggtagcacctaagacaccgctgctgggcatcgttaccaaggttgataaggcaagtcgtgatcaggtggcagtgcagctcatggagcttcacgagctgctcggcggtaattctgaggtagtgccagtttctgccgttaccggtgaacaacgtgacgtgcttctcgacgtgatcacgcggctgctgccagaaggtccgaagttctaccctgatgatcacatcactgacgatgacacggagactcgactttctgagctgattcgtgaggccgcattgagcggactcaaagatgagcttccgcactccgtagcggtgcaaattgatgagatcttgccaaacgatgagcgtgagggagttctcgacgttcatgcggtgatctatgttgagcgtccaggacaaaaatcgatcctgatcggtaaagatggccgccgccttggtcgcatcattcacaatgcgcgcccagaaatcatcaagattttgggaagcaatgtgtacttggatcttcgtatcaaggtgctcaagaactggcagcaggatccaaagcagctaggccgactagggttc

SEQ ID NO: 17631 - DNA, 1326 bp, Cornyebacterium diptheriae
gtgagccctgtagttttagggctgattacccttgctgctttgttgtgttcaggattgctaggaaccgtcgaagcggcagtcagctccatttcgcttgctcgagtggagcaaatcgacaaagataaagaaactcgtgcgtcacgagtgctactcaacgtcgtagaaaaacgagcagagcacatcaacctgcttgtactgctcaaaacctttctcgatgtgacagccgcggtgtttgccgtcatgctcactctggaactcatcgataacgagacgtgggcggttaccgcggcgatagtgggcgtagcgctcgtgacgttcacggttgtcggggtattttcccgcacggtgggccgcaagaatccttacacagtgtccttgtcctcggcatttttgctcagtgcgctagcgaaactgttagggcctattgcgcggttactcattcgcattggcaatatcatcgcgccagggcctggttttagagacggcccctacaacactgaagtagaattgcgtgaaatggtcgacatcgcccaagagcacggcgtggtggagatcgaagaacgtcggatgattcaatccgttttcgatttggcgtcgacaaccgcgcgatctgtgatggttccccgtactgatatggtgtggatcgaatcaggaaaaactgcgggtcaggccaccagtttgtgtgtgcgatcgggtttttcgcgtatcccagtgatcggggaaactgttgatgacatcatcggtatcgtctatctcaaagacctagttcagcgcacctactattctacggatagcggtcgttcagtgctggtagatgacgttatgcgaccggcaacttttgttcccgactctaaaaacctcgatgcgctgttgcacgaaatgcaacatgatcgcaaccacatcgccatgctggtagacgagtatggcggtattgccggtttgatttcgattgaagacatcctcgaagaaatcgtcggtgaaatcgccgatgagtacgatgaccgagaaatggctccgatcgaacgactaaacgacacggagttgcctacctatcgcgttgtgtcgcgattgtctttggatgatcttatcgaaaccatcgacgaggatcttgaccgagaaatcgagttcagcgaggaaattctcgatcaagtggataccgtgggcggactcattgcctttgaaaaaggcagaatcccgttgccaggtaccacagtgaccacgtctggtttgcagcttcaagccgaaggcggacgtgataggcgcggtcggattcaggttcgatctgtgctcgtgtctgttttgcctgtcgaatcgctttccgaacta

SEQ ID NO: 17632 - DNA, 756 bp, Cornyebacterium diptheriae
atgtcgcttccagtttttatctataacctcgaagacctcgtcgccggtaagcacagtgagattcctaccggcaatgttgtcctcgatggggcagaaggacgccacgcggtcagcgttaaacggatgacagcaggcgagcagatcaaactgatcgacggccgaggcggttgggcaacagcgacagtggcgtcgacaagcgggaaaagtacgctaaatcttcaagttttcgaatgcaatgaagaagccacccccacacctacggtgactgttttccaagcgattccgaaatcggaacgctcagaattggccgttgatctgcttacccaaggtggcgccgatgcgatcgttccgtgggaagcgcatcgatgcgtagccaagtgggtcggcgccaaacgatccaagggcgtgctcaaatggcagcaagcagcaatcgccgctgcgaagcagtcgcgacgcactcgaatccccgagattgccgagccaatgaccaccgctcagatcgcagaacaactcgagcaattcgacgttgtgctggtgcttcacgaggacgccgcagtgccgttcgctacggttgatgtcagcaccgcaaagtcaattgccttaatcattggccccgaaggtggagtgagccccgacgaagcagaagcattccgtaaagctggtgcccgcgccgtaaagctcggccccgaggtactgcggactgcatcagcgggaatcgtggcgctggctgctctcggagtacagacttctcgctgg

SEQ ID NO: 17633 - DNA, 2573 bp, Cornyebacterium diptheriae
atgttctctcgctggggagacttttcataccgccaccgcaaggtcgtacctatcgtcattgtggcgctgatcctcgccgtatacacgctcttcggagcacgcttggcggatcgcatgagccaagaaggctgggaagaccccggttcttcgtccgcccaagccgccgcgattgagcacgataccttcggccgcgataacgacggcgatgtgattttgctcttcacagcgaaagacggcatcgcgcacagcccaagctttgacaagatcaagaagtatctcgactccttgaaaaccgatcacagcgaccacgtcgatgccgtcacctcctactttgacaagcgcaacgcgcaactcatctccaaggacggcaccaccgccttcgcggctgtctcgctgcgtggcgacggcgaacaaaccctcaaggacttccgtgccatcgaatccgatctgcacccccagttcccagaggtcaccgtccaggtagccggatccaccgccgtggccgacgccctcgacaagggcatgtccggcgacatcaaacgcgccgaggtagtagccctgcccgtcgtcgccgtgctcctgctcatcgtcttcggctcggtagtagccgcaggcatgccactgatcgtaggtatcctctccatcttgggatccttgggtgtactgtccatcttggcaggctttgtgcaggtcaacgtgttcgcacagagcgtggtcaccctcctaggacttggccttgctatcgactacggcctgttcatggtgtcccgcttccgtgaggagctcgacgccggcagacccatccccgatgcggtacgcatcaccaccgccaccgccggcaaaacggtaacgttctccgcagctatggtcgcagtggcgctatctgggcttttggtgttcccacaggccttcctcaaatccgtcgcctacggtgcgatcagcgccgtgggcctagcagcactgctgtccatcaccgtcctgccagcgctttttggcatgctgggcaaaaacatcgacaagtggacgctgcgccgcacctcccgcaaggctacgtcgttacgctccaccgcgtggtaccgcattcccgcatgggccatgaagcactccgcgctggtcaccgtcggaattgttgcagtactactgggacttactttgccgcttgccggcgtaaagttcggcggtatcaacgaaacatacctgccgccgaacaacacggtgcgcacagcacaagcctcctttgacgagaacttcccgcacttccgcaccgaacccatcaagctcgtgatcaccggcgccaccaaccaacagctcgtcgacgtgtatcagcaggccaacaaagttgaaggcctcaccgatcgtttcaagcccagctcggccaccaaggacggcaccacggtcctatccgccggcattgaaaaccgcgaggacaacgccaaggtcgtagaacagctgcgagctatcgacgctcccgagggcgtatccgtctacatcggcggcatcccagcaatggaagtcgaatccatcgaagcgctctttgacaagctgccatggatggcgatctacatcgtcactgccacattcttgctgatgtcgctcgtattcggctccatgatcttgccagccaaggccatcatcatgaccatcctaggtttgggctccaccttgggaatcctgaccgccatgttcgttgacggtgttggctcctcgctgttcaacttctccgccggcccactgatgagccccgttctcgtgctcatcatggccatcgtctacggactatccaccgactacgaggtcttcctagtctctcgcatggtggaagcccgcgccaaaggcgaatccaccgacgaggccatcaagtacggcaccgcacacaccggtggcatcatcaccgcggcagctttaatcatgatcgtggtctgcggcgccttcgggttctctgagatcgtgatgatgaaatacatcgcctttggcatggtcgtagcattgcttttcgacgccaccatcatccgcatgatgctcgtcccagccgttatgcatctcctgcgcgaagacaactggtggggccccgcctggctgaaaaagatgcaagtctccgagggtggttccactgaacacgacccgcttcaccatctcaccgtagacttggatacagccggacgatccggacgcaccgttaaagacgatgccgagctagtaccattttccgaactgatgaaacgactgagtgaagaatcctaagatgcagatcctgaacaacaagtgggtgcgatttctgttcccccttgttgttctggtgatcgcagcgtttcttcttcgaaacaaaatgcccttccttgcagagggctacacccaagtcctagctgctaacaacactggcctcttcctcgccgtcgtcgccgtggtgatctccatcgtctcgatggcaggagtcatgcggcaactcctaggggccggcggcagccacgtgagcctgctacggaccacagagctgactttcattgccaactcatggtccggcaccttccccggcggcgctgcgatctccaccgtgtaccaattccgcaccatgc

SEQ ID NO: 17634 - DNA, 498 bp, Cornyebacterium diptheriae
atggacagcgaggagcctccgaacgttcgggtcgcctgctcgggtgatatcgacgaggttgtgcggctgatgcacgacgctgcggcgtggatgtccgccaagggaacgcccgcctgggacgtcgcgcggatcgaccggacattcgcggagaccttcgtcctgagatccgagctcctagtcgcgagttgcagcgacggcatcgtcggctgttgcaccttgtcggccgaggatcccgagttctggcccgacgccctcaagggggaggccgcatatctgcacaagctcgcggtgcgacggacacatgcgggccggggtgtcagctccgcgctgatcgaggcttgccgccatgccgcgcgaacgcaggggtgcgccaagctgcggctcgactgccacccgaacctgcgtggcctatacgagcggctcggattcacccacgtcgacactttcaatcccggctgggatccaaccttcatcgcagaacgcctagaactcgaaatc

SEQ ID NO: 17635 - DNA, 1734 bp, Cornyebacterium diptheriae
atggcaaaaaattttgcggaacaaatcgtagaaagcttggaaaaccaaggagtaaagcgcatctatggtttggtcggagatagcctcaacccgatcgtggatgcagtacgcacctccaacatcgaatggatccacgtccgcaatgaggaaacagcagccttcgcagcagaagcagaaagcctgctcaccggcgaactagctgtctgtgcagcctcctgcggccctggaaatacccacctcgtccaagggctttacgacgccaaccgaaacggcgccaaagtactcgccatcgccagccacattccctcacgccaaatcggctcacatttcttccaagaaacccacccagaagccctctttgctgagtgctccggctactgcgaaatggctaactctgcactccagggtgaggtcatcttgcaccacgccatccagtcgaccatggctggcaaaggcgtatccgtgctggtccttccaggcgatgtgaccatgcaagacgtggaggacgacaccttcaccggttcgcggatctccaacgcacgtcccatcatgtacccagacccagctgaggccgctgaccttgtcaaagccatcaacgaggccaaaaccgtcactttgttctgcggtgccggcgtgcgctacgcccgaaaagaagtcctcgaactcgcagaaaagatcaaggcacccatcggccacgcgctcggcggaaaaatgtacatccagtacgacaaccctttcgacgtgggcatgtccggcctgctcggctacggagcctgccacgacgcttccaacgacgccgacctgctgatcctcctcggcaccgacttcccctacaacgacttcttgccacgcaagaacgttgcacagatcgacatcgacggctcccacatcggccgccgcacccgcatcagccaccctgtggttggcgacgttgccgcaacaatttcgaacatcttgccgcacatcgaggaaaagactgaccgttccttcctcgaccgcatgctgaaaaagcatcaccgcaagcttaacgacgtgatcgaggcctacacctcaggcgtggagaagcacacccctatccacccagaatttgtggccaacattatcgacgaaatcgccgccgacgatgccgtattcaccatcgataccggcatgtgcaacgtttggggtgctcgctacatcacccctaatggcaagcgtgaaatgatcggctcgttccgccacggcaccatggcgaatgcgctgccacaggctatcggcgcatctgctgctaacccaagacgtcaggttgtcaccttctctggcgatggtggactcggcatgctcatgggcgagctgctcactgttaagctgcacaaccttcctattaagactgttgtgtttaacaactcctcgctgggcatggtcaagctggaaatgctggttcagggcatgccagagcacgaaactgatcatgagcatgtggactttgatgccattgctgctgcagtgggtatcgagcacattaagattacggacccagctaaggcacgtcagcagcttcaggcagcatttgattatgacggtcctgtgctgatcgacatcatcactgaccctaacgctttgtcgatcccaccgaacatcacgatggatatgctgatgggcttctctcgtgcagctacgcgcactgttttcggtggcggcgtgggccacatggtagatatggcgaagtccaatctgcgtaacattccaaagcca

SEQ ID NO: 17636 - DNA, 1884 bp, Cornyebacterium diptheriae
ttgctgacttctcaactatcgaaagcgatggactcaactgtgcgatctatagcaaagatcttacgtagtgcttcggctctatggccgttttacgtcggcgtggtgctttctgcaatcacggtagccgttttagcactgatcactcccttcatcattaaagatgcaaccgacaccatcgtagaagccgtcaatggcaatatggcgattgataacgcaacaaaaaaggtcatctggctatctttaggtctcttggtcgcacagctggcgaacacaatattaaacaacataggtggttacgtcggtgacgtgctagcagctaagctccgtcaaattctctcaacacggtatttcgcccaactcctaggaatgccgcaacgctattttgatgaccaagttaccggaacgattatcgcccgcttagaccgctcgatcacttcgatcacgcaggcacttcaagcaatggccaataactttttcccgatgctgatatctgtcgccgcggttttgggaattgctgcaacctattactggcctttggcggttcttctagcaacaatcattcctatttatatgtggcttacttccctaacaagtaagaaatggcaagtaatagaggagaaaaagaacgagcaaattgatttagccggaggtcgatttgctgaggttgtaagccaagtcaaggtcgttaagagcttcgtgtcagaacccagagaactacgttcctttggtgagcactacgaagaaacagtaaccttcacccgccagcaatctcgattctggcacttcatggacacgctgcgcaccggcagcatgaatctcgtattctttgctatctacctggtacttttctatcgcactcttcacggttatttcactttgggcgatatggtcctccttattcagttggtcaatatggcgcgcacaccaatgacaatgatgagctggatggtcgacacaactcaacgagctattaccggttcgaaagattacttcgaagtaatggaacgacagcttgagccaacagttaatccagagatttccgcagctacagccaccacaggccttcccgaactcaacactgctcctactaagccacttgtgcccgcaacagaacaacctgctttcgacttccgcaatgtttcatttgcttataacgaaggcgaagaagtacttcacaatgtgtcattccacgcaaatattgggcaaaaaatcgccttggtaggagaatcaggcggtggcaaatctacactagttaatttgctactaggtctttataagccgacccacggcgcactcaatgtatgcggtcaacacgcgtccgagatttcagcagaagatctacgcgcaaccgtcggagtggtgttccaagaatccaatttgttctctggcaccgtacgggaaaacatcgcatacgcacgcccagatgcatccttggaggaagtcatcgccgtcgccaagcgggcgaatgctcacgacttcatcgtgaacttcccacagggatacgacaccctgatcggcgaacgtggtttgcggctatctggcgggcaaaaacaacgtgtttcagttgcccgtgcaatgctcaaagacgcaccgattcttgtactcgacgaagcaacatcagcgcttgacacaaaatctgagctcgcggtacaagccggcctagaagaactcatgcgagggcgcacaacgcttatcattgcccaccgtctttcaacgatcgcggatgtcgaaacaattatcacattgaaaaacggtgcagtcgatgaaatcggttcgccacaagaactcgcacattcagggggaatttacgcggaactccttaaactgactgccaacgcctccgatgacagtaaagaacaactcaaacgctttgggttccattca

SEQ ID NO: 17637 - DNA, 1302 bp, Cornyebacterium diptheriae
atggcctctcccacctctgagaagaagctgtccggtggcgcaatcatcgccaccgcactcatgctgttctccatgttctttggcgccggaaacctgattttcccaccagtgcttggcgctaactctggagaaaacttcacccccgctattatcggattcctcctcggcggtgtcgcgttgccagcaatcaccattgttgccatgacgctgtccggaaacgacatccgcgatctcggatcccgcgccggctcatggttcaatctctcttttgcaatcatcgcatacctgtccatcggtgcgttctacgctatcccacgtaccggcgccgtcagttactccacagtcatccaaccagtgatgtcggagccatccacagcagcatcagtaggattcaacgctctgttcttcgccgtggcgttactgttgtcgcttaacccaacgggaatcgtcgataagctgggcaaaatccttaccccagcactgctcatcctgttggtcatcttggtcaccttggcagtattcaaactcaatggcaccgcagcacctgccaccgattcctatcgcgaggctccgctcaccagcggcctgctcgaaggctatatgaccatggactccattgcagcactggtcttcggcatcttggtgatctcgtctctgcgctaccaaggcggcaataacgagcgccaagtcattggtgcagccgtcaaggcatcactgatcgccgcaggtctgctgggcattatctacctcggcttgggctacatgggccacatcattccgaacggtcaaggttttgcagatggcgcggcattactttcctcagcatcacagcagaccatgggtaccccaggccaagtcattttcggcctgatcgtcttactcgcatgcatgaccacagcagtcggcttgctggcgtcgacaagcgaattcttcaaccgcctcatcccaggcatttcctacaagggctggctgttcatcttcgcactcatatccttcgcggtcggcagcttgggcctagccaaggtcctcgcagtggcagcgcctgtcatcaccttcatctaccccatcgcgatcaccctcgtcgccatcacagtgatcgaaatgcttgttaagaacctgaacctgttctggggctttcgccttcctgcatggactgttacgctgtggtctgcaattacagttatcgcaagcgatacccttgcatgggccccattccatgacatcagcctctcgtggatctggcccgctttgatcggcttcgttctcggtctgagcattgataaggccctcgcttacaagagt

SEQ ID NO: 17638 - DNA, 4584 bp, Cornyebacterium diptheriae
ttgggcgtcaaactcgacgcgaccatcgcttatgagtacccgacgatcgcggcgctgagccagcgtctgatcgagggtgctcctgaggctgccacccctgtctttacacagcgggaaactcagcgcaccgcgtcccatgatatcgctatcgtgggtatggctgcccgttaccctggcgcacatgacatcgaccaaatgtggtcgatgctcattgagggccgcgacggtatcaccgacctgccggagggccgttggtcggaatatgctgctgacgaggtcaccagcgaaaaaatagctaataccgatttacggggcggctacttagacgacattgctttctttgatgcagagttctttggactatctccgctggaagcagtcaatatcgatccgcagcagcgcatcatgttggagctgacatgggaggctcttgagcacgcgcacattccggcatcctcgcttaagggcaagccggtgggtgtgttcttcggttcttccaataacgactacggtatgttgatcggtgctgatccagccgagtcgcacccctatgcgatgacgggtaatgccagctcgattgtggctaaccgtgtgtcctatgccttcgacttccgtggcccgtcggtaagcgtggatacggcgtgctcctcgtcgctggtatcggtccaccaagcggtgcgtgcactgcgtgagggcgacgctgatgttgctgtctccggtggcgtgaacatcatggcggcaccattcgtgtctaccagctttggcgagcttggcgtgtttagcccaacgggcaagatccacgcgttttccgacgacgccgatggcttcgtgcgttccgacggcgccggtgtgctcgtgctcaagcgcgttgaggacgcggtcgccgatggcgataccatccttgctgtgatcaagggctccgcggtgaactccgacggacactccaacggtctgaccgcccctaatccagacgcacaggtcgatgtgctgcagcgcgcttacgccgacgctggtattgacccacgctacgtggactacgtggaagcgcatggaacgggcaccatcttgggcgaccccattgaggcaaccgcactcggtaaggtcctaggccctggccgtgacgcagcaacccctactttgctgggttctgctaagaccaactttggtcactccgaatcggctgctggcgctgcgggcctgatcaaggtggtgttgtcgatgatgaacaacacgctgccagcgtccctgaatttcgctggtccgaaccgctacgtcgattttgatgccgagcacctcgaggtcgtggaagatccacgcgaatggcctgagtattccggcaagaagatcgccggtgtgtccggatttggttttggcggcaccaatgcgcacgttgtgctgagctcgtatgagccggcggctgatgtggaacgtcgtcacgctccgagcctgatcgacccggacaacccgaatgctgtcacccttgaggtgtcgggattgctgccgtcgcgacgtcgtgaagcagccgccgcgctggccgacttcctcgagggtcgccccgacagcgacctgcccaaggtggcgcgctcgaccgcaaagcgcaaccatggccgctcccgcgctgtggtcacagcagaaaccaccgaagaggccgtcaaacgcctgcgtaccgtcgctgagggcaagaccgccatgggtatcgcagtggccgacgcccccagcaacgcacccgtgtttgtttactccggtttcggctcccagcaccgcctgatggccaagaagctgctgggcgtttccgaggagttcgcgcagcgtatcgcggagctcgacgagctggtggtttttgaggccggctggtccatgctggacatcatcaccaacgatgaggaaacctacaccaccgaaaccgcgcaggtcaccatcactgccatccagattgcactgacagatctgctggcttcctttggtgccaccccagcgggtgttgtgggcatgtcgatgggtgagatcgctgcggcctacgccgccggcggcttgtctgatcgcgatgcgatgaccattgctatccaccgtgctcgtttgatgggcgagggcgagaggtcactacctgaggaccagctcggcgctatggccgtggtggaattctccgtggaggcgctggaggagttccgtcaacaaaacccagagttcagcggtgtggagccagccgtgtatgcagcccctggcatgaccactgtgggtggcccacgtgaggccgtgatcaagttggtggaaaaacttgagtcagagggcaagtttgcgcgtttgctcaatgtgaagggcgcaggccacacaagtgctttggatccgctgttgggtgagctcgcagctgaaacctcgatgattgagccgaaaccactgcgcattccgctgtatagctcggtggatcgcgcgactgtatatcctgtcggttcggtggtgcacaccaccgattactggttgcgttgtacgcgtcagtcggtgtggttccaagacgcaacagagcaggcgtttgcgcatggagccatgatgctggtggagatttctccgaatcctgttgcgctgatgccaatgatgaacaccgcttttagtgttggtaagtcggatgcgcagttgttgtttgcgttgaagcgcaaggtggacgaggtggcgtcgatacgcgacctgttggccaagatttatgttacgggcgcgccgatttccttcgagtatggcgatggggagattattcctgcgccgcatattccatggaagcgccagcattattggacgtccgcgcggccgtcgtcaagcaatcgtgttgcgatgccgggcacgaaggttacgctgccaggtggcgcgcaggcgtttacgatggtcgccgatcaggtgccgtccaccgcagcgcttatcgacgctaccgtcacctccgtacaaccaggcgcgcaggtgctcgcgatttctgaaaccgcaacgctgcccgcaaccggtgagctgaccactgttgctaccccgaatgttggcggtgtggcagtggtggtttaccgcgtgattgacggccaaacccagcagatcgccgaggcatttgccaccacgcttagtgccccgcatcccccagccgctgaggttgctcctgattcggtggtaggcacagtagttgaggtagaagccccggaggtgcccgataacctgttgtgggatcccgccacggagactgtggaggagcgcctgcgcgctatcgtttctgaggccatgggctatgacgttgcggatcttccccgcgagctgccactgatcgatctgggcttggactccctgatgggcatgcgcattaagaaccgtgtggagcatgacttccagattccgccgctgcaggtacaaaccctgcgcgatgcttctgttgcagacgtggttgcccttctggaggaactcgttgccgaccgtggcgcagcccagcccgccgaaactgaaatcgctatcgagcacactgctaccgccgcggaatcccatgaggtaggcgtggcgccacgtgatgcttccgagcgtttggtctttgctacatgggccggtattacaggggctgcggcagccggggtgaccagcactttgccgaagatcactgaggagcaggctcgagaaatcgcagagcgcctcacagagcgtgctggtgttgcgatgtctgcggagcaggtgcagcaggcggaaacgcttgaacctttggccaacattgtgcgcgagggattagaaaccgatgtggagggcaacatccgtgtgctgcgtgcccgccctgagggctccacgcaaccagctgtgttcatgttccacccagccggcggtagttccgtggtgtaccagccgctgatgcgtcggttgcctgcggacgttcctgtctacggtgtggagcgtcgcgaaggctcgttagaggaacgcgccgcagcttaccttgatgagatcaagcagtactctgatggcctgcccatcattttgggcggttggagcttcggtggcgcgttggcttatgaagtggcttaccagctgcaggattccgacgtggagatcgcaacgattgctttgctggacaccgtgcagcctgcgcatttggcgccggatactaaggaagaaacggttaagcgttgggagcgctactcggcgtttgctaagaagacctatggtcttgatttcccagtgccctatgagctgctggaaaccgctggtgaagatgcgctattggcgatgatggcggagttcttgtccaccactgatgctacagagcacggtttgtcggcgggtgtgctggagcaccagcgtgcttcctttgtagacaaccgcattttggatcgtatggacatgcagcgctgggcaaatgtgaagattccggtgatgttgttccgtgctgagcgtatgcatgatggggctattgagctggaacccgcgtacgctgagattgagcctgatggcggatggtcggctatcgttgaagatttggtgatcatccaactatctggcgaccacctagcagtggtggatgagccggagatcggtaaggttggtgtggcgctcaccaacaggattgaacagctacagggtaag

SEQ ID NO: 17639 - DNA, 1812 bp, Cornyebacterium diptheriae
atggatctgcataaagccatgggccagttctttgacgccaagggtaatattgcgctaccgccacaaattacgctcgcaggtctgagcgaattgttctaccagtcggatgttgatggcggcgatcgtcattgcatgcgctactgggattacagtactgaaggtggtgtggctcgtgactacaaccgccgcgagatcaacactcgcattaagtcggtggcagcacgcctccagcaggtggcacagcctggcgaccgtgtagctattttggctaacaacagccctgagtacctctttggctttatcggcgctttgtatgcgggtctggtgcctgttccgctgtatgatccttcggagccagggcatgccgatcacctcaccgctgtgatggctgacgcgcagccagctatcgtgctgacgaacaatgcgtcggctgcggcggttcgtcgtttcttctctgcgctgccaggtgcacagcgccctcgtattatctccattgattcgctgccggatacgcttgcgcaaagctatcagatccctacgccgtcgatggctgctgctgcgatcaaccctgttgatctgccagcattcttgcagtacacctcaggttctacccgcacccctgccggtgtggtactgaccaaccgttcgatcgtgaccaacgtgctgcagattttcgccgcggctcagttgaagactccgctgcgtttggtgtcgtggctgccgctgcaccatgacatgggcatcattttggctgtgtttgttacgttgttgggcttggagttcgagatgatgtcgccacgcgactttatccagcagccaaagcgttggattgaccagctggatcgtcgtgagggcgataacgcgatctacgctgtggttccgaacttcgcactcgagcttgctgcacgttatgcaacgccttctgagggcttggatctttctgctgttgagggcctaattattggttcggagccggtcacagagaaggctgtggaggcattcgctgagaggttcgggccttatggtttgaacaggcagaacatgcgcccgtcgtatggtcttgctgaggcatcactgctggtaactaccccgcagaccccgcagcgccctgtgatttcttactttgatcgtgagcagttggctgcaaaccgtgcggtgatcgtcgacaagggcgataacgctgtggcgttgaccggtgtggggcaggttgtgcgcccacagaacttggtcatcgtggatcctgagacgcgcaccgaggttgcagatggcactatcggtgagctgtgggcgcatggtgagaacatggctgctggctacttggatcgtccagaagataccgcagagacgttccacaacaccttggctggtcgtttggagaactcccgtgcggcaggtgtgccggaggagtccacgaagtggatggcgaccggtgaccttggtgtgattgtggacggtgaactctacatcacgggtcgtttgaaggatcttgtgattattgcgggtcgtaaccactatccgcaggatattgagtacacggtggatcatgcttcggagcacatccgccctgctgcagtggctgcctttgctattgagggcgacgccgtggagcagctgatcatcttggcggagcgcgatctggatcgtgatccatctggtgatgcggaggctatcgacgctatccgtgctgccgtcacggaggctcatggtgtggttcctgcggatatccgtatcgtggccccagatgagatcttgcgttcttcctccggcaagattgctcgccgcgtgaataagaaggcgtatcaagaatcccac

SEQ ID NO: 17640 - DNA, 807 bp, Cornyebacterium diptheriae
ttggacgcggcaggtcttgcccgatcaacatttttctatcaccagcaacgcctaaacgtgccggataagcatatcgacctcaaggaagcgatcgtcgaggtcttcacgcggacgaaccgtcgttacggctaccgcaggattcatgctcaccttcgccaagacggatggaatgtcaaccataagctggtctacaagctcatggacgagctaggccttaaatccaaggtcagagcaaagaagaggtacaacgcctaccaaggtactgtcagtcacatcgcggagaatgtgctggatcgatgcttcacgcccgataaaccaaacacggtgtggacgagtgatgtcaccgagtttcgcattgccggcaccaaggtctacctgtcaccaatcatggatctctatgaccgctcaattgtgtcatatagtgtgtctacctcaccaaatacagcatttacgtcaaggtcattgaaagatgccatcacaagccaatctcccggaagcggcttactggtacacacagatcaagggatccagtaccaacattccagctggcgtgacctcatcacaagtattgacggcatccaatcgatgtccaggaaaggcaactgctacgacaatgctgtaatggaaaacttcttcggacacctcaagtcagagatgcaccacggtgaatcattcgacggtctcgagcacttcagacaggccctggatgggtacatccactggtataaccacgaacgcattcagaaacggctcaagggcctggccccgatgcaataccggaaccagacccttgaaccactaaccgca

SEQ ID NO: 17641 - DNA, 1635 bp, Cornyebacterium diptheriae
ttggttttcagacatatacgtatcggctatccccccgatttagggatcagcctaagatcacgttcagtgcagtttcaaccccgaacataccaccggctaccctgtgtttttatgacttccttctcccggagcgcggtagcaacattggcgctagccggcattgtagggctgagcggatgctcggccggatcgacttcatctcaagcacatcacatctccacttctgccaaggctgtgtccctcggactaacggcaccacctgcttctctcgacttcaccacagtgtcgggcgcagcaatcccccaagcactcatgggcaacgtgtacgaaggtttggtgcgaatccaacaagatggcaccatcgtcccgtggttggcacagagctggaccgtctcgccggatggcaaggagtatattttccggcttcgcgacggcgtgacgttctccaatggcgacgctttcacggcagaaaccgcaaagttttccatcgacgcagttaaatccgacgcatggacgaacggattgaagaaacaaatggccaaggtggaaagcaccgaagccatcgaccaccacacgttaaaagtgacgttgaaggctcgttccaatacgtggctgtggtccatgggtacgctcgttggcgcgatgatgactcccaacggtgtgtcggagctagcaacgaaaccagtaggcactggcccctacgttgtagataaatgggcagttggcacttccctatcgttagctgcacgccctgattattggggtgaacaaacacgcaatgaccgcgtagtgttccgctattttggggatgccatcgcgctaacaaatgctgtgcgttcgggtgatattgatgcagcgattggtctgcaaaatccggagcttttagagtcgataacttctcgtggtgacctaaaagttcatgttggttccactaatggcgaagtggtgctcagtatgaataacaaccgtgcaccttttaatgacgttcgcgtgcgccaggcagtcatgtatggagtaaaccgccaagacattattaacaccacgtgggaaggctacggaactgacaccggtggccagccggttcctcctacagatccgtggtaccaagaaatgaatcggtacccatatgatctagaaaaggctcgcgagctcatgcgcgaagctggtgcggtaggtactccgattactatttcggtaccgtctttgccctacgcaaattctgcgtcggaaatcgtgctttctcagctacgcgatatcggattcgatgttcgattggaatccacggagtttccttccgtatggttgtccaaggtttataaggccaaggattatgacatgtccgttgtggcgcacgttgaggcccgcgatattccgaatttgtttggtaaccccgattactatttgggttttgatgatgaacaagttcgagagcttttagcccaggctgactccggtgacgcagactcctatgtatcgaccatgaagaaggtagtcaaccgaattatggatcaagctggtgcagataccctgtttaacctgcctaatatcgtggtcacccaacctgatgtttctggagttcccaccaacttggtcgctgatggcctcgttgtgtccaacatttcccgctcggaggac

SEQ ID NO: 17642 - DNA, 819 bp, Cornyebacterium diptheriae
atgcgtcatctttctataggcggaaaaatcggcgcatcgattgtgatcgccgtagcacttctcgctctcgtgtccttggtctggacgccctatgatcccctgcatgtgatcgccgatgaccgcctgcaggggccgtcgatacgccatcttttaggcactgaccgctacggccgcgacgtattttctcaaatcatggtgggatcgcgcattacgctgctcgtcggcgtggttgctgttgccgtagcctcactcattggaacgccgctcggcatgtgggccggcatgcgtcgtggcctcgttgataccatcatcatgcgtttttccgacatcgttctagctttcccagggctgctcatggcgattgttgctaccgcgatatttggcgcaagctccgtcaccgcgatggctgccattggtgttgctagtattcccaccttcgcgcgtatgtcgcgggcggcgaccatgcaggtcatgtcgcaggattacattctggccgcccgaaacgccgaacaaggctggttgaccattgcgcgtcgccacgtgttgcctaacatcatgggcgtggttattgtgcaggcttctgttgcctttgcactggctattttggctgaggctggtctgagcttcctcggcctcggtactcccccaccggatcctagctggggtcgcatgctgcagtcggcgcagtcgtcgctagctactgccccgctacttgcagtctttcctggcatggctatcgccctgacggttctcggattcaacttgcttggcgacggcctacgtgacctcgtcgatccccgcacaaggaggcgcaactca

SEQ ID NO: 17643 - DNA, 1575 bp, Cornyebacterium diptheriae
atgaccacatcgaacgtagtatttgatccccagaagtccgagcttcttgccggctgctttagcgattccaacaagcctgccaccttatatatcaatggaacgtggcagcctgccgatagcggcgaggtgcgcacgattaccaatcctgccgacggcagcgtggtgggtgttgtgtcggaagcgggggagcacgatactgagcgtgcgattgcggtagcgcgtgagacgtttgatcgcggtgagtggttggcggtgcctgcggttgagcgtggcaagattttgctcaaggttggtgcgctgctgcgtgagcataaggatgagtttgcgcgcgcggagtccgctgatactggtaagcgcttggcggagtctgagctggatatggatgacattgccaatgcttttgattactttggcactctcgcccagcacgaggcgggtcgcgtggttgatccgggtgatccgaatgttcgctcgcgtatcgacgtcgaaccggttggtgtgtgtggtttgattacgccatggaattacccgttgctgcaggtttcgtggaaggtggctccggcgctggctgctggtaacactttcgtgttgaagcaggcggagcttacgccgcatacggccatgatgttgatgactctctttgagcgtgcaggtgttccagctggtgtggctaacttgattaccggtgctggtgctaactgtggcaatccgttgtctaccagcccgttggtggacatggtgtcctttaccggtggtctggtgaccggtcgtttgattgcgcgcaatgcagctgaaacggtgaagcgtgtagctctcgagctaggtggtaagaacccgaatgtgattttcgcggacgccgactttgatgctgctgtggataacgctctcaacggtgcgtttgtgcactccggccaagtctgttcggcaggttcgcgcattgtggtggaagagtccatccatgatcgctttgtggaggagcttactcgccgcgctgcccagattaagctcggcggtcctctcgacaccgctgcggagactggaccattgatctcccttgagcaccgcgacaaggtggatgcgtatgtggttgccgccaaggagcaaggggctacgatcaccaccggtggtcgtgttgccgatgccagcgacaatgagggatcgcacgctaccggaaacaccgatctggcggccggcgctttctacttgccgacgatcatcgacaactgcacccgcgacatggactgtgtgcacgatgaagcattcggtccaaccgtgactgtagaaaccttccgtaccgaggaagaagccatcgccattgccaatgacaccgaatacggtttggctggtgccgtgtggacccaggatgccggaaaggctgagcgtgttgcccgcaagctgcgccacggcaccatctggatcaacgacttccacccttatctgccacaggccgagtggggtggcatgaagcagtccggtaacggtcgcgagctaggccctaccggtttggcggagtaccaagagcacaagcacgtctaccagaacatcgctcctgctgtgactgggtggttcgccggc

SEQ ID NO: 17644 - DNA, 1389 bp, Cornyebacterium diptheriae
gtgactttacgcatctttgacacaggaacacgctcgcttcgagattttgagccgattcgtcccggccatgcctcgatctacctgtgtggagcaaccccgcagacacaaccccacattgggcacgtgcgctcaggggttgcttttgacattctgcgtcgttggctgattgcccaaggcctcgatgtcgcattcgttcgcaacgtcaccgatattgacgacaaaatcctcaccaaagcagcagaaaacggtcgcccatggtgggagtgggtgtctacctatgaacgcgaatttacttgggcgtataaccagctcggtgtgctgccgccttcagtagagccccgcgcaaccggacatgtcacccagatggtggagtacatgcaacgcctgatcgataacggctttgcttacgccgccgaaggctccgtgtacttcgacgtggcagcatggaccgctgctgaaggctcggactacggcagcttgtcgggcaaccgagtagaagagatggaacagggcgaaacagagatcaccggcaaacgcggtgcccacgacttcgcactgtggaaggccgcaaaaccaggggaaccctcgtggccgaccccgtggggtgatggtcgcccaggctggcacctagagtgctccgcaatggcaacctggtacctcggcggcgaattcgatatccactgcggtggccttgatcttcagttcccacaccacgagaacgagatcgcccaatcccatgccgcaggcgatggttttgccaactactggatgcacaaccactgggtcaccatgagtggcgagaagatgagtaagtccctgggcaacgtcttgtccgttcccaacattttggacaaagtccgcccagtcgagctgcgctactacttggggtctgcacactaccgctccatgctggaatactccgaaggtgcactgctggaagccgccgccggctatcgacgcatcgaagcattcttaaccaaggttgccgacgtagaagcagggcagtggaccacagaatttgaagaggccatgaacgatgacctcgccgtcccacgcgcactggcagagatccacacccaagtccggcatggaaactccgcacttgcagcaggagacgtcgataaggcccacgagatcgccgcaagcgttcgcgctatggccgccgtgctaggcgttgatccactcgacgagaagtggcttgattccgcagcctccgactcctccacaaacgccgcactcgacgtattggtacaagctgagctacagcgacgcaccgaagcacgcgctgccaaggactgggcaactgctgatgaagtccgcgaccgcctccacgccgcaggcatcaccgtcaccgatacacctgatggcccaacatgggcactgaataac

SEQ ID NO: 17645 - DNA, 480 bp, Cornyebacterium diptheriae
gtgactaatacccccatcatcccgcgtgtgggcattgctaccgacgcacaccagatcgaggccggaaaaccctgctggattgcctgcttactgttttccggcgcagacggttgtgaaggccacagtgatggtgacgtggtagcgcacgcgcttgtcgacgccctcttgtccgccgctaatcttggtgacctaggctcctttgtgggcgttggccgcaaggaatacgatggcgtgtctggtacccagttgctcaccgagtgccgcgagttgttggaatcccatggttttaccatcggcaacggtgccgttcagctggttgggcaatctcccaaaatggggccacggcgggaagaagccgagcgcgtgatgagcgaaattcttggtgcgccagtgtctgtttcggcaacaacaaccgaccatcttggttttaccggtcgcagtgagggtagggcggccgttgccacggctgtggtgtggaag

SEQ ID NO: 17646 - DNA, 645 bp, Cornyebacterium diptheriae
atgtccgattttcgcacccgctaccagatcgtttctgaaaaaatcgccgcagcagctcagcgttctgggcgtaagcccagcgatattcgcctcatcgcagtgagtaaaaaccatccggttgcggcagttcaggaagccatggacgcgggagtgacggtgtttggcgaaaataggccccaagagctggtagaaaaagcgcaggcgatccccaacgcctattggtgtgctattggtcggctacagcgtaataaggcaaaagatattgttcgctacgcgcaggagtttcatgcattggattcgctgcggctagcgcaggcactggatcagcggcttgaccaccagctcgatgtgtttgtgcaggtaaatacctctcatgaggagcaaaaaggtggcattgcgccaagcgaagtcgagccatttttagctgagctgtcgcagttttcacatctacacgtgcgtgggctgatgacgatggcgcgcaacgatccttgcgagcgcgttgtcagagcgtcgtttagcgagctaagagagcttcgcgacgccctcctcccccacggtgaactatccatgggcatgtcgggcgatttcgagtgggccatcgaagaaggtgccacttctgttcgagtaggaagcgcattattttta

SEQ ID NO: 17647 - DNA, 1791 bp, Cornyebacterium diptheriae
atgagtctacgaaaccgactccgcacctcaatttctaagcacgacacagacggcgaatttattcaagatcggacacgcgatgtggttatcgtgggtggcggttccgccggctccgtgctcgccaatcgcctctccgaagaccccgacacaagcgtgatggtgctggaagccggtcgctccgactccctgtgggacctattcatccacatgcccgcagcattctctttccccatcggcaacaagtactacgactgggcttatgagtccgagccggaaccacacatgaacggtcgccgcatctaccacgcccgcggcaaggttctcggcggctctagctccatcaacggcatgatcttccagcgcggtaaccctatggattacgagaagtggggcgcgttgccaggcatgcagaactgggacttcaagcacgtgctgccgtacttcaataagatggaaaccgcactaggtgccgatgctaacgatccccgtcgcggccacaccggcccactgaagctcacccgcggtccagctaccaccccgctgttccaagcatttttccgttccgttcaagaggccggttacaacctgactaacgacgtcaacggttaccgccaagagggattcgccccctttgaccgcaacatcttgaagggcaagcgcctttctgctgctcgcgcttatttgcacccagttatggatcgtaccaaccttgaggtgcgcactcgtgcgctgaccactcggattttattcaacgaggctggcacacaggccaccggtgttgagtatgagtggaagggcaagaagcgtcgtgtaatggccaagaaggtcattttgtgcggtggcgccttcaacaccccacagttgttgcaggtcagcggcgtgggcgaccgtgaagtgctggaaaaggccggcgttgacgtggtcaaacatctgccaggtgtgggcgctaacttgcaggaccacttggaggtgtacgtccagtacaacgtgacaaagccggtgtcggtgcagccgaactacaagatgacgcgtcgtccgtttatcggtttgcagtggttgctgaccaagaagggccctgtggcttcttcccactttgaggccggcggcttcgcccgttcaaatgacgacgaagcatacccgaacttgatgttccacttcctgccgatggccattcgttacgacggcacccagccggaaggcgatcacggtttccagttccacgtaggccctatgtactccgataccttgggccatgtgcacattacctcgccggaccctaaggccaaaccagagatcatctttaattacttggccactgaacaggatcgtcgcgagtgggtagaggccgtgcacgtttcgcgtcgcctcctagatacggatgcgatgaaggaatacaccgacggcgagatttcacccggcgcggacgtgcagaccgatgaggagatcttggagtgggtgcgtaacgacgccgaaactgccctgcacccatcatgtactgcgaagatgggctcggctgacgacgccatggcggtggtcaatccggaaaacatgcaggttcacggtattgatggcttgtatgtgtgcgatgcttctgcaatgccgattattactaacggcaacatctacgcacctgtgatcatgatggcagagaaggctgccgatctgattaagggcattaagccgctggcaccgatcgacgttccgttctacaaggctaagcagggcatgccgctctatgccgagggcgagaaggttcgcgatcacacgaaggctattcctggcgctgaccac

SEQ ID NO: 17648 - DNA, 1161 bp, Cornyebacterium diptheriae
atgtctgactttgatctgatcgtggtaggttctggcctgtttggcctgacggttgctgagcgtgctgctagccagctgggcaagaaggtactcatcgtggagaagcgttctcacttgggtggcaatgcttattcggaggcggagccagagacgggtattgagatccataagtatggtgcgcatttgttccatacttctaataagcgggtgtgggattacgtgaatcagttcaccgctttcaccggttaccagcaccgtgtgtttgctatgcacaatggtactgcttaccagttccctatgggtttgggtctgattaaccagttctttggccgttactatactcctgatgaggctcgcgagttgatcaaggagcagtctgcggagattgattccaaggatgcaaccaacttggaggagaaagcgatttcgctgattggtcgtccgttgtatgaggcgtttattcgcgattacacggcgaagcagtggcagacggatccgaaggagctgccggcgggtaacatcacgcggttgcctgtgcgctacaactttgataaccgttactttaacgacacttatgagggtctgcctgtcgacggctacgcgcagtggttgagcaacatggctgatcatgagaatattgaggtgcggttggacaccgattggttcgaggtgcgtgaggatctccgcgcacagaaccctgaggctcctgtggtctacaccggcccactggatcgctactttgactactctgagggtcaccttggttggcgtaccttggactttgaaactgaggtgttgaacacgggtgatttccagggaacccctgtgatgaactacaacgatgcggagttcccgtacacgcgtattcacgagttccgtcatttccacccggagcgtgaggatcgccacccgaaggataagacggtgattatgaaggagtactcgcgcttcgcggaagagggcgatgagccgtactacccaattaacaccccaagtgaccgcgagatgttgttcaagtaccgcgagcttgccgacgccgagacggagtccggcaaggtgtacttcggcgggcgtctgggcacgtaccagtacctagacatgcacatggctattgcttcggcattgtcgatgtttgataacaagcttgtcgacgccctgaaa

SEQ ID NO: 17649 - DNA, 618 bp, Cornyebacterium diptheriae
gtgcgtgcgatgattacctctgcggtagttgacgaggtcatcgtgattatcagcccccaaatgcaggattatgctgccgcgctgttgctgcgttgggggctttttagtgccgacatccctgtgcgtcttgtccatggcggtgccgagcgcgccgactccgtgtggtgcggtttgcaggctatcgctgataccgacgcggtggtgctcatccatgattcagcacgcgcgctcaccccacctggcatgattgcccgagttgcacgtgcggtactcgacggtaacaaggctgttattcctgttgtgccggttgccgacaccatcaaaacagtccacggcaccaccgttgtagcaacgcctccacggagagacttgcgtgcggtccaaaccccacaaggtttcgatattgcggcattgcgggcagccaatattgcatatcagcagcaacaacccgattttgaagcgaccgacgatgccagcctcatggagtggtttggcaccccagtgctgtgcgttgatggcgaccccatggcctttaaggtgactacgccgcttgattatgcgctggcaaaagccgtgactgaccaagcagaaccaacgattttcgaggtacccagtgac

SEQ ID NO: 17650 - DNA, 1389 bp, Cornyebacterium diptheriae
atggctaaaaaagcacgtagctcgcatatatgctccgaatgcggatatacctcaccgaaatggttggggcgctgcccagactgtggcgcatggggaactttccaagaacatcaggtgacaacgagctctgcggcaccgagtgtgagcgccaaacctattgggcttacccccactagccccgctcagtcgataacgcgtatcgacgccacccgttccagcacgcaatccaccggaattggggagcttgaccgtgtattaggctccggcatagtcccaggctctgtcgttttactcgctggtgagccaggcgtgggcaaatccaccctgctgcttgaggtcgccagcaagtgggctcagcagaaacaaggatcaagcaaccgcacagcgctgtatatcactgccgaagaatctgcggggcaagttcgtatgcgtgctgagcgcacaggagcattacaggattctttgtatttagcggcggaatccaatctggacatcgtgtttggccatgtagaacagatcaaaccaagcctgctgatcatcgactccgttcaaaccatgcaggcaagtggtgtggaaggtgtcgcaggcggcgtggcgcaatcgcgtgccgtgacagcggcaatcaccagccttgccaaaaccacggggatcccctgtctgttggtaggtcacgtgactaaagacggcaacgtggcaggcccgcgcgtactagagcacctagtcgatgtcgttcttaactttgagggtgaccgccactccagcctgcgcatgctccgcggcattaagaatcgttttggcgcaaccgatgaggtcggctgctttgagcagcattctgatggcatacgtgaggttccagacccctctgggcttttcctctcccatcatggcagcacaccagatggcacagcagtaaccgtagccatggatggcgttcgtcccatcgtcgcggaggtccaagcccttgtggttcccacggaggcgaaaaatcctcggcgtgctgtcacaggccttgatcccacgcgcgttcccatggtcttagcggttttagccgcacgcgccggaaaacgcacccatagcagcgaggtttacgttgccaccgttggcggtatgaaggtgggagaacctgccaccgacttggctattgcgctcgccacagccagtgccctgaataagaaggccattgcagaaaaaactgtggttcttggcgaggtaggtctagcaggcgagatccgtcgagtgcctaatatccagcgccggctcatggaggcccaacggctgggctataagcgcgctattatccctgtgtctgaccccagtgaaacaaaggttgccggaattaaggtgatacaagtaagcgacatccgagaagctctggatgtcgctgtggga

SEQ ID NO: 17651 - DNA, 2634 bp, Cornyebacterium diptheriae
atgttcgagcggtttaccgatcgtgcacgtcgcgttatcgttctggcacaggaagaagcgcgcggcctcaatcacaattacatcggcaccgagcacatcctgctcggacttattcacgagggtgagggcgtggccgctaaggcgctcgagtccatgggcatctcccttgaagcagtacgccaagaggtagaagaaatcatcggccacggctccgagccaccagctggccacattccttttactccacgtgccaagaaggtacttgagctctccttgcgtgagggtctgcagatgggacataagtacatcggtactgagttcctgctgctcggccttatccgtgagggcgacggcgtagccgcacaagttttggtcaagctcggcgctgacctgccccgtgtacgccagcaggttatccagcttctttccggctatgaggggggcgaaagcccagaaaacaataacgagggcgaggctgtgggtgctggtactggcgctggccgtgctggccgcggtggtggcgcaggcgagcgctccaactccttggttttggaccagtttggtcgcaacctcacccaggctgctaaggaaggcaagctggatcctgtggtgggtcgtgagcaggaaattgagcgcatcatgcaggtgctctcacgtcgtaccaagaacaacccagttcttatcggtgagccaggtgttggtaagaccgctgttgtagaaggcctagctctagacatcgttaacggcaaggtgccagaaacgctgaaagacaagcaggtttactctcttgacctcggctccttggtggcaggttcgcgctaccgtggtgacttcgaagagcgcctgaagaaggttctcaaggagatcaaccagcgtggcgacatcatcttgttcatcgatgagatccacaccctcgtcggtgccggtgccgcagaaggcgctatcgacgctgccagcttgctcaaacctaaactggctcgtggtgagctacagaccatcggtgctaccactttggacgagtaccgcaagcacatcgaaaaggacgccgcacttgagcgtcgtttccagccagtgcaggttccagagccttccgtcgatatgaccatcgagatcctcaaggggctacgcgaccgctacgaggcacaccaccgcgtctccatcaccgatggggctctcgcagcagcagcacagctgtccgatcgctacatcaacgatcgcttcttgccagataaggctgttgaccttatcgacgaagccggcgcacgcatgcgtatcaagcgcatgaccgcaccggaatccatccgcaaggtagacgatcagatcgcggaagtccgtcgtgagaaggaagccgcaatcgatgcccaagactttgaaaaggccgctggcctgcgcgacaccgagcgcaagttaggtgaagagcgcgctgagaaagaaaagcagtggcgctccggcgacctagaagacatcgccgaggtcggcgaggagcaaatcgctgaggtgctgggcaactggactggtatcccagtgttcaagctgaccgaggaagaatcctcccgtctgctgcacatggaagaggagctacacaagcgcatcatcggccaagacgatgccgtcaagagtgtttctcgcgccatccgccgcacccgcgctggcctcaaggacccacgccgtccttccggctccttcatcttcgccggcccatctggcgtgggtaagaccgagctatccaagtcactggccaacttcctgttcggcgacgacgacgccctaatccagatcgacatgggcgagttccacgaccgcttcaccgcgtcccgtctgttcggtgcccctccaggatatgtgggctacgacgagggcggtcagctcaccgagaaggtccgccgcaagccattctccgtggtgcttttcgacgaaatcgaaaaggcgcacaaggagatctacaacaccttgctgcaggtcctcgaagaaggtcgcctcaccgacggccaaggccgcgtggtggacttcaagaacaccgtgctgatcttcacctccaacctgggtacccaagacatctctaaggctgtgggcatgggctttagctctgtcggcgagcacgatgccgatggccagtacgaccgcatgaagcagaaggtcaacgacgagctaaagaagcacttccgccctgagttcctcaaccgtatcgacgaaatcgtggtattccaccagctcacccaagagcagatcgtcgaaatggtggacctgctcatcggacgcgtatccaaggcacttgctcaaaaagacatgggcatcgagctcaccgaaaaggccaagaacctgctggcaaagcgtggattcgatccagtactgggtgcacgaccattgcgtcgcaccatccagcgcgagatcgaagacgtactctccgagaagatcctcttcggtgaggtcggcgctggtgagatcgtcaccgtggatgttgaaggctgggacggcgaatccaaggaaaccgacaaggcttccttcaccttcaccccacgcgtgaagccgctgccagacgagttcgaagaggcaaccccatctgaggaagctcaagaagcagtgattaacgctgctgagactgaggttccagaagaagaagtcaacatcgaaaac

SEQ ID NO: 17652 - DNA, 846 bp, Cornyebacterium diptheriae
gtggcacattttctactcttaccctgcacatattgtgtgccatactatttgttcatgacgatgtattggcatcacacttccacgactcccgtatcgacagtgttgatcactcacggatacgcggagcatcagggtcgctattcggcgcttgttcgaagccttctgaattacaacttcgatgtagttacgtttgatttgcctgggcacggctatgcaccgggaccacgggcgtgtgtggacgtcgataagctcgtggattttcatgtagccttgcgccaccgtgccgagcaggattgtcgcttaagaacagaaacgatgtgtctttttgggcattcgatgggcgggcttattaccgcgctttctgtgttagaggattcctcgaatgtttccgccgttgcgttgtcagggccggcgttttcaccgtttcctaagactccccgcgttgtcacgcgaatgctgcgctgtagtgcacgtatagcgccacgattgaaggtgttggcgctgccacaagatgctatttcgcgcgaccctgaggttgttgccgcttatgccaatgatccccgtaattacacaggccgagttccgctgctcacaggtgcgtcgatggcacttgctggccagaaagcgctggcgcaggcttctcaatgggatcgttcggtgccattgctggttatgcacggcagcgctgatcggttagccgatattgagggctctcgtaattttgccgcgagcgctggcggcacgatgcgccctgtagacggcgcttttcatgagatttttaatgaaccagaagcaccacagctgcgtgcagagctatgtgagtggctgcacgccaactgtggtgcg

SEQ ID NO: 17653 - DNA, 513 bp, Cornyebacterium diptheriae
atggcacaaggcgaagtcaacgtcaccattgttggtaatctcgttgcagacccagaacttcgcttcacccctaatggtgtagcagtaaccagcttccgtgttgcttctacctccaagaagtacgactcccggtcgaaccagtgggtagatggtgacgcggttttcttgcagtgcaacatttggcaccaagctgccgaaaacgttgcagaatccctcaccaagggcatgcgcgtgatcgtcaccgggcgtttgcgtcaacgctcatatgaaacccgtgagggtgaaaagtgcactgtgatggagctagaagccgatgaggttggtccatcgttgcgttacgcatctgcgagtgtcatgcggaatgagcgtaattccggcgggaatggggttggttcccagccgtcgaccggcggttttggtggacaggtgtcacaacctcagtctggtggtcagtctcagggtagtgacgggtggaataatccagcgcctcttggtgatgataacccgccgtgg

SEQ ID NO: 17654 - DNA, 1005 bp, Cornyebacterium diptheriae
gtggtcagtaccgacgctaaacactccaccggtaccagttccaatgcgggtaccggtgagagctcagcgaaaaagaaagcgcagacggcaattgctgcgatagtcatgcttttgtgcggactgttagggctggtgattctgttctatccagtcgtgtccactcaacttaacaattatgaacagtctaaactcgcccgacagtttggtgcagacgctgcccaagctgaccctgccgtagttgctgctgctcttgatgctgcccatgcctacaacgattcgctagaaaatggacccctgcaggatccgtggaccggtggagatagcactaaggatcctgcctatcaggcatacgagaaactcttaggggaatatccggcgatggctcagatctctatcccggctatttccgtgaaccttcccatttaccacgggacaagcgacgccacactcctcaaaggtgttgggcacctttacggtactgcgctacccgttggtggactggggacgcgttcggttctaacagcgcattcaggtatccaaaaatcgaccttctttgacaatttagaaaaggtcaaaaagggtgacgccatttatgtacgcaatattggtgagaccctgaaataccaagtacgcgacatcgaaatcatccgtccagcggagattgaccgtatccagccaatcccagaccgagacttaattaccctcgtgacctgtacaccctatggaatcaatacccataggcttttggttactgccgaacgtgtccctatggaacccggtgaggcggaccgtgcatttgccggtgacggaattgtctggcagtggtggatgaagctagctatcggtgtgttggtggtcatccttctcctaactgggtggctcattatccgtattttgcgagctaggaaattcgcgaagaaaacagctggagcagacgctgctaaatctgttgaacctggtgatattgaggcgtcgctaagcgcttcagcggccgaggagtcccag

SEQ ID NO: 17655 - DNA, 1560 bp, Cornyebacterium diptheriae
gtgagtaacgctaaaaacacccaagacgtacctgagcagctccgcattcgtcgcgagaagcgccagaagcttatcgacgccggcgtggagccgtatccagtcatcgttgaccgcacccactcgatcaccgagctgcgcgagaagtttgcagctgtgccagagggtgaaaagggcgacaagccaggcgttacctacctcgaaccaggcgaggattccggcgtagaggttgccatcaccggccgcgccctgtttatccgcaacaccggcaagctgtgcttcgctgctctccaagagggcaacggcgagtacatgcaggctatgttgtccttggctgaggttggcgaggaatccttggcatcgtggaaggccgatgttgacctaggcgacatcgtttccatccgcggtaccgtcgtcgcttccaagcgtggcgagctttctgtgatggtgaactcgtggcacatggcgtcgaaatcgctacgcccactgcctgtggccttcgctgatatgagcgaggacatgcgtatccgccaccgttacaccgacttgattatgcgtgaacaggctcgtaccaacgctatgactcgtattaaggtcatgcgcgcgctacgccattaccttgaaggccaggacttcatggaagttgaaacccccatgctgcaaaccctgcacggcggcgcagcggcacgtccgtttgttacgcactccaacgcccttgatatcgacctctacctgcgtatcgcgccagaactttacctcaagcgctgcgtggttggtggtatcgagcgtgtattcgaggttaaccgcaacttccgcaacgagggcgtggactcctcgcactccccagagttcgccatgctggaaacctaccaagcgtggggcacctacgatgacggcgcgaagatgatccaagagctcatccagtccgtcgcaatggaagtctttggctccaccaccgtcacgcttgtcgacggcaccgagtacgacctcggcggcgaatggaagaccatcgagatgtacccatcactcaacgaggcgttgacacgcaagttcccaggccagccagaggtcaccatcgactccaccgtggatgaactcaaagcaatcgccgctgttatcggtttggacgttccagccaagggcggttggggccacggcaagctggtcgaagagatctgggagcacctgtgcgaagaccagctctacggcccaatcttcgttcgtgacttcccagtggaaacctcgccgctgactcgccagcaccgctccaagccaggtgttaccgaaaagtgggacctctacgtgcgcggtttcgaactagcaaccggctactccgagcttgtcgaccccgtcatccagcgcgagcgcttcgaggaccaagctcgtcttgccgccggtggcgacgatgaggccatggtcttggacgaggacttcctcgcagctatggagcagggcatgccaccaacggcaggctgcggcatgggcattgaccgcctcctgatggccctgaccggccttggcatccgcgagacagtactgttcccaatcgtgaagccggagcgc

SEQ ID NO: 17656 - DNA, 831 bp, Cornyebacterium diptheriae
ttggggttgtatccatctactgcagcgtggtttaacgcccgcgaacaggccaaactggtagatctctatgattccaaaattgaaaatgcaacccctcttagcgcggaacaattacttgaactcgcgcaccgttataacgaccgcctgaccgtaggcgctgctctcgatccctgggctaacgtcccccgcggagcgggcaaagaagacggcgacggtatggcctataaagaccagttgcgtgttgaccgtacggatgtcatggctcgtatacgtatcccctctatcaaggtggatctaccgatctatcacggcacgagcgataacactctaaagaagggcgctggccatttggaaggtacctcgttaccggtgggaggaccacgcacccattccgttatcactgcacaccgtggcttagctgaggccaccatgttcactaatctcaacaaggttggggtaggggatagattcaccattgaggtgatgggcgaagtccttacgtatgaagtgcgtgaaactcgtgtggtcagcccagaggacactaggttcctgcaaactcaagacgatcgtgaccttgtcacactcgttacttgtactccgttgggcatcaatacacatcgcattctggtgacagctgagcgcattactcccaccccgcaatccgatatcgatgcagcacgtcaagcttcccaaatcggcttcccttggtgggcggtcattttcgcagtgggatttagctttatcgccttgttcttctggcgttcgggttacatgattcctccaaagaagaaggaagaagacatcgaaagcgaagctgatggcgatgaactc

SEQ ID NO: 17657 - DNA, 1518 bp, Cornyebacterium diptheriae
atgaatcaaccacagtatgttgctgcgattgaccaaggaacgacgtcgacacgctgcatcattttcgaccacaacggccaacaagtaggcgttggccagtacgaacacgaacaaatcttcccccaaaaaggctgggtagagcacaacccaatggaaatctgggccaacacgcgccaagccgttgggacagcactcgccgaaagcgacgtctcccgtgaagacatcgtagccgtaggcataacaaaccagcgtgaaaccacggtggtctggaacaaaactactggtgaacccatatataacgccattgtgtggcaggacacccgcactaactccatctgctcggagttagcccaaggcgaccctgcccggtggcaaaaacgtaccggtttgctcatcaactcataccccgcgggcccccgactcaagtggatattggacaacgtcgagggtgcccgcgaactagcagagaacggcgatttgctcttcggaaccattgatacgtggttgctgtggaacctgaccggcggtgccgagggtgacaacggccagcctgccgttcacgctaccgacgtaaccaatgcctcccgcaccctactcatggatctggaatccctgcaatgggatgaggaactatgtgccgcgttggatattccaatgcaggtgttgccagagattcgtccttcagttggtaacttcggccaagtacgtgcacgtggatcactagctggtgttccgatccgcgccatcctcggtgaccagcaagccgcaatgttcggacaggcatgcttccggccaggtgatgccaaatgtacatacggcacggggttgttccttctggagaacacaggcaaaaccccgaagcattccgaaaacggtttgctcaccaccgtgtgtttccagctcgaaggcgaaaaaccggtctatgccctcgaaggatccgttgccatggggggctcgctcgtccaatggctacgcgacaaccttcaaatcatcccgaactcgcccgccattgaaaacctcgcacgcgaagtacccgacaacggtggcgtgtacatcgtccccgcattctccggactattcgcaccacgctggcgccccgacgcccgcggggtcatcgtgggcctgacccgctttgccaaccgcaagcacctcgcccgcgcagtactcgaggccaccgcctaccaagtgcgcgaagtgatcgatgccatggtcgcggattccggagtagaactcaccgaaatgcgtgtcgacggcggcatggtcatgaacgaactgctcatgcaattccaagccgacgtcctacgatccgacgtcacgcgccccaagaacatcgagaccacagccaccggcgtagcctacgcagccggcctcggcgtgggctactgggacagcctcgacgtactccgcaacatgaacgaagtggacaaaacctggcacgccaagatggacgccgacaagatcgacgagctccttgccgaatggaacaaagcagtcgaacgcacctacaactgggaaaac

SEQ ID NO: 17658 - DNA, 477 bp, Cornyebacterium diptheriae
atgcgcgcagtgctttctattggttcgaatatggatgaccgctatgccttgctgcgaacggttgtcgaagaattcgcagggcagatcgtggcagcatcctcgatctactccacgcccccgtggggagtagaggaccaatacgagttcctcaacgcggtcgtcattgtggacgtcgatagttcaccccttgagctgctaagacgtggccagcgcctagaagaagccgcgtgtcgacgtcgcctgcggcactggggtccgcgcaccctagacgtcgatgtcgtgaccatctacaacgacgacggcacgcagatgcgatccaccgaccccgagctgaccctgccgcacccctacgcccacgagcgagcttttgtgcttgtgccttgggcagaagcagaccccgaagctgaattgctaggccagaaagtagctcagcgcgccgcagcactgggcgaaacatttccggtggtgggaagccta

SEQ ID NO: 17659 - DNA, 834 bp, Cornyebacterium diptheriae
gtgagcgcgaaagacctcatcattcccgagcgaacagccgtcatgggcattgtgaacgtcaccgaagactcattttccgacggtggccgctggctcgacattgatgccgcaatcgaccacgcccgcgacctcgtcgcagcaggcgcagacatcatcgacgtcggcggcgaatccacccgcccaggtgccacccgcgtcgaccccgacgtggaacgcagccgcgtgatccccgtcatccgggcgctatccgaagaaggcatcgccacctccatcgacaccatgcgcgccagtgttgccgccgcagcagccaacgccggcgtaaaactcatcaacgatgtttccggtgggctcgccgaccgcgccatgtactccgtcatggccgacacccaactaccggtctgcctcatgcactggaagaccgttcgcttcggggacgcagcaggaagcgccgaccacggcggcgacgttgtagcagacgtacaccagaccctagataagctggtcacctctgcactcaacgccggtgtcaaagaagacaacatcaccatcgacccaggtctcggctttgccaaaacacaagaagataactgggcactcttacgcgccctaccggaatttatcgcaggcccataccccgtgctcgtaggagcatcacgcaaacgcttcctgatggcagtccgcgcctcccgaggcctgcaatcagggccagtcgacgccgaccccgccaccgcagcggtgacagcgatcgccgcacacatgggagcatggtgcgtgcgcgtccacgaagtagcagtttcccgagacgcggtcgacgttgcggccctgtggaatgcg

SEQ ID NO: 17660 - DNA, 738 bp, Cornyebacterium diptheriae
atgaccgccctacaagcattcggctgggagtttttgggcacagccctcctgcttctcctcggtaacggcgtttgcgccgtcaacagcctgcgcacctccgcaggcaaaggcactggctgggtgcttatcgctttcggctggggcatggcggtattcgtcggtgcctcagtggcaagccccagcggcggccacctcaacccagcggtcactatcgcgctggcgatcaaaggcagcacaccatggaacctggtaggcggctatgttctcgggcagttcctcggagccatgtttggtgcaatcctgtgctggctgacattcaagcagcttttcgacgccaacaacaccgacgaaaacggaaacgtcacgggagctaaccgcaccaccggcggtatcttcttcaccggccccgcccacaatcagaacgggtggaacatggtcaccgagttcatcggcacctgcgtactgctgctgttcatcttcttcggccccaccggcggcgacctaggccccatgacctatttcgcagtcgcctttgtgatcgttgccataggcttgtcgctaggcacaccgaccggctacgccatcaaccctgtgcgtgacctcggcccccgcctgatgtacgccttcgtgctgcccattaaagacaaaggatccgcgaactggggctatgcctgggttccgatcgtcggccccatgatcgccgcagtcttctgcggagtgctggccactgtagtgctg

SEQ ID NO: 17661 - DNA, 2472 bp, Cornyebacterium diptheriae
atgaacaacaaaaagaccctgcaatatggcgtgatagccgccatcgtgctcatggccatttatgtgtttactttccttggaaatgacacccgaggctataagcccgtagaaacttccgtggcagttacccaactggataacaaaaacgtcaaggaagtagagatcgacgatcgcgagcagcgcctgcgtatcaagctcaagaacccgatcgaacacgaggggcaaaaagaagtctcggaaatcctgaccaaataccctgcacgcgcctccgccgacatctttagcaaggtagaaaagtccgaggcagaaaagttcaccaccaaggtgaaccaagaaaacttcttcgtctccatgctgagctacatcctgccgatgttgctcatgttcggcatcatcatgtttatcttcagccgcatgcaaggcggccaaggtggcatcggaggcatgttcggcttcggcggctcccgcgccaaagagctcgacaaagacatgcccaccaacaccttcgcggatgtcgccggtgcagacgaagctatcgacgagctgcacgaaatcaaagacttcctcgaagaccccacccgctacgaagcactcggtgcaaaaatcccacgcggcgttttgctctacggtcctcccggcactggtaaaacactgcttgcacgcgcagtcgccggtgaagcaggcgtaccgttctactccatctccggctccgacttcgttgaaatgttcgtcggcgtgggcgcatcccgcgtccgcgacctcttcaagcaagcccgcgagaacagcccctgcatcatcttcatcgacgagatcgacgcagtcggccgccaacgtggctccggcatgggcggcggacacgacgaacgcgaacaaacactgaaccaaatgctggtagaaatggacggcttcggtgaccgcgaaggcgtcatcatcatggctgccaccaaccgccccgacatcctcgacccagcactgctgcgcccaggacgcttcgaccgccaaatcccagtaaccaaccccgacctcaaaggtcgcgaacaaatcctgcgcgtccacgccaaaggtaagccctttgccaaagacgccgacatcaccgcactggcacgccgcaccgccggcatgtccggtgccgacctcgccaacgtactcaacgaagcagcactgctgaccgcacgtatcggcggcaacgtgatcaccgcagacgcactcgaagaagccaccgaccgcgtgatcggcggcccacgtcgatcctccaaggtgatttccgaaaaggaaaagaaggtcaccgcctaccacgaaggcggccacaccctatccgcatgggcactcaagaacatcgagcgcgtgtacaaagtgaccatcctcgcgcgtggacgcactggcggccacgccatgaccgcccaagaagatgacaaaggcatgtacaaccgcgacgagctctacgcacgcctcgtgtttgccatgggtggccgcgcagccgaagaactcgtcttcggtgaaccaaccaccggcgcctccgccgacatcgaacaagccaccaagatcgccaaagccatgctcaccgagtacggcatgagcccatcactgggcatggtcaaatacggcgaagaacaaggcgaccccttctccggccgcggtggatccggcaccctggaatactccccagacgttgccgcccaaatcgaccgcgaaatgcaatacctgctggataaagcccacgcagaggcctacagcatccttgctgagcaccgcgactaccttgacaaactcgccgaaaagctcctcgaaaaagaaacactgcgacgccccgacctcgaagcactattcgaaggcatcgaaccacgcgaagtgggcgacgtattccctaacgaaaacgatcgcttcccacgccaagcaggccgcgaaccagtcaagaccccaaccgagctcgctatcgagcgcggcgaagaaccacctaagcctttctccatcctggaggcatccaaggccgcacgtgccaagcgggaagcagaactcgccgcacgcaacgcaggggctgcacccgtagcacccgcacaaggaccacaggaacccgcacgcggactcggacacatggacggtaccgcgcagcgcgtcgaaaagcctgcaacccctgcgacccctgcgacccctgcaaacaaggaacaacgctacggtggcaccccgccaccacaaggctggaccgcaccagggtggccaccagcgcaacccaagaacgcagacacccctgcctccgtgcaccccggcgtgaaaaactatgcagacgacagcacaccagcagcccctgccgaaccacaggaagaagtaggcttccaacttccagaaaacgagcgcaccgaaaacccgtgggagaaaccaaacgatgaatccggacgccaccgcgcacccgccgacagtgagcgcccctcgtctgatcccacccaagtgatcaaacgagtcgaagaaactgacgag

SEQ ID NO: 17662 - DNA, 1257 bp, Cornyebacterium diptheriae
gtgattgatctaaagttactccgcgaaaaccctgatgtcgtccgcgagtcccagcgcattcgtggcgaagacccagctctggtggatcagctcctcgaggctgacgagaagcgccgcgaggccattaagtctgccgacgacctgcgcgccgagcacaaggcctttggcaagaagattagccaggcctccccagaagagcgtcccgctttgctggagggctctaacgagctgaagtcccgcgtgaaggcggcggaggaggccgaggctgaagcgttggccaaggtcaacgagatccaaatgctgttcggcaacgttgttaccgatgccccagctggtggcgaggatgactacatcgttttggagcacgtaggcaccccacgtacctttgatttcgagccaaaggatcacctcgatcttggtgagtcgcttgggcttatcgacgtcaaacgcggcaccaaggttggtggtgcacgcttctactacctcaccggcgatggcgcattcctacagctgggcatgctgaatcttgcggcgcaaaaggcccgcgagaatggcttccagctgatgatcccacctgtgcttgtccgcccagaggtcatgtccggtaccggtttcttgggtgctcactcagatgagatctactaccttgagcgcgatgacctctacctcgtgggtacctccgaggtggcgttggctggttaccaccaggatgagatcatcgatttgtctgatggtcctatcaagtacgcgggctggtcgagctgcttccgtcgtgaagcgggctcctacggcaaggacacccgcggtattttgcgcgtgcaccagttcgacaagctggagatgtttgtttactgcaagccagaagaggctgttgcgcagcaccaagctctgttgaacatggagcgcgagatgttggctgctgttgaggtgccttaccgcattatcgacgtcgccggcggcgaccttggttcctctgctgcccgcaagtttgacactgaggcatggattccaacccagaacacctaccgtgagctgacctcgacctcgaactgcaccaccttccaggcacgtcgtctgcgcacccgctaccgtgacgagtctggcaaggcacacactgcagcaaccctgaacggtaccttggctaccacgcgttggctggtcgctatccttgagaacaaccagcaggctgatggctcggtgatcgttcctgaggcactgcgcccattcgtgggcaaggaagtactcgagccaaagaag

SEQ ID NO: 17663 - DNA, 744 bp, Cornyebacterium diptheriae
atggtcgacactctcctggagttgcccgccaggaccctgactgacggaaccagcactccaaaacaccagcaactcagggaaattctcgaagaactctgccgcacccagctcaaacctggcgacatgctccccggcgaacgcgccctagaggagcaatacggagttagccgcatcacggtacgacgcgccatcggcgacctcgttgccaccggccaactgcgacgcagccgcggcaaaggcaccttcgttgcccaagcccccatgattactcggctgcagttggcgtcgtttagcgacgaaatggccgcccgcaagatcgaagcctccagcaagatcctcgcatcctcatggtcttcacccagcgccgtcgtccacgaatttttcggcaccgaacaaggcaccccgcacacccacctcgtgcgcgtccgcctcggcggcggcaaaccattttgcattaacgacgcctggtacaactccgccatcgcacctgacctgctcgaaaacgacgtatataaatccgtctactccatccttgagcagaactacggcgcatctattaccggtgccgaacaaatcaccactgcggtggccgccaccccagaaaccgcgcggattctcggcgtggatgtcggcgaaccactactgaaggtggaacgccacgcacacgcaggagaaaaccccatcgagtggtgttcctcgctctaccgcaccgaccgcttcgcgttaaggacgtttatcacgaag

SEQ ID NO: 17664 - DNA, 879 bp, Cornyebacterium diptheriae
gtgatgcataaattctggccccgccacagccccaacttcatggcctgccgcgtcgccgtacgcacagtacaaccccgcgacatcaccgtcggcctctccggcggcgcagattccctcgctctcgtcgcagcactatgcgccgaagactacaacgtccacgccctctgcgtagaccacggactccaacccggctcccacgaagtagcacaacaagcagcccaccacgcccgaaccttcggagcacacgccgaaatcatcagcgtcaccgtcgcgccgggcaacctcgaagccaacgcccgaaccgcccgctaccaagcactccactcacgcaacctccccgtcgttgtcggccacaccgccgacgaccaagctgaaacactcctgctcggcgcgctacgcgggaaagccacaggaatgcagatccacaccgacaacctctggcggccactacttggcgttcgccgcgccaccaccctcgccgcctgcacagaacttggaatcgaaccctggcacgacccccacaacgccaacaccgacttcctgcgcgtagcactacgcacccaagtcgtgccgctgttgtccgacatcattggtggcgacgcagtgccagcattgtcacaagccgccaccttgatcgccgaagacactcacgccctgcacgtagacacccccgacgaccgaatcgcccagctagcaggcatgccaccagcgttacgacgccgccacctcgtagcactactccaagcctacggggcgcgcgtgagcgccgctcacctgcgtgccgtcgacgcattaataaccaattggcacggccaaaaggccgttccagtgggaaacgggttggaagtgacccgcaaagatggcagactttcggttagc

SEQ ID NO: 17665 - DNA, 1163 bp, Cornyebacterium diptheriae
tacaacacaaacacgccttaacacaccaagccccctataaacccatcgagcctgctcgcggcatcaccgcgctgacagacaaagggacaaccaacaacgaggcgctacgcagcaccgtcggtgcactcgcacaagaccccaggcttgcaggattcgccggcaaaattgtcgacgccaccaccggtgaagtgatcctagaaaaagacgccgacaaaccactgaccccagcctcggcaaccaaaatgctcactgccaccgcggcactctacgaactaggccccgaacaccgcatcaccaccgaagtgatcaaacaagacgaccacaccgtggttatcaaagccgcaggagacgtctggcttaccgacgaacgcctcgaccaactagcacgcaaaatcaaagaacaaatgcccagcgtgaacacagtcctcgtagacacctccgcatggagtggcgacaaaatactaggcggatgggaccccgacgacgtcaacgccggctacgtagcacccctcgaacccatcatgctctacggcggacgcctcggcgccaaagaaggcgacgtaccacgcagccacaacccaggactcgacgtagccgccgcactcgcacaacgcctcggtgcaggaaccaagggctacaccgactccgccaccggcgaagtcgtcgccaccacagaatccgaagccctagaaaaacgcatctcccaaatgatgcaacactccgacaacgtgatggcagaagccatcggccgcgaaatcgacgccacccaacccgtacaagcaacactgcggatcctcagcgaacacggcatcaccatcggcgcctccgaagtagcagacaactcagggctctccctccacaaccgcatcaccccagcgctactcacccaagtagccaccaaggccgtaaccgaccccgaagtccactcgctcatcctcgccctgcccgtcgcaggcggcagcggaacactcgcagaccgctacgcagaactcgacggccgcggctgggtacgcgccaaaaccggaaccctcacaggagtatcggcgctggtcggcgtggtgccgtcgacaagcggacacatctacagcttcggcctcatctccaacggctccgaaatcctcgaagcccgcgcagccctcgacaccatcgcctcggcacttcgt

SEQ ID NO: 17666 - DNA, 867 bp, Cornyebacterium diptheriae
atgaggcaccgggcaggtgaacatcgaaacgtttttgccatcctcgcattcgtcatcgcgatcgtctcagtgggatttttgctctaccccgtggccgcaaccgcatggaacaacgcgcgccaagcacgcgtcgcacagtcctacgagaacagctacgaggtagacagcccagcggtacgagacagcgttcttgaggcggccagacagtacaacacgtcggtagtaggcttcccgatcctcgatccgtggctgaacagggcgtcgaaaaacagcgggccatacctcgactacctgcaacaactcaacccgcagcgcgccgaacgtcccgtcatagcgtcgataagcatccctactatcgacgcccacctgcccatctaccacggcaccgacaccgccaccctcgagcacggactcggccacctatacggctccgcgctacccgttggcggcaccggcacccaccccgtgatcaccggacacagcggccttgccaacgccaccctctttgacaacctcgaagacgtcaaagaacacgaccccatctacatcaccgtccaaggcgaaaccctcaaatacgaagtagacgccatcaacgtagtcctacccgaagacaccaaactcctcgccccagaccccaacaaagaccaaataacactcatcacctgcaccccctacgccgtcaactcccaccgactcctcgtacgagcccaccgcgtagacctcgaccccaacgaccccaacctcacacaaaccggcaccaaaatctggcaaccctggatgctgtggaccgcagccctagcactcaccgccatcgccatcatcatcaccctcgtgcttcgcaggaagaggacaaccacccatgaaaaa

SEQ ID NO: 17667 - DNA, 1407 bp, Cornyebacterium diptheriae
gtgactgaacattatgacgtagtagtactcggtgcaggccctggtggctatgtcgccgccatccgcgcagcccagcttggcaagaaggttgcagtcgttgaaaagcagtactggggaggtgtctgtctcaacgtcggttgtatcccttccaaggcgcttctgaaaaacgctgaggtagcgcacatctttaaccatgaggcaaagaccttcggcattagtggcgacgtgtcctttgacttcggtgctgctcataagcgctcccgccaggtatcttccggaatcgtcaagggtgtccactacttgatgaagaagaacaagatcaccgaaatcgacggcctcggctcctttaaagacgccaagaccatcgagatcaccgagggtaacgacgccggcaaggtagttactttcgatgactgcattatcgccaccggttccgtcgtgcgttccctgcctggtgtgaccatcggcggtaacatcgtttccttcgaagagcagatcctcaaggaagaagcaccaaagtccatggtgatcgtgggcgccggcgctatcggtatggagtttgcttacgttctcgttaactacggcgtagacatcaccatcgtggaattcatggaccgcgtactgcctaacgaggatgcagacgtatccaaggagatcgcaaagcagtacaagaagctcggcgtgaaactgctgaccggttacaagaccaccgccatcaccgataacggcgacaacgtcaccgtcgaggtggagtccaaggacggctccaagaaagacagcctcaccgttgagcgctgcatggtgtccatcggattcgcaccacgtgttgaaggctacggcctcgaaaacaccggtgtgaagctcaccgagcgcggcgctatcgaaatcgacgacttcatgcgcaccaacgtcgaccacatttacgcaattggcgacgtcaccgcgaaactgcagctggcacacgttgcagaagcacagggtgttgttgccgccgaggttatcgccggtgctgaaacccaagaactgggcgactacatgatgatgccacgcgctaccttctgtaacccacaggttgcctccttcggctacaccgaagagcaggcgaaggcaaagttcgaaggccgtgagatcaagaccgccaccttcccattctctgccaacggcaaggcagccggcctcgctgaaactgcaggctttgtcaagatcgttgcagacgcagaatttggcgagatcgtcggtgcacacatggttggcgcaaacgtctccgaactgctgccagaactcaccttggcacagcgtttcgacctcacctgtgaagaaatcggacgcaacgttcatacgcacccaaccctgtctgaggcaatgaaggaagccgcagaaggaatcatgggtcacatgatcaacctc

SEQ ID NO: 17668 - DNA, 894 bp, Cornyebacterium diptheriae
atggctaccaagaacgaagaactccctattatcgacctagctgccactgaaggctatatcgtcgatgatactgacgaggatgatccagtattgttagctcccgacggaactccgattgatacgtggcgtgaaaattatccttatgaggaaaggatgacacgcgatgaatatgaaaagacaaagcgtgccttacaaatagagctgttgaaatggcaaaactggacaaaagatacagggcaacgccacattattctgtttgaaggccgcgacgctgccggtaaaggcggaaccattaagcgtttcaatgagcaccttaatccccgcggtgcccgcactgtggcactagagaagccgtcgccacgcgaatcaacctcgtggtacttccagcgatacatagaacatttcccatgtgctggcgaaatcgtattctttgatcgctcgtggtacaaccgctccggcgtggaacgggtcatgggattttgcaccgaatcccaacatgctgagtttctccgtgaggtacccatgctcgagaacatgattcttggctcgggaatttcgctgacaaaattttggttttcagttacccaaaaggaacagcgaacaaggtttgctatccgtcaagtagacccagtacgccaatggaaactatcgcctatggacctcgcctcactcgaccgatgggatgactacactcgtgccaaagaagagcaattcagatacacggacaccgacgaagcaccttggataaccatccgttctaacgataagaaacgtgcacgtatcaatgcgatgcgttacatcctaagcaagttcgagtactcaaacaaggaccacgatctagtaggtgagcccgatcccttaattgttatgcgcggtagagatcgcattggagat

SEQ ID NO: 17669 - DNA, 1293 bp, Cornyebacterium diptheriae
atggatgaacagcgcaatcagggtgagttccttcttggttcagatggaaaaccccttttggaccgctacggtcgccccatccggcggcgacgctccgcaccgcgccgccctaagctcgaccgcactgaacctcggcgtgctgcacccagcgaagccacacgggtaatccgcacggaaaccacccaaatgccagctcagcctggggctgttccgcaggagcgcccacggcaatacattcctacccccgaagagcagcaacgctaccgcgcacagcagtactaccagcagcaaccggtgcaacctggtcagccggtgcagccggggtttgagcctaatcgacgctaccgtcgcagccaggtcacccttcctccagagccaaagaagcgtcgtcgtttgcgccctggcggctgcattgcgggtttggtgtggacgctcgtcattgtcatggttcttggtatcgctggcacactgtggctagacactcggctcaatcgtgttcaggctgccccgccgcagcacattgctaagacatccggcacgaactggctgctcgtgggctctgactcccgcgccggcctgtccgaggaggatgttcagcgtttgggcacgggtggcgacatcggctccatgcgcacggacacgatcatggtgttgcatattccgtcgtcaggcaaggccacactgatgtcgatcccgcgtgactcctatgtggaaatcccaggctacggcatggacaaaatcaatgcgtcgttcacctacggcggtgcgcctttactcacccaaaccgtggaaaacgccactggcctgcgcattaaccactatgccgagatcggtatgggcgggttggccaatgtggtcgacgcggttggtggtatcgaggtatgccccgccgagcctatcgacgaccccctcgccggcctcaacatcgcagccggctgccaaaaagtcgacggccccactgctttgggttatgtgcgcacccgccacaccgctctaggtgatcttgaccgcgtgcagcgtcagcgcgaattctttgcagctttggtcaacaaagtgacctccacgtcgactttggctaatcctttccgcatcatgcccacgattaatactgtggcgggttcgttcactgtgggtaagaaggatcacgcgtggcatttggcccgggtggcgctcgctatgcgcgaaggtgtggaaaccgtgacggtgccatatgcaggttttgctgattatgacgtcggaaatgtggtcctgtgggacgaggtcgcttccgaggagctgttcgcttccctgcgt

SEQ ID NO: 17670 - DNA, 1638 bp, Cornyebacterium diptheriae
atggcaaagatcattgcctttgatgaggaagcacgtcgtggccttgaaaagggtttgaacactctggcagatgccgtaaaggtaacgttgggtcctaagggtcgtaacgttgttttggagaagagctggggcgctcccaccattactaacgacggtgtctcgattgctcgcgagattgagctcgaggatccgtatgagaagatcggcgctgagctggttaaggaagtcgctaagaagactgacgacgtagctggcgacggcaccactactgcgaccgttttggcacaggcacttgttcgcgagggcctgcgtaacgttgctgctggttctaacccaatgggcattaagcgcggtattgagctggctaccgctaaggttactgaagcactgctggcttctgctaaagaggttgagactgaggagcagatcgctgctactgctggtatttctgctgccgatccagctattggtgagcagatcgctaaggcgatgtacgcagtcggcggtggcaagctgaacaaagaatccgtgattacggttgaagagtccaacaccttcggtgtggatctcgaggttactgagggtatgcgctttgataagggctacatctccggttacttcgcaaccgacatggagcgccttgaggctgttctggaagacccatacattttgttggtttccggcaagatctctaacatcaaggaacttctcccattgctggagaaggttatgcagaccggcaagccactgctcatcatcgctgaagatgttgagggcgaggctttgtccaccttggttgtgaacaagatccgcggcaccttcaaatctgttgctgttaaggcaccaggtttcggtgaccgtcgtaaggctcagctgcaggatatggctatcctgaccggcagccaggttatctccgaagaggtcggtctctcccttgagactgctgatctgccattgctgggtcgcgcacgcaaggttgttgtgaccaaggatgacaccaccatcgttgagggtgctggcgattccgctcagatcgacggtcgcgtgaaccagatccgcaccgagatcgagaactctgactccgagtacgaccgcgagaagctgcaggagcgcctagctaagttgtctggcggcgttgcagttatcaaagtcggtgcggctaccgaagtcgagctgaccgagcgcaagcaccgtattgaggatgctgtgcgtaacgcaaaggctgctgtggaagagggcatcgttgccggtggtggcgtagcacttctccaggccgcacacgtgttggctaacgaccttgacctgactggcgacgaagccaccggtgtcaagatcgtccgcgaggcactttctgcaccactgaagcagatcgctctcaacgcaggccttgaggctggcgttgtggcagacaaggtttcccacctgccagcaggcgagggcctaaacgctgctaccggcgagtacgtcgacctgatggctgcgggcattaacgatccagtgaaggttacccgctctgctctgcagaacgccgcctccattgcagcgctgttcctgaccactgaggctgttgttgctgataaaccagagccagcagctccagctatgccaggtgctgacgagatgggcggcatgggcttc

SEQ ID NO: 17671 - DNA, 1488 bp, Cornyebacterium diptheriae
atgaatacgctcatcgaaacccttaattcgatcatctggtcacccttccttgtttttctctgcctcggagcaggcctgtacttcaccattgccaccaagtgcgttcaagtaaccggcctccccgacatgcttcgccagctccgcgccggtgaaaaatcagcaaacggtgtgtcctccttccaatccctcatgatgtccctcgccggacgcgtgggggttggaaacatcgccggtgtggcaaccgccatcgccttcggcggacccggtgccgtgttctggatgtgggccgtcgccttcctcggcgctgccacttcctttatcgaatgcaccctcgcccaaatctacaaagagcgcgaccaagacaccggcgaataccgtggcggaccggcctactacattgagaaaagcctcaagcacaccaaagcagcccccttcatgctgttctacgccatcgccttcgcagtggtcatgatcttctccaccagctacttcatgccgggtgtgcaggccaacggtgtggcgtcggcaatgcacaacgcatggaaccttgacgttcgcatcgtcggcgcattcctcaccgtgctactcgccctcatcatcttcggcggcgtgaagcgcatcgcctggtttgcgtcgttagtcgtgcccttcatggccatggtctacatcatcatcgcgctcgtggtgctcttcatgcacttcgaccaaatcccacacgtatttggcaccatcttcagctccgcattcaacgccaacgccaccttctccggactcctcggctccgccatcatgtggggcgtacgccgcggcatctactccaacgaagcaggccaaggcctcaacccccaagccgcagccgcagccgaagtatcccaccccgcaaaacaaggcttcgcacaagccttcgccgtctacgtagacaccctcttcgtctgctccgcaaccgccttcatcatcatctccaccgacatgtaccgcgtcttcgaaggcggcaccgaagacagccccgtgcgctacgcaggctccctaccaagcaacacccccgtgggaccaggattcgttcaacaaggcctcgactccgtcgcctcaggtgtcggaccatcttttatcggcgtagccatcctcttcttcggcttcaccaccatcttgtcctactactacatctccgaaaccaacttcacctacctcatgcgctggatctccaacgcaaccgcaaggcgcgccaccatcttcggcctgcgctgcctgatgctggtatccgtttggatcggtgcagtatctaccccaggtgctgcatgggcattgggtgacattggagcgggtgccaccgcatggctcaacgtgatcgccatcctgatcctgcaggtcccagctattaagtgcctgcgcgactacaacgagcagaagaaagccggactggatccacaatttgatcctgctgcggtgggaatcaagaacgctgagttctgggagacatacaaagctcgc

SEQ ID NO: 17672 - DNA, 1158 bp, Cornyebacterium diptheriae
agcatgagaattagaaacgtaccgggcattgacggacttcggggaatcgctgtcttggccgtgatcgtctatcacttctatggcgccgccctgccgggtggtttcttgggagtcgatattttctttgtgctttccggcttcctcatcaccagcctgcttattcgcgagcacgcgggttccggccgtattgacttgaagcatttctgggtgcgtcgcgctaggcgcattcttcccgccgcagtcactgtgttgatcacggtcagtgtggtcacggccgccattggtggcgacgttgccgtggggttgccttcacaattccttggctcgttgctctttgccaacaactgggtgcagatcgcgcagagccaaagttatttctccgacgcaggtgtgcaggtctttgcccattactggtcgctggcggttgaggagcagttttatgtggtgtggcccctaattttcgtggctgttgctgcgttgagcaagcgcattgttccgctgattctcacgttcttgttggctattgcgtcggcggtgtggatggcgcttgcctataaccccgaggtggatccgtctcgtgtttattacggcaccgacactcactcctttggcctgctcattggtgcgtttttggcgtttgctattaccagtcgcactgagggggattcgtggccggcgtcgatacgccaaagccggatcagttcgatcgctggcccacttgcgctggccgggctgctggtcatgctcgtggtggttaacgcgacgcaccccacaacgtaccgcggaattattgtgctgggttcgctgctcacgtccatcgtgttgtggtcggtggtcaatgagcgcggtgttgtttctaagatcatggtcaaccccgtactgcactggctgggtcgccgctcgtttagcttgtacctctggcactggccggtggtcagcctgttggcctcggtgatggagtcttattcgattctaatcgcgctgctatcggcggtgttctccgcaattctcgctgagtggtcgtatcacgcggtggagaatccgctgcgtcgccaggggtaccagcgctacttcggtagctggtggaatcaaactcgacttatgcgtgcactttcgcttcctactgtgatgacggttttgttgctgtgcgtccctgta

SEQ ID NO: 17673 - DNA, 1362 bp, Cornyebacterium diptheriae
ttggagctaggggtgttctgggaagaacaagcagatagcagcactgacacgcccaacgccgcagcaggcagtaatgtacgtttcatgcagtcaagcctagatcctgagaagccctcaggcacatcacacctcaccggcacggggcagctcgacgtttcccaccacactggacgccctggggccgcgctgtactaccgctccatgaacgtgctcaccagcgtgttgctgctggtatcgctcgcgggcgtggtcagcttggatcgtcgtagcgctatcgtcgcggtcatcctgagcgcgctttttgccctcttctacgccgcggccgctgtcagtcaccgccgcgccatgtggaccaaagccatgctgttggttattctcaccgtgctgtgggtctttatgctgcccatcattccagtgagtatctacatggtcttcccactgtttttcctctatctgagggtgctgccagatattcgcggcattattttggtggtcggagcgacggcgatcgcgattaccagccaattagcgcagctcaccattggtgcggtgatggggccggtggtatcggcgctggtagttatcgctatccatttcgcgttcgaggcgatctggaagggtgcgcgtgagcgcgaggagcttatcgacgaactcctagccacgcggaatcagttggcagaaacggaacgcgccgcgggtatcgccgcagagcgccagcgcatcgcccacgagattcacgacacgctcgcccaggggctttccagtatccaaatgttgctgcgcgttgccgagcaagacattaaaaagtcaggaatgccggaagctgagcaacaagcacccttgcatcgcatggagcttgcgcgctcgaccgccgcggaaaacttacgcgaagctcgtgccatgatcgcagccttgcaacctgcagcgttgagcaaaacctcgctcgaaggggcattgaatcggatcgcggagcatgtggtgggccccgagattagcattgaggtcgacggcgaggaacgccaactgcccatgcgcgttgaggcagccttggtgcgtatcgctcaaggggcgctgggcaacgtcgcaaagcattcgggcgccacgcattgccacctcaccttaagttacggggaagaagaagtgcgtctcgacgtagtggacaacggccatggcttcgaccccgagcaagtagcgcaacgccccgcggggttgggacacgtgggcattagcgccatgcaacaacgcgctgcggaactaggcggggagctgattgtggagtcggaacctggtcaaggaaccgcggtgtcggtggcgttgcctatagacatcgaggaaattcattcaaaagatcaggatcagtgt

SEQ ID NO: 17674 - DNA, 975 bp, Cornyebacterium diptheriae
atggcggcggttcgctgcaggtcacagcattctgtggttgaggttgttcggcttctcgacgcccaccagatcccactactcatcgtaggtggtggctccaacctcgtgatcgctgacggcgaaatacccctcgttgctgtgattctcgactgtgacgatatttctgtgaccctcgacaccggacgcgtagtagccgaagcaggtgccgtatgggacgacgtcgtacgcctgtgcgttgatgccggtctcggcggcattgagtgcctttctggaattcctggctcggcgggagctacccctgtacaaaacgtgggcgcctacggtgcagagatttccgatgtgttggtcagcgtaaccctcttggaacgtgcaacaggggcggttatggaagttcctgcggccgacttagagctggcgtatcgctattccaacctcaaattcaccggccgtggcgtggtactgggcattacgctacagctgcacacggatggcatgtctgcgccgctgcgctttggggagcttgctcgggtgctaggccatgagggaccacatcctgcagtgcaggtgcgcgaggctgtacttggcctgcgtgctggcaagggcatggtctacaacgaggcggatcacgacacgtggtcggccggatccttctttaccaaccccatcgtcccagaatcggtcggggatcacgtacgtagcgttgtcggcgacgagtcgatgccatgctttgctgcgggcgagggcatggtcaaactatctgctgcatggttgattgaccgcgccggatttgccaaaggccaccaaggccctggcgggcgggtgagcttgtctactaagcacacgctggcactgaccaatagaggaaacgccaccacggatgatctcgtcgcacttgcgcgcgaggtccgtggcggcgtgatggatgccttcggggtgctacttgagcccgaaccggtatgggttggggtgtctatt

SEQ ID NO: 17675 - DNA, 1281 bp, Cornyebacterium diptheriae
atgatgactatgcgcattgccatgatctctatacacacctcgcccctgcagcaaccaggcagcggagacgcaggtggaatgaacgtctacatcatttccatcgcccgcgaacttgcacgtcgcggcgtagacgtagacatttacacccgtgccactcgccccagccaaggcgacgttgtagaggtggagtcggggctgcgcgtgatcaacattgtggccggcccctatgagggcctgagcaaagaagaactccccacccagctcgcagctttcgcaggtggcgtggtgcagttcgccaagtgtcaccacatgcgttacgacgtcatccattctcactattggctttccggccaagtcggctggctactgcgcgacctgtggaacatcccactcgtacacaccgcgcacacccttgcggcggtaaaaaatgcgcaccgcagcgcaggggataccgaagaatcagaggctaggcgtatttgtgagcaacagcttgtagataacgctgacatcctcgtggtgaacacccccgaggaaaccaacgaccttgtgcgccactatgacgccaaccccgattcggtggctgtgatcgcgccgggtgccaatgtggaactttttactcctggtacgcagcgcaatacggaacagtcgcggcggtgcttgggtattccgttgcacaccaaggtgatggcttttgtgggaaggttgcaacagtttaagggccctgaggtgttgttgcgtgcagtggcggagatgttggagcgggatccggatcgcgatatgcgtgtgattatgtgtggtgggccgtcgggtgctgctgccacggtggagcattacattgagttgacgcgcagtttgggtattgcgcatcgggtgcggtttttggatccgcgtccgccggaggagctggtgagtgtgtatcaggcggctgatgtggtggcggtgccctcgtataacgagtcgtttgggctggttgcgatggaagcgcaggctagtggtactccggtggtggctgcgcgtgttggcggcttgcctattgcggtggtggatggtgagacgggcgtgcttgtcgacggccacgatcccataatgtgggcggatgcgctggagcaattgcttgacgacgaccccacgcgtcagcagatgggtgtggctgcggtggagcatgcggcgaactttacgtgggctgcggctgcggagaagttggagtcggtgtatggcgatgcggcgatgttggatgttgcgcagtgccatgaccgctacgccgcgggttccgatcgggca

SEQ ID NO: 17676 - DNA, 678 bp, Cornyebacterium diptheriae
atgacctctatcttgttggttgaagacgaagagtcgctagccgatcccctcgcgttcttgttgcgcaaggaaggttttgatgtagtaatcgccggtgatggccccagcgccttggtggagtttgatcgcaacgccatcgatattgtgctgcttgacctcatgcttcctggcatgtcgggtacggatgtgtgcaagcgcctgcgagcagtatcctcagtccccgtgatcatggtgacggcacgggactcggagatcgacaaggtggtaggcctagaactcggtgccgacgactacgtgaccaaaccatattcttctcgcgagctcattgcccgaatccgtgccgtgctgcgtcgcggcggggagacaatcgaagaatcggatgagatcctcggcagcggccgaatccacatggatgtggaacgccacaccgtgaccgtcgacggcgaagagatctccatgccgctaaaagaattcgacctgttggaatacctcatgcgcaactcggggcgcgtgctcacccgtggccagctcatcgaccgcgtgtggggtgccgactacgtaggggataccaaaaccttggatgtgcacattaaacgcctgcgctccaagatcgaaccagaaccctccgcgccatgccacgtgattactgtgcgcggtctgggctacaagtacgaagac

SEQ ID NO: 17677 - DNA, 900 bp, Cornyebacterium diptheriae
atgactgccgaaaacatcgttgtcgttgctgtcgatggttccgaggcctctcagaacgccgttcgctgggcagcaaatacagccaacaagcgtggcgttccgcttcgcctcgccgcaagctacaccatgccacagttcctctacgctgagggcatggtgccaccacaggagcttttcgacgagctccagtccgagacgatggacatgatcgaggcagctcgcgtagttgcccatgaggtcgccccagacatcaagatcggatacgtcatcgctgagggaagccccattgacatgcttctcgatatgtcgagtgacgtcaccatgatcgtcatgggctcccgtggccttggcggcctctccggtatggtgatgggttccgtctctgcagcagttgtcagccacgccgactgcccagtggtagtcgtgcgaagcgacaaccacgtcaccgaaaccaacaagtatggcccagtggtcgtcggtgtcgacggctccgacgtgtcccagcgcgcaaccgagttcgccttcgaagaagcacaagcacgtggcgcaaagttggttgccatccacacctggatggacatgcaagtccaagcatccttggctggtctggcagccgctcagcaagagtgggagatcatcgagaaggagcaaaccaccctgcttaaggatcgcctgcagccactgctggagcgtttcccagacgtagaggtcgaaatggtgattacccgtgatcgcccagtacgcgccctcgaagattgcgcacacaacgcacagctgctggtagttggctcccatggccgcggcggtttccgcggcatgctgttgggctccacctctcgcgcactgttgcagtctgcaccatgcccaatggtggttgtgcgccccaacgaaaaagaaaac

SEQ ID NO: 17678 - DNA, 368 bp, Cornyebacterium diptheriae; identical to SEQ ID NO: 17460

SEQ ID NO: 17679 - DNA, 428 bp, Cornyebacterium diptheriae; identical to SEQ ID NO: 17459

SEQ ID NO: 17680 - DNA, 171 bp, Cornyebacterium diptheriae
atgacgtcaaatcatcatgccccttatgtccagggcttcacacatgctacaatggtcggtacaacgcgctgcgagcctgtgagggtgagcgaatcgctgaaagccggcctcagttcggattggggtctgcaactcgaccccatgaagtcggagtcgctagtaatcgcagat

SEQ ID NO: 17681 - DNA, 1359 bp, Cornyebacterium diptheriae
atggttgatattgtggtgagggtaagcgagcggaaaggtgagcgcgtgagtgttctagtggtgggtatgtcgcataggtcggcacccgttgcacttctagaaaagctcagcatggacgatggggtgcggacaaacaccgtttccgacttggtggcacgcccatcgctggccgaggcgatgatcgtatcgacctgtaaccggcttgaagtctatgccatgacgtcgagtttccataccggcgtcaacgatgtggttgaggtcctccacgacatgagtggtgtggacatggaggagctgcgcggttatctctatgtgcgctatgcggatgcggcagccgagcacatgatggaagtcacctctggtttagactccatggtggttggcgagcaacagattatcggccaggtgcgcaccgcctaccacagtgcgactgaggctggcacggtcggcccagcgctgcatggtttggtgcaggcgtcgttgcatacgggcaagcgcgtgcacacggaaacggatattgatgacgccggtgcttcaatggtgtcgtttgcctgcgatgaggcgttggctcagatgtctgccacgaactttgcaggctgccgtgcgctggtgctgggcgctggtgcgatggcgtcgttggctgctacgcatttgggtcgccttggcattgagcacatcacggtggctaaccgcacgttcgagcgtgcccaacgccttgcggatcatgccgtggaggcgggggttgcagcttctgctatcgagtttgagcgtcgcatggacgtgctgtgcgacgtcgatgtggtggtgtcggctacgggcgcgaacacctttaccatcgaggctgccaacattcctgcagctcatggcgatttaatgatgattgatctttctctgccgcgtgatattagtgatgatgttgccgaggttcctggcgtgcacttggtcaatattgaaaaacttcgtgacgtggcttcttctggggaagcgaaggaccatgcagcgcagcgcattgtggccgaggagctagaggcctacacgtctgcccagcggattcgggatgttgcgcccgcggttgcggcgttgcgacgccacgcttctagtctgatcgattcagaattagcgcggttgtctacccgagtgccaagtatggacgaagacgacttctcagaggtacagcgcactgttcgccgtgtggtggataagttgctgcatcagccgacggttcgagtcaaagaattggcggcgcaatcaggcacggtgtcctacgacacggccattcaagagctttttgggcttgcggtcgaggcgacacctgttgctgtgaatgtggatgaactgccggaaaggattaacaagcga

SEQ ID NO: 17682 - DNA, 882 bp, Cornyebacterium diptheriae
atgacgttgaagatcggcacccgtggaagcctgttagctaccacgcagtcgggccatgttcgcgatgacctgcgcccctatgaggcagagctggtgatcgtgactactcatggtgacgtgaacatggctccggtggagcgcattggtgttggcgtgtttacccaagccctccgcgaggagttgcacacgggtggctgcgatattgcagtgcattcgtttaaggatcttcccaccgagttggatccgcggtttcatttggttgtgcccaagcgtgccgatttccgtgattgtttgatcgcccgtgatggcttgtcgttggctgatcttcctgctggtgcgttgattggcacgggtgctccgcgtcgtatttcgcagatcaaggcgttgcgccctgatgttgagtgcgtgccattgcgcggcaacattgatacccgtatgggcaaggtaaccagtggtgagctcgacgctgtggtgttggcttatgccggtcttacccgtgtggggcgtggggatgaggctacgcaggtttttgatccgcaggactttttgccggcaccagctcagggtgcgttggcggtggagtgccgagcagatgatgcgtatgcccgcgaggcgattgattctatctgcgacgagcaagcacaggtgtgcgctgttaccgagcgtgtagtacttaatcgccttgaggcgggatgcacggccccggtggctgcgcatgcaacgcttaacgacggcacgctgacgttgactgcagcagtgattgctttggatggttcgaaggtggttcgtcgtgaactatctgcgccagtagcggagaatgtggcgttggcggaggagcttacgcgtgctttgattgctgatggtgctgcgaccatcttggga

SEQ ID NO: 17683 - DNA, 1050 bp, Cornyebacterium diptheriae
atgacccacaggtatagcaagcgtagcgacgacgtgttcgttcttcgggcacgtcgtcgagtgatgttgtttgttgtcttagtggtgttggtgttggcgtcagttattacgtcgttggcgttggggcagtactatgttccgcttcgcgacttattgacgattcttactcagcctgattcaagcagtttgatgcacaacgttatttgggagatccgtcttcctcgaattgtgttgggtttgttggttggtgcatgccttggtgtggctggcactctgatgcaagccgtttttgcgaatccgcttgcggagccgtcgattatcggagttacttctggagccggtgtgggtgcagcagcggtgatcgtattcaacgtgggaattttgggtacttttactgttcctgcggcagcatttttgagtgcggttgttgtgacggtgattatctatcagctggctcgacatcaaggtaaggttgcgatcgtcaatttaattttgactggtattgccatcaatgccgtgtgtaatgcattgatttcttttcttgtgtaccttgctcctacgtcgaatcgtgaagagattgttttttggcagatgggatcgcttaatggagcacagtggaaacacgtctgggtagttgcccctattgcactggtaggaatcgtcatttcttcccaaatcggtaaacaactagatgtgctagctcttggcgaacgcgcggcagggcacacgggtatcaatgttggacgattgcgcattattgctattgctgcctcgacgattttgactgcagcggctgtgtcgtttgctggattgattggttttgttggtttgattgttcctcacttgctgcggagtatttctggcccagagaatcgtctactccttccagcatctgcgttggcaggagcggtattgatcgcgtgcgcggatgttgctgcgcgtacgatgattccgtttgcggatttgccgattggtatctttacggcacttgttggtggcccaacattttttgttttgttacgtcgaatgttgaagaaaggctctgtccat

SEQ ID NO: 17684 - DNA, 1668 bp, Cornyebacterium diptheriae
atgcgattaatcatgaagcccgagcactcaacgcgaggacgtgtcatcttcgtcggcgccggtcccggcaacccagatcttttgacggttcgagcccgcgaggtgctgggctccacagccaatgcagtggtggattccactgttggcgtaggtattcgcgcagttattgctgaacatcttgaggtgccgcaggccaagcttgatgcagctgaggctgagtatgagcgcatgtgtgcggctgcgaagcgtcgtaagcctccgcgtcccgacgcccccaccgccgcggaaatcactgaggtgtccgctgatgcgagcgtcgatgaagtgatggcggtgctgttgcctttgctagacgaaggcgatgtgatccgcctagtgcagggtaacccgttggcggattcccgcgcgttagatgagattacggctgttacacaggtgggcgcggatttccagattgtgccaggtatgtcgttgccggctgcggttcctgctttcgcgggaatcacgttgggtgattcttataccaagaccacggtgagtgaggatactaactgggatcagttggcaaccgccccgctgccgttgattttgcaggcgagtaaagacgacttgctgactatcgctatggagttgaaggatcgcaaactgccggcgagcactccggtgacggtgacgatgaatggcacgacgcgtttgcagcggagctttgacgtgacgcttaaaactatgaagtcgctggtcaagcaggagctcgatggcactcttgtggtcacagtgggtgtatcggatcgcagtacattttcgtggtgggaaagccgcgcgttgtttggctggcgggtgttggttcctcgtgcgaaggatcaagctggtccgatgagcagccgaatcgccgcttatggtgctattgcccaagaggttcccactatttctgtggagccgccgcgtaatccggcgcagttggagcgtgcgattaagggcattgtggaggggcgctaccagtgggtggtgtttaccagcgtgaatgctgttaaggcggtgcgtgagaagatcgtgtcgtttggtttggattctcgcgcgttcgcgggggtgcatatcgctgcggtgggggctaagactgcggcggcgattcgtgagtttggcattactcctgagctaattccgccacgtaaggagcataatgctgcgggtatggtgtcggttttccctaattatgtggagggcttggacccggtaggtcgggtgttgctgccgcgggctgatattgccactgatgtgctggttgatggtttggtcaaccttggctgggaagttgatgatgtggtggcgtatcgtacggtgcgtgccgcgccgccgagtgcggaagtccgcgacatgattaagtccggcgattttgatgcggtgtgttttacctctgcgtcgacggtgcgcaatttggtgggtattgcgggtaagccgcatgcgcgcacgatcattgcatgtattgggccgatgaccgccgcggaggcagagaagcaagggctgcgtgtcgacgtcatccccgaggtggctaacgttgcggctcttgtggatgcgctcgcggagcatgtggagaaactgcgtgctgcgggtgagttgccgccgccgcgtaagaagcgtcgggcccgtcgcaaatctaaggaaggtgctgta

SEQ ID NO: 17685 - DNA, 990 bp, Cornyebacterium diptheriae
atgaatctagatcttattcgtcgtcctcgtcggttgcgttcgactccggtgatgcgtgaatttgttgcggaaaccacgctgcgtccggctgatcttattttgccgatgtttattgccgatggcattgataagcctcgggagattgagtcgatgccaggtgtgtaccagcacaccatggaatcccttatagaggctgtccgtgaggcgatctcggtgggtattcgttgcgtggatctttttggtgtgccactggattccgataaggatgccactggttcacaagcgtgggatcccgagggcattttgaaccgcggtgtgcgtgcgcttcgtcaggagttcggtgatcaggtgctcatcatggcggatacctgccttgacgagttcaccgatcatgggcactgtggcattttgaccacggatcgctttggcgccaccattgtggataacgatccaacggttgagttgtatcagaagatggcggttgctcaggctgaagcgggtgctcatattgtgagcccgtcgggcatgatggacggccagattttagctatccgtgaggctctcgacgccgcagggttccacgatgttgcgatcatggcgtattccgctaaatatgcgtcggcgttttatggtcctttccgtgacgcagtgggctcctctttgcagggtgatcgtcgtgcctaccagcaggatcctgctaatctccgtgagtcgatcctcgaagtcgatctggacatcgaggaaggcgcggattttgttatggtcaaacctgctatgccgtacttggatgtgcttgctgaggtagcgtctacgtcgtcggttccggtggcggcttaccaggtttctggcgagtatgcgatgttgcatgcggctgctgcgaacggctggttggatctggatcgggtgatgatggagtctctgatttctattaaacgtgccggtgcggatcaaatcctgacatactttgctgtagaagcagcacgaaaactt

SEQ ID NO: 17686 - DNA, 762 bp, Cornyebacterium diptheriae
atgccgaatccgttttccaagggttggaagtacctaaccgcatcactggacaacaagatcgaagaaaacgctgatcccgttatccagatcaaacaggccgccgaggctgccaaaaagcagcatgcggacatcgagcaacaagcagcttctgtgatcggcaatcgcaaccagctgcagatgaaactcaatcgactgctcaaggatcaacagtccatccaagaaaaagcccgccaagccctctcgctgagcgacagcgcaacagaccccgcagagcagcacaaatacctcaacgcagccgaggtatatgcctcgcagctggtgggtgtggaatcagagatcgagcagaccaccacgctgcatcagcaagctgaacaggccgcagagcaagcaacccagcaggttaaacagtcagaagctcgcctacacgagcagctgtcccagatcaatgagctgaccacccaggcgcagcaggcaaaaatgcaggaagctgccgtagctgcaagcgatcagatcaacagcattgatcctgaccgcgatgtgcccacgatggacagcattcgggaaaagattgagcgtcgttacgccgatgctttaggctcccaagagctcatgcagtcctcgatgaatgagcgcatccacgagatcgaagccaccaccagtgagcgtgacatgcgtgcaaacgccaagcttgatgccattcgtgcccagatgcgtggcgagctccccgccggatcggaagaaaccgagccaccagcggataaa

SEQ ID NO: 17687 - DNA, 2229 bp, Cornyebacterium diptheriae
atgaccaacgccgcagtagagatagatttcggtgtgacgggcatgacgtgtacgtcgtgttcggcgcgtgtggagcgcaagctcaacaaggttgcgggtgtggaggctacggtcaactacgcgacagagacggcgtcggtacgctacgatccggcgtcgacaacgcccgcgcagcttatcgacgtcatccgcggcgctggttacgatgccttcgaggtcgccgaggctgagcccgctaccgcagaacccagcgataccgcacgtgatcaccacgctgaggagctcaagacccgcttaatctattccgcaatcttggctctaccagtttttttgatgtctatgtttggtcagctgcagtttaacaactggcagtggctggcctttgcgctcgcgtcaccggtgtatttctggggtggctggccattccaccgcgctacactgcgtaacctccgccatggttccttcaccatggacaccctaatctccttgggcacgtcggctgcgtatctgtggtcggtgtgggccttgtttatcggcaatgccggcgatccagctatgcgtatgcacatgagttttacagctcatgctcatggtggcatggacgagatttatcttgagtcggccgccatggtgattgtgttcttgctgctggggcgctggtttgaaactcgtgcgaaggggcgaagcggggaggcgctgcgttccctgcttaaccttggggcgaaggatgccgccattattcgcgataaccgtgaagtgcgcatacccatccaatcgctgcaggtaggcgacgtttttgtggtgcgccctggtgagaagatcgccacggatggtgtggttgttgagggcacttccgctgtggatcagtcgatgatcaccggcgagtcggttcctgtggaagttgctcaaggttctcacgttaccggtgcaacaatgaacacctctgggcgtttgctggtcactgcccagcgcgtgggtgccgacaccaccctagctgccatggggcggttggttgctgaggcgcagtcgaataaagcgccggtgcaaaaactggtggataagatttctcagatctttgttcccgcagtgatcgttatttctttgatcacgctggcggttcacctcgccacggggtctgctactgccgacgccttcgcagccgcagtagccgtgctgattattgcttgtccttgtgcgctgggtcttgccactcccacggcattgttggtgggtactggccgtggcgcgcagatgggtctggtgattaaaggccccgaggtgttggagcaggcacgaaacatcgacacggtggtgttggataaaactggcacgatcaccactggtgatatgcaggttcgcaatgtttatggccatcctagttggcaagaacaagatgtgctgcgcttggcgggtgctgtggagcaggcttcggagcaccctattgctcgtgctatcacggcggcagctgtggctcagactcgtaccggcacgttgcctaaggtgacagactttaataatcaggcaggtcatggtgttgctggcaccgtggaagatcaccgcgtgtgggtaggtcgcccagccgacgacgaggccacgcagcaggtcaagaccgcggaaaatgagggtgctacgtgtgtggtggtgcgtatcgacgaccacctcgccggtgtgatcagcgtgcgtgacactgtgaaagagcactctcgactgagcgtggaaaaactcaccgctatggggcttactccggtgctgctgactggcgataacgccggtgccgccgccgcagttgcccgcgaggtgggcattcctgccgaccgtgtgatttccggtgtgcttccagaaaacaaagtccaaacggtcgaacagctgcaacgcgaaggccgcgtggttgccatggttggcgatggcgtgaatgatgcagcggccctaacccaagccgatttgggtcttgcaatgggtgctggaaccgacgtggccatcgaggcttccgacatcaccgtcatgaacaatgatccgcgttccatcgccaatgcgatcaatctctcacgacgcagtttgcgcaccatcaaaggcaacctgttctgggcttttgcatataacgtgatacttattccagtggctgcgttaggcctgcttaaccctatgttcgcaggagctgcaatggcgctaagttcagtgttcgtggtgactaattcgcttcgtcttcgcagcgtacgcagcgtattttcc

SEQ ID NO: 17688 - DNA, 1518 bp, Cornyebacterium diptheriae
atgaccacgcccagttttgatgacgattacgtcccaccgggtgatgcggatgttccttccgataccacagattatgcggaggcagagtacgccgaggtagaggtgtatgatccggccccgccggcttcctcggatgtgccagtgcagcgggagcgcaggggctataagcgtcgtgaagcggcgatggcgagcactgagttccgtcagcctcctcatgacgcggaggctgagcagggcgtgttgggggcgatgctgctaagcccgcaaacggtgatcgatacggtggagttgctggttgcggaggatttttaccgccctgcgcatcagttgatttttgaggccattgttggcttgttctccgataacaaggagatcgacccagtgatcgtggctgcgcgtttggatcgtaataatgatctggaacgtgtgggcggggcaccgtatttgcacacgctgatctcttcggtgccgactgctgcgaatgctcgttattatgcggaaattgtggctgagaagtcgttgcttcgtcagctggttaacgctggtactcgtgtggtgcagttgggctatgagggtactgagggcgctgaggttgagtcggttattgaccgtgctcagcaggaagtgttcaaggtttctaagaagaaccaagctgaggattatgcggtgttagctgacatcgtgggtccaacaatggatgagatcgatatgatctcggagaatggcggcttggcgcagggcgtgccgacgggctttgtggatctagataacctgaccaatggtctgcatggtggccagatgattattgtggctgcccgtccgggtgtgggtaagtcgacgatcgcgttggattttgtgcgttcgtgtgcgattaagcatgacaaggctgctgtgattttctctttggaaatgtcaaagagtgagatcgtgatgcgtttgttgtcggcggaggctgaggtgaagttgtcggatatgcgctctgggcgtctcgacgattccggctgggcgaagctagcaacacgcgtgggacagatcgaacaggcgcctatctatattgatgactccgcgaatttgacgatgatggagattcgctcgaaggcgcgtcgtttgaagcagaagcatgatctgcagatgattgtggtggactacctgcagctgatgagctcgggtaagcgtgtggagtcgcgtcagcaagaggtgtcggagttctcgcgtcagcttaagctgctggctaaggaactggatgttccgcttattgcgatttcacagctgaaccgtggtccggagtcgcgtactgataagcgcccgcagcttgccgacctgcgtgaatccggttcgttggagcaggatgccgacatggttatgctgctataccgtccagactcccaagatcgcgagaatgagcgcgctggtgaggccgatattattctggctaagcaccgtggtggtcctatcgacaccatccaagtggctcaccagctgcactactcgcggtttgtagatatgccgcacgctggc

SEQ ID NO: 17689 - DNA, 450 bp, Cornyebacterium diptheriae
atgaagctgatcctcaccgctgacgttgaaaacctcggtgtcgctggcgacattgtcgaggttaaggacggctacggacgtaacctcctgcttcctcgcggattggcaattgttgccacccgcggcgcagagaagcagatcgagggcatcaagcgcgcccaggaagctcgcgagattcgcgacttggaccacgcacgcgaagttaaggctcagctggaagcacttgagggtgtttctgttgcagtccgcacttctgagaagggtaagctcttcggttctgttaaggccgaggatgttgccgctgccgttaaaaaggctggcggtccgaacctggacaagcgttccatcgagctgccaaagagccttgttaaggccaccggcgcttacaaagtgaacgtgaagctgcactccgacatcgcagcaacggttaacttcgaggtcgtagccgct

SEQ ID NO: 17690 - DNA, 579 bp, Cornyebacterium diptheriae
atggcacaaggagatgtcaacataaccgttgtcggcaacctcgttgctgacccggagcttcgcttcacccctagcggtgcagcggtggcaaacttccgcattgcctccaccccacgtcgttacgactctcaaacgaaccagtgggtagacggcgaagccttgttcctgcagtgcaacatttggcgccaagctgccgaaaacgtcgcagaatccctgaccaagggcatgcgcgtgatcgtcactggccgtttgcgtcaacgctcctacgaaacccgtgagggcgaaaagcgcagcgtcatggagcttgaggtcgacgaagtcggcccatccctacgctacgcagcagcaagcgtgaaccgtaaccctcgcgagggtggaaacggcggaggaaacttcggcggctcccagggtggtttcggcggaaacaccggaggcaactcaggtggcggattcggcgctcctcaaggtggcttcggaggcggcccgcagaactcccagagtgctgcaccagccaacgatccatggagcagtgccccgcaagcaggtggattcggcggtgcggagcaagatccaccgttc

SEQ ID NO: 17691 - DNA, 285 bp, Cornyebacterium diptheriae
gtgcgtcactacgaagtaatgattattctggatccttcccaggatgaacgcactgtagccccgtccctggacaagttcctcgagatcgtccgcaaggaaaacggcaccgtggaaaaggttgatatctggggcaagcgccgtcttgcttacccgatcgccaagaaggaagagggcatttacgccgtcgttaacctgacctgcgaatccgcaaccgttctagagctcgaccgcgtgttgaacctgaacgacagcgttatgcgcaccaaggttctgcgtggcgacaag

SEQ ID NO: 17692 - DNA, 2178 bp, Cornyebacterium diptheriae
ttggcagattcaggtaaaggcaagccatctcccaagcggaagaaggccagtgccaaaagtagcgcgaaaagtcgtccggcacgggcaccgcaggcgcgtcgcccgaaaaagaagtgggttaagccagttattggcggcagtattgctgctgtactgctggcccccttccttgcgttcatggtcgcatatattgtgaccgatgttcccgagcctagcgagctggtgaccaaacaggtttcacagatttttgcctccgacggtaaaacgcagctggcgcgtatcgtgccaccggacggaaaccgcaccgaggtgcctatcgacaagatccccgaggttacccgcaacgcagtcctcgcagccgaagaccgtgagttctacaccaactccggtttctcctttactggctttggtcgtgctatcttgggccagctcaccggtgacgcttccgccggtggtggttcgacaattacccagcagtatgtgaagaacatggtggtgggcaatgactactcctacatgcgtaaagcaaaggaactggtgtactccgtcaagatggccaatgaatggtccaaagacgaagttctcggtgcatatctcaataccatttacttcggccgcaatgcctacggtatcgacgctgccgcccatgcctactttggtgttccagcttccgaactcaacgtaggacagtccgctatgttggccgccacaattcagcgccccagccagctggatccatggagcaaccgcgtcgaagcagagcaacgttggaactatgtgcttgacggcatggtgggcgaaggctggctcgatcccaatgaccgcgctggtgttgtattccccgaggtcactgaccctgctcagaaccagacttacaccgaagccacaggtgcaaacggcctgattaaaaaccaggtcatgaacgagctgaccaccctaggtatcactgagtccgatgtgcagacccttggcctgcgcatcaccaccactatcgacgacgccacccagaagtccatggtggaggccgtcgaccgcaacatggccgacgagcaatccaacacccgtgtcgccgccgtcagtgtggaccctaagaccggtgccgtacgtgcctactacggcggcgacgatgccaccggctacgactttgccaatgcaccgctgcaaaccggttcgactttcaagatctttggtcttgctgcagctgttcaacagggcattccaacttctactaactacagctctgatccttaccaacttcgtggcggtatcactgttactaacgttgataaaggttgtggcgtctgctctcttaaagaagctttgaaaaattcctacaacaccagtttcctgcgactgcaagatgatctgaaacatggcagccaagacacagctgacatggcgcactcccttggtgttgctcgttccttgcccggaattgaaaaaaccctgaccgaaaatggtcagcagccctatgaaggcgtcatccttggccagtacctttctcgtccgctggatatggctcatgctatggccactttggctaattatggtgtttggcaccaagagtactttgtagaaaagattgaaactgccgaaggtaaactgctctaccagcatgaaggtacccaaggtgaacggcgtgtttccgagaaggtagccactaacgttcttgatgcgatggctcctattgcagcatggtccggtggaaacggtcttgcaggtgggcgtccatcggcaagcaaaaccggaacgactcagcttggcgataccggcgctaataaagatgcttggatgatcggtgccaccccgcaacttgcaaccgcggtctgggcgggtaccgccgataactcgccattgctgaattcgtggggtgggcctatgtacggctccaacctccctgcacagttatggaaggatatcagtgactctgctctttcaggtaaagattgggagcaattcaaacccgcacaaaatattggctgggcgaaatatggctacggaactgctcctcgtgcgaccactgaaaagattcaaactgagacctcgaccagctcggcggaggctaccagccctgcagcatctggaacaccgggtgcaccgccagtaccaagtgccccagagccggcgccagctccgggaggcattgagattctgccaggcgtagtcctgccggtccca

SEQ ID NO: 17693 - DNA, 1254 bp, Cornyebacterium diptheriae
atgcaaacgctgttaaggtatctcgtcgtgcttgtcaaccacctcaataaaagaaaacctgtaccccgccaaacagagatcactcatcgccaccgactcatcgccatgttggcgttggcgctcggcggatttggtatcggtgttaccgaatttgtctccatgggattgctcagccttatcgctgaggacttcaacgtggcggagtccactgccggtcacgtgattaccgcctatgcgatgggcgtggtcgtcggtgcgcctgtcatcaccgcttttaccggaatgattccgcgccgacgtctactgatcttgttgatgattgcctttacaatcggcaacgcgttgacagtatttaccacttcttatcctgtgctgatggctgcacgctttttagctggcttgccgcatggtgcgtttttctcagtagcgggccttgccgtggcgtcgatggcccctgaagggcaacgcggccgtgctctcgcttttgtcggcatgggattgcccgtagcgacggtggtcggtgtacccgctgtccaagctctgggatttgctaccacgtggaaagccgcgtacgtggtggtcaccatcatcggtgctattaccttggcattgttgtggacgctcatgccgcatatgtccaagatgaaaccgacgagcccactcacagaactcggtgcgttaaagaacggtcaagtttgggcgtcactgctgatcggttcggtgggctttggtggcatgtttgctgtgtacacctatatctcttggacgatgacgcagcgcgcgggtttgcctgaggcgctcatgtggatcgtgctgatggcctatggacttggcatgattgcgggcaattttatcggcggacgcctctccgactggagtgtggaatacggaattcttactgctcttatctgcattgtgctcactttggtgagtttctacttcaccagtgcctatgcgtggatcgccatcatcaactttgctctggtggggctttccggttcgatgctcatcccgtctcttcagatccgacttatggacgttgccggtcgtgcccagaccctagctgctgcacttaaccactctgcgcttaacatcgcgaatgcttgtggcgcactgcttggtggcgtagtgatcagcgcaggatatagctattctgctcctgctcttgcaggcgctgctttaggttgtgccgccatcatcatttggatcccagcgcatatcacgcgcagcaaacaagaacgcaaacagcacagc

SEQ ID NO: 17694 - DNA, 1041 bp, Cornyebacterium diptheriae
atgttcaccatgactgcaaccgtgcaagaaaatacgcagaagaagcaacgtgtgctgtcgggaattcaaccaacagccgactcgtaccacctaggaaactatttgggtgccctgaagcagtggatcgaacttcaggataactacgaggcgttttacttcatccctgatctgcacgccatcacggttgatcaagacccccgtgagctgcgggaacgtaccatcgctggtgctgcacagctcttggctttgggtattgatcctcacaagagcactctgtttgtgcagtctcacgtgccggaacacgctgagcttggttgggttcttacgtgcttgaccggtttcggcgaagcgagccgcatgacacagttcaaggacaagtccgccaagcgaggtgcggatcgtacctcagcaggtctgttcacttatcccatgttgatggctgcggatattctgctttaccgtccgcagtttgtgccggtgggcgaggaccaacgccagcacttggagctcactcgcacgcttgctgagcgttttaactcccgttttaaaaagaccttcgtggtgccagacggaattattcctgagggtgctgccaagatttatgatcttcaagacccaacctccaagatgagcaagtcgggttcgaaccccaagggcttgattaatctgcttgatgaccccaaggtttctgcgaagcgcattcgctctgctgtgaccgacaacgacggcgagatccgttttgataaggaaaacaagcctggtgtgtccaacttgctggtcattcagtcggcactgacgggcaagaccatcgactcgcttgtcgacgcctaccaaggccagggttacggcgccttgaaggtcgacaccgccgatgccctcgaggccttcgttacacctttgaaggctcagtacgacatgtacatgtctgaccgtgctgagctggaaaatgtgttggctcttggcgccgaaaaagcccgtgagattgcatcgcgcacccttgcggacgcctacgagcacatcggttttttgccgccaaagcgc

SEQ ID NO: 17695 - DNA, 789 bp, Cornyebacterium diptheriae
atgaatattctcgctagtggactaggggaaagcgtcgcagatgtcgcttcctctggtcctctccttttaggtattttggccgctgcattggcaggttttgtttccttcgcgagtccttgcgtcatcccgcttgttcctggttacatgtcctatcttgcaggcgttgtgggcgcagaagtcgagctcagtgagactggccctcgggtgcgcactcgtcgatggcgagttgttggtgcggctttattgttcgtccttggtttcacggtggtatttactttggccacggccactgtttttggtgcgattagtgctctgacattaaatgctggcactttgatgcgtattggcggtgtggtcactatcgtcatggggcttgtgttcatgggtgcggttccgatgttgcaggaagagcaccgtttttctcctcgtcggtggtcgacaattctgggtgccccgcttctgggtggagttttcgctttgggctggactccatgtttggggcctacgctcgccgcaattatttctgtttccgcaggtactgagggtatgaccgcgttgcgaggtgtgctgctcattattggctattgcgtgggtttgggcattcctttccttattgttgcgttgggttctgctcgcgtgatgatgggtctgcgtaagtattcccgcattattcaaatcatcggcggttgtgcgttggttttggtggggctggcgttggtgtctgggcagtgggctcattttattaactgggtacgtcaatggaccgtcgagtacggtgccacgttgatt

SEQ ID NO: 17696 - DNA, 897 bp, Cornyebacterium diptheriae
atgaacgtcaactcgaaccttgcgcagctatcagatatggctttcgcatcgagcttcgttatttacttcatcgcgttggtgttatccatcgtgtactacatgaaggttaagggaatcgttgatcagcagcgtgaaggcctagagccctccacggcatcggcggataagttcgctggtatgacgcagatgattgtgtggcttggtgttttcgtccacattgcttccgtggtgttgcgtggtttgtcggcgagccgattccctttcggaaacctctatgagtacatcttggtgatcagcgcttttgccgttgctgtggctgctggtttcttgcagcgccatgagcttcgggctatgtggccatgggtgcttaccccagtgctggccttgctgttttatggtggcaccaagctgtatgcggattccgctccggtggttcctgctttgcagtccttctggttcccgattcacgtatcgacggtttccattggcgcgtcgattggtttgatttctggggtggcgtccttgttgtatctgctgcgtatgagcaagaacaagcgtcttgcggctttaacgtcgccgttgccttctgctaagacgttggatgcgattgcttaccgtacggctattgtgactgtgccagtttttggtttgggtattgttcttggtgctatttgggcggagagcgcgtggggtcgtttctggggttgggaccctaaggagactgtcgcgtttattacttggattttgtatgcggcttatctgcatgctcgtgctaccgccgggtggcgtgacaccaaggctgcatggatcaatatcgtggcattgataaccatggtgtttaacttgttctttattaatattgtggtgtcaggcctgcactcttatgctggcttgaat

SEQ ID NO: 17697 - DNA, 936 bp, Cornyebacterium diptheriae
gtggctcagagcaaaatccttctatattacaagttcacccccatcgccgatccgaaagcgatgatgctgtggcagcgcgatatgtgcgaactgctagggctcaaaggtcgtatcctcatttcggaacacggcattaatggaaccgtcggcggagacatggatgcctgcaagcggtatgtgcgcaagatgcgcgagtacccaggtttccgcggcaccgaattcaagtggtctgatggcggcgcggaggacttcccgaagttgagcgtgaaggtacgcgatgagatcgtggctttcggcgcgccgggtgagttgaaggtggacgagaagggtgtgatcggcggcggcgttcacttgaagcccgaggaagtgaacaagctcgtcgaagagcgtggcgacgacgttgtcttctttgatggtcgcaacgccatggaagctcagatcggtaagttcaaaaacgctgtggtgcccgatgtgcgcactacacatgacttcatccgcgagcttgagtctggcaaatatgactggatgaaagacaaaccagtggtttcctactgcactggcggtattcgctgcgagatcctttcctccctgatgaagaaccgtggcttcaaagagatctaccaaatcgatggcggcattgttcgctacggcgaaaagtacggaaacgacggcctgtgggagggttcgctgtacgtattcgatcgccgcatgcacatggaatttggcaatggtgtgcaagacccaggctttatccagctgggacactgtgtgcagtgtggcgccccaaccaacaagttcgagcattgcatcaatgaggatgagtgccgtgagctcgttctcatgtgcccagattgctacgaaaacccagcaactcgtaactgtgggcgggagcactgtaaagaagtagccgccgaggcagctgctgcggcagcggtg

SEQ ID NO: 17698 - DNA, 483 bp, Cornyebacterium diptheriae
atgaagaactttacagtcccaggaatcaaagaagcagacgccaagcaactcatcgaccacctgcaagagcgtcttaccgattacaacgaccttcacctcatcctgaagcacgcccactggaacgtgcacggtcgcaactttatcgccgtccacgaaatgatcgacccccaagttgatctcgttcgcggatacgccgacgaagtagcagaacgcatcgccaccctcggcggcaccccaatcggcaccccagtcggccacgtagaaaaccgcaccccactggagtacaacgtcaactccggctccaccgaggatcaccttaaggaactcaacaaggtgtacaccaaggtgctagaaggcgtgcgtgaagccatggccaacgccggcgacctcgactccgtcacggaggacatttacatcgggcaagcagccgaactggagaaattccagtggtttatccgcgagcacattgtcgacgacaacctc

SEQ ID NO: 17699 - DNA, 633 bp, Cornyebacterium diptheriae
atggaaattcggatcgtcgaccaccccttggcagcttcacgtcttaccatcatgcgcgataagcgcactaacaatgcgggattccgtgctgcgcttgcagatctcggcgccatgctcgtgtatgaggcgtctcgtgatctcgcaattgagcagttcccagtcagcacccctgttgctgatacgcaggggactcgtttgcaggatcctcccattatcgtgccgatcattcgtgccggtttgggcatggtggatccagcgttgtcgatgatccctgatgcccaggtgggctttattggcatggcgcgtgatgaggctactcatcagcctgttccttatcttgaagcgttgcccgacgatctcagcggtcgcaccgtgttctgcgtggatccgatgctagctacggggggttctttgctacacgccattaagctgctggcggatcgtggcgctaccgatatcaccgctatttgtatggtgtcggcgcaggagggtgttgatgccttggctgagtcgggtctgccttgccgtttggtcacggccaccatcgaccccgagcttaacgacgacgcctacatcgtgcctggcctaggtgatgcgggcgatcgtctctacgggccacgtaacatcgacctc

SEQ ID NO: 17700 - DNA, 267 bp, Cornyebacterium diptheriae
atgcaaaccgttaaggcggccgccctttttaaggtgctctcagatccaacgcgcctccaactgctctacctggtagcagaaaatcccgaacgactctgctgtgtcgatctctcagaggcacttgccgtctcggcccccacggtcacacaccacatgaaaaaactcgccgatgccaacctcgtcacccgccacaaacgtggcaaatgggcatattacgagatagtcaacgacgagttcgcccgcgtacacgagctcatccggacgctc

SEQ ID NO: 17701 - DNA, 3423 bp, Cornyebacterium diptheriae
gtgtctcaacaatcatctgaacgtggaacctctacggtaaatccattgtcaaagatcctcgttgctaaccgtggcgagatcgccgtgcgagcttttcgtgcagcctttgaaaccggtgctgccacggtagctgtctacccgaacgaagaccgtaattcattccaccgatcgtttgcctctgaagctgtcctcattggtgagggcggatctgcggtcaaagcgtacctcgatatcgacgaaatcatccgtgctgctaaacaaacgggtgccgacgcaatttacccaggctacggcttcctttccgaaaacgcccagcttgctcgtgagtgcgctgaaaacggcataacctttatcggtccacctccatcagtgctggagcttaccggtgataaagcagctgctgttaccgcagcacgcgaggcaggtttgcccacgctgactgagacagaagcaacagacgatccaaagaagctcgcagagctgaccaaggggcagacctacccgctattcgtcaaagccgttgccggtggtggtggccgcggcatgcgttttgtcgacgcccccgaaaacctagaaaagctagcagcagaagcctcccgtgaggcggctgcagcattcggcgatggccgagtctacgccgagcgtgcagtaatcaatcctcagcatattgaggtccagatccttggtgactccgctggcaacatcatccacctgtacgagcgtgattgctcgctgcagcgtcgccaccaaaaggtcgtagagatcgccccagcacagcacttggcgcccggactacgcgaaaagatttgtgcagacgcagtcgcgtttgcacgccacatcggttaccaaggtgcaggcacggtcgagttcctagtcgatgaggaaggcaaccacgtcttcatcgagatgaaccctcgtatccaggtcgaacacaccgtgaccgaagaggtcacccaagtcgacttggtgaagtcccagatcatgatcgcctccggtgcgacactcgaagatctcggtctgcgccaagaagacatccacaccgaaggcgctgccctgcagtgccgtattactactgaagaccccaacaacggtttccgtcctgacaccggaacgattaccgcttatcgttccccaggtggcgcaggtgttcgtctcgacggtgctgccatgctcggtggtgagatcaccccgaatttcgactccatgctggtcaagatgacctgccgtggtgccgatttcgccaccgcagtcgctcgcgctcagcgtgcactcgcagaattcgttgtctcaggtgttgctaccaacatcggattcctgcgtgctttgctacgcgaagaagacttccagcacaagcgcatcgccactggcttcatcgcagatcacccatggctgctgcaggcaccacctgccgacgatgagcctggccgcattttgaactacctagctgatgtgactgtgaacaagcctcatggtctacgcccagccgtgatcaacccggtagaaaagctcccagcagagatcaaaggtgagctaccacgtggttcccgtgatcgcctgctccagctcggcccagagggatttgcgcgcgcactgcgtaaacaggatgcgctcgcggttacggataccaccttccgtgatgcacatcagtcgcttctcgcaacccgcgtgcgctccaacacgctgatcgacgcagcacggcacgtcgcaaagctcaccccagagctgctctctgtagaagcatggggtggtgctacctatgacgttgctatgcgcttcctacatgaggacccctgggagcgtctcgaccacctgcgtgaggccatgcccaacgtcaacattcagatgctgctgcgaggccgcaacacagtcggctacacaccgtacccagattctgtatgcaaggcttttgtcgacgaagccgcacgctctggtgttgatatcttccgcatcttcgacgcgcttaacgacgtctcccagatgcgtccagcaatcgacgcagtgctcgaaaccaacaccacgattgccgaagtcgcaatggcctactccggtgatctgaccaacccaagtgagaagctctacacactggattactaccttaagcttgccgaggaaatcgttaagtccggtgcacatgttctagccattaaagacatggctggactgatgaagccagccgcagcaaccaagctggtcaccgaactacgacgcaacttcgacctgccggttcatgttcacacccacgacactgctggtggccagctggctacgtattgggctgcagcagccgctggtgcagatgccgtcgatggtgcctccgcgccactgtcgggcacaacgtcgcagccatcgttgtctgcaattgtggcagcattcgctaacacctaccgcgatacgggtctctctctggacgcagtcggatcgatggaaccgtactgggaagcagtgcgcaaactctacgcacccttcgaatccggaaccccaggaccaactggccgcgtctaccagcacgaaatcccaggcggccagctgtccaatctgcgcgcacaggcaactgcactcggcttggcagatcgcttcgagctcatcgaggactactacgcagccgttaatgagatgctgggacgccccaccaaggtcaccccgtcctcaaaggtcgttggcgatcttgcactctacctagtcggcgcaggagttaacccagcggactttgcagcagatccccaaaagtacgatattcctgactccgtcattgccttcctccgtggtgagctcggcacccctccaggcggctggccagaagaactgcgtgctaaggcattggcaggacgtaaggaatcaaaggacacattggccccgctgccagcagaagatgaagctctgctcgcagatcgtgcgaccgttcgcccaacgctggatcgcctgctcttcccgaagcctgcggcagaattcgcagagcaccgccgtcagtttggcgataccaccaaactcggtgacgcagaattcctctatggcctcaaagaaggcaaagaaacggtcattcgtaccgcagacagtagcgtcccaatgctggtgcgtctcgatgccgtcggcgagcccgacgaaaagggcatgcgcaacgttgtgtgcaatgtcaacggccagattcgccccatcctcgtgcgtgatcgcagcgtagagtcagtgaccgcctcggtggaaaaggctgatccttccaacgccggacacgtagcagcaccattcgcaggcgttgtcacagtgacaatcgaggaaggcgctaccgtcaaagccggcgatccagttgctgtcattgaggcaatgaagatggaggcaacgatctctgccaccacagacggaaccgtcgaccgtatcgtcttgacgcaggccaccaaggtcgaaggtggagacttgctcctcgtgatcaag

SEQ ID NO: 17702 - DNA, 1782 bp, Cornyebacterium diptheriae
gtgtctgtggaacagaagaagatcactaaggtgctcatcgcaaaccgcggtgagatcgccgtccgcgttatccgtgcagcccgcgatgccggcatcgccagcgtcgccgtgtacgcagagcccgatgcagacgctcctttcgtctccatggctgacgaggcatttgcactaggtggccaaacctccgccgagtcctaccttgtctttgacaagatcctcgacgcggccaagaaatccggcgccgacgccatccacccaggctatggcttcctctctgaaaacggcgacttcgccgaagcagttatcaatgcaggcctgatctggatcggcccatcgccgcagtccatccgcgacctcggcgacaaagtcactgcacgccacatcgcgcttaaagccgaagcacctatggcaccaggcaccaaagagccagtcaaagacgcctccgaggtcgtcgccttcgcagaagagcacggacttcccatcgctattaaggcagcattcggcggcggcggacgcggcatgaaagttgcctacaccatggatgaagtagccgacctctacgaatccgcaacccgcgaggcagtggcagccttcggtcgcggcgaatgcttcgtcgagcgttacctcgacaaagcacgccacgtcgagtgccaagtcatcgcagatatgcacggcaacgttgttgtcgcaggcacccgcgactgctccctccagcgccgattccaaaagctcgtcgaagaagcaccagccccattccttaccgacgaccagcgcacccgccttcacgaatccgccaaagccatctgtaaagaagctggttactacggtgccggcaccgtagagtacctcgtcggctccgacggactgatctccttccttgaggtcaacacccgcctccaggtggaacaccccgtcaccgaggtcaccaccggcctcgacttggtacgcgagcaattccgcatcgcagaaggcaaagaactccacatcaaacaagacccaacccctcgtggacacgccttcgaattccgaatcaacggcgaagacgcaggctcaaacttcatgcccgcaccaggcaaggtcaccaagtacatcgagccttccggcccaggtgtacgcatggactccggtatcgtcgaaggctccgtcatcggcggccaattcgactccatgctcgccaagctcatcgtcttcggagaaacccgtgacgaagcactccaacgcgcatcccgcgctcttaatgagtacgtcgtcgaaggcatgcccaccgtcttgccattccaccgccacatcgtggaaaacccagccttcatcggcgacggcgaaaaattcgaggtctacaccaagtggatcgaagaagagtggaacaacccgatcgagccatacgtcgacccaacagatgtggatgatgaagaagcagcactgccatcccagaaagttgtcgtggaaatcgacggccgccgcgtagaaatcgcactaccaggcgacctcgcactcggcggcggcgcaggtgcaccaaagaagaaagccaagaagcgccgcgcaggtggctccaaggctgccatctctggcgacgctgttgcagcaccaatgcagggcaccgtcatcaagatcaacgccgaagaaggcgccgaagtagctgaaggcgacaccgtcgtcgtcctcgaagcaatgaagatggaaaaccccgtcaaggcacacaagtccggtgtggtcaccggtctagccatcgccgctggcgaaggcgtaaccaagggccaagtactcctcgagatcaaagacgcc

SEQ ID NO: 17703 - DNA, 2115 bp, Cornyebacterium diptheriae
gtgccgcaacctaaaactcaacaatcttctaggccttcgactactaaataccgctatgaccttgatggtctacgcggtattgctattgcattcgtggtcatcttccacgtgtttgtgggccgtgtgtcgggtggcgtggatgttttcctcttgctgtcgggctattttttccttggttcgcagctgcgttatgccgctaaaccgaatgccagcttgaacccgtggtggccgttgtggcgaacgattcgtcgactccttccagcactcatggtggtgctgatgtctacggtgctgattattgagtcagcgatccccgagcttcgcaccacaaatgttgcggatcaggcgctggctagcgtggggtattaccaaaactgggagttaagtgcgcagggctctgcctatggtgcagcctccagtgtggtaagtccgttgcagcatctgtggtcgatgtctgtgcagggacagttttatctggcggcgattgcgttcgccctgtttgtatctgtggtgttgaagctgcggcgtcgacgcggccatgaagccgagcgggtgcgtcatttggccggtattccgctgatcgcggtgacggtggcgtcgtttagctatgcggtgtatctgcatccagtggatcagccactgaattactattccacgtggtcgcgtgtgtgggaacttactcttggtgctgtgttggtgctctactccgacaaaatccgcgtgagtcgagcgatgggagtggtgttcacatacctaggcttggccatggttttgaccactggtctgcttttcgacggcgcccaagtattcccagggcctggcgctttgtacccactgggtggcgctgcattggtcatccttgggcaaggccacggcgctggctggatgaagagccgtttcatgctgtggcttggttcgatcgcgtacccgttgtacctgtggcactggccgctgttgattatgtccacgatttatcttggactcgatcgtccaagtactggactcggtatctcggtgattgcggtgtcggtcgttttggcacacctgacgcacaagctcatcgaggaacctttcaaacagcatgccaaacgccccgaacgccaagcgcgtcgagtgcgtagtgcggcagcgacgttgcgtaaggcaacgggggctacgcgtgcgctcgccggcgtagtggttcttgcgctgtgcgggacagcattgtggattccttccgtatggcaaaaggaagtacaggcgctgtcgaagactcagctggatccggtgctgtatccgggtgcgatggcgttggttggcgggcgtgtgccgcaggtgaagtttgcgccggatccctatgttttggctaatagtttgtcaccagcgtggacggacggctgcatgtcggagcttgacgacgaccccacgaagatcgcgaacgacaacttcggcgaggaatactgtgtttatggcgacaagaatgccaagaaggttgcctatgtgatcggtggttcccatgcggagcagtggatggctgctttggatcagatcggtcgcgatcatggcctgaagattattccgattgtgcgtcagggttgtcctgcgtttgccatggaagaagacggtgtatttagcgatgactgtgcgacttttaacaaggtcatgctggagaaggtccgtagggataagcctgatttggtgatttctaattccacgcgtccgttgctggagaagctgcgcggtttggacgaggttccagagagctatcgcacgctgtgggtggttctagaaaaagaaaagattccgtttattggtttgcgggataatccgtggttcttggataaagatggccaagcgtggcccctatcgcagtgcatcgcaagtggtggcagcataacggaatgcggtaagccgcgggaggaaatttattctcctgtggatcccgcggcacgtttcttgaagtccaagacgatgatctctattgataccgccgactggttctgcccgaatggtttttgccccggtgtgatcggcaatatctatgtttatcgcgatggcaaccacatttccgatgcctacgcgttgagtcttgtcccactgttgtgggaaaagatggaaccagtggtctcccagctt

SEQ ID NO: 17704 - DNA, 522 bp, Cornyebacterium diptheriae
gtgtgccccgcagatgttgatgaagacgccctgctggattcccttgtaggccgtagccctgctgataaagttgccgccttggcgcaggccaaagccgaggctattgctggcgattaccccgatgatgtggtcattgggggtgattccatgctgctgcttgatggggcgcttcaaggaaaaccgcacaccgtagataagactattgaacggtggaaacaacagcgtggcaaaaccgctgaactcattaccggccactgtgtgatcaccccgcgtggtcggcatgtagaaacctccacaacgactgtcacgtttgcccacgccgacgatgccgatattgaagcctatgcgcgtaccggcgagcctttgcagtgtgcgggtgcttttacgctcgaggccatcggtggttggtttatcgactccattactggcgatccatccagcgttatcgggttgtcgctgccggtggtacgtcgtgcgctatatgcggcaggctacaacgtcagcgaattctggaacaataac

SEQ ID NO: 17705 - DNA, 711 bp, Cornyebacterium diptheriae
gtgatgttgttacactggacaaccgtggcaaaggcatcattggataagaagcccctcgacgttgcaaaaatgttcgacggcgtgggcaagaactacgacatcaccaatacggtgttgagttttgggcgcgataaaaagtggcgggaaaagacccgtgagcgtctccagctcaaagcgggtgaacgcgtgctcgaccttgcggcaggaacagcggtgtctaccgtggaactcacccgatctggtgcatgggtagttgcgtgcgatttctcccaaggcatgctggcagccggtaaggatcgcaatgttcccaaggttgtgggcgacggcatgaagctgccctttgctgacaactcctttgacgctgtcaccatttcttatggtttgcgcaacgttcatgatttccgtatggctttgcgcgagatggcgcgagtaaccaagcctggtggtcgtattactatcgcggagttttccaccccgaacctacctggttttaaaaccatctacaaggaatatctcactaagctactgccattaatcgccaaggttgtaggcaccaacccagaggcttatgagtatttggcggaatcgatccgcgcatggccggagcgagaagaactcgccgcggccatcaatgaaaacggctggcacgatgccggctggcaaaatctcagcctcggcatcgtggctcttcactcggctgttaagccttcc

SEQ ID NO: 17706 - DNA, 990 bp, Cornyebacterium diptheriae
atgggcaacggtacgcgagttgatctcggcgagcaaaacctcaatgaggagattgcggccggaatgatccgcgtcgaggatctcttacgggaagaactttccaaaggagaagattttctcgtagaaaaggtcatgcacctagcggaggcaggcgggaaacgattccgcccgatgtttgcgctgctggcatcgcagtatggctcgcagccaatgagcgagaacgttatcaaagctgcggtggtggtggaaatgacccacctcgccacgttgtatcacgacgacgtgatggacgaggccgacaaacgccgtggcgttgatagcgccaacttcaggtggaacaactctgtcgctatcttggctggagacatcctcctcgcgcacgtggctcgcctcatggccgaccttggtgtagaaaccgtggcgcacttctcggagacgttcgcagaactggtcaccggtcagatgcgtgaaaccatcggtgcccgcgatggtgatcccatcgagcactacctcaacgtgatcaatgaaaagactggcgtattgattgcttccgctggattccttggctccatgcatgcgggagcctcagccgaacatgtagaggcgttgcgcgcctacggccgagccatcggcatggttttccagatcgtggacgacatcatcgacatcttctccgataccaccgattctggtaagacccctggcaccgatcttcgtgagggtgtgttcaccctccctgtgctctatgcgctgagcgaagacaccgccgttggagaagaactacgctccatcctcaccggcccgcttaccgacgacgccaccgtcgcgcacgccctcgacctccttgcccgttccacaggtcgcgaacgcgcgcttgccgacgtccaccgctatctcgaagaagccgagcgtcaattggctctcttgccacagaactcaaccacggatgcccttcgtagtctcgcgcactataccgtgaaacgagtcgga

SEQ ID NO: 17707 - DNA, 303 bp, Cornyebacterium diptheriae
gtgagcgatcaacagccacgcccaacgggtaagcgccagcttgctggtgttagcactacgtccaccgcttcctacgaggcgaagaaagtcgccccaacgggtggcgatgatgagcgtaacgggaacaaggttgtttctttcgtccctgaagtagcttcagagatgaagaaggttatttggcccaccgcgcagcagatgatgagctacacgttgatcgtgtttgctttcctaatcttggttaccgcgttggttgcaggagtggacttccttgccggcctcggagttgagaaggtgcttactaag

SEQ ID NO: 17708 - DNA, 789 bp, Cornyebacterium diptheriae
atgagcgaagaaaacagctttgcagaagcctttgatgaggccgtacagaacacgatttccgctgaggctgaagagttcaccgctgacggtgaactcgaagttgtggaggaaactgcccaagaggcagatctcaccggcggcgagaagaatgaagacgctgagtacaaggcgcgtctgcgcaagtacacccgtgagctcaagaagctcccaggtgcttggtacatcattcagtgctattcgggatacgagaacaaggtaaagaccaaccttgatatgcgcgcccagaccctcgaggttgaagattccatcttcgatgtcgttgttcctatcgagcaggcaatcgagcttcgcgacggaaagcgcaagctggttaagcgcaagctgctgccgggctacgttttggttcgtatggacatcaacgatcgctcatggtccgttgttcgcgacaccccaggtgtgaccagcttcgttggcaacgagggcaacgccaccccagtgaagcaccgtgacgtcgctaagttcctcatgccgcaggaggctaccgagtctgaggctgttaacgctgagggtgagaaggtcgtcgctatgccaaccgattccaccaagccaaagaccgctgtggacttcgaggttggcgaggctgtcaccattttgtccggtgcttttgcctctgtttccgcaaccatttcgggcattgaccacgagaacgcaaagattcaggcactggtatcgatctttggccgcgaaaccccagttgaattggccttcgatcaggttgagaagatcagc

SEQ ID NO: 17709 - DNA, 426 bp, Cornyebacterium diptheriae
atggctccgaagaagaaggtcaccggccttatcaagctgcagattcaggctggacaggcaaaccctgctcctccagtcggcccagctcttggtgctcacggcgtgaacatcatggagttctgcaaggcttacaacgctgcgactgagaaccagcgcggcaacgtggtcccagttgagatcactgtgtacgaagaccgctccttcgacttcaagttgaagaccccacctgctgctaagctgctgctgaaggctgctggcctgcagaagggttccggtgttcctcacacccaaaaggtcggctccgtgaccatggatcaggtcaaggaaatcgcacagaccaagatggaagacctcaacgctaacgacattgagaacgctgcacgcatcatcgctggtaccgcacgttccatgggtatcgaggttaag

SEQ ID NO: 17710 - DNA, 705 bp, Cornyebacterium diptheriae
atgggcaataaatcaaaggcttataaagctgctgctgagaaaattgacaagggtcgtctatacacgcctctgaaggctgctgagctggtcaaggagacttcctccaagaactgcgacgcaaccgttgatgttgctatccgcttgggcgttgaccctcgcaaggctgaccaattggtccgcggaaccgtctccttgccaaacggcaccggtaagtccgttcgtgttgctgttttcgcagaaggcgaaaaggctactgaggcacaggctgcaggtgcagacatcgttggcaccaccgagcttattgagcagatcaccgctggtaccatcgagtttgacgttgctatcgctaccccagatcagatggctaaggttggccgcgttgctcgcgtcttgggcccacgtggtcttatgcctaaccctaagaccggtactgttaccaacgacgttgccaaggctattgccgaggttaagggcggtaagatctctttccgcgttgacaaggcttccaacttgcacgcaattattggtaaagcatccttcgatgctgaaaagcttgctgagaactacggcgctctcctcgatgagatcaatcgtatcaagccttcttctgccaagggtatctatgtcaagaaagtaacgcttacttccactttcggacctggcgttccagtggatccttctatccagaagaactacacccaagct

SEQ ID NO: 17711 - DNA, 1116 bp, Cornyebacterium diptheriae
ttgatgaagtacgtagatgagttccgcgatcctgaagcagccaaagcacttctgaatcgtatcgaaaaagacgcggcccagcttggcgagatctcgctcatggagatctgtggtggtcacacgcacacgatctatcgctacggcttggaaaatctcctccccgacaacattgacctcgtccatggcccaggttgtcctgtgtgcgtcatccccatgggacgcgtcgacgatgccttgtggttggcttcccaacccaacgtcatcttgaccaccttcggcgatatgatgcgcgttcctggttctaccggctcgcttctcgacgcccgcgcgaacggcgccgacgtccgcttcgtgtactcgcctctcgacgcccttaaagtagccaaggacaatcccaccaaaatggtggtgtttttcgccgtaggttttgaaacgactgccccgtcgactgctgtaacactcgaggcggccaaacgcgagaatgtgaccaactttgcggtgtttagcaaccatgtgaccatcgagccacctctacgtgttttggtcaacgacaccaaagttgatggctttatcggcccaggccacgtggccaccatcgtcggaaccgacacgtttaagttcctccccgaggaatttaacaagcccgttgtcgtcgcaggattcgagcctctcgacgttcttcaaaccgtggacatgctgctccagcagttcctccgcggcacctccgaggtaggaaaccaatacgcccgcgttgtgcgccccgagggcaacactgccgcactcaacttgatgtcacgagtgttccgtgttcgcgagaccttcgaatggcgcggtcttggctggatccccaactctggcctcggaatcgcagacgagtatgcgcagtgggatgcagaaaagcttttcgacgtccccggccgccgaatccccgaccccgtcgcctgcgagtgcggctccgttttgaccggaaaaatcaagccgtggcaatgccgtgtctttggcaccgcctgcaccccgcagacccccatcggaacgtgcatggtatcgcccgaaggcgcctgcgctgcatattacaacttcggacgtatcaaccgtgaggaggccgcggcgctacgc

SEQ ID NO: 17712 - DNA, 609 bp, Cornyebacterium diptheriae
atgcggcagctgggattggtatcaaagatcaggcgtaagaagtacaactcctaccgtggcactgtcagccacattgctgacaacgttctcgaccgccgcttcacccaagacgcaccgaacaaagcgtgggttagtgacgtcacagagttccgggtagccggcaccaaggtatacctgtcgccagtcatggatctgtttgaccgaaccatcttggcgcatactctgtctacgtcaccgaatactcagctcacatcccgcgcgttggcggacgccattgccatgtttagcccgggtaaaggactgattgtgcacactgaccaaggcttccagtaccagcacgcaagctggcgcaacctaattgaaagcgttggcggtgtgcaatcgatgtcgcgcaaaggcaactgctacgacaacgcagtgatggagaacttcttcggtcacctgaaatcagagatgtaccacgatgtttacttcaccagtgtcgatgagctttgccaagctatcgatgagtacatactgtggtacaacacgtaccgactccaagaacgattcaagggtctggctccgatgcaatatcggaaccagacccttgcaaagaccctaaccgtt

SEQ ID NO: 17713 - DNA, 513 bp, Cornyebacterium diptheriae
atggcaaatccaaagaacaccgagtctctcgcagagctgaagaaccgctttgcagacattgactctgtattcgtcacggaataccgtggcttgaccgttgctcagatcactgagctgcgtcgtgctcttggttctgatgtccagtactccgtcgccaagaacaccctgatcaagcttgccgctaaggaagccggcatcgaaggccttgatgatatcctcaccggtccaaccgctgttgccttcattaagggcgaggctgttgatgccgctaaggctatgaagaagttcgcttctgaaaacaaggcattcgttatcaagggtggctacatggatggcaacgctctgagcgcagctcaggtcgatgctattgccgagcttgacaaccgcgagactactctcgcaaagcttgccggcgccatgaagggcaacttggcaaaggccgctggcctgttcaacgctccagcttctcaggttgcacgcctcggcgctgcactccaggagaagaaggaagcg

SEQ ID NO: 17714 - DNA, 1452 bp, Cornyebacterium diptheriae
gtgagcaatcctcattccagcgcagtgatcgtgttagcggccggagctggcacccgaatgaaatccgcaaaacaaaaaactttgcactcgatcggtggccgttcgctgctggcgcattccctgcacgcagcagcaggattaagcccacagcgcatcgtggcagttatcggacatcgtcgtgagcaagtccgccccgaggtcgaggccgttgccgccaccgtggactgcgaaatctccgtagcgatccaagagcaacaaaacggcactggccatgcggttcaatgcgcgatgcacgaactcgaaggcttcgaaggcactgtcgtggtcactaacggcgatgttccattgttgcgatcagaaacgcttcgctcgcttgtcgacgcccacaccgccgtccccacggccgtcaccgtgctcaccatgtcgctgagcgatcccaccggctatggccgcatcgtacgcaacgatgaaggagaagtcaccgcaattgttgagcaaaaagacggtgatgaagaaaccctcaaaatcaccgaagtcaactctggtgtttttgctttcgatgccgccattttgcgatccagcctcggcaaattggattccaacaacgcccaaggcgagctctacctcaccgatgttttaagcatcgcacgcaccgaaggccaccccgttcgcgcataccgcgcacacgatcaccgtgaactcgccggagtcaacgatcgcgttcagctcgcccaagcaggaaaaatcctgaatcagcgtctcgtcgaagatgccatgcgcaacggtgccaccatcgtcgatcccgacaccacgtggatcgactccgaagtcaccatcggacgcgacgttatcatccatccgagtacccaacttttggggaagaccagcatcgcggataactgtgtgattggccccgacaccaccttgaccaacatggtcattgacgaagacgcacatgtgattcgcacccacggattcgattcacgcatcggcgcccacgccaacattggccccttcacctacatccgtcctgggaccgttgtgggcgaaaacggcaaactcggtggcttcgtcgaagccaagaatgcccagattggacgcggttccaaagtgccacacctgacctacattggcgatgccacggtaggtgaagagtccaacattggtgcctccagcgtcttcgtaaactacgacggtgtgaacaagcatcacaccacgattggctcccatgtacgcaccggctccgacaccatgtttatcgctccagtcaccgtgggcgacggcgcatactctggagcaggtacagtaattaaagaggatgttcccgcgggagcactcgtcgtctccggcggcaaacaacgcaacattgaaggctgggtggaaaaaaaccgccccggcactccagctgccgatgccgcccgtcaggcacatgcccacgaaaccaaggaaggt

SEQ ID NO: 17715 - DNA, 993 bp, Cornyebacterium diptheriae
gtgatgggtacgggcattttggcgaacttgttgcagattcacgctgaacgtctgcctggtgcacatgatctggctttggcaatcctcatcgtggcgtgggcattgctgttatttttaagcgttggttttattgttcgtgtgatgcgggatccgcaggtttttacggcttcggttcgtgcgatggcggcgctaccgttttggtccacagtgtcgatgggctatttgtctgtggggtcggcgtccacagtggtcattccgtcatatttgccgcagtggcacgattcgatttgggtagtaaatacgtggatgtgggtgtttggaactgtcgtcggcgtatctacggcgctagtttttgcgttccgacttattggagtagatcgtggtgatcccacgactgtgtgggggctggcagtggtggggccgatggtgtcgtcgactactggcgctaatttggctgcgcacgttccccacggggtggtgttgtggctgcaggtggcctcggcggcgtgtttcttcttgtcgttttatgcgggtgctgtgattttctcgtgtgcgtatcaccacttttggcgggttgctacgatccctgttgctgcttcggcatcagcatggattccactgggcatggtaggccagtcggctgcggctgctcaggcgatggcgttgcaagcagaacatgtccttgttcaggggtttgggcagtcggttcatcagattgcgcacacctatggctggattatggttgtcgtaggtattcccatggtggcgtgggcgtgtgcggttacgcttcgcggttttcgtaagcgtatgccgtttagccctggttggtgggcgttgacgttccccatcggtactttggcgttgggggctacgttgcttggtgcgggtactcagattcaacccttggtgtggctgggtgcggtggggacgttgtgccttgtggggacggtgacgttgtgcttggtggcgtcggcacgcgcggtgctgcgtggg

SEQ ID NO: 17716 - DNA, 378 bp, Cornyebacterium diptheriae
atggctaagctcaccaaggacgagctcattgaggctttcaaggaaatgaccctgatcgaactctccgagttcgttaaggaattcgaagaggtcttcgaggttaccgctgctgctccagttgctgttgctgctgcaggtgctgctccagctgctgctgaagaagagaagaccgagttcgatgttgttctcgaggacgcaggcgctaagaagatcggcgttattaaggctgttcgcgagctcgtctccggcttgggcctgaaggaagctaaggagctcgttgagggtgctcctaaggctatcctcgagggtgctaacaaggacgacgctgaggctgcaaaggctaagctcgaagaggctggtgcaaaggttacccttaag

SEQ ID NO: 17717 - DNA, 759 bp, Cornyebacterium diptheriae
atggggcgttttcatcgccacgacgacggtacggtgcattcccacgaccatgaccaccacggtcattctcatgatgttggggatcactccggttacgaaactgggcgggagcgcattgaggtcctagaggatattttccacgaaaacgaccactgcgctgcggataacaaggagcttttcgacgcccaccaggtgcgttgcatcaacatcatgagctcgcctggtgcaggtaaaaccacggtgttgcagcatgtattgcgagctgctgaaggaaaagtgcgcgtaggtgttgttgaaggcgacattgaaacttccctagacgcagatcgtctcactggctttggtgcccagatttcattgctgaacactggcaatggttttggtggagagtgccacctcgatgcccctatggtgagccgtgcgcttcgtggcctagaccttgacaccctcgacgtggtgctcattgaaaacgtgggcaacttggtgtgccctgcggaatttgaagtcggtgagcacagcaaagcgatgatctactcggtcacggagggggaagataagcctctgaagtaccctgtgatgttccgtagcgtggatgcagtcgtgattaacaagatcgacttgctgccatatttggattttgacatggagctttttatgaagaatctgcgccaagtcaatcccgacgccaaagtgtttgaggtttctgccaagacgggtgaaggactcgacggctggattgaatggttggtcggggccaaa

SEQ ID NO: 17718 - DNA, 3528 bp, Cornyebacterium diptheriae
atggtggtcaatattgcggggccaccgccgcgtgaggtgctggaaggacccatcttggcagtctcccgccagaccaaggccaacatccctggggcccccgaacgcaagtcgttcgcaaagattacggaaccaatcgaggttccggggcttctcgatattcagctcaactcctttgcatggttgattggtacgcctgagtggcgcgcccgccagcaagaagagctgggcgactcggttcgcgtaacaagcggacttgaagacatcttggaggagctatctcctatccaggattattccggaaatatgtcgctgtctctttctgagcctcgcttcgaggacatgaagaacactattgatgagtgcaaagacaaagacatcaactactccgcgccactgtatgtgaccgcagagttcatcaacaacgaaacccaagagatcaaatcgcagaccgtattcatcggcgacttcccgatgatgacggacaagggcacgttcattgtgaacggtaccgagcgtgttgttgtctctcagctggttcgttctcctggcgtgtactttgatcagacgatcgataagtccaccgagcgtccactgcactccgtgaaggtcattccttcccgcggtgcatggctcgagttcgacgtggataagcgtgacaccgttggtgtgcgtatcgaccgcaagcgtcgtcagcctgtgaccgttttgctcaaggcccttggttggaccactgagcagatcacggagcgcttcggcttctctgagatcatgatgtccaccctcgagtccgacggtgtatctaataccgacgaggctttgctggaaatctaccgcaagcagcgtccaggtgagcagcctacccgcgacttggcacagtccctgctggacaactctttcttccgcgcaaagcgctacgacctagcaaaggtgggccgctacaaggtcaaccgcaagctgggcttgggcggcgacaacgagggcctcatgaccctcaccgaagaagacatcgcaaccaccttggagtacttggtacgcctgcacgcaggtgaaaccaccatgacgtcgccaaccggcgaggtcatcccagtggaaaccgatgacatcgaccacttcggtaaccgtcgtctgcgtaccgtcggcgagctgatccaaaaccaggttcgtgtgggtctttcccgcatggagcgcgttgttcgcgagcgcatgaccactcaggatgctgagtcgatcacccctacctcgctgatcaacgttcgccctgtttctgccgccatccgcgagttcttcggaacctcgcagctatcgcagttcatggaccagaacaactctctgtccggtctgacccacaagcgtcgtctctccgcactgggcccaggtggcctgtcgcgtgagcgcgccggcattgaggtccgagacgttcacgcttctcactacggccgtatgtgcccaattgagactcctgaaggtccaaacattggtctgatcggttcgcttgcgtcctacgctcgcgtcaacgccttcggcttcatcgaaacgccataccgcaaagtagaaaacggcgttctgactgaccagatcgactacctgaccgctgatgaggaagatcgcttcgtcgtcgcgcaggcaaacgtcgagcatgacgctgacggcaagatcaccgcagacagcgtaaccgtgcgtgtgaagaacggcgacatccaggtcgtcgcaccggaatccgtcgattacctcgacgtttcgccacgccagatggtttctgtggcaaccgccatgattccattcctcgagcacgacgacgctaaccgcgccttgatgggtgcgaacatgcagcgtcaggctgtgccactcgtacgttctgaggcaccattcgttggcaccggtatggagcgcgcagctgcctacgatgctggtgacttgatcatcaacaagaagggcggcgtggttgaaaacgtctccgcagacatcatcaccgtgatggctgacgacggaacccgcgaaacctacatcctgcgtaagttcgagcgcaccaaccaaggcacctgctacaaccagacgccgctggtaaacatcggcgatcgggtagaggccggtcaggttctcgccgacggcccaggtacgcacaacggtgaaatgtccctcggacgcaacctcctcgtggctttcatgccatgggaaggccacaactacgaggacgctattatcctgaaccagcgcgtggtcgaagaggatatcctcacctcgatccacatcgaagagcatgagatcgatgctcgcgacaccaagctgggacctgaggaaatcacccgcgagatcccgaacgtttccgaagacgtgctcaaggacctcgacgagcgcggtatcgttcgcatcggtgcggacgttcgcgacggcgacatcctcgtcggtaaggtcaccccgaagggtgaaaccgagctgacccctgaagagcgtctgcttcgcgccatcttcggcgagaaggcacgcgaagtccgcgacacctccatgaaggtacctcacggtgaaaccggtaaggtcatcggcgttcgccgcttctcgcgtgacgacgatgacgatctcgcaccaggcgtcaacgagatgattcgcgtctacgttgcccaaaagcgcaagatccaggacggcgacaagctcgctggtcgccacggcaacaagggtgttgtgggcaagatcctgcctcaggaagatatgccattcatgccagacggcaccccagtggacatcatcctgaacacccacggtgtgcctcgtcgtatgaacatcggccaggtgctcgaggttcacttgggctggttggccgctgccggttggaagatcgacaccgaagacccagcaaacgctgaattgctcaagaccctcccagaggatctctacgacgtcccagctggttcactgaccgcaaccccagtgttcgacggtgctaccaacgaggaaatcgcaggtctgttgggcaattctcgtccaaaccgcgacggcgacgtcatggtcgacgaaaacggcaaggctacgctgttcgacggccgctccggcgaaccattcccatacccagtgtctgttggctacatgtacatcctgaagctgcaccacttggttgatgagaagatccacgcacgttccaccggtccttactccatgattacccagcagccactgggtggtaaggcacagttcggtggtcagcgcttcggcgagatggaggtgtgggcaatgcaggcgtacggcgctgcctacaccctgcaggaactcctgaccatcaagtctgacgacgtggttggccgcgtcaaggtgtacgaggccattgtgaagggcgaaaacattccggatcctggtatcccagagtccttcaaggtgctcctgaaagagctccagtcgctgtgcttgaacgtggaggttctctccgcagacggcaccccgatggagttgtctggatcggatgacgacgagttcgatcaggccggtgcctccttgggcatcaacctgtcgcgcgacgaacgttccgacgcagacatcgcc

SEQ ID NO: 17719 - DNA, 3798 bp, Cornyebacterium diptheriae
atgttcgtgcctgataaatccgtgcctgcggcacaaccaccaatgcttgctggtttgctcaaagttgctgccaccgatccaaagatcaagggactgcttcagcatgtaggcgaaccccatctgcatatcacaggcatcgatcaggcacggccgtgggcgattgctgcgttggcacaccgcgccccagtgcttgtggtgacggctacggggcgtgaggcagaggacttatctgctgagctgcgtgccatgttgggggaaaaggtggcgtggtttccggcatgggagacgttgccgcatgagcgcttgagcccaggtgctgatattgctggtcagcgagcccgtattttgtcgcatattgcagactattcggtggtggtgacggctgcgcgtggtttcagccagccgattgtttcacaggttgctggtcgagatcctttggtgttggaagttgattccgaatgtagtttggaagaagcaacacagcagttggtgtttcgggcttatcaccatgtggatttggtggctaagcgaggtgaatttgcaacgcgcggcggcattttggatgtgtttcccacaacggctcagcatccagtacgtgtggagttttggggcgatgaggtttcagaaatccgtggattccaggttgctgatcagcgtgcgattcctgattcggatgtgtcgcgggtagaggttttccccgctagagaactgcctattaccccagaaattgcgcaacgtgcagctgagctcgctgtgaagtttcaaggaaacccaacgttgcaggagctactggctaaaatttctgactctatcccgtcagatggcatggaggccttgatcccagcgttggttgatcaacccatggtcacccttgctgagcttatgcccgaaaacacccatattgtggtggtcgggccggaaaagattcgtactcgtgtagcagatcttcaagctacggatgccgagtttttggccgctggttgggaggctgctgctatgggcgctgatggtcccgtggcaacgcgtggcctcgatcttgatgccagctcgtatcgatcctatgaatcgctggaaaacacagcacagaagcacaccatgccttggtggacttttgcaccacctggcatgtttgaagcctcagacggcgacaccctcccgttggaatttgagccgggacctacaccgcgtggcgatctcgaacagatcgatcagatgatggctctgctacttgcacatacgcgcgacggcggtgcggcagcttttattgctccggctcaaggcgctatcaagcgcatggtggaacgctttaaggaacaaggaatccccacgaaggtggcaacacctggctggcagccaaccttgggtgaagtgacactgtatcaggcgatgagccatgcaggtttggtatttcccaaggtgcgaaagcaacctggaaaacccgcattgccgctggtggtgatcacaaaaacagaccttaccggtaaccgagttggtgacattgctggtgcgaagcgccgcccagccaagcgccgtcaccgtgtggacccgcttgctttgaaaaccggcgactatgtggtccatgaaacccatggcatcggtcggttcctcaagatgaccgagcgtgtgatccagtccggtgatgagacttcgcggcgcgaatacatcgtgttggaatacgcggcgtcgaaacgcgggcagccagcagatcaactgtatgtgcctatggattccctcgacatgctgagtaaatatgtcggcggtgaaaaacctaccctttctaaaatgggtggctcggactggaagaacaccaaaaagaaagctcgcgcagcggtgcgagaaatcgctggtgaactagtcgagctgtatgccaagcggcaatccgcgccggggcatgcgtttgcacctgattccccgtggcagcacgagatggaagataacttcccctacgtggaaaccgaagatcagatgcttgctattgacgcggtgaaagcggacatggagaagccttcgccaatggaccgcgtggtggtcggcgacgtaggttatggcaaaaccgaagttgctgtgcgtgcggcatttaaggcggtacaggatggtcgtcaagtcgtggtgcttgttcctacaaccttgctggcccagcagcatttgagcacctttgaagaacgcatggcaggattccccgtgacgatcaagggcctgagccgttttacctctcctagtgaatcaaaggagatccttaaagggcttgccgacggctccgttgacatcgtgatcggtacgcaccgcctgctgcaaacaggtgtgcagtggaaaaatctgggccttgtcatcgtggacgaggagcagcgttttggtgttgagcataaagaacacatcaaagcattacgtacccatgtggacgtgctcacgatgtcggcaactccgatcccgcgcactttggagatgtcgatggccggtatccgtgagatgtcgaccattttgaccccgccagaagatcgacacccgattttgacctacgtgggcgcccaagaagataaacaagtagcagcagccattaggcgtgagctgcttcgtgatggccaagttttctatgtgcataacaaagtctctgacatcgagaaaaaggctcgggaactgcgtgaactcgtaccggaagcacgcattgtggtggcgcatgggcaaatgagcgaagagttactagagcaaactgttcagggattctgggatcgtgaatacgatgttctggtctgtaccacgattgttgaaaccggcctcgacatcgcgaacgccaacactcttatcgtggaaaatgctcaccacatgggtctgtcacagctgcaccagttgcgtgggcgcgtagggcgttcccgcgagcggggttacgcttacttcttgtatcccaagggtgccacgttgacggaaaactcctatgaccgtcttgctacgatcgcgcaaaacaacgatcttggtgctggtatggcggtggccatgaaagacttggaaatgcgcggtgccggcaatgtgttgggcgcgcaacagtctggtcatatcgccggagtgggctttgacctgtatgttcgtttggtgggagaagcggtcgaggcataccgtgcgctagcagatggcaaggttgccgatgccacggagcaggggccgaaggagatccgcatcgatttgcctgtcgacgcccacatccccgaggactacatcaactcagaacgattgcgcctcgaggtctatcgtaaacttgccgcctcggccaatgataaggacttggcgcttgtggttgaggaaatgaaagaccgcttcggtcccgttccccacgaggtaaagcggctgctggcggtgtcacgcctgcgtcacttagcacgcgcgacagggctaagcgatattggcgtgcagggcacacgcatcaagctgcacccagtggaattgactgattctaagcaggtgcgtctcaagcgtctggcaccgtctgctacctatcgcgcggctgctaaggccatccagttgccatttcctaaagaaggcgcgaaggtaacggacaaacagcttcgcgatgttgaactattgcagtgggttgctgactttatagcggagatgtttgaacacgatcgcgtatctgtgacaggggagaagctgccggataaagtgatctcggtggcgcagcccatgagccctgctgcggcgcgagcggagcgcgtagcgcaacgggcagcggtgcgcagacaagcgcgaaatgacgatgaggactacgaagatcgtagagaagcgcgacgtaggaaataccgtatgcgt

SEQ ID NO: 17720 - DNA, 4008 bp, Cornyebacterium diptheriae
gtgatcgacgtcaacttcttcgacgagcttcgaatcggcctggccactgccgacgacatccgccgttggtccaagggcgaggttaagaagccggagaccattaactaccgcaccctgaagccagaaaaggacggccttttctgcgagcgcatcttcggtccaactcgtgactgggagtgtgcctgcggtaagtacaagcgtgtccgctacaagggcatcatctgtgagcgctgtggcgttgaggtgaccaagtctaaggttcgccgtgaacgcatgggccacattgagttggctgcaccagtgactcacatctggtacttcaagggtgttccatcccgcttgggctacctgctggacttggctccaaaggatcttgagcgcatcatctacttcgcagctaacatcatcaccagtgttgatgatgaggctcgccacgctgaccagaccactttggaagcagaaatgcttctggagaagaaggacgtcgaggcggacatggagtccgaaatcgccgagcgtgccgccaagctggaagaagaccttgcagaactcgaagcagccggcgctaaagccgacgctcgcaacaaagtcaagaaggctgccgagaaggaaatgcagcacatccgcgagcgcgcggagcgtgagatcgaccgccttgaggagatctggcagaccttcatcaagcttgctcctaagcagatgatcatcgatgagaccatctacgaagagcttgtggaccgctacgaggattacttcaccggcggcatgggtgcagaggctatccagaccctgatccgcaacttcgaccttgattccgaggctgaggaacttcgcgagatcatcaacaacggcaagggccagaagaagatgcgtgccctgaagcgtctgaaggttgttgcagccttccagcgttcaggtaacgatccagctggcatggttttggattgcattcctgtgatcccaccagagcttcgccccatggtgcagctcgacggtggccgctttgcaacctccgacctcaacgacttataccgtcgtgtgatcaaccgcaacaaccgcctcaagcgcatgattgaactcggtgcccctgagatcattgtgaacaacgagaagcgcatgttgcaggagtccgtggacgcgttgttcgacaacggccgccgcggtcgtccagtcaccggtcctggtaaccgtccgctgaagtccctgtctgacttgctcaagggcaagcagggccgcttccgtcagaacttgctgggtaagcgtgtcgactactccggtcgttccgttattatcgttggtcctcagctcaagctccacgagtgtggtctgcctaagctgatggctctggagctgttcaagccgttcgtgatgaagcgcctcgtggaaaacgactacgcgcagaacatcaagtcggcaaagcgcatggtggaacgccagcgtccagaggtgtgggacgtcctcgaagaggcaatttccgagcacccagtgatgctcaaccgtgcacctaccctgcaccgcttgggtattcaggcattcgagccaaagcttgtcgagggtaaagcaattcagctgcacccattggcatgtgaagccttcaacgccgacttcgacggtgaccagatggcagtccacctgccactgtccgctgaggctcaggcagaagctcgcatcctcatgctggcctcgaacaacattctttcccctgcatcgggtaagccacttgccatgccacgtctagacatggtgaccggcctgtactacctgaccatggacaagaacgaaaacgagatcggcggccagggcgcatacgcttcagcaaccgaagaaggaccagcacagggcgtgtactcgtcttatgctgaggccatcatggctcgtgaccgcggcgttcttggcctgcaggctaagattaaggtgcgtatttctcacctgcgtccaccagtagatatcgaggccgagcagttcccagagggctggaacaagggcgatgtttggttggcagacaccaccttgggtcgcatcatgttcaacgaactgctgccttggaactacccataccttgaaggtgtgatggttcgtaagggtggcggcaccggcaagatcatgctcggtgacgtgattaacgacctcgcagcaacctacccaatgatcactgttgctcagacgatggacaagatgaaggatgccggtttctactgggcaacccgttctggcgtgaccatcaccatgtctgacgtgctcgttcttcctaacaaggaagaaatccttgaccgctacgaggctgaggcacgcaagattgagcgcaagtactgggagcagggtgctctgaccgagcgcgagcgttacgaccgcctcgttgagctgtggaaggacgctaccgacgaggttggtaacgccgtcgagaagctctacccagacgacaacccaattccaatgatcgtgaagtcgggtgctgccggtaacatgcgtcagatctggacgcttgctggtatgaagggcatggttgtgaactcgaagggtgactacatcacccgcccgattaagacctccttccgtgaaggcctgtcggttctcgagtacttcaacaactcccacggttcccgtaagggtctggccgataccgctctgcgtaccgcagactccggttacctcacccgtcgtctcgtcgacgtggcacaggacgttatcgtccgcgaagacgactgcggcaccaagcagggcattcgtgttcctgtagccgttgaagtcaaggacgctgagggcaacgtgaccggttacaccggacacagcctgatcgaaacctccgtggccggtcgtgtggcagctaccgcagtcaaggacgccgaaggcaacgtcatggtcgagccaggtgagaacctgaccgatcagcttatcgacgagctcatcgccgctggagtcaaggaagtcaaggtccgctcggtcttgacttgccagaccccaaccggtgtgtgcgcaaagtgctacggcaagtccatggcaaccggcaagctggtcgacatcggagaagcagtcggtattgtggctgcacagtcgattggtgagcctggtacccagctgacaatgcgtacgttccaccagggtggtgtcggtggcgacattaccggtggtctgcctcgtgtccaggagctcttcgaggctcgtgttcctaagaaccgtgcaccgatcgcttctgtcgcaggtaccgtccaccttgatgacgaaggcaacttctacaccctgaccatcaacccagacgatggatctgacgttgtggtctacgagaagctgtcgaagcgtcagggcttggcaactgtccgcgttccaatggaatccaacccaggtgccatgattgagcgcaccttggccgagggtgaccatgttgaggttggcgaccgcctgctgcgcggccctgccgatccacatgatgtactcgaggttctgggtcgccgtggtgttgagcagcaccttgtcgacgaggtgcaggacgtctaccgtgcccagggtgtggctattcacgataagcacatcgaaatcatcattcgacagatgctgcgtcgcggaaccgtcatcgagtctggttccaccgagttcctcccaggtacgctggtggatctgtccgaggctaaagctgcaaacgctgaggcattggcaaacggtggccagccagcagagcttcgctccgagatcatgggtatcaccaaggcttccttggcaaccgagtcgtggctatccgccgcatcgttccaggaaaccactcgtgtgcttaccgacgccgctatcaacaagcgctccgacaagctgatcggcctgaaggagaacgtgatcatcggtaagctgatcccagctggtaccggtatctctcgttaccgcaacatctccgtgaagccaaccgaggctgcacgaaatgccgcatactcgatcccaacatatggtgattcgatctacggtgatgatggctacggtgagttcaccggagcttcggttccactggatgaggcatacgacctc

SEQ ID NO: 17721 - DNA, 1494 bp, Cornyebacterium diptheriae
atgaccaccccggccaccatcgtcgaagcaacttctgccaaaagccatagcgtccgcatctggacactcattggactcatcatcggctctaccgttggctccggaatcttctccctgcctcaaaacatcgcctccgttgccgccccaggcgccatgttcatcggctggctgatcgctggaatcggcatgctcgccgtcgccttcgtcttccaaatcttggcacaccgtaagccacacctcgattccggcgtctactcctacgtgcgtgcaggacttggcgactacatcggatttacttctggttggggttactggctcggcagcgttatagcacaggtcggctacgccaccctgtttttctccacgcttggccactacgttccgctgtttaacagcgacaaccgcgtagcctccgtcatcggagtctcccttcttacatgggtaatttttggcattttgtccatgggcgtcaaacaagcggccttcatgaatgccatcaccacagtcgctaagctcctccccatttttgccttcatcatcctcgtcgccttcctaggctttagctgggacaaacttactctcgacttctggggcgaatccactggcagcagcgtattcgaacagatccaaggcattatgctgttcaccgtctgggtcttcatcggcgtggagggtgcatcggtctactccaagcaagcccgcacgcgtcgcgacgtcggccgcgccaccgtcatcggctttttcaccgtgctggtactcctcgtctcggtttctactctgtcctacggcgtgctcacacaagccgaacttgccgcccttcccgataactccatggccaatgtcctcgaggctgttatcggcacatggggagcagcactagtatccatcggcctatgcttgagcgtgctgggcgcctatgtgtcatggcagatgttgtgtgcagagcctgttgccatgatggctttcgacggccttttgccccgcaaactcggcaccattaatgccacaggctcccctgttatcgcacagctgatttccaccattgtgatccaactatgggtcttcgtgtttttcctcaacgaaacgacctatatctccatggtgcaattagcaacagttctctacctgctgccctatgtgttctcctcgctctacctcattttgttggctacccgcggcaaaggaatctctcaccctgccgcaggcacgcgtttcgacgactccggccccgacgtcagcgcagccgacaaccgccgacacctctttgtcggtgcagtcgcattcgtttactccctgtggctgttttacgcagccgacttgaaatacgtgctcttcggcgcgctcgcagttctgccaggattgatcccctacgtgtggactcgcctgtacacaaaagaacgagtattcaacgccttcgaatggtttgttgttgcactcattatcatcgcagcaggctatggtctttcggggatcatgacaggatcaatgtcgcta

SEQ ID NO: 17722 - DNA, 4967 bp, Cornyebacterium diptheriae
ttttctgaggttttggatcagctgcgcgagaatcagtctaaggcaaagtatggcatcgcgtttgagaagctgatggtgaattatttccgcacggatcccaccctcagaaacgagttcgacgaggttgttcgttggtcggactggcgctacaacggcggcaaagtcgataccggcattgacctcgtagcgcaccgtattgaggacgattcttggaccgcgattcagtgcaagttctacaagccgactacgcgtatcgaaaagtcgaacttagattcattcttcgaggcctcaggccgtgccttccaaactgagaagggctctgaacacttcaaaaaccgtctgattatttccacaactgacctttggtcctcccatgcggaagaagcactggctaatcagctcattgctactaaccgcatcggtatagcctcgattgcggagtctccaatcaattgggatgtcgtcttccccggttccgaaatccaaattaacctgtcccgtcgcgagattttcaagcctcgacctcatcagcaaaccgcaattgaaaaactctgcagggcttcgcgacgcacgaccgtggcaagctaattatggcctgtggcacgggcaaaacgtttacttcgcttcgccttgcggaaaaagttgcagaaaataatggcggaaaagcccgaatcctattcctcgtgccatcaatctcgttgctttctcaagcattgagggaatggacggcgcaggcaggcgttgatttgcgtagttttgcagtctgctctgactcgaaggtttctaagaagaagacagaggatatttcctcgtacgaccttgaggtacctgtctcgacgaacggtgccgatattgccgaacgctttagcgtcggcaagcgggcgaaggggttgaacgtagtattttccacttatcagtcgttgccggccgttcatgaagcgcaagcgcatgggttggaggatttcgacctcgtcatctgtgatgaagcccatcgcaccactggagtaactctggctggcgaggaagcatcgaacttcacgaaaatccacgacgccaactacatcaaggcctctaagcgcctctatatgacggccacaccacggcttttcgacgaagccgtcaaaggcaaagctgccgagcattctgccgagctggcatctatggacgatgaggctatctacggcccggaattccaccgtctcggcttcggggaggcggtggagaaaggcctgctcacggactacaaggtgcttattatgacggttgatgagtccgttgccgccgaagcgatggctcgtggcgctgggcaggaaatcaatctgacattggcctcggcgatgattggtgcctggaacggtttggctaagcgttctggtgccttgcaaggcaagaaaggcggcttcgacgaaggctctgaaccgatgcgccgggcggttgcctttgctcgcgacattaagacatcaaagcagattgctgaatcctatccgttgctgatctcgaattaccagcagtcgctgaagaagaaggcagcgcttaatgacgtatccctgcacaacattgaccttcgcatagctttaaagcatgtcgatggtggcatgaatgcaatggaacgtaacaaccggcttttttggattgaatctccaatagctgaagacgaaactcgcatcctcaccaatgctcgctgtctctcggagggcgtggacgtgcctgcgctcgacgcggtggttttcttcaatccgcgcaattcgatggtggatgtggttcagtctgtcggtcgcgtgatgcgtaagtcgaagggaaaggattatggctacatcatcctgccggttgcggtgccaccaaatgtctcgccgtcacaggctctcaatgacaacgcccgcttcaaagttgtctggcagattttgaacgcgctacgcgcccacgacgaccgcttcaacgcgcaggtcaactccatcgcactcaatgagggaagtctcgaacagctcccaatccaggtagatcacacctccgatccaaagaagaagctggacgctgtcgatggcggagctgccgagccatacgccgacccgcatgagatgagccagcagattgccctgttctccttggaacagtggcaggaggcgatgtttgtcaagctggtggataaggtcggcactcgcacctattgggaggattgggccgacgatgtcgctgacatcgcgcaggcacagatcactcgcattgaagcgcttgttgacggcgccgacgacacactccgcgccgagttcgaggcatttgttactggtctgcgtggcaatctcaatgactccatcacggagtcggagaccatcagtatgcttagccagcatttgattaccgcgccggtattctctgcgttgtttgatgcctacgacttcgctgagcacaacccggttgcacaggtgatgcagcgcatggtggatgcactgtctgacgcgaagttggagtcggagaccgagtcgctgaacaagttctatgagtcggtgcgcgtccgtgcctctgaggtgacttctgcttctggtaagcagcaggtgatcaaggaactttatgagcgtttcttccgtaaggcttttaagaagcagtcagaggctttgggtatcgtctacactccagttgagattgtagacttcatccttcgcgccgccgacgacgtgtccaagaagcactttgaccgtggcctctcagatgagggcgtgtgcattctcgatccttttgctggcacctccacctttacagtccgcttgctccagtccggcctgattaagccggaggatttggcgcgaaagtatgcaaacgagctttttgcaacggagattacgctcttggcgtattacgtctctgctgtaaatatcgagacaacttacaacgcgctgatggccgaggccgccttgcgtgatggcaagcctgcgccggagtatgtgccgtttaacaacattgcattggcggataccttccagattcatgaggaaggcgatgttgcggacctgttcatgttcaaagacaacaacgcgacgattgaccgccagatgaaggcgccaatcaatgtggtgattggaaatccgccgtattctgcggggcagaccagtgcgaatgacctgaatgccaacctgaagtatccgtcgctggacgcgcgtatcgcggaaacctatgcagcgaagtcgactgcgacgaataagaactcactgtacgactcctacctgcgtgcgttccgctgggcgacagaccgcattggggatcaaggcgtggtggcgttcgtgtccaatggtggttggctggatggcaataccggtgatggcgtgcgcttgtccatgcaggatgacttcaccgatctgtatgtgtttaacctgcgagggaatcagcgtactgctggagaactgtcgcgtaaagaaggcggcaaggttttcggatctggtagccgatcgactattgccatcactattggagtgaaggaccccgagaagacaggctttgacctgcattaccgagatattggtgattacctctctgctgaagagaagctcaacattgtcaacaagaacagtctcgaaactcttgagtggcaggagattgttccgaaccagtggggagattggctcaaccagcgctccgctgatttcgagacttggccggtagtcggcgagaagaaggggaactcgacaaagttctttgaggcgttctcggcgggtttacaaactaaccgtgatgcctgggcatactccttctcagagacggtgctcaaggagagtatctgtaagcttggagcaacctacgaacaggcacgaaatgcgttccatgaaactgcattctcaagctccggaaaaggggaagcacgagtcaacgaattcctaaaggaaaatccacagtatgctgattctcgggaaatcagttggagcaggagccttaggaattcggccttcaagaaccaggaattcgcatttgcgcaggaccgagttatcttgtctgtttatcggccgtttactcaacaacatgcttactttgaaaagctgcttaaccatgagcagtaccaattgccgtcgatgtttccgacaccgaagcatcacaacatggggtattacatccccgctgcgagtagcgctgcccgtgagttcaatatccaggcgaccaacttgctaccggatttatgtctgagtggatccggttctggccaattcttcccacgcttcacctggcggccagtcgaagctgctgacggtgggctgtttgctgagggcagcgtcgtaaagcaatcgagtgaggcgagcgcctacggtgagattggtgaggtcgtcgatggctatgtgcgtgtggacaacatcaccggcgagattaaagcgctgtatcgggaggccctgggggcggatatttccggcgatgacattttccatttcgtgtacggcaagctgcatgatccggtgtatcgggagacgtatgcggcggatttgaagaaaatgttgccacatattgagacgccggggtcgcgggcggagttcgataagtttgcggcggcgggtgccgagttgatggcgctgcatgtcggctatgaagacgtggagccgtggccgctggatgttgaggtgaaatcttcggcgaatccggaggatcgtgagacgtggcgcgtgctgaagatgcggtgggcgaagcggaaggatccggagacgggcaagagcgtcaatgatgtgacaaagctgatctacaacaaggacgtgacgatttcgggaattccggctgaggcggatgaatacatgctggggtcaagatcggccttggcgtggattattgatcggtatcaggtgaagaaagacaaggcttcggggattgtgaatgacccgaatgattgggctgatgaggtggggaatccgcgctacatcgtggagttgattggtcgtgtgacgagggtggcaatggagacggtgcgggttgttgagggaataaaagatggaaatatttaa

SEQ ID NO: 17723 - DNA, 630 bp, Cornyebacterium diptheriae
atgattactatgtcagtcatgaccgttctgcttctcgacgcccgttggccatccatgatcccctttaatttggtaggcaagctcgaaggacagctacgattcaccgacgaagtacccgtaaaagttcgctggaacctcgacgacattgtgcgtttcgcaaccgatgatctgcttgtaagcaccaatgagttagatccgcaagtgatcgcagccatcaacaatggagcaagcgttattgaagttcccagccggcacgacgccctaggtcaagcacgtgaagtgatgcgccgagcagtagcccgtggggaatgggaacaaacccaaacccacgaatctcttctggaatatctcgacgaagaaaccgaagaattcgcgcaagctgttgcccacggaaccaccgaccacattgtttccgagcttggcgacgtactactccaagtgctctttcacgccgaaatcggtgcacgacatggcgaattcaatctcgacgatgtagccgcaagctttgtgaccaaaatgcaacaacgctcgccctaccttttcgacggctccgacggagtagtacccatagaagaacaagaacgtctctgggaggccggaaaacatcgatctgcacacgcacaaacaaac

SEQ ID NO: 17724 - DNA, 1275 bp, Cornyebacterium diptheriae
gtggctgacattatgcacgtatttgctcgtgaaatcttggactcccgcggtaacccaaccgttgaagccgaagttttcttggatgacggatcccacggcgttgcgggcgttccttccggtgcgtccaccggtgttcacgaggctcacgagcttcgcgacggtggcgagcgctacctcggcaagggcgttctcaatgcagttaacaacgtgaacgaggaaatcgctgacgcaatcgctggtgcagaagccgacgatcagcgcctgatcgatcaggcgatgattgctctcgacggcactgagaacaagtctcgtctcggcgcaaacgctatcttgggtgtatccatcgccgtagctaaggctgccgcagagtctgctggcctacctttgtaccgctacatcggcggccctaacgctcacgttcttccagttcctatgatgaacattgttaacggtggcgcacacgctgactccggcgttgatgttcaggagttcatgattgctcctatcggtgccgagtccttctctgaggctctgcgcatgggtgcagaggtctaccactccttgaagtccgtgattaagtccaagggactttccaccggcctcggcgacgaaggtggtttcgcaccttctgttgagtccaccaaggcagctctcgacctcatcgttgaggcaattgagaaggctggcttcaagccaggtgctgacatcgcacttgcactcgacgttgcttcctccgagttctacaaggatggcaagtaccacttcgaggggggcgagcacaccgctgaggagatggcaaaggtctacgagcagctcatcgctgagtacccaattgtttccatcgaggacccactgcaggaagacgactgggagggctacaccgccctgaccgccgcaatcggtgacaaggttcagatcgtcggcgacgacttcttcgtcaccaacccagcacgcctcaaggaaggcatcgagaagaaggctgccaatgccttgctggtaaaggtcaaccagatcggtaccctgaccgagaccttcgacgctgttgatctcgcacaccgcaacggctaccgcaccatgatgtcccaccgctccggcgagactgaagacaccaccattgctgaccttgcagtcgcattgggctgtggccagatcaagaccggtgcaccagctcgttccgagcgcgttgccaagtacaatcagcttctgcgcatcgagcagcagcttgacgatgcagcagtctacgcaggccgttcagcatttccacgttttcagggc

SEQ ID NO: 17725 - DNA, 828 bp, Cornyebacterium diptheriae
atgcgcagtagcaatccggtcttgaattctctgacgggtacccgccaaaactatgctcaagcgggctaccagcagcaagcgttcaaccctatgtcccagtatgaccagtatggtcagtccgttacctcagctggcgctgcagagcgtcctatgactgtggacgatgtggtgaccaaaactggtatcaccgtcggcgttattatcgccttcgccgtggttaactttgcgttggccacggttaaccctggtcttgcattgatccttaccggtgttggtgccatcggtggcttgatcaccgtcttgatcagcacctttggccgtaaatatggttcggcagcagtgaccttgacctacgcggcatttgagggcctgtttgtcggcggcatttccttggtgctttccggtgcgatggtgggtggccaaaatgctggtgccttgatcggtcaagcagtccttggcaccatcggcgtattcctcggaatgctctacgtgtacaagacgggtgctgtgaaggtaacccctaagttcaaccgcatcctcacgggatcgttgatcggtgtgctggttctagctttgggcaacatggttctgggcttctttggtatcaacctaggtctgtactccggcggcccaatcgccatcattttctccctgttctgcattggtttggcagcgatgagcttccttcaagactttgacatcgcagatcgtctgatccgtcagggtgcgccagcaaagaatgcttggggcgtggctctgggcttggcagtgaccttggtctggctctacaccgagatcctgcgcttgctgagctactttaatcagcgt

SEQ ID NO: 17726 - DNA, 408 bp, Cornyebacterium diptheriae
gtggagctttggaaaagttaccgaaatagaaagacggttatgcccactattcagcagctggtccgcaagggccgccacgataagactgccaaggttgcaaccgcagccctgaagggttccccgcagcgtcgtggcgtgtgcacccgtgtgtacaccactacccctaagaagcctaactctgcactgcgtaaggttgcccgtgtgcgccttacctccggcatcgaggtttccgcttacatcccaggtgagggccacaacctccaggagcactccatggtgctcgttcgtggcggtcgtgttaaggacctcccaggtgttcgttacaagatcatccgtggcgcactggatacccagggtgttaaggatcgtaagcaggctcgttcccgctacggcgcaaagaaggagaag

SEQ ID NO: 17727 - DNA, 465 bp, Cornyebacterium diptheriae
atgcgtaagaatgcagctccaaagcgtccgatcgttaaagacccagtttacggctctgaggttgttacccagctggtaaacaaggttctcttggacggcaagaagtccaccgctgagcgtatcgtctacggtgctcttgacaagtgcaaggaaaagaccggcatcgatccagtcctgaccttggagaaggctctcggcaacatcaagcctgacctcgaggttcgttcccgccgcgtcggtggcgcaacctaccaggttccagttgaggttcgtccagcacgtgctaacaccctcgcccttcgttggttggttacctttacccgccagcgtcgtgagaacaccatgatcgagcgcctcgctaacgagattctcgatgcagctaacggccttggtgcatccgtcaagcgtcgcgaggatacccacaagatggctgaagcaaaccgcgcgtttgctcactaccgctgg

SEQ ID NO: 17728 - DNA, 2178 bp, Cornyebacterium diptheriae
gtgagtgaggaaacaaaagtttgctcactccggctacataagttagggacaactgtggcacaagaagtgcttaaggatctgaacaaggtccgcaacatcggcatcatggcccacattgacgccggtaagaccaccaccaccgagcgtatcctcttctacaccggtattaaccgtaaggtcggcgagacccacgacggtgcctccaccaccgactggatggagcaggagaaagaacgcggtatcaccattacctccgctgctgttacctgtttctggaacggcaaccaggtcaacatcatcgataccccaggccacgttgacttcaccgttgaggttgagcgctcccttcgcgttctcgacggcgcagtcgcagtgttcgacggtaaagaaggcgttgagcctcagtccgagcaggtgtggcgtcaggctgctaagtacgacgttccacgtatctgcttcgtgaacaagatggacaagctcggtgctgacttctacttcaccgttcagaccatcattgaccgcctcggcgcaaagccattggtcatgcagctgccaatcggcgctgaagatgacttcgacggcgttgttgaccttctcgagatgaaggccatcacctggcgcggcaaggtcgagaccggtgcagagccagttatcgaagagatcccagctgacttggctgacaaggctgctgagtaccgcgagaagctcgttgaaaccgttgctgagtccgacgaagctctcatggagaagtacttcggtggcgaagagctcaccatcgaagagctcaaggctggcatccgtaagctgaccgttaactccgaggtctacccagttctctgtggtaccgcttaccgcaacaagggcgttcagccactgctcgatgctgtcatcgactacctgccaaccccactggatatcggagaggttcacggccacaaggtcggcgacgagaccgttgacttggtccgtaagccatccgttgatgagcctttctccgctcttgccttcaagatcgcagctcacccattcttcggtaagctgaccttcgtccgcgtttactccggcatcgttgagccaggtgctcaggttgctaactccaccaagggtaagaacgagcgcatcggtaagctcttccagatgcacgccaacaaggagaaccctgttgacgaagcacgcgctggtaacatctacgcgttcatcggcctgaaggacaccaccaccggtgataccctctgcgataagaacgaccagatcatcctcgagtccatggacttcccggacccagtgatcaaggtttccatcgagccaaaaaccaagtctgaccaggagaagctcggcaccgctattcagaagctttctgaagaggacccaaccttcaccgttgagctcgacgaagagtccggccagactgttatcggcggcatgggcgagctccacctcgacgttcttgttgaccgcatgaagcgcgaattcaaggttgaggcaaacgttggtaacccacaggttgcataccgtgagaccatccgtaagcctgtcgagaagctcgaatacacccacaagaagcagactggtggttccggtcagttcgctaaggtcatcatcggcatcgagccttacgctccagaagctgagaccttggaagagggcgagtccgcaacctacaagttcgagaacgccgtcaccggtggtcgcgtgccaaaggaatacatcccatccgtcgacgctggtatccaggatgctatgcagtacggttacctcgcaggcttcccattggtgaacatcaaggcaaccctgatcgatggcgcctaccacgaggttgactcctctgaaatggccttcaagctcgctggttcccaagcgctgaaggaagccgtcgcaaaggcaaagccagttcttctcgagccactgatggccgttgaggttatcacccctgaggagtacatgggcgacgttatcggcgacatcaactcccgccgtggccaggtctccgcaatggatgaccgcgctggcgcaaaggttgttaaggctaaggttccactgtccgagatgttcggctacgtgggcgacctgcgttcccgtacccagggccgtgcaaactacaccatgatcttcgactcctacgctgaggttcctaccaacgtggcagctgagatcgtggcagagcgcaacggcactgcc

SEQ ID NO: 17729 - DNA, 1188 bp, Cornyebacterium diptheriae
gtggcaaaggctaagttcgagcgtaccaagccgcacgtcaacatcggcaccatcggtcacgttgaccacggtaagaccaccaccaccgctgctatcaccaaggttttggcagacgcttacccagagctgaacgaagctttcgctttcgatgccatcgataaggcaccggaagagaaagagcgtggtattaccatcaacatctcccacgtggagtaccagaccgagaagcgccactacgcacacgttgacgctccaggtcacgctgactacatcaagaacatgatcaccggtgctgctcagatggacggcgcaatcctcgttgttgctgccaccgacggcccaatgcctcagacccgtgagcacgttctgctcgctcgccaggtcggcgttccttacatcctcgttgctctgaacaagtgcgacatggttgatgatgaggaaatcatcgagctcgtcgagatggagatccgtgagctgctcgctgagcaggattacgacgaagaggctccaatcatccacatctccgcactgaaggctcttgagggcgacgagaagtggacccagtccatcatcgacctcatgcaggcttgcgatgattccatcccagacccagagcgtgagaccgacaagccattcctcatgcctatcgaggacatcttcaccatcaccggccgcggtaccgttgttaccggccgtgttgagcgtggctccctgaaggtcaacgaggacgtcgagatcatcggtatccgcgagaaggctaccaccaccaccgttaccggtatcgagatgttccgtaagcttctcgactacaccgaggctggcgacaactgtggtctgcttctccgtggcgttaagcgcgaagacgttgagcgtggccaggttgttgttaagccaggcgcttacacccctcacaccgagttcgagggctctgtctacgttctgtccaaggacgagggtggccgccacaccccattcttcgacaactaccgcccacagttctacttccgcaccaccgacgttaccggtgttgtgaagcttcctgagggcaccgagatggtcatgcctggcgacaacgtcgacatgtccgtcaccctgatccagcctgtcgctatggatgagggcctgcgcttcgctatccgcgagggctcccgcaccgtcggcgctggtcgcgttaccaagatcatcaag

SEQ ID NO: 17730 - DNA, 1167 bp, Cornyebacterium diptheriae
atgcagctactagcaccagcaactcaagcctatgcttggggctctcgaacgctaattcaacagcttcggggagatgcggccgattctcggcccatcgcagaactctggtacggggctcatccaagtggtccatctgtgattgatggcgagcggactcttgctgacgtcattgcacaagaccctgccacgcagcttgggcaccgtgttgttaccgagcacggtaaccgacttccattccttcttaaacttctcgcggctgatcaaccgctatccttgcaggcgcacccatcaaagcagcaggcagaagaaggatttagccgcgaaaatgatctcggtattgcgcttggtgcgagcaaccgaaactacaaggatgacaaccataagccagaacttttggtagcacttactgagttccatgcgatggcaggtttccggccattggataaaactcgggagcttttccaagcattgcagtgcgagaagctcaaccgctacgtaggaatgctcgattcttccccagaacatgaaggcgagaatcttcgtgcgctgtttaccacatggatcacgatccccgtagcaagtcgccagcagcttattgccgccattatcgaggctatcgacgggctgagcaccacgagtcctgagtggatccaggtagcggctcgcaatgttgcccagcttaatgatcgctaccccaatgacatcggagttctgggggcgttattgctcaactatgtggtgctccaaccgggagaagccatttacctcagtgccggtaacctgcatgcttatgtcaaaggtttgggcgtagagatcatggcaaactcggataacgtgctgcgtggtggcctaaccccaaagtatgtggatgttcccgagttggttcgagtgcttcgttttgagtctctcgaagatcccattgtgcggtctgtggcgggacgctacgaggttcctattaatgagtttgcgcttcagcgtttgcacatcgattctgaggcagagcacaatgcgcgcctcgagcatgatggtccgatgatcgcggtgtgcacctccggtgagttgactattaatgatgtcgtgctagcacctacccaagcactgtggatttctgctgacgatccagcagttgaagttacaggatcaggtgagcttttcgtcgcttccgta

SEQ ID NO: 17731 - DNA, 303 bp, Cornyebacterium diptheriae
gtggcgggacaaaagatccgcattcggctgaaggcctacgatcacgaggcgatcgacgcttctgcaaagaagattgtcgagacggtcacccgtaccggcgctcgtgttgttggtccagtgccgttgcccaccgaaaagaacgtatacgccgttattcgttctccccataagtacaaggattctcgcgagcacttcgagatgcgcacgcacaagcgcctgatcgacatcctcgacccgacgccgaagacggttgacgcacttatgcgcatcgaccttccggccagcgtcgacgtgaatattcag

SEQ ID NO: 17732 - DNA, 654 bp, Cornyebacterium diptheriae
atgagtgaaactgagatcaagggcattctgggcaccaagctcggcatgactcagatcttcgacgaggacaaccgcgtaattccggttaccgtcgttgaagctggtccatgtgtcgtaacccagattcgcaccgtagagaccgatggctacaatgctatccagatcgcatacggcgaaatcgacccacgcaaggctaataagccagctgcgggtcactttaagaaagcaggcgttaccccccgccgtcacgtagcagagattcgtatggacgatgtctccggctacgagctcggccaggacgtgaccgttgagatcttcgaaggtatcaacttcgttgacgtcaccggcaccaccaagggtaagggctacgccggcgctatgaagcgccacggcttcgctggccagggcgctgcccacggtaaccaggctgcacaccgccgcgtcggtggcatcggtgcctgcgctaccccaggtcgtgtcttcaaaggcacccgtatggcaggccgcatgggtagtgaccgcgtcaccacccagaacctcaaggttcaaaagatcgacgcagatgccaacctcatcctgatcaagggcgctatcccaggcgttcgcggtggcatcgtaaccgttaagaccgcagtgaagggcggtgcacacgca

SEQ ID NO: 17733 - DNA, 615 bp, Cornyebacterium diptheriae
atgatcatcgcgattgagggtattgatggcgctggcaagaacaccttggtcagcgccatcaaggagcgtttcgacgccgatgtgatcggtttcccacgctacgaacagtccattcatgccaagctggcccagcgtgccttatacggatcgatgggggatctgacagattctgcctacgcgatggctacgctgtttgcattggaccgctacgacgcaaaggcggtgctggggcgctatgtggggacgtcgaaagttgtgttgttggatcgctacgtggcttctaacgctgcttattccgccgcgcggactcgaaatgatgccatggtgcaatgggttcaagaactcgaatttgaggaattgggcctaccggtaccagatattcatattttgctgcatacctctccggaattagccgcgcagcgggcgcaacgtcgcgaggctaccgatgcatctcgcaaactagaccgctatgaggaagacgctggtctacaggaacgaaccttccaagcgtatgagtcgctggcacagcaaaaatggatgtctccatggctgctagtacacccagatgagtcaccggatacggtgactcaacgaattattcaagcgctcagtgca

SEQ ID NO: 17734 - DNA, 1287 bp, Cornyebacterium diptheriae
atgacagatgacatccgttaccaatcgctaaccgagcttgatccagaggttgcggctgcaatcactggtgagcttgaccgccagcgttccacgctcgagatgatcgcgtctgaaaacttcgttccacgcgcagttttgcaggcacaaggatccgtattcaccaacaaatacgctgaaggttacccagggcgtcgctactacggtggctgtgaaaacgccgacatcgttgaagatctagcgcgtaaccgtgccaaagaggtcttcggtgctgagtttgccaacgtgcagcctcacgcaggtgcacaggctaatgctgctgtgttgatggcactagccaaccccggcgataagatcatgggcctgtccttggctcatggtggccacctgacccacggcatgcacttgaacttctccggaaagctctatgaagttgcagcctacgaggtagaaccagataatttccgcttggacatggacaagatccgtgaacaggctttgaaagagaaaccacaggttctgattgctggctggtccgcatacccacgccaccaggacttcgcagcattccgttctatcgctgatgaggttgacgctaagttgtgggtcgatatggctcacttcgctggtcttgtggctgctggtttgcacccatcgccagttccttacgctgatgttgtgtccacgaccgttcacaagacgttgggtggtccacgctcgggcatgatcttgtccaagcaggagtatgctaagaagctgaactccgcagtcttcccaggccagcagggcggacctttgatgcacgcaattgttgctaaggctgttgccatgaagattgctgctactgaggagttcaaggatcgccagcagcgcacccttgatggtgctcagattatcgctgagcgcttgacaggtgctgattgcaaagctgcaggtgtagacgtactgaccggtggcaccgatgtccacttggttcttgtcgatctgcgtaattcccagatggatggccagcaggctgaagatctcctccatgaggtcggaatcaccgtgaaccgtaacgcggttccattcgacccacgtcctccaatggtcacctccggtttgcgtatcggtacaccagctttggctacccgtggcttcgatgctgcaggtttcaccgaggttgccgacatcatcgctaccgcattggcacaaggcgccggtgctgacaccgagcagctgcgcgcacgcgtcgctaagcttgccgagcagtacccactctacgagggccttgaggactggaagctcctc

SEQ ID NO: 17735 - DNA, 2559 bp, Cornyebacterium diptheriae
gtgtttggactttccaagatgcttcgcgttggcgaaggacgggccgtcaagcgcctgaagaagatcgctgatgatgtgatcgcactcgaggcggattacaccgatcttactgacgaggagctcaaggctaagacccatgaatttcaagagcgcattgcacaaggtgaatcagtagatgacctcttgcttgaggcatttgcggttgcccgtgaggcgtcgtggcgcgtgctgggtcagaagcactacccagtgcagattatgggtggtgctgcgttgcactttggcaacgtagccgagatgcgtactggtgagggtaagaccttgacctgtgtgcttccggcatacctcaatgctctcgaaggcaagggtgttcatgttgttaccgtgaacgactacttggctaagcgtgacgctgagtggatgggtcgtgtgcaccgctggctaggccttaatgttggtgtgatcttggcgaacatgcagcctgcggagcgtcgtgaagcctacaatgctgacatcacttacggcaccaacaacgagttgggctttgactacctgcgcgataacatggtgcgctctctcgatgagctcgttcagcgcggtcatcactatgcgatcgttgacgaggttgactccattcttatcgacgaggcacgtacgccactgattatttctggtccagtagatggatcatcgcagtggtatagcgtgttcgctcagatcgttcctcgtatgactcgcgacatccactatgaagtggataaccgtaaacgtaccgtcggtgtacgtgaagaaggcgttgcctttgtcgaagatcagctcggaattgataacctttacgctcctgagcactcccagctggtgagctacctgaacaatgccatcaaggccaaagagctgttcaaccgtgacaaggactacatcgtgcgcaacggtgaagttctgatcgttgatgatttcactggtcgtgttcttgatggacgtcgctacaatgagggtatgcaccaagcgatcgaggcgaaagaaaacgtcgagatcaaaaacgagaaccagactctggcaaccatcacgttgcagaactacttccgcctgtacgacaaactctcgggtatgacgggtactgcagaaacggaagcatctgagctccaccagatctacaagctggacgttatcccgattcctaccaaccgtccgaaccagcgtgaagacatgactgacttggtgtacaagacccaagaagccaagtttgctgccgtggtggatgacatctctgaacgcgtaacaaagggacagcctgttctcgttggtaccacctctgttgagcgctccgagtatctctcccagctgctgcagcgccgtggaatcaagcacagcgtgcttaacgctaagttccacgagcaggaagcccagatcgtggccaaggcgggtctgcctggtgcagttaccgtggcaacaaacatggccggtcgtggtaccgacatcgtgctcggtggcaacgcagacatcattgctgacattaacctgcgtgagcgtggcctcaatccagttgatactcctgaagagtacgaggcagcgtgggatgccgagctggcacgcgtcaaggaaaaaggtgctgagctagcggagaaggttcgtgaagcaggcggcctctacgtgctgggtaccgagcgccacgagtcgcgtcgtattgataaccagttgcgtggtcgcgctggtcgtcagggtgatcctggcaccactcgtttctacctgtctatgcgtgatgacctcatggttcgtttcgttggccagaccatggaaaacatgatgaaccgcctcaacgttccagacgatgtacctatcgaagccaagatggtgaccaactccatcaagtcggcccagacatcggtggagaatcagaactttgagatgcgtaagaacgtcttgaagtacgacgaggtcatgaatgagcagcgcaaggtcatttacaccgagcgtcgtgagatcctcgaatcggctgacatcgcggccgatattcaaaagatgatcgatgacaccatcggtgcctatgtcgatgctgcgaccgcgaccggctacgttgaggactgggatctagaaaccctgtggaacgctctcgagtctctctatggcccatcctttagcgcacaagagctcattgatggcgattcctatggtgaatctggtgagctttctgcttccgatctgcgtaaagctgttctggaagacgcacacaagcagtatgcggagctagaggaaaatgtcaccgctatcggtggcgaggcacagatgcgcaacattgagcgcatggttatcctgccggttatcgataccaagtggcgcgaacacctctacgagatggattacctcaaggaaggtatcggtctgcgggcaatggctcagcgtgacccactggtcgagtaccaaaaggagggtggcgacatgttcaatgccatgaaagacgccgtaaaggaagaaaccgttcgccaactattcttgctgcgcaagcagtttgcagttgcaaatgagcagccagcggaaactgaagaaggcaccgtagaagcc

SEQ ID NO: 17736 - DNA, 1014 bp, Cornyebacterium diptheriae
atgaccaacctcaacccagagattccagatcgcaacctcgccctcgagttggttcgtgttaccgaggcagctgcactggcgtctggccgctgggtcggtcgcggcatgaagaacgagggtgacggagcagctgtcgacgccatgcgtaagctcatcaactcagttcaaatgaacggcgtggttgttattggagaaggcgaaaaagacgaagcccctatgctcttcaatggcgaacaggtaggcaccggcgaaggcgcagcagttgacattgctgttgatcccgtcgatggcactaccttgatggcagaaggtcgccccaacgctatttccgtcctagccgccgccgagcgtggttccatgtacgacccatctgccgtgttctacatgcgcaagatcgccgttggaccagaagcagcgggcaccatcgacatcaacgcaccagtcgagtacaacatcaaggccgtagcaaaggctaagggtattgccccagaccaggtcaccgttgttgtcttggatcgcccacgccacgaaaccctgatcaaagacattcgcgaggccggcgctaaggtgcgcctgattcgcgatggcgacgttgcaggtgcagttgctgctgctcaagcaaccaactcagtcgacatcatgatgggtaccggtggaaccccagaaggtatcatcaccgcatgcgctatgaagtgcatgggtggcgaaatccaaggtgtgctggcccccaaggatgatgcggaggccgccaaggcacgcaatgctggccacgagctcaaccgcgttctgggaacccatgacctcgtctcttcagacaactgcttcttcgtcgctaccggtgtgactaatggcgacatgctccgtggcgtgagctaccgtgccgacggcgcaaccacccgctcgctcgttatgcgttctaagtccggcactgttcgtttcatcgaatccacccacaagctgcacaaactgcaggaatactctgtggttgattactcccagatttccccacggaag

SEQ ID NO: 17737 - DNA, 1125 bp, Cornyebacterium diptheriae
atgcatactcacttcggttacctaaccgtaggttacgtttgggaagggaagaatgtcatggcacggacgtcgaaagatcgtctctcaaaggtgcgaaaaatccttggcagatttaccacgccacttctgccagatgattactcggtgctgattaacccacgctggtcaacacgcgaacttcgtggaactatcgcagctgttcgtcgagaagcagacgttgttcatcttgacatcgtgccgggctggggtgtgcccacccaatttgagcctggtcaatttatcggaattggtgtggaagtcgatggcagatacatctggcgcagctattcactgacctgcacaccgacaacctctgcctcattgttatcgatcacggtgcgcgcggtagaacatggcaagctctcaaatcacttggtaggccacgctactcctggaaccacggtgcgcttgtctgcccctgctggcagttttcatctccccactccgttgcccccaaagcttgcactcattgctgcaggaacaggcattacgccgattatctctatgctgcgcacgatggctgagcgccaacagtttgccgaaactgacgtggtgctggtgtattcgatacgcgatcgcgcccatgggttgtttcttgaggcattagcgcgaatgtcaacgcaacacccgcagctgcgtgtggtggtacaagagacgtcctcgcaggggcgggtgacgccggagacggtggcgtcgatagttcctgatataacaagccgcactgtgttcgcctgcggcccgtccaccatgcttgatgcgtacgagtcatgggcgaataagaatcacgttaacctcacgaccgagcgatttttgctggatcgaaaggccacgacagctcagggtggcacggtgagctttgggcagcgtgccagcgtgcttgtcgacggcgccaccacggttctcgaggcaggagagcaggcgggagtacaacttcccttcggctgccgtatggggttgtgccacacctgtgtgcgtccgctgactcatggccacgcaaccaacctcgtaaccggtgagactcatgagccggggtcacgtattcgtacctgcgtgtgcgtagctgcaggtgacatcactatcgaagca

SEQ ID NO: 17738 - DNA, 1239 bp, Cornyebacterium diptheriae
ttggctgcacaaccaaatgcaccggaaagtgcgtggcctgttcgtgagcttaattccaaagtaaaaagttggatcgagcgattgggccatctgtgggttgaaggacaaataacccagctaaatatgaaacctagctggaagttttcctatatcactctgcgtgatcctgaagctgaagccagcgtgcagctcacatgcgctacttcgttactgcactcgttgcctagtcggcttcaagacggtgaccgcgtagtggtttacggtaagccagcgttttatgagggccgtggctctttttcgttgtgggttaccgatatccgccctgtgggcgttggtgagctactggctcgtatcgaaagattacggcaacaactcgcaagcgaaggacttttcgatcccgcattaaaaaagccgctgccgtttttacctcacaccatcggtttgattacagggcgtggctccgccgccgagcgcgatgtgctggccgttgcccacagtagatggcctgaagtgaagttcaacgtgatcaatactgcggtgcaaggtgcacgcgccgtgccagagatcatcgaagccctacagcgtctcgacgccgaccctagcgtggacgtgatcatcattgcccgtggcggtggctctgtcgaagacctactccccttttccgaagaagcactccaacgtgccgttgttgcagcgcacacaccagttgtctctgccatcggccacgaaccagacaatcctgttttagataacgttgccgatcttcgcgcagcaacaccaactgacgctgccaaaaaggttgttccagatgttgctgctgaacgtcagctcatcgccgaacttcgctcccgtagcgccgcagcgttacgcggctgggtccacaaagagcgccaacaacttgccgccgtacgcagtagaccagcccttgcagatcccgtccgcgctatcacgctgcatcgcgaggagattgctcggtcaatttcttctatccgacgcgatatgcgttacatgctcagtactgaacgcgccacagtggcgtcgctacgccaacaagtcgcagcccttggaccttcggccacattggcacgaggctacgcagtcgtccaagtcgtgccacgagatggcagcgctcccgaggtagtgaccaccattggaatgtcaccacctggcagccagttacgcatccgcgttgccgacggctccatcaccgccgccgcaatgcaaacaaccccagcagac

SEQ ID NO: 17739 - DNA, 1278 bp, Cornyebacterium diptheriae
atggcaatcgacaacattaaagcgtatgtacacttaagtgacgcagacatcgaagaaatcggtcgtcgcctagatcagatcaaagcagaggtaacgcaatcactaggtgctcgggacgtggcctacatcaagcgtttgattcgtacccaacgtagccttgaggcagctggtcgattcgcgctgttgtttgcgggaaataagaagtgttggtggctcggaacagggttgctcagcactgcgaaaatcctagaaaatctcgaaatcgggcataacgtgcttcatgggcaatgggattggatgaatgatcccgaaattcactccaccacatgggagtgggacattgtctgcccatcatcacaatggatgcactcacataactttgttcaccacacctacactaacgtgctgggaatggacaacgatgtgggatacggaatcttgcgcgtcacccgcgaccgaaaatggacaccactacatgctttccaaccagcggtgaataccgtgctggcagcgatgttccagtgggcggtggggtactacgacgtggaacttgggcgctatctgactaaacgcgctgattggaatgacacaaaagacaaattctgggagacgacgaacaaagcaggtcgccagcttgctcgcgactacgttttctatccagcacttgctagaaaggcttttccgcaggcagtgaaggcaaatgcggttgccaacctagtgcgctcagtgtgggcatattctgttatcttctgcggacattttcctgatgaggccgagacgtttaccaaagaacagtttaaaaacgaggaccacaatcagtggtatctacgccaaatgctggggtctgcaaacttctatggcggcaagttgctcaccatcatgtcgggcaatttgaattaccagattgaacatcacctattcccagatatgccatcgaatcgtctggcagaagtgggagagaaagtgcgtgcgctgtgcgacgaatacgatctaccatacaacgtcgattctttcccagcacagttgttcaaggtgcaaaaaacactgctcaagctcacccttcccaataagtacttagtggcgagcccagataatgcccctgaggtgcgctcgaaccgagcattttcgcaaaaccctgagattgaaaatcaactggcaggcggaagcaacggaagcggcttacgcacgggcctaaaactactcaaacgcctgcgcccgagtatcaaagatgccatcttgatctattcagggcgcaagccgcggggaaatcaacagcgc

SEQ ID NO: 17740 - DNA, 1083 bp, Cornyebacterium diptheriae
gtgagccttacacttggaatcgtcggcctgcccaatgttggcaagtccacgctatttaatgcccttacccgcaacgacgttctggcggcgaactatcccttcgcaaccatcgagcccaacgttggtcttgtcgagcttccggatgctcgcctgaaccgtctcgcagagatcttccaatcggagcgcatcttgccagctacggtgtccttcgttgacattgctggcattgtcaaaggtgcatccgagggtgaaggcatgggcaacgccttcctagcgaatatccgcgaggctgacgctatttgccaggtagttcgtgcctttgctgacgacaacgtgattcacgttgatggtcgagtagacccaagctcagacatctcagtgatcaacaccgagctcatcttggcggatctacaaacagtggaaaaagcgcttcctcgtcttgaaaaagaagcccgcaagaacaaagatctggctgaaaccgtcgaagcaaccaagaaagcacaagccattcttgaagacgaccgcaccttattcgcagcatccaaaaacggtgagatcgatctcgccctagtccgcgaactacacctcatgacggctaagccattcctctacgtcttcaactccgatgaagaagtactgaccgacgatgcccgcaagcaacaactgcgtgacctggtagcaccagcagaggcagtgttcctcgacgcaaagaccgagactgagctcctcgaactcgacgaggatgaagccctcgaattgctcgagtccgtcggacaaaccgaacctggtcttgccacgctcgcaaaagccggctttgcaaccttgggacttcagacttacctcaccgcaggtcctaaagaatcgcgcgcatggacgatcaagcagggatctttggcgcctcaagccgctggagttatccacaccgactttgaaaagaaattcatcaaggccgaaattgtctcctttgatgatctcgatgctgctggttccattgctgaagccaaggctcagggcaagatgcgtatggaaggcaaagactacgtcatgcacgacggcgatgtgtgtgactttaagatcggcggc

SEQ ID NO: 17741 - DNA, 843 bp, Cornyebacterium diptheriae
atgatccgcaaatttgctcgccccatgctcgcctccgtttatgtggctgacggtgtcgacgttgttctcaacagccaagctcatgtggaaggcacacagaccgttatcaaccgactgcgcacggttgtgcctcgcaaatacatgaaaaaacttccagaggatccacaggtaatcactcaggcagttggagcaaccaaagtattagccggcagctcactcgcactcggtaaagcacctcgcacctccgctgcagttctggctgccattagtgttccaactatcattgctcgtcacgcgttttgggaaactcaagatcgtgaagaaaaaatcgctcgacgtcagggctttttaacgagcatcgcattacttggcggtttggcaattacgagcgcagataccgccggaaaaccaagcttgaagtggcgcgctgataaggctgtacaaaaagcatccacacagattcagcaagctctccctaccaaaactgagaccgaaaaatttggcgaccaggcatctgcagttgcaagccaagcagcatccacagcaaaagatttgtggaacgatgcgactgattctgtttcccaatacggccaaacagcgctagagtacgtcgaagataacaaagatgattggctagctcttgctcaaaagaacgctgttttggctaaaaagaaagccgtaaaggttgcagcacgcgctcaagaacgagcagctcaagcatacgagagtgcagaaaaatctactggccgtaacgctaaacgagcttctaaaaaagctaaccaacttcagcgaaaagcagaaaaatctctgaacaaagcaatgaaacgattcgattcagctttc

SEQ ID NO: 17742 - DNA, 924 bp, Cornyebacterium diptheriae
atgctgcgttatattgggcgccgattgctccaaatgatccccgtgttctttggtgcaacccttttgctctacgcactcgtcttcttgatgcctggcgatccagtggccgccctcggcggcgacagaggcctaaccgaagcagcccgcgctcgcatctcagccgagtacaacttggacaaacccttcctcgttcaatacttgctctacatcaagggtatttttcagctggactttggtaccacattttccggccgcccagtggcagaagcaatggctcatgcatttcctgtgactatcaagttagctgtcatggcactgatctttgaagctgtgttcggtgttatttttggtgtgatcgccggtatgcgtcgcggtggcatatttgactccaccgttttggtcctctcgcttcttgttattgcagtgccttccttcgtgattggctttgttttccagttctttgttggggtgaagtggggattactccctgtaactgttggttcaaatgtctcggtgaagtcgcttcttatgcccgccatcgtattgggtgcgttgtcttttgcctatgttgttcgtttgactaggcagtccgtatcggaaaatctcactgctgattatgttcgcactgcgcgagctaaaggcttgaaggggtcgaccgtgacgatgcgccatgtgctgcgtaactcgttgattccagtggccacatatttgggtgctgacctaggcgccttgatggccggtgcgatcgtgactgagggcatattcggcattaacggtgttggtggaactatgtaccacgccattttgaagggcgaacctactacggtggtgtcatttaccaccgttctcgtgatcgtctacatcatcgccaacttggtcgtggacttaatctacgccctgcttgacccaaggatccgctatgca

SEQ ID NO: 17743 - DNA, 2880 bp, Cornyebacterium diptheriae
atgcgtaaggaagaatcgttagtggttgatcgtcttgtagtccgcggcgctcgtgaacacaatcttaaaggtgtggatattgatatcccacgtgacgccatggtggtatttactggcctttcgggatctggcaagtcttctctagcgtttgacacgatctttgcggaagggcagcggcgctatgttgagtcgttgtcttcctatgcgcgcatgtttttgggtcagatggataagccggatgttgatttcattgatggattgtcacctgcagtttcgatcgatcaaaagtcaacaaaccgtaatccgcggtccacggttggcaccatcactgaagtgtatgactatcttcgattattgttttctcgcgctggcaccgctcattgccctgtgtgtgacgccaaagtcgaacgccaaacaccgcagcagattgttgatcaagtcatggacatggaacaagggctaaaattccaggttcttgctccagtagtgcgcacacgcaaaggggagtttgttgatctctttgcagacctagcaactcaaggctattcgcgtgttcgagtcgatggttccatctattcgctttcagaaccgccgacgcttaaaaaacaggtcaagcatgatattgacgttgttgtggatcgtctacaagttaaggcctcacaacaacagcgtttgactgattcggtagaaacagccctgaagcttgccgacggcgttgtggtgctcgaatttgtgggcctgagtgaagatgacccacagcgatttgttcgattttccgagaaaatgtcatgtccaaacggacatgcattaagtgtcgatgaattggaaccacgggcattttcttttaactcaccttacggtgcatgttccgcatgcgatggcttaggcacacgaacagtagttgataccgaactactgattcccgatacgcacgccccagcgttgaaggctattcagccatggaattcaagtcccaaccacaggtattttgaaaagcttattgaagcactcgctaaagctaaaggttttgatcctgcgactccttttgatgagttatcagaggaccagcgagatgcgttaattcatggatgccaagaagaagtaaccgtacgatataaaaatcggtatggccgtgtgagaacgtggacagcccctttcgaaggggtcttgggttatatcgaacgcaaattggatcaggcagataccgagtcgcagaaagatcgtttgctgcaatatacgcgtgaggttgcatgccctacgtgtcatggctcgaggctaaaacctgaaattttggctgtccgattagcgtcatcgagccatggagagctttcaatcgcaggtttaagcgagctgtcgattcaagacgcatctgatttccttcaggacttagtgctgggcaaacgagaagaaattatcgccggtgcagtgcttaaagagataaatgcgcggctgcggttccttttggatgtcgggttgacatatctgaccctgaatcgtgcagcaggaactttgtctggcggtgaggctcagcgaattcgtcttgccacccagattgggtcaggtcttgcaggtgttttgtatgttctcgatgaaccttctattggactccatcaacgtgataatcagcggttgatctcgacacttgagcgactccgcgatatcggaaataccttgatcgttgttgaacatgatgaagacacgatcagggcagcagattggctcatcgacgtaggaccaaaagcgggagaatacggcggcgaaatcgtctaccaaggtgaaccagcaggaattgttgactgtaaagaatccatcacaggcgcgtatttatctgggaaaaaggttcttggagtacctgagaaacggcgtgcgattgatccggacagggcgcttaagattgttggtgcgaaggagaataacctcaaggggataaacgtcacgattcctttaggcgttttggcatgcgtgacgggggtttcgggttcaggcaaatccacactggtaaatcagattctggcaaaagtcttggccaacgaacttaatagagctcggactgttccagggcgcgcgcagcgagtagaagggatcgacaacctcgataaattagttcaagttgatcaatctcccattggtcgaacaccacgttcaaacccagctacatacaccggcgtttttgataaagttcgtaatctttttgcggaaacaaccgaagcaaaagttcgaggatataaacctggtcgtttttccttcaacgtcaaaggtggtcgttgcgaggcatgccaaggcgacggcactttgaaaattgagatgaattttttgccagacgtgtatgtgccgtgcgaggtgtgtcacggtgctcgatataaccgagagacactagaagttaaatacaaaggcaagaacattgcagaagtattagacatgccaattagtgaggctgcagagttttttgaacccattacttctatacatcggtatcttaaaactctcactgaggtaggtcttgggtatgtacgtctggggcagtcggctaccacattgtctggtggtgaggcacaacgagtgaaacttgccgcggagcttcagaagcgatcgaatggtcgaaccgtctatattttggatgagccgacaacaggccttcattttgaagatatccgtaagcttatgttggtgatccaagggctagttgataagggcaactctgtcattatcatagagcataatttggacgttattaagacagccgattgggtaatcgacatggggccggaaggtggctcaggaggcggaacagtggttgctgaaggaacccctgaacaagtggctgaagtttcgggttcgtatacaggaggtttcctcaaagaagttctatcagcttcgaaa

SEQ ID NO: 17744 - DNA, 1680 bp, Cornyebacterium diptheriae
atgtctgagaaaaaacaacagccgcttctagagatgcgagacgttcgcatcgcgtttacgtccaccaccggaaccgttgaagcagtccgtggaattgatctaactatttacccaggacaatcggtcgcaatcgttggtgagtctggatcaggtaaatctacaacggcgatgtccatcatcgggttgctgcccggtaccggcaaagttaccgatggtcagatcatttttgatggccaagacatcaccaaatacagcgaaaagcagatgcaggagctgcgtggctcccatattggtctggtgccgcaggacccgatgagcaacctcaaccctgtgtggcgcattggcacgcaggtgaaagaatccctcaaagccaacaatgtggtgccgggctcccaaatggacgagcgtgtaacccagctattggaagaagcagggcttcccgacgctgcccgccgcgctaagcagtaccctcacgaattttctggtggtatgcgccagcgcgccttgatcggtatcggcctggccgcacgtcctaagctcttgattgccgacgagccgacctctgctctcgacgttaccgtgcaaaagcgtatcctcgatcacttggaaaatctcacccacgagctaggcaccgcggtgcttttcattacccacgacctcggactagctgccgagcgtgcagagcacctcgtggtcatgcaccgtggtcgtatcgtggaatcaggcccgtcgcttgatatcttgcgaaaccctcagcacccctacacccgtcgattggtcaaagctgcaccatcattggcatcagcgcgcatccaatctgctcaagaaaagggcgttgaaagctcggagatccttgcaacggaaaagaagaccgatgaggaaatcatccgcgttgaaaacctcaccaagattttcaacgttcgcggccaacgcggagacaaagctgaactcaaagcagttgatgacgtcagcttcagtctgaaaaagggcaccacattggcgctggtgggtgagtcaggatccggaaaatccaccgtggccaacatggtgctcaacctcatcgatcccacgacgggcaaggtctattacaaaggcaccgatctttccacactaggaaagaaggagcttttcgacatgcgccgcaaactccaagtggtgttccagaacccttatggatccctagacccgatgtattcgattttccgctgtatcgaagaacccctcctagtgcacaaggtgggtagccgaaaagagcgggagaagcgtgtagctcagctgctcgacatggttgctatgccacgctctgcgatgcgtcgataccccaacgagctctctggtggtcagcgccagcgcatcgccgtcgcgcgagcactcgcgctgaaccccgaggtgatcgttctcgatgaggcagtctcggcccttgacgttcttgttcagaaccagatcctgcagctgctggcggatctccagcaggagctggatttgagctacttgtttatcacccatgaccttgcggttgtgcgtcaaacagcagatcaagtcgtggtgatgcaaaaaggtcgcgtcgtagaacaaggaaccaccgatgagttgttcctcaacgcacgcgaagattacacccgtgatctgatcaactctgttccaggtcttggcgttgagctcggtacgggagaaaacctg

SEQ ID NO: 17745 - DNA, 444 bp, Cornyebacterium diptheriae
gtgggcatcgtgcgtatcgacgacgcccgtaagcttgcctacgaagcagaccttgacttggttgaggttgctccgaatgctaaaccgccagtctgcaaaattatggactatggaaagttcaaatacgagcaggcgcagaaggcgcgtgaagctcggaagaaccagcagcagactgtggtcaaggagcagaagttccgtcccaagatcgatgaccacgattacgagacgaagaagaacaatgtgatccggttcctcgaaaagggatccaaggtaaaggtcactatcatgttccgcgggcgtgagcagtctcgtcctgaacttggtttccgtctccttgagcgcctggctggcgatgttgctgagtatggcatcgttgagtccaagccaaagcaggatggtcgtaatatgaccatggtctttggtccagcgcgcaagggcaagaag

SEQ ID NO: 17746 - DNA, 1086 bp, Cornyebacterium diptheriae
atgtcggcaaagccattgcctaatcgcgaaacctacaggttccgtggaaacgacgagctcaccgagctgcccgagcacacactgctcaacattattcgtatccccggtaaccccttggttagccctattcgtctgatcgcacggcgattcggctatgcgcttgcactcatcatcatcgtggcgctagtggtttatctcgacgaaggagggtacagcgagcacctgaccttcatcgatgcgctgtactactcagcggtatcgctatcaaccaccggctatggcgatataacacccattacccaaagcgcccgcttgctcaacattattatcattacaccgctgcgcctcgcattcgtgatcctcttggtcggtaccaccttgtcggtgctgacagaagaatcacgtcgtgcatggaagattcaacgctggagaaaacgaatgcgtaaccacacagttgttatcggatacggaaccaaaggccgctcggccattgcggcactgctggcagatggtgtagctcccaaagacattgtggtagttgataccgacagtgtcgcattggaagccgcaaacaatgctggactcgtcaccgtgaatggatcggctactaaatcggaagtgctcaaactcgctggcgttcctaaagcaaaagcagtggtcgtagcccccaatattgacgatactgccgtgctggtcacgctctctgtacgagagctttcccccagtgcatggattgttgcaagcgtgcgtgaatcggaaaaccagcacctgctcgagcaatcaggagctgattccgtagttatttcttctgaaactgcaggtcgcatgttgggactagctaccgtaactccatcggttgtggagatgatggaagacctattgtccccagacgaaggcttctctgttgcagagcgccccatcggtgaagacgaagtaggtgctaacccacgccacctcgccgacatcgtgcttggtgtagtgcgttccggtgagctgtaccgaatcgactccccagaagctgaaacagtagaaccaggtgatcgtttgctctacgttcgtcgcgtgtttagtgaggatgttcgcgat

SEQ ID NO: 17747 - DNA, 192 bp, Cornyebacterium diptheriae
atgaagcagaagacccacaagggcaccgctaagcgcgtcaagatcaccggttctggcaagctccgtcgtgagcaggctaaccgccgccaccttctcgagggcaagccttccaagcgcactcgtcgtttgaagggcaccgaggatgttgctaaggctgacaccaagcgcatcaagcgtctcttgggcaaggct

SEQ ID NO: 17748 - DNA, 381 bp, Cornyebacterium diptheriae
gtggcacgtgtcaagcgctcactgaatgccaagaagaagcgtcgcgagattctgaagtccgccaagggctaccgtggtcagcgttcccgcctgtaccgtaaggctaaggaacagtggctgcactccatgacttacgcttaccgcgatcgtcgcgcacgtaagtctgagttccgcaagctgtggatcacccgtatcaatgcagctgctcgtatgaacgacatcacatacaaccgcctcatccagggtctgcgccttgctgagatcgaggttgaccgtaaggttttggctgacttggcagttaacgactttgctgcgttctccgcaatttgtgaagctgcaaaggcagctttgccagcagacgttaacgctcctaaggctgcc

SEQ ID NO: 17749 - DNA, 816 bp, Cornyebacterium diptheriae
atgccgattgatttttcctctccttttactgaaagaacccctcgtgtagtgaacgccgctaaactcttgcgttctgcaggccgtaagaaggttgatcgttttcttgctgaaggggaaaattcagttgaggctgcagttgctacgggtgctgcgacggacctttttgttaccgaaaaagctgctgagcgatttgaagcaatcgtcacagctgcagggcatatgggggtttttgttcatccgattactgatcgcgccgcaaagagtttgtcggataccatgaccactacagggatttttgcagtttgtctaccagtattgtggagtgctcgagaagcgctaaaaggtaatccatcattggtatgcgtggcggtcgaaactggtgagcctggtaatgcaggtacgttggttcgtgtggcagacgctatgggagcagactgcgtgatattcgcgggaacaacggtagatccgcaatcgccaaaggctgtcagggcaagtgctggatctttattccacattcctgtcgtgagagaaccagacatgcaaaaagtatggcagattcttcgggctcgaaatgtgcagatgttagcaacggctgctcaaggtgaaattaacttggacacagcaggtgaattgttagaaaagcccacggcatggctgatgggaaatgaggctcatgggctcaatgatgaggcattgtctgctgcggatcattcggttcgtattcccattcgtggtagggcagagtctctcaacctcgcaactgctgcaagtatttgtatgtacgagtcttcaaaatcacaagctcacaaagacaac

SEQ ID NO: 17750 - DNA, 1284 bp, Cornyebacterium diptheriae
atgcttaatcaatttgggcagatgttgtccggcatggggtcttccatgaattcccccgaaggacaaggagcggtgaactatgcactggcggaacgcattgcgcgccagcaaattgagtcagcgaaggctcctgccgccacagaagcagataccaaggccgtcaccgaggctgttaacctcgtggaactttggcttgacgacgccaccatcttgcctactgccagcaataaagtcgaggcgtggtcggctaacgactggcttacaaacaccctgccgatgtggaaacgcatggtcactcctgttgccgagcatatggctcaggctcagctcgattcccttcctgaggaagcgcgcgagatggtcggccccatgatgcagatgatgaatcagatgtcgggtatgaacttcggcatgcaactaggccatgctctcggcgatcttgctacgcagaccctttccggcaccgattttggtgttcctattgcaccagctggtgttactgcgctgatgatcaataacgtgcgcaaggaaacccaaggcctcaagatcgaacagcgcgaagtgctggtctaccttgctgcgcgtgaggctgcacgtcagcggttgttgcgtcacgttccgtggcttgctgaacagatcgtcgcctccgttgaggagtacgctgccggtttggtcatcgacacctcccatatcgaagaagctatgcgcgaaatgaaccttgaatccggtgatcctgccgccattcatgaggctatggagcggatgcagaacttggatatgagtcctcgtattacttctcgtaacgccaatgcagtttctcgtctggaaaccctgctcgcgttgatcgagggctgggttgaacacgttgttaccgaggcaatgggctcccgtgttccttcgaccgcagcattgaatgaagcatggcggcggcgtcgtgcaaccggcggttccgccgaaaaagcattcgcccaggttgttggcattgaattcggtgctcccaaagttgcagaagcccaagagctttggcgtcgtgtagacgtagccgtgggggtggaaaagcgcgaccacgtgtgggaccaccccgatttcctccctgttgctgaagacctagacaactctgcagaattcatcgacggcctactcgatactgcctcagccgatgagtttgatcccatcgcagagatcaccaagctcgaagaaatgctctcccagcagtccgaagagcagcaaaaggaacagcgagaaaacccctccgatcctgatgaggattcccccaagaacgat

SEQ ID NO: 17751 - DNA, 1104 bp, Cornyebacterium diptheriae
atgatgtcatggttatctataacttctgctaactatgacgaggagcatcgagtgtctgaacaaccggactatcccgctgtcgagctgactgaggagggcctagcgcaagctgctgatgccgcgattcgtgcctttggcgttgcttcaaacttagatgagttgaatattgctcgtcgagatcatctaggtgatgcggcgccgattcctcaagcgcgacgtagcctaggcactctgcctaaagatcagcgtaaagatgccggtcgtcttgttaacatggctcggggccgtttagagaaacactttgctcaggtaaaagaagtcttggaagctaaacatctcgaagagatgctgaaggctgagcgggtggacgtcactgttcccacaacgcgtcatcagacaggtgctctacacccaattacgacccttagtgaaaagattgcggatatctttgtagcaatgggctacgaggtggcagacgggcctgaaatagaagcagagtacttcaacttcgattcgctaaatttcatccctgatcacccggcccgtacgttgcaagatactttccatgtcggtgagcctggttcgagtcaagttttgcgcactcacacttcacctgtgcaaatgcgaaccatgttgtcccgtgaggtgccgatctatgttgtgtgcccaggccgcgtgtttcgcacggatgaattagatgcgacacatactccagttttccatcaggtagaaggtcttgctgtggataagggcctaactatggctcatctgcgtggcacacttgatcatttggctaagactttgtttggccctgaaacaaaaacccgtatgcgtgccaattacttcccatttactgaaccatcagctgaagtggatgtttggttccccaataaaaagggcggtgctggttggatcgagtggggtggctgcggcatggtgaaccctaacgtgttgaaagccgcaggtattgacccagaagtgtattcaggattcgcttttggaatgggattggaacgtactttgcagttccgaaatggactgactgatatgcgtgacatggtggaaggcgatgttcgtttcactcttccatttggtgttcaggcg

SEQ ID NO: 17752 - DNA, 2508 bp, Cornyebacterium diptheriae
atgctcatttcacaaaactgggtcaccgaattgttaggtcgatcgaacccagattggaaagttagcccagctgagctggattcgggatatgtccgagttggatttgaaaccgagggttacagcgcaatccctgaaacgactggtccactcgtcatcggtcgagttgaaacaattgaagagctagagggctttaaaaagccaattcgtcactgcttcgtcaatgttggagatgcgaatggcactggagagcttcagtcaattgtatgcggggcgcgtaatttccaagaaggttcttatgtagtagtttcacttccgggtgctgttttgcctggtaatttcgcaatttcggcacgtgagacatatggacgcatgtcagctggcatgatttgctcggcagcggaattggggctatctgacaagcaaaattctggaatcataacgcttccgaatgaaatcgccgaaccaggaactgatgcacgaagcattgttggtttggacgatactgtttttgatgtcaatatcacgccagatcgtggatatgcattgtctgcacgtggattaactcgagaactggcttcggcttttaatctaaagttcgttgatcctgcagtagatcttaacgtggctggcgtcgatacttcggatgttccagaatcttcaggtgagttaattaaggttgatctgcgaccagaaacgcaggcacgtcgtttcggagttcgtaaagtttctggaatcgatccaaaggctcccacaccattttggatgcagcgtgaactcatgttgtcaggccagcgttgcgtgaatgccgcaactgacgtgaccaatttcgtcatgttgcttttggggcagcctatgcatgcctttgatgccaacttaattaagggcggattggttgtacgtaatgccctagaaggagagtcttttgagactcttgatcatgtaaagcgtactttgtctgcagaagacgttgttatctccgatgatactggtattcaatccttggctggcgttatgggcggaactacttcagaaatttcagacgaaacaactgatgtattttttgaggctgccaattggcatccaattactacagcacgtacgtcgcgtcgccataagctcagcaccgaggcgtcacgacgcttcgagcgtggcgttgatccagaaattattgaggtagctctggacgttgcctgcgccttactcgtcagtattgctggtggttctgtggaatccgcccgcactttgattggatctgcgccaagcatgcctcaaattcgtatgaagacgtctcgcccagccgagttggctggagtagcttactcggacgctactgtgattgcgcggttgaaagaagtcggatgtgctgtcgaagtcgatggtgatgatcttcttgtcacgcctcctacgtggcgtccagatatgactatgtctgctgatttggttgaagaagttcttcgtctcgaaggactagaggacattccaacaatcgttccgcttgcacctgtgggatcagggctctcgcctgcgcaattgcgtcgtcgtgcgatcgggcatgcacttgcatacagtggctatgcggaaatcctacctacgccttttattcgaaacgatacgttcgatgtgtgggggcttgcagcagacgatgagcgtcgaagcgtcgtcacggtacaaaaccctctcgatgctgagtacggagttctcgcgactacattgctgccttctatgctcgaggctgttacccgcaatgtttctcgagggcaaacttctgtcaatcttttcggtcttcagcaggtgtccttcaaacgtggctcaggtatttcgccaatgctcgatgtccgtcagcgtcctagcgataatgaagttgctgagttgctaaactccttgccagtacaaccactccatgtggcaactgttggcgctggttttatggagttggagggaccatggggtcatggtcgaacgtattcgtttgctgatgctatcgagtcggctcgagttgttgcccgtgcagcaggcgttgagcttaacgtcgaaaatgtagagatgctaccttggcatcctgggcgctgtgctgcattaaaagctggtgaccacattgttggatatgctggcgaattgcatcctcagattgttgaagccttgaatctgccagcacgtacgtgcgccatggaactcgatgtatctgcgctgccattgaaggaatcatttccagcgccggttctatcagcgtttcctgtattacatcaagatctagcacttgtcgtagacgagtccgtaccggcagaatctgtacgtaaagttatcgaggatgcagcaggagagctactggaaaaggttgagcttttcgacgtttaccgttctgaggcgctaggtgcagagaaaaaatctctcgctttttctcttgaattccgtgctcaggatcgcactctgacagacgatgaatgttctgaaggtaggcttgcagctgcgggtcgggctgctgagctattcggtgcgacgatgcgcgca

SEQ ID NO: 17753 - DNA, 1908 bp, Cornyebacterium diptheriae
ttgacacgtccagagtttcgtaacgtcgctatcgtcgcgcacgttgaccatggaaagaccacgctagtcgacgctatgctgcgccagtccggagccttcgatgagcatgctgagcttgttgaccgcgtgatggactctggtgaccttgaaaaagaaaaaggcatcaccatcctcgcaaagaacaccgctgtgcgtcgccgcggtgctggcaaagatggcaatgacgttgttattaacgttattgacaccccaggccacgctgacttcggtggcgaggtagaacgcgcgctgtccatggtggacggcgttgttttgcttgttgacgcctccgaaggcccactgccacagacccgcttcgtgcttggcaaggctttggccgcgaagatgccagtcgtaattttggtgaacaagaccgatcgtccagacgctcgtatcgacgaggttgtcgaagagtctcaggatctcctcctagagttggcatcggcactcgatgatccagaggctgccgaagctgcagaacagctgctcgacctgccagttctttacgcttccggccgtgagggcaaggcaagcaccgttaaccctggcaacggaaacgttccagacgctgaggatctgcaggcattgttcgacgtgatctacgaggtcatgccagagccaaccgtgaacgtcgatggcccactgcaggcacacgtgaccaacttggactcctcttccttcttgggtcgtatcggcctgatccgtgtgcactccggttctttgaagaagggccagcaagttgcgtggattcactacgacgaagaaggcaaccagcacaccaagaccgctaagatcgcagaattgctgcgcaccgttggcgtgacccgtgttcctgcagacgaggttgttgcaggcgacattgctgctatctccggtatcgactccatcatgatcggtgacaccctcgctgatcttgagcacccagtggctctgcctcgtatcaccgttgatgagccagcgatctccatgaccatcggtgtgaacacctcgccacttgctggccgtggtggcggcgacaagctcaccgcacgtgtggtcaaggcacgccttgagcaggaactcatcggtaacgtttctctgcgcgttttgcctactgagcgtccagacgcttgggaggttcagggccgcggcgaaatggctctgtccgttctcgttgaaaccatgcgtcgcgaaggcttcgagttgactgtgggcaagccacaggttgttactcagactgtcgatggcaagctcttcgagccatacgagcacatggtcatcgacattccttccgagtaccaaggcaacgtcacccagctcatggccgctaggaagggccagatgctgtccatggacaacatctccgatgagtgggttcgcatggaatacaaggttccagcccgtggcctgatctctttccgcaccatgttcatgaccgaaacccgtggtaccggtatcgcaaactcctactccgaaggccttgacgagtgggctggcgaaatcaagggccgtgctaccggttcgctcgtggctgaccgctccggtcagatcactgcctacgcacttcagcagcttgccgaccgcggtaacttcttcgtcgagccaggcaccgaagcctacgagggcatggttgttggtgccaacaaccgtgacgaggacatggatgttaacatcacccgtgaaaagaagctgaccaacatgcgttccgcaacagcagacgcaaccgtcaccttggcaaaagctcgtagcctctccttggatgaagcgatggagttctgtggccaagacgagtgcgttgaggtcacccctgacgtgctgcgcgtacgcaaggtcatcctaaatgcaaccgagcgtggtcgcgcgcgtgcacgcgaaaaggctcgtaacaag

SEQ ID NO: 17754 - DNA, 315 bp, Cornyebacterium diptheriae
atgacgtacacaatcgcacagccctgcgttgatgtcatggaccgagcttgcgttgaagaatgccccgtggattgtatttacgagggtaagcgctcactctatatccaccccgatgagtgcgtggattgtggcgcttgcgagcctgcatgccctgtcgaggctatcttctacgaagacgatgtccctgatgaatggatcgattacaacgatgcgaacgccgcgtttttcgattctcttggttctcctggtggtgcggcgaagcttgggccgcaggatttcgacgctgatttggtggcgtcgcttccaccgcaggtt

SEQ ID NO: 17755 - DNA, 1266 bp, Cornyebacterium diptheriae
atgggacagtgtaccgaaaggataatcatgtctaagaatgcggcgaacacagattcacaatcgtcagagactcaatgggctgatgtcattatgaatacctacggcacgcctcctctgacgatcacaggaggaaatggcgccactcttacggattctgtaggtaaaacgtacatcgatttactggcaggaattgccgtaaactctttggggcatgcgcatccggccattgttgaggccgtaacagaacaaatttcaaattttgctcatgtttcaaatctcttcggatcgcgaccagttattgataccgcagctcggttaattcgacgcttcgcggaagaaaccaccgactcaactcaaactgctcacgatactcgagtatttttctgtaactcaggtactgaagctaatgaggcggcattcaagttggctcgtatgactggaaagaaccgaatattagcagcgcagcatggttttcacggtcgtacgatgggagcacttgctatgacgggccaacctgacaaacaaatgccgttttatccgctgcccgcaggcgttgaattttatccctatggcgacattgactatttgcgcaagcttgtccaaatcaactcgacagatgtcgcagccataattttagagccaattcaaggtgaaactggtgttattcctgctccagatggatttttgtctgcggttaggggattatgcaatgaatttgacattctgatgatcgttgatgaagtccaaaccggaatcggacgcactggagattttttcgcatttcagcatgaaactggtgtcattcccgacgtcgtaactatggcgaaaggtttgggagggggattaccgattggtgcgtgccttgcaacgggaaaagcgaaagatttgttaggtcctggcaaacatggcacgacttttggtggaaatccggtctcttgtgccgcggcaggggcagttttgcgcacaattgacgacgatttcctcgagaacgtccagcgtaagagtcacaagttagttaaaagaatgagccgactgcctttggttgagtcgatccgcggacgtggtttgatgcttggtgtgctgttgtccgagccagtcgctaaagagtgcgtcaaactggctttagaacatgggctcatcgtgaacgctccttctgcgtctgtgctgcgacttactccgcctttagttatcagtgacgcagaaattcatgaatcaattgaacgcctttcaatagtgctgactaagataaagaagaaagaatgccat

SEQ ID NO: 17756 - DNA, 1479 bp, Cornyebacterium diptheriae
atgagcccgagaaaaattggagtgaccgaagtcgctctgcgcgacgcacatcagagcttgtttgcaacccgcatggccatggaagacatggtcgcctcatgcgaggatattgacaacgcaggcttttggagtgtggagtgctggggcggcgcaacgtacgacgcctgcatccgattcctcaacgaagatccatgggagcgcttgcgtaccttccgcaagttgatgcctaattcgaagctgcagatgctgcttcgtggccagaatcttctaggataccgccactatgaggacactgtggtggacaagtttgtggagaagtcaaaggaaaacggcatggacgttttccgtgtctttgatgctttgaacgatccgcgcaacatggaacgcgcaatgcaagcggtgaagaaagtgggcggccacgcccaaggcacgatctgctacaccgtgtcgccactgcacaccgtagaaggatacattgagcaggcaggtcgactgctcgacatgggtgcagattccattgctttgaaggatatggctgcgcttttgaagccacagcctgcctatgatgtcattcgcggtatcaaggaaacctacggcgaagacactcagatcaatgtccactgccactcgaccactggtgttaccttggtgaccttgatgaaggccattgaggctggcgcagatgttgtcgacaccgcaatttcttccttgtcgctcggcccaggccacaacccaaccgagtctctcgttgaaatgcttgagggtaccgagtacaccacagatctggacatggatcgtctgattaagattcgtgaccacttcaagacaattcgcccgaagtacaaagagtttgagtccaagacgttggtggataccaacatcttcctttcacagattcctggcggcatgctctccaacatggaaagccagctcaccgctcaaggtgcaggcgaccgtatcgatgaagtgatgcgcgaagttccaatcgttcgtaaagatgctggttacccaccactcgtgacgccttcttcgcagatcgtcggcacgcaagcagtgttcaacgttctcatgggccgttacaaggtcatgaccgcagagttcgccgacttgatgctgggttactacggcgaatgcatcggtgagcgcaacgctgaattggttgagcaggcaaaggctcaaaccaagaaggaacagatcaccgttcgtcctgcagaccttctcgagccagagtgggatcacctcgtcgaagaggcatccaagctggaaggttttgatggtaccgatgaggacgtgctcaccaacgcactgttcccaggtgttgcaccagggttctttaagacccgcccagaggggccaaagaacgtgggcaaggatccatcgaagatcaagacccgcgataaccaagcggtcttggaaccaatcacctacaaggtcaccgtgggcggtcgcagccagaccgtcaaggttgagccagctgaa

SEQ ID NO: 17757 - DNA, 1554 bp, Cornyebacterium diptheriae
atggctaaagaattgtcgatggccgagcgcctcgaaaagctggcagctgctaaggccgaggtaagccttggcggtggtcaagccaagattgataagcagcacgaaaagggcaagcttactgctcgcgagcgtatcgacgcgcttgtcgacgacggcaccttctttgaaactggcatgtttgctaagcatcgcaccactcactttggtatggacaaggcgaatgccccagcagatggtgttgtgactggttccggagctgtgttcggtcgccctgtccacatcgcttctcaagacttcaccgtcatgggtggttctgcaggtgagacgcagtccaacaaggtcgctgcgatgatggaggcttcggccaccaccggtacgccgttcatcttcattaatgactccggcggagctcgtgtccaggagggtatcgactccctgtccggttacggcaaggtgttctaccaaaacgtgctgctatcgggtctggtcccacaggtctcgatcatcgctggcccttgtgccggtggtgcagcatactcgccagcgctgactgacttcatcatccagacccgcaaggccaacatgttcattactggccccggtgtgatcaagtccgttactggcgaagaagtcacctctgatgcacttggtggtgcagacgcacacatgaccaaggccggcaacatccacttcattgctgatgacgacgagcaagccgtcctgatcgctcagaagctgctgagcttcctgcctcagaacaacactgaggagccacctgtggtggatcctgacccagtagttgagcctgatccagagctgcgtgacattgttcctgtggaaggcaagaagggctacgatgtccgcgacatcatcagccgtgtagtcgaccgcggtgacttcctcgaggtccaggcaggctacgctacaaacatcgtggttggttttgcacgtatcgtcggccgtactgtcggtatcatcgctaaccagccaaacgtgatgtcgggtgtcctagacatcaactcttctgacaagggcagccagttcatccgtttctgcaacgctttcaacattccactcgttaccttcgtggacgttccaggctttatgccaggtgttgctcaagagcacggcggtatcatccgtcacggtgcaaagatgctttacgcatactccgcagcatcggtaccaaaggtgaccatcgagctgcgtaagtcctacggtggcgctcacttggcaatgtgctccaaggaccttggtgcagaccgtgtcttcgcatggccaactgctgagatcgctgtgatgggtgcagaaggtgccgtcaacgtggttttccgtaaggaaattgaggctgccgaagacaaggacgcaaagcgcgaagagcttatccagctgtacaaggatacgttctccacaccatttatggccgcatcccgtggtttggtggacgacatcatcgatccagcagagactcgcctgcacatcgccaatgcacttgaggttctgaccaacaagcgcgttacccgccctgctaagaagcacggcttgggaccagtg

SEQ ID NO: 17758 - DNA, 1410 bp, Cornyebacterium diptheriae
atgaccgaacacaccgccccaaccctcacaaaagggctcaaagtccgccatctgaccatgatgggactcggctccaccatcggcgccggcctcttcctcggcaccggcgtaggaatcaaagcagcaggacccgccgtactcatcgcctacatcatcgccggattcatcgccgtcatgatcatgcgcatgctcggcgaaatgggatccgtcgtccccgcctccggctccttctccgaatacgccgacgcaggcatcggccactgggccggattcatccaaggctgggtctactggctcgccaccgtcgcagtcctcggcgcagaaatcaccggagcctccggattcgtcgcctcatggctcggcgtctcaccatggataccagcgctcgtcttcgtcgcattcttcggactcgtcaacctcatgcgcgtccgcgccttcggcgaattcgaattctggttcgccttcatcaaagtggcagtactcgtcgttttcttgatcatcggctccctcctagtactcggcctcctaccaaatcacgacttcgttgggctcagcaatgttcgcgccgaaggattcgcgcccaccggactaggaggaatcgcagccgccctcctagccgtcgccttcggcttcggcggcatcgaagtcgtcgccatcgcctcggcagaatccgaagatccacaaaaatcgctcgtcaacgccgtgcgcaccaccatcacgcgtatcagcatcttctacctcggctcagtagccatcatcgtattgctcttgccttactcgtctcttggtaaggcgaaaagcgcagcagaaagccccttctcccaagtacttgccatggcaaacatcccaggagtagtaggcgtcatcgaagtcgtcattgtgctcgcactgctctccgcattcaacgcccagatctacgccagctcacgcatgatgatgtccctcgcggaacgtcgacaagcaccaaacatcttcgcacgcgtcgacaaccgcggagtcccactgcccgccatcgtgctctccgtcgtactcagcgtcatcatggtgatcctcaactacgtcgacaccggctggctcctcaccttcctactcaacgccgcaggcgcctccctcctcaccgtctggaccttcatcgccgtctcccaactcaaactccgacgacgcctcgaagcactccaaggcaacctagccgtacgcatgtgggccttcccaggactcaccatcgccaccctcgccatcctcttcggactcgccatcctcatgcttagcgacgccggcgcacgcatcgaactactctccgccatcgccatggtcgccatcctcttcgcgatcagccttatagcagtaaaacagccctttgacaaggccctcctgccaagagaggcgagttatccacagaactccccctcc

SEQ ID NO: 17759 - DNA, 1431 bp, Cornyebacterium diptheriae
gtgcaaaaacacggtactaatgaaggcgcgctttggggcggccgcttctctggcggcccttcagaggcgatgttcgcgttatctgtatctacgcactttgactgggttttagctccgtacgatgttctagcctcaaaagcccatgctcgtgttttgaacaaggcgaaactactttctgactccgatttagagacaatgcttggcggtctcgacaagttgggtaaggctgtagcttctggtgaattcaagccattgccgaccgatgaggacgtccatggcgcaatggagcgcggacttatcgacatcgtgggccctgaagtaggcggacgcctgcgtgctggtcgttcccgaaacgatcaggttgccaccttgttcaggatgtgggttcgtgatgccgtgcgttcagtagccttgcaggttaccgagcttgtcgatgccttggcatatcaagcgactcagcatcctcgtgcgattatgcctggaaagacgcattcccaagcagcccagcctgttttgctagcacatcagttgctcgctcatgcgcagccgttgcttcgtgacatcgatcgtattcgagatctagataaacgccttgctatttctccatatggttcaggtgcattagctggttcatctttacacttggatcctgaggcgattgcccaggagttaggattcgactcagcgtgtgataactcgattgatggtacgtcttcgcgtgactttgcagcggaaactgcatatgttctcgcgcaaattgccattgacatgtcgcgattagctgaagaaattatttactggtgtacaccagagtacggctatgtaactctttctgatgcttggtcaactggctcatcaatcatgccgcaaaagaagaatcctgatgttgctgaattaactcgaggcaagactggacgcttgatcggaaatctttcagggcttttggcaacgcttaaagctcagccgcttgcctacaacagagatcttcaggaagataaagagccgattgttgattcgtttgctcagttgaatttgttgcttccagctatgactggtctcgtttctacgcttactttccacgaagaccgacttctttctttagcaccagcaggatttactcttgctactgacttggctgagtggatggtacgtcaaggtgttccattccgcgaagctcacgaagcttccggtgcatgcgttaggatcgcagaatctcgtggtgtaggcctcgacgagctgactgatgatgaactcgcttccgtagatgtacgcttgacgcccgaggtacgtacagtgcttactgtcgaaggtgctgttgcatcgcgagctacacgcggtgggacagcaggtgtaagagttgaagaacaacgttctcgagtagaatccacctctcaatcttttaaagaatgggcgctaactcctgttcgtaaa

SEQ ID NO: 17760 - DNA, 1089 bp, Cornyebacterium diptheriae
atgcgccacctttgtttttcgcgcctgtatcgtccactattattcgctgctgcaaccacgggtgcggcattttttgcggggccgctagcttacgctgatgaggtccaatccacacctttgccagtaacacagccacagcctgcaccgaccctgacacaaactgtcacctcgatggttaatagctgggggattccaacacctgcaatcgatccccagattgcggcggccgtcgatacgctagctcaacaagttcaagcattcgtagcccctgtcatgccctatgcagatccccaggtggctgcacctgcccctgagcggcatgcggtcgcgcaacgccccgttgatggtcctaattatcactggacgaacgaccctgtttcgcaggtaatggctcaaaaacctggtccagtgctgcaccgtgttcagggtagttggtttaatgcaccagacattccagaagaatcattgcaggcgcaagctcagggggcatctctgtatggccctggcaccccgatctacgtgggcaaagaccgcctatgcacagtaggtgcttctggctacgatgccgatgggcggaaaatcgctattacggcaggacactgcggaaatgtaggagatgcggtcagctctgctgattcgtggcaggtaggcccaagcggcaccgtggtagctaaaggctctaacttggactatgcagtcgtagagcttggctccaatgctcaagtcacccaaaattacaacaatatccgcgttaattcagtcggtggcccgatgcctgtcacaggtaatacagcctgcaaacaaggcattgctactgggtttagctgtggattggtgtggaatcatgaccaccgcaccacggcttcccaagtctgcgcaatgcagggcgattccggtgcaccaatgttggtgggagatcgtgtggttggcatcatcaacggtggcatgatccctaatgtgaactacccatgcacaaccccatggcaggggccgttctttgtgcccactatcagcacgaacatggatgcaatcgtatccgacctcaattctaagaaatcagtcggacacggtttccggcttgctaactct

SEQ ID NO: 17761 - DNA, 1362 bp, Cornyebacterium diptheriae
atgacacaagcaaccactgagaccgagcttggcacaggcctaaaaactcggcacctaacaatgatgggactcggctccgccatcggagccggcctcttcctcggaaccggcgttggaattgcagcagcaggacccgccgttctcatcgcctacgtcctcgcaggcatcttcgtcgtattcgtgatgcaaatgctcggagagctcgcggcagcccgcccagcctccggatccttctccgtctacgccgagcaggcattcggccactgggccggcttcagcctcggctggctttactggttcatgctcacgatggtcctcggtgccgaaatgaccggcgccgcagccatcatgggtcaatggttcggcatcgcgccatggatcccagctctcatctgcgttatcttcttcgcagtcgtcaacctcgcacgtgtcagcggctttggcgaattcgaattctggtttgcttttatcaaggttgccgtcattattctcttcctcgtcatcggcgtactgctcatcttcgggctactacccaactatgacttcgtaggaacccagcacttcctcggcgacggatttatgcctaatggtatctcaggcgtagccaccggcctcctagccgtcgccttcgctttcggtggtatcgagatcgtcaccatcgccgcagcggaatccgaagatcccaagactgccatcgccacagccgtgcgctccgtgatctggcgtatctccttgttctacctgggctctgtccttgtgatctgcttcctcatcccattctccagcatcggaggcgccaagagcgcagcagactcccccttcaccatcatccttggcatggccaacattcctggtgtggtcggattcatggaagccgtgatcgtcctcgcactcctttcagcattcaacgcccagatctacgccacctcacgcatcgtccactccttcgcagaacgtggcgacgcccccaagatcttcgcagccaccaacccctccggcgtccccatgccagccgtactcctcagcatgttcttcgcattcgtttccgtaggactgcagtactggaaccccgcaggcctcctcaacttcctcctcaacgctgtaggcggatgcctgatcgtcatctgggtcatcatcgccttcgcataccttaaactgcacccagaactcgtccgcaacggagaaatcaccaccgtgcgtatgtggggcttcccatggctcggctgggtcaccatcgcaggattcctcggactgaccgtcctcatgctgactgacgacgcctcccgcagccagatcacctccgttacggtcgtattcctcctactcatagtcgtgtcattcttcaccaagaaaaagagtaag

SEQ ID NO: 17762 - DNA, 1260 bp, Cornyebacterium diptheriae
atgaacattatcgacgaactccaatggcgtggcctgattaatcagtccaccgacatcgacgcgttgcgagaagcatgcgaaaaaccgatcacactttactgcgggtttgatccaacaggtgactctctacacgccggtcacttggtaccgatgattatgctccgacgtttccaagaagctggtcaccgaccgattactcttgctgggggtgcaacaggttttattggggatccacgcgacgtgggggagcgttctatgctgtcccaagatactatcgagcacaatcttgagtcgattaaaaaacaacttcggtcatttgtccgatttgatggtgatagtccagccatcatggtgaacaatgctgactggactatgtctatgtcagtagttgattttttgcgcgatgtcggaaaaaacttctctctaaatacgatgctggatcgtgaaactgtcaaacgacgcttggaaacagacggaatctcttatacagagttttcctacatgctgctccaagctaatgattttgttcagctgaatcgtgaatacgactgtgtcctgcaaatcggtggtggagatcaatggggcaacattgtttcgggtgttgatctcaatcgtcgagtatccggaacaaaaactcatgcactgaccgttcctcttgtaactgatgcccaggggcagaaatttggtaagtcgacgggcggcggaaagctttggcttgatccggagaaaacctctgcatattcgtggtatcagtatttcctcaatgcgggagattctgtcgtcattgattaccttcgatggtttaccttcttaactcaagaagaaatcgctgaattagaaactgaagtacgggagcgtcctcacctaagagctgcgcaacgccgacttgctcaagagatgactgatttagtccatggtcacgatgcgactgtctcggttgagttggctgctcaagcacttttcggccgtgcttctttgcaagatctagatgaagctacgttggatggtgcattgtccgaaaccgtaatttttgaagttcccgcgggtgaatcgcctacgattatcgatcttctcatcggtgcaggtcttgttgattcgaagggagctgcgcgtagaacaattaaagaaggcggcgcatacgtcaataatgagcgaattgaatcagaagattggcaaccaactgatgacgtattgctacatggagcatggttagttcttcgtaaaggaaagaaaaactttgcaggtgtgaagtactccgcg

SEQ ID NO: 17763 - DNA, 171 bp, Cornyebacterium diptheriae; identical to SEQ ID NO: 17680

SEQ ID NO: 17764 - DNA, 428 bp, Cornyebacterium diptheriae; identical to SEQ ID NO: 17459

SEQ ID NO: 17765 - DNA, 368 bp, Cornyebacterium diptheriae; identical to SEQ ID NO: 17460

SEQ ID NO: 17766 - DNA, 747 bp, Cornyebacterium diptheriae
atgaacgtctccgtagtaattcctgccctcaacgaggaagcaaccgtggccgatgtggtcgcattgtctaggagggggagtgacgaggtcatcgtcatcgactccgactccacagatgccaccgccgcccgtgcgaaagcagccggagcgagcgtcgttaattggcgcgacgttgtgtctttgcctccgatccctggtaaaggcgaagccctatggcggggcgttgctgccgcacgtggcgatgttgttgtcttcttagacgctgatctcacagaaatttcgcccactattgtcgaggacctcgctcgtccatttatcgacgattccgtcatgctcgcgaaagccgcctacacccgtggcgatgcgtctggcggcggcgggcgcgtgaccgagttgaccgcccgccccctcctagaggcgttcttccctgagctggggtttgtgcgtcagcctctaggaggggagtatgccattcggcgcagcgcagctcttgatctaccgtttgttggcggatatggcgtcgaggttggtttgcttatcgacgtcttccgctgcttcggtgcagcgtcgattgtggaggttgaggctgggcatcgtggtcatcgtcaccgtccgttgcgtgagcttgctcccatggcacgcgtggtggcgtcgacaattttgcagcgtgctggtgtggcttcggggctggatggggttggacagcgccctgcgatatcttccttggaaagtggcgtaggaaaggtg

SEQ ID NO: 17767 - DNA, 951 bp, Cornyebacterium diptheriae
atgactatcgattgccatgaagatcgcagagttttactagttccgcataccggaagaccgcaaaatgttgcttcagctgcgctagctgccgagcttctcgacgattcaggcgtcggagttcgtgttctcgttccggccgaagacacaacagttgcaacgcatccagttttgggacaatttgaacgagtttctcattctcctcaagcgactcaaagtgttgatctagtactggtattaggcggcgacggtacatttctgcgtgcagctgatctcgcccatggtgctgatctaccagtgttaggtatcaacctaggacatgtcggttttttggctgaatgggagaaagattccttagacgaagctgtccgtagagttacaaaaggaagtttcagaattgaagaacgtatgactctcgatgtcagcgtttacgattcaaatggtactgcaattggtcgagggtgggctttgaatgaagttagtatcgaaaatagcaaccgaagtggtgttttggatgcaacattagaaattgatagtcggcctgtaagttcatttgggtgtgacggcatcatagtttcaacacctacgggctcgaccgcttatgctttttccgcaggtggtcccgtattgtggcctgaactagacgcaattttggtcgtaccgaacaacgcacatgcactattcaccaagccactagtagtaagcccccggtcatctgtggcagtggaatcgcatcctagcgcatttcctgctactgctgtcatggatggattccgttcgatttccgtcccaccaggtgcacgagtagaagtcaagcgcggttctcggtcgattaagtgggtacggttggatgacatcccgttcacggacagacttgtcacgaaattgcgactgcccgtagaagggtggaggggacctaagaacatgattccacagattaatccccattcagcg

SEQ ID NO: 17768 - DNA, 738 bp, Cornyebacterium diptheriae
atggatgaccataacgcgctgctcgctgagcgccatacgattttccaaagctcactcatgaccgccctcctagacggcatctatgacggtgagatttccatcggcgaattactgggacacggtaacttcggcataggcacatttgatgccctcgacggggaaatggtcatcctcgacggagtctgctaccaacttcgtggcgacggatccgccagtgaagcagcgcttacacaacgcagtccattcgctatagccacaaactttgtgccacggcttaaagctcgtgtaccacgaggcatgcacaggagcgaactcagtgacttcatcacctccctcctacccagcgaaaactacatgtatgcggtacgtatttccggaatgttctcatcagtcagcgtccgcaccgtgaccaaacaagaacgcccttaccgcccgatgacacaagcgactggcgacgacgccgaactcgaattcaccaacgtctccggtgtcgtagctggttttagaacccccatctacgaaaaaggcattggcgtacctggctgccacgtccacttcatcgacaccgaccgcaccagcggcggccacgtcctcgacttcaccatgtctgaaggcaccatcgaagtctgcccaggaaccgacctccagctgcgcctaccgcttacccaagacttcagcaaagcatccttggcgccagacgacctcgacgcacaaatccacgcaaccgaagtgaaaggc

SEQ ID NO: 17769 - DNA, 858 bp, Cornyebacterium diptheriae
ttgtctaattatcgtcgtgatcttgaacggtatacacggtggctgcaagtacagggaatcacagatattgagaatatctccgcacaagatattgaaagatatgttcaagagttgcgtaagggggatagtgatactggaaaaaaacctctagctgcctcatctgctgcgcgagctttgattgttgctcgtggtctacatcgttttgcattgttagaaaacttagtggagaacgatgtatctgctgatgtctctccacctgcaatggggcgtcacctgcctgataccctctcagtcgaggaagtgaatcgtctaatagaagctatacccatagatgatgcggcttcgccagaaaatcttagggattgcgctctactggagttcctctatgctactggagcccgcatttcggaagcagtaggtctagtggtggacgacgtggctgcaattgtcgaaaatgaaggcattgtccgaataactggaaagggcaacaaacagcgtattgtgcctgttggtgatcagtgtttgtcagcgctcgagcgatatgtcgtgagaagcagaccggcaatgtcaaaagggaaatcgcacgcacttttccttaataaacgtggcggacaattatctagacaaagcgcttggcaaattctcaaaaactcagctcaacgcgcaggaattgaaaaagatatttctccacatactttgcgccatagttttgccactcatcttttagaaggtggggctgatgttcgagtagtacaagaattgttagggcattcgtcggtcacaactacacagatatacacccatgtaactgccgataatctacgatttgtctggtctcgttcacatccgcgtgctcac

SEQ ID NO: 17770 - DNA, 1323 bp, Cornyebacterium diptheriae
gtggttcatcgccttgaagcacgtagactggccgttatgagtcaagtgacacgtgtgtatgcaggacgtctcgccggcatgattgtccgcgggcccgatactgatgccataggccgtgtacgcgacgtaattgtcaatgttcgccccaacggccaaccctcgcgcgttttgggtttggttgtcgagatgatgaacaatcggaagatcttccttcccatgcttcgcgttgctgctatcgagcctcaggaaattacgctggtttctggatcagtgtcgttacgcgcatacaaaccgagaaacggcgaggtggcgatcatcgccgatatcgtcggctccaaagtccacatcgacgaccccgaactcgatcacctccacgggcgccccgtcgaagtcgcagacatcgagctagaacgcacccgcacccgcgactgggcaatctcacgtgttgcggtcataggcgaacgccccaaattcggacgccgccccgagctgttcacctgcccatggtcgcacgtccacggcatctccgcaggtggtgtaggaatcaccgacgcagccgccgaactcatcgcagaattcgaagacatgcgccccgccgacatcgccaccgtcctctacgagctacccgacgcccaacgcgccaacgtagccaaagagcttgacgacgaccgcctcgccgacgtcctgcaagaaatgtccgaagaccgccaagcagaactcatcgaaaccctcgacatcgaacgtgccgccgacgtcctcgaagaaatggaccccgacgatgccgcagacctccttggcgaactcgatgacgacaaagccgacgtcctcctagagctcatggacccagaagagtccgcccccgtgcgccgcctgatgagttttagccccgacaccgtcggtgcactcatgacgcccgaaccactcatcctctccccacaaacaaccgtcgcagaagcactcgcgctagcacgcaaccctgacttgcccacctcactggccagcattgtgttcgtcgtccgcccgccaacggcaacccccaccggcaagtacttaggatgcgtacacctgcaaaaactcctgcgcgaacctcctagcgagctcgtctccggcatcctcgaccccgacttgccaccgttatgggccagtgactcccaagaaacagccgcacgctactttgctacctacaaccttgtatgcggccccgtcgtggacaacgacaaccacctcctaggcgcggtggccgtcgacgacctcctcgaccacatgctccccgacgactggcgcgacaccggcattcgccccgacgaaacaccaaaggaggtg

SEQ ID NO: 17771 - DNA, 1311 bp, Cornyebacterium diptheriae
gtgttcaatactgatgagttggaaaataattcattcgcacaatttgatcgtgatcatatttggcatccttatggcccgatgccggctacggttgccccctacgtagttgcagccactaacaacacggacatcattctagacaacggaacgcgcttaatcgacggaatgagttcatggtgggctgccgccttcgggcatgggaacgagaggcttaaagcggctgctcatcgccaaattgacgtgatgagccatgtcatgtttggtggcttgacgcatgtgcctgcgattaagcttgcacgtcaattgtgtgaacttacggacgaacctcttaccaaggttttcttttctgattcgggatctgttgccgtagaagtggcactgaagatggtgtatcaataccagcttgggcaagggcatcccgaacggcgtcgtatgttgacctggcgtggtgggtatcacggcgacacctttgccacgatgagcttgtgtgatccagaggggggaatgcacgcaatgtgggaggggcgcgtaatggataatgtttttgcgtctcggccgccgctgtggggcgctgcatcaaatgaaatttctgcatacatagatcatctcgattcgttgattgattcaacaattgccggcatcatcgttgaacccgttgttcaaggagctggtggcatgcgattccacgctccagagattctcaaaggtattcgacagctttgtgatcaacatggaattttatttatcgcagatgaaattgcgactggttttggtagaacgggtaacttatttgccactcaagctgcaaaagtaactcctgacattctttgtgttggaaagtcattaactggcgggtttatgtcgttagctgcaaccatcaccacggatgctgtggcagaaagtatttcttccgctgccggaggaggagcactaatgcatggaccaacatttatgggaaacccgttggcatgtgctgttgctagcgaagcattaagcattattgcagaaggtgattggaagcagcaggttgcagaaattgaaagcgagctaaaaaaagggcttgttccgctagcttccaaccctgctgttcgtgacgtaagagtcctcggtgcaattggtgtagttgaaatgaaagaacctgttgacatgaaacgtgctactcatgctgctgtgaacgcaggtgtatggctccgtcctttcggcaggctcgtatacacaatgcctccatttgtctgtactcataaacaaatacaaaagatttcgtgtgcaattgcttctatcgtgcatacggagcaggaacgtttcgaacgc

SEQ ID NO: 17772 - DNA, 2762 bp, Cornyebacterium diptheriae
gcttggtcaccatcacctctacgtacgatcaccgcatcattcagggtgcggaatccggtgaattcctgcgcaccatgagccagctatttatcgatgatgccttctgggatgagatcttcgaatccatcggtatcccttacgcaccgatgcgctgggcttctgatctttctaacacgggaatcgataagaacacccgcgtgatgcaactcatcgaggcataccgctcccgtggacacctcattgcagacacaaacccattgcgctggcaccagccaggcatgccagtcccagaccaccgcgatctagacatcgccacgcacggtcttaccctgtgggaccttgatcgatctttcaacgttggtggcttcggcggcaaggaaaccatgacactgcgcgaggtgctcggtcgcctccgcgccgcctacaccctcaaagtgggctcggaatacacccacattctcgaccgcgatgaacgcctctggttgcaagatcgcatcgaagcgggcatgccgaagccttcctacgctgagcagaagtacatcctgcagaaactcaacgcggcacaggctttcgaggacttcctccaaaccaagtacgttggccaaaaacgtttctccctagaaggcgccgaggcactgatcccgctgatggactctgccatcgacaccgccgcaggccaaggcctcgacgaagttgttatcggtatgccacaccgcggccgcctcaatgtgctggtcaacatcgtgggcaagccacttgcaaccgtattcaccgaattcgaaggccacatcgagccaaaggctgccggtggatctggcgacgtgaagtaccacctcggtgctgagggcactcacatccagatgttcggcgacaacgaaatcaaggtttcgcttgccgctaacccatctcacctcgaagcagtcgaccccgttatggaaggtattgcccgcgcaaagcaagacctcctcaacaagggtgactccactgacggctactccgttgttcctatgatgttgcacggcgacgctgcattcgcaggacttggcatcgttcaagaaaccttgaacctcgcccagctgcgtggctacaccgtcggcggcaccattcacatcatcgtgaacaaccagatcggcttcaccaccaccccagactccggccgctctagccactatgccaccgaccttgccaaggcctacggctgccctgtcttccacgtcaacggtgacgatccagaagcagtggtatgggttggacgcctcgctaccgagtaccgtcgccaattcggcaaagacgtcttcatcgacatgatctcctaccgtcgtcgcggccacaacgaagccgatgacccatcgatgacgcagccagagatgtacaagctgatcgacgcccgcaacaccgtgcgcgaacagtacaaggaagacctcctaggccgtggcgagctgaccaccgaggacgccgaaaaggtacagcgcgatttccacgaccagatggaatccatcttcaacgatgtcaaggaaaccgaaaagaagccattcgaggcacaagctggcatcacttcctcccaagaagttccacacggccttgaaaccaacatcacccgtgaagaactcgtagaaatcggtcaggcctacgccacagcaccagaaaacttcgagttccaccagcgcgtagcaccagtagcaaagaagcgcctcgaggcagctcaaaacggtggcattgactggggttggggcgagctcatcgccttcggctccctcgcagcaggcggcaagttcgttcgcctcgcaggtgaagattcccgacgcggcaccttcacccagcgccacgcagtggtctacgatccacgcaccggtgaagagttcaacggcctcaacgaccttgctgagcgcaagggcaacggcggtaagttcctcgtgtacaactccgccctgaccgaatacgctggcatgggcttcgaatacggctactccgtaggtaacgaagatgccgtcgtcgcatgggaagcacagttcggtgactttgccaacggcgcccagaccatcatcgacgaatacatctcgtccggtgaggccaagtggggccagacgtcctccgtgatccttcttctgccacacggctatgaaggacagggccctgaccactcctccgcacgtattgagcgctacctgcagctctgcgctgaaggaaccatgaccgtggcacagccgaccaccccagccaactacttccacctcctacgccgccacgtactcggcggactgaagcgaccactcgtcgtattcacgccaaagtccatgctgcgtatgaaggctgcaacctcaagcgtggaagacttcacccagatgaagaagttccagtccgtcatcaacgacccacgcttcgttaacggcggattggacaagaacaaggtcaagaagatcatgctggtttccggcaagctctactacgaccttgctaagcgagcacaaaaagacaagcgtgacgacgtagccatcgtccgcatcgaaatgctccacccaatcccattcaaccgtctcaaagaagccttcgacttctacccgaacgccgaagaaatccgcttctgccaagacgaaccagcaaaccaaggcccatggccattcatgcacgagcacctaccagagctcatcccaggcatgctgccaatgaagcgcgtctcccgtcgcgcacaggcctccaccgccaccggcctatccaaggtccacgcagtggaacagcagcacttgctcgacgaagcattcgct

SEQ ID NO: 17773 - DNA, 1572 bp, Cornyebacterium diptheriae
atggaaattcttattggtttgctagcgttgctttttgcaacggtcatcatggtcgccgtcggagaccgaaccggtctgccatggcctgtgttacttaccttggttgctgccggtggaatttttcttccgtggcttcccgaagtagcgattcctgaagagatgatcctcccgatttttattccgccattgctatgggcactggcgcgacatagcagctgggcgtcgattaaaaggcagtggcgaaccgtagttttgctttcagttctattagttatagttactgcagttacggtgggtcttgtcgcatatttattagtaccaactctctcatttgcagctgcggttgttattggcgcagccatttctcctccagaccccgtagctgttgatgctgttgcagaaccggcaggtgttccacgacgattatctaatacgcttcaagttgaaggcctctttaatgatgctgcttcgatcgtcgtttttaatttggcattgtcagtggtgcagtctgggcacgatatcacttggtggtcggcgctatctacattggtatattcagcagcggtcgccgtggttattggttttgtcttgggaaccggatgtgcaaaactccattcttggatgacttcatcagttgctaggaatgcattcacgtgggtcattccgtttgctacttttatcgctgctgaggaattgcatgcttcgggtgttattgccatcgttattgctgcgatccaatttaattccaagagtcaagctggtgccgaggatagattgtctggatcggctttttggcaggtagttgagctgctttttactggtgtggcattcggactcattggaatttcggtgcgtgatgcgatccattctgctggagcgaacctgtggcatggggtgtggttcggcctagtgctggcattgactgccatcgcagtgcgggcactgtggctgtacttgctctatgtagggaacaaaaaggcgggtagacgaactggtgcaccgttacgactccaagaagtactgttactaacttggggtggaatgcgtggattagtcactttggcgctcgtattgtcaatcccgatgactaccggatttgcaatttaccgagagctttctattgtcgcacttactgttttgcttgtaacgatggtgattcctggcctgacacttcctgctctcatgagggtattaaacctcgaagaaggtccggatgcttttggcgattacgcacgtgaaaagctatttgttcgcgccagatttgctgcacgacaagtgctggattcctattctcatgacatcccagaagaatttatggcttccttacggcgtcgcttcgaacatgacattaatgctgatgaagatgacgacgatgccatgacacctgaagagcgtcgcaagattcaagagcgtcgttttgctctgtttaataaagtacggcttgaagccttgtatgcttctcaagctgagttacttcgagccagaagcgagcgggacgtcgatccgatgattgttgacgaagttctgtttgaaatcgacagccagatcatcgccgccgagaaatcaacgaga

SEQ ID NO: 17774 - DNA, 963 bp, Cornyebacterium diptheriae
gtgaatagaaccgctcgccgtgacggcacaccggaaaagcctcgtcgaggctctcagggaggctcccgtggggactacggaaagccgaaacgtagccatgccaagccacaatcggcaaattcgggccgtcccataaagcaacgtaaacagcgtgattcagaaatgttgatttctaatgcgcgtccagcacggcaccagcatgtaggtcgtcgtgaagcaggagatggcagtactgaaggcattcgtctgcaaaaagtccttgctcaggcaggtgtcgcctctcgtcgacacgctgagattttgatcgatgccggccgtgttgaggtcaacggaaaaatcgtgatgactcagggcatgagagttaacccaaatgtcgatgtcattcgcgttgatggtgtacgagtcaatgttaatgaaaacttgcagtacttcgttctcaataagcctcgcgggttgcaatcgactatgagcgatgacatggggcggccgtgtgttggcgacatcgtgggagagagaatttctgcaggccagcgtttgttccacgtgggacgtctcgacgcggctacggaaggcttgctgctactcactaacgatggagaactcgctaatcggttgatgcatcctcgatatgaagtttcgaagacttacttggctactgttctcggtgaggcggataaacgccttgttaagcaattacgtgatggtatcgagcttgatgacggtccagctaaggcggatcttgttcagatcattgatactttccaaggcaagtccttgattcgtattgagctgcatgaaggtcgtaagcacatcgtacgacggatgctcaaaactgcaggattcccagttcaacgactagtgcgaaccaaaattcacacaattcagcttggtgagcaaaccccaggagcgatccgagctctcaacagtagcgaattagctagcttgtacaaggcggtagggatg

SEQ ID NO: 17775 - DNA, 723 bp, Cornyebacterium diptheriae
atgagcacagctgatagcactgcactgagcaatatgcctgagggtgggctgatcgtagctgtcgatggtccttctggagcaggcaagtctacggtttgtcgacggattgcttctatgctcggggcaaagtacttggacactggcgcgatgtaccgcgttgcgacgcttcacgtgttacgccaaggaatcaacccgagcgatactactgcggtagttcaggccaccagggaactgcctttgtccgtcaatgatgacccggcttcacgtgaagtgatccttgatggggaagacgtgtcgaatgaaatccgtggacgtctagtaactcaaaatgtttctgctgttgctgcaatcctagaagttcgggaaaatctggtagccctacagcgcgaactggcagctactgcacatcggtgcgtagtcgatggtcgtgatatcggatcgaccgttctggtcgatgcgcctgtaaaaatattcttgactgcctctgctgaggtacgcgcacaacggcgatatgaccaggatgtggcggccggacgactaacagatttggcgactgtacttgccgacgtgaaacgtcgtgatgagctcgatagcaaccgatctgtttctccattagcgccagctagtgacgcaaccgttgtcgatacttctacgttaacccttgatcaagtcgtcgatactttgatgactctgattgaaaaatctgctgaaaggaccgcacga

SEQ ID NO: 17776 - DNA, 915 bp, Cornyebacterium diptheriae
atggattcactaggagaacaaccaagcaaccgtgcccccgttattactatttcttctgggcgctatctagcgcagattgctacctatggtggcggaattaaatcccttacttacgacggtcgccctttggtcgaaacctacccagacgatgcgtttccgccgctgaacgcgggggttgtactggcgccgtggcctaatcgaactgacgctggtgcctacgattttcaaggtcaaagctatcagctgccgattactgagccagatcgtaataatgcgattcatggttttgttgccaatgcagtgtggaacattgatcttattcgccctgctagagtcattctttctaccactattgaaccgcagcaggggtggccttgggctattgagcttgcggctgattatttactaacggattccggtttaagggcacagttcacggctacgacgccgcatgaggctgtgccctttggctttggatggcatacctatttatcggcccaaggcgcagaggttgataagaccacgcttcgtgtgggcgtcgataagcaatggatgcttgatgatcgcaaccttcctaccggtgagctcgttcaacctactaacgacgtttccggtggcctgcccatggcgggaaagcttctcgacgactgcttcttggccgagcgcactcccgtaacaacagtcctggaatcgcagggggtgggagtatccatgcactgcagcgaacaattcccgtggttccagatttttactccagatccggcatgggaaatgccatatccagggcgtgggcggtcggtggctgtggaaccgatgacaacgtccccgaacggactgaacttggggatcgatacgatcggcgcggcatctccgtggcacggaacgatcacgatttccgcatataacaagcactct

SEQ ID NO: 17777 - DNA, 1641 bp, Cornyebacterium diptheriae
atgagcaatgcgcacaatgcaccgcttggcggaaataactcctcggatgaagaccaagaaacggttttcgtttatcacactgcacatggtgaagtcgatgctcaggaagcattcgtagaagaagacgtcgtagtcgatggggctgggtatgcttctgatggctttgatgagaatgactttgacttcgattttgaacatgactctgaaggcaatgtcgtattcgatgaagctgattttggggaagccgactttggtgaggattacaccgatgaagattgggaagagcttgagcgtgcattcggtgttggatctcgggcgattgagtcagagaacctctgcacggtggccatcgtaggtcgtccaaatgttggcaagtcttcgcttgttaatcgctttttagggcgccgagaagcagtggttgaggacttccccggcgttacgcgagatcgaatttcttatctagcggattggggaggacgtcgattctgggttcaagatactggtggttgggatccaaacgttaaggggatccacgcggtgattgcccggcaggcggaaaccgcgatggctacagcagacgttatcgttatggttgtcgataccaaggtgggtattacggaaaccgattcggtgatggcccgtaaacttcaaaaatctgaagttccagtaattttggtggctaacaaatttgattctgatagccagtatgccgatatggcagagttttatgcattgggtttgggagacccttggccggtttctgcgcagcatggtcgaggcggcgcagacgttctcgagcaaattttggcagcattcccagaaaccccacgtgcaacctcaattgttgaaggaccgcgtcgcgttgcccttgtgggtaaacccaatgtgggcaagtcatctttgctaaataaaatgtctggcgaagatcgatcagttgtcgataatgtatccggtacaacggtggatccggtggattccatcgtaaaacttgacaagcacctttggaagtttattgatactgcgggactacgcaaaaaagtgaaaaatgcccaagggcatgagtattacgcgtctctacgtactcgtggcgttattgatgctgctgaaatatgtattttcatgatcgattcctcggaaccagtctcggagcaagatcaacgtgtgttggccatgatcttggatgctggtaaagcgctcgtccttgttttcaacaaatgggatcttatggaagaagatcgccgttgggaactagaacgtgaaattgatctgcaacttgctcacattccgtgggtaaagcgtataaatatttcggctaagacgggacgtgcccttcaaagactagagccgtacatgctggaagcgctggaaagctgggataagcgtgttaccacaggtcagctaaacaactggttgcgggcgactattgcacagaatccgccaccaatgaaggggggccgtgttcctcgcgtattgttcgccacgcaagcttcaactcaaccgcctacgattgtgctatttaccactggtttcttagacgctggttatcgtcgctaccttgaacgcaagtttagggaaagctttggtttcgaggggtccccagtcaagattgcagttcgtgtgcgcgaacgtcgttcaaagaag

SEQ ID NO: 17778 - DNA, 1694 bp, Cornyebacterium diptheriae
ttcgaggctctaggtctcccagacgcaatcctgaaggcagtcgctaaggttggcttcgaaacgccatccccaattcaggcgcagaccattccggtgttgatgcaggggcatgacgttatgggcctcgcgcagacgggtacaggtaagacggcagcattcgcgttgccaatcttgtcgcgtatcgacgtcaagaagcgccacccacaggcgttgatcctcgccccaactcgcgaacttgctttgcaggttgcagactccttccagtctttcgcagatcatttgggcgacatccacgtgctgccaatctatggcggtcaggcttacggcattcagctgtccggcctgcgccgtggcgcacagatcatcgtgggtactccaggtcgtgtgatcgaccacttggagaagggctccctcgacatttccaacctccgcttcctcgttctagacgaggcagacgagatgctcaacatgggcttccaagaagacgttgagcgtattttggaggacaccccagaggacaagcaggttgctttgttctctgccaccatgccaaatggtattcgtcgtttgtctcgcgactacatgaaggatcctcatgagatccaggtgaagtcgcagacgcgcaccaacacgaacatcactcagcgttacctcaacgttgcacaccgcaacaagctcgatgccttgacccgtatccttgaggtcaccgagttcgaagccatgatcatgttcgtgcgtaccaagcatgaaactgaagaagtcgctgaaaagcttcgcgcacgcggattctccgctgccgctatcaacggcgacatcgctcaggctcagcgtgagcgcaccgtcgaccagctcaaggacggtcgcctcgacatcctcgttgctaccgacgttgctgcccgtggcctcgacgttgaacgcatcactcacgtgttcaactacgacattccaaacgacacagaatcctacgtccaccgcattggtcgtaccggtcgtgcaggtcgttctggtgaagcaatcttgtttgtcactccacgtgagcgtcgcatgttgcgttccatcgagcgcgccaccaacgcaaagctgatcgaaatggatctgcctaccgttgatgaggtcaatgagtcccgcaaggcaaagtttgctgactccatcaccgagtctcttgaagacgatcaggtagcaatcttccgtagcctgattaagtcctacgcggaagagcacgatgttccactagaagacatcgccgccgcattggctacccaggcacgcgctggttccgaattcttgatgaaggagccaccaccagagaagcgccgcgagcgtcgtgaccgcgacgatcgtcgtggcggacgcgaccgcttcgaccgcgatgaccgacgtggcggccgtgaccgtggctcccgcttcgagcgtaacgacgacatgcagctctaccgcctagcagttggtaagcgccagcatgttcgccctggtgccatcgttggtgctctggcaaacgaaggtggcctgtccaacaaggacttcgggcgcatcaacatcttcgttgatcacaccttggtcgagttgccaaagaacatggatccaagcgtgatcgatcgcctcagcgatacccgtatctccggccaattgatccacatcgaaaaggacaatggccgaccaccacgtcgtaacgacgacggtgaccgcggcggata

SEQ ID NO: 17779 - DNA, 1119 bp, Cornyebacterium diptheriae
atgacagttaggttccttcacacctccgatctccagatcggcatgattcggcgattcctcgattcagacgcacaagcgcgtttcgacgcccaccgtatcgccgccatcaccaagctaggcgagatcgcggcccaacacgattgcgaattcatcgtgatggcaggagacatcttcgaacataactctctgaaacctgccacatttggacgcgccatggaagcactcaaaaaggtccccgtaccggtgtacctgcttccgggcaaccatgatcccctcactgcggattcccaactcgcgcgaaccgaagtgctcgaccatgtccatgtcatttcgcattctgaacccatagttattcggccaggagtggaattagtgggggcgccactgactgcaaaaacagcaacgcgtgaccttgttcggctagccttggagccgctttcgcctgctggaaccactactcgtatcgccgtagggcatggacaaacacttgcccgcgataatgagatgaaaccggatgttattgatctcgccttcgttgagcaacgtatcagtgaaggggttatcgattacttggcgcttggtgacactcactcgacagaaagcttggggtccacaggtcaggtctggtactccggtgctccagagactacagattttgttgaatttcctagcggcggtggggagatagactcaggaaatgcgctgatggttgccattgaagaccatcaagtatttgtggaaaaagtgccagttggaaagtggacctttgaggctgtcacatgggacattaactcttttgacgatgcacaagcctttatttcgcacttaactgcgtattccgaaaaggaaaatacggtagtgaaatacgcgcttcgtggcactgtttccatgcggacaatgcaataccttgaaacagagtgtgaaaaattacgacctatctttgccgcactctatgagcggcggcgactcatggatttacacctagaacctcgcgaagatgagcttgaccaattggggcttagcggttttgctcaacaaacgctgcacgagctcgtcgatcgtgacgatccggttgcacatgatgccctcaaactgctgtttcgactagcaaaggaagat

SEQ ID NO: 17780 - DNA, 528 bp, Cornyebacterium diptheriae
atgcataacctcaacggaacctacgtactcgatccagctcactctgttatcggttttatcgctcgccacgctatggtgaccaaggttcgcggcaacttcggcgacttcgacgctaccttcaccatcaacgatgaagatgttcaggcttctgcaacaatcaagtccgcatcgatcaccaccggtaatgctgatcgtgatgcacacgttcgcggagatgatttcttctccaccgaggctttccctgagctcacctttactgctaccgatgcaataatcaaggacgaggactccgctaaggtcaccggcgacctcaccatcaaaggtgttaccaagaccgtcgtccttgatgttgacatcgagggcattgcagaagatccattcggcaacgttcgcttgggcttcgaggccaagaccaagatcaaccgtcgcgattttggtatcaacttcaatgctcctttgaataccggcggcatgctggtttccgatgagatcaagattgagatcgaaggatctgcaatcaagcaggct

SEQ ID NO: 17781 - DNA, 1050 bp, Cornyebacterium diptheriae
atgagtctcagtagcaccgttttactgattgttcttttgctccttgccaatgcttatttcgtcgcatccgaatttgcacttgtctcttcgcgcaaagatcgaattgagaatctgatagctcaaggacagccacgggcgcaaaaagtcttgctgtccatggagcatctttctatcatgcttgcggcatgccaatttggtattacgatatgttccctaattttaggcaaagttgccgaaccagctattgcacattttattgagcaaccattccattcccttggattacctgctcatctgctccacccggtttcattcatcatcgcactaggtatcattactttccttcatattctcgccggagaaatggttccgaaaaatattgcacttgcagggccagaaactcttgcactttggctgattccatcgctgctatggttcatgcgtttgacaaggcccatcattgcagtaatgaactggctagctcgtataagtttgcgcgccgtcgggattgaacaaaaagacgaacttgattccgccgtagacccagaccagctagtgaccatgctctccgagtctcgatcagagggctacctcgacgcagaagaacatgcacggttgaataaagcactccgagttgaagataggtctcttcaagaggtcatgattcctctcaacaaagtgcgttccctcaactttggaatgcggggaccacttctccaagaattagaaactgctgttgcagaaactgggttttcacgttttccagtgacaggaaaagacggctcgtatctcggttatgtgcacatcaaggacgtactggatcgttttgatcattccagtcctgacaccatcattcatcgctcagagatccggccattaatcatcgttgatgcagctggaactatggatgaggccttgcaatcgatgcactccaagtcagcgcacatggcccaagttcgtgatcgcggcctcctcctaggcgttatcaccctagaggatctcatcgaggaatacgttggaaccttctccgactggacacacgaacaatca

SEQ ID NO: 17782 - DNA, 408 bp, Cornyebacterium diptheriae
gtgacaaggggaatcgacgaagaacttcagtccagtcaaggactgactactccagaattttcagtccttgttagcctttcggagcgaccagggcatgagattcgccttcgcgatctttgcgaatcgcttcagtgggacagaagtagaacgtcgcatcaaattacccgtatgcagcgtcgtggcttagtcacaaaaacgaaatgttcagatgatgcgcgcggtgtattcgttgagctgactccagaaggggagaagcgtctccgtgaggctgcaccagggcacgtcgatgtagtccgcaaattaatctttgatgtgatgaccgaggaagaagccgcagtgttgcgtggatatttccaaaaagtgattgatgttcagtgtggggcgtctacgggaaatccactagacgac

SEQ ID NO: 17783 - DNA, 783 bp, Cornyebacterium diptheriae
gtgagagttgcgctcttttccacttgtatcggcgacgcaatgttccccgatgcatccaaagcaaccgcactcgtgctttcccgcctcggctatgaagtcgtattccctaagggacagacatgctgcggccagatgcacgtcaacaccggctaccaaaaagaagccatcccgctaatcaagaactacgtggacgcattcgctgacgattccatcgactacgtagttgcaccttccggttcctgcgtaggcgccgtgcgcgaacagcacgagcacatcgcagaccgctacggcaacgccgcactgaaagatggcgcacacatcgccgcaaagaagtccctcgatctgtcggaattcttgatcgatgttgccggcgttgaagacgtcggagccttcttcccacacaaggtcacttaccacccatcctgccacggccttcgcttcattggcctaggtgaccgcccataccgactactgcaaaacgttgccggcatggaacttatcgagcttccaaacaaagaagagtgctgtggcttcggcggaaccttctctctgaagaacgcagaaacctctgctgccatggtgtctgacaagacccgcaacattgagctgaccggcgccgagtacatcaccggtggcgactcctcttgcttgatgaacattgcaggcaacctgtcccgcaagcatgtaggaatccgtgccatccacatggctgagattcttgcctccaccaaggaaaatccttggaccccgaccactgccgcttactcccgagaggtcatgctg

SEQ ID NO: 17784 - DNA, 1452 bp, Cornyebacterium diptheriae
atgactgatcaaacacaactagcgcagatcggcattgtcggtctcgctgtcatgggttcgaacctcgcacgcaattttgctcataaaggccacacggttgctgtttttaatcgcagctttgaaaagacccaagcgctcatggatcagcacggagatgaaggcaatttcatcccgtccgccacaatcgaagaatttgttgcttcgctagaaaagcctcgtcgcgccatcatcatggttcaagcaggacctgcaactgacgcagtaatcaaccaacttgccgatgcgatggatgaaggcgacatcattatcgatggcggcaacgcactctacaccgacacgattcgtcgtgaaagcgaaattgctcaacgaggcctcaacttcgtcggcgccggcatttccggaggcgaagaaggagccctcaacggtccttctatcatgcctggtggtcctgataaatcttgggaagcacttggaccgctgctcgaatccatcgccgcacaggttggcggcacaccatgtgttactcacatcggccctgacggcgcaggccactttgtcaagatggttcataatggaatcgaatatgccgacatgcaagtgatcggcgaggcataccaattgcttcgatacgccaccgaaatgcagccatctgagattgcagatgtgtttaagacatggaaccaaggtgacttggactcctacctcattgagattacgtctgaggtacttgctcaggtcgattctgaaactggcacaccacttatcgatctcatcgtggatgaagctggtcaaaaaggaaccggtcgttggacggtgaaagctgctctagaccttggtattgcaactactggaatcggcgaagcagtattcgctcgcgcactttcaggtgcaaccactcagcgcaaggcagcccaaggtaacttgccagccggcactttggaatcattggcctcgttgaacatcgataaggaccagttcgtagaagatgtccgtcgcgcactctatgcttcaaagctcgtcgcttatgcgcagggcttcgacgaaattatcgccggatcagccgagcacaactgggatgtcgatcctcgcgacctcgctaccatctggcgcggtggctgcatcattcgcgcaaagttccttaaccgcatcgttgaagcttacgacgctaatccagaactcccgtccctcctactggatccctactttaagactgagctggaatcgcttatcgattcatggcgccgcgtagtcgttgcagctacacaactgggattgcctgttccagtgttcgcttcatcgttatcctactacgactctttgcgagccgaacgcctaccagctgcacttatccaaggccagcgtgattttttcggtgcacacacttaccgtcgcacggataaagacggaagcttccacaccttgtggtccggtgatcgtagcgaagtagaagct

SEQ ID NO: 17785 - DNA, 1173 bp, Cornyebacterium diptheriae
gtgtccacccctaccggtcagcccatcggactcggattgcctgatgcaccgttgcccgtcctcgccccacgccgtaagacccgccaattaatggtgggaaatgttggtgttggctcggactacccagtatctgttcagtcgatgacaaccaccaagactcacgacgtcaacgctacgttgcagcaaattgcgcagttgacggcctcgggatgtgacattgtccgtgttgcctgccccaagactgttgatgctgaggcgttgcctgctattgctaaaaaatcgcctattccagtgattgccgatattcacttccagcctaaatatatattttctgctattgatgcaggttgtgctgcggttcgtgttaaccccggcaatatcaaagaatttgatggtcgtgttaaagaagtggcaaaggcagccggagacgcaggaatcccgatccgcattggtgtcaacgctggatccttggataagcgcatcatggaaaaatacggcaaggccactccggaagcattggtggaatcagcattatgggaagccggtttgtttgaagactgcggtttcggcgatattgcgatttctgtgaagcacaatgatccggtcatcatggttgaggcataccgtcagctagcagcccaaagcgactatccactgcacctaggcgttactgaagctggacctgcattccaaggaacgattaaatcgtcagtggcttttggttcattgctctcgcaaggtattggcgatactatccgtgtttctctttctgctgatccagtagaagagatcaaagtaggcgatcagattcttcagtctctaaacctccgtaaacgagggcttgaaatcgtttcttgcccatcgtgtggtcgagcacaggtcgatgtgtattcgttggctgaagaggttacagccgctttggacggcatgagtattccgttgcgcgtagcagtaatgggatgtgtggtgaacggtcctggcgaagcacgagatgctgatttgggcgttgcttccggcaatggcaagggacaaatctttgtccgtggtgaagtcattaagacagttccagaatctcaaattgtggagactctaatcgaagaagccgttcgattggcggaagcagaaggcctcgaaattgaggagggcgctggacctcaggtaaaaattactcga

SEQ ID NO: 17786 - DNA, 876 bp, Cornyebacterium diptheriae
atgcctcattcatcaacggcttttgagcacttgcctaaaccgaagaattcggctggtcgaaacctgaaagccgcgatcagcgttggaattggcttgggcgccctcgtattgctcgctatctttgttattccttttggttggtatccattagtggctatcgcaatcgcagtggcaacttgggaggtagagcgccgtttaatagaagccggttatcttttgcaacgttgggtcatgcttattggcggacaagtcatgttgtggcttagttggccatttggtccgaagggattagtggctggtttcgtcggcgttgtactcgctacgatgtttggtcggcttttccatcatggtcgttctatgccaccgaaaaactatctgcgagatactgccgtcgcaatttttgttttaacgtggatcccactttttggtagttttgcggcaatgctttcgctgtttgaaacagaaacagcacccggaaagtacttcatcgtcacattcatgttgtgcgttatcgcctctgacgtaggcggttatattgcaggcgtgatgttcggatcgcaccccatggcacctgcggtaagcccaaagaaatcgtgggagggctttatcggttctgtagtctttggcatgattgttggagcattcactgtgtcctatttattagggcatcaatggtggtggggattagttctcggatttggacttgtgatctgcgcgacactgggcgatcttgtcgaatcccagtttaagagggaactcgggatcaaagacatgtctgcgattttgcccggccatggtggtctgatggatcggcttgacggtatgttgccatcggctatggtgacatggttagtcttgagtgtgatttcttcagta

SEQ ID NO: 17787 - DNA, 555 bp, Cornyebacterium diptheriae
atgatcgatgagatcctgtttgaagctgaagagcacatgaacacttcggtggaacgtacccgtgacgagctggtcaatatccgtaccggtcgtgcaaaccctgcaatgtttaatggagtaattgccgattactacggggtaccaactccaattacgcagatggccaccatttctgtcccagaggctcgtatgctgctgattaagccttacgagatgtcgatgatgaacgaaattgagaatgcgatccgtaattcggatttgggagttaacccaactaatgatggccaagttctccgtgttaccatcccacagctgacagaagagcgtcgtcgtgacatggctaaactcgcaaagtctaagggcgaagacggtaagatcgccatccggaatgttcgtcgcaaaggcatggatcagctcaagaagattcaaaaagatggcgatgctggcgaggatgaagttcaggctgctgaaaaggagcttgataaagttaccgctaagtatgtagctcaggttgatgaggttgttgctaagaaggaagcagaactaatggaggtt

SEQ ID NO: 17788 - DNA, 729 bp, Cornyebacterium diptheriae
atgactgaaggtgtccaaaacgaacgtactggctacaagcgagtaatgctcaaactcggcggtgaaatgttcggcggtggggcagtgggaattgaccctgacgtcgtccaaaatgttgcacgacagatcgccagtgttgctcgtaccggagcggagatcgctgtagttatcggaggcggtaatttcttccgaggtgcgcagttgcaacagcgtggtttggatcgtaatcgctcagactacatgggtatgttgggcactgttatgaactgcttggctctgcaggacttccttgaacaagagggcattgattgtcgtgtacaaaccgccatcaatatggcccaggttgctgagccatatttgccgcttcgtgcaaagcgacacctggaaaagggacgcgtggttatctttggtgcaggtatgggtatgccttatttctccaccgatacgactgcagcacagcgtgctctagaaattgattgtgaagttcttcttatggctaaagccgttgatggagtttacgatgacgatcctcgtactaacccagatgcacagttgttccaccagattacccctcgtgaagtaatcgaaaagggtctaaaagtcgcagatgcaacagcatttagcctgtgcatggacaacaagatgccaattttggtgttcaaccttctcacagaaggtaatatcgctcgtgctgtcgcgggtgaacaaatcggtactttggttcaatcc

SEQ ID NO: 17789 - DNA, 825 bp, Cornyebacterium diptheriae
atggcgaactacactgctgctgacgttaagaagctgcgtgaaatcaccggctccggcatgctcgactgcaagaaggctctggaagagaccaacggtgacttcgacaaggccgttgaggttcttcgcatcaagggtgcaaaggacgtcggaaagcgcgctgagcgcaacgcaaccgagggcctgattgctgtttctggcaacaccatggttgagatcaactccgagacggacttcgttgcaaagaacgcagagttcaaggaatttgctcagaaggttgctgacgcagctgcagctgttaaggcaaacacccctgaggaactcgctgctgctgatcttgatggcaagaccgctgctgatgcaattcaggaattgtccgcaaagatcggtgagaagctcgagctgcgtcgtgctatcaccttggaaggcgagaagctctccgtttacctccaccagcgttccgctgacctgcctccagcagtgggcgttttggttgcctacaccggtgaaggtgaagcagctcaggctgccgctcacgccgctgcaatgcaggttgctgctctcaaggctcagtacctgacccgtgaggatgttcctgctgaggtcatcgagaaggagcgctccatcgctgagcagatcacccgtgaagagggcaagccagaaaaggcaattccgaagatcgttgagggtcgtctgaacggcttctacaaggatgtgtgcttggttgagcaggcttccgttgcagatagcaagaagactgttaagcaggtcatggatgaagctggtgttaccttgaccggtttcgctcgctatgaggttggccagcac

SEQ ID NO: 17790 - DNA, 1374 bp, Cornyebacterium diptheriae
atgagcacacttatcgcgatcgtacattccgcaacactgtttttattacttcttccatggatcggcgaatttgtaggggcaatgccttacattgcgttgtccatatttttatctttgtattcaattctgtggggagcaccgttagcaaaacttctatctacacgaaagggctggattacagccccctttgtactgctcgcagtggagtggctgaggtccaactatccatttggtggttttgcatgggttcgccttgcatggggtcagataggcggccctttagcgcctcttgcagcgtggggcggccctgcattagtctcatttgccacagtgttggtaggtgcattgatcttcgcactgctccagcgcacaaatacacgattggccctcacaatctctgccatcatgagtatagtcacggctagcgcatggtttaatctcagttcttccgaaagccaagaatcaacaggacaacaccaagtcaccgtggctgctgttcaaggcaacgttcctcgacttggattagatttcaatgctcagcgtagagctgtattagcgaaccatgtccaagaaacgagaaaattaactgagcaagtagacttcatagtttggccagaaaattcctcggatgtcgatccctttgcagatgttcgtgcacgcaatctcatcaactctgcggtcgcttcagtgcaagcacccattgttgtcgggacggtcacaaccgatgaagtaggcgctcgaaatgccatggtggttttcgatccggaaactggggaaggggactggcatgtcaaaaagtttttacaaccatttggcgagtggatgccatggcgcgacttcttccgaaagttttcttcgctcgttgatctcgccggcgatttcaaaccaggtgaaggtagcggggttgtccgagttcatgctgcccaattaggagaaacagtcaagctcggaataagcacttgttacgaagtggcattcgaccaagcaggacgagacgcggtactcgctggggcacaaattttagcgacccctacaaataatgccacttttggatttacagatatgacttatcagcagcttgctatgagccgtatgcgtgcaatcgaactcgaccgagcagtggttgtagcagctacttcaggtgtttcggctatagtgacaccgcgtggtgaagtactccaacactcgaaaatattcgaatcagcgactctagtacaatcgcttccgttgaaagaaaccatcactttttccgcgcggtatggcacgctattggagaaagtcttggttattattggaactctatgcgcagtatctgcgttagctatacgcagaaagatgccacaagcatcatctcgagcaccacgcaaaaagaat

SEQ ID NO: 17791 - DNA, 798 bp, Cornyebacterium diptheriae
atggcagttgtaaccatgcgcgagcttctcgacgctggtgttcacttcggacaccagacccgtcgctggaacccaaagatgcgtcgtttcatcttcaccgaccgtaacggcatctacatcatcgaccttcagcagaccctgacctacattgacgaggcatacgagttcgtcaaggagacggttgcacacggtggcactatcttgtacgtcggtaccaagaagcaggctcaggagtccgtcaagaacgaggctgagcgcgttggtatgccttacgtcaaccaccgttggcttggcggtatgctcaccaacttccagaccgtttctaagcgacttcaccgtatgaaggagctccaggctatggatgctgcagaaaacggttacgagggtcgcaccaagaaggaagttctcatgctgacccgtgagcgcaccaagttggagcgcgtcctcggcggtattgcagacatgaccaagacgccttctgctatgtgggttgtagacaccaacaaggagcacatcgctgtttccgaggctcacaagctgaacatcccagttgtggcaattcttgacaccaactgtgatccagatgttgttaacttcccagttccaggcaacgatgacgcaatccgctccatcgacgttctgaccaaggttatctctcacgcagttatcgagggcaagaaggctcgcgaagagcgtgcacttgccgctgctaaagaagcagctggcgatgccaacaagaccgaggtagcagctaaggttgaggcaaccgaagaggttgcagctgaagctgaggctaag

SEQ ID NO: 17792 - DNA, 771 bp, Cornyebacterium diptheriae
atgacagtttacttcattggtgcaggccccggcgctgcagatcttcttacacttcgtgcgcataacatcatcaaatcggcacaggtgtgcatgtacgctggatcaattgtcccaccagaagtgttggaatcggttccacaaaacgctgaggtgattaatacagcccgtatgccgcttgaccagatcatggaaaaaattgttgctgcgcataagaatgggcatgatgttgctcggctgcagtctggtgacccctcaatttattcggcagtggcagagcaagctcgcaggctcactgcgttggggattgactatcaaattgtcccaggagtacccgcttttgctgctgttgccgcagcattagggcatgagcttaccgtccctactgtcggtcaaacagtcatcctcactcgagtttcgggtcgtgcgtcagctatgccacaaggtgaggacctgcctactttaggtaagagcggcgcaactttgtgtatccatctcgcagcgcatgacattgaccgtgtcgtatcagagctgcttcctcagtatggtgagtattgtccagcggctgtggttgcttacgcctctcgtccagaggaggcaattgtccggggaacacttgctgacattgcagaaaagacgcgaagtgctgagattacccgtacagcaattattgtggtcggaaaagtgctcggagctgaaggtttccccgattcattcctatactccaatgaccgacctcgagatgagcatggtaggacgattccatgcgcgcac

SEQ ID NO: 17793 - DNA, 516 bp, Cornyebacterium diptheriae
atgccgcagcgtcccatcgctcagcttcaggcgctcacagactcgaaaaaactgagtgcagcaaaacgtgcagaactatatccgctgataaaaaaatacgcactggcgtggtcgatcattcatatcagtgccgcggaaattgatcgagaaggcatacagcatgccaacattttcggcatgcgacgagctatcgaaaaacttgatgtggctcctggatatgttttaacggatgcgatgaaagtgccggggctacggtgcccctcgcttccgattattggaggtgacgcagcggtgcggtgcattgctgcggcaagtgttctggcaaagcattcgagagatctcatcatggatgatcttggtgggaaatatcccgaatatggtttggaagatcataaaggttatgggacgaagagtcacatggatgcggtgcgccatcacggcgcaactcctgagcatcgatatagttattccaatgtgaaggcagcacacgatcaatggctgcaagaaaagacacaa

SEQ ID NO: 17794 - DNA, 792 bp, Cornyebacterium diptheriae
atggctgaaacagctgctagagttctcaaagtgagttcagctaataacgagactgtgtcccccacggaaggcgtcgaaacgcacgacaaggaaaagaagcaactgccatggtttgtggaaatccctgtcgtcgtagtggtgacccttcttgtgatcaccttgcttcaaacgttcgttggacgggtctatatgatcccaagtcagtcaatggagccgacacttcatggatgtgcagggtgtaccggagaccgaatttatgtagataagctggcttatcgttttggtgaaccagaagccggcgacgttgtagtttttgcaggtacagaatcatggaacaccggatttaccacttcacggtcagaaaatcctctggttcgtggaatacaaaatgcgggtgctttcgtcggattagtagcaccagacgaaaacgaccttgtaaaacgcatcgtagcaacagggggtcaaacggtgcagtgccttgaaggcgatgaaggtgtcaaagtagacggtaaagtcatcgactcgtcatatactctgatgccaccagcgtatccggtcgaccagaccacaggatcagaggcgtgcggcggcttttacttcggacctatcaaggtacctgaaggaaattacttcatgatgggcgataaccggacaaactccgcggattctcgttaccacattggtgatcagtatcaaggcaccatccctaaagaaaacctcaaggggaaagttcagttcaagattttcccatttaaccgtattggtgcagtcgaggattacgatatccaacag

SEQ ID NO: 17795 - DNA, 810 bp, Cornyebacterium diptheriae
ttgcttgccgtctctggcctggctaggtcaacgttttttgatcaccagcgccgccttgacaagccagataagtacgccgacctcaaggaacagattacgacgatctttcacgactccaacgccacgtttggctatcgccgtatctggcgtgcgctgcgcaacaacaacacgatcgtcaacaagaaggtggttcaaaggctcatgcgcgagcaaggattggtatcgaagatcaggcgtaagaagtacaactcctaccgtggcactgtcagccacattgctgacaacgtgcttggccgacgcttcatccaagacgcaccgaacaaagtgtgggttagtgacgtcacagagttccgggtagccggcaccaaggtatacctgtcgccagtcatggatctgtttgaccgaaccatcttggcgcatactctgtctacgtcaccgaatactcagctcacatcacgctcgttggccgatgccattgccatgtttagtccgggtaaaggactgattgtgcacactgaccaaggctttcagtaccaacacgcaagctggcgcaccctgattaaaagcgttggcggtgtgcagtcaatgtcgcgcaaaggcaattgctacgacaacgcggtgatggaaaatttcttcggacacttgaaatcagagatgtactacggcgcgtctttcaccagtgtcgatgagctttgccaagctatcgatgagtacatactgtggtacaacacgtaccgactccaagaacgattcaagggtctggctccgatgcaatatcggaaccagacccttgcaaagaccctaaccgtt

SEQ ID NO: 17796 - DNA, 480 bp, Cornyebacterium diptheriae
atgcatccacgcagtaaactcagtcaggctcagcgtgagctggcagtcgacctattcgaggaaggctacggctcgcgggcagtggctaaccgcctcggtgtcaggcgtgagcaagtacgtcatctcgaagaccggttccggttacatggcagactatgtctggtgagcaaacgaacgaagaggcagtactccttcgacacgaagatggagatccttcgccgccataaagctggcgaattgaaatccgatcttgccaaggaatatggcttgtcgtcgcctgccctgattaaccattgggtatggcaggtcaataaaggtggccctgatgctttacggccgaaacccaaaggcaggcctaaaagctcagctcggcctgcaccggtgacggaagaagataagctgcggcgtgaaaatgagcttcttaaggcggaagtggcgtacctaaaaaaattgagggacttgagggatcaacgacgaggc

SEQ ID NO: 17797 - DNA, 468 bp, Cornyebacterium diptheriae
atgagtaagcttcatatcgtttttgataatccagtaattcctaataacacaggtaatgctattaggacttccgccgtaactggtgcaagtttgcaccttatcgagccgctggggtttaactttgaagacaaaaacctcaaacgcgcaggattggattaccacgacttagccgatgtccatattcattcgaatttcgatgcctgcatgaatgctttaccgcattctagggtctttgctttttcctcccatgcaaccacttggtacaccgatatcgaatataaagatggcgatgtccttctattcggtaccgagccgacagggttaccaactgaacaccttgagcatcctcgaataactcagcaggtaagaatccccatgttaccggcacgtcgttccatgaatctttccaattgtgcatccatcgcgatctacgaagcatggcgacagttgggctttgaaggagcacaa

SEQ ID NO: 17798 - DNA, 480 bp, Cornyebacterium diptheriae; identical to SEQ ID NO: 17796

SEQ ID NO: 17799 - DNA, 609 bp, Cornyebacterium diptheriae
atgcgcgagcaaggattggtatcgaagatcaggcgtaagaagtacaactcctaccgtggcactgtcagccacattgctgacaacgtgcttggccgacgcttcatccaagacgcaccgaacaaagtgtgggttagtgacgtcacagagttccgggtagccggcaccaaggtatacctgtcgccagtcatggatctgtttgaccgaaccatcttggcgcatactctgtctacgtcaccgaatactcagctcacatcacgctcgttggccgatgccattgccatgtttagtccgggtaaaggactgattgtgcacactgaccaaggctttcagtaccaacacgcaagctggcgcaccctgattaaaagcgttggcggtgtgcagtcaatgtcgcgcaaaggcaattgctacgacaacgcggtgatggaaaatttcttcggacacttgaaatcagagatgtactacggcgcgtctttcaccagtgtcgatgagctttgccaagctatcgatgagtacatactgtggtacaacacgtaccgactccaagaacgattcaagggtctggctccgatgcaatatcggaaccagacccttgcaaagaccctaaccgtt

SEQ ID NO: 17800 - DNA, 339 bp, Cornyebacterium diptheriae
atgaaccttcttgacaaggtcgatgcagcttcgctgcgcgacgatatcccagctttccgcccaggtgataccctcaacgttcacgttaaggttatcgagggtagcaagtcccgtatccaggtattcaagggtgtagtcattcgtcgtcagggtgctggcgttcgcgagactttcaccatccgtaaggtttcctttggtatcggtgttgagcgtactttcccagtacacacccctaacatcgacaagatcgaggttgttacccgcggtgacgttcgccgtgcgaagctgtactacctgcgcgacctgcgtggtaaagcagccaagatcaaggaaaagcgc

SEQ ID NO: 17801 - DNA, 2274 bp, Cornyebacterium diptheriae
atgattgcagctaccattgccaaagaacttggtgtgaaacaatcccagattgaaacggcgctgacattgcttgctgagggcaatacggtgccgtttattgctcgctaccgaaaggaagcgacagggggactcgatgattcgcagcttcgtatcatcgaagagcgtgcttcgtatttgcgtgaattagaagaacgcaagcacagtattgcggaagcaattgaggaacaaggcaagctgaccgatgagctgcgtcgcaagatttttgagtgcgataccaaggcgcgactggaagatctctatcttccttacaaaaaacgccgtaaaactaaggctgataacgcacgcgaagctggtcttgaagcactggttgatgagctcatcgcgcatccaagcgctgattccgagcagcgcgctcagccgtatataactgctggtttcgaggactccaagaaggtacttgaaggtgcacgcgccatccttgtcgatcgattcgccacggatgctgatctcgtaggtgatgtgcgtgaacgtatgtactccaccggaaccatgcgtgcgggagtcgtcgccggaaaagaaactgagggggcgaaattcaaagactattttgagttttctgaggcctttgactcgctgccaagtcaccgcattttggcgctgctcaggggtgaaaacgaaggcgttttgcagctcgatctggatgccggagatgatgaaatctatcaaggcatgatcgctgatcgttttaaactagacaccaattctgcatggctggctcaagctattcgctgggggtggcgtactaagctgcaggtttctgctgccttagatgttcgtatgaggttgaaggaaaaagcggaggccggcgctctcgaggtgtttgcgcgaaaccttcgcgacgtcctcctagctgcaccagcaggacagcgtgcgacacttggactcgatcctggctatcgcaatggagtgaaatgtgctgtggtagatgccaccggaaaagtactcgatacggtgatcgtttacccgcatcagccacaaaaccagtggacccaagcagtgcagacgcttgcttctgcatgtgcgacacatcatgttgatctgatggctatcggtaatggcactgcttctcgtgagactgaaaagttggcgcacgaagtagcggatctgttgaaaaaggctgggggagcacgccctacgccggtggttgtttctgaagctggtgcttcggtgtattcagcgtctgaggctgctgcacgggagttcccagatatggatgtttcgcttcgtggcgcagtttctattgcgcgtagacttcaagatcctctggccgagttggtcaagattgatccgaaagcgatcggagtgggtcagtatcagcacgatgtaaaccaaacggctttggcgaagacgcttgatgcagtggttgaagatgcggttaatgcagtaggtgttgatctcaatactgcctcggttcctttgcttgctagggtagcgggtgtcagcccaaccattgcagaaaatattgtccattatcgtgatgaacatggtgcctttgtcaaccgtacagccttgaaaaaggtgccacggttaggtccaaaggcgtttgagcagtgcgcaggattcttgcggatttcaggtggcaaggatccactcgatgcctctgctgttcacccagaggcttatccagttgttcgtaaaatgtccgaagctacggggctttctgtggaaaagttgatcggaaactcccacgttttgtcttcgcttcgtccgtcggattttgctgatgagcgctttggtattccgaccatcactgacattgttgcggagttggataagccgggtcgtgatccacgcccagaatttaagacggcgacttttaaagaaggaatcgaaaatatttcagatcttaaacctggaatggttttggaaggaaccgtgacaaatgttgctgcatttggcgcattcgtagatgtcggagttcatcaagatgggctcgtgcacgtatcggcactgtcagactctttcgtctctgatccccatcagtttgttcattccggtcaagtggtgcgagtcaaggtggttgatgttgacacacaacgcaagcgaatcggattaacaatgaggcttaacgacgaccccgcaaagccgcgccagcgttccgaaactcgggaacgttcgggtgcaaaacagaagcgatcgggtagtaagactaaaaatagccccgctgcaaacggatctcttgcagatgcgttgaaacgtgcaggatttggccat

SEQ ID NO: 17802 - DNA, 876 bp, Cornyebacterium diptheriae
atgagacttgatgtcatcacaattttccctgaatatcttgatccgctaagacacgcacttttagggaaagcgatcgagaaagatttgcttagtgtcggtgttcatgatctgcggttgtgggctgaagatgcgcataagtctgtcgacgattctcccttcggcggtgggccaggaatggtgatgaagccaacggtgtggggaccagcgcttgatgatgtagctaccatgtcgggtaaagcgcacatgggtgcgcaattagattcggcacgcgtgcacgtcgataagcctcgtcatgatgagctagaaggtattcaatttgcaggttatgatgccgcagaggtagcagaagccgataaaccgttgcttttggttcccacgccagctggtgcaccctttactcaagaagatgcacgcgcgtggtctaacgaagagcacattgtttttgcttgtgggcgatacgaaggcatcgatcaacgcgttattgaagatgctaagaaaacctatcgagtacgtgaagtctccatcggcgattatgttctcatcggtggagaagttgccgttcttgtcatcgctgaagccgtagttcgcctcatcccaggtgtccttggaaatactcagtcgcatcaagacgatagcttttccgacggcttgttggaaggcccaagctataccaaacctcgtgaatggcgtggactcgaagtacctgaagtgctcactagcggcaatcatgccaagattgaacggtggaggcgagaacaatccctcaaacgcacgtgggaagtacgcccagaattgctggatggtatggagctggatcgacacgaccaagcctatgtagaaggcctgcggcgaggaaacaccagtgataatctcaac

SEQ ID NO: 17803 - DNA, 498 bp, Cornyebacterium diptheriae
atggaattaatgattggtcgtgtggtgaaatcccatggtattcgtggtgaggttgccattgaggtaactacggaagaaccagagattcggttcgcgcagggtgaagttctcaacgggcggcaaggcgggaaagaacattccctcacaattgcatctgtgcgaccacatcaaaatcgacttctcgtgaaatttaaagaaattgccgatcgtactgctgctgatagcctacggggtacgcgctttttcgcagctccactcgatgacgatgtcgacgatggattctatgaccatgagctagaaggtctagcagttatccacggagaagagaaaattggtgaagtatccggagttatacatgggccagctcaatcacttttagaagtaacccttgaaagtggtaaagaggttcttattccattcgtccacgatatcgttcccgaagttgatcttgacgctggaacgtgtgtgattactccaccggaagggctgctggaactc

SEQ ID NO: 17804 - DNA, 471 bp, Cornyebacterium diptheriae
atggcagttaaaatcaagcttcagcgcttgggtaagatccgtacccctcactaccgtgtagtcgttgcagacgctcgcactcgtcgtgacggtaaggtcatcgagaacattggtatctacgagccaaagcaggatccatctgtcatcaagatcgattctgagcgcgcacagtactggttgggtgttggcgcacagccaaccgagccagttcttgctctgctgaaggtcaccggtgactggcagaagttcaagggtcttgagggtgcagagggcaccttgaaggttgcagagcctaagccatccaagctcgagctgttcaaccaggctcttgcagaggctaacgagggcccaaccgctgaggctatcaccgaaaagaagaagaaagctaaggaagaagctgctgctaaggctgcagctgaggctgaggctgctgcaaaggctgaggaagctccagctgaagaggctgctgag

SEQ ID NO: 17805 - DNA, 1595 bp, Cornyebacterium diptheriae
gttagcataggtacgttaaaagataatgggtctgggtgttgctgcgctgcatcgccgatctccacgtgtcatatggttgctggagaaataaagttttagaggagagtacgtctcgtgtttgaatccctatctgaccggctcggcaatgccctttctgggttgcgttctaagggcaaggttactgaggctgacatcaataccgttgcccgagagatccgccttgcgttgctcgaagccgatgtttcattaccagtcgttcgtggatttatctcgaggataaaagatcgtgcgttaggcgttgaagtctccaaagcgcttaatccagcagagcaagttatcaagattgttgatgaagagctaacgggaattcttggtggcgaaacacgacgattgaacctagcgaagaacccgccaacggtgatcatgttggctggtttgcagggtgctggtaagaccactctcgcaggtaaattggctaagcacctggtggagcaggggcatactccgatgctggttgcttgcgacttgcaacgccccggcgctgttcagcagctgacgatcgttggtgagcgagcaggtgttcctacctttgcaccggatccaggtacctctatcgattccagtgatcatgaaatgggtacgtcccatggtgacccagtagcagtggcacaacagggtatcgcagaagccaagcgtacccaacatgatattgtcatcgtcgatacagctggtcgcttgggcatcgacgaagccttgatgacgcaggctcgcaacattcgtgatgctattaatccggatgaagttctgtttgtcatcgacgcgatgattggtcaagatgcagttaatactgcagaagctttccgcgatggcgtggatttcactggtgttgttttgaccaagcttgatggtgatgcccgcggtggtgcagcgctatctattcgagaagtcaccggcaaaccgatcatgtttgcctctaccggtgaaaagcttgaagacttcgacattttccacccagagcgtatgtctagccgaattctcggcatgggcgatatgttgacgctgatcgaacaagcagaaaagaaactcgatcagcaacaagcactggaaactgcacaaaagctcggtactggcgaacttactctcgacgatttcttgaaccagatgctcatggtgcgtcgaatggggccactaggcaacattttgaagatgctgcctggtggaaaagctatgtcggacatggcggatatggttgatgagaagcagctcgaccgtattcaggcgatcattcgcggcatgactccagctgagcgcaacgatccaaagatcttgaacgcttctcgacgcaagcgtattgctcttggttcaggagtttcggtagccgaagttaatcagcttgtagagcgcttctttgaagcgaagaagatgatgaacaaaatggctggccagttcggcatgggtggtggatcgcgtagtgctaccaagaagaagcccaaaggtcgaaaaggtaaaaacggtaaacgtaagcctgctaagaatcgcagtggcggaatgccgaatatgggcggtatgccgggtatgccgaacatggcggaatt

SEQ ID NO: 17806 - DNA, 1875 bp, Cornyebacterium diptheriae
atgatttctgccgaacctacggcagcattggcattactagatatttctcattgcagcggagatccacagttaacggcgacaacccgctgcgtcgtgctagagcaatggcgtcgggaactgaagaaaaatttcaacgatgtgactgatactgcgattgctcggtggaatcgttctggatccgttgtggacatgacccaccctgatctcaagcatgggcggggtgggctacgagatattgagctgatcagagcattagctctaggaaacctttgtgacaaacgtcctcttggtgaggaacgccaactattgctcaacatacgtacaatgcttcatcaacatgcgggcagggcacgtgatgtgctcgatccagaatttgctgttgacgtcgctttggacttgggatgtgaagaccgatacgacttatcgagaagcttggcaaaagctgcacgcactatcgatgatgccactaatgccgcattgtctacagcgcgcaatctgctcccgcggcgaagtagcgtacgaaaagcagtacgtcgaccagttgatattgatgttgtcgaagttgacgggactcttgcgttgtcgagaaccccaaatctggaggatcccagcttagtgcttagagttgctgcagcaagcgcgcgaacaggtatgacgatttcggaatcagcatggaaacaactcgaaactgttcctagcatgccacctacatggccgagtgctgctgctagcaacttttttgcattgcttagttcttcggtacatagtcaacgagttatccgagaactagacgagcatggattttggtcagcaatgatcccacaatgggagcatattaggggacgtatgccacgtgaatccgtgcatattcacactattgatgttcatagcatggtggtaacagccaactgtgcgacgcaaagtattcgagttgcgcgtcctgatctgttattccttgcagccttattccacgatattggcaaggggtatgggcgtcgtcatgaagaggtcggcgcagaatttgtcgtcgatatggctacaacgttgcggctcaacccttctgatactcaaatcgtagagacacttgtcgcacagcacaccataattccgcacattgttggacgctataacccaacaagcacggaggcgatagacaaacttcttgatgcggtcaactatgacctgttgactcttgatctgctagaggcactagttgaggcggatgcccaggggactgcccctggggtgtggagcgcagtactgcgatacggcacacgagagctgtgcgcgcaggcgcggcaacgtcttaccgctatcgtccctaatccaccttcgctgagtgctgtctcgccactgtccttaacagttgttaaagacaccttgccaacagggaagaactatgcggcagaagtggaatggtctggtgactatgtcagggagatagtgcgcgtcctagcattgatagctgctaaggaatggaacattgaatccgcagaaattgtcgtggtgtcttcggatgatgaaccagcatctgaaaacggctcggtgggagtttcagcgcgtatgagggtatataaccgactcggcacgcgtttcgactctgcggaatttgagcaggcgtacaagtcaggcgtgcactcgtccttaccaccgttggatcgtggcaaatgcgcgagtttctgggtcggtaatatcttggaagtgcgcacgacagatcgtcgagctgcactaggccacttattgggagtgctacctgaccttaagtgggcgcggatgtctaatccaggcgccacgatgattgtgcaatgcgagctgaaagatggctttgatcgctccaaagttgagcgtgatgtgacccgcgtgctcaccaacggt

SEQ ID NO: 17807 - DNA, 843 bp, Cornyebacterium diptheriae
atgctaaaaattgctatcccaaataaaggttctttgtctgaggctgcagtagagattctcgctgaggcgggttatgccggccgaggcgaatctaagactctcaatgtttatgacaaaacaaatgacgtagaattctttttccttcgtcctaaagacatcgccatttatgtcgctggaggacaactagacctcggcatcactggtcgagatcttgctacggattcccatgcaaacgttgaagaagtgatgagtctcggatttggcaattcatcctttagatatgcggctcctgcagatcaaaaatggactgttgaaatgctcgaaggcaagcgcattgcaacctcataccccaatttagttcgagatgatttgcaagcgcgtggtattaacgcaactgtcattcggcttgatggtgctgtagaaatctcgattaaacttggcgtagctgacgccatcgctgacgtagtttcaacgggccggacattacgcaaacaaggtctcgcaactttcggtgaagtgatttgccaatccgaagctgtcattgtcggccaacaaggtaatgtggttgacaacgagcaaaaggttttccttcgtcgcatcgaaggaatcctacacgcccagaattacctcatgcttgattacaacatcgatcgagtaaacctcgccgcttctgaaaaaatcacaccaggtatttcgggtccaaccgtctcacctctggcccgcgaaaactgggtagcagtgcgtgcaatggtgccgcgtaaagaagccaaccacatcatggaccagctttctgagctaggtgctcaagcaattttggcttctgagattcgtattgcacgcttg

SEQ ID NO: 17808 - DNA, 1548 bp, Cornyebacterium diptheriae
atgaacctcatcccgatagtcgtcattattgccgtggttgtgattttcgccgttgttattggcgtgatcattgcccagcgaaataaaaaagcgaagaccgtaagcttcgaatccgccgcagattcagagcagaaacaacttacgcaacagcagcgatctggaaactaccaagcacaaggagagttttcgttcgcgcccgcgcaggcgcctatggctgttaaagatgcagtccctgctacgccgcccgtgggctcgattcaggaacctgagttgccgcatgaagaagctcccattgtggattccgagcaacctttagatcaccaagtggaatctgaatctgatgcagacaaagcagcagaagaagctcaagcagttgtagaagaggctgctcagctgcgtgaggaagaacagcttcgcgtagaaactgagcaagctgctcgcgataatttcgatgcactcgaagaatttgacaagcctcaacctgatacgaacaacgctgcagagactgaggctcaagaggctgctctggctgctgacgtagtagctgaggctgcagctgaggcgcgtgaagtatcagaaccatcggatgtagaagaggcaccggttgccgaggctgtcacggattccattgatccagcagttggtcgaattggacgtttgcgtgggcgcctcgcgcgttcccataacgtgttcggtaagtctgtcttgggaatgctatcggctggcgacttggatgaagaggcttgggaagatatcgaagccttgttgattcaggcggatcttggcgttggaatcaccacggctgttattgatcagctacgtcagctgatcgcggaacgcggtgtagaaaacgaggcacaagcccgcgctatgctacgcgaatgcctcattaatgcgtgcaagcctgaactcgatagatctattaaagcgatgccttacgacggcaaacccgccgttgtattggttgtaggagtaaatggcactggtaagaccacgacgaccggaaaacttgcccgtgtattagtgtcattggggcactcggtggtgctgggcgcagctgatactttccgtgctgcagccgcagatcagttggagacgtggggacgtcgcgtaaatgcgcatactgtccgtggtgctgaaggcgcggatccagcatcggttgcgtttgatgccgtggcttatggcgtagattctcatgctgatgtcgttcttattgataccgccggacgcttgcacaattcttccaacttaatggatcagctgggcaaggttaagcgcgtggtggaaaagaaggctgttgtcgatgaggttcttttagttcttgatgctacgacgggccaaaatggtctggctcaggcacggacgttctctgaggtagtcaatatcaccggtgtggtattgaccaagctagatggtacggcgaagggcggaattgttttccaggtccaagaagaattaggtgtaccagtgaaattggttggtttaggagaaggctctgatgatctagcgcctttcgaggtcgaagggttcgtcgacgctttactaggc

SEQ ID NO: 17809 - DNA, 3600 bp, Cornyebacterium diptheriae
atgaatactgccacgccccaatttaaaactgcatttctcgacgctatgaaaaatcgcgttctgatcggtgatggagcaatgggtacccagctccaaggattcgatcttgacgtcgattccgattttctaggtctcgagggctgtaacgaaattcttaaccacactcggccagatgttgtttctgcaatccaccgtgcctattttgaagcgggcgccgacttggttgaaacgaatacttttggttgtaacctacccaatttggccgattatgacattgcagatcgatgcaaggaactcgcattcaaaggtgtgaaaatcgcccgagaagttgcggatgaactgggacccagtgctgatggcacaccacgcttcgttctaggttcaatgggacctggaacgaagttgccttcgcttggacacgcaccttatgaagcgttgaaaaatcactacaccgaagcctcacttggcatgatcgaaggcggcgccgatgcgattttggtcgaaactgcccaagatttgcttcaggtaaaagcagctgtacatggttgccaaactgcatttgaaacttctggcattcagcttcccattgtttgtcacgttacggttgaaactactggcaccatgctcctaggttccgaaatcggtgctgcacttacggcaattgagccactcaatgtggacatgattggtcttaactgtgctactggcccagacgaaatgagcgagcaccttcgatacttgtctcgcaatgctcacattccggtttcggtcatgcccaatgccggtttgcccgtcctcggtaaaaatggtgctgaatacccactaactgaacaagagctcgcaagcgcactgagaggatttgttgaagaatacgggctcagcatggtgggaggctgctgtggtacaacgcctactcatattcgtgaagtacgtaaggctgtacttggcgatagcgagcatcaaccggcacttcaggctgagagaaatcccgatgtcggagatgcagtatcgagtctctacaccagtgtgaatctcacacaagatactggcatcaccatgattggtgagcgaacgaatgccaatggttctaaagctttccgcgaggccatgcttgtaggtgatcttgaaaaatgtgtggatattgctaagcaacaaactcgcgatggcgcccacatgcttgatttatgcgttgattatgtgggccgtgacggcacagccgatatggcccagctggcttcactgctagcaaccagctcgacacttcccatcatgattgattccactgagccggatgtaatccaagtaggactcgaacatttaggtggtcgatgcgcagtaaactctgtgaactttgaagacggcgatggcccagattctcgctatcaacgcattatgcgattagtcaaacgccatggagctgctgtcgtcgctctcaccatcgatgaagaaggccaagctcgcactgccgaaaagaaaattgaaattgccgaacggctcatagcggacattacgtcgacatggggattagacgaaagcgacattatcgtcgatacgcttactttcccgatttcaaccggccaagaagaaacgcgtcgagacggtatcgaaactatcgaggcaattcgtgagcttaaaaagcgtcatcccaaaattcacaccaccttgggcctatctaacatctcttttggactgaacccagctgcacgtcaggttctcaattccgtatttttgaacgagtgcattgaagcaggactagattcggctattgcacattcgtcaaagattgttcctatgaatcgtatcgatgaggaacagcgacgggttgctctcgacctggtgtacgaccgaaggtctgaaggctatgacccgcttcaaactttcatgcgcctatttgaaggtgtatctgcagcaagtgcgagcgatgcccgcgcagaagcattagcagctatgccgttattcaagcgaatcgctcaacgtattattgatggcgaaaaggccggtttcgaggatgacctcgatgcaggtatgaaagaaaaagaaccgctccaaattatcaacgaggatctcctagaggggatgaaaaccgttggtgatctctttggatcaggccaaatgcaattgcccttcgtcttgcaatctgccgagacgatgaagcatgcagtggcttatctcgagcagttcatagaagcggatgaagatgccggcgacggtaacggaacaattgtcatcgcaacagtgaaaggtgacgtccacgacattggaaagaaccttgtcgacattattctttcaaataatggattcaatgttgtcaacattggtatcaagcaacctattgcaaacatcctagaggctgcagaaaaacacaaagcagatgctatcggcatgtctgggctattggtaaaatctaccgtgatcatgaaggaaaaccttcaagaaatgaaccaggcacaaaaatctgactatccagtcattcttggtggtgcagcgcttacgcgagcctatgtagaagatgacctcaccgaggtgtacgaaggtaatgttcactatgcaaaagatgcatttgaatcacttcgcctaatgcaagaatttatggctgaagctaggggagagcgtctcgatccacagtcgccagaagctcttgcggccgccaagaaaaaagctgagagaaaagctcgtcgagaacgttcaaagcaaattgtcgcgcaacgcaaagcaaaggaaattcctatcgaggttccggaacgatccgaagttgcagctgacgtgccaattgccacacctcctttctggggaacacgaattgttaaaggcatcaatttatccgaatacctgccgcttctcgacgaacgcgcgctgtttgtgggtcgttggggcttaaaagcgactcgcggcggagagggcccaagttatgaagaacttgtagaaactgaaggtcgaccacggctgcggtactggattgatagactcaaagctgaaaaaatacttgaccacgccgctgtcgtgtacggatatttcccagcagtttccgaaggcgatacggtcattcttcttgaatcaccagaccctacttctgcagaggtagcacgatttaattttcctcgacaacagcgtggaaagttcctttgtgtagctgacttcattagatcccgtgagcacgcaatcaagaccaagacggtagacgtattcccgctgcaattggtaactatgggacaaccgattgcagactttgccaatgtcctttttgctgataataattaccgagactatctcgaagtacatggtatcggtgtgcaacttacagaagcacttgcggagtattggcatgcccgtatccgccacgaattgtcactttccgatggatctcatgcaggtgacgaagattccgctgatctgcaggaattctttaatcttaaataccgaggtgctcgttattcctttggttatggttcctgcccaaatctcgaagatcgcgaaaccttggtagatttgcttgactcacgtcggattggcgtagatatttcagaagagtttcaactgcaccctgagcaatcaacagatgcatttgtgttgtatcacccagaagcaaaatacttcaatgtg

SEQ ID NO: 17810 - DNA, 3483 bp, Cornyebacterium diptheriae
gtgtatttaaagtcgctgacgcttaagggattcaaatcgtttgcgtctgccaccacgctaaaattcgaacccggaatctgtgcagttgttggccctaatggttccggaaaatcgaacgttgtggatgcgctctcgtgggtgatgggggaacaaggagctaagaacctgcgcggcggcaaaatggaagatgtgatctttgctggggcaggagatcgcaagccgctaggtcgtgccgaagtaactttgacgatcgataattctgatggtgctttgcctatcgagtacaccgaggtatcagtaactcgccgaatgtttcgagatggtggcggcgagtatgaaattaatgggcataaagcgcgtctgatggatatccaggagcttttgtccgattccggcataggccgtgaaatgcatgtgatcgttggtcaggggcgactatctcaaattttggaatcgcggcctgaagatcgccgagcttttattgaagaagctgctggtgtgctgaaacatcgacgacgaaaagaaaaagctcagcgcaagttggtaggaatgcaggcgaatctcgatcgtcttagtgacctcacagcagaacttggtaagcagctcaagcccttggctcggcaggctgaggcagcacgcaaggccgcaaccatccaatctgaagtccgcgatgctcgattgcgcattgctggttatcagattcattcgttagcgagctcgttaaaagacgcgcagtcgcatcatgattccattgcggaaaaacttgaggaagtcacggaacaattagaagaagcaacaggtgtacaacttgaggcggaagatgctttggggaagattagtcctgaggcggaaaaatcccagcagttgtggtttgaactgtcctcattagctgagcgggtttctgctacacaaaggattgctacggatcgtgcgaaaaacttttcagaagtacggtattcgggtccggatccagatgagttggcagaaaaagctgcacgcgctgatgccgaatatgcagaagcagaagaaaccgtagacattctgagcgaacggttggaatcgatccaagacaatgttgctgagcttgaggagcaagcacagcgtgcggatcgagagcatttggcccaggttcgtgctattgctgatcgccgcgaaggaattgttcggctcctaactcttgaaagtcagcagcgggagcacattgttgctgctgaagcagagctagagcggttgcgtgaagcggaatccgatatagctgctcaagctcggagcaaggacgcagagcacaaagactgtcaaacgcaggcgcaagaagcacgttcacgcattgaaccattatcgcagtcacgtgatgctgctctgaatgaatctcgtgccgcagatagtcgattggaacagctacgagaacaacaaagcgacatcgataaatcgatatcgcggttggagtccaagattgagacgctcgagtcgcatcggatgactcgaaatgcggtcaaacaatgggaaaagctgcaaagtttctatggggtcgaccgctacattattcctcagcgcggcatggaaaaagcaattgcggccgcgttggggccggttgctgaggcgctagtaggagaaactacaacagctgaactacaagcacttgatattgaatcactggcgcgtcacatagttattactccaggcgaagaccatgattggcgactcgctacggatttgcctcattacgcctcgtggctgctggattatgttgaattagctccagaggtaagttcaacgatcgttcaaattttggcagatgtggtgctcgtagattcctatgaacacggacgtgaagtggtcaaccacgatccgcggttgcgtgctgtgtgtgtagacggaacgatgtggggccatggctgggttgccgttgggtctgcagagcgatctgctgtcgagattgctgctgaaatcgaccaagctgaaaaggatttagaagtagctcgcctgcaacgggtggagcttgctggcacgctcaacggtgcacatcaggctgctgatgaggcacgcgtgcggtccgctcaggctcaagcagtgtgccgcgaacaagaaattgtcgttgaaaacttttctcggcgagtagaagctgtctcgcatgaggcagaagctaggaaacaggaacttcgtcggcacgcgttgcgggtccaggaagcccaagaccggttgaaccaactacgacagctgtgggaagagacttctgatcgattgtcgcgagtagaagaagataactcagaagaggaaccttcaaccagcgaacgtgataaagccgcagctgcgttatctcatatgcgatctatggaagtagaggctcggttgagcctacgtactgcacaagacaaagccgaacatatccgaggacgcggtgatgggcttcgtcgtcaagcagaatatgagcgtcaggcgagggcacgtcatgatcaagctgtggcgcggcagcgtcgaaaagcggaaattgcgagcgtggtggcgcagcaatgcctcgtggtagctgagcgtgtcgacgatgctcttgctcgtgcaactcagtggaaagaaaatgcgatcgcacaacgtggagtcatctctgctcgagtgtctgcggcgaaagatacagtttccgcgcttcgaacgaatgcgaatcgtttaacggagaaatctcatgccgcggagttgtcattaggacaagcgcaggtacgccttgaagaagctcacgagaaaattgttgagcaattaggcattgcgatttcagatctcatgcgtgattacacacctcatgaaggctttgatattggagcacaacgagtgcgcctgaaaaatgcggaaaaagatctcaatgccttaggaaaagtcaatccgttggcgctcgaagaattcaaggcactagaagagcgctatgaattcctgtctacgcagttagctgacgtggaacaagcacgacgtgatcttcatggcgttatcaacgacgtagacaccaaaattctgcaactttttaccgacgcttggaaagacgtagaagccgagtttcctcaggtatttgccaccttattcccaggtggtgagggacgccttgtgctcaccgaaccacacgatatgttaacgactggtatcgaggtggaagctcgacctcctgggaaacgagtcaagcgcctgtcgttgctttcaggcggcgagaagtcgttgactgcactggcgatgttggttgccatcttccgtgcgcgtccatctccgttctatgtgatggatgaagtcgaggcggcgcttgacgacgtcaacctgcgtcgactcattgcactgttccaagaactacgtgatgactcacagctgattgttattacacaccagaagccgacaatggatgtagcaaatgttttgtatggtgtgaccatgcgtggtgacggtattacgcgggtaatttcgcagcgaatgacaccagacgtcaccaagcttcctgagcctcaacccgcagag

SEQ ID NO: 17811 - DNA, 888 bp, Cornyebacterium diptheriae
atgcctgagcttcctgaagttgaggttgtacgtcgcgggctaacaccttatgtgcttggcgcaactatcactgatgttgccgttgagcacccccgcagcattaggacaatcgaaggcggggccgccgaactcatagggtcgctacaaggtcgtgaggtcacgcgcataggtcgccgtggcaaatttttgtggtttgagctcacaggccatggtgattatgcatgcggatttcctcagcaagggctactggttcatttgggaatgagcggtcaaatgctgataaaaactcaaaactcggctctgcatcctcatcgtagaattcgtaccacgattgttcgctcagatgctcaggaatgcttcgagctttggtttgtcgatcagcgcacttttggctattgggcacccaccacatttgtagaaactgctcacggttgcgttccagaacagatcactcacatagcgcgtgatcttttggaccctcaactcaaaagagaaaatctagcgcgattgatccgcaagaaaaatagtgagattaaaagagttctgcttaaccaagaaattgtctctggaataggcaatatttacgccgatgagatgttgtgggctgcacgaatccatccacaaactcctgcgtcgcatttgtctgtcgcacaattaagtaatttgctcgaacacggtcagcgagtcatgaacgcggctttagaccaaggtggaactagcttcgattctctttatgttaacgtcaatggccaatcggggtattttgatgtatcgcttcatgcatacggccagcaaggccaagcgtgcgatcgctgtggttcgaatattatccgcgaaaagtttgctaaccgctcgagtcatttttgcccacgttgtcagcttatgcac

SEQ ID NO: 17812 - DNA, 1485 bp, Cornyebacterium diptheriae
ttgccgccgttgatcggtttccttgctgctgggtttatcatgagcgcgcttggtttagaacagattccctttattgattacatcgctgagctgggcgtgaccacgcttctttttacgatcggtttaaaactaaatccgcatgatattgccagtcctcgcgttgtaggtacggccaccgcacatgcagtggtgaacaccatcgtgttcgccggtttgtttgcactttttgcgattgtgggttggaccggtttgttatatatcggcattgcggcgtcgttttcctccacagtatttgtgatgtcgcagttggaagtacatagccgcagtggctcggcggtggggcgtatttccattggtgtgttggttctgcaagacatcattgcggtgggtgttcttgtggtgtctgctggtaccaccccgcagttgtgggcactgtttttgcctttgattttgtgcttgcgcccgttggttacgcggatgccggatcgaatgtttcgtactgaactgctcgtgctcacaggcgtggggattgctgtgggcgcctattcattcttcgagcttgcaggtgtttctggttcccttggttctttggtcgcgggcatagttttgtcgggacatcctgtttcacagcgtttgtctcatgcgctcattagcgtgcgcgagttgttactcgtggccttctttattcatattgggctcggcgggattcctaatgctgcaggtcttggcatcgccgcgattttggtggctttcctcgcggtaaaagccgcagttttctttgcgattttgccactgatggggatgggggtgcgtacgacgatcctagcaggtctgaccttggctaattattcagagttcgggttgattgttaccgcagtggcggtatcacatggtgcgttgccagatcaatggttgcccatcatggcgatcgcggtgggcgcaagctttattgttggctcgatcgtcagcgcccaggaagaaaaacttgtgcgcatcttggctcgttttgtgcccaaggtatctgagcatagaaaagcccccaacgaacgccctgttattgtcgctggcgccgacgccattgtgttaggcatgggacgtgtgggggttggggtttatgatcgcttgaccgaagaatacggaatgcatgtctacggcatcgagttcgacgaagaccgtattattgagctccgcgacaggggctaccgtatcgttgccggtgatgtgaccgacccggaactgtggcggcgtatcgaattgctggatattccccaactttttgcgatgtcgctgccacgctataccgacagcgacaaggttcttgcacgcatccaccacgattatccaggggcaacagttgccaccattacccaaacgcgaggtagggaacaagcgctattaactgctggtgccgacgtcgccgtgtacctctatgaaggagtaggcgacgaattggcagaccaagccgttgctcacttacgccaagga

SEQ ID NO: 17813 - DNA, 936 bp, Cornyebacterium diptheriae
atgacccgaaaaattattctcgactgcgacccaggacacgacgacgccgtagccatgctactcgccgcagcaaaccccaacatcgaactgctgggaatcaccaccatcggcggcaaccaaaccctgcccaaagtcacccacaatgcgcaggttgttgccacgatcgcaggaatcaccgcacctatccatgcaggttgttcccgcccactcgtgcgtgacgtcgaggtcgccgagagcatccacggcgatactggaatggaaatccacaactacacgctgccagagccagcagtaggagtatctgatacccacgccgtggactttattatcgacaccatcatgtcccacgagccaggaactgtcacccttgttcctaccggcccgcttaccaacattgctatggcggcgcgcaaagagccccgcattgtcgaacgagtccaagaagtcgtgctcatgggcggcggataccacgtaggtaactggtcccctgttgcagaattcaacatcaagatcgaccccgaagcagcgcacatcgttttcaacgaaaaatggccactgaccatggtgggcctcgaccttactcaccaagcgcttgcaaccccagaagtagaagcacgcctgagcgcaatcggctccgacgttgccgactttgtagtcgcactcttcggcgcattccgtaagaactaccaagacgcacaaggctttgataacccaccagtccacgacccgtgcgcagtggcctacgtgatcgacccgacggtatttactacggtcaaggtacctatcgacgtcgagctgaccggggcactgaccaccggcatgaccgtcgcggacttccgcgcaccagcacctgccgactgccacactcaagcagctgtcgccctcgactttgacaagttctggggtttggttgaaagcgctgtcaaagaactaagc

SEQ ID NO: 17814 - DNA, 1344 bp, Cornyebacterium diptheriae
atgtcgcctatcgatgagaaggtacagggctactacgagctgcttttgaagcgaaaccctgcggagccggaattccaccaggcagttaacgaagtccttgactctctgaaaattgttttggaaaaggatcctcactacgcggactacggcttgattcagcgcttgtgtgagcctgagcgccagcttatgttccgcgttccatgggtagatgacaacggagttgtccaggttaaccgtggtttccgcgttcaatttaactcggccatcggtccttataagggcggcctgcgtttccacccatccgttaacttgggcatcatcaagttcttaggctttgagcagatctttaagaactctttgaccggtcttcctatcggcggtggcaagggtggttccgacttcgaccctaagggtaagtctgatgtagaaattatgcgcttctgccagtccttcatgacagagctttaccgccacatcggcgagtaccgtgacgttcctgctggcgacatcggagttggcggccgtgagattggttatttattcggtcagtatcgtcgactagcaaaccagcatgagtccggtgttttgaccggtaagggtcttacctggggcggatccttggtccgtaccgaggctaccggttatggattggtgtacttcactgctgagatgcttgctcatcacggccagtccttcgaaggtaagaaggttattgtttccggttccggcaacgtggcaatttacgccatcgagaaagctcaggaactgggcgcaaccgtgattggtttctctgattcttctgcttgggttgaaactcctaacggtgtggatgttgccaaactcaaggagatcaaggaagtccgtcgtgagcgtgtatcgagctatgtcgacgaagttgaaggcgcaatcctgcacactgagggctcgatttgggatctcacctgtgatgttgctcttccatgtgccacccaaaacgagcttgatggcgagcatgccaagaaactagctgacaatggctgtgccttcgttgcagagggtgccaacatgccatcgactgctgatgctatcgaggtctaccgcgagcgtggaatccactttggtccaggtaaggctgctaacgctggcggcgtggcaacctcagcactggagatgcagcagaacgcatctcgtgattcgtggagcttcgagtatgcagatcagcgccttcgcgagatcatgaagggtatcttcaagaactgtgagtctactgctcgcgaatatggtcatgagggcgactacgtagtaggtgccaacattgcaggcttcaagaaggtcgcagatgcgatgcttgcacaaggtgtcatc

SEQ ID NO: 17815 - DNA, 1419 bp, Cornyebacterium diptheriae
atggaacgtcgaactaagattgtttgtacattagggccggcagtcgcttcccgtgagggaattcttggactggttaaagccggcatgaatgtcgcacgtatgaatatgtcacacggcgaccacgcagatcatgagaagaattaccagtgggtccgcgaagctacggatgaaaccggacgcgctgttggtattcttgccgatctgcaggggccaaagattcgtctcggtcgctttatcgatggcgcaacggtgtgggagaacggtgaaatcgttcgtatcactgttgatgacattgaaggtacacacgaccgtgtgtctaccacctacaagaacctcgctaaagatgcgaagcctggcgatcgtcttttggtcgacgacggcaaggttgcattgcgctgtgttgaagtagatggaaacgatgttgtttgtgaggttgtagaaggcggcccagtctctaacaacaagggtgtttcccttcctggaatggatatttccgttccagctttgtctgaaaaagacattgctgatttgcgcttcgctctcaatctcggtgttgacattattgcgttgtccttcgtccgctccccagcagacgtggaacttgttcatgccatcatggatgaagaaggtcgccgttgcccagtgatcgcaaagcttgagaagccagaagccatggacgctttggagtccatcgtattggctttcgacggcatcatgattgctcgtggtgacttgggtgttgagtgcccgttggagcaggtgccgctgttccagaagcgtgccatccagattgctcgtgaaaacgctaagcctgtgattgtggcaacccagatgctcgattccatgatcgagaacctacgcccaacccgtgctgaggcttctgacgtagctaacgctgttcttgacggtgcagatgccgttatgctgtccggtgagacttcggtcggtatcgatccagctaacgttgtccgtactatgtcacgtatcgtttcctacgctgagattgatggccgggtaccaaacttggctcatattccacgcaccaagcgtggcgtgatttcctactctgcacgcgacattgcagagcgtttgaatgcaaaggcacttgtagcattcacctcttcaggtgataccgcaaagcgtgttgctcgtttgcactcgcagctgccgctattggtctttacccctcaccaagaagtccgctctcagttggctttgacttggggtgtagaaaccttccttaccgacgaggttaaggacacagacgagatgatgcgtacgatcgatgagcagttgcttgctctcgatacctacagcgaagatgacatgatcgtgctcgtagccggaacccctccaggagtccaaggcaataccaacatgatccatgtacaccacctaggtgaggacctcaacggtcta

SEQ ID NO: 17816 - DNA, 261 bp, Cornyebacterium diptheriae
atggcaaacatcaagtcccagaagaagcgcattctcaccaacgagaaggctcgtcagcgtaaccaggctatccgctctgcagttcgcaccgagatccgcaagttccgtgcagctgttgctgccggcgacaaagctgctgctgaggctcagctgcgcgttgcttcccgtgctctggacaagtccgtgaccaagggcgtcttccaccgcaacaatgcggctaacaagaagtccaacatggcccacgctctgaacaagatggcc

SEQ ID NO: 17817 - DNA, 1284 bp, Cornyebacterium diptheriae
atgaataacgccgatgtacggtcccaagaacgcaagcaggtcatggtatgtgcacgtgccgcccatcgtgtagcgccgattgttgcccaattgaccagcgctgataaaaatgcggtgcttctcgatgccgctgcggcgttagaggccgcaggcgctgagattattgccgcgaaccagcgtgatattgaccaagggcgcgcgcgtgggctaagcgaggcattgatcgaccgcttgagccttgatagcgcccgcattgcaggtattgctggtggtttgcgccaggtggcagcgctgagtgatcccgtgggggaggttgtaggcggcagcgtcatgcccaatggtatgcagatgcgtaaggtgcgtgtcccgcttggcgtgatgggcatggtctatgaggcccgcccgaatgtgacgatcgacgcttttggcttagcactgaagtccggtaacgtggcgttgctgcgtggttcgaagtcggcgcagcattcgaatgcggcgttggttgcggttgtgcatcgtgtgcttgaaagccatggattaccgcatgaagtggttcagttgctgccttgtgagacacatgaaagtgtccaggatttgattacggcacgcgggcttgtcgacgtcgtcatcccgcgcggcggtgccggcctgatcgaagccgtggtgaccaatgcgacggttcccaccattgaaacgggcactggaaactgccatttctatattgatcgggatgtcagcgacttagatcaagcgatcgccatgttgcttaacggtaagacgcgtcgctgttctgtgtgtaatgcgactgaaacggtactgatcgattccgcgttggattccgcatatcagttggcgattatcaccgccttgcaagaagctggtgttactgtgcatggcgatgtagctcagctagaagccgtgggggcgtcgggaatcgttcctgccgacgagcacgattgggcagaggaatacttgtcgcttgatattgcgtgtgcgctggttgatggtgtggatgccgcgatggagcatattcgcacctatagcaccaagcacactgaggcgatcgctaccggcaacattgtgactgctcagcgctttgcagatcgtgtggatgcggcagcggtgatgattaatgcgtcgacagcgtttaccgatggcgagcagtttggtatgggtgcagaaatcggaatttctacccaaaagctgcatgcccgcggcccgatggcgttgccggagctgaccaccacgaagtggattgtccagggcacgggtcaaacacgtccg

SEQ ID NO: 17818 - DNA, 1524 bp, Cornyebacterium diptheriae
atggcacgtttcgtagaccgcgtggtcctacaccttgaagcaggcgacggcggcaacggctgtgcttctgtgcaccgcgagaagttcaagcccctcggtggcccagatggtggcaatggcggacacggcggcgatattatcctcaccgtctccccacaagcacataccctcctcgatctgcattaccgcccacacctgaaagcccagcgtggcgccaacggtgccggcgatcaccgcaacggtgctcgcggccaagacctcgtgctggaggtccccgctggcaccgtcgtcatgagcgaatcaggtgagacgctagcagacctcacatcccctggcatgaccttcatcgcagccaagggcggctttggtggcttgggcaacgctgcgctggcctccgctgcccgtaaggcgccaggctttgctctcaaaggtgaacccggcgaacaacacgacgtgatcctcgagctgaagtccatggcagacatcggtttggtgggattccccagtgcgggtaagtcctcgctgatttctgtgatgtctgcggctaaaccaaagatcggcgattacccattcaccactttgcaaccaaacctcggcgtggtggacatgggcaatgatgcctttaccatcgcagacgtgccaggtcttatccctggtgcttctcagggtaagggcctcggcctcgacttcctgcgtcatatcgagcgcaccgctgtgctcgcccatgtggtagacgctgcaacccttgagcctggccgcgaccccatttccgatattgaggcgctcgaggaagaactcgcagcgtatcagtcggcgttggatgaagacaccagccttggtgatctgcgtgaacgcgcccgtatcgttattttgaataaggctgatatccccgatgcgctcgagcttgcagagttcctcaaagaagacattgaggagaagttcggctggccggtgtttatcatctctgcggttgcccgcaaaggccttgatccactgaaatacgcgatgctggatttggtgcagcaatctcgcaagaagcgcccgaagcaaaaagtggaagagcgtatcgtggtccgcccgcaggctgtggatgcccgcaagaagaacaaagactttgagatcctggcggatccacaggtcgaaaacggctacctcgttgttggtgagaagccggagcgctggatcatccaaaccgacttcgaaaacgacgaagccgtaggctacctagcggaccgcctcgcacgcatgggtgtggaggatgctttgtggaagaagggggcacgcgcaggctgcaccgtgaccattggcgaggtgtctttcgaatgggagccaaccaccgctgctggtgtagaggtccaaatgtctggccgtggtaccgatatgcgccttgaacgcaatacgcgtgtctcggcacaagagcgtaagcgagcgtctcaggttcgccgtggtcttatcgacgaatacgatttcggtgatgaccagaaggtcacccgcgaatccgcaaaccgcgatcgctggcaaggc

SEQ ID NO: 17819 - DNA, 264 bp, Cornyebacterium diptheriae
atggcacacaagaagggtgcatcaagctccagcaacggtcgtgactctgaggcaaagcgccttggtgttaagcgattcggtggccagcaggtcaacgccggcgagatcctcgttcgtcagcgtggcaccaagttccacccaggtgagaacgtcggacgcggtggcgacgacactctgttcgcactgaaggcaggcgctgttgagttcatcaccaagcgcaaccgtcgtttggtcaacattgttgagaacgagactgtagacgcc

SEQ ID NO: 17820 - DNA, 303 bp, Cornyebacterium diptheriae
atgtacgcgatcgtcaagaccggcggcaagcagtacaaggttgccgaaggtgacttcgtcaaggtcgagaagatcgagggtgagccgggttcgtccgtggctctcaccccgattctgctcgtcgatggcgcagatgtaaccaccaaggcagctgacctcgctaaggtgagcgtcaccgctgagatcgtagaggccgttaagggccctaagatcaagattctgaagtacaagaacaagaccggttacaagaagcgtcagggacaccgtcagcagttgacggttctcaagatcaccggcatcaag

SEQ ID NO: 17821 - DNA, 1017 bp, Cornyebacterium diptheriae
atgcctcagtcactgatttctgagctacatactcagtacgctcagttcgttcggaaacatccccatgccgaacgagacttcagtgatgcgctcgaagatgtcctgaccgatgctggtcttacgtacgatcgcgtcagcgctcgcattaaagactggcattctctgaaaaccaaggcccggaagaagaacgcgcagggtgcgtttatttatcctcacccatgggacgatgtccacgacatcatcggtgtgcggattacaaccctgcattccaccgagattccacagattatcgaagccctcgccgatgttttcacggtggaacgctccgtcgataagaccgcccttactcgcatttcgggaagctttggctacggatcgcatcaccttattctcaaaatcgacgatcgcgtcaaagatctcaacaattacgtcggcatggttttcgaagttcaaattcgtaccgttttgcaacatgcttgggcagaattcgaacacgacattcgatacaagcgttcaggtgaccttgatccccaaatcgacagagcctttaccctagccgcggggcttatcgaattagcagatcaacagtttgatctcatcgcagcaattcaagaacctcaaaagcacagccccaaccttgaggtagacattactgccgaaacgttgccgggagttatcgcaatgcttgtaggttcccgtttcccacaatcacgcagcgagcactatcgttggctcgaagaattactcttcgcacactccatcactactgcagctcagctgaaggaattgcttaacgatcgcgacatcgaagcagtacgcaaggccttgaactacaagttcaaaccaggacaagtacgcattatcgacgacctcctgctataccgttatggcaccaagcacattgaagccactggggaaaccggaaagaatcctcgcctccgtctcccccgacttaacgaacgcctccgaattcttaacaaacatgcccctcgaaaccgctcagatttacaacaatcc

SEQ ID NO: 17822 - DNA, 2706 bp, Cornyebacterium diptheriae
atgactaatcgcgctgacaaactcccaaagtcttgggacccacaggcagttgaaaaagacctctatgagggatgggtagaaaagggatactttacggcggatccatcgagctccaagccggcgttttccattgttttgcctcctccgaatgtgacgggtcagctgcacatggggcacgcgttggatcacacgcttatggatggcatcgcgcgtcgtaagcgtatgcaaggctatgaggtcttgtggcttcctggcatggaccatgcaggtattgccacccagacgaaggtcgaagcaatgctcaaggaaactgaaggcaagtcccgttgggattacagccgtgaagagtttatcgagcacgtctgggaatggaagcgtaagttcggcggcaccattggcacccagatgcgtgctattggtgattccgttgactggtcgcgtgagcgttttactctcgacgaaggcctgtcgcgtgcggtccagaccatcttcaagcagatgtatgaccgaggcatgatttatcaggcgaaccgtcttgttaactggtcgccgatcctagaaaccgctgtctccgacatcgaggtcgtgtacaaggacgtcgagggcgagctagtctctatccgctacggttcgcttaacgacgacgagccgcacgtgatcgtggctaccactcgtgtagagacaatgcttggcgacgtagccgtggctgtccacccagacgacgagcgctacgccgatctggttggtaccaccttgccgcacccattcctgccggatcgtcagatgatcgttgttgccgacgactacgtggatccagaatttggcaccggtgccgttaagattaccccagcacacgaccctaacgactacgcattgggccttcgccacaatctggacatgccgaacatcatggatgctaccggccatattgctggcaccggcacccagttcgacggcatggatcgcttcgaagcgcgcgtgaagattcgcgaggcgcttgcggagcagggccgcatcgttaaggaagttcgtccttatgttcactccgtgggtcactccgagcgttccggtgagcctatcgagccacgcctgtctttgcagtggtgggtcaaggtggaaaagcttgccaccatggctggcgacgccatccgcgagggcgataccgttattcaccctaagtcgtccgagccacgctactttgactgggtcgatgatatgcacgattggtgcatttctcgtcagctgtggtggggacaccgcattcctatctggtacggcccagaagacgctgagggcaaccgcgacatcgtctgcgttggccctgatgagcagccaccggcaggttatgagcaagaccccgacgtgctggatacgtggttcagctcggcgctgtggccattttctaccatggggtggccagataagacccctgagctggataagttctacccaacctccgtcttggtcaccgcttacgacatcctgttcttctgggtggcccgcatgatgatgtttggcacccttgcaggtgaaaccaccccagagatcctggggcagggtaccgacggtcgcccacagattccatttaacgacttgttcctccacgggcttgtgcgcgatgagcagggccgcaagatgagtaagtctttgggcaacggcattgatccaatggattgggtggagcgctttggtgctgatgccttgcgctttactttggcccgtggcgcaaacccaggtgttgacctgccagtgggtgaggactctgcacagagctctcgtaactttgctaccaagctgtttaacgccaccaagttcgcactgatgaatggtgcggaggtgggcacgctgccggagcgcagcgagctgactgacgcagaccgttggatccttgatcgccttgaagaagtccgtgtttctgttgacgactacttcgaccgttaccagtttgccaagggtaacgaggcgttgtaccagttcgcatggggtgagttctgcgactggtacttggagatcgccaaggtgcagatcccacgcgacatggaggcagcatctgcacaagagcaggctcgtggccgcaacacccaaatcgttctgggtcaggtgctcgatgcgttgctgcgcatgctgcacccagcaatgccattcgtcaccgaggtgctgtggaaggcgttgacggatggcgagtccctcaacgttgccgagtggcctacggctgctatgaccaacggtggggttgcaaccgatgaggtggcagcacgtcgcatggctgatgtggaaaagctggtcactgagattcgtcgtttccgttctgatcaaggtgtgaagccttctcaaaaggttccaggtgcggtggactttgccgccgctgatctggcagcacaagaagacctcgtgcgttctctcgctcgattggatcagcctgcggaggacttcgcggcgtcggcaagcattgaggtgcgcctgagccaagccaccatcgagatttccgtggacacctcgggaaccgtcgataaggaagcagagcgtaagcgcctcgataaggatcttgctgccgcgaccaaggaactcgaaaccaccgcgaagaagctcggcaacgagtctttcttggccaaggcaccagaggccgtggtggcaaagattcgcgagcgtcagcagatcgcccaagaagaggtggcccgcattagcgctcgccttgaggagctgaag

SEQ ID NO: 17823 - DNA, 3558 bp, Cornyebacterium diptheriae
atggccaaaaaatcttcctttgttcacttacataatcacaccgagtattcgatgctcgacggaatggcaaaagtggacatgttggcagaagaagttgtcaggcagggcatgcctgcagtaggtatgaccgatcatggaaacatgtttggatccgatgcattttatcgggcaatgaaagctgccggggtaaaaccgatcatcggtatcgaagcctatatggcacctggatcacgcttgcacaaggaacgtgtgcgctggggtgaaccccatcaaaaatccgacgacgtctcagcatctggtgcctatctccaccaaaccatgctggccgaaaacgttgaagggcttcacaatcttttctacttgtcttcgatggcatcgtatgaaggccaattaggtaaatggcctcgaatggatgccgagctgatcgcagagcacgccactggaatcattgcgacgacaggatgcccatcaggtgatgtgcaaacgcgtcttcgcctcgggcaatttgaccaagctttggaagctgcagccatgtggcaagacatctacggcaaagaaaactacttccttgaactcatggatcacggcctcgagattgagaatagagtccgctcagagctcctagaaattggccgaaagctcgacttgcccccgttggtgaccaacgactgtcactatgtgctggaatcgcaggctcctgcgcacgaagctatgctgtgcgtgcaaacaggtaaaaccttgagcgaccccgatcgattcaagttcgacggatcgggctactacatcaaaaccgctgagcaaatgcgggaaacgtgggattcactggttccacaagcatgcgataacacgctatggattgcagagcgtgttcaagactacggcgagatctgggaaccacatcctcacgaccgcatgcctattgccgatgttcctgaaggccacaccccaacatcgtggttgcgacatgaagtccacgaaggattgcgtatgcggtttaacgggggagcagtaccgcagaactatctcgagcgcgctgaatttgaaatcgacgttatcgatatgaagggctatccttcctacttccttatcgtggctgagctcatcaaacatgcacgttccattggcattagagtgggccctggtcgtggttccgcggctggtgcattggttgcttacgcattgaccatcaccaacatcgatccaatggagcatggccttctttttgagaggttcttgaacccagagcgtccctctgcaccagatatcgatattgacttcgacgatcgccgacgcggtgagatgatccgatacgcggctcaacgatggggcgaagacaagattgcccaagtgattacgttcggtaccgtgaaaaccaaacaggcgttgaaggactcagcgcgtgtgcaatatggtcaagaaggctacaaaatggccgaccgtattactaaggaacttccgccagcaatcatggcgaaggatattccattatccggaatcatggatccagaacaccctcgatacggcgaggcaggtgaggtgcgtcatctgattgaaactgatccagatgtgcgcaagatctacgacaccgctcgtggccttgaaggtgttgtgcgacaagctggtgtgcacgcttgtgctgtgattatggccagcgtgccgctacttgagcatattcctatgtggaagcgtgctaacgacggtgccttgatcaccggatggccgtatcctgcatgcgaagccatcggtttgctgaagatggacttccttggtctgcgtaacctgaccgtgatcggtgactgtctagaaaacatcaagatcaatcgaaatgaagagcttgatcttgaagccctacaaaccgacgatcccaatgtgtacaagctgctatctagtggcgataccctaggcgtgttccagcttgactccggcggcatgcaggaattgctgaagcgtatgcaaccaaccggcttcaacgatatcgtggcgtctctcgcactgtatcgtccaggtccgatgggtgtgaacgcgcactgggactatgcagatcgcaaaaatggccgaaagcctattgaaccaatccaccccgaactcgaagaaccactcaaggaaattcttgaagaaacctatggtctgattgtgtatcaagagcagatcatggagatttctcgcaagctagccaactacactgctggcgaagcagatggattccgtaaagccatgggtaagaagaaacctgaagttcttgccaaggagtataagaagttctctgagggtatgttctccaatggttattctaaagcagctgtcgacgcactgtggggaacaattgagccgttcgcatcctatgcgtttaacaagtctcacgcggcaggctatgggttggtgtcttattggaccgcctaccttaaagctaactacaccgcggaatatatggcggcgttgttgacgtcggtggcagataagaaggacaagtctgcgatctatctttccaactgcaggcatcttgatatttcggtgttgtcgccagacgtgaatgaatcccaccttaacttcatgccagttggcgaggacatccgcttcggtcttggcgcagtgcgtaacgtgggtgaagacgttgtggctgcgatcatcaaagcgcgtgaagaaaaaggtgctttcaccgatttttcggattacttagacaagatcgatatcactgcgtgcaacaagcgtgtgaccgaatccttaattaaggcaggcgcctttgactctatggatcatcctcgcaaaggattgctgctgatccatgaggatgcagtggatgctgtcaccagtacaaagaaagccgccgataaaggccagttcgatctttttgcaggtcttggcgcagacgccgaagaagtcaataatgtcttcgccgttcaaattccagatgcacagtgggacaaaaagcatcaacttgcgcttgagcgtgaaatgcttggtctttatgtctctggccatccacttgatggctatgaagaagcactggaggcgcaaactgataccccattgaccaccattttgagtggtgagctgcgtaatggtgcagaagtcaccattggcggaatcatttccggcgtggatcgtcgctactccaagaaagacggatctccgtgggcaatcgttaccgtggaagaccaccatggtgcacaggtggatctgcttgtgttcaacaagatctacgccattgtcggtccgcagatcgtggaagataacattattcttgctaaggcacatgtcagcattcgtgacgatcgaatgtcgctattctgtgacgacctcaaagttccagaattgggaccaggcaatggtgctggtctaccgctgcgtcttaccctccgaaccgatcagtgcactatggaaaatattgccaagctcaaacaggtgctctctaataacaaaggagattccgacgtgtacctgaatgtggttcatggagaagaaaaaacagtgatgattttgggcgaacacctccgagttaatcgcagtggaaatctcatgggtgacctgaaagccaccatggggccgggcattttgggg

SEQ ID NO: 17824 - DNA, 1290 bp, Cornyebacterium diptheriae
atgacacgtatgcaagaaagcgctgatctcctcaaatgttctttctgcgggaagagccaaaaacaggtgaagaagctcatcgccggtggtggcgtgtacatctgcgatgaatgcatcgagctgtgcaatgagatcatcgaagaggagctcaactcgtcggcagcagaagccaaagataacggtgaccgcctgcctcgaccttcacagatctccgccttcttggacaagtacgtgatcggtcaagatgatgccaagcgcatcctctcggtggctgtgtacaaccactacaagcgggtgcgtgctgaggaatcacgcacgacgcacaagcgtgcctcggaggaagaaaccgaactccaaaaatccaacattctcatgttggggcccaccggatccggtaagacctacctcgcccaaactcttgcgcggcttctcgacgtccccttcgcgatcgccgatgctacctcactgaccgaagccggttacgtgggcgaagacgtagaaaacattttgctcaaactcctgcaggcagcagactttgatgttcagcgcgcccagcgtggcattatctacgtcgacgaagtagataagatttcccgtaaatcggataacccatcgattactcgcgatgtgtccggcgaaggcgtccagcaagcactgctgaaaatcctcgagggaaccgtggcctctatcccgcctcagggtgggcgtaagcaccccaaccaggactttattcagctcgatacttccaacatcttgttcattgtggccggtgcatttgcaggtctagaaaaagtgatcgaagaacgtcgcggcaaaaagggtattggcttcggcgctgagttgaccacaaaagcagacaccgatgcagtcgatgtgttccgcgatgttctacccgaagacttggtcaaattcgggttgatcccagaatttattggtcgtcttcccatcgtggctaccgtcaacaacttggaccaagcttcccttgttaaggtgctgaccgagccacgaaactcactggtcaagcaatatcaacgactatttgatatggatcgcgtagatctagaatttgatcccgaggcactgcaagccatcgccgatctggccatcgaccgtggtacgggtgcgcgtggacttcgcgcgatcatggaagaactcctagtgccagtgatgtatgacatccctgaccgtgaggatgtcgcagtggtgcgtatcaacgaggccgcagttcgagggctgcaggaacccgagatgatcttgcacagccagaaagacgaagaggagaagacagcc

SEQ ID NO: 17825 - DNA, 2523 bp, Cornyebacterium diptheriae
atgcaacgcgcgcatattttggtggtggataatttcgattccttcacctacaacatcgtcgactacctccaccgctgcggggcccgcacccacgtggtcaccaacaacgtatccccagaggacattgatctagaccgctaccacggaatagtcatctcaccaggtccagggcatcccagtgtggcagaagacgtcggcataagcgcgtgggtattacaaacagcacagtgcccagtgctgggcgtgtgcttaggtatgcagctgatggtcacaagcgaagggggctgcgttgatcgtgcgccggaggctgtccacggacgcgtagataccttaaatattgttgccgccgatgagctttttgctggtctacctcggacgttttcgatcgtccgctatcattcgctcgccgcgatcacagtaccacccagcatggaagtcacatcttctaatcccgaggggattgtgatgtcgatacgtcatcgcagcagcccatggtggggagtgcagtttcatccggaatcgattgccggcgatttcggtgtggagatcattgaccgctttgttgacctatgcacaccgcagtatcgcaccgatgaagtggagctttgctgcagccctgtggagcttttccatgcgttgggcggcaggggagcactgctggaatttgaaggcacggctatcattgcgattccgagtgggcaggtagcgcaccacattgaggagctggaagtttctggtatttcggtggccccggaggcatgggcgccgccgggttggtacggctacattggctacgaggctaacgacgctacctttggcactgcggtccatgcgccaaagccggcggaatttcccacgactgccatgatgtattgcacggaagttattgcgatccgtggggatcgtgcccaaatcaccgcgccgagttcgcgctggggccggttacgggatgcggtcgtggcggcgtcgaaaagcgtgcccacggtgccgagtttcaacccgactggtatcgggcggttgcacgtacgcgactcccgagaacgctacatggctacgatcgagcggatccaagaagcgattcgagccggcgaaacatatgaagtctgcctgaccaccgaactattcgccgaagtacacggtgaggtccatccggcggcaatgtatcaagcgctgagcaccgcagtacctgcgcctatgcgttcgctggttgtcaccgatgatgtagcagtgatttccgcgtcaccagaacgatttatcaccatgaacgaccgcatggtgtcgtcctcaccgatcaaaggaaccagaaaacgcagcgccgaccgcgaagaagaccgcgccttggccgacgatctgcgcaccaaccccaaagaccgcgccgaaaacctcatgatcgtcgaccttgtgcgcaacgacctcgcccgcgtctgcgaatcaggcagcgtccgtgtgccagaactatgtgcactgcacagctttaccaccgtgcaccagctgatttctaccgtcgaagggcaacttcgccccaccagcatgcctatcgacgtcctacgcgccaccttcccaggcggttccatgactggggcgcccaaacaccgcaccatgcacctcatcaccgagctcgaaggcaaacaacgcggggtttactccggatgcattggttatatcggcgacgatctccgcaccgatcttgctatggtcatccgcaccgtcgtgctcacacccaccaccttgagctatggggtaggaggtgccatcatcgcgctttcagaccccgccgaagaatgggcagaaatcaccacaaaatcccgggtgcttctcgacctactcgggcaagatttcccacaatcgctcatcatcgattctttcctcgtcaacgacgggaaaacccgcggactcaacctgcacctcgaccgcttccgcactgcttgcctagaacacggctatgcccaccacgagcaactcgacgcctttttcgcagaggcactcagaagcatccccgccacagggcagtggttcccgcgccttgaagccacacccaccgaactacgtatcgcgcttcggcccgcccctcagctacgcggcaccacaacgctgacctcggtggcggcagtacgccccaccccgaagtacaaaggcctcgaccttgactacctcgccgaactgcggtgcagtagcactactgacgacgccctcctggtcacaccagccggtgtgattgccgaaaccaccacagccgccatcatcgcctgggacggcaccaagtggatgagcatggccccagcccgattggaatctgtgactgaatccctgctgatcaacagcgctcgcgcccaaggcgagatggtagttactgcagccttgacagtgcccgaggcacagaaactcaacctgtgggcggtgaactccctccacggcgtgacccccgtgacgcacattgatgaggtagcacttcccagcaatccccagcgcagtgcgttgctacgcggatggttgtcacaatctgaggagaatatcgcccaagtg

SEQ ID NO: 17826 - DNA, 432 bp, Cornyebacterium diptheriae
atgaaaaacattattgccgatcacctcaaagccaaaggccacgaggtgatcgactgcggagctcacacatacgatgctctcgacgattaccccgcctactgcatcgaagcagcaagccgcgtagtaaacgacccaggctcattgggcatcgttctcggcggatccggcaacggcgagcaaattgccgctaacaaggtcaaaggcgctcgctgcgcactcgcatggtcggttgaaactgcccgcctcgcacgcgaacacaacaacgcacagctgatcggcctcggcggccgcatgcactccgaagaagaagcactagcaattgtcgatgccttcctcgaccaagagtggagcaaagaagaacgccaccagcgtcgcatcgacatcctctgcgaatacgagcgcaccggaatcgcacctgttattccagaatcc

SEQ ID NO: 17827 - DNA, 3156 bp, Cornyebacterium diptheriae
atgtcagacgcagttggtggagtatatccacgcgtagatatgtccggtggaacaaatgtgttcccagatatggaacgccaagtcttggagtactggaaagacgacgagacttttaaagcttcgttgactaaccgcgaggaaaatcctgagtacgtgttctacgatgggcctccttttgccaatggtttgccgcactatggccatctgcttaccggatacgttaaagacatcgttcctcgttaccagaccatgaagggcaaactagttaatcgcgtattcggttgggattgccatggtcttcctgctgagttggaggctgaaaagcagctcggcatcaaagacaagggcgagatcgaggcaatgggtcttgagtcctttaacaattactgcgcgaagtcggttttggagtacacccaagagtggaaagactacgtgacgcgtcaggcgcgctgggtggacttcgataacggttacaagaccatggatatggacttcatggaatctgtcatgtgggcttttaagaccctctatgacaaaggtttgatttatcaaggctttcgtgtcttgccttattcttgggctgagcacacgcctttgtctaatcaagaaacgcgtctcgacgactcctataagatgcgtcaggacccaaccctgacagtcacgttccctatcactggcgtaaaagatgacagtgcagctgatgcctctctcgtgggtgcatatgcgctggcttggaccactacaccatggactttgccatcgaacttggctttggctgttaacccccaggttaactacgttgaggtgaaggtaggcgatcagggtgctgaggccattcgcggtcagcgcgtgttgctggctgaggctctcgtcggtgcgtatgccaaggagctgggcgaagaccatgaagtgctcacggttcgtccaggtagtgagcttgttggtttgacctatcagccaatctttagttacttcgctgatcatgaaaatgctttccagattttggcagcagaatatgtgaccaccgaagatggtacgggtatcgtccaccaggcgcctgcttttggtgaagacgatatgaatacctgtaaggaatatggcattgaggtagtcattccggttgatatggacggaaagttcacatctttggtgccggaataccaaggacagctcgtatttgacgcaaataagagcatcattgctgatcttaaagcagcaggtcgcgttgtgcgccatcagaccatcgagcactcctatccgcactcttggcgctctggcgaaccactgatctacatggctttgccatcgtggtttgtggaggtcaccaagatacgcgatcgcatggtcgagttgaacaaagagatcgactggatgccgtctcatatccgtgacggccagtttggtaagtggcttgaaggtgcgcgtgactggaacatttcccgtaaccgttactggggttcgcctatcccagtgtgggtatcggatgacgaaaactacccacgtgtagacgtctatggttctttggaagaactagagcgtgatttcggtgttcgtccggaatctttgcaccggccgcatatcgatgaacttacgcgtccaaatccagatgatccgactggtaaatctacgatgcgtcgtgttccagaggttttggactgctggtttgaatctggctcgatgccttttgctcaaaagcattacccctttgagaacaaagactggtttgatacccattcacctgcagacttcatcgtggagtactccggtcagacccgtggttggttctacaccctgcatgttcttgccacagcgttgtttgatcgccctgcgttcaagaaggtcgtagcgcatggaatcgtgctgggagacgacggcaccaagatgtcgaagtcgcgccgcaactacccagatgttaatgaggtcttcaaccgagatggctccgatgctatgcgttggttcctgatgagttctcccattctgcgcggcggtaacttgattgtcaccgaacagggtattcgtgaaggtgtgcgccaggcgctgttgcctatgtggaatgcgtatagcttcttgcagttgtattcttctaagccagcacaatggtcagttgattcctctgacgttttggatcgttatatccttgctaaactgcacgatgttgtagcggctgttggcgatgctttggataacacggacattgcacgtgcatgtgatgaggttcgtactttctgcgatgcattgaccaactggtacgttcgtcgttctcgcgatcgtttctgggcaggtgatactgagcatccagaggcgttttacaccttgtacacagtccttgagactctcacccgtgtgacagcgccactgctgcctatggtgtctgaggtcatctggcgtggactcacaggggagcgttcggttcacttggccgatttccctcaagccgatcaattcccagcggatgatgaccttgttcgcgcaatggatgaggttcgtggcgtctgctcggctacgagctcggtgcgtaaggcgcataagctgcgtaaccgtttgccactgccgaaggttaccgttgcgttgccggaatcggcacgattggcagatttcgcggatatcattcgcgatgaggtcaatgtaaaggaagttgctcttacctctgacgttgatagcgtcggccgctttgatgttgtggtcaacgccaaggttgcaggtcctcgactatgcaaggatgttcagcgtgctatcaaggctgtcaagtctggtaactatgaacgccgtggagatactgtcgtagctgatggcattgagcttgttgctggtgagtttacggagcgtctcgtggctgctgatcctgattccaccactcagatcgacggtgttgatggcctcgtggttttggatatgaccttgaccgaagagcttgaagctgagggctgggctgcagatgttatccgtggtttgcaggatgctcgaaaggcttcgggatttgaggtttccgaccgaatcgaggtcaagcttgttgttcctgaagaaaagaaggaatgggcgttgcgccacactgatatgattgctggcgaagtgcttgctacctcttttgaggttgtcactggtgagcctgcggagcacgatattgtggcaggtgttacagctacggttcaaaaggtt

SEQ ID NO: 17828 - DNA, 2616 bp, Cornyebacterium diptheriae
atgtcttcgattaatctcacgcagttggaagctgagcatcgcgcacatgtgctaagcgttggccattatgatgttgcactggatcttactgctgatgagcgcacttttccttccacgaccacggtgtcgtttgaggtgctcaatgctggtagtaccttcattgatcttcgtgcggagtcggttacgcgtgtggagttggatggccgcgatattacggaaagcgcggtgccgttgcaggatgggcgttacgacgaatcccgcggtatcaccctcgacaatctcacggtgggcgcacatacgttgattatcgacgctacttgtgtgtattctcacaccggccaaggtctgcaccgctttgtcgatcctgctgatggcaaggtttatctatacacccagttcgagacagccgatgccaagcggatgtttgcctgctttgaccagccggatcttaaggcaacctatggttttaagatcgtagcgccgaaggcttggaaggtgattacgaatgcttattccgagatcaccgttgatggcgatacggcaacacatgtgtcctcggtggattacaagctttcaacctatctgattgccttgtgtgctggcccttatcacgaggtgaccgatacgtggcacggtgagcttaagcatcatcctgaaactcctccggatcagcctcatgagttggagattccgatggctatttattgccgcgagtctttggctgagcatttggatgcggagacgctgtttactgagacgaagcagggctttgatttttatcatgccaattttggtgtggcttatccgtttggcaagtatgaccagatttttgtgccggaatttaatatgggcgcgatggaaaatgctggtgcggtgacgttccgcgatgagtatgtgttttcttcgaaggtgactcgttatcgctatgagcgtcgttgcgatacggttcttcatgagatggctcacatgtggttcggtgaccttgtgactatgaagtggtggggtgacttgtggctcaacgagtcctttgccacgtggtctgcggcgttgtcgcaggcggaagccacacagtattccaccgcatgggtgacttttgccaacgtggagaagtcttgggcatatcagcaggatcagttgccttctacgcacccgattaccaccgatgccagcgatattgagatcgtggagcagaacttcgacggtattacttatgccaagggttcttcggtacttaagcagctgcaggcttatgttggccgtgaggcatttttggctggtgtgcgtatgcactttgctaaccatgcgtttggcaatgccacctttgatgatttgttgggtgcttttgaaaaggcgtcaggtcgcgatttgtcgcagtgggcccagcagtggttgaagactacgggtgtgaacaagctaagcccgcgttttgagatcaacgagggcacctattccagctttgcggtggctcaagagggcgcggcccccggcgcaggcgaggtgcgcacgcatcgcattgccgtgggcttatattcgcttatcgacggctccgtgacgcgtacccatcgcgtggagcttgatgttgattctgagctgactgaagtaccggagctggtgggggttcctgcagctgatctggtgattgttaatgatgatgatctgacttattgcttgatgcagttggatcctgcgtcgttggcttttgttgtggaaaacattgacaagattgcggatccgatggcgcggacgttgtgctggtcggcggcatgggagatgacacgtgacggttcgatgcgtgcgcgtgattttgtgcggttgattgctcgtggtgcgcaggcggaaacagagattgcggtgctggagcgtgtactcatgcaggcgtcgcgggcgttgtcgtcttatgtggatccgcagtgggctgagcaggaaggttctgcgttgttggcagatgcgatgctgcaggctgcccgtgagctggagcccggttcggatgcgcagttggcgtttgtgcaggcgctggccaaggtgaagctgactgatgaagccgcggcagagtttgcgctcattgctaagggctctacgtccctacctggtgttgtggtggattcggatctgcgctggtgggctttgactgcccttattgcccgtggtgatgttcctgcagctgaggttgagcagcgcattgcacagttgttggcgttggataagtcttctgcaggcgagttggcggcgcttcgtgcatatgcagcccagcctagccaggacgtaaaggctaagattttcgcgcagattactgatcctgcgaattcgttgtctaacttgtatctgcgccacaagttagagggcttgcagtttgcgggttcggctccatatttggagcagttctctgagtctgtgtttgagcttgtcgagccgctgtggaaggcgttatcctctgaggttgctgctgttactgtgacgggcatctacccgtcgtgggatgtctcggcagaatctgttgagcgcgcgcacgcgttcttggatgcgcatccagatctgcctggtgcagcacgccgcattattagcgagggtgctgcaggccaggagcgtgcggttcgactacgcgctatcgacgcagct

SEQ ID NO: 17829 - DNA, 447 bp, Cornyebacterium diptheriae
atgtcgtttgtaaagaagaccaagaatttcttcggcctcgatggcgaagcggatccgtacatggagcattctgacgcgtactatgacgagccacgctatgaaccggctccagcatattctgcgcctcgttacgaggagccaatctacgcttcagcgcgtccacgagctgctcgtcccatgcccactcacatcgtgccggtccgtcttcttacttactccgatgctgcgatcaaggtgggcgaccccttccgcgatggtgatgcagtggtgtttgatatgagcgacatgcataagggcgaagcaaagcgcattatcgacttcgctgctggtctgtgctttgctctacgtggccagatgcgcaaattggacggacgtatctttgcactcgtaccagagtcagcctctgtggatgaaaacgacctcaagcatgctgctggtctgattcac

SEQ ID NO: 17830 - DNA, 1059 bp, Cornyebacterium diptheriae
gtggttacccccgcgtgttggtgttctacgatacggtggaaaccgatgaatatttttggtttctcagggggtgggccgcttcaggttctcgcccaaaataagttgtcagatgagacggagtctgcgatcaactccactgagtcgtggctgcatagcccgatggctcaggattggttgattgaacgccccatcagaattgctttgacgctcgttgtggccatcgtgttgaactgggcgctgcgcaaggcgattaccaaggctgccgacgccaacattcgcaaacctcggttggcgatctccaacccgattatcaagcgcaagcgcaacaacgccgcgagtgaggctctcactgccactcaggagcagcgtcgacaagcccgtattcgtaccctcgccgccgtgggccgcagcgctgtgtcgatttttgtgtgggtctgggctgcgcttggcactctcaagctgatcggcgtggatgttactcccctgatcgcttctgccggagttgttggtgtggcgttgggctttggcgcacaatcgctggtcaaggactttctttctggtgtgttcatgctcattgaggatcaatacggtgtgggcgacaccatcgacgtgggtgatgtcgtaggcacggtcgaagacgtatcccttcgcctgaccaccttgcgtgatatcaacggcacccagtggttcgtgcgcaacggcgagatcctgcgcgtgggcaatttcagccaagaatatgcggtagcgatcatcaacgtgcccatcgccttggacgagaaggcctccgatgcgattgctttgattgagaagtccgtggccgatgaagcacagctacaagaagtagccgatgtacttctcgacgaccccgtggtcgacggcgtgaactccgtgggacttgaccacatggttatccggacacgtgtgactaccttgccggatcaacaatggtttattgagcgtaagatgcgcgcgcgtattcttaccgatctgcagcgtaacggcattgacaccccctaccccgaaggcattggcgcttatcgccgcctcgacgacgaagaa

SEQ ID NO: 17831 - DNA, 1233 bp, Cornyebacterium diptheriae
atgacttccccagataattacctcgccgtaatcaaggttgttggtgtcggtggcggcggtgtaaacgctgttaaccgaatgatcgaagaggggctaaaaggtgttgagtttattgcggtcaacaccgactctcaggcattgatgttctctgatgccgatgtcaagctcgacattggacgagaagctactcgcggccttggtgctggtgcaaaccctgaagttggacgcgcatcagcagaagatcacaaaaacgagatcgaagaaacccttaaaggggcggacatggtcttcgttactgccggtgagggcggcggtactggtaccggtgcagcaccagtcgttgcgggaatcgctaaacgcttgggtgcacttaccgtcggcgtggttacgcgtccattcaagtttgagggcccacgccgtacccgccaagcaatggaaggtatcgatgcactgcgtgaagtttgtgacacgcttatcgttattccaaacgatcgcctacttcagcttggcgacgccaacatcaccatggttgatgcgttccacgaagcagaccgcgtgcttcacaatggtgtccaaggtattaccgatctcattaccattcctggtctgattaacgttgacttcgccgacgttcgttctgttatgcacgatgctggctccgccttgatgggtgttggttctgcatctggtgaaaatcgagtgcttactgctgctgagcaggcaattaactcaccactgttggaatccacgatggaaggtgccaagggagttttgctctccgttgcaggtggctcagacttggggctgcaagaagtcaacgaggccgcatccatggtccaggaaaaagcagatgaggacgttaacctcatcttcggtaccattttcgacgacaacctcggagacgaggttcgtattaccgtgatcgctactggttttgacggtgagaagaattctctcgatcgtcaacgcgaagctgcgcagccagctgcttcacaatcagcatctgcaatggaagccaatccaactcctgcgcctgatcgctctacgtcgacgtcgttgtttggggattcagatagtgctccgcgccatcgcttgaatgaggaacctgctgcgcgacggacttcccatgattctgagggaatgtacacgcgccggtcggtgcctcgtgagtcctatcgcgatcagcgttctgatgactttgatgacgatctcgatattccagacttcctacgc

SEQ ID NO: 17832 - DNA, 654 bp, Cornyebacterium diptheriae
atgaaaaagcgtattgccattgtgagtagcattgtgctgcttattgtggcgattgctggcggttgtctgtgggcttttcccgtcatgaccgtccaaaaaatcgagattgatggcgctgtgcgtagctcagctgaagaggttgaaaccgcaagcggaatagctaaaggcactaacatagttcgagttgctgctcatgatgctgcaggaagcgttactcaacttccttgggttcgttcggctacggtaacgcggtcattccccaacacggttcgtattgaggtcgtagaacgaaccgatgtgggatttgtggatcgtagtgatggtcaacatctttttgatgaaaaaggacgtgcttttgttattgattcaccttctgaaggctcagtaaaagtcacaggtccttcgcaggatgaccccgaggttctttctgctgtggcggagtctatttctgctattgatcccgggattcgttccacaatcgaccatatcgaggccccagatcgttattctttaaatttggtgttgcacgatgggcgccagattttttggggttcctcggaatctgctcatgataaagcggcaacattaatgattgctttgagtagggcagaacaacgtcttgatattagtggagcaccggtgattgccgtccga

SEQ ID NO: 17833 - DNA, 1077 bp, Cornyebacterium diptheriae
atgatatttccgccctcgcccccaaccctcggcgtcgaatgggaagtagcgcttgccgacccgcactcacgtgaccttgtacctcgtggccacgaggtaattgagaaagccaccacgcatttggaacgagagttccttgccaacacagtggagctggtgacctcggtatgcaccaccgtccccgaagccattgaggagctgcgcgagggcattgaggaagtcaaagccattgcagccgacatgggtttgaaggtgtgggctgcaggctcgcaccccttctcggacttccgcaagcagccggtgaacgaaaaaggccactacaacgagattatcgagcgcactcaatactggggtaaccagatgctgatctggggtattcatgtccatgtgggtatttccagcaaggatcgcgtgtggcccatcatcaacgccatgctcacctactacccgcacctgttggcgttgactgcttcctccccaggctgggatggcattgatactggttatgcctccaaccgcaccatgttgtaccagcagctgccgacagcaggcctgccttaccagttccagagctgggatgagtgggaggcgtacatggcggatcagaataagtccggcgtgattaaccacaccggttctatgcattttgatattcgccccacccgctatggcaccgtggaggtccgtatttgcgactccaccaacctgcgcgaactttccgcagccgtagcactgacgcactgcctgatcgtagacctcgagcgcaaactcgatcgtggcgaggagctccctacgctgcaggattggcatgttgccgagaacaagtggcgtgctgcccgctatggcatggacgcggagatcatcatctcccgcgacaccgacgaggcgtgggttaccgacgagctgcgctcactggtggaacgcctcagcccgcttgcccgtgagctcggctgctacgacgaactccaaggcgtgctcaccatttgccagacgggagccagctaccagcggcagcgcgctatttacaaagaaacaggttcttggctgccggttgtcgacgccgtcctcgccgagatg

SEQ ID NO: 17834 - DNA, 390 bp, Cornyebacterium diptheriae
atgaacacccctgcgtctttttatgagtctgttggtggcgaagaaaccttccacctcatcgtgcaccgtttttacgaacgcatgcgtaacgacgacctcatcggccccatgtaccccgacgatgattgggaaggcgccgaagatcgcctccgctggttcctcgcccaatactggggtgggccacagacattttctgaaaaccgcggacatccacgtctacgcatgcgccacgcacacttccccattggtatgaacgaggctcagcgctggctcgacatcatgtccgacaccttggacagtatcgacgaggcaacccttcccccagcccaccgcgccgctatgtgggatcacatgcagcgcgtggcgcagatgcttatcaaccaagccccc

SEQ ID NO: 17835 - DNA, 1431 bp, Cornyebacterium diptheriae
atgaattcaatcgacttaagccgtgtccacatgatcggaatcggtggagcgggaatgtcgggagtagcgcgcattttgttgtcttgcggcagcgttgtgagcggttccgatgttaaggaatctcgtccggtagctgcgcttcgtgcaatgggagcaacgattgcggtagggcataaagctgaaaacctagcaatctctggttctatgccgacggtagttgttacttcctttgctgcgatcccccaagataaccctgagctacaagaagcacgtgccaataacattcccgttattcggcgatcggaccttttgggcgagctcatggaagaccaccagcaggttcttattgctggtactcacggcaagacttcgacgacatctatggctgtggttgcgcttcaagcggctgggaaagatcctagctttgcaattggtgggcagctgaacaaagcaggaacgaatgcgcatgatggcaccggcaaagcctttgtggcggaggccgatgaatcggatgcgtctttgctgcggtataagccagacattgcagtagttactaatatcgagccggatcacttggatttcttcaaaacatctgaagcatatttcaaggtgtttgatgactttgctgagcgtgtgcagccaggcggaacacttgttgtgtgtttagatgatccgcacgctgcggcattgggggagaagtttaaagatcgcatgacggttcgcggctatgggtcacctgctgcagcgcaacagtatccagatgtggcctttaccgttgttgagcacatggaagttgggcccgctggtacccgcgctcgaatcacagttggtgacgatacagtcgatgtgatcatgcgtattcctggccaccacatggtgctcaacgcatgtgcagctttgactgctggtgtgaccgctggcgccgaattggaacgacttgctgctggtattagcgacttcagtggtgttcgccggcgttttgaattccatggtcgtgtttccggcggagcatttcacgatgcagaagtctatgacgactacgcacatcatccgactgaggtaacagccgttcttaaagctgcacgtcaacagcaggaagcgcgcggcattgggcgagtagtggttgcttttcagccgcatctatattctcgtacgatggaatttgcagctgaatttgctgaggcattatcgcttgccgatcatgcggtgatcctcgatatctttggtgcacgtgagcagcctgttgaaggcgtggattcccgtattatttcggacaaaatgacaatacctgtagtctttgagcccaatttttcagcagttgcagcacaggtgaaaaagattgctcagcccaacgatattatcgtcactatgggtgcgggtagcgtgaccttgcttgccgacgaaatccttactgcgttacgggagagcgaa

SEQ ID NO: 17836 - DNA, 1668 bp, Cornyebacterium diptheriae
gtgggcgaattcatctacacgatgaaaaacgtgcgcaaggctatcggcgagaagctgatccttgacaatgtgaccatggctttttatccaggtgccaagattggtgtcgtgggccccaacggcgcgggtaagtcgtcgatcctaaagatcatggcaggcctcgaccagccatctaacggcgaggccttcctagacccaggtgccaccgtgggtatcctgctccaggagccaccgctcaatgaggaaaagactgttcgcggcaacgtggaagaaggcttgggcggcatctttgaaaagaagcagcgcttcgagcagatcgccgaggaaatggcgaccaactacaccgacgagctcatggaagaaatgggcaggctccaagaagagctcgaccacgccgacgcatgggaaatcgactccaagattgaccaggctttggaagctctgcgctgcccaccatccgacgaaccagtaacccacctttccggtggtgagcgccgccgcgtggcactagcaaagctgctcctttccgagcctgaccttttgcttctcgacgagcccaccaaccacctcgatgcggaatccgtgcagtggttggaaaagcacctcgctgactacaagggtgccgtcttggccgttacccacgatcgttacttcctcgatcacgttgctggctggatctgtgaggtcgaccgcggcaagctctacccatacgagggcaactactccacctacttggaaacaaaggctgctcgtttggaagttgctggcaagaaggaccagaagttgcaaaagcgcctgaaggaagaactcgcatgggttcgttccggcgccaaggctcgccaggctaagaacaaggctcgtctgcagcgctatgaggagatggctgccgaggccgagcagtacaagaagctcgacttcgaagaaatccagatcccaacgccaccacgcttgggtaaccaagttgttgaggtagagcaccttgataagggctttgatggtcgcgtattgatcaaggatctttccttcaccctgccacgcaacggcattgttggtgtgatcggcccgaacggtgtgggtaaatccacgctgtttaagaccatcgttggcttggagcagccagacggtggcgaggttaaggttggccagacggtgaagctgagctacgttgaccagaaccgtgagaacatcgaccccgaaaagaccgtgtgggaagttgtttccgatggcttggattacatccacgttggtcaaaacgaaatgccatcgcgtgcatacctgtctgctttcggcttcaaaggcccagatcagcaaaagccttctaaggttctctccggtggtgaacgcaaccgcctgaaccttgcgctgaccttgaagcagggcggcaacttgatcctgcttgacgagccaaccaacgaccttgacgtggaaaccttgggttccttggaaaacgcgttgcagaagtttcctggttgtgccgtggtcatctcccacgaccgttggttcttggaccgcacctgtacccacatcctcgcgtgggaaggcaacgttgcagaaggccagtggttctggttcgagggcaacttcgaggattatgaaaggaacaaggtcgagcgcctcggtgccgatgctgcacgcccatcgcgcgtgacacaccgcaagctcacccgc

SEQ ID NO: 17837 - DNA, 1077 bp, Cornyebacterium diptheriae
gtgaacactccacgagtcgtagtcgcaggtggcggcacagctgggcatattgagccagctcttgccgtggcagagtcgctacgtcaccgaggtgcagaggttgtcgcacttggcacgacaaaaggactggaaacgtcgattgtccctgaacgcggatttgaactacgactgatcaacccagtgccagttccacgaaaaataaatgcagatttgttcaagttgccgtttcggctattggcaacaatttctcaaacccgcaagattttaaaagaattcgataccgatgtggttatcggattcggcggatacgtagcagcgcctgcgtatattgcagcaaaacttcaaaaaattccatttatcgttcacgaggcaaacgcccgctccggtatggccaacaaacttggtgttcggctaggcggtatgggacttaacgcggtagctaactccggcatgccaggaactgtcgtaggaattcctatccgatcgtcattgtctggcgataacaccgcactggatcgagcacaacaactgtgggggctagatccagagaaaaagacaatcttgatcaccggtggttcccaaggcgcccgttccattaacgctgcggtggcagaaggcatcgatgcagtattagctgatccagacgttcaagttcttcacgcatatgggcgtaagaattctgctcccgaggcacaagaacgatatgtgccagtggcatatatcgacgatatggccgccgcctatgccattgctgatctcgtgatcggtcgcagtggagcaatgacggtagcggaaaatacggctgccggaattcctgctatttatgtgccattaccacacggtaatggtgagcaagggcttaatgcacaaccgttagtggaggaaggcgcagcggtattggttgcggattctgaatttaatggcgaggcttttagctcattggccgccaaaattttaggcgatcaagaaacctacaacacgatggtcatcgcagctaaggaatctggcaccgctaacgctgcggagacgattgctgacatcatctattccattgtgaaaaatcacgatcgcaacaaa

SEQ ID NO: 17838 - DNA, 855 bp, Cornyebacterium diptheriae
gtgcgcgcggttgatgacctgacgtttaacgtctcgccgggtatcgtcacggggttcctcggccccaatggtgccggcaagtccacaaccatgcgcatgatccttggattagacacaccgacctccggtacagccacgatcggtggcgtggaataccgcaggctaaaaaagccattaacccacgtcggggcgcttctcgatgccaaagcagtgcaccccaaccgcagtgcacgcaaccacctcctgtggctcgcccagtccaatggcatacccgcctcgcgtgtcgacgaagtcctcgcccttgttggccttagctcagtggccaagaagaaggccggtggcttctcccttggtatgggtcagcgcctgggtctggccgcagctcttttgggggaccccgaagtcattattctggacgagcccgtcaacggactcgaccccgaaggcattcgctgggtccgcgacttcctacgtcgcctagcagcagagggccgcaccatcttggttagctcccacctgcttgccgagatggcccaaaccgccgaccacctcgtggtcatcggccgcggcaaactcgttgcctcctgctccacagcggaattcatccaagcgcactcgcgcaacaccaccgtggtaaaacctgccgcgccacaactagcagcagcattgaacgccgagggccttcaagtaacagaaaacaacggtgcgctagaggtcaacgcttctccggaacgcgtcggcaagctggcattcgaagcaggcgttgccctgcaacttctcacacaacaacaggcatccctagaagatgcattcatggaaatgaccagcgaggtggtgcaatatggcagtaagaac

SEQ ID NO: 17839 - DNA, 1506 bp, Cornyebacterium diptheriae
atgagcaccaacacttcgaatcgtggctctcgggttcgtgaccggatagcgagttttttgggcgaaatgatgcgccgaccgctgacggattattacatcgtcatgttcgttatcgccttgttggtgctcactggcgttttgatggtggttacctcgtcgatggcaacctctgtttcagaaaccggtagtgcatggacttacgcgaccaagcagattttgctgattgttatcggttttatcgccatgatcggtgtcatgcagatgccaccgcgtaaggtgagaaaatacgccgtgtggctgatgcgtatttcgattctccttctcatcgtggtgctcattcctggcattggtaccggtaaagaacaagtcggttcgcagtcgtggattccgcttgggcctgtaaacattcagccttcagagatcgcgcgtgtggccttagcgatttggggagcaagttttcttacccgtaaacctaaagtgtatttccgcttttatgggattgatttcgatcgccgtgcgatgtttgccgttattgctggattcacctgtgcattagtcatggctgagggggatcttggtatgacggcgatgctcggatttctcacgttgattatgctcgtattcgcagggctaccgcgaggtttaattgttgcagcattgacaatttctggcgtggctttcgttttggcagtcacgatgcatgggtatcgcggtcaccgcatcactgtttttatagatgcgctctttggccgatttgatgatatcgatggcgtagcatatcagtcttatcagggcatattatcgcttgccgatggatcctttacgggattggggatcggtcagtcacgagctaaatggttttatcttccagaggcgaaaaacgacttcatttttgccattgttggagaagagcttggttttgtcggagccgccatcatcattgggttatttaccgcgctccttcttattgcgttaagaattgcactgagaattaaagacagtttcctttctcttgctgttgctactcttgccgcaggtatttctttgcaggcttttatcaacatggcctatgtgattggtcttcttccggttactggtattcaactacctttgatttctgccggtggcagttctgcggtgattacgctggcggcactggggttgatcgcaaactgtgcacgctatgagccagaagcgatttcagcgatgcagtcctatggaagaccagccttggaccgagtgctgttcttgcgggagccggatgtatccgatattcgtacgcgtcgttctacacggcggtcttcacagggaacacgccaatctggtgctcccaagaggcaaccgccgaagatcgaacgcaatgagcgagtgagctaccgtcaaagttcaacaggcacgtggggttcgagtgaccgcgatagaactggtagcgtcgacaagcagcggggagcacagcgccaacctcgacgtcgaaattatccacaagacaacaaacgcaggagaaga

SEQ ID NO: 17840 - DNA, 1440 bp, Cornyebacterium diptheriae
atgtctgccgccaaaatgacagtaagtgttgaagagctcaaggttttgcttcctgagttagcaggccgcgtactcgttgcaggtgccggtgtttccggagttggaatcactcagctgctgcgagagatggggtgtgctgtcaccgttgcagattccaattctgcgcagttggataagcttgctcaacaaactggttgtcagactattagcccagctgatgtggtttcggatggttttcaagactacacagtggtggtcacttccccgggttggcgacctgattcgccgcttctcgttgctgctcaaagcgctggtcttgaggtgattggcgatgttgagctggtgtaccgactcgatcgcgccgaggtatttggcccgaagcgaacctggatggtggttaccggtactaacggcaaaaccactacaacggccatgctcgcagaaatcatgcaacattctggtgcgcgtgctgctgccgtcggcaacatcggtgtatcggttgcagatgctgtgaggacccaaccacgtattgatgtgttagttgcggagctgtcgagttttcagctgcattggtcttccactttggtccctgacgttggaattttgctcaatcttgctgatgatcacattgattggcacggtagtttcgcccaatatgcacaggataaggcgaaagtattagctgctcccactgcaattgcgggctttgacaacggacatgtgatgacggaaacgacacgcatccaacgtgccgaagatgctgatcccatcatcggattcaccttaggcgagccagctaaaggcatggtaggcgtgcgcgatggacaacttatcgactgtgcatttggcgataacgtggtgttgcgatctgctgaaggaatcgaacctgcaggtccggcagggcttaacgacgcccttgctgcggctgcggcagcgcgctcgatgggagtgagtgccgtatgtattgaagaagccctgtctaagtttgaagtcgcaggacaccgtggacaatgcgtggggcgtcatagggaagtagttgcgattgataattcgaaagcaacgaacccacatgctgctgatagcgcacttgctggtttctcttcagtagtgtgggttgctggtgggcagctcaagggagcagaaatcgatgagctcattgttcgacatgccggacgaatcaaagcagtagcgttgttgggcgttgatcgtgatgtgatcgaagattctgttcggactcatattcctggtattccggtactgagcgtttctgagactgatccacgtcgcgcaatggatgaggcggtagcgtggtcggtatcccaagcagaggcaggcgatgcgatcgtattggctcctgcagcagctagtcttgatatgtacaccggcatggggcagcgtggagacatgttcgctacagcgattgcacaacatttacacgac

SEQ ID NO: 17841 - DNA, 1098 bp, Cornyebacterium diptheriae
atgacccagatcattattgcgggcgctgtgggccttttggtgtcgatctttgttacacccgttttgattcggcgttttagcgccgagggactggggcaagagatccgtgaagatggtcctaaatcgcatttgcgcaagcgcggcacccccaccatgggtggtatcgcaatcttgatcggtatcaccgttgcttatgcagtcacggggatcgtgggtcaagtaaccggaactggtggtttgacagcttctggtttgctggttttaggcttgacacttgcactcggtggtcttggttttgctgatgactttatcaagctctacatggggcgcaaccttggtttgaacaagaaagctaagttgatcggacagttggcgatttcacttatctttggtgcgctcattcttcttttccctaacgctgatggactaaccccaggatctagtcacttaagcttcttgcgtgatttgcccacagttgaccttgccattgggcctaaggcagtaggaatcgcaattttccttctgttcatttacattctgatttctgcatggtctaacgcagtaaatctaaccgatggcttggatggcttggcagcgggctcaactgccatcgtgatgggtacgtacaccgttattacgttctggcagttccggaactcatgctcggcaggagcacaacctggctgttacgacgtccgtgatccattagatcttgcaattttggctgctgctggtttgggcgcgtgtttgggctttttgtggtggaatgctgctcccgccaagatctttatgggagataccggttctctcgcgctcggtggcctcgttgcgggattgtccgtggcctctcgtacagagcttctcatgattattgttggtgctttgtttgtactcgaagctgcttcggtggttatccaggtcgcgggttaccgaacaaagaagattcgtattttccggatggcgccgttccatcatcactttgaaaacggtggttgggccgagacaactgttgtgattcgattctggctgatcgccgcggtggctgcgctcatcggtgcatccattttctatggtgagtggctatctcttacaggagta

SEQ ID NO: 17842 - DNA, 609 bp, Cornyebacterium diptheriae
atgcgcgagcaaggattggtatcgaagatcaggcgtaagaagtacaactcctaccgtggcactgtcagccacattgctgacaacgtgcttggccgacgcttcatccaagacgcaccgaacaaagtgtgggttagtgacgtcacagagttccgggtagccggcaccaaggtatacctgtcgccagtcatggatctgtttgaccgaaccatcttggcgcatactctgtctacgtcaccgaatactcagctcacatcacgctcgttggccgatgccattgccatgtttagtccgggtaaaggactgattgtgcacactgaccaaggctttcagtaccaacacgcaagctggcgcaccctgattaaaagcgttggcggtgtgcagtcaatgtcacgcaaaggcaattgctacgacaacgcggtgatggaaaatttcttcggacacttgaaatcagagatgtactacggcgcgtctttcaccagtgtcgatgagctttgccaagctatcgatgagtacatactgtggtacaacacgtaccgactccaagaacgattcaagggtctggctccgatgcaatatcggaaccagacccttgcaaagaccctaaccgtt

SEQ ID NO: 17843 - DNA, 1488 bp, Cornyebacterium diptheriae
atgattgatctgactgttgaacagatcgcacgtatcgtgggtggaacactcacacaaggcactgatccagaaaccgtagtgacgggacctgtggaatttgactcgcgcaaggtatcggaaggttctttgtttgtggcgttggccggagcgcgtgtcgacggccatgatttcgtgccagctgcgttagaaagtggcgctgcagcagcattggtagcgcatcctgtgaagatcgattctggattagcgcccgctattgtggtgccacctgcgactggtcaacagcaatcggccaacagttacgcaactgaacatgatgaagacggttcagttgcggctgttctccaaggtatgggacttattgcgcgaagagtcatcgatacgttgactgctcaggggttaaccgtcatgggtgttactggttcggcagggaaaacctcgaccaaagacatgttggcgtcaattctgagtaatcaggcccctacagtggcccctcctggatctttcaataacgagatcgggcatccatatacagctttacgctgtaccgaacagacccgttatctagtagcggagatgtctgcccgcggcattggccacatagcacatctagcacagattgcccctcctaaaatcggtgttgtgctcaatgttggcaccgcgcatctaggcgaatttggttcgcgcgaagttattgctcaagccaaaggcgaattagtggaggcacttcctcacgacggtgtggctgtacttaatgcagatgatgatctcgttgcaggcatgcgtactcgaactgatgcgaaggtgatcactttttccgcgaattcgcaggacgcggatgtttatgccaccgatattgaacttgacgattatgcgcgtgctcgttttaccctccacattggcgaagcggagaacgtcgtaacgcttcgagttgctggccagcatcaagtttccaatgcactggcagctacagcggcggcatatgcggcaggcatagccattgacgatattgccgaagcattgagtaaccaccttggcgcttctgcgcaccgtatggctcttatgcaccgtagcgatggcgcaaccatcattgatgatgcttataacgccaacactgagtcgatgcgtgccggtcttacggcgctttccactactgctcacaacaagtcgcacaagggcgaagcctcgcacgcgtgggcagtgttgggtcccatgagtgagctaggggaggagtcggttgcggcacacgaagagattggcaggctcctcggtgagttgaatgtgcatggattaatcgttgtcggagactctgctgattctttggcattggcagatggagcccgacgcagcaatgtgactacacttatggctcgcgataccgcagaagcagcagatctccttgatcagaatatgggttctgcagacgtggctcttgtaaaagcatctaatgcatatcgtttgtgggaaaccgcagagattttagcttcaaaa

SEQ ID NO: 17844 - DNA, 1473 bp, Cornyebacterium diptheriae
gtgggagaaactacagcgggtgcaacagagatttcggcgattggactggattcatcgcagctaccagccgacgcaatctttgctgcacttccaggcaccaaaactcatggagctcactacgctagccaagggaaagcagcggcagcactagctgtattaagcgatcacgagggaacccaaatacttgtggattccggtgagaaacgtcccattatcgaggtagatgatgttcgcagagtcctaggaatactcagtgcggagatttatgggcacccttctcacgaaatgaccatcattggtgtgaccggaaccagcggtaaaaccacgacgagttatatccttgagcgcggtttgatggcagccggcttacacgtcgggttgatcggcactactggaactcgtatcaatggacgaaaagtccctactaaattgacaacccctgaagctcccacgctgcagcagctatttagtcaaatgaaggcagaaggcgtaagccacgtggtgatggaagtatctagccatgcgctggcgttggggcgtgtaacagggacgcggtttagtgcagctggctttaccaacctgtcacaggatcaccttgattttcatcctacgatgcaagagtatttcgaggctaaagcgctgttctttgacccagcttcgccgatacacgctgaaaagtctgttgtgtgcgtaaacgatctctggggcaaaaacatggctgagcgtgctggagcagacgccatcactgtgtgcactgaacaagaggcagctgcccaccaagctgattactgggtaagcaatatcgacgttaaccctgtcggcgcgcagtcatttatcgtgcatcatggcgcacagtcaacggatgtgcatttgccactgcctggcggctttaatattgcgaatacagtcgttgcgctggctttggcggaatccgtgggggttgatacggacgcctttattcgtggcattgctgacgttgcagttccaggacgtatggagcgcatcgatcgaggtcaagagtttcttgctgtcgtggactatgcccataaaccagcagccgtagctgtagttatagatacggtccgtgaccaagttccaggacggattgcggtcgtcgtaggagcaggcggcgatcgtgattccggcaaacggccaattatgggcgccgaagcagcgcgtcgagcagatttggtcattgtgactgacgataaccctaggtcggaggatcctgcgaaaattcgtgaggcagtattagaaggtgcccatggtgttgcaggatcagcagatatccgtgaaatcggagatcgtagggaagcaattcgtattgcagtgcaatgggctcagcccggcgacgccgtcatcgttgctggaaaaggccatgaagttggtcagctcattaacggagtcgatcatcacttcgatgatcgtgaggaagtagcagctgctctgcatgatcaagggttcgacctcgat

SEQ ID NO: 17845 - DNA, 846 bp, Cornyebacterium diptheriae
gtgggagagttttatctttcctacatcctcgactttttcggaggcatcatgactcttccttctccatcggttcatgcgtttgctgttgttacgggcgctagtcaaggtattggacgtgcgatggctcgggatttggctcggatgggccataatgtgttgttggttgctcggcgcgaggatgtgctgcgcgagttggcggatcagttgatgactgaccacagcgtggtggctgaggtgtacccgtgtgatttggctgatgctgatgatttgcgtggtcttgttgcggagttgcagggccgtgaggtcaacatcattgttaattccgctggtattgctagttttggcccgtttatggatcaggattggcagtatgagtcgaagcagtttgatttgaatgctcgagcggtttttgaactcactcatgcggtgttgccggggatggtggcgcggaagtcgggggcgatttgtaatgtgggctcggctgcgggcaatgtgccgattccgaataatgcgacgtatgtgttaactaaggcgggggtgaatgcgtttacggaggcgttgcattatgaactgcggaagtcgggggtggcgtgtacgttgttggcgccggggccggtgcgtgaggctgtgattccggatgcggagaagtcgattgtggatcgtgttgtgccggatttcttgtggacgacctatgagtcttgctcgagagaaacgttggaggcgatggcgtcgaataggcgtcgtgtggtgccagggcctctgtcgaagataatgaatgcggtgtcgttggtggcgcctacggcggtgttggctcctgtgatggggtggttctacgccaagatggcg

SEQ ID NO: 17846 - DNA, 1827 bp, Cornyebacterium diptheriae
gtgctggtagcggccatacttatcgcgcgccttggttgggtacaactcgtttggggaccggatctttcagaaaaagcatctgcacagcgcactcgagtatttgtcgatgctgcacgtcgtggcgagatttatgacaacacgggccaattgttggcatatacaatgcaagctcgatcgctgacggcgtcgccaaagcaattgcgcaaagagattgaatacactgccaagatcgagctgcaggacgaaaaagagtattccagttgggatgaaaatcagaggaagaaaaagattgaagacaaggtagatagctacctagaagagtattcaaacgaaattccgaagatcatcaaagactcggaagcatctgctaacgacatcaagtcaaaagatattctgaaaaaactaaaagctgatactagctatgaggttttagtacgaaacgttgacccagatgttgccgaaaatattgcgcagaaatttcatggtatcgccgccgatctccaacagatccgtcagtacccgaatggtgctgtcgcagaaaacgtgattggcaagattagtcaagatggacaaggtcagtttggtttcgagtcatcgaataattctgtgctttcggggattgacggacgcaaaactcttgatgtcgctgcgagtggagaagtaatcccaggttcgctacgcgatgaagtccccgcaactaacggggccaatgtcactttgacgttagacctagacatgcagacctatgtgcagcagcaattggaacaagcagtgtccaattccggtgcccaaagtgcctctgcagtagtgctagatgtgaaaaccggaaaagttcttaccatggcaaattccggaacgatcaacccaaatggtgatattgaaaagcagctcaaagacaataagtcttttgaaaacaccaccatttcttcaccatttgagcctgggtcagttgccaagatcattaccgctgcgggagttattgaagacggcaaatcaaccccagatgaagttttgcaagtacctggcagtatcgagatgtcgggcgtaaacgtgcgggacgcgtgggagcatggaacagttgggtataccacaactggcatcttcggtaagtcctcgaacgtcggtactcttatgctcgcgcagcgattaggagagcaacgatttaacgatcttcttcatcgctttggaatcggacaaaatacaggtatcgaacttcccgtagagtcacagggcctcctacccgacatttcccagtggtctggcggaacctttgcaaacctccctattggacagggcatgtctgtgacgctgctccaaatggcaggtatttaccaagctttggccaatgatgggcagcgaatcgaaccacgcattattgaaaaagtagtggattcctctggaaacgaagtcgaacaacagccgcctgcagaaacccgagtcgtgtctgctcaaaccgcgcgtactgttgttgatatgttccgtggtgtagtgcaaaaagatcccactggaatcaatagtggtactggcgcaggtgcagctgttgatggctatcaagtcagtggtaaaaccggcactgctcagcaagtagatcccaacacgggtgcttattcgaattcgaattactggattacttttgcgggaattgccccagcggataatccgcgatttgtagtagcgcttatgctcgacaagcctcatcgcggtgtccatggcgaaggaggtcaatcggctgcgccattgttccacgatatcgcatcgtggatccttgatcgtgataatgttccactttcgccaccaatggagggacaacttgtgttgcaggctcaa

SEQ ID NO: 17847 - DNA, 1017 bp, Cornyebacterium diptheriae
atgactcacggtgagccgcaagagttttcgttcgatgttgaggaaaaccatggtcacgtcccagttcttcgagccagaatggctgagctgattgcgcctaaggttacagcgatggggtcagatgctgtcattattgatggcactcttggcgctggtgggcacagcaagtattttcttgaaagcttccccgaagctcgagttataggcctcgatcgtgatactaactctttagcttcggcgcgcgaacgactaaaagaatttggtgatcgattcctcggtattcacacccgtttcgatcgatttgccccgaaattagaggaactggctcaatctggaaaccccattgcagctactgcattggagcaaggtatcagcggtgcacttttcgacctcggggtttcatcaatgcagcttgatcaagcagagcgaggatttgcctaccgtgttgatgcgccactagatatgcgcatggataacacgatcgggatcactgcagctgatgtgttgaatacctatagccatggcgagctagcgcgcatccttaaaacctatggtgacgagcgtttcgcaggaaaaattgcaagtgcaatagtccgagagcgtgaaaaagaaccatttgacacttcggctcgtctagttgagctgctttacgcgacgattcctgcagctacgcgtcgtactggtgggcatccagccaagcgaacattccaagcgcttcggatcgaagtcaatcgagaattggaatctctagagaatgtacttcctgagattacgcagcgtttgactacaggtggacgagcagtgttcatgtcgtaccagtcgttggaagacaaaattgtcaaacgttacttcgtagacatttctacttcgaaaacgccgccggggcttcccatggagctaccggaatatgcgcccaaattcaaagtagtgacccgtggtgcagaaaaagctactgacgcggaaatcgaggaaaatcctcgcgctgcatcagtaagagttcgagcaatcgaagctctg

SEQ ID NO: 17848 - DNA, 429 bp, Cornyebacterium diptheriae
atgtttttgggtacctacacccccaagcttgatgacaaaggtcgtctcactcttccagcgaaatttcgtgaggaattagctggagggttaatggttacgaagggccaagatcattcgttagccgtataccctcgcgaagagtttgctgcacgggctcggaaagctgctgctgtgtcaaggactaatcctgaggcacgagcctttattcgtaatctcgcggcgagtgcagacgaacagcgtcccgatgggcaaggaagaatcactctttctgccgcgcatcgtacgtacgcaggcttgtctaaagagtgtgtggtgattggttctgtggactttctagagatttgggatgcggctgcttgggctgcataccaagaggaaacagaggctgctttctcttctgcggaaggtgagttcctcggtgatttcctt

SEQ ID NO: 17849 - DNA, 1029 bp, Cornyebacterium diptheriae
atgagttctgtttctgctgatgatcgacttcgtcgtcgtactggtttttctgcgctgattcgtcgccctgagttggcgagtttgctgggcgctattgctattttcgtgttgtttatggtgttggcaccgtcgtttcgttcgttggaatcgttttccacggtgttgtacgcgagttccactatcggcattgttgcggtagcggtgggcatgctgatgatcggcgcggagtttgatttgtcttctggtgtggcggtgacgagtactgcgttggcggccacgatgctgaactacaatttacacctgaatagttgggtgggtgccggtatttcgttggtgtttgcgctgggtattggtgcgtggaatggttttttggtcacgcgtactggcattgatagtttcttgattactctggcaggttttttgggtttgcagggtttgaatttggcgatcactaagtgggtgacgggccaggttgctactccgattatttctgacatggaaggttttggttctgcgcgcgtggtgtttgctggcacgattcatgtgggttcggtgtcgatccgtgccacggtgttgtggtggattttcttcgtcgtgatcggttcgtggttgttgtttaaaactcggtttggcaactggatttttgcggtgggtggcgatgccgatgctgctcgtgcttcgggtgttccggttgatcgcgtaaaaattattctgtttatgtttgttggttttgcggcgtggtttgtgggcatgcacaatcttttcgcttttgattcgattcaggctggccagggagtgggtaatgagtttttgtatatcattgctgcggttattggtggctgtgcgatgacgggtggccgcggaacgatcattggtacggcgattggtgctgtgattttcggtatgactaatcagggcattgtgtacgcggggtggaatccggattggtttaagttcttccttggtgccatgttgttgtttgcggtgttgactaatacgtcgtttgctagtttgaccaaggggaggcgc

SEQ ID NO: 17850 - DNA, 222 bp, Cornyebacterium diptheriae
atgtcgcgtgaggtcaactgctacgacaacgcggtgatggagaacttcttcggtcatctggagaccaaaatgtactacggcgagcacttcgccagtgttgatgagttttactgggccgtagatgattacatcttctggtacaacaacgaccggcttcaacaacggttcaagggcctgactccgatgcagtatcgggatcagacccttaaggccctaaccacc

SEQ ID NO: 17851 - DNA, 666 bp, Cornyebacterium diptheriae
atgctgcccacgcctaggtggggtcgagactttgatccgcggtgctactttgtcaccggcacgggctctgtggatcacattgtcgacgtagcgcgccaagcagcgcgcgccggcgctgggctcatccaagtgcgcagcaaacccattgctgcccgtgacctgtacattcttggccgtgaggtagcccgcgcggtggcggaggttaatcctcgcacccgtgtgcttatcgacgaccgcgtggatgtcgcccttgcgttaatgaataacggcgagcacatccacggggtacatgttggccaagatgaccttccggtgcgccatgttcgcgccttgttgggtgataacgccatcatcggcctcaccacgggcaccttggagctagttcgtgcttcgcgccaggttgccgaggtgatcgactacatcggtgccggtccatttcgacccacaccgacaaaagattcgggccgtgcccccgtgggcttagctggctatccgccactggttgctgaatcattggtgccagttgttgccattggggatgttcgccccgaagatgcggctgatcttgctgcaacgggggtcgctggtgtggcaattgtgcgcgcattaatgaactcacagggcgtagcaaccgatgtaaaactcgtattgaaaggttttgcacaa

SEQ ID NO: 17852 - DNA, 1365 bp, Cornyebacterium diptheriae
atgcagccatcgttcctgcttacccgtgctggacgtaacttcaacggctttgatgttgatggtttcgccgatcatcttggcctcccagtccgtcagctagttgattcgactccggatcttgcggctatcctcgctgcccatcctgctgctaccccgagcttgttcattggttccggaaacgtgaactttgatgctaaggctgcgtctgctttgggtgtgccactacttttgcttatcgacgcccctggtatgcacattgatcttgccaagcaggagtgcgaggaacttggggcagttgtggcaagtgtctttactgccgatgaggccgtttccgctgagggcattgcgcgcattaaggcttctgctgttgaggcccctgttgtgatgagtgcgccggtgtttgagtcgtggctgttggagcaggctaagtcgaagaatgcgcacatcgtgttgccagaaggtgacgatgatcgtattttgcaggctgctcatcagctgcttgctcaagagatttgtgagttgaccattttgggtgatcctgaggccattactgcacgtgcgcaggagttgggcttggatctttcggctgctcatttgcagaaccctgagactgatccgaatgcggagaagttcgcggaagatttcgctgagctgcgtaaatctaagggtatgaccttggagcaggctcgggagacgatgaaggatatctcctactacgccaccatgatgattcatgaggggcttgccgacggcatggtgtcgggtgcagcgcacaccactgcgcacaccattaagccaagcttccagatcattaagaccaagccaggcacgtcggttgtgtcttctatcttcttgatggtcatgcgtggccgcctgtgggctttcggcgactgtgctgtgaaccctaacccaactgccgatcagctgggtgagatcgctgctgtgtcggcaaagacggctgagcagttcggtatcgatccacgcgttgctatcttgtcctactccacgggtacttctggctctggcccagatgtggaccgcgctgttgctgcaacgaagaaggctcaggagcttgctccggagtacaagattgatggcccattgcagttcgatgctgcgtgcgatcctactgttgctgctaagaaggccccagaatctgaggttgcaggccaagcaaacgtctttattttccctgatcttgaggctggcaacatcggctacaagactgcgcagcgtaccggccatgctcttgctgttggcccgatcctgcagggcttgaacaagcctgtgaacgacctttctcgcggcgcaaccgttgccgacattgtgaacaccgtagccattactgcaattcaaggaggcaaa

SEQ ID NO: 17853 - DNA, 1836 bp, Cornyebacterium diptheriae
ttggctattcttacctccttgagtgtcgttggaactatgacgacaacggtggcggtagaatcgcaggaagttgacccttctagactgtcgcgttacaaagcgaacgaaccatgggcacttgttggccctgaagtgaaaaaccctgagtatcgaactgaggatttccgcgatccgcgtactgcggtaacggaggctcgcagtacagttaacggggtcggtgtgtctgcaatctttcataaggaagataagaccatcgaaggtgtatcgtttttgaccaacggtgctgatcagtcagagtaccgagccacgagtgaaatgcttgccggcagtccctcaccggcaagcctacctgcattgggtatttttacggcacaatctgggcatactaaaaagatcaacgacaaggaaatgctcgactataaaggtcgtattcctgttggtaccctgacgcttaagtttgaccagcctgttaaagatccaattcttgatttttcgggtttgggcggttataacatcttttcggcgcatcatgaagaggcctcgcacgaaggcattcgaaattgggaagttcgaaatggcaaaatcgttgtgacgggcgaatctgcctctgttgtgggtgcccagattaatgatcaaattcgtggatctttcaaccacactgatttggaattggaaacgcctggtgtcaaattagtcgagctggccaaaaactcgaatctaaaggtggatgaccggagtatttccactgtagctgctaataacgattatgtatgtaatactcccaacgattaccaaactttacctgaggaattggaaaacgggccaagctatgagcaaaatgacgcctttctttctccagtgatgaaaccggctggatgtggttctgttctagctcaaggtgagttttcagaactgaaatttacacttttttcatcagttgagcccatgtcaagttttgctcatgatacgcataagactggcctgttgtattttgctggtggtgtaaacgggggtaatgctaatcccgtgacaccaatcccaatgcttgagggatattcgaagccgcaggaagtctctgatactagcaatggcgatttgttccgaatgagtattcgactgccggaagagccggttaagggttctgtgtctgttggtgactttgtctggattgataaagacgctgatggtaggcaggatgacaatgagccgggtcttgctggtgttaagttgtggctttatggccctgatggtggtccggttacggatgttcatggcaaagttgtgaagtctgtaactactggtgaggatggtaagtattcgtttaaggatcttccggttcttacgggtagtgattcttacaccgtgaaggttgtggatgttcctgctggttacaaaccaacgttgtctggtactggtaaggttcctgcgtttaaggattcttctactgatttggctaagtcgacgcctggtgcgttgagtgaaaatggtgcgcaggatctgactcttgattttggttttgttaaggagtcggctacgcctagcgacccaaccgttcctggttttaaatggtggattccgttgattccattggcattggtacctttgataccaatgctcgctcaaacagttggcggatcttcggctccagcaacgagcgctccacaggtaccaaacgctcctgtttctacttcaaatgatccaaagccggctcctgtggcacagaagcctcaaaataagcagcttgctgcgactggtgcaagtgttcttggattgttggcgatggcgttagctttgattgcgggtggcgtattgcttcttcgatcaaggaaagaaagc

SEQ ID NO: 17854 - DNA, 1287 bp, Cornyebacterium diptheriae
atggcggcaatcgttattgttggagcccagtggggcgacgaaggtaaaggcaaggcaaccgacatcctcggtggccaggtcgattacgtggtaaagcctaacggtggcaataacgcgggacataccgtggttgttggcggcgagaagtacgaactcaaacttctgccagccggtgtgctttcagaaaatgcaaccccaatcctcggcaacggcgttgtgatcaacctcgaggccctctttgaagaaatggacggcctgattgcccgcggttgcgacgcatcccgcctgcgcatttcctcaaacgcccacctagtggccccataccaccagatcctcgaccgcgttcaggaacgcttcctaggcaagcgcgccatcggcaccaccggacgcggtatcggcccaacctacgctgacaaagtctcccgcgtaggtatccgcgtacaagacgttttcgacgaatccatcctgcgccaaaagatcgagtctgcactcaacgtgaagaaccagaccttggtcaagatgtataaccgtaaggctatcgtcgctgaggaaatggtgcagtacttcctcggctacgtcgagcgcctgcgccccatggtcatcgaggccgagctggagctcaaccgtggcctcgacgcgggcaaacatgtgctcatggaaggtggccaggcaaccatgctggacgttgaccacggcacctacccattcgtcacttcctccaacccaaccgcaggcggcgcctgcgtgggttccggtatcggcccaacccgtatcacttcctcgctgggcatcatcaaggcctacaccacccgcgttggtgctggcccattcccaacagagctatttgataagtggggcgagttcctgcagaccaccggcggcgaggtcggagtgaacaccggccgtaagcgtcgttgtggctggtacgactccgtggtggctcgttacgcttcccgcgttaacggcttcaccgacttgttcttgaccaagctcgatgtgctcaccggcatcggcgagatcccgatctgcgttgcttatgacgtcgacggcgtgcgtcacgacgaaatgccgatgacgcagtccgacttccaccacgccaccccaatctacgaaaccatgccagcatgggatgaggacatcactggctgcaagactttcgacgatctgccagaaaaggcacaggcttatgttcgtcgcctagaagagctttccggttgccgtatctcctacattggtgttggcccaggccgcgaccagaccatcgtgtgccacgatgtgatggaggct

SEQ ID NO: 17855 - DNA, 303 bp, Cornyebacterium diptheriae
atgagcattatcaaaatcaatgcgattacggttccggaaggccatggcccgcagctagaggagcggtttatgggacgtaagcatgctgtggattctgccccaggttttgagggcttccagctgctgcgtcctaccgctggtgagagccgctattttgtggttacccagtgggctgatgaggaatcctatgctgcgtggcgtgatggggatgcccgtcaggttcatggtggcaactcccacagcaagccgatagcaaccgacgctgagctgctggagttcgacgtagtgctcgattcacgcacc

SEQ ID NO: 17856 - DNA, 381 bp, Cornyebacterium diptheriae
atgattgttattggaaccgacatcgtgtgcattccctcttttgcgcagcaattagatcagcctggtacgcagtttgaccgggtgttttcggcccaagagttacgtgttgcggcacgctatcaggggcggcggcgtgccgagcatttggcggggcggtgggctgctaaggaggcgtttgttaaggcgtggtcgcagtcgctgtatggcaagccaccggtgttggagcacgtcgattgggctgagatcgaggtgcagccggacgcgtgggggcgggtgctggtggtgccgcgtggggaggtagcgcgtgcttgcggaattgagtgcgcgcaggtgagtatcagccatgacggaaattacgccatggcgcagtgcgtgctgggc

SEQ ID NO: 17857 - DNA, 951 bp, Cornyebacterium diptheriae
atgacgaatatgtcagaatctgtcactgtcggattcgacatcggtggaaccaatatgcgggcagcggcggtgacggattccggtttgatcatcgactccgtttcggttcctacccctaaatcttctgaggctctggaaaaaggcattatttctctggtagctcaattgcgggaaaagcatgaggtttcggctgtaggtcttgccgttgcaggttttttggatcctgattgcgaaatcgttcgctttgctcctcatctgccgtggcgtgatcgcccagtgcgtgcggaattagaggacgcgttgggacttcctgttcgtcttgaacatgatgcgaattctgcagcgtggggagaataccgcttcggagcggcacgtggttcgcaaaactgggtcttatttgcggttggcactggtatcggtgccacactgatgcatgagggtgagatctaccgtggtgcttttggtacagctcctgagttcggccaccttaccgttgtccctcaaggtcggcagtgttcttgtggcaagagtggctgtttggaacgttattgttccggcactgctattgaagcgacagcgcgtgagcttctcgacgccgatcgtggccgcgactcgatggttgctgctgcttatcattcgggcacattgagtgggaaaactgtgaccgaagcggcccgccagggtgatgtttttgccatcgaggtctttgatgattttgctgaatggatgggccgcgccttgtctatcgtgtgtgatgttttagatccgggacagatcgtgattggtggcgggttgtccacgtcaagcgatttgttcttggaaaaggctactcagcacatggcacagcagattgtcggggctgggtatcgcccccttccgacggtggtgtgtgccgaattgggtggcgatgccggtatgatcggggtatctgatctggctcggcgtcgcgtc

SEQ ID NO: 17858 - DNA, 2019 bp, Cornyebacterium diptheriae
gtgaccgatatcgttctcgccgaccgctatcgccttggcgacgtcatcggtactggtggcatgtctgaggtgtatgaggccaccgatgttcttctcggccgcaaggttgcggtaaaaatgctgcgtgccgacttggcacgggatgtgaacttccgcgagcgcttccgcagggaggcccaaaactccggcaagctcaaccaccctgcgatcgtcgcggtgtacgacaccggtgaaactccacgggctggtttaaacactccttatattgtgatggagctggtcaacggccgtaccctgcgtgacattgttcgtgaggatggtccgctaacacctagccaggcggcacatactttgatccctgtgtgccatgcgctgcaggtcagccacgatgctggcattatccaccgcgacatcaaacccgctaacgtgatgatcaccaacaccggcgcggtcaaaatcatggactttggtatcgcacgcgcgcttgacgacgccaccagcgccatgacgcagacctccgcagtgatcggcaccgcccagtatctctcaccagagcaggcacgcgggaagcttgccgacgcccgctccgatgtctacgccctaggctgtgtgctttatgaaaccctcactggtaaaccacctttcgagggtgaaacccccttcgctgttgcgtaccaacacgtacaagaagaccctgtaaagcccagcgaatacatcgctgacctctcgcctaccgcggcgattaacgtcgatgctgttgtgcttactgccatggctaagcatcctggggatcgctaccagaccgcacaagaaatgtgcgcggatcttgaacgccttgggcgcaatgcggtcactgacgcggcacgccactatgtcaccccgaccagctttgctacccaagacccagcgtctaccactgtggttccagtaacccaggtgactgagttggaccatgccgaggctggtgctggcattggtgctggtgtggttcctgccggtgccgtagctggttcggctgcggtggccggttccggtggtgcgcatgctgcaccacgatcatccaaccgtggcctgcggattctcgccgctattttggcagtactcgttttggctgtgggtgccggatttgccattgactattttggtggcggaccgttttctcagcgatccaccgtgaccatccctaagctgcaaaactccacgcagcaagatgctgtcaaccagctggaaaagctagggttacaggtcaatgtgatcgaagaacccaaccctgatattcctcgcggcaaggttattcgcaccaaccccaccgatggttccaacgtgcaacgcaactccaccgtgcgccttaccatctcctccggtaaagagatcactgaggttcccgacctcagcggtaagaacaccgccgacgcggttaagatcctcgaagccgcaggtctgcttctcgaccccaccgtgcgtgaagactcctccgacaccgtgcccaagggcgaaatcatcgaagtctcccccgcagccggatcccaagtatcccgtgggtccaaggtatccattactgtctccaccggtgtagaaacagtccgcgttcccgtgatcaccggcatgaaatgggaccaagccgaaggcaacctgacctccctaggtttcaaacccgaagtcgtccgcgttgattccgtcgaaccagccggaaccgtggtcgccgtaccagacgaaggcgccgaagtacccaagggttctagcgtcaccgtgcagatctccaacggggcaatgttcaccgtcccagagatcacccgccaaacgattgacgacgcagtgcgcatcctgcacgacgctggctggaaaggcaacgcctcccgactcatccaagcagcgaaagtgcccaccgtagctgtgaccgaccaaaacctgatcgcctcacaactaccaaccccaggcacagcactgcgcaaagacgcacccattgaaattcgcctctacgaattcaaccttgcggcactcgtgccaccagcacagcac

SEQ ID NO: 17859 - DNA, 621 bp, Cornyebacterium diptheriae
gtgaaagtactcgtagcctccaacaatgccaagaagctcggtgagctacgcaccatcttggaaaacgcaggtctgagcagcgtcgaggtagtgccgctttcggcaatcgacgcctacgacgagcccgtagaagacggccgcaccttcgccgacaacgccctaattaaggcccgtgcgggtgcacaccacagtgggcttatcacgattgccgatgactctgggttcgccgttgaagaactcaacggaatgccaggggtgctgtctgctcgctggtctgggcaacatggcaatgacgcaaccaacaacgagttggtgcttgctcagatgaaacatgtcccagaggagcgtcgacacgcggcgtttgtgtccgtctgtgcgctcgtgacccccgacggcgacgaacacatcgtcgaggggcgctgggaaggtcgcatgctcaccgcaccccgcggcgccaacggcttcggttacgaccccctgttcgtacccgccgaagaagacgcagccggcactgggcgcacctcggcagaaatgagcccagcggaaaagaacgccatctcacaccgcggcaaagcgcttcaacaactcgtccccatcatcgcgggatacagcacatttttt

SEQ ID NO: 17860 - DNA, 795 bp, Cornyebacterium diptheriae
gtgaataacgcaccgattgggattttcgattctggtgtcggcgggctgaccgttgcgcgagtgattatggagcagctgcccaacgagtcggtgatttatatcggagataccgctaacagtccgtatgggccaaagcctatcgcccaagttcgggagttgtcgctggctatcggcgaggaattagtgcgtcgtggctgcaagatgatcgtgattgcgtgcaatacggcaacgtcggcggcattgcgggaccttcgggagcgtttcgacgtccccgtcttaggcgtgattcttcccgcagtgcgcagggctgtctcaacaacccgcaacggaaaaatcggtgtgattggtacggaaggcaccattaagtcgggggcgtatcaagaactatttgcggcgagcccctcggttgaggtgcatgcacaggcgtgcccaagttttgtcagctttgtagaacgtggcataacgtcgggccggcagatcttgggggttgcgcaaggatatgtggaacctctgcaagccgcaggcgtggatactttggtgctcgggtgcactcattacccgttgctgacgggtgtgattcagctggcgatgggcgatcgcgtcacgttggtgtcgtcggcagaagaaaccgcgaaggacgtttttaaaacgttgagcatgacagacatgctggccagcgaggattccacaccagttcggacatttgaatcgacaggggatccggtgctgttcgcacagttggcggagcggttcttggggcctcatgtgacgaacgtggaaaaattcgcgggtatg

SEQ ID NO: 17861 - DNA, 1311 bp, Cornyebacterium diptheriae
gtgactcataatcaatcaactgcgcttctcaccgacatgtatgagctgaccatgttacagtcagcgcttgccgacggcaccgcagagcgccaatgcaccttcgaggtcttcggtcgacgtcttcctaacgagcgccgctatggcgttgtcgcaggtacgccccgtgtactcgaagctgttcaaaacttccggttcaccgaagctcagcttgccagcctgacgttcctcaacgacaccaccctcgaatacctgcgtaactaccgcttcgcaggacatatcgacggctaccgcgagggcgaactgtacttcccgcattcccccattttgaccgttcgtggcaccttcgccgaatgcgtgatcctcgaaaccgtcatcttgtccatcatgaatgcagactccgccgtggcaactgcagcagctcgcatggtcaccgccgccgatggccgtaccatcatcgagatgggctctcgtcgaacccacgaatacgcagctgtcactgcaacccgtgcagcctatcttgcaggttttagtgctacttccaatttggaagccgtgcaccggtatggcattccaggatctggaacggcagcccatgcgtggacgcttttgcatgttaacgaggatggcacacccaatgagaagagtgccttcgagtctcaggtaagagcccagggcactggaactactttgctcatcgacacctatgacatcgctcaaggtgtgcgcaatgcaatcgaggtggctggccccgagctcggcgcagtacgaatcgactccggcgatcttggcgtgatgacccgtaagatccgtcaagagttggataatcttggtgctcataacactcaaattgtggtgtcctccgatcttgatgaatatgccatcgctggtcttcgcggcaatccagtcgatgtttttggtgttggcacatctgttgttactggttccggcgctcctactgctggcatggtgtacaaactggtggaagtcgatggcaatcctgtttctaaacgctcccgtggcaaaggaatgctcggtggcgctaagcgtgcagcccgtactcaccgtgcgtctggtaccgctgtggaagaactcgtgttcccttatgaacatccagtcccccaggttggcactctcacgtcggtagagctcaccattccactcatgcgtgatggcgtggtcgtggaggggcttcctactttggaagaatcccgtgcttacttagcgcaacaactcgtcaccatcccttgggaaggattggctttaagccgagacgaacctgtcttggcaacgcgccatgtgggattcgatcag

SEQ ID NO: 17862 - DNA, 1032 bp, Cornyebacterium diptheriae
atgcctatcgcaacaccagaggtctacaacgagatgcttgaccgcgctaaggcaggcggattcgcctacccagccatcaactgcacctcctctgaaaccatcaacgcagcattgcgtggatttgctgaggcggagtccgacggcatcatccagttctctacaggtggcgcagaatttggctccggtctatccgttaagaacaaggttgcaggcgcttgcgcactggcagccttcgctcatgaggcagcaaagcactacggcatcaacgtcgcattgcacaccgaccactgccagaaggaagttcttgacgagtacgttcgcccactcatcgccatctcccaagagcgcgtagaccgcggcgagcagccactattccagtcccacatgtgggatggttccgcaattccaatcgacgagaacctcgtcattgcgcaggagctgctggagaaggcacgcaaggcccacatcattcttgaagctgagatcggtgttgttggcggcgaagaagacggtgttgaagccaaggctggcgctaacctctacacctctccagaggactttgaaaagaccatcgacgctctcggcaccggtgaaaagggccgctacctgctcgccgctaccttcggcaacgttcacggtgtgtacaagccaggtaacgtcaagctgcgcccagaggttctccttgagggccagaaggttgctcgcgagaagttgggtctggatgactccgcactcccattcgacttcgtcttccacggtggctccggctccgagaaggaaaagatcgaagaggcactcggctacggcgttatcaagatgaacgttgacaccgacacccagtacgcattcacccgcccagtcgtcacccacatgttcaccaactacgacggtgtactcaagatcgacggcgaagtaggaaacaagaaggtctacgacccacgctcctacatgaagaaggctgagcaggctatggctgaccgtatcatcgaggcctgccaggatctgcactctgttggaaccactttgagcaag

SEQ ID NO: 17863 - DNA, 531 bp, Cornyebacterium diptheriae
atgtccaaaaaggccgaacttgcagagctggtcaaggaactcgccgttgttcacggcaaggttacgttgtcgtctggaaaggaagcggattactacgttgacctgcgtcgtgctaccttgcacgcccgcgcttctcgcctgattggtgagctgctgcgtgagctgactgccgactgggactatgtggccgtgggtggtttgaccttgggtgccgatccggtggctacctccgttatgcatgctgatggccgcgaaatccatgcgtttgtggtgcgtaaagaggctaagaagcacggcatgcagcgtcgtatagagggccccgatgtagtgggtaagaaagtgttagtggtggaagacaccaccacgactggcaactctccgctgactgctgtcaaggcgctgcgtgaggcgggtgctgaggttgtgggcgtagcaaccgttgtggatcgtgctactggcgctgccgatgtgatcgctgcggagggcttagagtaccgctacattttgggcttggaggacttgggtcttgct

SEQ ID NO: 17864 - DNA, 1125 bp, Cornyebacterium diptheriae
gtgcggggcgtgaagaaaaagagccatttgctatccggaattaccggcggaactgttgcagtgctgacgtccgcgatgctggccatcgcacccgcgcacgcccttccgttgcccatccccatcggagcgtcctcgggtatcgacgtctccggccaccaacacccaggcggaatcgccatcgactggaagagcgtccaacgtgacggtcaaagcttcgcattcgtcaaagcctccgaaggtgaaggctggagcaacgactacttcacccaagacgccaaacaggcagccaacagtggcctcaaagtaggcacctaccactacgcgcgtccctccaaagacgcccgcacccaagcacgccactacgcagcgcaggtcgcccaaatcaacgaccactccctgccacccgtactcgacatcgaggtcgcagaaggcaaaaccccagaacagctcgcagcctggaccaaaacattcctcaacgaatttgagtcccaatccggccgcaagccaatgatctacacctaccgctacttctggacccacgacatggccaacaccaagcagttcgcggaatacccactctggctggcggcctaccaaacccaagccccagaaccagttggcggttgggacaccatcgacttctggcagcgctccggaagcggacgcattaatggcatcgtcggcgacgtagacctcaacctcttcaacggtgacgacgcacaactcgacgccttcgcggcgggcaactacgcctccgccggcggcaagtttgcatccatctcactccccggtatcgcagacctcggcggcgactctcaggctcttgtcagtgctgttgcagcgctggcagccggcgtagccgcagcgccacaggtagcacaagcagctgaaaacgcaggcttgagcaccgaaggagcagaagaactgatcaaggtcgtccaagacctcatcaactccggcaacctccccatcgaccagctcaaagacctcgcagccggaaactactcggtgggtgacctcgtgatcctgctcgacaacgcccagcaccttgctgccacatcaagcgagccacaaaaccagaacatcaacgtcgatcagctcgtcgccttggcgaagaactttatc

SEQ ID NO: 17865 - DNA, 828 bp, Cornyebacterium diptheriae
atgatcgagtttgagtcggtgagtaagcgctatggcaagcgtggtgaaaaagccgtggccgatttcagcctgtttatccccaagggcaagacgacggtgttggtggggtcgtcgggaagcggtaagaccacgctgttgcgcatgattaatcgcatggtcgagcccaccgagggccgtgtgattgtgcgcggtaaggatgtcgctgagacggatccggtgcagttacgacgttccatcggctatgtgattcaaagcgctgggttgttgccacaccgcaccgtgattcaaaacattgctttggttcccacgctcaacaaggagcccaaagctgaaattgagcggcgtgccaaacaagcgcttgccgacgtcaacctggagccgtcgttagccaaccgctaccctggcgagctctccggcggccaacaacaacgcgtcggtgtggcgcgggcgctggcctccgaccccgacatcttgctcatggacgagcccttcggcgcagtggatcccatcgtgcgacgctcattgcaaaaacaactcatcgacttgcaatcccgactgcataaaacggtggtcatggtcacccacgacatcgacgaggccttctgcgtaggcgaccacatcgtggtgctagaaaagggtggcaagattgcccagcagggctcccccgcccatattttcgcccaccccgccaatgacttcgtcgcatccttcttgggctctgaccaggaaaatcgcagcctgcacaccgagcttatcgacggccacaccgtagtcgttgacaccttcggcaggccgcttggaaccctaggtgatggtgccacatgtggc

SEQ ID NO: 17866 - DNA, 984 bp, Cornyebacterium diptheriae
gtgactacgtacaacgcatactttgaatctcatccaaatccggtagcggctattaactggaactccattccagatgagaaggatcttgaagtttgggatcgtctgaccggtaacttctggcttccagaaaaaatcccagtatctaacgacattaagagctggaacacccttaatgatctggaaaagcaaaccaccatgcgcgtgttcactggcctgacattgctggatactattcagggaaccgttggcgctgtgtcgatgcttccggatgccgtgtctcttcatgaggaggccgtgtatacaaacattgccttcatggaaagcgttcacgcaaagagctattccaatatctttatgactcttgcgtccacgccagaaattaacgacgccttccgctggtctgaggaaaacgaaaacctgcagaagaaagcgaagatcatcctctcttactacgagggcgacgatccgctgaagcgcaaggttgcatccaccttgttggagtccttcctgttctactccggcttctatcttccaatgtattggtcgagccacgccaagctcaccaataccgcggacattattcgcttgattattcgcgatgaagcggtccatggctattacattggctataagttccagcaggcgctgcgtaaggaaactccagaacgccaggcggagctgaaggggtacaccttcgacttgctttacgatctctatgacaatgagatccagtacaccgaagacttgtatgacgatcttggctggaccgaagacgtcaagcgcttcctgcggtacaacgcaaacaaggcgttgaacaacttgggttacgaggcactgttcccggcggacgagtgccgtgtttcgccagcaattctttctgcgctgtcgccgaacgctgatgagaatcacgacttcttctcagggtccggttcttcctacgtgatcggcaaggctgagaacaccacggacgacgactgggatttc

SEQ ID NO: 17867 - DNA, 3198 bp, Cornyebacterium diptheriae
gtgtttagtgaagacatgctagagcgactggctttggaaaagctgggtgataacgactggcagccactccacggcaccgcagtcgcgccgggctctggtgagcgccaaaactggaaagaaatagtcctccggcaaacgctgaatgaggctgtctccaagctgaacccagaagtacccgaggagtttctacaacaggccatcggcgaactgctcacgccaaagtcccaggatcccgtggcggaaaacctgcgcgtgcatcagatgctggtacagggatactcgggaattgaatactacgacctcgacgggcagcgtcagaatccgacgatctattttgtgtcgtccaacgtggataaaaacgactataaagtggtcaaccaggtcatcatccgcaacgtggaatatgagcgtcgtttcgacgtagtggcctacatcaacggtctgccggttgcattctttgagctgaagaaaccctccggtaaatccactgctgaagaagcattcaaccagctccaaacctatgtccacgagttccccatggcattccgctttgccaacgtcgtggtggcaagcgatggcattgacgcgcgctacggcaccccgtttaccccgctgaaccacatgtcgccgtggaacgtggatgacgacggcaagccaatcaagatggaccagccggatagctccggtgagatcccgctcgggctggaaaacgtgatctggggtgtattcaaccaagtccgattcctgcagctcatgcgcgaatacaccgcgtttgatgacaccgagcgcggtctgtacatgcgcatcgccaagccgcaccagtactttgctgtgaccaaggctgccggcaccaccatgcaggctgtgcgaagcgacggcagggctggcgtggtctggcacacccagggctcaggcaagtccatggaaatggaaatgtacacagccaaagtgatgcgcgccccggagctggaaagcccaaccatcatcgtgattaacgaccgcacggaactcgacggccagctctacagcaccttcctcgccagcaccctgttgccggaaaagccccgccagattgaagaccgcgatgacctgcgcaccgcattggccacacgcacctcgggcggtatttacttcaccaccttgcagaagttcggcctgaccgcggacgagcgtaatgcccacgccaagcacccggtgctgtcgcagcgacacaacatcattgtcattgctgatgaagcccacaggtcgcactacggcttcggggcaaaccgtgacggatatgccgcacacttgcgctcagcgttgcctaacgcgaccatgattgccttcaccggcacgccgatttctgaattggaccgcaacactaggaaagtattcggcgatgacattgacgtgtatgacctgcagcgcgcagtcgacgatggtgcgaccgtgcccgtttacttcgagccacggctaatcccgctggcccgggtccaaggcatcaccgatgagtacatcgacgccaccgccgatgaggcactcgaaggcctcagcgagtccgagcgtgcccgaatccagcgcaccactgctgctctcgaagccatgtatggtgccgacgaccgcttggacacgcttgtcgacgacctactgttgcggtgggaagaccgtaagaccgtcatgcaggacttcatcggatgcccaggcaaagccatgatcgtcacatctactcgtagtatcgcaatgaagatttacgacaagatcatcgcgaagcaccccgattggcatagcgatgctgacgacaagggcaagatcaaagttgtgtactccgcgaatccctcggacaccgcggagatcaagaagcatatgcgtcggccgagcgctattaaggctgtcaaagaacgtgtgaagaatccagacgacgagctggaaatcatcatcgtgaaagacatgatgctcaccggcttcgacgcgccaccgctgcacacgttgttcattgaccgaccattgcgcggtgcattgctcatgcagactctcgcgcgcgtgaaccgcaccttccgaggcaagcaagatggtctgctcatcgcatacgcgcccctgaccgacaacctgaaggaagcgctcgatgagttcaccgtcgatgcagagaaatccggtgagaaagtcatcggccagcatgccgcggagacgctgaccatcgcgcagcagttcttggggcaaatccacgaactagtgacggtagattggcacacaaagctgcaaagtggtgacgtgcgcggggcactggcaacggtggtgggatttctacgttcgccgcagacactagggaacactgacccagaagacccaatggcgcgaccggtggcgaagaagttccgagaactttctagcgcgcttgcgcgatcttgggcgattgccgtgaccgctgacggcgctgatgagattcgatcggaagtcgagttctaccttgaggcccgccagtggctgatcaagatagaagcagcggacagagcaagtcgcggtgaaccgatttccgataccgcgcgacgtatcttaggccagctcgtcgtcgatgctgctgaaagccgtgaggtgttggacatctacgcggaaattggacaggatgtgccgaacctgcaagagcttgctagccaaggtttcagcgaaaagaacgtcaagtccaacattgaaattgcgatcgaggcgctgagagcgaagctccaacagggagtacgtgacgcgaccggaaataacgaactgcgcagccaactattttcggagcgtatccgagaggtgatgacgcgatacaccaaccagcagctcaccgctgccgaagtgatcgctgagctagtgaagctatcgaaggaagtggttgaggaatcacgtcgtggcgagaagttcgcgcctgctctgtccaacgacgagctgacgttcttcgatgtggtgtcgcagaacgaatctgccgtcgatgtgctcggtgattccgtccttgccgacatcgcccgtgacctggttgccaccatgcgtcgtgacacccgcaccgactggaccgtccgcgacgacgtcaaagccaagctacgccgcaccatcaagttgctgctgcgtaaatacgggtatccaccagaccgacaaaaagaagccacccagttggtgtacgaacagatggaaaagttcgcgccaaggtatgcgggtagacttggaagtgaaggagtcaagccc

SEQ ID NO: 17868 - DNA, 2157 bp, Cornyebacterium diptheriae
gtgaatcaatccatgggaaggcacgtcgctgagccagtttcccgcgctgagcaactcgactaccacgcactgaatgcactgttgaacctttatgacgcaaacgggcgaatccaatttgataaagaccgcgaagcggccaaccagttcttcctgcagcacgtcaatcaaaacacagtgttcttccacgacctagaagaaaagatcgaatacctcgtagaaaacaactactacgagccagaagtgctggacaagtactcttttgcaggcatcaaagacctgttcaagcaggcctacgcgcataagttccgcttcaagtcattcttgggtgcctacaagtactacacctcgtacacgctcaaaaccttcgacggtcgacgctacctcgagcgcttcgaagatcgcgtgtgcatggtggcactaacgcttgccgacggatccatcgagctggctcgtaacctcgttgacgagatcatgaccggacgtttccagccggcaaccccgaccttccttaactccggtaaggcacagcgcggcgaaccagtatcgtgcttcttgttgcgtatcgaagacaacatggagtcgatcggacgttccattaactccgcattgcagctgtccaagcgtggtggtggcgtggcgttgctgctgagcaacctgcgtgaatccggtgcaccgatcaagaagattgagaaccagtcttccggtgttatccctgtgatgaagctgctcgaggattccttctcctacgctaaccagctgggcgcacgtcaaggtgcaggtgcggtgtacctgaatgctcaccacccagacatcttgaacttcctggacaccaagcgcgaaaatgccgatgagaagatccgcattaagacattgtcgctgggcattgtgatcccagacatcacctttgagctggctaagcgaaacgaagacatgtatctgtttagcccctacgacgtcgagcgcgtctacggtaagccatttgcggatatctctgtcaccgaactctatgccgacatggtcgaagatccgcgtatccgcaagaccaagatcaacgcccgttcgttcttccaaacgatcgccgagatccagttcgagtccggttacccgtacatcatgttcgaagataccgttaaccgcgccaaccccatcgaaggccggattaacatgtctaacctgtgctcggagatcctgcaggtcaactcgccatcagttcttaatgctgatctgacctacgagcatgtcggcgaagacatctcgtgcaaccttggctccatgaacatcgctatggccatggattccactgactttgctaagaccgtggaaaccgcgattcgtggtttgaccgcggtgtccgagcagacctccatcgattccgtgccatccattaagaagggcaacgatgcagctcatgccatcggccttggccagatgaacctgcacggctacttgggtcgtgagcatatcttctacggatcagaagaaggcttggactttaccaacgcctactttgccgccgtgttgtatcaatgcctgcgcgcttctcacaagattgctgcggaacgcggccagcgttttgaaggctttgaaacttccgactatgccgatggcagctactttgatcgtttcgatccagctgactttgcgccgaagaccgcaaaggttcaagagctatttgaaaactccaccattgttgtgcctactgcagaggactgggaagagctcaagcagttggtcatgaaggacggcttgtttaaccgctaccttcaggctgtgcctccgacgggttcgatctcgtacatcaacaactccacctcgtcgattcacccgatcgcctctcgtattgagatccgtaaggaaggcaagatcggtcgtgtgtactacccagcgccgcacatggataacgacaacttggagtactaccaagatgcctatgagattggctttgaaaaggttattgatacctatgcggtagccaccaagtatgttgaccagggactttcgttgacgctgttcttcaaggacaacgtgacaacccgtgacatcaaccgcgcgcagatctacgcatggcgtaaaggaattaagtccctgtactatattcgcctccgccaagttgcccttgagggtaccgaggtcgagggttgcgtatcctgcatgcta

SEQ ID NO: 17869 - DNA, 762 bp, Cornyebacterium diptheriae
atggaagaacacaatcttcgcactgttggtgaagtagcagacctcgtcggtgtaagcgtgcgcactcttcaccattgggatgacatcggactagtcagcccccaatggcgtagttgggccgattaccgcctctacagcgaggaggatgttgcccagatttaccaggtcttgctgtaccgcgaaactggcatgccgctaaaaaccatccgcgacatgctcgaaggcaacagctctcccgcggaccatctccaacgacagctggaacttctgcaacagcggaaacatcgtgtgacttccatgatcgaatctgtacatcaacttttggaggacaccatgaaccacaacgaaccgctctctgcagaccacaccgcgaaggtccttggccgcgaatggagcaagtgggagaaggaagccgaggagcgatggggtgacaccgaagactgggcaatcttccaacagcgcgcagcacagatgggcaaggacgactttgctgctcggcagatggtcatgcacaagctagaccagcgacttgcccaagctttcgaatcgggtatggcccctgattccccagacgcacatgcactcgcagaggaacaccgggcatgtttatcgcaatggtttccggtttcacacagcaagcatgcgctgattgctcagggctacactgccgatccgcgctttaccgcgcattatgacaagtacgcgaaaggcttggcggtctggttggagaaggctattcagagcaacgctcaacgccacacc

SEQ ID NO: 17870 - DNA, 2547 bp, Cornyebacterium diptheriae
atggctggttttaaccccacaacgaaaactcaagaggcattgcaagaggcgctgcagaaggcgtcggccgcaggtaatccggatatccgtccggagcacctccttgctgcgattttaggccaagaagatggcattgctattccggtattgcgcgctacgggcgtggaccccgatgtggttcgccgtgaagcagaagcattggtggccaagctgccaaaggctgaaggtgccaacttggcaaacccgaactttaaccgtgatgcgttaagcgttttaaacaacgcccaggagttggcgggtgagttaggcgacgagtacgtttctaccgaggtgctgctggctgcggtggcccgtgggactaacgatgctgccgagttgctgaccaagcgcggtgctacttacgacgtcatcaagggtgttttcccttcggtacgcggtaataagaaggtgactacggagtctccagaggatcagttccaagcattagagaagtactccactgacctgactgcgcgggcgcgggaaggcaaaattgatccggttattggccgtgatcaggagattaggcgtgtggttcaggtgctttctcgccgcactaagaacaatcctgttcttattggtgagcctggtgtgggcaagacggccatcgtcgaaggtcttgcgcgccgcattgtggcaggggatgtgccggagtcgctgaagggtaaaactctgattagcttggatcttggttccatggtggctggtgctaagtaccgtggtgaatttgaggagcgtttgaaggcggttctcgacgaaatcaagtctgctgagggcgagatcatcacctttatcgacgagctgcacaccattgtgggcgctggtgctaccggcgattccgctatggatgcaggcaatatgattaagccgctgttggctcgtggcgagctgcgtttggtgggtgctaccaccttggatgagtaccgcaaatacattgagaaggatgctgcgctggagcgtcgttttcagcaggtctttgtcggtgagccttcggtagaagatgccgtgggtattttgcgtggcttgaaggagcgctacgaggtgcaccatggtgtacggatccaggattcggcgttggtggctgctgctacgctgtcggatcgctatatcaccagcaggttcttgccggataaggctattgacttggtggatgaggctgcatcgcggttacgcatggagatcgattcttcgccgcaggagatcgatgagctggaacgtattgtgcgtcgccttgagattgaggaagtagcgctgtcgaaggaaacggacgctgcgtcgaaggatcgcttgatcaagttgcgtcaggagcttgccgacgagcgcgagaagctcggtgagcttgtggcacggtggaacaacgagaagggcgcgattaataaggttcgcgaagccaaggaagagctggagcggctgcgctcggagtcggaaatcgcggaacgcgacggcgactacggcaaggtagctgagctgcgctatggccggatccctgagctggaaaagcaggtcgctgaggccgaggaacacaccgtggaaaccaccatgctgagcgaggaggttactccagacaccattgctgaggtggtgtcggcgtggactggtattcctgccggcaagatgttgcagggtgagacggagaagctgctcaacatggaggctgagctaggcaaacgtgtggttggccagtcggaggctgtggttgcggtgtctgatgcggtgcgtcgtgcccgtgccggcgtggcggatccgaaccgtccgacaggttccttcctcttcctgggccctacgggcgtgggtaagacggagctagccaaggcccttgcggagttcatgtttgacgatgatcgtgcgatggtacgcattgatatgtcggagtatggcgagaagcatgcggtcgctcgtttggtcggtgcccctccaggatatgtgggttacgaccaaggcggtcagctcacagaggctgttcgacgtcgcccgtacaccgtcgttcttttcgacgaggtggaaaaggcacacccagatgtgtttgacatcctgctgcaggtcctcgacgagggccggttaacagatggccaaggccgcacagtggacttccgtaatacagtactgatcctgacgtctaacctaggtgccggtggcacaaaagacgagatgatggatgctgtaaagcgggcgtttaagccagagtttgtgaaccgccttgatgatgtggtgatctttgatccgctgagccaagagcagctcacacacattgtggagattcagattgcgcagctggcacagcgtcttgccgctcgtcgtttgacgttggcagtgtcggattctgcgaagttgtggcttgcggagcgcggttatgagccggcttacggtgctcgtccgttgcgtcgattgatccagcaggctattggcgatcagttggctaagaagctgttgtctggtgaggttcgcgatggtagcgaggttcatgtggatgcggatttggacaatgatgggttggttattagcgcctcg

SEQ ID NO: 17871 - DNA, 423 bp, Cornyebacterium diptheriae
atgctggttgtctatttctcttcggccaccgaaaacaccaaacggtttgtagagaaactgggatttccgtcccagcgcatcccactgaccaagtccgacgccccgttgcgtatcgacgagccctacgtacttgtgtgcccaacgtacggcgggggagcgtcgataagcggaaacaacacaaagccggtacccgttcaggtgattaaattcctgaacaacgaacacaatcgcagttttatccgcgcggtcatttcaggaggaaactccaacttcggcctcgactttggcaaagctggggatgtgatttcgcagaaatgttcggtaccctatgtgtatcgatttgaactcatgggcaacgacgaagatgtcaggctagtgcgcgacggtctgcgagaaaacgcagcagcactaggccttgaaaaa

SEQ ID NO: 17872 - DNA, 834 bp, Cornyebacterium diptheriae
ttgggaattacctcgacaagtcatcaccactttgattatctggttatcatgacgccttcttctttccactcagaacccacagatcaggcctttgcggtgcgcgatctttccgttatgttcggccccaaagctgccgtcgatcatctcaatttggatgtgccacacggcagcattttcggcctcgtaggccccaacggcgccggaaaaaccaccatgatttcggcagccacgggactgctgcgaccacagagtggttcggcgtggatcaacggggtcaatgtctgggaggagccgattgcagcgaaggctcattttgggttgcttatcgacggcatgcccgtcttcgaccgtctcaccgccacggagtatctcgagttccttggtggcttgcgttccatggcccccgatgtggttgcgcagcgcagcgaggaactactgagaaccctcgggttagctgaggctaaagacaagcagattgtggacttttccgccggcatgaccaagaagatcttgctggcaggagctctcttgcacgcaccacgcgtcttgatcttggacgagcccctcgaggcagtcgatccagcctccgggcaactgatccaaaagattttgcgcaactatgcccgctccggaggcaccgtactgttgtcctcccatgtgatggaactcgtcgagggcttgtgcgaccacgtggcgatcatcaaccaaggcaccgtgatcgcctccggcaccgtcgatgaggttcgcggcacgggcaccttggtagacaaattcgtagaactcgtcggcagcacccagcttgacgacgacagcttcggctggttaggcggcaaa

SEQ ID NO: 17873 - DNA, 1605 bp, Cornyebacterium diptheriae
atggtacggaagaagaaggaagtggcgcaggtcccttccacctctaaggaaatcaaggacacattgtggaagtccgcggataagcttcgcggttctatggatgcgtcgcagtacaaggatgttgctctggggctggtgttcctaaagtatgtatcggattcctttgaggaacgtcagaaggaaatccgcgcggagctagaaggcaagggcttcgatgaggaatacatcctagaagatcttgccgacgttgacgcttacaccagcgagaatgttttttgggtggcgtcgaatgcccgttgggacttcctaaagaagtattccaagggcatggatctggaaggaaaacacaagtctatcggcaagttgatcgatgaggctatgcagcagctcatggcggataacgaatcgctactgggcacgctgccgcagatttatggcaaggacaatatcgaccagcgccgtctcggtgaattagtggacctgtttagctctacgtattttgccagcactaaggataagaaggcccgcgacctgcttggggaggtttacgagtactttctggataagttcgccaaggccgagggtaagaggggtggcgagttttatacgccgcagccggtcgtgcggacgttggtagaaatccttgagccgactgaggggcgtgtgtatgacccatgctgtggttcgggtggcatgtttgtgcaggcggaaaagttcttggaggttaccaagcgtgaccgcagcaacattgcggtttatggccaagaactcaatgagcgtacttggcgaatggcgaagatgaacttggctattcacgccatcagttcgtccggtttgggtgagcgttggggtgacacgtttgctcgcgatattcatgcgggcaccaagatggattacatcatggctaatccgccgttcaacattaaggattggatccgcaatgaggaggatgcccgttggaagtacggtgtgcctccggcgaagaatgcgaactttgcgtggatacagcacatcatttcgaagctgaaggatcacggcgaagctggtgttgtgatggcgaatggcaccatgacgtcgcaaagctctggtgagggcgagatccgtaagaacatggtggaagatgatgttgtttcgtgtgtgattgcgttgccggcgcagttgttccgtggcacgggcattccggtgtgcgtgtggttttttgctaaggataagtcggcgggtgttggtggcagtgttgatcgccgtggtgaggtgttgcttatcgacgcccgccagctcggccacatgatcgaccgcacggagcgggcgtttagtgatgaggacatcaccaagattgctaatgcgttccgaacctggcgtgggcgtaagtccgcggagggagagtacgaggacgaggcgggattctgtaagtccgccacaattgaggagatccgcgaagctggctacgcgctaacacctggccgctatgtgggcatgcctgaggccgaagaagatgatgagcctatcgacgaaaagattgcacgtctaaccgcagaactgactgctgcattggacgagtctgcacgtttggacgctgtcgtccgcgaacagctggggaggttgaag

SEQ ID NO: 17874 - DNA, 1023 bp, Cornyebacterium diptheriae
atgaaaactcaagcgagcctgctggctatcctcgccgcggcgttgtacgccctcaacgttcccgtagccaaaatgctgctagatcacaccacagccaccatgcttgcggccttcttatatcttggcgcgggtatcggcatgatcgcctttgcgcgccccacgcctgacgacgcccccatcaccgctcaggacaccaaatacgtagtagccatggtcgtcctcgacatcgcggccccgatattgctcatgctcggaatcgcacggacgacgtcgtcaagcgcgtcgttgcttggcaacttcgaaatcgttgcaacctcgctgatcgcccttatccttttccgcgaagtaatctccaaacacctttggcttgccattgggctcgtcaccctcgcgagcctgatcctgagtttcgaaccaggcaccatccagttcaacctcggatcactcctcgtactcgccgcgtgtgcctgctggggactcgaaaacaactgcacacgcgcactatccaacaaaaaccccgcccagattgtggtcatcaaaggcatattctctgggcttggagccctcaccgttgccctcctactggctaactcccttcccagctggcagatcatcgcgctcaccatggctttgggattcgtctcctacggcctcagcattactttctacatcatggcgcaacgccacctaggagccgccaaaaccagcgcctactacgccatcgcaccattcctcggcgtggcctttagtatggtgcttctcggcgaacgccccgacatccaattctggctagcgctggccatcatgggcgccgccaccgtcgtgatcgtccgcgactccatcggattacagcacgaccacatgcacacccacgtgcacacacaccaacattcccacggcgatctcgtgcacacccatgcccatactcacacccattcccatttgcatgcacacgagggcgatagcgaagaaccaggtcatagcgtggaccatcatgctgactttgatggtcacgaacacgac

SEQ ID NO: 17875 - DNA, 1101 bp, Cornyebacterium diptheriae
ttggtaaccgtgaccgctcaatcaatccaggccgttgccgacaaacttcgcgcccaccgcgcggagttcactcaggcagccaatcaaaagccggactcccctctcgcggacgccatcgcgcagctcgtcgatcataccgatctagacggacacgttccggaatcgatcgctacttcatggctacagcacgcagccgccgccgaaagcctcggggtatcacgtgactactacctcacgcttgccgacgcctcccgcagcgccctgcgccacatttgcgcagacctccccttcgccgaggtcctcggtgccgaacgcgctatcacgtcgatagccaacacactgagcagcgcgcccctgcccaacgcagcagtacccgcacaagtcgtgcaagtagaaaagcgcagcagcgctatctccgtggtacgactgcaagcagaaacagctatcaactacaccaccacccagtacgtcaccgtcaccgccgactatttacgtggagcgcgtcgtgagctctttcccaccatcccacccaacgagtacggccaaatcgaattccatatccgccatgaaggtatgatctctacattgctcgccggcgcacatgtaggcgacacgtggtggatcagcacaggccaaggcggttttgattacgtagaaaaccaagacatggtgtttatcgcccacggggtaggacttgcagcactacgccccatcatcgtcgatttcctccgcctagccgagccccctcgagtccacctcttcctcgcagccgactacccaggcgaactctacgagctcgctggcctatggagcctagcgtcgaccgcaccttggctgtccgtcacccctgttgttgcccatgaagaagacgcctggtgggtagcccccacccagcattctcacccaccgcgcgggctacacatcacccaagtcggacaagccggagaaatagtcgcaggttatggcacgtgggaagatcgtcgcatcttgatcgccggtccctcccacgacgtggcagcctcccgcaaggcacttattcgccgcggaacgccacccaccatcatccacacgcaaaccttcgattactcaccgttttggtta

SEQ ID NO: 17876 - DNA, 816 bp, Cornyebacterium diptheriae
atgcgcaacaacatcatccaccgacttggaactaaacccaccatcgaccccgcaacggaaatccgcaaccgcgtcgaatttctcacccgttacatcaagcactctggcaccaaaggtttcgcgctagggatctccggcggacaagactccaccctcgcaggccgcctcgcacagctcgcagtagagcagctacgagtagccggctaccccgccgaattctgggcaatccgcctcccctacggtgtacaagccgacgaggatgacgcccacatcgccctagaatttatccagcccgatcacagcgtggtcatcaacattaaagaggcgaccgacgcagccgcccgcgccaccgcccaagcattggggcttcaagacgtaggcgacttcaataaaggcaacatcaaagcccgccaacgcatgatcgctcaatacgcactcgccggcgaaaagaaactactcgtgatcggcaccgaccacgcagcagaaaacgtcaccggattctttacaaagttcggcgatggcggcgccgacatcctcccgcttgcagggctatctaaacgccaaggcgccgccctcctagaacacctcggcgcaccagcatccacatgggaaaaagtccccactgccgacctcgaagaggatcgcccagcacttcccgacgaagaagcactcggcgtgacctaccgagagatcgacgcttacatcgaaggaaacgaagaagtctcacccgaggcacaacagcgcatcgagcgcctctggaaaatcggccaacacaaacgccacctccccgtcgaacccgatgacacttggtggcac

SEQ ID NO: 17877 - DNA, 993 bp, Cornyebacterium diptheriae
gtgactgacattctagaactcgcccgcaccaaagtgctcaacaacggcgaaggcctgaacaaagaagaagtcctccaagtactacaactcgacgaagcacgcatcccagagctgctcgaactcgcccacgaagtacgcctcaaatggtgcggcgaagaagtagaagtagaaggaatcatctccctcaaaaccggcggctgcccagaagactgccacttctgctcccaatccggactcttcgaatcccccgtgcgctccgcatggctcgacatcgcaggcctcgtagaggcagcaaagcaaacccaaaaatccggtgccaccgaattctgcatcgtggcagccgtcaaaggccccgacgagcgtctgatgagccagcttgaagaagccgtcgccgctatcaaatcggaagtcgacatcgaagtcgcagcctccatcggcatcctcacccaagaacaagtcgaccgcctcaaagccgccggcgtgcaccgctacaaccacaacctagaaaccgcacgctcctacttccccaacgtagtgaccacccactcctgggaatcccgccgcgaaaccctacgcatggtcggcgaagccggaatggaagtctgctccggtggcatcatcggcatgggtgaaaccctagagcagcgcgccgaatttgcctgtgacctcgcagaactcaatcccaccgaagttcccatgaacttcctcgacccacgcccaggaaccccattcgcggactatgaagtcctcgacaccacagatgcattgcgcgcaattggagcattccgacttgcacttcctaaaaccatcctgcgcttcgccggcggccgcgaactcaccctcggcgacctcggcaccgagcaaggcctcctcggtggcattaacgccgtgatcgtgggcaactacctgaccaccctcggccgccccatggaacaagacctcgacatgctcggcaaactccgcctgcctatcaaagccctgaacgcgagcgtc

SEQ ID NO: 17878 - DNA, 2880 bp, Cornyebacterium diptheriae
ttgaccatgactaatccgagcggaaacacccctgacacttcagcaggtcctgcgtttcgttataccgccgaactggccggtgagatcgagcgttcatggcagcagtactggattgataacggtacttttaacgcccccaaccccgtgggcgatttagccgtctctggagacaaactccctgaagacaagctgtttgttcaggatatgttcccgtatccatcgggtgctggtctgcacgttggccacccactgggatacattgcgacggatgttttcgctcgctttaaccgcatgctaggcaagaatgtgctgcacaccttgggctacgatgccttcggtctgccagctgagcagtatgcgatccagacgggcacacacccacgcacgaccaccatggccaacattgcgaacatgcagcgccagttgggtgcattgggtttgggacacgatcctcgccgtagcgtggctaccactgatccggagttctacaagtggacgcagtggatcttcttacagattttcaatgcttggtttgataccaagcagcaaaaggcccgccctatctctgagctaattccgcttctggagtcgggtgaagtggcattgccggagggcttcgagggctctgctgactcgtactccgagttggatgcggtggaaaaagcaaaggttgtggatgaattccgcttggtttaccgctctcactcgatggtgaactggtgccctggtttgggcactgtgttggctaacgaggaggtcaccgcggatggtcgttcggagcgcggtaacttcccagttttccgcaagaagttgtcgcagtggatgatgcgcattactgcatattcggatcgtcttatcgacgaccttgacctgttggattggccagacaaggtcaagagcatgcagcgtaactggattggtcgttcgcgtggcgctgaggtggactttgatgccctcggccacacgatcaccgtgttcaccacccgtccagacacactgttcggcgcgtcctacatggttctcgcccctgagcacgagcttgtcgacgccctcgtcgccgccggcacgaactcctacgaaggaatcgacccccgttggaccttcggccaagccacccctgcggaagcagtcaaagcctaccgtgcttccatcgccgcaaagagcgaccttgagcgccaagaaaacaaggaaaagacaggcgtttacctcggcgtaaacgccgtcaaccctgtcaacggtgagagcatcccagtgtttatcggtgactatgtgctcaccggttacggcaccggcgcaatcatggctgtgcctgcacacgacacccgcgattacgagttcgccaccgaattcggcctgcccattcgcgaggttgtcgctggcggcaacattgccgaagcggcctacaccgaatccggcgcagccgtgaactccgctaatgaccaaggcctcgatatcaatggcctagacaagcaggaagcgattgctcaggttattgagtggctcgtcgacaagcaaaagggatccgaaaaaatccagtacaagctgcgcgactggctcttcgcccgccagcgctactggggcgaaccattcccagtcgtctacgacgaaaacggcctcgcccacgcactacccgaatccatgctgcccgtcgaactccccgaggtagaagactacaaaccagtctccttcgacccagacgacgccgactccgaaccacacccaccactggccaaagccaccgagtggacccaagtagaactcgacctcggcgacggcctgaagaagtacacccgcgacaccaacgtcatgccacagtgggccggctcctcctggtaccaactgcgctacatcgaccccaccaacagcgaagctttctgcgacatcgaaaacgaacgctactggacaggcccccgcagcgcagaagactccggcggcgttgacctctacgtcggcggcgtcgagcacgccgtgctccacctcttgtactcccgcttctggcacaaagtcctcttcgacctcggctttgttacctcccgcgaaccttaccgacgcctcttcaaccaaggctacatccaagcatttgcctacaccgactcccgtggcgtgtacgtcccagccgaagaagtagaagaaaaagacggcaaattctactaccaaggcgaagaagtcaaccaggaatacggcaagatgggcaagtccctcaagaacgccgtcgcacctgacgacatctgccgcgacttcggcgccgacaccctccgcgtctacgaaatggccatgggaccactggacacctctcgcccatggtctaccaaggacgtcatcggtgcccaccgcttcctccagcgactctggcgcctcgtggtctcggaagacgatggctccatcgttgtcaccgacgcagcactcaccgacgacgacctcaagcaactacaccgcaccatcgccggcatgcgtgacgactacgaaggcctgcgcatcaacaccgtggtagccaaagccatcgaatacgtcaactacctgaccaaggcatacggctccaccggtgcaccacgcgcagccgtcgaaccactggtcatcatggtcgcagccgtcgcaccacacatcgccgaagagctctggaagcgcctcggacacaacgacaccatcacctttgtccccttccccgagtacgaagacaagtggctcgttgacgacgaagtagaaatgccagtccagatcaacggcaaggtccgcgcccgcatcatggtccctgccgacgcctcccaagaccagatctccgaaatcgcactcgcctccgaggccgtggcaacacacatcgaaggcaagaacgtgatcaagaagatcgtcgtctcagggcgcatggtcaacctagtggtcaag

SEQ ID NO: 17879 - DNA, 1038 bp, Cornyebacterium diptheriae
atgtctgctactgaattcccctctgcctttaccgccgctgttgtggacaagtttggctccgagctcaacatccacgacgttgaccttccagagccaggccaacaccaagcactggtcaaggtgctcacctccggcatctgccacactgacctccacgccgccgaaggcgactggccagtcaagccaaagccaccattcgtcccaggccacgagggcgtaggcgaagtggtcaaacttggcccaggtgagcatagcgttgcgctgggtgacatggtcggtaacgtctggctgtggtcagcttgtggcgagtgtgaatactgccgcaccggctgggagactatgtgtgagaaagccgagtacggtggatacaccgtcgatggctctttcggtcagtatatgctggtagatactcgctactgtgcccgcatcccagacggctgtgacctgctggaagtcgccccaattttgtgcgctggcgtgaccgtgtacaaaggactcaaggttaccgaaacccgcccaggccagttcgtggtcatctctggcgtgggcggtctgggccatatcgccgtccagtacgccgtggctatgggcatgcgcgttatcgccgtggatattgcggacgacaagctcgaactggctaaaaagcatggcgctgagtttgtggtcaatgctcgtgaagaagacccaactgaggcaattgtgaagtacaccaagggtggcgcacacggcgtgctggtcaccgcggtgcaccctcaggccttcggtcaggcaattggcatggctcgtaagaacggaaccattgtgttcaatggtcttcctccaggagagttcccagcaccgattttcgacatcgtgttcaagggcctgaccatccgcggctccctcgtgggaacgcgccaagacctcgaagaggctttggacttctacgctcgcggcatgatcaagccaacggttactgaatgcaagcttgacgacgtcaactcggtctttgctgatatgaagcaaggcaagatcgacggccgcatggctatccgctac

SEQ ID NO: 17880 - DNA, 663 bp, Cornyebacterium diptheriae
atgagcgccgcaccggttctctccatcaccaacgccagcgtggtctaccccgacggcatctcgacagtcaccgccctcgactccgccaacgtggaaatattccccggcgagctcgtagccatcgtcggtgaatccggctccggaaaatcaaccctgctctccatcgccggcttcctccaagaacccacctccggaaccgtgacactccacggtgcggaaggtttggatgctacgtcgacacgccgtgaacacatcggattcgtcttccaacaacccaacctcctcggatcgttgaccgcccgcgaacaactactcatcaccgaccacctgcgcggtatcaaaccccgcaaagaccgcgccgacgagctactcgcccgcgttggactcaaagggctcggcggtcgacgcgtagcccaactctctggcggccaacgtcagcgcgttaatattgcccgcgcactcatgggcaacccccaactcctgcttgccgacgaacccacctccgccctcgacgctcggctctccaaggaaatcgtcgaactactccgcgacgtcaccaaagaattcgccctcgcaactctcatggtcacccacgaccgctcccaactggcctacgccgaccgcttcgtagaaatggccgacggaaaagccctccaaaccgca

SEQ ID NO: 17881 - DNA, 1518 bp, Cornyebacterium diptheriae
atgactgtttatgcatatccaggaacgccaggtgctgtagccaactacaagaagcgctatgacaactacatcggcggccaatgggttccgccggtaggtggcgagtacctcgacaacatcaccccagtcaccggtgaagtgttctgtcaagtggcacgaggaaccgctgccgacgtggaaaaggccttggatgcagcgcatgatgcagcaaaaacatggggtcatagctcgccggctgagcgcgcactcattctgcatcgcattgccgatcgcatggaagagcatctcgaagaaatcgccgttgccgaaacatgggataacggcaaggcggtacgtgaaactctcgccgccgatattccactggccatcgaccacttccgctactttgccggtgcaatccgtgcccaagaatcgcgaacctcacagatcgaccacaacacggtggcctaccacttccatgagcccatcggcgtagtcggtcagatcattccgtggaactttccactgctcatggccgcatggaagatcgccccagctcttgctgcgggtaacacgattgtgttgaagcccgcggagcaaactcctgcgtccatcctgttctggatcgacattgtgggtgacttgcttcctgacggtgtgctcaacatcgtcaacggcctcggcgaggaggctggcgtggcgctatcctcttccaaccgcattggcaagattgcctttactggttccacgcaggtgggcaagattatcaaccgtgctgccgctgacaagatcatccccgtcaccttggagctaggcggtaagtcgccgtcgatcttcttcgcggacatcatggattacgacgaccccttccgtgagaagtgcattgagggccttgccatgttcgcactcaatcagggtgaggtatgtacctgcccgtcgcgtgcgttggtgcatgagtccatcgcggacgagttccttgagctgggtgtccaacgtgtgaagaacatcaagctcggcaacccgctggacacggaaaccatgatgggtgcccaagcctccatggaacaaatggataagatcagtggctacctcgatattggcccgaaggagggcgctgaggtgctcaccggtggccacgtgaacaagattgacggtttggaaaatggctactatatcgagcccacggtgtttaagggcacgaatgacatgaccattttccgtgaggaaatcttcggcccagtgctttcggttgctaccttcaaggattttgatgaggcaatccgcattgctaatgacactaactatggcttgggcgctggtgtgtggactcgccatcagaacactgcgtatcgtgccggacgtgccatccaagctggtcgcgtgtgggtgaatcaataccataattacccagcgcacgcagcattcggaggctataaggagtctggaattgggcgtgagaatcacctcatgatgttggatcactaccagcagacaaagaaccttcttgtctcgtatgatgagaatccaacaggcttattt

SEQ ID NO: 17882 - DNA, 1251 bp, Cornyebacterium diptheriae
atgctcgctagtgtgaagcctcatgtgattcaaattctcaccgtcatgcgtgtcagcctgcatgtaatgttcgctggtctgctcatttttggaatcgtacgttattatctcgagcttccaacagttccaaccgatgcaaacaatattgctatcgccgcagcaatcacgctgggaattttctacatgatcggcaccgcatgggaaaatcgtttcgcgcgtggcgacgacatcccggaccccgggatactcagtcccgtgtggctcgtgattattgttgctctctgggctttcctcgtaggtgcctccggctatttcctgtggctgatgttcccactcgtatttgtaatgttgcatctcaagcagggcattcgtggcatcttgggcgttgccttactccttgccatcgccatcgcaattcccctagccacacgcccagatgagtggatgcccgcacaggccatgggcccaacgatgggtgccgcgttttccacggtgattttttatagctacaccaccttgcgcaacgatgcccaacattaccgccaactagcggcagagttgcttgcagcccagcaggatctcgccacctctgaacatcaggcaggccggctcgaggagcgcgagcggctctctcgcgagatccatgacacagttgcccaaggattgagttccatcgtaatcttggcacgcgccgcacacggccgcctcgataaaggtgaaattgaagatgtggcacagcaactcagcgtgatcgaaacccaagcctctgacagccttgcagaggcacgccgctttgtgcgcgacctagcagccccagcactgggcgactcgctgcctatcgcactgaccagtaccattaataatctacgcaccaaacaggatgctctcggtgcgccattggatgttcatttagagctcgtgggggatacgtcgataagcctgccggagccggtatcgcgcacggtggttcgcgtgacccaagaagggctcaacaatgtggttaaacatgctcatgccacaaaagcggtggtcacattgggcgtgtgggaggacgaggtcagcctcgacgtggtggacaatgggatcgggttcaacctcggtaccaccgagcgtggcaccagctccggctttggccttgatggccttcgcaagcgcgtagataccgttggtggcacactcgtgattgaatcagatacatacggcaccgcactcgcttgccgcattccgcttaccagccgccgggagacttca

SEQ ID NO: 17883 - DNA, 1833 bp, Cornyebacterium diptheriae
atgggacgcgcagtaggaatcgacctcggtaccactaactcggtggtttccgtcctcgaaggtggagagccacaggttatcgctaactctgagggttcccgcaccaccccatcggttgttgctttcgctaagaacggcgaagttctcgtcggccagtctgctaagaaccaagctgttaccaacgttgatcgcaccattcgctccgtcaagcgccacgtaggtactgactggaccattgctatcgacgacaagaagtacacctctcaggagatttccgctcgtactttgatgaagctcaagcgcgacgctgaggcttacctaggcgaggacgttaccgacgcagttattactgttcctgcttatttctctgacgcacagcgccaggccaccaaggaagctggccagattgctggtttgaatgttctgcgtattgtgaacgagccaaccgcagctgctttggcttatggccttgaaaaaggcgagaaagagcagaccatcttggtcttcgacttgggtggcggtactttcgacgtctccttgctggagatcggcgatggcgttgttgaggttcgtgcaaccgctggcgataacgagctcggtggcgacgactgggatcagcgcatcgttgattggctggttgagaagttcaagaccgctcagggtgttgacctctccaaggacaagatggctatgcagcgtctgcgcgaggctgctgagaaggcaaagattgagctgtcttcttcccagtccgcaaacgtgaacctgccatacatcactgtcgacgctgataagaacccactgttcttggatgagacgctttctcgcaccgagttccagcgcattacccaggatctgctcgaccgcactaagaccccattcaaccaggtgatcaaggacgccggtgtgaccgtctctgagatcgaccacgtggttctcgttggtggttccactcgtatgcctgctgtttctgagctggttaaggagctgaccggtggccgcgagcctaacaagggcgttaaccctgatgaggttgttgctgtcggtgctgctttgcaagctggcgtgctgcgcggcgaggtcaaggacgtgctgcttctcgacgtcaccccactgtctcttggtatcgaaaccaagggcggcgtgatgaccaagctcatcgagcgcaacaccacgattccaaccaagcgttccgagacgttcaccactgcggacgacaaccagccttccgttcagatccaggtcttccaaggcgagcgcgagatcgctgcacacaacaagctgctcggttccttcgagttgggtggcattgctccagcacctcgtggcgttcctcagattgaggtcaccttcgacatcgacgcaaacggcattgtgcacgtaaccgcgaaagacaagggcaccggcaaggaaaacaccatcaagattcaggatggttccggtttgtctcaggaagagatcgatcgcatggtcaaggatgctgaagctcacgctgaggaagacaagaagcgccgtgaggagcaggagacccgtaactccgctgagtccatggcataccagactcgtaagttcctagacgagaacggcgagaaggtttccgaggagatcaagaccaaggtcaccgaggctgccgacgctgttgacgaggctcttaagggcgaggacatcgaggctattaagacggccgtcgagaagctctccaccgagtctcaggagatgggcaaggctatctacgaggctgaggccgctaacgctggcgctgctgatgccaccaacgttgatcctaacgtcgtcgacgctgaggtcgttgaggacgatgacaaggacggaaacaag

SEQ ID NO: 17884 - DNA, 666 bp, Cornyebacterium diptheriae
gtggccttggattctattgatgtggagtttgcagctcatcaatttactgccattatgggaccttctggttctggtaaatcgactctaatgcattgtatggcgggtttggattcgatctccagtggtagcacctttattggcgatactgatctttcattgcttaaggataaggagatgacggctcttcgccgtgatcgtcttggctttattttccagtcatttaacttggtgcccactcttactgcggcggaaaatattacgttgccgcgtgatattgcgggtaagtcggtcaataaggagtggttcgatgaggtgacgtcgcgcctcggtttgacggagcgtctgagccaccgtccttctgagttgtctggtggtcagcagcagcgtgtggcgtgtgctcgtgcgttggttgcgcagccggagatcatttttggtgatgagcctacgggtaatttggattcgaattcttcggctgaggtgttgtcgattcttcggactgcggttgatcaggatgatcagactgtggtgattgtgacccatgatcctcgtgcggcatcgtatgcggatcgtgtggtgttcttggctgatggtcgtattgtcaaggagcttatgcatccgacagctgaggaaattttgtccacgatggcaaccattgaggagcttgca

SEQ ID NO: 17885 - DNA, 609 bp, Cornyebacterium diptheriae
atgcgcgagcaaggattggtatcgaagatcaggcgtaagaagtacaactcctaccgtggcactgtcagccacattgctgacaacgtgcttggccgacgcttcatccaagacgcaccgaacaaagtgtgggttagtgacgtcacagagttccgggtagccggcaccaaagtgtacttgtcgccgattatggatctgtttgaccgaaccatcttggcgcatactctgtctacgtcaccgaatactcagctcacatcacgctcgttggcggacgccattgccatgtttagcccgggtaaaggactgattgtgcacactgaccaaggcttccagtaccagcacgcaagctggcgcaacctaattgaaagcgttggcggtgtgcaatcgatgtcgcgcaaaggcaattgctacgacaacgcggtgatggaaaatttcttcggacacttgaaatcagagatgtaccacgatgtttacttcaccagtgtcgatgagctttgccaagctatcgatgagtacatactgtggtacaacacgtaccgactccaagaacgattcaagggtctggctccgatgcaatatcggaaccagacccttgcaaagaccctaaccgtt

SEQ ID NO: 17886 - DNA, 368 bp, Cornyebacterium diptheriae; identical to SEQ ID NO: 17460

SEQ ID NO: 17887 - DNA, 1899 bp, Cornyebacterium diptheriae
atgtctgaccctgcaaccctagcggatacccgccatttcagctggaagcgcctgtgcgcggtgctgttcttgctgttccctgttcttgtttctgtggtctatatgtgggccatgtgggaccctacaaaaaatctgcgttctgtggatttggctgtggttaatgaggatgagggtgctactcgcaatggcgagttcaatcgttatggcgataaggtggtcaaggggctgctggataaggactatctggcgtttaagcaggtcagtgctgatgaggcagccaagggcttggataacggcacttatttgttcacggtgacgatccctgagaaattttcggagaacgtgaataccttgttggcggatcagccgactaagccggagatcattttgtcgtataacgacttcaatggcacgaatggttcggtgttgacgggcggtttggttcctaagattcagcaggcggtgtcggcgtcgatttcggagtcctatgccaccaagttggtcaacggtgtgaataagcttggcggtggtttggagcgtgctgctgacggttccgcaaagttggaggagggctctggcaagttgaaagacggcttggccaagggcgttgcgggttcgcagaagcttaacgacggctcccaccagctcgctgagggcaccgcaaagttggcagatggtacaggtcagcttgccgacggtgccagccgtcttgctgcgggtaccgcaaagctgggcaatggtgccgctcagattgatgacggcgtgggcacgctggtgaacacccttattccagtgctgacgaccgcccaagccgctgccccgcagctgcagcaggctgccgatgcacttcgcgccgtgggtatggttgcggaagctgatcgtattcaggatctggccaccaagtttgacgctaacaaccctgacaaccaggtgaacaagctcaataagctgaaaaatggtaccgctaccttgcgttatatgctaagcgatccttcttcggaatattacggtggtgtgctgaaactcagcgacggtgtggctaaggcccacgatggtgcggtgaggttgaacgatggtgcgcaccgccttgcggatggtactgcgcagttggctaatggcacacagcagctttacgacggtgccggccgcctcaacgagggtgctaataccttggccaccaagcttgatgagggtgcaaagaatgccccgaaggttcctaacgcagaggcatcggccaagcagatttcggttccaattgtgtacaaggaaaacaacgccaacccagtgcagacggtggtagacagcaatgatccaacggctaagaagctcaacggtggtgcctccatgctgatcgtcatggtctttggtttcttgctcatggcactggctgcgatcttgctgccgcatgtgtttggtactgatcgtcgcaacgcgtttgttggccctacgttgaagtcctttgccggcctattcggtatcggtgtactgactctgttcgtcttggctggttttgccaccaccatcggctggcaccctcgctcgtgggcgggcattgcgctgggcttcctgctcactgcctctgcgatggctgcggtaaaccagttgttgcgcgcactgtttggccgttttgttggtggcattgccatccttgcggttttcgctttcggaatgttctccttcggtggtgtgtggccactggccacggttccaggtgtgttccgtgcgattcacccgctgtcccccatgagctacgcccgccaggcattcgtgggggcgtcgcagggcgaactggatgctagctatgttttggccattgcggtgcttgccctgtttactgtggtgccactggcggtcacgttgatggtgcgtgcggcgcgcgtaagaaagctcaacaaccag

SEQ ID NO: 17888 - DNA, 1254 bp, Cornyebacterium diptheriae
gtgaaggaaagatttctagttaccggcggtgctcgacttgaaggaaccgtccatgtcagcggcgcgaaaaacagcgtgctcaagctgatggcggctgcacttcttgccgaaggcaccacgacgttgaccaattgcccgaagatcttggacgttccttatatggttcgcgtcctcgaaggcctaggttgttctgttgtccactccggttcaacggtggaaattacaacgccagccgaaatttccagtaacgccgactttgatgccgtgcggcaattccgcgcctctgtatgcgtactcggcccattgacctcgcgctgcggcaaggcagtcgttgcattgcccggcggagacgccatcggatcgcgccctttggatatgcaccaaagcggcctagaaaagctgggtgctaaaacccacatcgaacatggtgcggttgtggcccaagcagatcagctgcgtggcgccaatattcaccttgacttcccatcggtcggagcgaccgaaaatattttgaccgcggccgttctcgcagaaggcacgaccgttcttgataacgctgcgcgcgagccagaaattcttgatttatgcgtcatgctcaaagaaatgggcgcggatattgaaggcgagggtacctcgaccatcaccatccgtggcgtagaaaaactgcaccccacccagcacgaagttattggcgaccgcatcgttgccggtacatgggcatatgccgcagcgatgacccaaggcgacatcactgtcggtggcattgcaccacgcaacctgcacttggcattggaaaaactcaaggtcgcaggcgccgaggtgaccacgtacgatcacggattccgcgtgcgcatggaccgtcgccccatggcggtggactatcaaacgctcccattcccagggttcccaactgatcttcagccaatggccattggtatttcgacggttgcagatggcgtttcagttatcacggaaaacatcttcgaggcacgcttccgcttcgtcgacgaactcgtccgcttaggtgccgacgccactgtcgacggtcaccatgtagttatgaggggagtggagaagctttcttcgacaccagtgtggagctcagacatccgagccggagccgggctcgtgttggcggctttgtgcgctgatggggtgacagaagtaaacgatgtgttccacatcgaccgcggataccccaactttgtagaggatcttcagcgcttgggcgcccagatcgaacgagtgcaagtt

SEQ ID NO: 17889 - DNA, 1599 bp, Cornyebacterium diptheriae
atgacggacagcgcgatgctcagtggcgctcccttcgatcagcgctccgacaaatggtggcacctcacctttggcggaatgctcgcagtggcgctgatcttcttcatcacatggtccatgggatacgttggccccgaagccaacaaagccatgctgatcaccacgatcgccttcggcgtattcatggccttcaacatcggcggcaacgatgtggccaactcctttggcacctcggtgggtgcgggaacactcagcatgaaacaagcgctggtgatcgccgcaatcttcgaagtatccggcgctgtcctcgcaggcggcgaggtcaccgacacagttaaatccggcatcgttgacctcggtgccatcgacctcgacccccaacacttcgccttcatcatgatggcctcgctcctcggagccgcagtatggctcctcgtggccaccaagatgggctggccagtgtccaccacgcactccatcgtcggcggtatcgtcggtgcctcgctgctcttgggctttacccaaggaatcggcggctgggaaatggtgcaatgggcagaaatcggccgcattgccatgtcctgggtgctttcgccactacttggcggcctctgtgcgtggttgctcttcggctttattaaaaagcacattttggtctacaacgaagaagccgacgaggcgcttcgtcagatcaaagccgaccgcattgagctgcaccaatccttcaaagcctccttcgagcgcctcaacgagatccagcagttggcctacaccaacgccatgactcgcgacgccgccttgatccaagaaccagacttcgacccagaacaactggagtctgactactaccgcaacctgtaccgcatcaatacccgacgcgacaacctaaacacccaccgtgcgttggaaaactgggtgccgctgctggctgctgcaggcgccgcccttatcggtgccatgatgctgttcaaagggcttaagaacctcaacttgcatatcagcaacttgggcaacgtggttatcctcgtgatgctctccgccgtagtctggatggccatttcgatcttctcccgactgctgcgccagcaagaactcacacgggcaacctttgtgctgttctcttggatgcaggtatttaccgcctccgccttcgcgttctcccacggttcgaacgacatcgccaacgcaatcggaccattttccgcagtgctcgacgtcctccgcaccgactccatcaacggcaaagccgcagtgccaaccgcactgatggtcacctgcggtatctcactgatcgccggcctgtggttcatcggccgctacgtgatccacaccgtgggcaccggattaaccaagatgcaccctgcctccggcttcgcagctgaactttccgccgcagcggtagtcatgggcgcatccgtcatcggcttgccggtgtcttccactcacatcttgatcggcgcgatcctcggtatcggcgtggtcaacaaatccgccaactggcggctcatgaagcccatcggcatggcgtggattatcaccctgccggctgcagccgcagtatccggcgcagcagtgctcgtgctcaacgccgtgtggggg

SEQ ID NO: 17890 - DNA, 933 bp, Cornyebacterium diptheriae
atggctaaaatttacgacagcatcctcgacaccgtgggcaataccccactgattaagctcaatcgcctcgacaaatacctccccggcaacgttgtggtcaaagttgagttttttaaccctgcaaattctgtgaaagaccgtattggtaaagcaatcgtcgacgcagcagaagcctccggtgatctcaagccaggtggcaccatcgttgaagcaacatccggcaacaccggtatcgctctcgcactcgtcggtgctgcccgcggctacaacgttgtgctcaccatgccagaaacgatgtccctcgagcgccgcgtcatgctacgcgcctatggtgcagagatcgttctcacctctggtgcagccggaatgcaaggcgccgtagacaaagcaaacgaaatcgtcgctgagcgcgacaacgccatcctcgccagccagttcaagaacgccgccaacccagaaattcaccgtcgtactaccggcgaagaaatctggaacgacaccgacggacaggtcgacatcttcgtcgcaggcgtgggtaccggcggaaccgtcaccggcgctggcgaaaccctgaagaagcacaacccagagatcaaggtctacgccgtcgagccagcagcctccgctctcctaaccaccggcaaggcaggcccacacaagatccaaggcctcggcgcaaactttatcccaagcgttctaaaccagaaggtctacgaagaagtcattaccgtaactaacgaggacgcaatctccacctcacgccagcttgccgcacaagaaggcatcctaggcggcatttctgccggcgccaacctcaaggcagcacttgagcttgcagcattgccagaaaacgagggcaagaccatcgtcaccgtcgtacctgactacggcgagcgctacgtatcaaccgtcttgttcgacgacatccgcgac

SEQ ID NO: 17891 - DNA, 609 bp, Cornyebacterium diptheriae
gtgcgtcggggcgtcgataagcccaaactgatagagtcggagtccatgtacaggcttgtcaagacgatccgcgaagacctagcgaacgcccgcgaacacgaccccgcggctcgcagcgacgcagaaaacgccatcgtttactcaggactccacgccatctggagccaccgtatcgcccacgcactatggcagaaaaaccttaaaggccccgcccgcatcctcgcccaattcacgcgatttctcactggtgtagaaatccaccccggagccaccatcggacgtcgattcttcatcgaccacggaatgggtatcgtcatcggcgaaaccgccgaaattggcgacggagtcatgctctaccacggcgtaaccctaggcggacaggtgctaacccaaaccaaacgccaccccaccgttgaagacgatgtggttatcggtgcaggcgccaaagtcctaggccccatcaccatcggcaaaggaagcgccatcggtgccaacgccgttgtgaccaaagacgtccccgccaaccacatcgctgtgggaatccccgcagccaaccgcccccgcggcgccgacgaaaaaatcaaactcgtcgaccccgactactacatc

SEQ ID NO: 17892 - DNA, 900 bp, Cornyebacterium diptheriae
atgttcactatgactcaagaaacttttactgcaactacacgtgtgaagcgcggcctggccgacatgctcaagggcggtgtgatcatggacgtggtcaccccagaacaggctcgcattgctgaggatgccggcgcttctgctgtgatggcgttggagcgtgtacctgcggatattcgtgcgcagggtggtgtggctcgtatgtcggatcctgatttgatcgagggcattgttaatgctgtgtcgatcccggtgatggctaaggctcgtattggccactttgtggaggctcagattttggagtctttgggtgtggactttatcgacgagtccgaggtgctgtcgcctgcggattatgtgaaccacattgataagtggaacttcgatgtgcctttcgtgtgcggtgctaccaacttgggtgaggcgttacgacgcatcaccgagggcgctgccatgatccgctctaagggtgaggccggcactggcgacgtttccgaggctgtgaagcacctgcgcaccatccgtggtgagatcaaccgtttgcgcagcatggatgaggatcagctctatgttgctgctaaggagattcaggctccttatgaccttgtccgcgaagttgctgcaaccggtaagctgcctgtcaccctctttgttgctggtggcgtggccacgcctgccgacgctgccttggtgatgcagatgggtgccgagggcgtgttcgtgggatcgggcattttcaagtccggtaaccctgctgcgcgtgctgctgcgatcgtgaaggccaccaccatgtatgacgatcctgctgctatcgcagaggtgtctcgcggcctaggcgaggcaatggtcggcattaacgttgccgatgttcctgcacctcaccgcttggctgagcgcggatgg

SEQ ID NO: 17893 - DNA, 555 bp, Cornyebacterium diptheriae
atggtaatcggagtactcaccctccagggtgggtttgcagaacacattgcgatcctagagtccttgggtgtggagcaccgtcgggtgcgcgtgcccaatgacctgctggggctcgacggcctgattatcccaggtggcgagtccactgtgatggataagctggcacgtgctttcgaccttgcggagcccctgcgtgctgcgatcaacaatggtctgccggtgtttgctacctgtgctgggttgatttacttgggcacggtggaaaatccggcgaagggccagcagacgttgggctgcttggacgtggtggtgcgccgtaatgcttttggccgccaggtggattcctttgacgcggtagttgacgtggaaggaatcgacgcgaatgtggcctttatccgcgcccccgaggttatttcctgcggggcgggggttacggtgaccgcgcgtgttggcgaccatgtggtgggcgtgcgccagggcaagatccacgcctatgcgttccacccagaatccgctggtgaggtccgcttgcaccaggcgtggctcgccagcatc

SEQ ID NO: 17894 - DNA, 987 bp, Cornyebacterium diptheriae
atgacagaccaacccccaacgccgaacacggcggacgcaaccccgccccgccaagacaagaagctgaacaccaacgcgatcattgccgtcgtcctcatcctcgccggcctgggcgtactgctatacccagtgctcgccacccagtggaataactaccagcagtcccgcgccgccgaggcctactcgcagctggaaaagggcgtgcccccagaggtcctcaataaggcctgggaggaggcgcagcaatacaacgccaatctcggggatatcgaccccggcgatgcgtggaccagctccgacgacgagagctcctcggcgtatcagcgctacctgaattacctctccgccctgaacgagactgaggccatgggccgcattgtgctgccctccatcaaatccgatctgccaatcttccacggcacctccgaccgcgtgctggcccgcggggtcggccacctttacggcacggacctgcctgttggcgcacccggcgagctcggcgaggatggcgttatcccgcccgccccaccagagggccgactctccgcgctttctgcccataccggcctgcagaacgccaccctgtgggacaacctcatccagatcaagaagggcgacccggtctacgtcgccgcggcgggcgagaagcttaagtacgaggtccggaacatcgaggtcgtcaccccggataagaccagcctgctgcgccgcacgtcgaataaggaccaggtcacgctcatcacctgcaccccctatggcatcaacacccaccggctgatcatcaccgccgagcgcgtgccgatggatccgcagggagagtccgccttcgacgggcagggcactacctggcagtggtggatgtgggccatcctcgctgccgcggcgatcatcgtgctgctgctgatccgctggtggtggaagaacttccgcaagcaggaaggcgaggagggccccacaacctccggcgctgggggcaccacggagagt

SEQ ID NO: 17895 - DNA, 936 bp, Cornyebacterium diptheriae
gtggatcacaccctcagcactgacgtcgaaccggagaaggaaccgcgccgtgccaacagcgccaaaaccagccccgtgctggccgcggtgctcgtgatccttggggtgctcgtgatgctgtacccggtgacgtccaccctgtggaataaccacctagccacgaaggccgcgcaggaatacgcaaaactcgaaaagaatgccccacaagaggtgaagaatacccagtgggagcgtgcccacgagtacaacgagaaccgaacaaccggccccatctttgacccctggctcgcccgcttcgacgagaacaactcggactaccaagaatacctggaccaactcgacgcgaacgacgcgatggcgcgcctcatcttccccaagatcaaggcagacctgccgattttccacgggacagataacgacactttgcaaaaaggcttggggcacctcttcggctccgacctgccggtcggcggtaagggcatgcactcggtgatcaccggccacacgggcctagcgaactcgaccatgttcgaccacctcaacaaggcggagaagggtgataccttctatgtccaggtttccggcgagaagctgaagtatgtggtcgaccagatcaaggttgtgctccccaccgaaaccgaggatctccgcccagagcagggcaaggactacatcaccctgatcacctgcactccctacgggatcaacacgcaccgcctgatggtgcgcggccaccaggtcccgctggccccggaagatcacgaggttttcgacaagaaccacggtgccgggtggcagtggtggatgtacacgctactcgcggcagcagctgtcgtgctgctcctgctgctgcggtggctactgaagaacaagcgggatggcgaatcccaagaaacgacagagatgatgaatgacgaaggggctggagcagatgac

SEQ ID NO: 17896 - DNA, 792 bp, Cornyebacterium diptheriae
atgagtgcgctcaatgagcttttacacgatgatgcgattgatctgaacgcccatgccgaaacgtggcaagaggcgatagcgcaagcaggcgcattgttggaaaagactggtgcgattaccagcgcttacacagagtctatgatttcctcggtggaggaacagggcccttatattgttgtggccccagggtttgcgtttgcgcatgctcgcccgtcagaggcggtgaagcgtactgcgattgcgtggactcggttagattcgccggtggagttccatcattcgagtaatgatccagtgactttggtggtggcgttggcggcgcaggatgatcaggcgcatacggctgcgatgcgggagatcgcccaggtgttagggtcgcgtcggcgggatctggatacggtggcgactgttgctgagttgcgcggtgttttggaggcgtcgaaacgccgtaagtcgcgtggggttgctgggggagcgacgcatgtgacagcccaagattcggtggagtcgaagggcaagattttgacggtgtgtggcaacgggctgggcacgtcgttgttcttgaagaacactcttgaccaagtgttggatacgtggggttgggggccgtttgtgtccacggaggccacggacacgatttctgcgaagggccgcgcgaaggaggcggactttctgctgacgtctgaggagatcgcgcgcacgctgggcgatgtgggtgttccggtgtatgtgatcagcaatttcacgtcggaggacgagatcgacgccgccctccgcgagctttacgacgtc

SEQ ID NO: 17897 - DNA, 1560 bp, Cornyebacterium diptheriae
atgaatgcactcattgctatcccagagtttctggttaatgagatcttgtcagtgccggcgtttttgatcggcatcatcaccgctgtaggacttggcgccatgggcaaaaagaccggccaggttctgggcggtgctatcaaagctacgttgggtttcctgctcatcggtgcgggagcgtcgctagtcgtagcatctttggaaccattgggcacaatgattcaaggtgccaccggcgcccacggtgtggtccccacgaacgaagcaattgttggtattgcgcaaaatcaattcggtggccaagtcgcatggctgatgatcctcggattcgccatctctttggtcctagcccgcatcaccccgatgagctacgtgtttctaaccggacaccacgtactattcatggccaccatgctgacaatggtgctcgccgccgccggttttggcccttgggttgtggtccccgtcggcgcactactgttgggcatcttgatggtgtcgctacccgcaatcgcccacccatggacgcgccgcgtaaccggtgacgactccatcgcaatcggccacttcggtacggctggatacgtggcggctggtgccgtcggcaagctcgtaggcggcaaaaaagaatcaatgtccgcctccacggaagagctcaaactccccgaaggcctacgattccttcgcgactccatggtcgccaccgcactttccatggcattaatgtacgtcgtactcgccatcctattcatactgcgcgccggccaaaacgaagccttcaccgcattcgcaaacggtgcaaccagcgtaggcaactacctcatgcaatccgtcacccaaggcctacaattcggcgttgcagtagcagtaatcctgttcggtgttcgcaccatcttaggcgaactcgtccccgcgttccaaggcatcgccgccaaagtagtacccggcgcaatcccagctctcgacgcccccatcgtattcccctacgcacaaaacgcagtgctcatcggctttatcatgtccttcgtgggcggcctgatcggcctcacagtactctccgtctggctcaacccagctttcggcgtagcactcatcctgccaggactcgtgccgcacttcttcaccggcggcacagctggcgtatacggcaatgcgaccggcggccgacgcggtgccgcactaggcggcctcaccaacggtttaatcatcacattcctgccagcattcccgctgggcgttttgggcaactttggtgatgccaatacgaccttcggcgatgccgacttcggatggttcggcatgctcgtcggcggcggcgctcgcgtaggtggtccgctcggcatcgtcctagtactcttagttggtcttgcagtcttcgccttaggctggttctctcaggtcaagctggtgcagggtaactgggatccgacaccgtggcgtggcggctctactacagcgggtgctgctggtcctgctggtgctgctgcgggttcggcccagggtttgacccgtacatacccgaaggtcttgccaccgaagggcgctccggttccaccgagccgc

SEQ ID NO: 17898 - DNA, 368 bp, Cornyebacterium diptheriae; identical to SEQ ID NO: 17460

SEQ ID NO: 17899 - DNA, 428 bp, Cornyebacterium diptheriae; identical to SEQ ID NO: 17459

SEQ ID NO: 17900 - DNA, 171 bp, Cornyebacterium diptheriae; identical to SEQ ID NO: 17680

SEQ ID NO: 17901 - DNA, 3714 bp, Cornyebacterium diptheriae
atggacgcgcgtcttgccattcgccgctcacccaacttccgcgacgaggagcgcgcgctactgcgttccctcaacaacctagaaggcgcccccctcaccgacgtccagatcatcaatgtctacgacgtcttcgacgccaccgaagcagacatcaccgccctaacaaactccgtagtcagcgaccccaaggtggacaccgtacttactacagctgagctcgacaccatcgtcgaacaagcaccagctcatctcgcggtcgaaccactacctggccaatacgaccagcgcgccgacgcagccgaacaagcactacgactgctcaacccccacaccaacgcacgtgtaacctccggggagctttatatcttcagcgacctaaccgaagaggcattcgccaacatccgcgactacctgatcaaccccgtcgaagcaggcgagaaaaacctcgacgtactgcgcgcaccatccatgggcgacatcgccccactcaagcaatacccagatttccttgagctcgacgacgctggcttgagcgcattgctggccagcgaaggcatggccatgagcttggcggacctgaagcttattcaggaatacttccgcaccgaaggccgcacccccaccgaggtggaactggcagcactggacacctactggtccgatcactgccgccacaccacctttaacaccgagctgacggagatcaccaactccagcagtcgttacggtgcacagctcgaccgcgcactgaagcgttacgacgaactccgcgaagccaacggtcgcgcccataagccacgcaccctcatggacttgggcaccatcatggtccgtgagctgcgtcgcaacggaaccatgaccgatcaagaagtcagcgaagaaatcaacgcctgctccgtatacgttgacgtggacaccccagaaggcgacaagccttggctgctgatgttcaaaaacgaaacccacaaccaccccaccgaaatcgaaccattcggtggcgcatccacctgcctcggtggcgcaatccgcgaccccctatccggccgctcctgggtttaccaagcaatgcgcatctccggcgccggtgacatcaacaccccacgcaccgaaacgatcgacggcaaactcccgcaggcagacatcagtgcccgcgcaacccacggctactccagctacggcaaccagatcggtctggcaaccaccagcgtccgcgaactgattcacccaggttacgtcgccaagcgcatggaactcggcgccgttgtggcagccgcaccacaagaaaatgtcaagcgcctagagcctcaaccaggcgacgtagtgatcatcctcggtggccgcaccggacgcgacggcgtgggcggagccaccggctcctccaaggcacacgacgaagaatccttggcacgctcgggtgcagaagtccaaaagggcaaccccgtcaacgaacgcaagatccaacgcctgttccgccgaccagaaatcgcccaaatgatcgtgcgctgcaatgacttcggcgcaggtggcgtgtccgtcgcagtcggcgaactcaccgacagcatcgacatccacttggatcgcgtaccactgaaatacgccggcctcaacgcccgcgaaatcgccatctccgagtcccaggaacgcatggcagtcgtcgtgcgcccagaagacgcagccgccttcattgaagcagccgcaaccgaaaacatcgaggcagtagagctcgccatcgtcaccgacagcggacgcctacgcatgttcctcggcgaagacgtagtcctcgacctctcccgcgaattcctcgaaaccaacggcgcagcacgctcccagagcgtagaaatgcgcgatgcaggagacgtcgaaaagcctgctcagccggcaaccatcctcgaatccttgacccgccacggctcccaagaaggcatggtcgaacaattcgacgccaccgtcggacgctccaccgtactcatgccatacggcggccgcacccaaaaaaccgacgaactcgcatccgtacaaaccttcccagtaccaggcggatcccacaccgcatcggtcatgacctacggattcagcccagagcttgccgacgtctccccctacctcatgggctcctactccgtcgtcgaagcactcagccgactcgtcgccaccggtgccaacgcacgcggcgcatggctgtccgtccaagaatatttccagcgcctcgaccaaaaacccgaactctggggcgaagtaacccaggcactcctgggtcttcttgaagcacaagacgccttcgaagtagctgccatcggcggcaaggactccatgagcggcacctacggcgatgacctgcacgttcccgcaacgctggtcaccttcgcagtcgcaaccatggacgcacgacgcaccctcagcgccgccatcccaagcggcgaattcgacgtctaccacctcgcccacaccccgctggaaaccggcgaagccaactacgagcaactccgcgccaacttcgacgccttccatgagctcgccgccaccggcaccctctcggcagcctcccccatcatcccaggtgggctcggcgccaccatcgtgaacatgctgctcggcaacgaactcggattccagggcaccgccaccaccaacgcagccctcggtggcctcgtattcgcggtcccagccggcaccgcagtcgagcttgccgacgcccaactcatcggtcacaccaacccatccggcgagatcaccttcggcgaagaaaccttcaccatcgcgcaagcactcgacacactagagcgcgactaccgcgaggtctaccccctcaacgtgaccaccgcagacgtagaggccctcccagattttgctaccgctctacccaaggcggacaccgattctgaagaagccaacgcctccgccggtgacaaagccgtacacgtgttgcttccagtattcccaggtactaactccgaatacgacatggccgaggccttcgaggcagcaggtgccaccaccgaattccacatcatccgaaacctcaactcggagatgctggctgctgacacagaagcattcatcaccaagctgcaatccgccaacatcctggcattctccggtggattctccctcggcgacgaaccagacggctccgcaaaattcatggcagccttcctacgctccgacaccgtagccgcagcgatcaaggacttcgtggctcgcgacggcctcgtcctcggaatctgcaacggcttccaagcactggtcaagagcggattcctgccatacggcgaccccgccaagatgagcgcagaatccccaacgttggcacacaaccgccaactgcgacacgtctcacgcatcgccaccactcgcgtcagctccgtagcctccccatggctgagcaccttcaccccaggccagcagcacctcatgccagtatcccacggcgaaggccgcttcgtagtatccgaaaaggaagcccaagcactgtttagcgcaggtcaagtagcattccagtacgtggatgccgagggcacccccaccatggaagcacctgcgaaccccaacggatccaactacgccatcgagggcatcatctccccagatggtcgcatcctcggcaagatgggacacccagagcgcttccgcgacggcctcatgcgcaacattcctggtatggagatccaagacatcttcgctaacgcggtgaactactgccgtaagagtcaacgc

SEQ ID NO: 17902 - DNA, 2502 bp, Cornyebacterium diptheriae
atgccactgaccatcaccacagtgctgggtttccttgggatcgtcttgtccgcgcccgcgtggttctacttcatccgcgcggcggcgcacctgtataagttcgtagcccagggacagccctcccccggccgcacgcagcaacttggcaggcgcgcatggcaaacgttcgtcgaggtatttttccataccgagctccgacgcaaacccgctattgcggttgcgcactggtttgtcatgctcggtttcctcttcggctctatcgtctggtttgaggcttacatccaaaccttccgccccgattctgggtggccgctgctctcacattggtcggtgtatcactttgtcgaggagattttggcgctcggcacggtcctcggcgtgctgtttttgttcgcggttcgcctgaatacgggcatgcgcgatcgccttgcgcggttctatggttccaacgccacggcagcttatttcgtcgaggcagtggtgtttgtcgagggcttgggaatgctcttggtcaaggcgggcaaaatcgcaacttatgggcatgcgtcggcgtgggctgattgtgtgacccgttttattgcgttggcacttccggcaagccccacactggtgagcatgtttgcgctggtgaagctgctcagcggcatgatctggctggtggttgtggcccataatttgtcgtggggtgtggcatggcaccgctttttggcgtttttcaatattttcttccgccgcaatcctgatggttcgcaggcgttgggcaagttacagccgttgtattccgacggcgaggtgctcacattagacacggctgacgacgattccacactcggcgtaggcactatcgaagacgctccttggaaaatgcttctcgacgtttccacctgtaccgaatgtggtcgctgccaggagcagtgtccggcatggaacacagagaaaccgctgagccccaaaatgttggtcacggatcttcgcgatgcagccattgagtattttgattcctcccacgactccgttgatgtgctcgcattagcaggaaatagcggtgtgatcagcgatgatgtgctgtggtcgtgcaccaactgtggtgcctgcgttgaacagtgccccgtcgacatcgaacacatcgaccatgtgtccaacatgcgtcgtttccaagtgctcgccgagtcgaacttcccctctgaactaggcggaatgtttaaaaacttggaggtcaagggcaatccgtgggggcgcaactctcaagagcgtgccacgtggatcgacgaggcgcgtcgcgacggaatcgaagtaccggtattcggtgaagacatcacggactttgaggacacggaatacctgttctgggttggttgtgctggcgcttttgatgacgacggccgccgcaccacacgtgccgtcgtcgagctgctgcacaccgccggagtgaaattcgcagtgctttccaaaggtgaaacctgcaccggcgacccagctcgccgcgcgggtaacgagttcctcttccaaatgctggccacagaaaatatctccaccctggatgatgtttttgacggtgtcccccaaggtcagcgcaaaatcatcaccacctgcccgcactgctttaacaccctacgcaacgaataccccgacttcgacggacactacgacgtcttccaccacacccagctactgaaccgtctggtccgcgaaggcctgcttacccccgtcccgcgccgaccagaagaccgcgcaccgatcacctaccacgatccgtgcttcctcggccgacacaacaaaatcttcgacccaccacgcgaacttctgggtgttaccggaatggaactcgtggaaatggaccgtaaccgcaacgaaggcttctgctgtggcgctggcggtgcccgcatgttcatggaagaaaaactcggcacccgtattaacgaaaaccgagctgcagaagcagtagccaccggcgcaaccgaaatcgccgtgggctgccccttctgcaacaccatgatgaccaacggtgtcaaagccgttaccgaaaatacgcccatcgtccgcgatgtggccaccatgcttcgcgacgccatcagcaccgacggcaccttgcccgcccctcgcgaacgcgccttcctggatctccccatccgatctgcacgtgcaacaactcctgagactcagcaagctgcgcccaaaccagtggcacctgcagcgccagcggtcccggccatgcctgcggtccctgctgccccagcaacaccggtgccacctagcactccagctccgggcgcagcagtaccaccagcagcaatacctcctgcggcagtacctccggtagcggttccaccagtggcaactcccccggtcgccgcgccacccaccccagttccaccgacaccagtgccaccagctgcggttccgccagctgcggccccacctgtagccgtgccgcctgcggccgttccaccggcaccacaacccccaatggcgcagccaccacaagcgcagccgccacagcag

SEQ ID NO: 17903 - DNA, 1089 bp, Cornyebacterium diptheriae
atgaaagcagcacggtactacgaccaaaaagacatccgaattgaagaaatctccgagcagccactgctgccaggcactgcccgcatcaaagtagcgtggtgtggcatttgtggcaccgacttgcacgagttcctcgaaggtccactgttcgttccagaacaccaccacccgcacccagtctccggcgaggactccccagtgaccttggggcatgaaatgtccggcgtgatcacagaagtcgccgaggacgtgaccgatctagccgttggcgaccacgtagtagtagagccctatttgattcacgatgatgtagacacctctgaagccaaccccttctaccatctttcccgcgacatgaacttcattggtcttgccggtggcggcggtggcttgagtgaaaacattgtggtcaagcggcgctggatccacaaaatctccccagacctgcctctcgacgaagcagccctcatcgaaccactgtctgtgggctatcacgcagtggaacgtgctgggttcgcctccgaagaagcagccaagggcaaggttgcacttgtcggcggtgctggacctattggcttgctcaccgcctcagtactcaaggctttcggcgccaccgtggtgatatcggaactatccccgctgcgtaggaagaaagcactcgattccggtgctgccgactacgctctcaacccagcagaagtggatgtggttgaagaaattgccaagcttaccgacggcaaaggtgccgacgtcgccttcgaatgcacctccgtccaagtagtgctggacaccctcatggatgctgttcgcccaggggctgtgatcgttgtggtgtctatctggtctaagcgctccaactttgacatccataagttggtgatgaaggagatcgacctgcgcggcacgattgcctactcccatgcgcacccgaacaccatcaagctggtggaatccggaaagattaacctcaagccgtttatcaccggaaagattgcgcttcaagacatcgtggataaaggttttgacaccctcattaaccacaatgaaacagcagtcaagatcttggtatccccatcgggcgtaggcctc

SEQ ID NO: 17904 - DNA, 1290 bp, Cornyebacterium diptheriae
atgactgacacgacttttgagcttcgtaccgagctggacgacgcgccaggccgccacggccgaactggtgtaatccatacccctcatggtgacatcaacacgccggcgttcatccctgtggccaccaaggcgacggtgaaaaccctcaccccacagcaaattcgtgacactggcgcccaggcgatcctctccaacgcctaccacctctacttgcagccgggccccgatattgtcgatgaagccggcggtgtatccaagttcgagaactggcacggccccacctacaccgactccggcggattccaggtgatgagccttggtgttggctttaaaaaggtgctcgctatggataccgcggggcttgtagaaggcgacatccgcgcgcctaaaaaagatcgctacgcgcaggttgatgaagacggcgtggacttccgcagcgttatcgacggctcccgccaccgcttcaccccagaagtcagcatgcaaatccagcaccggctgggcgccgacatcatcttcgctttcgacgagctgaccaccctcgtggacacccgccagtaccaagaaagctccgtcgaacgcacccaccgctgggcacgccgctgcctcatcgaacacgaccgcctcacccgcgagcgcgaaggaaaaccactgcaatccctgtggggcgttgtccaaggcgcccagtacgaggatctgcgcagacaagcagtccgtggcctgcttgacctagacaaagaggcagaagataacggacgacgcggcttcggtggcttcggcatcggtggcgcattagaaaaggaaaacctaggaaccatcgtaggctgggtctgcgacgaaatcccgcagcacaaaccacgccacctactgggaatcagcgaaccagacgacctctttaccgccatcgaagcaggtgccgacaccttcgactgtgttgcgccgacgcgcctcggccgtcgcggcggcgtgtacaccctcgacgggcgcgtgaacctcaccgcagcccgcttcaaacgcgacttccgtcaagtagacgaggagttcggcggccctatcgccgagtactcccgcgcctacattcaccacctgttcaaggccaaggaattcctcggtggaacattgtgcacaatgcataacgtggcctttatgatccagctggtagacaacattcgcagcgctatcaacaacggcgactttgaagcctaccgcgatgaattcctcggccgctactacgcaagcaaaggaggcccagcagcagctgggcgctccggagggatgatctacggggtt

SEQ ID NO: 17905 - DNA, 2151 bp, Cornyebacterium diptheriae
gtggctgttcgtgctgccgcccatcatcttgtacagctcgaccagagcagttgcgatcagcccagtacacatcgtgtggggtataccattcgcggcgagcgttctcggggcgatctcgtggagtttgtcaccccaggtgtgctgttgcgcaggctgatttctaatccggagctcgacggagtctctgccgtggtggtcgatgaggtccatgagcgccaactcgacaccgaccttgtccttggcatgcttgttgagctacgagagcttcgcgacgacctcacggtgatcgcaatgtccgcaaccgtcgatgccccgcactttgctgagctactgagcccagagcacccagcacctatcgtggaaacccacgcggagattcaccccttggagctgcattatcagcctgctgccgagcgcatagcactgagccgctcatacatggatcatgtgtgcacagttacccagcatgcggtggcacacttcacggattccgcccttgtattcctccccaccattgctgccgtgactactgcggtttccactttagagcagcgcacatccgtgccggtttatcctctgcatggccagttgactagttcggagcaagacgctgcgctacgcgctggtcggcagcggatcgtggtggcaacgtcgatagccgaaagttctttgaccgtgccaggtgtgcgcattgttgtcgacgccggcctaagccgtgttcccaaacgcgatcacgcccgtgacctcaccgggctggtcaccaccagcaccagccaggcacaagcagaccagcgtgcaggacgcgctgggcgtgaaggcccaggcaccgtgtaccgcctgtactcggcggcggagtttcagcacttccccgaccacgtcaccccagaaatccgctccgccgatctcacccaggcggcactgtttttagccgcgtggggttgtactgatcccgcacagtttccgctgcttagcgcgcccccgaagcaatcatgggagcaggccgtggatacattgcgcgacatcggcgcccttaacgccgcaggccagatcactgaacttggtcgcacgctggctacgttgcccacggatcctcggctgggtgcgtcgttgctgcattgtggcggcggggctgcaccgacgattgcggcgctaagtcttgatgcccgcggggatattcctcgcgcaatcgcggcgatgtctcatcagcagcgttttacccgcgaggtggcgcggttagcggggttcgtgcccgattctgagtgcacaccaggggaagcgatcgcgcgggcgtggcctaaaaatgtggcgcgtcgcgatggcgacagctatcttatggcaggcggttcccgtgctgagctgggggtttctagtctttctggccatgagtggcttgcggtggcgcaggcgtctctcacgcatcgtggcagtgttatccgctcggctgcccctatcagcgaggccgctgctgtggacatcatcggcgttgcggagcgcaccgaggctacgcttatcgacggctccctgcggggcacacgcatccgccacgccggcgcaataacattgagcacaaccaatgtgaaagttgagggtgagctcgcggaacaagcactcgccgaggggatccgcacccatggccttgagctgtttacgttctccgataaggccaccgagctgcgcgatcgcctccgacatcttcacgagtattacggtgaaccgtggccggatgttgatgcagccgaccccactttgtggcttggcccagagatctcagcattggccgccggcaccccagccgcacgaatcgacctctaccccgcactccagcgcttgctcccgtggccggaggccacccacctcgacgagctggcacctgccgtactcgagttgcctaatggtcgccgcgcccgtatctcctatgctggcgaccggccggtggtgagcaccaagctgcaggattgttttggcctgttggagtcccccattgtgtgcggccgtccgcttcagtttcatttgttgtcgcctgctggccgcccgcttgcggtgaccgacacgttagatagtttctgggcgggcccctaccagcaggttcgttccgatatgcgcggacgctaccccaagcatccgtggccggaggatccgttggctatccgt

SEQ ID NO: 17906 - DNA, 426 bp, Cornyebacterium diptheriae
ttgatcctcagccccgccagtaaggactgcacgatcagacagcctctgaccattgaatatggtgttaacacgaccattggcaaagacacttttatcaattacggcgtgaccatcctcgacaccgcagaggtcaccattggcagccaggttcttatcggaccgaactgccagctcatcacggtcacccaccccgttgacaacgccgatatgcgcaccgccggctgggaaattgcccacccgattgtcgtcggcaagcaggcatggctaggggctggcgtgatcgttttacctggggtcaccatcggcgagcgtgctgttatcggcgctggcagtgtggtcacccacgatattcccgacgacaccatcgcctacggcaaccccgcccgagttatacgcaccaccaatcctcacaccacttatgagctt

SEQ ID NO: 17907 - DNA, 1512 bp, Cornyebacterium diptheriae
atgcacataactggtggtggcgcgcttaaccgcgggccgttttcacgcattcatttcaacaggctcgccttgtccaacaagcagcgggcctttttgttagccaccaacaagctcacaagagtttcggcccaccgcttgaacacaacaaatatttgtttttcagcgaaagaggttagaaacaccatgactgactccaccctccgtaagacgttaatcagcgcctactttggtaactacggcggacagtttgttcccgatgcgctcctgccggttctcgacgaactagagcaggcctatgtggatgcactcaacgacccagagttttcgcgggaacttgccaggctacaaaagcactaccttggtcgtcccactcctattaccgaatgcgccaatcttcccctagcaggtaaggggaagggtaaggtgcggatcttcctcaaacgcgaggatctagttcacggtggcgcacataagggcaatcaggtgcttgcccaggcgttgattgctcgccgattgggtaaaactcgtttgatcgcagaaaccggtgctggtcagcacggtaccgccactgcaatggtggcggctttgatgggaatggactgcaccatttatatgggtgctaaagatgtggcccgccagcagcccaatgtgtatcgcatgcggctcatgggggctacggtggtgccagtaaccaacgagcatggtgattccatgtcggatgctatcgacgtagcgcttatggactgggtggaaaacttggataccacgcactatctgattggttctgcggtcggcccacatccgttccctacgctggtcaaggagtttcaggcggttatttcgcgggaatctcgcgaacagatgctggagctaacaggcaagcttccggacgcagtagttgctgccgtgggcggtggttcgaatgctattggtgcgtttgctgattatctcacggataagccaggtaatgagtccgtacgcttgattggtgtggagccagcaggcgaaggtcttgattccggtaagcatggtgcgccgctgcagcgtggcaaggttggtgtgcaacacggcttcaagtcgttcatcttggctgatgagcagggcaatccgctgcattcttattccgtatcggctggtcttgattatccaggcgtgggtccagaacacgcccacctcatggaatctggtcgtgcgcaatattatggaatcaccgatgccgaggcgcttcaagcattccggatgctgagccgctacgagggtatcattccagctttggagtctagccacgctctagcatatgcgttaaagatggcagaaaacgccgaagaaaccgatgctcccattaacattgtggtcaatctttcgggtcgtggcgataaagatgtggactatgttcgtaatatcttgggcgatcttgctaccgaggatccagcaacctcaccagtcacggatcctcatgtcgccgaaaccctcgtcacaatgatcgctgagtccaatgcacgagagggagtc

SEQ ID NO: 17908 - DNA, 1086 bp, Cornyebacterium diptheriae
ttggcaggccggttgcctatttccgagcctggtctggcggatcttctagcggcgaattcggttgagtggacggatgatccgcagcgtgcgcgcgattgcgacctctattttgtgtgcgtgggaacaccgagcaccgatggtccctctgcccaggcaagactggatgtgagtgccgtggttgcggcggtggggactattgctacgcttgcgccccacccggtggtggtgggcaagtcgacggtgccggtggggacgtcgatacgcttgttgcagcaattcccacagattcgcttgctgtggaatcctgagtttttgcgcgaaggtcacgcggtggcggatacgctgcaccctgatcgcattgtgatcggtggtgcggatccgcagccgcttttgcgtgtttatgaggggattaacgcccccgtgatcaccactgatctggctacggcggagttggcaaagtcggcggctaatgcgtttttggctaccaagctcagttttattaatgggctgtcggaactggctagtgccaccggtgcggatattggcaccattactcgggccatggggcttgatccccgaatcggctcccagtatttgtccgcaggcttgggctatggcggcggttgtttgcctaaggacgtccgtgggcttgcggccagcgctcgcgattatcaggcatcgcattttgctgagctgttgagcattatcgacgccaccaatctgcggcagcgcgagcgcacctgtgaactcgtggccaacctgtgcaccccaggcgcgcggatcgatgtatggggtgccacgtttaaagaaggttccgatgatgtgcgcgactccccagggttagctgtggcccatgcgttgaaaactgcgggttttcgtgtgcgcgtggtggatcccctcgtggggcattggccgcctgaactgcaagaacctgaggcaattgtggtggcaacggcgtggtcggagtttagtcgcgttgtccctgaaccccgccttgcgcatggatgtggcggtgtggtggtggacgcgcgaggtgttttgaaccgctcggcgtgggtggccgcggggtggacgtacaggaatctc

SEQ ID NO: 17909 - DNA, 1023 bp, Cornyebacterium diptheriae
atgacaagcgacaaaacactcaacaacctcatcgcctacctcgacaacccacaccccaccgtcgaacaagccattgaagtattcacaccactcaccgtcggcgactacgacgacgtccacatcgcagcgctgctcgccaccatccgcacccgcggcgaaacctacgccgacatcgccggcgccgccaaagcattcctcgccgccggacgaccatttcccatcaccggcgcaggtctcatggactccgcaggaaccggcggcgatggtgccaataccattaacgtgaccaccgcggcgtcccttgtcgccgccgctgggggagtgaagatggtcaaatgtggcaaccgatccgtatcctccaaatccggatccgccgacgtactcgaagcactcaacatcccactagacctcaaccccgaccgcgccgtgcgccaattcaacgcctccaatttcacgttcctttttgcgcccgcctacaaccccgcggtcgcccacgtgcaaccagtgcgcaaggccctcaaagtgcccacgctgtttaacaccctcggcccgatcttggcgccggctcgccccgaatttcaggtcatgggcgttgccaaccccaagctcggtcagattatcgccgaggtgttccgcgaactaggtcgcagccacgccttggttgttcacggatccggcaccgacgagatcgcagtccatggccccaccacggtatgggaacttcgcgatggtgagatcagcacctacaccatcacaccagaagaaatcggtatcaaccgctacgagttgagcgagctcgcaggtggcgacggcgtagaaaacgcacacctcatgcgcgaaaccttcgccagccgtggtcccgccgcacaccgcgacgctattagcgccaccgccggcgcaatgttctacactgcgaatcacgtacccaccatcgccgagggagtcgctaaggcacaaacaatgcttgccgacggctccgtggagcgctggttagctatccacgaggaggcaaactatgcagaa

SEQ ID NO: 17910 - DNA, 1455 bp, Cornyebacterium diptheriae
atgcagaatgattcgtcgacacgccccatgcccaccgtcctagaatccatcgtttcgggccgacgatcccacctgcccgaaatccaagcgcggatttcccacgtggacccggcgcgactactgcgttccacccgctcgctgtttcagtcgttgggaggccgtagcgatggcggtccggcgttgcgggggagtgcgcgctttatcatggagtgtaagtcctcttcgccatcgcttggcatgattcgtgaggattatcgccctggcgacatcgcgcgggtgtattcacgttatgcggccggcatttcggtgttgtgcgagccggatcgttttggcggcgactataaccatctggccacggtggcggccacgacacatctgccggtgctgtgcaaggattttattatccaccccgcacaggttcacgcggcacgttattttggggcggacgcaattttgctcatgttgagtgtgcttgacgacgccacctacaccgagctcagccaggaagcagcacgcttggggttggatgttctcaccgaggttatcgacgaggttgaggtggaacgtgccattcggttgggggccacaatctttggcattaatcatcgcaatctgcatgacttgagcattgatttaaatcgctcagcacgccttgcgcagctgattcccgatagcgccgtgattgtctccgagtctggcattcggaataacgagacggttcgccaactcagcgggcattccagcgcattcttggtaggctcgcagcttacttctcagccagatgtggaccgtgcggcccgcgagcttgtgtacggcctcaataaggtgtgcggtttgcagtcaccaagcgaggcgcaagcagcgcgcgcatcgggcgcaatctatggcggattaatcttcgtggagtctagtccgcgtaatgtttcacgtgaaacatcgaaaaaaatcatggctgccgaacctgacctcacctatgtcgccgtctcacgacgcaccaccggatggaccgaaattataggtggcaacatcgccgttgctcagatccacagtccttaccagggctccatcgccgccgaaaaagaactcattaaccatgtgcgcggcgaggtaggagacaaggtaaaaatctggcgtgcagtctccatgacgcatgccgacggctcccttgtcgccgaagcactcgcacccgaggtagacagactcatcctcgacaccggcaacggcggaaccggcaccaccttcgattgggcacgcatcccagaagccgtaaagggcaagactcttctcgccggcggcattggaccagacaatgtcaccgaggcactcgccgttggctgcgcgggacccgatctcaactccgggttggaatatccagtcgaagcagggaagtgggcagcacacaaagacgctactgcaatccactccactttcacccaaatacgtggttttcattac

SEQ ID NO: 17911 - DNA, 636 bp, Cornyebacterium diptheriae
atgctgggatattccggaactaaccaggtgagctttgaggagatggtcatgctcacggcggcggtggtgcgcggtgcgggtcctgcgatggtggtggctgaccttccgttcggcacctacgaggcgagtgacgagcaggcggtgcgcagtgccacggagatggttcgtcgaactggtgctcacgtggtcaagcttgaaggtggcgttcggatggcgtcgcggattcgcgctattacagatgcaggggttccggtgtgcgcacacctaggttttactccgcagtcgatgaatcagctttctggttttaaggtgcagcgaggcgcggagaagctgacggctgatgtggatgctgtcgtggaggcgggtgcagagatggtggtgtttgagatggttccggcggatcttgccgcggagcttactgcccgctgcccgattccggtgattggaattggcgccggcaatgctaccgacgcccaggtgttggtgtggcacgatatcgcgaatcttcctaaaggtgatcatcgtgcccgttttgttaagacgtatgcagaggttggttcgcagcttacttgcgcggcgcggttctatcgaaaggatgtggaggcacgtcgcttccccgctgaggagcacacgttc

SEQ ID NO: 17912 - DNA, 651 bp, Cornyebacterium diptheriae
atgaccaatctgaagttggacgtcctcaccgctgagggcaagaccgatggtcaggtcgagctgccagcagagatcttcgatcgcgaagcatctgtggcactcctccaccaggtcgtcaacgcacagctcgctgcaaagcgtcagggaacccactcggctaagacccgtgcagaggtttccggtggcggacgtaagccgttccgccagaagggcaccggtcgcgcacgtcagggctcgatccgcgctcctcacttcaccggtggtggcatttcgcacggccctaagccacgcgattacagccagcgcacccctaagaagatgatcaaggccgctttgttcggtgctctcaccgaccgtgcacgtcacgagcgtatccacgtcatctctgaattggttgctggtcagaccccatccaccaagtccgcacgctccttcatcgagcgcatcacggatcgtcgcaacgttcttctcgttgtcggccgtgaggacgtaaccgcacagaagagtgctcgtaacctgccaggcgtacatatcctgttcgctgaccagttgaacacctacgacgttctatactctgacgacgttgtgttctccgtcgaggctctgaacaccttcattaaccgcgcttccggtgcggctcaggaggagaag

SEQ ID NO: 17913 - DNA, 1326 bp, Cornyebacterium diptheriae
gtgagcattcaccacacaacttttggaaacacaagcccgcgtatcgcgggctttttcgtatattccctgcgatacgcccaaccaaccacagggaatatcctcatgaaacacacactgctaccggcatacttcggagaattcggcggacaatacgtacccgagtcccttatccccgccctcgaccaattagaagcggccttcgtggaagcgcaaaacgatcccgagtttagagccgaactcgccggctacctcaaggactacctcggtcgtcccacgccgctcacgctctgctccaagctacccaaagccggaaaagggaaggggcacgcgcggatcttcctcaaacgagaagacctcgttcacggcggcgcacacaaaaccaaccaagtaatcggccaagccctcttagccaaacgcatgggtaaaacccgcattattgctgaaaccggtgccggacaacacggaaccgccaccgcactcgcatgcgcactgctcgacctcgactgcgtgatctacatgggcgctaaagacgtggaacgccaacaacccaacgtgtaccgcatggagctcatgggcgccaaggtcgtaccagtcgactccggctccggaaccctcaaagatgcagtcaacgaagcactgcgcgattggaccgcaaccttccacgagtcacactatctgctcggcaccgcagccgggccacacccatttcccacgattgtgcgcgaattccaccgcgtaatctcagaagaagccaaagcccaaatacttgagcaaaccggcgcactgccagatgtggtggtcgcctgcgtcggcggcggatccaacgctatcggcatgttcgccgactttatcgacgacccctcagtagaactcgtcggtgcagaaccaggcggcatgggactaagctccggaaaacacggcgctaccatcaacaacggccaaatcggtattttgcacggcgccagaagctacctcatgcgcaactccgatggccaagtagaggaatcctattccatttcagccggcctcgactacccaggtgtcggcccacaacacgcccatctagcaaagtctgggcgcgcccgctatgtcgccatcactgatgcggaagcactcgaagcattccaattgctctcccgcgaagagggcatcatcccggccttggaatccagccacgctcttgcttatgcactcaaacgtgccgccctcgctgaggaaaacaacgaagatatcaccatcgtggtgtccttgtctggccgtggcgacaaagacatcgaccacatccgccgcactctttccgcccacccagagctggttgtaaaggac

SEQ ID NO: 17914 - DNA, 840 bp, Cornyebacterium diptheriae
atggctattcgtaagtacaagccgacaaccccgggtcgccgccagagctccgtttccatgttcgaggagattactcgctcgactccggaaaagtctttggtacgcccccttcctaagaagggtggccgtaacgtacacggccacatcaccgttcgccacaagggtggtggacacaaacgccagtaccgtctgatcgacttccgtcgtaacgacaaggacggcatcccagccaaggtcgcacacatcgagtacgacccaaaccgtaccgctaacatcgcgctgctccactacgtggacggcgagaagcgctatatcatcgctcctaagggcctccagcagggtcagatgatcgagtccggtgttaacgcagacatcaaggttggcaacaacctcccactgcgtaacatcccagccggtaccaccatccactgcgtagagctcaagccaggtgcaggtgcaaagttggctcgttccgctggtgcttccatccagttgctcggtaaggctggcaagtacgcagttctgcgtatgccttcctccgaaatccgccgcgtcgacatccgctgccgcgcaaccgttggtgaggtcggcaacgctgaccagatcaacatccgttggggtaaggctggccgtatgcgctggaagggcgttcgcccaaccgtccgtggtgtcgttatgaacccggtcgaccacccacacggtggtggtgaaggtaagacctctggtggtcgtcatcctgtttccccatggggcaagaaggaaggccgcacccgtaaccctaaccgttacagcaacaacatgatcgtgcagcgccgccgcacgaacaagagcaagaagcgc

SEQ ID NO: 17915 - DNA, 276 bp, Cornyebacterium diptheriae
atgccacgcagcctaaagaagggcccgttcgtcgatgagcacctcctcaacaaggtcgacgctcagaacgaaaagggcaccaagcaggtcatcaagacctggtcccgccgttccaccattctcccagacttcattggacacaccttcgccgttcacgacggtcgcaagcacgttccagtgttcgtggacgactccatggtcggccacaagcttggtgagtttgctccaaccaagaccttcaagggtcacatcaaggacgacaagaagggacgtcga

SEQ ID NO: 17916 - DNA, 770 bp, Cornyebacterium diptheriae
gtgggccagaaaatccatcctcacggcctacgtctgggcattacttccgactggaagtcccactggtacgccgacaagaactacgctgagtacctcgctgaagacatccgtgttcgtgagtacttggtaaagaccctcgaccgtgcaggtatcgccgatgttgtcatcgagcgcacccgcgagcgcgttcgcgtcgacattcacaccgcccgcccgggcatcgtgatcggccgccgcggctctgaggctgaccgcctccgcacctcgctggagaagctcaccggcaagcaggtcgccctcaacatcctcgaggtcaagaacattgatgcaaacgctcagctggtggcacagtccatcgccgagcagctgaccaaccgtgtggcattccgccgtgcaatgcgcaaggcaatccagggcgctatgcgtcagccacaggtcaagggcatcaaggttgtgtgctccggtcgtcttggcggtgccgagatgtcccgcaccgagcgctaccacgagggtcgcgttccacttcacaccctccgcgccgagatcgactacggcacctacgaggctcacaccaccttcggccgcattggcgttaaggtgtggatctacaagggtgatgtcgtcggtggtcgtcgtgagagcgagatcaacgcaccagcagagcgtcgcggccgcggcgaccgcaacggacgtccacgtcgtggcggtcagcgtcgtcagcgctctgagcagaagcaggagggctaagaaatgcttatccctaagcgcgt

SEQ ID NO: 17917 - DNA, 225 bp, Cornyebacterium diptheriae
gtgtggatcaacatcttcccggaccgtccattaacccagaagccactcggcgtccgtatgggttccggtaagggtccagttgagaagtgggttgccaacgtcaagccaggtcgcatcctcttcgagatgagcttccctaacgaggaagttgctcttgaagcactgcgtcgtgcaggccagaagctcccttgcaaggttcgtatcgttaagaaggaggaccagttc

SEQ ID NO: 17918 - DNA, 318 bp, Cornyebacterium diptheriae
atgactcagccggatatgtcccagatccttgcacaggcacagcagatgcaggctaagctgcaggaagctcagcgtgagatccttgctaccaccgtcaccggtaccgctggcaatggtcttgtgagcattgacatgcagggcaacggcatggtttcttccgtcaccatcgaccctaaggttgttgacgctgacgatgtagaaaccctccaggacctgcttgttggtgcattcgcagaggctcatgaaaagctcggcacccttgcagagcagaagatgggcccgctgtctcagggcttcgacggccttggtgggatgttc

SEQ ID NO: 17919 - DNA, 654 bp, Cornyebacterium diptheriae
ttgttcgaaggacctctccaagacctgatcgacgagttttctcggctccctggtgtggggccgaagtcggctcagcgcattgctttccacctgctccatgtggaaccagcagacattacgcgtctgcaagatgcgctgggtgctattcgtgacggtgttactttctgccgcatttgctgcaatatctctcgcgaagaggtctgccgcatttgtgcggactcttcacgcgaccgcagcaccatctgtgtggtggaagaacccaaagacattcaggttattgaacgaaccggcgagtacacaggtcgctaccatgtgctcggcggctcgcttgacccccttgccaacattggcccccgtgagctcaacatttcgcaattattgcagcgtatcggcggcgtgttgccagaccgcgaacttgcggactccacccccgagacaccgctttacgacgcctccccagaagtgcgcgaggttatcctcgccaccgaccccaacaccgaaggcgaagccacagcctcctacctagcgcggctgctgcgcgacttcccagaccttgtggtgtcacgccttgcctctggcatgccactcggcggcgacttggagttcgttgacgaacttacactgtcgcgtgcgctgagcggcagactgacgctg

SEQ ID NO: 17920 - DNA, 750 bp, Cornyebacterium diptheriae
atgagcgaattaaccatcggtttaatcctgccggacgtgttgggcacctacggtgacgacggcaacgccctcgtcctgcgccagcgcgcccgcctgcgtggtatctccgcggagatccacacggttcgcctcggcgaagccgttcccgagggtctcgatctctactgcctcggcggcggcgaagacaccgcccagatcttggcagcagaacacctcaacaatgaccggggtctgcgccgtgccgctgattccggccgcccaattttgggcatttgcgcaggtctgcaggtgttggggcgttccttccgcgcctccggaaagatcgtcgagggcgtagggcttatcgacgccaccactgcgtccctagccaaacgcaccatcggggaacttcagtccactcctaccgcagcgggctttactgcagagctcaccgaaccgctgactggttttgaaaaccacatgggcgccaccatcttaggccctgatgcccaaccgctgggtgctgtaactcgaggtgtaggcaacacggatctgcacggtattactaccgcctcggtatctgatgaacaggtgtcttatgaaggcgctgtgcagggcaatgtggtgtgcacctatatgcatggcccagctttggcccgcaacccgcagcttgcggacctgctgctggcaaaagcgatgggcattgcccttgctgatcttgcccccttggacctgccggtcgtcgaccagctgcgcaaggagcgcctagcg

SEQ ID NO: 17921 - DNA, 366 bp, Cornyebacterium diptheriae
gtgattcagcaggaatcgcgtctgcgggttgccgataacaccggtgcacgagagattctgtgcatccgcgttctcggtggctccacccgacgttttgctggcattggcgacgtcatcgtcgctaccgtcaaggaagctaccccaggtggcaacgttaaggctggcgaagtcgttaaggctgttatcgtccgcgctaagaaggaaacccgtcgtccagacggttcctacatcaagttcgatgaaaacgctgctgttttgatcaagaacgacaacgagccacgtggtacccgtatcttcggcccagtagctcgcgagcttcgtgacaagaagttcatgaagatcgtttctctcgcaccggaggtgatc

SEQ ID NO: 17922 - DNA, 1248 bp, Cornyebacterium diptheriae
ttgcgcactcgccttgcaatcggcgcggccgctgtggccactacggcttcgcgggcgaccggccgtggctccggcggcatgattggtggtctgattgcagaaaaaatcgacccgaacatcatgcagtcgttggctaaaacgcgtccgaccgcgctcgtaacaggaacgaatggcaagtccaccaccacgcgcatgctggccagcgccgtccgcgcccagcacaccgtggccaccaacgaaggtggcgacaacatggacgccggcattatctccgctctgatggcggggcaatcggcaagccacgtggtccttgaggtcgatgagctgcatgttccctcggcagccgaccgcctccacccgcagtgcctgatcctgctcaacctcacccgcgaccagcttgaccgcgtcggtgagatcaacaagatcgaacgtgccctgcgcgactgcgtaaccgcacaccccgacatgaccgtgatcgccaactgcgacgacgtgctagtcacctccgtggcttacgacgcccccaacgtagtctgggtatcagctggtgccgggtggaccggcgactccgtgtcctgcccacgcaccggcagccacatcgtccgccaagacgaccactggtacgccaccaagccactcccgaacggcgaaaccttccaacgccccacccccgcgtggaccatcacccctgacggcattctcaccccagggcatgccgaacccgtcccgctatccctagcactgccgggcaacgccaaccgtggcaacgctacccaagccatcgctgcggccgtgacctgcttcaatgtgccgcttgatgatgctgtgcgtgccgtcgaaacggtggacgatgtggcgggccgctactccaccatcaccctcggcgagcaccaaattcacctgctgttggccaagaacccagccggctggcaagaagcgctctccatggtggatcgcaccgccgagggccttgtgatcgccgtgaacggccaagtcgctgatggcgaggacctctcctggctttgggacgtcaaattcgaggagctcgaagagctttccgtcaaggctgccggcgagcgcggtacagacctctccgtgcgcctgacttacgcctccgtggaccacgagctcgtgcgcgaccccctcgccgccatcaaggcctgcccggcggggcgcgtcgaagtcctagccaactacaccgcattccgcgatctcaagcgcgccatcaccgccgcaaccaaggaggct

SEQ ID NO: 17923 - DNA, 312 bp, Cornyebacterium diptheriae
atgaagatccacaagggcgatatggttctcgtgatctccggcccagacaagggcgctaagggtaaggtcattcaggctttccctaagaccgagaaggtcttggttgagggcgttaaccgcattaagaagcacgttgctaactctgctccagagcgcggcgctgagtctggcggaatcgtcacccaggaagctccaatccacgtttctaacgtcatggttttggactccgacggtaacccaacccgcgtgggctaccgcttcgatgagaacggcaagaaggtccgtatctcgcgtcgtaacgggaaggacatc

SEQ ID NO: 17924 - DNA, 561 bp, Cornyebacterium diptheriae
atgagcgagaactacactccacgtctgaagacccgctaccgtgaagagatccgcaccaagctcaacgatgagttctcctacgagaacgtcatgcagatccctggtgttgtcaaggttgttgtcaacatgggtgtcggcgacgctgctcgtgactccaagttgatcaacggcgcactcgaggacctcaccttgatcaccggtcagaagccagagcttcgccgtgccaagaagtccatcgctaacttcaagctccgtgaaggcatgccaatcggtgctcgcgttacccttcgtggcgaccgcatgtgggagttcctggaccgtttgctgaccgtcgcactgccacgtattcgtgacttccgtggcctgtctgaccagcagttcgatggccacggtaactacaccttcggcctctccgagcaaaccatgttctacgaaatcgacgttgacaagatcgaccgcccacgcggtatggacatcaccgtcgttaccaccgctaccaacaacgaggaaggccgcgcattgcttcgcgagctcggcttcccattcaagaaggctgacgcc

SEQ ID NO: 17925 - DNA, 1086 bp, Cornyebacterium diptheriae
gtgacccgccgcggcgaagaaggagaagattcgcgcgattcatgtgaagtagcatacatgaatcccgtctcatgcgctaggtatcccactatgtggaacatgttgtggggtgtgtcgtggttgggggtggagtggggtaaaaatgtacatatgattgacgcccgcgattgcctagcacttgatgctgccaaactttattacgtaacaggtttgggtcaggcacaggtcgctaaggagctggggatttctcgtcctacagtatccaagctgctatcgcatgctcgtgataaaggttttgtcaccatctccctgaatgaccctcgcgaggttgcaggtgggtacgtcgaaaagctttgtgctcgctatgggcttgccgatgtccgcgtcgtacaatcccctgcaatggggcgggggctgactggcgagctgggtaatgccggtgcagcgctgctggaagaggttgtaaaggacggtatgacggtgggtgtgtcgtggggtgacacgatgctggccgtttctgagcatctgcgtaccttgcccttggtggatgtaaaggtggtgcaacttaaaggcgggcactcgcatactgcacgcaacactaacgacatggtgacgctgacgcgcttctcgcgagctctgaatgcggaaatgatgatgttgccgctgcctgtcattcttgatagcaaagaagctaaagagctggtagtaaaagatcgacatattgcgtccatgctgaacctgggggcgcattgtgacgttgctgtgtttacagttggggcggtaaagtcggaaagtttgctgcttaacttggggtatttgtcgcctagtgagcaggctcgcttgatggagcatgcggtaggtgatgtgtgctcgcgcttttatgatgctcaaggcgaggttgcggaccctgatattgatgctcgcacagtgggaatatcgctggcagatttgaagaagcggcctgtacgggtgctggtagcgggcggtttggagaaggcgccggcgattgaagctgccttgcgtaccggtgtggcgacccatgtggtgattgatcatgctacggcgcagcgcgtggtagagatggcg

SEQ ID NO: 17926 - DNA, 1485 bp, Cornyebacterium diptheriae
atgcgggtgaattcacagagtaaccatgatgtttcccccgccccctccggcgtggtcttagaagctgccgatccagctgagctgttggtccgcgcacagaaaaccctgggcttactctctccgctattgagcccactggctcaagcgttccacgatcgtgggcaccgcctctacctcgtaggtggttcggtgcgtgacgccctccttgatgagcttgggcacgatctggattgtacaacggatgcccgccctgaggtggtatccgcgatcctggaagagtacgcccccgtggtctgggatactggtatcgagtttggcaccgtttcagcagaaaaagacggccaacaaatcgagatcaccacgttccgctccgacgtttatgatgggcagtcccgtaaccccgaggtgcaattcggtgacacccttgaaggtgatctgattcgccgcgacttcaccgtcaacgctatggcgatggagatcctgccggatggctcgatgcagttccatgaccccgttggtggcatgaatgatctagttgcgggactgttagacaccccagcgactccgcagcaaagctttaacgacgaccccctgcgtatgctgcgcgctgctcgttttgtttctcagttgggctttgatctcgcaccacgagtacgccatgccatgacggagatggcggatcagatcacacgcattaccgctgagcgcgtgcaggtagagctggacaaaatgatctgtggcaaagtcccatgggatggtatcgacgtgatggtagataccggattagcagacattatctatccggaaatctctgcgctgcggcttactcaagacgaacaccatcaacacaaggatgtgtatgcccactccttgacggtgttgcgccaggcgatggatcaagaagaagacggccctgatgtggtgttgcgctgggctgccctcatgcacgactgtggtaagccagatacacgcgagttctcccccgaggggcgcgtgagcttccaccagcatgagatcgtgggtgcccgcctcatgcgtcatcgcatgcgcgcgttgaagtactccaagcacacgatccgtgacgttagtgagctcattcgcctgcacatgcggttccatggatttagtgagggcgagtggaccgattcggcggttcgtcgctacgtcaccgatgccggcgacctactcccccgcctgcacaagctcgtgcgcgccgactgcaccacgcgaaacaagaagaaggcggaacgcctacaaaaaacctacgatcacttagaagatcgcattgcagatattgctgcgaaggaagacctagccaaggtgcgccccgacctagacggtaacgagatcatggagattctcgacatcaaggcaggaccccaagtgggacaagcatggaaattcttaaaggaactgcgcttagagcgtggccccctagaacgtgaagacgcgattttggaattgaagaaatggtggtacgaacag

SEQ ID NO: 17927 - DNA, 1341 bp, Cornyebacterium diptheriae
gtgtctcagattgtttcccactcagcatctgctggggtccgcgatggtgtagcaccatcagaatcacctgcctcatctagcgcgccttcttggcgtaaaaccgacaccgtatggagcttgagcctcttcggcacagcaatcggtgcgggcgtattgttcctccccatcaacgccggtatcggcggaatcatccccatgctcgtcatggccgtcgttgcgtacccgatggcccactgggcacaccgaggtcttactcgtttcatcctttcagcatccaaggaagacgcagacctaacggacgtcgtcgatgagcacttcggccacaaggccggcgcatttatcaccgtcttgtacttcttgtcggtctacccgatcttgttggtctactcagttactatcaccaacaccgtgaactccttcttggaaaaccagctgggaatcaccccgctgccacgctggttgatgtcgctcatcttggtcggcggacttatcttcgtagtcagcctcggtcgcacggtgatcgtcaaggccatgtcggttttggtattccccttcatcgccatcttggttgtgctctctgtttacttgatccctaagtggaacaccgcactattccagaccttcgacctgcgcacttcagctgaggcttccggtcatagcatctgggttaccctgctgcttctcgtcccagtgatggttttctccttcaaccactcgccaatcatttcctccttcgcccaggaaaagcgtgctgagtatggtcagtgggctgactacaagaccggtcgcattcttagcgccgcccagatcttgatggtcgttgtggttatgttctttgtgttctcttgcgcattgagcttgtcgccagccgacctcgctgctgctaaagaacaaaacatcaccatcttgtcctacttggctaatcactttgataaccctgtgattcagtgggctgctcccattattgccatgattgctgtggcaaagtccttccttggccactacctcggtgctgctgaaggtttccaaggcttgattgcttcgggtgctgcttctaagggcaagactgttgatactcaaagccgtgcgctggtgctgggcactctcgccttcatgctgatctcttcgtggctggtggcatggctgaacccatccatcctcggaatgatcgagacgatgtgtggtcctacgatcgccatcctgctcttcctgatgcctatgtacgccatccataaggttccggcattggctaagtaccgtggtcgtatttcgaattacttggtcttcggcatgggcctgttggcactgtgcaccatcgtctacagcatcgtccaggctttc

SEQ ID NO: 17928 - DNA, 3327 bp, Cornyebacterium diptheriae
ttgaatcccacgaatcccacaccccatccgcagcgtggcacgcgacatcgcattgttaccccggctgctcctgcgcctgtgccggcggcccgcccacaggtagcaaaggagacatcgaacgatcgctccaagctcgatcgtgtgccggttcgtcacaagcagccagaagctgcggtggctgccgtcgatacgtcggttgctgtggctgttgccgaggaagcggcgaaggagcctacggaagctgcgccggctgccgctccggtagcgtcggaaagcgacgcgcaggagacgagcgatagcgatgtggtccgttctaccggttcgatggcgattgctacgttggtgtctcgtattaccggctttttgcgcacggtgttgattactaccactctgggtggtgcgatcgcgtcggcgtttaacaccggtaatacgttgccgaacttgatcacggagatcgtgttgggtgcggtgttgacgtctctggtggtgccggtgttggtgcgcgcggagaaggaagaccccgatcgtggtgaggcgtttattcgccggttgttcacgttggcgtccacgttgctgatcgcggtgacgatcattgcggtggtatcggcaccgtggctgagccggttgatgttgcgttcggacggcaaggtcaatctgttccagaccacgagctttgcgtatctgttgttgccgcagatttatttctatggcatttttgcgctgttgatggcggtgttgaacactaagcagatttttaagcctggtgcgtgggctccggtggcgaacaatgtgatcaccattgtggtgttggttgcttatatgctgttgccgggggagattgatccggatgcgccgtcaaaggtgacggatccgcatgtgttgttgctgggtttgggtaccacactgggtgttgtggtgcagttgctgattatgattccgccgattcgtcgtgctggggtgtcgctgaagccgctgtggggtattgatgcccggttaaagcagttcggtggcatggcgttggcgattatcgtttatgtggcgatttcgcagtggggttacatcattacgacgcgtattgcgtcgcatgcggatgcaggtgccccgaatatttatcagcagcattggctgttgttgcaagtgccatatggcattatcggcgtgacgttgttgacggcaattatgccgcggttgtcgcgtaatgcggctgatggtgatgataaagctgtggtccgcgatttggtggtgggctcgaagctgacgtttattgcccttattccgattgtggtgttttttagcgcttatggtgagcgcatcggtgtgggcttgtttgcttatcgacgtttcgatgtggagtccgcttctatccttggtttaacgctggcgtattcggcttttacgttgttgccttatgcgttggtgttgttgcatttgcgtgtgttctatgcacgtgaggaggcgtggactcctacgtttattattgctggcattacgggcaccaaggtggtgttgtcgatgttggctccgttggtggcgtcggatcctagccgtgtggttattttgctgggtgctgccaatggtttcggttttgtctctggtgcgctgattggtgcgatgttgttgcgtcgtaagttgggcaatttgggcagcagggaagtgactaagaccagtgtgtgggcgttgggttcgtcgctggtgggcattgtggttgctttgggtctcagcatggggatggatcgtgttgctggtggcttttttgagttcttcggcagcgtgggcatgttgattcatttggcgattgtgggtgtggtgttccttgtggtcactgcgctggtgttgtcgcgttctgggctggaagaggttgtcagcttgggctatgcgttgcagcggattcctggtatgcgtcgtgtgatcaagatgaaggcacagcagcctgccgatacgattcctacgaacgaggctcttgcggctcaggcgcttactttcgacgacacgttcaatgccaccccgatccctgcgccgatgtcggctggtattgttcgcggcccgcgtttggtgccgggtgcgcaggtgtcggatggtcgtttccgtctgcttgccgaccacggttcagtgtcgactgctcgtttctggcatgcccgcgaaaaggccacgggtagggatgtggccttggtgttcgtggatacgtcgggaagtgccccgcaggccccggcaagccctgctgcggcggcgggtaaggctgctgagattgcgcgtcgtacgcgtgcgttggctggcctgcaccatcctgcaattgcgccgaatattgaggtgttgtcgtaccgcaacggttgccttgtggtggcggactgggtgcgtggttctaatttgtcggcggtggcggattctacggtcaatccttatgcggcggtgtatgcgtttgagccgttggctcaggcgagtgtggcggcggagcaggctcacacaccgctgggtattgataaccatgcgcgtattcgcattaataccgatggtatggcggttttggcgtttcctgcggtgttgtcggattcttcttatgagcgcgatcttcggtcgctgcgtactgccttgggcacgcttatcgacgtcgacaccgcgccgaaggccattacggcgttgttgcaaaaagacgcagccgatttgccacaggctattgccgatctccctgatcctgatgatgctcacgaggagcacctcaacgtcactgcggaggaaaccccgaagccgaccaacaccccaggttttggtagccgtggatttagccgcagtagccgcgtctttattgcagccacagctgtactcctcgtggtggtcttggccatcatcactgcttatgtgactagtgttctcggcggagataagcaggaggctccgattacgaagaattcgattgctggtggccaaagcgagtcggctaattccaccatgccaggcattgtggtgccaattatcagtgctgagacttcccatgcagcaggcaatgctgatcccgatgtgccggacactgcccctcttgcgatcgacaccgcacttgaaagcgcgtggcagccggccaagggcgatacgttggttctcaacttcgcccagccgtatgtgattagtcgcgtcattgttgattcccctaccaaggacatgacgctagaggtccgtgccggggacaccgtggtgggcacgggcactgttaccaagtcgcgcaccaagatcaccgtgacgccagctccggcggtcacctcgttgagtatccgcgtggtgggtgtcccagatggtgtgtccccagagatcaacgacgtaaagctggtggcaaaaatc

SEQ ID NO: 17929 - DNA, 3990 bp, Cornyebacterium diptheriae
gtgacctctgctgacatcatgcgctggcgcaatagcgacacaacggggcaggcattgccggactatcccgtggtgtttacctccgccttaggtcacggcgacagtaccgactggccaggtgtgatgacgtggggtgtgagccaaaccccgcaagtgctcatggacttattgcactgggaatcagatggtgacttagtactcgcctgggattgcgtcgacgctgcactaccggagaacttcgctgacaatgccatcgatattgcctatgcggtgatccagcagctcaccaaccccgcggtgtggacagacccaactgtggtggctgacccctggttgcgcatgcctggaccaatggaacgcatcggcgaaagcgagcttatcgacgccccactgcgcgcccaatacgaggcagcacccgaggctcgcgctgttattgcaggggagcaatcgtggactcgcgccgaactagaccaccatagtgaacgccttgctgcggctgtggcccgtgctgcccatgaccatgatgtagtccgtgcggatgcgccggttcttgtgatgatgcagaaatcctgcatgcaggtcgctgcggtctgtgcggttgttcgtgcaggttttgcctatattccggtggaccccagctggcctatggaacgcgtgcaatcagtcatgcagcgatcgggtgccgttgtgtgcttagcggatgagggcgtggcgatccccgagggattgcaccgaatcccactatctgagcaaggcgcggaggctaccggttatacgggccggcaatcacagcccgaagatcttgcctacgtgatttttacctccggttctacggggcaacccaagggtgtggcgatcgagcaccgcgccgcacggaccaccattgatgatatcaaccagcgctttgagatcaccgataccgatgtggttcttggtttatcagcgctgagctttgatctatcagtgtgggacattttcggtggtcttggcgctggcgctacggtggtgctgccggaagaagatcggcttcgtgatccttcctattggcttgatctgtgtgatcgtcacgagattaccgtgtggaattccgcgccaccgttgttagaaatgctcgtggattatgcggagattgatcccgaagctgctgcgcatgcgctgcgtaacctgcggatggtcatgctgtctggcgactggattccggtgaccttgcctcgtcggcttaaagagcttgcgcccaacgccaccgtgatgagcttgggtggtgccaccgaggcgtcgatctggtctatctgtcaccgcacaagcgatgcagacgaacatgggccatcgatcccttatgggcgtgcgctgcggggtcagtggttccgcatcctcgataccgagggcgtaccagttccactaggaacacctggtattttgcacatcggtggtcacggtgttgcccgcggctatctgggggatccggagcgtaccgccgagcgtttttgcgagcatccccgtttgggtgagcggctttataacacgggcgatgaaggcatgtggttgcctaatggtgagatccgattcttggggcgcgtggaccgacaggtaaaaatcaatggttttcgtattgagttaggtgaggtcgacgcagctctggcacggtgtgccagtgtgaaatccgcgatttcggcagcgccgcaggatgcctcggggcgcaagcgcctcctcggacatgtggttcctacgcagccggagcgtttcgacgactccgtgttgcgtcgcgagttagcagagcacttgccgtcttatatgattccttctcgttttgtggtgcacgatcatctgccggtcaccgataacggcaaggtggatcataaagcgttgcctaatccgtggtgtgctgaaaccgcaccggaaccgcaggtggagccagaacccgaagtgctgcccgagcctgatcgcggtagcgctacccctgcagagctggggattaactccttagatattgtgcggttggccaaccggattgaagatgccacgggtacgcggccgtcgttagccaccttgttgaatcagccgtggcaggagtcactggcgatggtggaggtgctagaaccgcggccggcgctagcgtctgagcagaaaccggaattggttccagatcgtgatcgggaggtcattgatgttgtcggtgccggaatggcgttaggtgcgcgaattcgtgcggaggttccgataagtgaggagccggtagaggatcagtttgtgcaggtggggcagtggcttaagcagctgcgtgcggtggtagagcctgccggatgtatgcaggttaccccgccatcgggaaatatattgtgtgcaattgacatcactcctggtgagaaagcggacgtgtctgaccatgcaccgttgaccccgctgcagttgggatatttggtggggcgcgcggatacctggcttggtgagccggtggcgccgcactattacaccgaagttgaggtggcagaccttgatgtggtggcgttgcaacgagcgctcgatgaggtggtgcgggcgcatccggcgctgatgttaggtgtgcatgacgacggcaaccaaggcttgtccgaggccctacggccgcgcttggtggtcactgatctacgggatcatcccgatccagatggcgagctggagcgcattcgtgctgtggggtgcgctggcgtttcggatccgttgggtaccgcatggttccaattgcgtgcaaccttattacctacagctgtgcggctgcatctttccatcgatatgctgttttgtgatgtcgtcggcgctggggtgttggtatctgatctgcagcgtgcctacaacggggaaactcttgaacccgaacagcgaggtttcttggagtttgcgcagcgtgtggcacaaaatttcggtgcgcaggttacggcaggtgccagcgatgcccagccgttaccctcagtgattggcccgtggcagcagcccacctcggcgcggtttgagcggattcgtacggagataacttcggatgtggctgatgagctttctcgtgctgcagcgacgatgggggtcacccttgatgcgttgatggcgacgatcatttctacaacagccggtgcgattacaggttctcctgcgcagcctattgtggccacggtgcttgcgcgtccgcggggttttgagcgcacggtgggtgagttcacctcgacggtgcgtgttgtcccagatcaaggcgattttgtggcgcgtgcgaagtccgctacgcacaccttggtgacggctactgatcgtgctttgcggtgtgagagtgagcctcgtcaggggtctgcggaggtaacaccgattgtgtattcctcggggcttcatgccgtgggcgatcagtctgaggttttgggcacgtggggtaaaacgatcgttgctcagtcgtggacgccgcaggtgcttgtcgacgtccaactttttcgcaccgagtctggtctggcactcatcgtggattatgccgttgatgcgctgcagcctggtgctggtcgcgcgttcgccgatggaatcgttgctgcgatgcggcagtgtgcgatgggtgctggcatggattcgatatggcctcagctgcgtgtgcctgggcttcgtgcagtggatacgcggtggactgcatttgatggtgattctgcgccgagttccactaagccagatcatcttatcgaggtggacattgttgcccatgagctaggatcggtgctcggaataacgcttgaggcgcagtcctatgacaagggatttttcgatgtgggcgcaagttccgttgatctgattgccatgcgcaatgcgctggtatcgcggggctattcgctgacgcttctcgacgtgtttgcacaccctagtgtgctgcaactcggtcgattcattgccccagataccccgactacctcgcaggtgactaccgattctgctcatcaacgcggccacagaaggcgtcgtatagctcgtgctttgaatggagaactctca

SEQ ID NO: 17930 - DNA, 1374 bp, Cornyebacterium diptheriae
atgttcatcagctgcttcgatatgttcaagattggtatcggcccatcgagttctcacacgcttggccctatgaaggctggcaaggcattcgtcgatacgcttgaagagcgtgacctgcttgatcgagtcacccgcgtgcgtgccgacgtctacggctcactgtcgctgaccggcatcggccacgcgaccgacaaggccatcatcatgggattagcaggattcgagccagaaaccgtggacatcgacgccatgccaggattcctcgaaatcgtcgcctccttgcaacgccttgcactagcaggcgggaagaagacggtggacttcagccgaaccgaaggcatcgtcttccacaacacctgcctgcaactgcacgaaaacggcatgaccatcaccgcatttgaaggcgacgaggtcttgttgaccaaggcatatttctccatcggcggtggatttatcgtcgataaagagcactttggcctacctgtcgaagacaccgccgtagtacctttcccttacaacaccgccgaggaagtgctcgcacactgcgatcgcgaggggatgagcattccagagttcgcatggcgcaatgaggttgcggcaaacggtgaagaagccgtgcgcgaacacctagctaaggtatggaaagtcatgcaaagcggcatcgagcgtggttcctcagcagaaggaatcctgccaggtgacctacgagtaccacgccgtgccaaggcacttcgtgagcgcctcgaagccaccagcgaaaatgaaccactacgcatgatgagctggcttaacatgttcgccatggccgtcaacgaggaaaatgcctccggtggccgtgtagtgacctcgcctacaaacggtgcctgcggcgttcttcctgctgtgttgtcctactgggatcgattggtcaaaccagttggtgagcaagaagtgattgactacctgctgacctgcggcgtggtgggcgctttgtacaagaagaacgcctccatctcgggtgctgaggtcggttgccaaggtgaggtcggcgtggcctgctcaatggcagcggcaggtattgcacaactcatgggagcaactcctgcgcaggctttcgccgcagcggagatcgccatggaacataatttgggtcttacctgtgatccagtgtgcggccaagtccaagttccttgcatcgaacgcaatgcaattgctgctgtgacctcggttaatgcggcaaatatgtcgctacagcgtggttctacccctaccgtctcgctggatcaggttatccagacgatgtaccaaaccggtaaggatatggactccaaataccgtgagacgtcccttggtggcctcgctaaagtcttaatgccacgacttatgccgtgtagc

SEQ ID NO: 17931 - DNA, 1041 bp, Cornyebacterium diptheriae
atgactattgaccacgcacgctatgcccgtcagatcgcgctcagtggttttggtgtagctgggcaaacagcgctttctggtgcgcatgtggtctgcattggtgctggtggtctcggctcccctgccgccttgtaccttgctgcagcaggtgttggcaccattacgattatcgacgatgatgtggtcgatcgttccaacctacaacgccaaatcatgcactccgatgaggcggttggtcagcctaaggtcgaatcagcactgcagcgtctgcgcgcattgaatccggattgccgtgttgtggcgatcaataagcgctgtgtgtggcctgcttgcctcgatatgtgccgcgacgctgatgtgattatcgacggctctgataattttgatacccgttacgttgccagcaccacggcagcacgccttggtattccgcacgtgtggggagcaattttggggttccaagcacaactgagtgtattcgatgctgagcatggccctgtgtatgaggatgtatttccacagcctcccctgccaggcgatgtacccaactgtgcagaagcaggagttcttggtccgctcgttggtgttgtaggctctgccatggcgttggaggcgatcaagctcatcacaggaattgggcagccgctcaccggaaacatcggctatttcgacggcatgactggattgtgggaatatattcctattagttctcatgccgatactcgccgtcaactgcgtgtagaacctcctcggcacaccgccacagtgcgcgagacaacaaaggtagattcaaaaaaatacacaaccattattgatgtgcgagaacctgaagaaacccaccacgggacgatcccgaatgctcgccttgttccgttatcacttatcgaaaacgacctcaatacggcacgctcgcttatccccgatggttcgctgctctattgcgccgcaggaatacgctcggcgcgggcatgtattctgctttcccgcgccggcgttaaagaccttgtgagcctatcaggtggctacaaccaatggagtgcc

SEQ ID NO: 17932 - DNA, 654 bp, Cornyebacterium diptheriae
atgactactcgcaacgacgtagcccagatgatcgaccacaccctgctcaagccagaggcaaccaccgacgacttcaaggcactcatcgccgacgccgttcgcctcggcacctactcggtatgcgtatccccatccgcactcccagttgaggttccagaaaacctccacgtagcaactgttgtgggcttcccatccggcgccgtcaagccagagatcaaggctgctgaagctgcccgcactgttgccgatggtgcagaagaagtcgacatggtgatcaacatcgccctcgccaaggaaggcaagttcgacgagctcgaggccgaaatcaaggctgttcgcgacgccgtcccagcaccaggaatcctcaaggtcatcctcgaaaccgcagcactgactgacgacgaaatcgtcgcagcatgtaaggcctccgaaaacgctggcgcagactttgtcaagacctccaccggcttccatccagcaggtggcgcaagcgttcacgcagtggaaatcatgcacgcaaccgtgggcggccgcctcggaatcaaagcctccggcggcatccgcaccgccaaggatgccctcgccatgatcgaagcaggcgctacccgcttgggtctgtctgcctccgcagccattcttgaagaactaggagag

SEQ ID NO: 17933 - DNA, 1650 bp, Cornyebacterium diptheriae
atgagctacgcagagctagagcgcacagcccgcgagtgggcggatcacgatcccgaccctcgcaccaaagaaaccatcgagggctggcttaaaactcacgacgaagaatccctccagcaggcattcaacggaccgctgacttttggcaccgccggcctgcgagcacgagtgggcgcaggtgaatcccagctcagcctggcagtcatcctgcgcaccacctacggcctagtcgactgggtaaaaacccagctcggcgcagatgccacccctacgatcgtgatcggctgcgacgcccgccacggatccctagagttccaccaagccgcagcggaggtagtctccgcagccggcggacgcgccctgctgctaccagctaaaaaccccaccccactgaccgcctttagtgtgaagaagtttggtgccgatgccggcatcatggtcaccgcctcgcacaacccaccagccgacaacggctacaaggtctacctcggtggacgcatcgcccaaggcccagccgaaggcgtgcaactgatcagcccagctgacaaagaaatctccgaggcaatcgcagcagcaccgtacgcagacgaaatcccacgcaccaccgacaacatcgaacatgttgacccacgcgaggactacctcacccgcgcactgaccctcgcagacaagaagagcgacatcctcatcgccctgactgccatgcatggtgtcggcgcagccttgggcgaaaaggtgctcaccgctgccggattcaacgtctccctcgtcccagaacaagccgagccagacccagatttccctacggtgtccttcccgaacccagaggaaaaaggtgccctcgacctggcgaaagcacacgccaacaccatcggtgcagatgtcatcatcgcctacgatcctgacgcggaccgctgtgccgtcgccaccccagacgctaacgccgaaggcggatggcgccagctcagcggcgacgagacaggtgcggtgctaggtgcataccgtgcgagcgtcgcaaagccaggctccatggccaactccatcgtctccggccgcctgctctccaagatcgccgaagccgcagggcgtacccacgccaccacgctcaccggattcaaatggatcgcacgcacccctgaactcgtattcggctatgaggaagccatcggattctgctgcgacccagaagcagtcgccgacaaagatggtgtctccgcctccgtggtcgtagcaagcctcgtcagtgccctcaaagccgaaggccgcaccctcgatgacgccctcgacgacctagcccgcgaacacggcctctaccagaccgcgccgctgaccttccgcgtcgacgacctctccatcatcgcccgcgccatgagcaccctacgcgcacaaccgccaacggaactcgcaggtgcaaccgtcaccgaggtcaccgacctcaacgacccaaccctgccatggggcgcaaccgacggcatgatgtttatcaccgaccacaacgaccgcatcatctgccgcccatccggcaccgagccaaaactcaagtgctacctcgaagtggttatgcctgtcaccggcgacaccatcccacgcgccgaagccgcccaacgcctcgacgctatcgccaccgcactgcgcacccacctcggaatg

SEQ ID NO: 17934 - DNA, 1263 bp, Cornyebacterium diptheriae
gtggcacttgtagtacagaaatatggaggttcttcgctagaaagcgcggaacggatccgacgtgtcgctgaacggatcgtggccactaagaagcaggggcacgacgtagtcgtcgtgtgctctgccatgggggataccaccgatgagctgctcgaccttgcagcacaggtgaatccagttccgccagcacgcgagatggatatgttgttgacggctggcgagcgtatctcgaatgcgttggtggccatggccattgagtccttcggggcgaaagcgcagtcgtttacaggttcacaagctggtgtaatcaccacggagcgccacggaaacgcgcgcatcgtggacgtcaccccagggcgtgtacgtgaagccttggacgagggcaagatctgtctcgtcgccggattccaaggcgtgaaccgcgaatcaaaggacgtgaccacgctgggtcgtggcggttccgataccaccgcagtggcgttggcagcggcgcttaatgctgatgtgtgcgagatctactcggacgtagatggcgtgtacacggcggacccccgcattgttcctaacgcacagaagttggaaaagctgtgtttcgaggaaatgctggagcttgccgcaagcggttccaagattttggtattgcgcagtgttgagtacgcccgcgcgtttggcgtgccgctgcgtgttcgttcgtcttatagcaatgatcccggcacattggtcgccggctcgatggaggatatccctgtggaagaagcagtactaactggtgtagcgaccgacaactctgaagctaagatcacggttctgggtatcccagattccccaggcagcgcatcggcagtgttccgcgcgcttgccgacgccgaaatcaacatcgacacggtgctgcaaaacatctcctccctcgaggacaaccgcaccgacattaccttcacctgcccgcgtgccgacggtccccacgccatggaactgctccgcaacctgcaggcaaagaacgactggcagaacgtgctttacgacgaccagatcggcaaggtttccctcgtgggcgccggtatgaaatcccacccaggggtcaccgcagagttctgcgaagcactgcgcgacgccggtgtgaacatcgaattgatctccacctccgaaatccgcatctcagtactgatccgcgaatcggacgtcgatgtggcagcccgtgccatccacgagaagttcgagctcggtggcgaaaccgaagcaattgtctacgctggtaccggacgg

SEQ ID NO: 17935 - DNA, 1029 bp, Cornyebacterium diptheriae
atgaccactgttgcagttgtcggggccaccggccaagtcggccgcgtaatgcgttcgatcttggaagagcgtgacttcccactggacaccatccgattcttcgcctctgcgcgttccgccggaaccaccttgccctacaagggtcaagaaatagaggttgaagacctagctctgcaaatcgaagaaagcctcgcgggtatcgacatcgcgttgttctccgcaggcggtagcacctccaagcagtacgcacccctgttcgccgcagctggcgcaaccgtggtggacaactcctctgcgtggcgcaaagacgacgaggtgccactgatcgtttctgaggtcaacccagacgcaaagaacgacgtggtcaagggcattatcgcgaacccgaactgcaccaccatggcaatcatgcctgtggtcaaggcgcttcacgacgccgctggcgtgaccaagctgcatgtctcctcctaccaggcggtatccggctccgggctcgccggtgtagaaaccctgatcaagcaggttgctgagatcggtgaccgcgccgtagagctcgttcacgacggctccctgctcgcaccggaagacatgggcccttacgtggcacccatcgcgttcaacgccctgccattcgctggcaaccttgtggaagacggcactgaggaaaccgacgaagaacagaagctgcgcaacgagtcccgcaagatcctcggcctgccagacctgaaggttgccggtacttgtgttcgtgtgcctgtctttaccggtcacaccatggtggtgcacgctgagttcaacaacgccatcaccccagaacaggcacgcgaggtgcttggaaacgctgcaggtgttgacgttgtggacgttccaacgccactggctgctgcgggcgtagacaactcccttgtgggccgtatccgtcaggatcagaccgtagacgacaacaagggcctcgtctttgttgtctccggcgacaatctacgcaagggcgctgcactcaacgccatccagattgctgagcttttggtc

SEQ ID NO: 17936 - DNA, 777 bp, Cornyebacterium diptheriae
atggtatctatcgacacctataacgcctgcgttgacttccccatcttcgacgccaaatcgcgctccatgaaaaaagcattcctcggagcagcgggcggcgccatcggacgcaacaaagacaacaccgttgtcgtcgaagcgcttcgcgacgtcaacctgcacctgcgcgaaggcgaccgcatcggactcgtcggccacaacggtgccggcaaatccacactcctgcgactcctctccggaatctacgaacccacccgcggctccgcacacgtccgcggccgcgtcgcccccgtgttcgacctcggcgtaggcatggaccccgaaatctctggatacgaaaacatcgtcatccgcgggctcttcctcggccaaacccgcaaacaaatgaaacaaaaaatggacgagatcgccgattttaccgaactcggcgactacctctccatgccactacgcacctactccaccggcatgcgcatccgcctcgctcttggagtagtcacctccatcgaacctgaaatcctgcttctcgacgaaggcatcggagccgtcgacgccgccttcatggcaaaagcacgcgaacgcctctccgacctagtcaaacgctccggcatcctcgtgttcgcctcccactccaacgacttcctcgtccaactatgcgactccgcactctgggtcgaccacggcaccatccgccaagccggaccagtagccgacatcgtagaagcctacgaaggaaaagaagcagccgaccacatccgcagactgcaagccagaatg

SEQ ID NO: 17937 - DNA, 1206 bp, Cornyebacterium diptheriae
atgcatttagcgaaggaaaggagcagtgtgtctggcacgttgagagtcggcgaccgtagcccacgcatcgccgaagtcagaactgcactgacgcgacttggtctgcttgagggaaccaccaagaacctcgagcagaccaaaagtgatactttcaccgatagcgaaaccctgtttgatgaggacctagcgctggcgcttcagggattccagcaggctcgtggcattattgccagcggtgagatcaacgagatcacgttgaagctcctacgcgaagcttcctatagcctcggtgcacgtgtgttgagttttgagcccaacaatattttcgtgggcgatgatgttgttcagctgcagcatcagctccaagagctgggcttttacactgatcgtgtcgatggccgcttcggcgagctgacgtacacgtcgctagtaaactaccagctcaactacgggcttaaccccgatggcatctgcggccccgaaaccattcgcgctttcggccgcctaggccgccgtattaccggcggttccccgcacgctctgcgagagcgcgagcgagttcgtgatgccggcccaatgctcgccggtaagcgtgtggtcatcgacccaggctttggtggtgccgataagggacaagttgttcgtggtccttatggcgatatcacggaagaagagatcatttgggatctagcgggccgtatcgagggccgcatgattgccgctggcatggaaactattgtgtcgcgtccgcgccaggatagtccttcgctgaaaggtcgcgcagacatcgctaatgcatttggtgctgatgtgatgatttccttgcagtgcgataagtacccgaatgataaggccaatggcgttgctagcttctatttcggttccgagatgggttctagctcgctgacgggcgagatgttgtctggctttattcagcgcgaaatttccgcgcgcacggatctggttaactgcggtaatcatggtcgcacgtgggatctgctgcgcattacggagatgcctactgtggaggttgtgttgggttatctgaccaatccgcacgacgtggctattttgaccgatcctgagcagcgcgacgctatcgcggaagccattgtggttgctgttaagcgtctttatttgcttgacgacgatgaccagcccacgggcacgtatcgtttctctgagatgctggagcagggtttgctg

SEQ ID NO: 17938 - DNA, 945 bp, Cornyebacterium diptheriae
atgagggcaatttacgttcaagacgacgccaccttggcagtccacgatgcaccaacacccaccctgcaaccaggcgaagtactcgtccaagtcaaagcagccggcgtcaaccgcgcagacctcctgcaggcagcaggccactacccgcctccccctggtgaatcggagatcattgggctcgagtgtgccggtgtgatcgtagacgcaggcactaccagccgcaacgtcggtgacaaggtcgcttgtctgctggcgggcggcggatacgccgagtatgtggcggtgccagagggccagctcatgccgattcctgagggctacagcttcgctgaggcggcggccgtggtggaggttgcggccacggtgtggtcgaatatcgggatgctcaccggcttgaagcccgagcacatgtttttgattcatggtggcgcgggcgggatcggcacctttgccatccagttggctaagcatgtgggtgccacggtggcggtgacggcgggttcgaaggagaagctggaaacgtgtcgtgagctgggcgccgatattctgattaattatcgggaggaggattttgcagaggtcctgaagaataagtgcgatcgcattttggacattatgggtgcgaagtatctggaccaaaacgtgcgtgcattggcaatggacggccaccaggtgaccatcggaatgcaaggtggtgtgaagggtgagctgaacattgggcggctgctgagcaagcgcggcacgatctctgcgacggcgttgcgcgcccgcgaccgcgaggacaaggcacgcattgtggcgtcgacagtcgagaacgtgtggccactgcttgccgacggcaccatccggcaccacatccacgccacgctccccctagagcaggcccagcgggcccatgagatgctcaaaaatggggaggtaaccggaaagctcgtcctcgaggtt

SEQ ID NO: 17939 - DNA, 1014 bp, Cornyebacterium diptheriae
atggacgaccagagctgggacgacaccccgattgctgcggcggcacggcgagcagcccaagtgatgacgccgaacacgcttcacctgccgcgtccagagcgcacccgtcgcctaacggttgccaaccaaaaagggggcgtgggaaaaaccacctcgtcggtgaacctagctgcggggctggctctcggaggcttaaaagtcctcgtggtagaccttgacccgcaaggtaacgcatcgacagcgctgggtgcggaccatcgcgcaggcacactatcgagctacgagatgctcattggtgaatgcaccgcagaagaggccctccagcagtccactgcctcggaaaacctcttctgtattcctgccaccatcgacctcgcgggtgcagaaattgagctggtgagcctcgttcgccgcgagtatcgccttgctgacgcgcttaatgatgcgttcatcaaagagcacggctttgactacgtctttatcgactgcccgccatcacttggcttgctgaccatcaacgccatgaccgcggtagacgaagtactcatcccgatccagtgtgaatattatgcactggaaggcgtggggcagctgctcaataacatcggcatgatccgccaacaccttaatcaaaatctacacatctccgcgattttgctcaccatgtatgatggccgaacaaagctgtcggagcaggtaaccgaagaagtgcgcggacacttcggtgacgtggtactgcgcaccaagattccacgctctgtgaaggtgtctgaggcaccaggctacggtcagacggtattggactacgatccaggttctcgcggcgctatggcctatttagacgccgctcgcgagctggcgcagcgtggcgactacctccccatcgaggcgtcgggcgcagtgggaatgtctccggaatcggcacggcgcctccaagaacagctcgatgcccaagacggcgaaggtgaccaaccggaagctgccgacgtgatcaacctagaaacatcgaaggag

SEQ ID NO: 17940 - DNA, 633 bp, Cornyebacterium diptheriae
gtgaaacatgaagaaattgagtcgatagcgagccacgtgttcggaggaaacgtcgataaggcgtacgcctaccatgagcttttggctaccgacggctccacgcgtggttttatcggcccgcgtgaggtccccaaactgtggtcgcgccaccttcttaactgtgcagtgattggcgaggccatggatgaaaacatccgcgtcgccgacatcggatctggtgctggtttgcctggtatcccccttgccatcgcgcgaccggacctgaccatcaccttgatcgagccgcttttgaagcgatcggttttcctcggcgaggtcaaagaaaaactcgagctcgacaacgttacggtcattcgtggacgtgcggaggaaaaagcggtgcgcgagcagctcgggcttgtcgacgtcgccacgtctagggcggttgcgccactaggaaaacttgccggctggtcactccccctcgttcgtcttggcggaaaaatgatcgccatgaagggctcctcagtccatgaggaacttgagcgcgacgaaaaaatgatctggaaagccggcggcggaaaagtaaaaatctttagtgtcggtgaagttttggaagaaccaaccacgctcatttccatccgcaaggtgcga

SEQ ID NO: 17941 - DNA, 1086 bp, Cornyebacterium diptheriae
ttgcgtcacgagtttggtatcagccaattcgacgcacagttgaccatcacgttcttccttatcggaatgaccgtgggccagctgttcagtgggccgattaccgacgcccgcggtcggcgcgggctatttttcatcggcacgattgtgcttacgatagcaaccttgttaagcgccctcgcaccccacgcatgggtgctctacctctcccgcgcagccatgggctgggccgccggcaccgcagttgtttctgcacgcgcgattgccgccgataaggcttctggcccagaactagccaaggtgttctccatcctcatggtcctaggcagcatcgctcccgtggttggccccatcctcggcggtctgatcgtccactccgccggttggcgtgctgttttctggttcctcaccgtggtctatgcgtttacagctgttattgcagcacgcactatcccagaaactctgcctgtggaacgtcgcacccacggtggtatccgcgccatgcttgccgcgatccgcaccttgttaagcaatcgcgtctacgtaggctccacagtggcattcgtttttgcctttgccaccatgttcaccttcgtgtctgcttcaccctttatcctgcaggaacacttcggattctcgccgctgcactacgcactcatctttgccatgaacacctcgggtctagccaccatggcaatcatcaacgcccgagtagttcatcgctttggggcacctcgccttgcagcaacaggagtgaccatcatggctttggcagttgcttggctggcgatcgccgcaacatttagcctcggcaccgtggcattcttggctggaattttcaccatgactgcttccatgggcatgatctttgccaacacctcagcactggccatgtcccacgccggccccgtgggtggcgctgcctccgcattcttgggatccggccagttcttcatcgcagggctgtacgcccccatgttcggcgtggtccaatcatggggaatcgcacccccgctcgcagccgccaccatgatgtcggttaccgcggtgatcaccgtcgtgggcttagcacaagctctgcgctcttcc

SEQ ID NO: 17942 - DNA, 951 bp, Cornyebacterium diptheriae
gtgctcaacttcatttattggccaatctcggccatcttgtggttctggcataaagttgtgagctttgtgcttgacccaggttctggcctgtcatgggtcttggccatcgtgttgctgaccttcaccatccgagctttgttggtcaagccgatgctcaaccagatgcgttccatgcgcaagatgcaggaactgcagccgttgatgcaggagatccgtaaaaagtatcccaatgatcagcagaagctgatggaagaaacccgcaagctgcaaaaggaaatgggtgttaacccagttgctggttgcttgccggttttggttcagatgccagtgttcattggtctgttccacgtgctgcgttcgtttaaccgtaccggtaccggtacgggtcagctgggcctgagcccagaggtgaaccgcgaaaccgccaactacatctttagtgctgctgatgtgcagtccttcttggatgcccgcttgttcggtgtgccgctgtcggcgtttatttctatgccgaaggaaatgtatcaagcattccagccggttgattttacccgtactgatattgcgctggtggcagcaccacttatcgtgatcattgtgctggctactcactttaacgctcggttgtctgtggatcgccaaaaggctcgtcgtgagtctgggctgcagaagccgccggcgaatgatcagatgcagatgcagatggatatgatgaaccgcatgatgctgtggtttatgccgttgactattttgttcaccggtgttctgtggcacctcggcctgttgttctacatggtgtcgaataacatctggacgttcttccagcagcgttggatctttgacaagatcgatgctgaggaagctgccgagattgaggctaagaaagctgccaagcgtgcgactgcgcctcgtccaggtcaacgcccacagcagagtaagaagaaaaagaaa

SEQ ID NO: 17943 - DNA, 357 bp, Cornyebacterium diptheriae
gtgctaccttcacagcacaagctcagcaattccgaacagttccgcgcaacgattcggaagggcaagcgtgctgggaggagcaccgtcgttcttcatttttatgctgaggcgaccgcgggcaaccttgcaaccgcaggcggcccgcgattcggcctcgttgtgtccaaggctgttggaaatgctgtgactcgtcaccgtgtttcgcggcagttaaggcacgtagtaatcgctatgaaagaccagttcccagcgtcatcccatgttgttgtgagggcgttaccgccagcggcgacagcaagttctgaggagttgcgggcagatgtgcaggcagcactcgacaagctcaaccgcaagcga

SEQ ID NO: 17944 - DNA, 777 bp, Cornyebacterium diptheriae
atgcatagctatgacatgtttttgtgggtcgccttcccctggcttgccatcgcggctttcgcggttggtgtgtcgtggcgctggcgaaccgaccagtttgggtggaccacccattcgtctcagatttatgaatcgacgcttttgcgtctttcttcgccgttgttccactacgggatgatgtttgtgattcttggtcacgtgatgggtttggcttttcctaagtcgtggacccgtgcggttggtattaatgaccatgcgtatcacttgattgcgacgattccgggcactattgctggtattgctgcggtaattggtttgtgcggtttgatttaccgtcgtgtgagcaacaaggcagtcttgttgtccacgtctaagtcagacaaagtgatgtatattttgctggctttggcgattttctctggttttattgctacagtttccactcaggtgtttggtgggccacatggctatgattatcgtgagacgatctctccgtggttgcgccagctgtttatttttaatccaacgccggaattgatgctggatgttccgtggcagtttaaggttcacgttatttccggtttcactatgcttgctgtgtggccttttactcgtttggtgcatgcgttttctgcaccggttgggtatgtgaataggccttatgtggtgtatcgttcgcgcgatattacgacgcagccttctcagcagcatgttgcgtgggctccggttcagcatgataagaaccagtccaaggatgaagctggctggaccggggca

SEQ ID NO: 17945 - DNA, 150 bp, Cornyebacterium diptheriae
gtgttcaccgtggctaagggtaagcggacgttccagccgaacaaccgtcgtcgcgcacgtaagcacggcttccgtatccgtatgcgtacccgtgccggtcgcgcaatcgtggctgcacgtcgtaacaagggtcgtaagagcctgaccgct

SEQ ID NO: 17946 - DNA, 996 bp, Cornyebacterium diptheriae
atgtcggcaacgtcgtcaacgccgcaggctgttgctttagacccagtgcagctgcgcaaagatgctgccagcttgatgatggtgggcgtgggcaatttcgacgatgccctctttgccatccagcaaggtgccggcggaatttttatcggctcgggtacagatccccagatcttgacaaccccaggccgcgacattgcggagctgcgtcgaatagcggggcgaccgctgtctgtagccatcgactttgagggtgggcgcgtgttgcgtcaccgcgggatccttggcgatttcccatccccgcaggtgatggcgcaaaccatgaccccagagcaggtgcgcggaatggcttatgacatgggtcgttccttgttcgcacatggcattaatgtgaactttgcgccggtagtcgatattgaagccggccttgaagtagtaggcgatcgcgcgtttagcccagatccgcttatcgacgccacctacgccaccgcattcgcccaaggcatggcggatgctggggtgcgtcccgtactcaagcacttcccagggcatggccgcgccagcggtgactcgcacaccgcacaagtacacaccccaccattggctgagctagaaaagctcgatctgatcccttatggccgagtgccggttgctggtgcgggcgtgatggttgggcacatgatcgtgccaggtttgggtgcgccagaaaccccatcgacgatcaaccctgccgcatatcagttgcttcgttccggttcgtatcccggtggtcaaccttttagtggcgtgatttacaccgatgatttgaccatgggtgcggttacatcattaatgcccactgtgcaggcggtaccagcagctctagcagcgggtgctgatcaggcactgtgggtaagtacagcgggcttggtcgaagccattgatgccactgtggctgcagtctcggaggggcgttaccccgtcgaacagttcaaggcttcagttgcgcgagtcgcaggc

SEQ ID NO: 17947 - DNA, 1599 bp, Cornyebacterium diptheriae
atgaaggtcatggctcagatcgcaatgatcatgaaccttgataaatgtattggttgccacacttgttctgtgacgtgcaagcaggcatggactaaccgtgaaggcaccgaatacatttggttcaataacgtcgagacgcgccccggcgtcggctacccctatggttgggaaaaccaagacaaatgggaaggtggctgggtattggacaagaaaggcaagctcaagccacgttccggtggtcgcctgaaaaagctcagcacactattccataaccctaagctgcctacgattcaggattactacgagccgtggacctatgagtatgaaaagctgctgtctactccagcagggcaaaaaactcagcccactgctcgcccgatttcacaggtcgacggccgccccatcgataagatctcatggtcttctaactgggacgataacttgggtggctcccaagagactctcgacgatgatcctgtgttgaagcagatgaatcttgaggtcaaaaaggagatcgaagatgccttcatgttctatctcccacgcatctgcgagcactgcctcaaccctacgtgtgtgtcatcgtgcccttcaggtgcgatgtataaacgtgctgaagacggcattgtccttgttgaccaagatcgttgccgtggttggcgcatgtgtgtttccggctgcccgtacaagaaggtctacttcaaccacaagactggtaaagctgagaaatgtacgctttgctacccacgcatcgaggtcggtcagccgactgtttgctccgagacatgcgttggccgtatgcgttatctcggtgttgtgctttacgacgctgacaaagtagccagtgccgcacgtacctcagatgttaaggatctctatcaggctcagaaaaatctgctgcttgatccgcacgatccacaggtgatcgaggctgcgatgaaggaaaatattcctcatgcgtggatcgaggcggcacaaaagtctcccatctgggatttgatcgcacgctacgaagtcgcgctccccctgcaccctgagtaccgcacactaccgatggtgtggtatatcccgccgctaagcccagtagttgatcgcgtcaccgccaccggcaacgatggcgaggaccataagattttgctcacagcgatctctactatgcgtatccctctggattatctagccggcatttttaccgctggggataccgttcccgtggaaaaggtgctgcgtaaacttgcggcgatgcgctcgtatatgcgtgatatttctctgggcaaaacagcagatgagtcgattcccgctgctgtgggcatgacgggcgctgacattcgtaacatgtaccacctgctcggtgtgtccaaatacgatgaccgctacgttattcctacggcttctccagaaacaccacgtggtattgcttccttgccggaatatgctggtatcaatccggcacagtctgttgaacagttccacggcctaggtcccggcgcgccggaggcttgccaccatgaggctcaaagttctggtggcggtaaggtgtcgttggcttcgtggaatgtgggaagtagcccaagtagcatgttcccgccgagaaagagc

SEQ ID NO: 17948 - DNA, 984 bp, Cornyebacterium diptheriae
gaaggtcagcagatctttcttaagggcgggcgtcaagcggatgtgttttatcgcaaccgctgggcattcgacaaaatggttcgttccactcacggcgtgaactgcactggttcttgctcgtggaaggtctacgtcaaagatggcgtgatcacgtgggagtctcaggctgttgactaccctacgaccggccccgacatgcctgactatgagcctcgtggctgccctcgtggtgcgtccttttcgtggtacacctactcccctactcgtgtgcgctacccttacgcccgcggtgtgctcgtcgatatgtatcgtgacgctaaaaagcgtctcggtgatccggttcttgcttggcgcgagatccaagaaaccccagaaaagcgcgatgcatatatttcacagcgcggtaagggcggattgatccgtattccttatgaggaagccattgagatggcttctgcagctcacgtgtacaccatccgtaagcatggccccgaccgtattgccggctttacggttattccggcaatgtcgcaggtctcttacggcgccggtacacgtttcttgcaaaacatcggtggtgtggcactgtccttctacgactggtacgccgatctaccaccagcatcaccgcagaccttcggtgaccagactgacgttccagagtcaggcgactggttcaactccgcatatttgatgatgtggggctcgaatatccctgtcacccgtacccctgatgcacactttatggcagaggtacgctataagggcaccaagatcgtcaccgtatctcctgattttgctgataacaccaagtttgctgatgagtggctgcgcattgagccgggcacagatgctgctctagcttttgcgatggggcatgtgatactcaaagaattccatgtgggcaagcgtgagccatatttcttggactacatgcgtaagttcactgattctgggttcttggtcactcttgagcagcgtgag

SEQ ID NO: 17949 - DNA, 1329 bp, Cornyebacterium diptheriae
atggcaaccattaatacttctggtcgagtcctaactggctggaacccagaagatcccgaagcttgggactctaagattgcgtggcgcaccctcgtcatcactacatactcattgttcattggtttttccacgtggtacttggtatccgccattgcaccacagctcaaccaaatcggattcaatttctccaaaacgcagttgtactggctgtcttccgcatcgggcctagcagcaggcttctctcgcttagcgtttatgttcctgccacctatcgtcggtacgcgcaagctagtcaccatctcctcctttgttctcgtcctgcctatgttgggctggttctttgccatcatcaatccagcaacaccgtactggtggatgcttgttctctctgttgcaggcggcctcggcggcggtgtgttctccggctacatgccttccaccggctatttcttccccaaagcaaaggctggtacagcccttggcttacaagccggtatcggcaacttcggtgtgtccttcattcagctcgcagcaccactactgatgggtgtgtccttgctcggtgtcagtgccaagccacaattgcgcacagatggtagcgaggtatttgttcacaccccagcaatcttcatggttccatggaccatcctcgctggtgttctggcatggatgtatctgaaagatgttccagtcaaagcaaacttccgtcagcaaatggacatctttggcaacttcaacacctggatcatgacccttatctacttggccaccttcggcgcattttccggttttgctgcccaattcgcgctgttggtcaataacatctacggtgccaattcttcactggctgatacttttgctgctagtgagttgcctaagggcgctgctttcgccttcctcgggccactgatttctgctgctgtccgtgctgcatggggcccattctgtgaccgcttcggtggtgcgatctggacctttatttcctgcgccggtatggcagtctccactgctgttgctgcactcctccttaatccaaccgatccaagccagttctggtacttcctcgcagcaatgctgaccatgttcttctttactggtcttggcaacgccggcacgttcaaacaaatgccgatgattttcccccgtcgtcaagcaggtggcgttattggttggactgcagcaatcgccgccttcggcccattctttgtcggcgttattgtttccacccttggtgcaccagccttcttctggggttgcgttgtgttctttgctctgtgcgctgcactgacttggatcttctacgcacgccctcaggcaccattcccaggc

SEQ ID NO: 17950 - DNA, 1020 bp, Cornyebacterium diptheriae
atgctgggcatcacgctcttttctgcggtagcttccctcggcgttgcgttctcacaaaactacaccatgaccctagtgctggccttcttggtgggattctgcggcaattctttcacagcaggtgcagcgtgggcatccgcttggttccctaagcacaagcagggttttgcccttggcgttttcggcgccggcaacgttggcgcctccgtcactaaattcatcggccctgtgatcattgctagcaccgcaggtgcaacatactttggctttatcccagcaggttggcgtctcatccctatcatctacagcgtcaccctagtcattgttgccatcctcatgatgatttacacccccaaggttgatcgttttggcagctctggtcgtagcttggcagagatgcttcttcctctcaagcaggtgcgagtatggcgttttagcctctactacgtcgttgttttcggtgcttatgttgctctgtctgcaactttgcccaagtactacatctctaactatgacgtaagtcttgccgctgctggtctactcacagcaatcttcatcttcccggcatccctgctgcgtccagtcggtggttggttctccgatcgctacggtgctcgccgcgctatgtatggcactttctttgttatgggtaccgcagcaggcctactctgccttcccagtaacatcatcaacatcttcgtctttacccttttgattttctcccttggctgcgccatgggcgtgggcaaagccgcagtatataagcacatcccagaatacttcccgcatgacgttggagccgttggcggcctggtgggcatgttgggcggcttgggcggtttcttcctcccaccactatttgcttacaccaaggcgtggactggatggagcaccagcccattcatcgtgttgctcatcttggtagcggtgtctgcactgtggatgcacgtaacggttcaccgcatgttacacagccatgttcccgagctgaaacaccacatggaggtgccagccactcaa

SEQ ID NO: 17951 - DNA, 2766 bp, Cornyebacterium diptheriae
gagtaatctgtgaccctgataattgttctcgcgctggcggcctgtgcggttgcgcttgcgcctgttacagttcggatttgcgaccgaaaggcggggtggcctctggcggccttgtttgtggtcgccgccgttctgttgtgtaaagagctgcctggcatcattgctggaactcctttgacgttggaatatacgtgggttccggattttgtgggcgatggcgttgatgtgtcgttcgcattgcgtgccgacgccctcagctcgttctttgcactgttggctctgggcatcggctctgtcgtttttgcctattccgcttcttatctgcacaacaatgcgggcaatacgagcttttacacgattatgacggcgtttatggcgtcgattctgttgctcgtttttgctaatgatgctgtgctgttgtttatcgcgtgggagctggtgtctcttgcgtcgtttatgttgatcgcgcgttcgggcggcaagggcggtgagctgggttcgcagcgcacgttgatcttgacgttcattggtggcctgacgttgctggttgctatggcgattgcgtcgaatcaggctggcagcaccaatattgatgcgattatccatgctggtttctgggcggaaaagcctgcgttgactggtgtggttgctgtgttggtggcggtgtctgcgtttactaagtcggcgcagttcccgttccatttctggcttccggaggcaatggctgctgctaccccggtgtcggcgttcttgcacgcggctgctgtggtgaaggctggcatttatgtgctgttgcgtttcagtgcggtgtttagcgatgttgcggtgtggaactggttgctcattgtggtgggtatgttcactgctgtgatggcgtcgttctttgctatccagaagacggatatgaagaagctcacggcgtattcgacggtgtcgcatttgggttggattgtggccactattggtgtgggtactccgttcgcgttggcggctgctgtggtgcatacgttggcgcatgcgttgtttaagtcgtcgttgttcatgctggttggcgtggtggatcatcaggctggtacgcgtgatttgactcgtttgggttcgtcgtggcgccagttgccgtttacgtttggtgcgatggcgattgctgcggcttctatggctgcggttcctccgttgtttggttttgtttcgaaggagggcatgctggaggcgttcttgcatgctccgattggtaacgctggtgttgtggtcttgatggtcgctgcgggtgtgggcgcgttgtttacgtttacgtattcggtgcgtttggtggtcgatggctttatcgacggttcccgtgagatgtcggattgcaaggaggctccggtgtcgttgtggctgccggctgcgcttcctggtgtgttgtctattccggctgcgttgtttgtgagccggttggatgctccggtttctgctgcggtgagtgaggttgcggatgatccgcatactcatttggcggtttggcatggggtgactattccgtttgttatctcgatgttggtgttggtttttggtgtgcttggtttggtcaagcgtcagtggatttgggattcgttggcggatcgtaagcttgcaccgcgtagtggtaatgagttgttgaacttgtcggttcgtggcattgctgcgtttggtcgttgtgtgggttcgatggcggattcgttgagcccgacgcgtcacttggcgtacgtgtttatgttgctggtggtgctgggtggcacggtgacggtcaagggtgttgcttcgggcggtattgatggggtgccgttggcaccgcgtatcgacggagccgatcgttgggctgatgcgttgccgttggcgattattgttttggctgcggcgttgttgctgcgtacgaagcgtcgtttgactgcggtgatcatgattggtgtggtcggcgttggtgtgactgttcagatgttgatgttgggttcgcctgatgtggctttgacgcagtttatggtggaggcgttgacggtggtcatcatgatgatggtgattcgtcagcagccggataatttccacccgagcaaggggcgtcgtaaggcttttgctgcggtgatggctgtggctgtcggcgtggtgacgttcttgatgtgctggttcgttttgggtcgccgtgagcgccctgagctggcgatctggtatctcaacaatggcccggagatcactggcggcgataacgttgtgaacaccattctggtggagttccgtgctttcgataccatgggcgagctgtcggtgctgggtatggccgctgtggtgattgctgcggtggtgacgtcgatgccgcgttacccatttgcgcatggcacccacccggctccgtttggtttgtcgcatgtgaattcgattccgttgcgtcagctgctgcgcgtgctcatcccgattttgggtattttgagttttgctattttcatgcgtggtcacaattctcccggcggcggctttattgcggcactggtggccggtggcgcgttgatgctcagctacctatctcatgcccgtgaccagcacattttcacttttaagacgcctatttatctgacgtcgattggtattattttggcgctggtgtctggtttcttgggtcttacccatggctcgttcctttacgctttgcatggccattgggctggcgagcactggaccacggcgatgatcttcgacttgggcgtgtacctagcggtgctgggtatgttgtcgatggcgattaatgcgctgggtagc

SEQ ID NO: 17952 - DNA, 1224 bp, Cornyebacterium diptheriae
atgctcacccccaagatttatcgtgaaacatgcatcgatcttgcccacagcttggcacaggcacgcactggcacgatcactgtatcccctcatgatgctgcaattgattgcctgactcttgcccacgatattcatgctgtgttgcccatccctcccatggataattccgcgatggatggttttctcgtgcgcactgctgatcttgttggttctgcaccgtggagcttccctgtggcgggagatgtccctgctggtgcagcccccatggaggtgccccctggtcgcgctgtgcgaattatgactggcgccgaagttatcggtgagaacgtcactgtcattccggtggaaaagaccaatattcccgcaggccctaccacctgcccgtcgcatattgtggtccatgaggccgatgcccaaccgcggcatattcgtcgtcgtggggaaaatgttcagccgggtcagtgcattgctacacgtggtcagcgtgttgatgcaggtacgctcgcagcgattgtgtcctgtggtgtccgcgagattgaggttttaccgcgtctgcgtgtgactgtgattgctactggcaatgagctaggtgatagtgacgccgattctctcaagcgcgcccatattcctgattctaattcaccgatgatcgcgcagctggtgcacgatactggcttggccactgtaaacatcgtacgcatgtgcgatgatattgctgcttttggcagcgcgataagtgcagccgctaattcctctgatctcattatcactactggtggtatttctgcgggagcctttgatgtggtcaaagaatcgctttcatcccataaggattccaccatgtggtttggcgcagttgccatgcaaccaggtaagccgcagggtcatggacgagttggcaacaccatgattacgtgtctaccgggtaatcctgtgagtgcttttgtgtctttccagctctttgttcgccctgcgctgtacacacttgcggggctgcagccgccagcgttggggtatctagaagctgacattcagggtacactgcctaccccacggggccgggatatatttgtgcctgcgacggtgacctacgtcgatacgtggcaggcgcagccagcggctttcggctcgcattttattggctcactggtgggggttaatgcgctcattcatgtgccagccgacgcccaccgcgtagcgcctcgtgttatccctctaactttt

SEQ ID NO: 17953 - DNA, 894 bp, Cornyebacterium diptheriae
atgcccagcccgcaggttcttacggatgacgaggttatcaggcttgtcagcattgcagttactcgcctgaatgtcacctctgttcgttttactggcggagaacctctgttaagaaaatcgcttgagagtattgtttctactactagctctttgcgcacgccgcaaggcacgtcgccaagcattgcgttgacgacgaatggactaggtcttgataaaagaatcactggccttgtggatgcgggattagatcgcatcaatatttctctcgattctcttgatccacagcgctatgcggagttaagtaggcgtgctcgtcttgatgatgtgttaaaggggatcgacgctgctgtgcgcactggaatcgcaccgatcaaaattaatactgtggtcatgcctggggtcaatgaagatgatattgtgccgctggcgcgatattgcttgagcacagggctgcaattacggtttattgagcagatgcctattggcgctgaggggaactgggataaatcatctatgatcacagcagcccaaattctggaggttctttcgagtgagattgaattatcggaagcctcgcagccgcgcggtcatgcgcctgctgagttgtggaacgcttcttatcaggggatacagggcagcattggtgtgatcgcagcagtcacgcagcccttctgtggtgcttgtgatcgtacaaggctcactgcggatggttccatccgtaattgtttgtttgctcatgatgagttctcactccgggatctcatgcgtgatggtgctagtgatgatgagttagcgcaagcatggaaggggcacgcgtacattaaagcagcaggccatggaattaatgacctaggttttcttaaaccaacccgcactatgtctgccattggtggc

SEQ ID NO: 17954 - DNA, 462 bp, Cornyebacterium diptheriae
atgagtgaattgaaaaacaaaattagggcggatctgaccacggctatgaaggctcgtgagaaggagcgcacgggtacgttgcgtatgttgttggctgcgattcagacggaggagacgtctggttctaagcatgagctgactgatgaggatgtgctcaaggttattgctcgcgagattaagaagcgtcgtgagtctgcggaggtgtatgcggaggctgggcgttcggagttggcggacgctgagacgaacgaggcgaacattttggctgagtaccagccacagcagcttgacgacgacgagttggcggcgctggttgccgaggccgttgctcaggtaaaggcagagctcggtgagggtgtttccatgaagcagatgggccaggttatgaagctggccactgcgcaggctgcaggtcgtgccgatggcaagcgcctatccacggctgttcgtgcggcgcttgcc

SEQ ID NO: 17955 - DNA, 918 bp, Cornyebacterium diptheriae
atgccttccatcgttaagggcatcatcccaccagtactcacccccatgaagtccgatcgcagcatcgatttcgaagctctcgagcgcctcgttgagcacctcattgctggtggtgttgacggcctgttcgctctgggttcttccggcgaggttgccttcttgtctgacgaagaccgcgcaaccgtcatccgcgaaattgtccgtatcgcagctggtcgtgtgcctgtctacgccggtgtgatcgatatgcaggtcaaccgcatgctcggccacatcaaggctgctgaagaagcaggtgtagacgccatcgttgccaccgcccccttctacgccatctgcggacctgcagaggtagaggctcacttccgcgcggtagctgcagcaacgtctcttcctgtcatcgcttacgacatcccagtgtgcgtacacactaagctctcccctgagctgctggtcaagttgggctctgagggggttctggcaggcgttaaggattcctctggcgacgacgtctccttccgccgccttgtcatgctgaacaagaaggcaggctccccgctaaccctgctcaccggccacgaggcagtagtcgacggcgcattcatcgcaggtgccgacggctgtgtcccaggtcttggcaacgtcgatcccgccggctacgtccgcatgtggaaggctgcagaggccggcgactgggctaccgtccagaaggaacaagatcgcctcgctgccctgttcgagatcgtcttccagcccatcggcaaggttggcccagcagcaggtgtcggttctttcaagaccgccctcgagctcatgggtattttctcctccaacctgatgtccatgccattggcacctatcgacgacgccccatcccgcgatgcaatcgctgaaattctgaaggccactgatatgctc

SEQ ID NO: 17956 - DNA, 1620 bp, Cornyebacterium diptheriae
atgagcatggattcacagcgccgctactctcgccgcgatttctttaagatctccggcgcagtcggactcgcagcaggcttcgccgccaccctctcggcgtgtgcccccgataacagcggttcttccacatccggcagtcaagcagcagccggatctgccaataacgatggcaccattaacgcagcaatctcttacgagttgggcaccaatggttacgacccaatgtccaccaccgcagccctgacagttgctgctaactggcacaccctcgagggtctgaccgaaatcgacccagccacgggcgaaacctacgcagctttggctaaggaaatgccaaaggcttccagcaccgaggtagaggtcacgcttcgcgacggcgccaagttccacgatggcagcgcagtcaccgccgatgacgttgtcttctccttcgagcgcgtactagataaggccaacaagagcctgtacgcctccttcattccattcattaccagtgttgagaagaaggacgacaagactgtcgtcttcaagctttccaccgagactggcgtttttgctagccgccttgctgtggtcaagatcgttcctaaggcagctgttgagaaggacgttgacgcattctccgctaacccaatcggttccggcccttacaagatgaccgacaacggcggtacctctaagaccgtgaagttcgagcgcttcgaggactacaacggccctaagccagctcgcgcaaagaacatggtctggcagatcatcccagacgcttcgacccgtaccaatgctttgcagtccaagtccgttcaggctatcgactcggttccttacctctccatcgatcagctcaagggcacccacactgtggaatccgttcagggcttcggcttgctgttcgcaatgttcaacaacgacaagtccaacccattcagcgacttgaagaaccgccaagcattcctctacggcatcgacatggacaaggtcatcaagaccgctctgctcggccaagcaaccgcacctacctccttcctccacaaggagcaccctcagtaccacgaggccaaggttgtttactcacacgatgcagaaaaggcaaaggctttgttcaaggagactggcctgaccaagctgcgcatgctgtgcaccgaccacgactgggttaagaagtgcaccccattgatccaggaatccctgaccgccttgggtattcaggtcgacttcaccgagaagaagtcttcggatgtgtacaacaccatcgacggcaagccagaggcttacgacgttgtgatcgcacctggcgacccatctgtattcggcaccgaccctgacctgctcatgcgctggtggtactccggagacacctggaccgacacccgtatgcactggaagggtaccgaggcttacgccaagcttcaggaggttctcgacgcaggccttgcagctaccagcgagtccgaacagaagaacaagtggcacgaggctctcgacatcatctccgagaacgttcctctctacccactgttacaccgcaaggctccaaccgcgtgggatgcaagcacgctggttgacttcaagccgatctccctgaccggcctgagcttctcgggtgttggcaccactcag

SEQ ID NO: 17957 - DNA, 1251 bp, Cornyebacterium diptheriae
gtgggtcggatgaattctccatgtggtctattgtgcatggctcttaggaatggagccaacatttccccacgggggtctgcccacttgagggggagatcaggccagtatcaaacacggcgggcagacacgctagaattatcgcttatgcgaccggaaactcaatctgctgtaactcaactcgactcgactttgacgaccatcgaaaaagtgatgaatcccgaggatttggagtcgcgtgttcgcgagttggaacagcaagcctccgatcctacgctgtgggacgatcctgacaccgcgcaaaaggtgactaccgagttgtcttcggtgcaagccaagctgaaaaagctcagcacattgcgccagcgtatcgacgacctccccgtgatgtatgagctcgccgatgaggaaggcgaggatgctttagcgcttgccgacgaagaactcgccgagctgaccgcagacgttgaagccttagaagtaaagactatgttgtctggcgagtacgattcccgtgaggcagtgatcaatatccgttctggcgccggtggcgtggatgccgctgactgggcggaaatgctcatgcgtatgtacatccgctgggctgagaaaaacgaccacaaagtagatatttacgacatttcttatgccgaagaagcaggcattaagtccgcaacgttcgtagttcatggtgagtacatgtacggacaattatcggtcgaacagggtgctcaccgcttggttcgtattagtccttttgataaccaggggcgtcgccagacctctttcgctgagatcgaggttctccccgttgttgaacaaacagaccacatcgatatccctgactccgaagtgcgtgtcgacgtctaccgttcctcggggccaggtgggcagtccgtgaacaccaccgactcggccgtgcgtctaacgcacatcccaacgggcatcgtcgtgacgtgtcagaatgagaagtcccagatccagaacaaggcatcagccatgcgcgttcttcaagcaaaacttttggagcgtaagcgccaagaagagcgtgccgaacttgatgcgctcggcgcaggcggtaacgcctcatggggcaaccaaatgcgctcctatgtgctgcacccatatcaaatggtaaaagatctgcgtacaaactatgaggtcaatgacccccagaaggttctcgacggcgacatcgatggcctcctagaagcaggtattcgctggcgcatggcggaacaacaggggcaaaac

SEQ ID NO: 17958 - DNA, 1443 bp, Cornyebacterium diptheriae
atgactgctgttaatcctcaagacggatcgacagtagaagtgacaaacctgctaacaaaagagggcgccaccaaaatggtgagcgaagcggtgaacaactttgtagccttcccaccgttaggcgtcatcattaccgtcatgctgggtgtttccgtggccgaacactctggctttatcagcgcactagtacgcgccatggtagccaaagtcggtccgaagaccctgacatacgttgtcgcactggcaggtgtgaccggctcaattgcttcagacgctgtctacgtgatcctcattccgcttggcgccatgagcttccgtgccctcggccgttcccccatagtgggcgccatggttgccttcgccgcgtcgtcagcggggtttaatgccagcttgatccttaacatcacagatgttctccttagcggaatttctacctccgcagcgcaactggtcgatccggaatatcacgtttcaccccttgccaactacttcttcgttgtcgcttcttccctcgtccttgccttgattatcaccgccgtgacagaactgttcgttaaaaacagggcacgccagctcgtcgatcacgaccacatcgatcactcggaattaagctttcgcgacgacgatcaccccgacctcggcgcgaaaaccgatgaggaactagccgaggaaatagcactccattcaggggaaatccgcgcactaacaattgcaggtgtggcctttattggtatgttggccgtatattttgcactcctgtttgtgccggcctcgccgttttattctgaagaatcagcgatgtccagtccgctcgtcaaggctgttactgttccgatttccttgatgtttttaggccttggtgtggtttatgggatcacgataaaaagcatcacgtctctaggcgacattccggcttttatggccaagggcttgaccactttaatcccaatggtcgtgttgttctttatggttgcccaattcctcgcatggttccaatggtcaaatcttggcatttggactgcgatcaagggcgcggagctgttacagcgttgggatctgccggtctatgttttgtttgctgctgtagtgctcgctgtggctcttcttaatctcacgattacatcgggctctgcacaatgggcattaatggcacctgtgattgtgccgatgatgatgtatgtgggcatttcccctgaagtcacgcagatgttgttcaggattggcgactccccgactaacatcatcactccgatgagcccttatttcgcgctcgcgctgacattcttgcagtgttactacaaaccagctggtgtgggcacactggtgtcgcttgcattgccgtattccattgcgatgcttgttggctggtttgccttctttattgtttggtacgcactagggattccgctgggtcttggaacccctatgcacttccagcagggt

SEQ ID NO: 17959 - DNA, 1212 bp, Cornyebacterium diptheriae
gtgggttaccacccagtttgccaacgcagcccgcggaaactaacacccccacacatcacaaccaaggagtaccaaggaatgaaacagatcattggtgacctggtcactccagccggtgttctaccgcaccatcggatagacatcgactctaacggaatgatcgcagcgatcacaccagcaccagaagtagataacccacccctcgtgctgccaggtcttgccgacatccacaatcacggtggagcaggggagtccttccccaactccgactacgacggatgcgtgatcgccgcacgccaccaccgcgcacatggctcgaccacgctgctggcgtcgacagtatccatgcccgagcacaccctactgccgcaactatccctcctagcggatcttgccgacgccggtgaaatcgacggaatccacgccgaaggcccctttgttaacccgtgccgctgcggcgcacaagacccagaagcgatcatcctaggcgacccagaactgttcaagaaaatgatcagagcggcacgcggctggctcaaatccatgaccttcgcccccgaaaccgcacacgccaaggaaatcatcgacctctgcgccgaaaacaacatcatcgtctccctcggacacaccgacgcagacttctcagtcaccgaacaagccctgtcctacgcagtagcagccggtgcaactgtgaccgcaacgcacctatttaatgcaatgccagcaatacaccaccgtgaccccggtgcagccgcagcgcttatcgacgccgcagctcgaggcaacgcccacgtagaactagtcgccgatggcatccacctcgatgaccacacagtgcgcatggtcatcgactccgtaggtgcggatcgagtgagctttgtctccgacgcgatgggcgcagcaggaaaagaagacggggactacgttctcggagccctcgccgtcaccgtgaaagactccgtcgcacgactgaccaccaccgacggcagcgaaggcgctatcgcaggcggcacctcacgtgtgatcgaccaagtacgccgacacgtcgccgcaggattccccatagaagacgtagtcaaagccgcaaccgaaggaacccgaatcctcggattacacgaccgcggggccatcgaagtaggaaaacgcgcagaccttgtcctatgcagcggcgacttccatgtcgaccacgtgctcatcaaaggcgaggacatc

SEQ ID NO: 17960 - DNA, 381 bp, Cornyebacterium diptheriae
ttgggaaccgaaatcaagtcgatccgtgagggcaaagtatccctcaccgactcctttgccactatcgatgaaggcgaagcctggatccgtaatctcaatatcccaatctattcccgcggatcgtggacgaaccactcgccaatgcgcacccgaaaacttcttctgcaccgacgcgaaattgattcgctcatgggcaaggtgcgtgacggaaacaaaactctggttccattgtctttgtacttcaaagaagggcgactcaaagtggaactcggacttgctcagggtaaacaggactacgacaaacgccaagacatcaagcgtcgcaccgaagaacgagaagtggttcgcgatctggggcgtcgtgtcaagggaatccacgct

SEQ ID NO: 17961 - DNA, 777 bp, Cornyebacterium diptheriae
atggagatcgtaatcacccccaccaaggacgacgccgctcgtatcgccgccgacatcctagaagaatacgcacgtgaaggaaagaccctgggtcttgctaccggatctactccgctaggcacctaccaagagctcattcgtcgccacaatgaggaaggcttgtcgtttgccgaatgccaagcatttactctcgacgaatacgtcggattgcctcgcgaacacgaacaaagctactacagcaccattcgacgggaatttacttcgcatatcgatatcccagacgagaaggtgttcaaccctgacggcaccgcagaacacccaggacaagcagcacaggaatacgatcgcctgatcgtagaaaaaggcggtgttgacattcagattcttggtatcggaaccgatggtcacattgcttttaacgagccaacctcgtctatggcaagccgtacgcgtatcaagacgctgcacccagacacggtacgcgataattctcgattctttaatggcaacgaatcacaagttccacaccacgtgatgacccaaggaatcggcaccattcgcgaggcccgacacctgctgatgctctgctttggcgagaataaagcagatgcagtcaaagccatggtggaagggccagtcgcagccgtgtgcccagcatctgttttgcagctgcatgagcatgccactgtgattgttgatgaggcagcggcagcaaaacttgagcacactcagtactaccgctatgcgctagagaataagccagactggcaacgcttc

SEQ ID NO: 17962 - DNA, 741 bp, Cornyebacterium diptheriae
atgaccgtggattttccgcaaccagatgccccagggcacaacatcgacctgcggccagaattcgccccgcggtggctctcgcccctagtaagcgatgtggccaacggcgttatctgcgatcgactacgccgtgttctcgccccaccgcaacgcacggaaactaccaaacaagcagccgtgctcatgctgctcgcaggagatcccctcgcacacaccgtgcctaacgacgccaccgtgcttctcacacaccgttcaccaacgatgcgatcgcactccggccaaattgcctttcccggtggccggatggaccccaccgaccataatgtggtcgattgcgcactgcgggaagcgtgggaagaaaccggtgtggaccgcatgaacgtgacaccccttgttacctttcccatgttgcatatccgtgctaccggataccccgtgcatcccgtactgggctattggcacaggccgagtcgcgttggggtggtaagccccaacgaagctgacgctgttgccgcaatccccattgcggaattagctgatcccagcaaccggcttaccgtggaatttgaccgttggtctggtcccgcgtttcggatcaacgactttattatttggggttttaccggtggactcttagatgcaatgctttatcaagcgggatgggaacagccgtgggattcgcacaagcactacgatctatacgacacccttgctcgttcccggaacaacgagcgtttgacg

SEQ ID NO: 17963 - DNA, 396 bp, Cornyebacterium diptheriae
atgaccatgactgatccaatcgccgacatgctgtcgcgcgtgcgcaatgctaacaatgcgcaccacgatgcagtgtcgatgccttcttctaagctcaaggcgaacatcgccgagattctgaagtctgaaggctacattgctgactacaaggttgaggacgcaaaggttggcaagaccttgaccctcgacctcaagtacggcccaaaccgtcagcgttccatcgagggcgttcgtcgtgtttctaagccaggtctgcgtgtgtatgcaaagtccaccaacctgccacaggtcctcggcggcttgggcgtggccatcatctccacgtcccatggtctgctgaccgatcgtcaggctaccgagaagggtgtaggcggagaagttctcgcctacgtctgg

SEQ ID NO: 17964 - DNA, 534 bp, Cornyebacterium diptheriae
atgtcacgtgtaggtaaggcacctatcgcaattccatccggcgttgacgtaaagatcgacggccagcatgttgaggtcaagggtcctaagggcaccttggatctcaccatcccagagccaatcgtcgcttctattgaagacggccagatcagcgtcgttcgtccggacgatcaccgcaagaaccgttctttgcatggtctttcccgctcgctcgttaacaacatggttgttggcgttaccgagggttacaccatcaagatggagatcttcggcgttggttaccgtgttgctctgaagggcaagaaccttgagttctctctcggttactcccacccagtgctgatcgaggcaccagaaggcatcacgttcgccgttgatggcaacaccaagttgtctgtctccggtatcgacaagcagaaggtcggacagatcgccgccattatccgtcgtctgcgtaaggatgatccttacaagggcaagggtattcgctacgaaggcgagcagatccgtcgcaaggtcggaaagacgggtaag

SEQ ID NO: 17965 - DNA, 405 bp, Cornyebacterium diptheriae
atgagcaacaccgaaaacaacaacgcaaagcgtcttccagtgggcaaggatatctccacccgccgtcgtatcgctcgcgcacgccgtcacgaccgtatccgcaagaacctgcgtggcaccgccgagactccacgtctcgtcgtgcaccgctcttctcgccacatgcacgttcaggttatcgacgacatcgctggtcgtaccctggctgccgcttccaccttggaagcagaagtacgcgcacttgagggcgacaagaaggctaagggcgcaaaggtcggtcagctgatcgccgagcgcgcacaagctgctggcatcaccgctatcgtcttcgaccgcggtggctacaagtaccacggccgtattgcagctttggctgatgcagctcgcgaaggcggtctgaagttc

SEQ ID NO: 17966 - DNA, 624 bp, Cornyebacterium diptheriae
atgccgggacgtgaacggcgtgacggcggacgctccgccgacgacaaccagaagaagaacgaccgccgcggcggtcgccgcgatgatcgtcgcaaccagcagcaggacgagcgctctcagtacatcgagcgcgtcgtgaccatcaaccgtgtgtccaaggtcgtgaagggtggtcgtcgcttcagcttcaccgctctcgtgatcgttggcgacggcaagggaatggtcggtgttggttacggcaaggccaaggaagttccagctgcaatccaaaagggtgcagaagaagctcgtaagaacttcttccgcgttccaatggttgctggcaccattactcacccagttcagggcgaggctgcagccggcatcgttatgatgcgcccagctgctcctggtaccggtgttatcgctggtggtgctgcacgtccagtcctcgaatgcgcaggcgttcaggacattctgtgcaagtctcttggctccgacaacgccatcaacgtggttcacgccaccgttgctggcctgaagcagctcaaccgcccagaagaggtcgccgcacgtcgtggcaagaccttggaggaagttgctccagctcgtatgctgcgcgctcgcgcaggacaggaggct

SEQ ID NO: 17967 - DNA, 444 bp, Cornyebacterium diptheriae
atgagcgaaccaattaagctccacgacctgcgcccagcaaagggtgcaaacaagccaaagacccgcgttggccgcggtgaggcttccaagggtaagaccgcaggtcgcggtaccaagggcaccaaggctcgcaagcaggtttccgctgctttcgagggtggccaaatgccgctgcacatgcgtctgccaaagctcaagggcttcaagaaccctgcaaaggtctactaccaggtcgtcaacgtttccgacctcgagaaggctttcccacagggtggcgagattgctgtagctgacatcgttgctaagggcctcgttcgccctaagcaacctgtcaaggttcttggtaacggcgagatcagcgtcaagctgaacgtcactgcaaccaagttctccaagtctgcagttgagaagatcgaagccgctggcggctccgtgaccgaggct

SEQ ID NO: 17968 - DNA, 798 bp, Cornyebacterium diptheriae
gtggcaacgcacaatccgaccctgaatgacaaaatctttgggtccgtggctaaaaaagaagccctacttaagacagatttcctccgatactttacccgttgcatccttgccggtgtttatatcaccctcggaaccgcattctcagcgcacgttgcacaaaatgtagaaaacctagccccgggacttggctcggtcgtctttgcgatgttctttttcgtaggacttggcaccatcgtgatcctcaatgccgaactcgtgaccagcaacatgatgtacgtgtcttacgctgtggttggtaaaaagactccttggcacaaagcagccctcgtgctcatcgtctgcgtaatcggcaaccttgtcggtgccgtaatcattggctatctgctcggtcaatccgcagcctacagcggattgaccccagaatcattcgtctctgtcacgcttgaccacaagctggaaaagcactccatggggcttttcatagaagcgatgctggccaactttgtggtcaacatggccatcgtgggttgcgcgctaattaaagacatcgccggaaaacttatctggctgatgttcatcatcggcatgtttgtgggcctcggcctcgagcacgtagtggccaacttcggccttgtcgcgctcgtaggcttcggctcagaggtgcacagcgagtacttcaccgccggctacatcctgcacaactggggtatcgacttctttggcaacctcgttggcggcggactatgcatcggcggcgtatatgcatggctgaatcgcggcagcgaaaactaccgcgat

SEQ ID NO: 17969 - DNA, 1596 bp, Cornyebacterium diptheriae
atgacgtcgaaaagccttccaactcgcaccacgttaagctcgggaacgttctatcagatttaccctcctagctttgccgattctaataaagacggcatcggagatttccgtggaatcatctcgcgactcgactatctcagcgaccttggcatcaccggaatctggctcaacgcgtgctttgattcaccttttaaagacggcggctacgatgtgcgcgactacacaaaggtggcttctcggtacggcacccatgaggatttggtggagcttttccaccaagcgcatgcccgcggaattgccattatcttggatctggttcctggtcacaccagcgaacaacacccttggtttcaacaaagtgctgctagtaaatacacagattttgatgaccgctatatttggacttcgcacgcatttgagggtggtgcggggctagcttttattggcggcgaacacccccgcaacggtgcgtacattattaatttcttcaaatctcaacctgcactcaattatggtttcgcagaattaacccagccatggcaccaaccagtagatgcccctggcccgcgggcaaatcaagacgcgatggttgagattatgaagtactggttatcgcaaggtgccgatggtttccgcgtggatatggcggattcgcttgtgaaaaacgacggcacctcaaagcgggccacgattggtatttggcagtctatgttgagccaagttcgcgccgagtttcctaatgccatctttgtctcggagtggggcacgcctactcaagcgtttgaggcgggctttgacgctgacttttacctcgattggcgcggcaatggttacaaccttttggcacgtaacacggataccccactggagcggcgcgatgatgcaagtttctttaactctgattccgctacgggtgcccaagagtttctcgatatgtatttgccgcaatgggagcgcacccatgaggcagggctgtttagttttatcagcggtaaccatgactgcccgcgtcttgcaccacgcctgaatgaacaagaacgcgcgttgttcttcttgttccagctcactatgcctggccttcctttcatttattacggggatgaaattgggcttccctatgcggagatccctacgaaggagggcggctatgcgcgcacggggtcgcgcacccccatgtgctgggattcccagttgcctaacggcggtttttcgcttggcgacgctcccctgtacctccccatgactgatacatcccagaatgtggcgcagcagcgtgagcgtgcggattcgttgttccatcacgtacaaaagctcattcagttgcgttctcagctgccagctttagatggctttgctgatctagagtttgatctttctctcctaaagaagcaccccaaggttatggtgtatcgccgcactcatcatcatggcgacagcgtgcttattgccctcaatgcaggtaacaagccgatacgcgtcgagcttcagcagccccaagcacatgagcttttccgttgtggtgatgtgacatatcccgatctctcagatcacagcgtggttgagttgggtcctacttctggcgtcatcttgtccgtg

SEQ ID NO: 17970 - DNA, 1239 bp, Cornyebacterium diptheriae
gtggatatggtccacacaaagaaaattctcagcgtagttgctgcatctaccctagtcctcgcaggctgttccagtgagtccgactccagcaataaagcttccgattctggcgcctccaacgaggcaactttgaccgtttggggtccccaagaagatcaggatggcgctgacggatggctccagtcagttcagaaagaattcgaaaaggctcatcctgattacaagatcacctggaagaattcggttgtttctgcagcagatgcaggcaagacggtgaaccaagatccaagtgctgcagctgatgtatatgtatatgccaatgaccagctaggctcgttgcttgattctggtgcggttggtgagttgtcagatgatggtatgaagcagctcaaggaacaagctgaagacaccatggccgctactgtgaccggccaagacggcaaggcatacggtctaccgattgagccaaacacttggttcatgtactacaacaagtctaagctcagcgctgacgacgtcaagtctttcgacaccatgctggagaaagcaaaggtctctttcccaatctctaactcttggtacttcccagctttctatgctggtgcaggagcgaagttcttcggtgatgacggacttaaagcagacgcaggcattgatttgggcgctaaggctggcgatgtaaccaagtacctcgcaaacgttgttcgtaatcctaattttgttaatgatgctgatggttccggtattggcggtatgaagaacggctctgttgatgttgtgttctctggttcatgggatgcaaacaacgtcaaggaagctctcggcgataactatgctgtggcatctttgcctaccttcaaacttgatggcaaagatgttcagatgaaggctttctctggttctaaagcaattggctacaaccccaacactaagaacccaaagatcgcttctgagttcgcagcattcttggcttcttctcagtctcagaaaacccactttgaaaagagcggcgttatcccagcagataaaactctctctacagatgcaactattaccgctgacccggtagctggtgcactgttcgagacagtagcaaaagcttctatcctgcagccaactatcaagaagatgtctgatttctgggagccagcagaaaactttggtaaaggacttgccaatcgggaggttacacctgaaaatgctgcccaaaagacggaagcatgggcgtccactctgaag

SEQ ID NO: 17971 - DNA, 171 bp, Cornyebacterium diptheriae; identical to SEQ ID NO: 17680

SEQ ID NO: 17972 - DNA, 933 bp, Cornyebacterium diptheriae
ttggctagggaagcagccgcacgcaagaacgccgaagcacctgctcccgagcctgctcctgaaccgaaacccgaaccaaagccggagcctcgtgatgggtttgccactattcaagagaagtgggcaacgatcagcgatgtgatcttcaaagccaactccgtggcaggcattttgcttagccaagccaccttgctgggcttgcgtgacgattccactcttgtgatcggtcacaacaccggtgcgctggcgcatcggatcaacgacccacagcatgcaggctccatcgttactgcaattaagcaggaaactgatctcgatgtgaccattgagtgcgtagtaggtacggaccccaaagctgctggttttagcgaaccagaaaacaaaaaggtgtggaacccagagcccaagccggaacccaagcccgagcccaagccggaaccaaaaccggagccggaaccggctcctgccagcgataatgtctggggcgcacctgcgccgctcggtggtggacaaccagctacgcctccgccaccgccggtagagcgatttagtcctgccaaggcgaccgcaccacaacctccagctgcgccgcaacctgtgcaagaagctccgaaaccccgctggcagcaggccgctgaacgtggcatgcgcaagatggaggagcgcgccaagcggccgtcgttctccgatggtgtgccgctgccgcccgagccggaggaaccggatgtgccgccggacctctacggctaccccgcagatgaggggataccggaacctcagacccctcaggctacgtctaactatgtagtggaccatgatgaggaagaggagatggttagggaagcggcacagggcgtgggtaatcgtgaccatcgcgatgctatgaccgttgccgtggacattctctccgaagagctaggtgctcgacagctt

SEQ ID NO: 17973 - DNA, 261 bp, Cornyebacterium diptheriae
atgctcggactaggaattatcggatggatcattatcggtggcctcgcaggctggattgcatccaagatcaagggcactgacgcccagcagggcattggcttgaacattatcgtcggcattgttggcggtttcttgggcggttggctattgagcctcttcggagttgacgtcgctggcggcggcctcttctttagcttctttacctgcttgctaggcgcagtcattctgatcagcttggtgcagttggttacgcgaaagaag

SEQ ID NO: 17974 - DNA, 222 bp, Cornyebacterium diptheriae
atgtcgcgtaaagctaattgttacgacaacgcagtaatggagaacttcttcggacacttaaaaaccgagatgtaccacggagaagtttttggaaccgtcgaggaattcacccaagctgtcgaagactacatccagtggtataacaccgaacgcatccaacaacgactcaagggcctgaccccgatgcgctatcggaatcaggcccttgaacccctaaccacc

SEQ ID NO: 17975 - DNA, 936 bp, Cornyebacterium diptheriae
atgcttcccacgactcgaatcctgtccgtgctactactcggcttaggcgttgctctggtagccgtgggaattttagccccgcgatgggtcaatactgatgctcggttgccgctcgacctatcgcagactacttttaccctcgtagatgatcatgcacgtacacggcttatcaacgatgggcgtgtgctcgatgcaggggttgtgcgccagtggcacatggatattttgccgcccaccgatgccgataccgcaacagtgcgcattggagtaactgatgtgcggaagagccgacaggcagacgtcgatcgcctcattcaggcttccgtgtggacgtaccccctcgaccggctcagtggcgaagcactagcgcctgcgactgtgagcgcgcaactgggaagccccaccgaaagtgttccggttgacggtgcctggttgaagtttcctagcgatgcccagcagaccacctatgaggtattcgacccaactcttcgaagcacaacgcctgccgtcttttctgaggagatcgatcggggcggtcggacaatttatcggtatagccaagagataaaaccgaccaatgtggctgagaaatacgcctcggttttcaacacgacgcaaaaagatgaaaacacgctctacctgtatcattccggaaatcggcagtggtatgtggaccaaatttcggggcttgtggttgacgtggaagaaaatatcgaggattatttcggtgatgccgatggcacgcgtcgtgaagatgcgttgatattccatgggcgaatgagcgaggataacaaagcggcgctctttgagcaggcgtccgcagtctccgatggctccgtagctcgagtgctctaccgcgtggcgctcgccgctggggcggtgctgagcgtcgttggtctgatgggcgcgtttcgccgtcgcccagttgctttacat

SEQ ID NO: 17976 - DNA, 672 bp, Cornyebacterium diptheriae
atgacttggtttggtgatctcctctcctatctcaccactgccgcgcactggtggggctcgcaaggctttcttgcccgtcttctagaacacgttggaatcagcctggctgcggtcgccattgccgcactgctcgcccttccggccggtgttctgatcggccatactggccgcggcgccggccttgttggtggtgtcagcggtgctgcccgcgcgctgccaaccttgggcttgctcacgatctttgggctggcttttggcattggacttacggcaccgatgctggcgctgattattttggcgatcccatcactgctggctggtgcttattccggcgtggccgccgtagatcgcgcgaccatcgacgccgcctacgccatgggttttacccaccgccaagtaatcagttccattgagctaccactatctgcagccgtgctggtgggtggcattcgcgccgcagtgttgcaggtgaccgctacggccacacttgctgcatataccgcagatgtggggttgggccgatttattttccacggcctcaaaacgagggattacatcgagatgttggcggcctccgtgctggtgatcgcactcgcgttgcttttcgacgccctactcgggggcgcgcaaaaactgatctctcaacgcacccgcaccgctacgcctgctcct

SEQ ID NO: 17977 - DNA, 1830 bp, Cornyebacterium diptheriae
atggcaggcatgttccaagatcttttgtacctcaacctaattggtgctgtgcgcgcgatcacggctgcccagggcatcaagatccgtatttcgggcgaggagaatgttccagagtctggcggcgctgttgtggtggttaaccacacggggtacttggactttatttatgcgggatatccgtttaggaagttccgtaggtatatccgctacatggctaaaggggatgtgtttaagcatccggttgcgggtccgctgttgcgggagatgcgtcatattcctgtggatcgcatcgacggcaccgcggcttttgaccaggcggtggacatgctcaaaaagggggaattggtaggcattttccccgaggcgacgatttcgcgcagctttgagattaaaacgttgcgcccaggggcagtgcgtatggcgcaggctgcgggggttccgatcatcatggtgatggtggtggggtcgcagcgggtgtggacgaagggacaaaagaagaacctgattcatcctggttcgccgatccatatgaaggttttcccagcgtggtaccccgagggtgatgcgaatgaggcgacgcaggagttgcgtcgtcggatgatcacgggccttgaggaggtgtggtctgattatcaggcggaggagccgattgttcctggtgcgttgtgggtgccggcgcggttgggcggcggtgcgccgactttcgacgaagcccaggcggaagatgagaaagtggagcaggagcgtcgccgtgtgcgcgtgctcacggaggagatcgcgcagctgacggagcggattaagcaggccacgaaggcgggcgcgagtgctgtcgacgctgctcgacaccgtgtggaagacgtgttgcatggggaggtgcccgcgaaggcggatgcgggtaaggcgttgtcggtgttgaaggacactgtcgacgagttcgttgaggaggttgtctctagcgcgaaggaaggtaaagaccgtgtgatggatgccggtgagcagctgcgtcgtagtgttgctgatctgtatgggcaggcggtgactgctagtcaggttaatcctgtggtggtgcaggcgacggcccaggtcagcatgttgttggatcggttgccgcagcgtaaggacgcaccaaaggttgagttgccacgcgtgttggtgctcagcgtcgatggtgcggtggctgcgtatcctgaggtcacgctgtcgccgtcggtgttgtctcaggtggcggcgttatctcagcagcacacggtggtgctgaccacgatcagtggaatggatcgggtggtggcgcttgcacgtcaggtggcacaggagtcgggtgcggatgtctgtgtcagtgctagcgctggtgcggtggccgccacggtgagtgatacggatgtctctgtgttgcatgagtgtgtggtttccgatgagcttcgcgctgccgtgcaagagtgtgtggatagcttgggccttgatgtggaatggaaaggcgctcaccatggtgttgtttctggattgggggctgatccagacctgtggcaggaattatcgcaggtagtgcgggttgttccattgcctggggagccggatcgttgtgtgattgtttcgcctgaggcttctgttgaggcggctgtgcagacgtgtgtgggggatgtctgggatgaggtgttggtgtgtgctgctgatgcgtcggaggcaggcgcgttggcgcgtgcggggcatcgtgttgcggtggtctcggcaccggtggtggtgttgcgggaggctgcgcagtggtgcgatcgtccggacaaagacggagtaattaatttcttagacaagcactttattacccctgaaagtgtg

SEQ ID NO: 17978 - DNA, 318 bp, Cornyebacterium diptheriae
gtggagaatccaacgaagcagcactattccttcgaagttagaaaacaggtcgtcgatcgtttcaacgctggccaatccaagatggaccttgcccgggaattcgggttatcttcggaccagcttgtctccagttgggtgcgtgcctggcgtgcaggtggtgatgaggcacttcggccgaaaccgaagggcaggcctaaaggtagcgccagttcgaagccattgactgaggaagaccggctgcgccgtgaggtggagaaactacgcgcagaaaacgcgtacttaaaaaaattgcgggacttgaggaaccagcgacgaagc

SEQ ID NO: 17979 - DNA, 2853 bp, Cornyebacterium diptheriae
atgaacagtcctactggttcaccaaaaatagtcaaaacacccacaaagcggctttcacgtaaggctgtagccctaatggccactctaggcctcagtgccggccatttaatcattagcgataacaccatcgctggtgctgccgtagataatggatccgcctcattcacctctaacaataacgcacgttttgcgaatgagattttctttttcgattttggtaagttagcttctggagaagaacgtcaagacacttggggagctcaggaaaaaacaaataatgaagccgagttttacggcaaacgtatcaaatctggtgatagctatacttataaagaagtcgacggattacccaaaggtcttgaagtcacagtaacagtcaatagcgtgaccgcactgcatgacgacgcagtataccccgacaatggacctaaagcaggacagaaaatcgatgatggtatctgggctcgaacagtcacatggaatgattttttccgtcccctgaatttgtccagcccaggcagcatcgaccgagataaaaaacgtagcaacgaatggttcgatgcggatacactctacccaagcgatcccggatcaatgctgcagattagcaattacctagatccacaaggttttgcaaataacgctgatcatcaatccaatcaagggtacaaattcagcattaatgtggaaggtaaacttaacggcaaaccagttgatctcgacctctttgcttctgacggtgaatccactggtatcaaagtcgaggaccacgacaacccatatggtttaaaggataaaggtcaagttgttaaggggggagtcccagaaaatctgcagcttactcctaatggtgaaggcggatgggttgtcattcaggatctcgtaggtaaagacaaacgctactatttcacagatagcaaacctaccgtaccgcagaaagttcctgagggcgttgccccttacaagccgattgaagttgaacctgacaaggtgtggactgagcaaaacggtgcaaagacctacggctgggtggacactgagctggacgaacagggtggcccttggaaggctattccgatgtcacagccactactagtcagccgtggtgctactcaaatcagtgtcgaactggacaatcatgcacgcggtaaaacaggatcgcgccaaggtgtagttgcgggcatttttctccccacggatcagggtgatgcccctgaatcttatggtgaagcaagccatattttgaccaactggaaagaaacaggttcaccaaagaacaacccaaacatcgcgttccaggacggcaacaaagtgggatcatatatcgccgagtttgatggaggaaaaaattggaccactgacccagataatgccaagggtgacgacgaagaggatctaaatccagatttctttaaatctggatttgaaaacagcaatggcaaggtaacaatcccagcagttgcaaagaacagcgcagtagttgcgtgggttgatctcaaccaagatggaaaattcgaagatgatgaacgtcgtgtcggaaaagacaatggagatggcacattcacattcgattggagcgatgctcaaaagacgccccaaccagacagcgcaatatacgcacgtattcgtgttggtggggaaggaacatctgctgaccaaatcaaggatgctaacggcaccataacaggtggtgaaatcgaggatcttaaattcacgattgataaaaaagtaccagctgtaaccccatcggtaactgtcggtgactacgtctggcacgacgcaaaccacaacggaatccaagacgacaacgaacaaggcctcgccggcgtaaccctagaactctacggccctaacggcgaagcagtcaccgacgtcaacggcaaccctgtggaaaccgtaaccaccaaagcggacggaaagtactccttcgagaacctcccagtccttaaaaacggcgaacaatacaccgtcaaggtcgtcgacgtccctgaaggatacaagccaacaaaggaaaaccaaggaaccggatcactcgcaaggttcaaagactcctcaacgggatccgctcaaaccatcccaggcaccctgagtgaaaacggggcaaaagacctcactttagacttcggcttcatcaaaacagacgccccagtcaacccatcggtaactgtcggcgactacgtctggcacgacgcaaaccacaacggaatccaagacgacaacgaacaaggcctcgccggcgtaaccctagaactctacggccctaacggcgaagcagtcaccgacgtcaacggcaaccctgtggaaaccgtaaccaccaaagcggacggaaagtactccttcgagaacctcccagtccttaaaaacggcgaacaatacaccgtcaaggtcgtcgacgtccctgaaggatacaagccaacaaaggaaaaccaaggaaccggatcactcgcaaggttcaaagactcctcaacgggatccgctcaaaccatcccaggcaccctgagtgaaaacggggcaaaagacctcaccttagacttcggcttcatcaaaacagacgccccagtcaacccatcgatgaattggttaatgcctttggccccactagcggtactcccgttgattccgctgttgagccagcaaattggtggatcctcagcacctaacccaggaacacctcaagctactgcgcctcagacttctgcccctactgctgataaaccagcacagacgcagaaaccgcaaaagcccaagaacaagcagctggctgcgactggcgctagcgttctcggtgtactagccgcagcattggcaatgattgctggtggcgtactagttctccgctccagaaaagaaaac

SEQ ID NO: 17980 - DNA, 237 bp, Cornyebacterium diptheriae
atgaacgaagtcatccttgctgcttctgacaccgcagtctccggctccatcgcaactgttggttacggcattgctaccatcggccctggccttggtatcggcatccttgttggtaaggctctcgagggcatggcacgtcagcctgagatggctggccagctgcgtaccaccatgttccttggtattgcattcgttgaggctctcgccctcattggtctggttgcaggcttcatcctt

SEQ ID NO: 17981 - DNA, 174 bp, Cornyebacterium diptheriae
atgtggcgcggactcaccatccatcagtcctatcacggcggcctttttgactcgacggggattgtcgaattcactgctaggtatgctgtctgtggacaactgcaatcacaacatgaaacgtcccatttcagacgccatgatgggcgctgggtctatgttgacggagatcttcat

SEQ ID NO: 17982 - DNA, 1692 bp, Cornyebacterium diptheriae
atgaccgctgtggcgccgaggctcgaaaattatgccgagccaacaaggcccgcaccaaccggtggtgcccgcaagggaacgctggcgtggaagatgctgaccacaactgaccacaaactactgggcatgatgtacatcgtcatgtccttcgtgtggttcttcgttggtggtttgatggctctgcttattcgtgccgagctcttcagcccaggacttcagtttctgtctaacgagcagttcaaccagctgttcacccttcatggaacaatcatgctgctggcctttggtacgccagtggtgtggggcttttctaactatattctgccattgcagatcggcgcacctgacgtggcattcccacgtttgaacgcttttggtttctggattacccagatcggcgtcgtcgcaatgctggcaggcttcctcaccccaggtggcgcagcagacttcggctggacaatgtacctgcctttggctgactccatccactccccaggtgtgggcggcgacttctggatcatcggcgtgggggcaacaggtgtcggcaccattgcttccgccgtgaacatgatcaccaccatcctgtgcatgcgtgcaccaggtatgaccatgttccgtatgccaattttctgctggaacatcttcgttgcttccgtcatcgttcttctgatcttcccactgctcaccgcagcagctttgggtgttatgtacgaccgcaagctcggtggacacatctacgatccaggtaacggcggtgccatcctgtggcagcacctcttctggttcttcggccacccagaggtgtacgtcctagcactgccattcttcggcatcgtttccgaggtcatcccagtgttcgcacgtaagccaatgttcggctacatcggtctggttttcgcaaccttgtccatcggtatgctttcgatggctgtgtgggcacaccacatgttcgttaccggcgcaatcctgttgccattcttctccttcatgacgttcctcatctcggttccaaccggtgtgaagttcttcaactggttgggcaccatgtggcgcggtcacatctcttgggaaaccccgatgacttggaccatgggcttcttggtgacgttcctcttcggtggtctgaccggtattatgctggcatccccaccactggacttccacatctctgacacctacttcgtggttgcacacttccactacaccctcttcggtaccgtggtatttgcttcctacgctggtgtgtacttctggttccccaagatgaccggccgtatgttggatgagcgtctgggcaagatccacttctggatcaccttcgttggcttccatggcaccttcttggttcagcactgggttggtaacgagggcatgccacgtcgttacgctgactacctcgagtctgacggattcaccaccttgaaccagatttctaccgtgttctccttcttgcttggtgtctcggttatcccattcatctggaacgtgttcaagtcctaccgctacggtgagatcgttactgtcgacgacccatggggttatggcaactccttggagtgggctacctcttgccctcctccacgccacaacttcacgtcgctgccacgtatccgctccgagcgtcctgccttcgagctgcactacccacacatggtggagcgcatgcgccgcgaggctcacattggacaccac

SEQ ID NO: 17983 - DNA, 906 bp, Cornyebacterium diptheriae
atgcgtgaggtgatttttcttcagcgatcaacaacaagtgcgatctcagcaatctgtctgctcggttgtgtagtggcctgcgatataagcccctcccctgacccaaacgccactttgatagatctagcggcaatcgcacacaatgacgctgcagtactccaaagcaaaaactccgccttagcccagcagcgccacgctgactccgaggaattgataagcgaaattcaacggctttgtggtaccaattccgagggcaagctgcccgagtcttgctcgaatgagatcgtccaaggggccgtcgataagcaggctgtatcgcttaaagaaactgttacagagtctgatgctgctactcggtccgcacaggctattgtctccgctattgattctgcccctagcgaatcattaggcctacttgggcaacagctagtcgatctcgtccgcgctggcgcagctgcccctcaatctggaattgcacaattaaatcctcgaaatgagattaacaagggtacaagcaaagatgacctcatccatgatagagaaagtctcaaaaaggctctcgattgggagtattcagcaatttatgggctaggtgtcgcactagcccattctccagcaggtactagaaccgcagtatctgatgccatcaccgcacatcgtgatcgagtagaacttttagaatccagtttcgccgagtcattccccaatgaaacaattccacgacctgaagcagcatacgaattttccggctatccagaaccacatgacgctcaatcctcccgagcattttttgattccctagaagcagattctgcagcatggtggctacatgccctttcagaatcacattcggctacctggcgggccttgtgtgcttcactcgcagcacaaagtgcagctcgacgt

SEQ ID NO: 17984 - DNA, 1242 bp, Cornyebacterium diptheriae
gtgagaatacagattggtgagctcattcgttcaggtgtccttgaactgggtgatggttaccgtactaagaggtctgaactctcccaatttggctatgccattgtgagggcaggggatgtggtcgaaattggagttactgctagcgattccgaatttgttgatcagcgcttcgacaaagcgattggtagaaagacagtccgtctcggtgatgttgtaataacgacaaaaggaacggtagggcgtgtagcggaagtttcgaaggtcccaaacgcaggacttgcggtttacagccctcaagtttgttatttgcgttcgcttcaaccgtcgattcttcaccaacgctatttgaagtaccttctcatgtcgcctgccacgaaatactcgatttcgacatttgcttcgagctccgacatggcaccatatttgagcttgagcgacttcaagtccatggtcgttgatctgccttcattggaagaccagcgcgcaatcgccgatgtcctcggcgccttggatgacaagattgcggagaaccagcgggttattcagctgtctgagcagttggcaatgaccttttaccgaagcacggaaaaatcggaatcgtcgctgactttcgctgatgttgccggaatttacggtggcggaacgccatccacaaagaatcctgatttttgggatggcgaaatcaggtgggcgactccaacagatatcacagcattaaaaggtccttggttatgcggaactgcacgttcaattactgaggagggattatcgaaaagctcaggttcgctccatcctgaaggttcaatcttgatgacttcgcgagcaacggttgggcatgtggcattcattgatgctcctactacaaccaaccaaggcttcatcaacctcgtgcctcaagaggcttatagatattggctgtacttccaactgaaacagagaacttctgagtttatcgcctgggcaaacggtgcgacattcttggagctttcacgtggaacttttaagaagcttccatttcaagcatgcgctgaaactgagttggaaaagttcaactcggtggttgctcctttaatgaaacgtgtgctcaaagcacagaaagaaaaccaagtcctcgccgctacccgtgacgagctattgccgctgctcatgaacgggaagatcaccgttgccgaggcgaaggaagcggccggggacgtgggcgtcgtaaagcaaaaccagcaggaggaaggagacagcagtgtt

SEQ ID NO: 17985 - DNA, 228 bp, Cornyebacterium diptheriae
atggctaacggtacccccgcacacgagcttcgcgagctgaacgccgaggagcttaagacccgtctgaccgaggctaaggaagagctgttcaacctgcgattccaggccgcaaccggtcagctgaccaacaatcgccgccttcgcacggtcaagcgcgacatcgcccgcatctacacggttattcgcgagcgtgagctgggcctctcagaggttccgggagctgaggct

SEQ ID NO: 17986 - DNA, 261 bp, Cornyebacterium diptheriae
atgtgggcggctaggagaaagaaacctatgtcggctatttgccaggttacgggacgccagccgggttacggcaagtctgtctcgcactcgcaccgacgcacgtctcgccgttggaaccccaacgtgcagcgtcgtaagttctacctgccctctgagggccgtaccatcaccctgaacgtatccaccaagggcctgaaagtcattgaccgcgacggcatcgagtccgttgtggctaagattcgcgcacgtggggagaagatc

SEQ ID NO: 17987 - DNA, 762 bp, Cornyebacterium diptheriae
atgaccaatagccccaccgacgctcaactaacagcagcacggaattttctccacgccctagaagctgacgatccccgaaatgccgttgttgtatcggaaggaatcgacgattctttccaacacacactttctagtatcgctgcgatggtgaatatgcgtgatccgcgcgcggcttctcaagaactccaaaaggcccaatcagctttcctcaaagccaccacgcctgcggctacagtcgtggtaggagacatcacagagttaccattttcggcaatggtggtgccggctactcaaacgttgattgggccgacgtcgccgtcgataagcgatctcgcggcccgaatccatcaacgcgctggtttcggtcttcgccttgaatgcgcacgactgctcaaagaatcccacgagcacatagaggtaggatctgcgtacgttacaagcggttttttacttcccacaccatggattattcacattgtgaccccacagcttaatttggcagcgcgaggcgaaagtatcgaattattacgtcagtgtttccaaaatatttttgccaccgctgcgggaagggattggaaggaattgacgattccttcccaactaacaggaccgttagggttccccgcgggaatggaggcccaaatcctcagcgaggagctagcagccgccaggaaaacaggattctcggcgcatgtggttatcgtatgtgactcggaaaccgcagccggagcgtatcgacgcaccttcgcaccagtaacggat

SEQ ID NO: 17988 - DNA, 969 bp, Cornyebacterium diptheriae
actccgtctttgtccggacgatcgcaccactgcgcagcctcccgcaacaccaccaccggtgccgagaccaccgcaacacgatgccccgcacgcgccaacgcgcctgcctccgacgcatcagcagcacacaccaacacctcatcccagacatcccccacacacgtctgcacagccgcctcaacagaagcctcaggcgaaacaatcacacaacgatccggctccccaggcaatggaacaacccgcactacctgcgataattcctgccacaggtctggatcagcccccaatccagaaacaacaccatggtgagcgcctttccattccacatcaaggcccaagctatccacacactcttgcacggcagcgcgaagctcatcggaaaccacacactcatgcaacacagagacatccgtatcactcaccgtggcggccaccgcaccagcgctagcactgacacagacatccgcacccgactcctgtgccacctgacgtgcaagcgccaccacccgatccattccactgatcgtggtcagcaccaccgtgtgctgctgagataacgccgccacctgagacaacaccgacggcgacagcgtgacctcaggatacgcagccaccgcaccatcgacgctgagcaccaacacgcgtggcaactcaacctttggtgcgtccttacgctgcggcaaccgatccaacaacatgctgacctgggccgtcgcctgcaccaccacaggattaacctgactagcagtcaccgcctgcccatacagatcagcaacactacgacgcagctgctcaccggcatccatcacacggtctttaccttccttcgcgctagagacaacctcctcaacgaactcgtcgacagtgtccttcaacaccgacaacgccttacccgcatccgccttcgcgggcacctccccatgcaacacgtcttccacacggtgtcgagcagcgtcgacagcactcgcg

SEQ ID NO: 17989 - DNA, 426 bp, Cornyebacterium diptheriae
ttggccattattgactccgaggttaaccgacagttatcagaccacatccgttctgccacgtccttgaataaccgggcagcactgctcgttacctcttcattgattttcgtatcgattcctaaaaatggggatggaaatagctgttggtacggactggctctgatttttggcgtgattgcagcaattctcggagcgatagcgcttttctttcgttcaaaggggcaagagttaaaactttccagccttgaggcgcaacttgtgggaaagactgaaattgaggctatgagagcgttgactgaatcgaagcgtattaccttgagtcaaggtagggcgcagatacaaggaatatcgaagttcgtgatttggggtttcgtttctttggttgtgtctttaatgtgtacggtagcctattctttggttggaggt

SEQ ID NO: 17990 - DNA, 207 bp, Cornyebacterium diptheriae
atgagtgattttgagaacaagatcgaagaattgggcggcaaagcaaaagaggcagtaggagaggctactgagaacgagcagcttgccgacgaaggtcgcgccgatcaaactaaagccgatgttaagcaggctgttagcgatgccggcgataagatcaagggcgctgcagataaggtccttggatctttccaaaaagatgaagagaac

SEQ ID NO: 17991 - DNA, 723 bp, Cornyebacterium diptheriae
atgggctctacaaaatctcgaccactgcgcgatgctaatgggacaccgaaatttcgacacgaatccattgcctgcgtgttccgagtccatccccaacaaggcgtggatgttctaactgttatccgatcgcgaccgccgtatgccgatatgtcagctctgccaagtggtgctttagaaactaatgagatgttaaaagatgcatgcttaaggcatctatctcttagcggcgtgcacccgagcatggtcagtcacattgagcagctagatacccgaagtgctatagacagagacccctacgaccgcaccattgcaacggcgcatctctgtcttatcccttgggatattgatccatctgttactaacggtagctttaccccccttgttgatctggatgagctagcctttgaccacaaaaatattatcgaacaaggtctatatcgtttaagggcaaagctatcttattccaatattggttttgccttggcacctcgtttatttaccatttcagatttagctaaaacatatagtcacgtccttacctacaatgtttctcccaccaatcttcaacgaatacttacacggcgcaatcaactgcagccgaccaccgcgcgagcaataggcagcggtcggccagctcgactttttacttttactaccgatcgccttgaaataaccgatccatttgcaaccctcaagcctaccgaatctcggaagtgcaaatcc

SEQ ID NO: 17992 - DNA, 480 bp, Cornyebacterium diptheriae
atgcatccacgcagtaaactcagtcaggctcagcgtgagctggcagtcgacctattcgaggaaggctacggctcgcgggcggtggctaaccgcctaggtgtcaggcgtgagcaagtacgtcatctcgaagaccggttccggttacatggcagactatgtctggtgagcaaacgaacgaagaggcagtactccttcgacacgaagatggagatccttcgccgccataaagctggcgaattgaaatccgatcttgccaaggaatatggcttgtcgtcgcctgccctgattaaccattgggtatggcaggtcaataaaggtggccctgatgctttacggccgaaacccaaaggcaggcctaaaagctcagctcggcctgcaccggtgacggaagaagataagctgcggcgtgaaaatgagctgctcaaggcggaagtggcgtacctaaaaaaattgagggacttgagggatcaacgacgaggc

SEQ ID NO: 17993 - DNA, 342 bp, Cornyebacterium diptheriae
atgcggcgggatgttggtggccataccgacggcaataccgttggagccgttcatcagcaggttaggaacgcgcgatggcaatacgtctggttcttgggtcttgccgtcgtagttcggggagaagtccacggtgttctcgcgaatgtcgcgaaccatctccatagccaatggggtcaggcgacactcggtgtaacgcatagctgcggggccgtcgttgccgcgggagccgaagttaccctggccgtcgaccatggggtaccgcatgttccagtcttgggcgaggcgcaccaaggtgtcgtaaattgcggagtcgccgtgggggtggaactggcccatggtgtc

SEQ ID NO: 17994 - DNA, 360 bp, Cornyebacterium diptheriae
atgagtgaagcaatcacctccgcacgcgcaaccgcgcgcttcgtccgtgtctccccaatgaaggcacgtcgcgtgatcgatttggtccgcggcaagtccgttgaggaagcactcgcaattctgaagtacgccccacaggcagcttccgagccagtagcaaaggttgtagcttccgctgcagctaacgccgaaaacaacttcggcttggatcgccgctccctggttgtctccgaggcattcgccgacgagggcccaaccatgcgtcgtttcagtccacgcgctcagggtcgtgctttccagatccgcaagcgcaccagccacatcaccatcgtggttgagagccagaaggaaggggccaag

SEQ ID NO: 17995 - DNA, 285 bp, Cornyebacterium diptheriae
ttggcatctttgcaagatcaactactgaagttgcaatccgatcagccctcttcaaattctcaagaggaagcgaccgctttttcgcgggtatgtgcggtgctcaaacgcgtaggtcttgatcccgaaaagatgactcccgataccgttttagaagatgctggggtcgattctttggatcgtattgagatcacagttcgccttgagcaagaaagcggcatcgagcttcacgacgccgacgtgtttccggctcgtacggtgcatgacttgatgcaattgattgatcaa

SEQ ID NO: 17996 - DNA, 1455 bp, Cornyebacterium diptheriae
atgccttacgcctacatcatggaactcacgaaacactggatcatcgcgcatggatttgcgctggccatcctcgtgatcataggttttctgattccccgtatcggccgccgcatcatcaacgacatgagccacgccatcgacgaagacaccgaagcatccaaaggacgcaaagccatcatcggagccatcgtctacatcgcagaagccattgcttatgcagcgctcatcatcacggccatgcacaacctcggcatcaatctcgcggccgccgcaatccccgccaccgtcgtatccgccgccgttggcttcggatcccaaaaaatcatcggagaccttctcggtggattcttcatcatcaccgaaaagcaatacggtgtcggcgactgggtgaaattcttcggctccgcagccaccgtcgaaggcgacgtggtcaagatgaccctccgcgccacaacaatccgcaccattaacggcgacgaaatcaccgtccccaacggcgaagcccgcatgtgcgtcaactcctcagcccgctgggcccgcgcagtcatctccatccccgtgcccatcaccgccggcagctccatggccgaaatcaaaacgcgcacactcgccgccgcacaacacgcaatcaacgacccagagctctcaccccacatccgcagcgacatcacattccaagccgccaccgacgtcatcccgcccacagccatgggcctaccatggaccgccaccatgcgcctgcttatcgacgtcgcccccggcaaacaatggctcatcgaacgaggcgtccgcgccgcagtcatcgacgaatggtggaaagactacggagaaaaagccagctccgcagtggtgttgtcggaaggaatcgacgattccttccgacaattctccttagatacgcacacgccaccagttttggacgaagagactcactccactaacccacctgccgatcctgatccagaaaccgctcgggcgcttactcacgcagccgaaactatcgacctacctcgtacagaagtaatgcgagaaatccaagaacaaagcgaagaggacgctccgccccagcgctctcatgggttattgtccttcggcggccgtgtgcgaccgtcgacaagcatcttgatcatctgcctgctcggttttctagcactcggatctatgaccttatccggtggtgaaaacaacaaagctggatggttggctcccacgcagacgccaatccctactgtgcctgcgactccgatgaggacggaatcgtcgattccttccgaaagtgtggagccttccacgccttccatgccttccagctccgccgaaagcaccatgcctttgcctagtagcagcccgagttcgactccttcggaaacaacactagaaacaccaacgactatcgacgagcccactgtggaatcgagttcgtcaccatcagcttccgaaagtactactgcgcct

SEQ ID NO: 17997 - DNA, 480 bp, Cornyebacterium diptheriae
atgcatccacgcagtaaactcagtcaggctcagcgtgagctggcagtcgacctattcgaggaaggctacggctcgcgggcggtggctaaccgcctaggtgtcaggcgtgagcaagtacgtcatctcgaagaccggttccggttacatggcagactatgtctggtgagcaaacgaacgaagaggcagtactccttcgacacgaagatggagatccttcgccgccataaagctggcgaattgaaatccgatcttgccaaggaatatggcttgtcgtcgcctgccctgattaaccattgggtatggcaggtcaataaaggtggccctgatgctttacggccgaaacccaaaggcaggcctaaaagctcagctcggcctgcaccggtgacggaagaagataagctgcggcgtgaaaatgagcttcttaaggcggaagtggcgtacctaaaaaaattgagggacttgagggatcaacgacgaggc

SEQ ID NO: 17998 - DNA, 564 bp, Cornyebacterium diptheriae
ttggcagatctcctcgcggcggcagatatgccgcgggcgacattcttctaccatcaaacccgactcgataagccggataaacatgctgcggtaaagcacgcaatcctagaaagtttcgaagccaacaagcatcgctacggctaccggcgagtgttgctggacttgcgcaacaagggctgggtggtcaaccacaaactcgtctacaagctcatgcaccagatgggtcttcgggctaaaatccgtcagcgcaggccctataattcctacacaggaactatcagtcgcattgctgacaataagcttgcccgtaaattcactccagacaagcccaacaccgtctttgtcagcgacgttaccgaattgagggttgcaggccgcaaaagtgtatttatcaccggtaatggatctcttcgaccgctgtattgtcgctcacaccgtggctacatcaccgtcgatagcatttaccgccgattccctcacaaaggcgattgcagcctgtgcgccgaagtctggatggatgatgcacaccgatcaaggcttccagtaccagcattcaacctggcg

SEQ ID NO: 17999 - DNA, 198 bp, Cornyebacterium diptheriae
gtgttgatctttgatccgctgagccaagagcagctcacacacattgtggagattcagattgcgcagctggcacagcgtcttgccgctcgttgtttgatccagcaggctaagaagctgttgcctggtgagattcgcgatggtagcgaggttcatgtggacgttgccgatggcggcgaaaacttagatattagtgccagc

SEQ ID NO: 18000 - DNA, 3246 bp, Cornyebacterium diptheriae
gtgaagatggttgattcgcgtttttatgaaccccttgggttcagacgctccccaatccgcaggctgatcaccctgctaatggtggtcgttgtttgcgtaggtctagtggtttcccctcgtgttccttctgctggtgcggcagagtgtaagggggagattagtaatgtgcagtggaagaacgacacaaatatcaaagatggagtatttgttggtagctatgggcagggggcagacgttcagttcgactggaaagttgatccaggcgcgaaagctggcgatcaattcactttgaaactccctaacgagctttctcgattggggaataaagatctaacgcttactgctcctagtggagaagaagtagccaagggaacgtgggatgacgtagcaaaaacgtggacttttacgctcactgattatgcgaatagtcatggtgatatttcaggtagtgcttttttcacagttcagtgggatagatcagttgcacaatcaaatacccagtatccattaactttttcaggatgtaaaggggccggaacccttaatggaaaaacgcctgaagaaggtgtagggggtactgctcaagcaacatcaaagacgggcctctatgactccaaaactgattctgcacgatggaacatctatgtcgaaacagcggatactgatatctatacccccgttgttgtcaaagatattggaaatacccagctgctgtttaggtgttctgatgtcaaggtttttgatcgcaccccttaccctcatacgaagatccgcgatacacccattgatccaaatcgatggaagtgcgaggaaaaagatggcggaataattgtcagcatggtgcctgatgagcacggaaggtatctgacagctggacaatcgctgaccatcgggtttgagacacctatcaatgatgatacttctcgctttattacgaataaggcgattgttgaaatcagtcctaataaaatcgagaatgtggaatactcggtagaccgcggcgacgctggtggggtgggccaaggtttccaaggcaagatcaagattcaaaaggaagtagtcggggaaactgcacctgtacagggaaacaaatttgatttcgagtataaatgtggtgaaacaacgcagaatatttccgttgctgccggacaaacctcggatatctttacccaacgctcttcttctacatgctctattaccgaaaagaacgttgctgaaggcgttacagtcgactttgaagtaatagatgaagaaacgggtaaaccagcctacgttgttccgatcgacaatggcgtaacggtaaagttcaacaagaacagttccacgacgctaaacgtaaaggtcacaaacacctaccccaataagccagaagctaagaagggcaagtttgttatcaagaagacggttaacggccttgatgctggccagaaagataaagccttcaagttcaattacacctgtaaagcgccagatggtgatgcctacacggagcctcagctagcagaggtaactgcaggaagaacctggcaatcgggaaactatcctgagggaacaatctgtacgatagaggaagaccttgagagtgcaaaggttcctggttactcactgatttctgcccaacctaagggagatgtcacgatcaaagccgagggcactgaaggctccccagtagagttcgctgcaaccaactcttataccaaggatcttggtagcttctccgtccagaagaagatcgaggcatcggctgaggcaatgccgctgctcaaagatcaagaatttggctttaagtacacctgtggagctgacaaaggcgagtttaagctcaaaaacggcgaaacaaagaaggttgaaaggattgctactggcacaaaatgcaccgtcgaggagtcggatgccaaggtgccaaacggctttatgtggactgggaagatcgagggcacagatcttgatcctaacgacttcacgattgtgaaggataaaaccctagcctttactgccaccaacacctataagcaacagtatggtggcttcacactgtccaagaacgttaccggtgacgcaaccaacctagaagaattgcagaagcgttcttacacgtttaactacacctgcaccgcaccaactggcactgtcctaaaagacaaggttgagatcactgaggaaaccccgaaggcaatcggcaacattccagcagcctctacctgtaaggtcacggaagtcgaggcccctgctaaagacactgactggactgttgacttaagcgttaatggaacgtgggtaggagaaaccgcggagtttaaggttcctgctgaaggtgagccgtcgataagcattcttgcaaagaacaactaccgccagcacaagggaagcttcacgattgaaaagattgtggatgcatcggaaggtatcgtcacgccgaaggaatttacgttcacgtggcagtgcggcgaggataaaggagctgagaccgtccgggttaccaatggcaagggccgtgtagaaattgaccgcgcattcccagtgggcaccaaatgttcagtgaaagagctggaggccgaggctgaagacgcaaggctcattacaagctgggaaaaccaggaattcacgatcgacaaagataagcaacacgtgattgtttctgcgacgaatacctacaggtacgcagaaagcaaggtcaagattgtgaagaagcttgaaggtccggcaaaggataaggcaaaagacaagacctttactttcgattacagctgcgttgttaataacgaggctattgaaggttctgtgaacatcactggtgagggtgcaactgagattcctgagtccttccctgcaggtaccaagtgcaccattactgagcgggatgcaagtatctctggaaccacgtggacacatcggattgcagaggatggtcagatcaccattcagagtccggctaaggtgtatcaagtcggtgtaaccaatgcttactccaagcctggtttcccttggttcatcccgctgattccgcttgtgatcattccgttcctaccgttgttcccgcatccaactcctgcaccgcagccagctccacagccgacaccgcagaaaccgtcggaacagcagccttcccccaaggctcctgaaaagaagccacagaaggagaagaaggttctggcacgcactggcgctaacgtatggatgtttattgttatcgctgtactccttgtgctgttgggagcattcctccgcaggcgcggtaacaactca

SEQ ID NO: 18001 - DNA, 903 bp, Cornyebacterium diptheriae
atggctggtgatgttgtgcttgctccgcacggtgcttttgttactggccatggagtggttttgccgatggcttttcctgattttgatggaggggagcacactcgtcgcctgcatatggggactgcgtggtcgaagcgaatgatttttgagttttcgcgcagtctattaggtgagacgcgcccatcggaatgcattgcagcgcttttcgacgatcgcgcgcggccgccacgggttcctgaaccgcaggcagcacggaaggttgctcagaagctgattgcttatccggcggatcaaacacctttgttggaatttgctcagcttcacaacattagtagcaggacattgcagcgtcagttcgtcgcgtcgactggttttacgtttagtgaatggcgtgcagcattgcgtgtgtctgtggcggctgatttattggctcatgatttccggatcggtcaggtttcacagatggtgggctttagtgcgacgtcgtcacttacgcgcgcatttaagcgtcatactggtgatactccttcttcttttacctcgccgcgtatgcatgctgtgtgcgagcagcagccgccgatgattccagcaactacaacgtttgcgcgggcttcggacgacattgctttgtggatttatagtggaacggcgactgttaccacccctggttattgccgatttatgggtgcgggggagactgtcactattccctctggtacaagtacgcgtctcgacgtttctgctggttctgtagcattgccagtcccgcttgctgcggctcatgacgacttaacgctgagcgatgttctagctgcttctgttaatccacttgctgcggtggaattgcaacgattgagcgcccaagaacgcgcggatgttgagcaggtgttggttccttctgtg

SEQ ID NO: 18002 - DNA, 588 bp, Cornyebacterium diptheriae
gtggctggtgcgcttgcggatctggaaagcacgaccctgagcgcgtggactgaaacgacgcatggttgggccctcgtcggcgaatgcctcggagacaaccagggagcggcgatccaagccgaagttgttttcggcgttagctgcagcggaagctacaacctttgctactggctcggaagctgcctgtggggcgtacttcagaattgcgagtgcttcctcaacggacttgccgcggaccaaatcgatcacgcgacgtgccttcattggggagacacggacgaagcgcgcggttgcgcgtgcggaggtgattgcttcactcatcgcttatcgacgtcccttcttgtcgtccttgatgtgacccttgaaggtcttggttggagcaaactcaccaagcttgtggccgaccatggagtcgtccacgaacactggaacgtgcttgcgaccgtcgtgaacggcgaaggtgtgtccaatgaagtctgggagaatggtggaacggcgggaccaggtcttgatgacctgcttggtgcccttttcgttctgagcgtcgaccttgttgaggaggtgctcatcgacgaacgggcccttctt

SEQ ID NO: 18003 - DNA, 1395 bp, Cornyebacterium diptheriae
atgagccgaaaaattgtccgacgagccctcgcaggagccctgtttttcgtgccgctcattgccggcaccgtctacgccacaacacaagacgtagaccccgcggccacctggtccgcagcacaagaaacccaacaaggagcccccgcagtccaagaggacccctcactcgtcgacatccggcgcgcagccggcgaagcaggctcccaagccagcctcctaaaaaacggcaccacccagcttgtcgacggcaccaccgccctcaacaacggcgcagcccaactcggcgacggtaccaaagccgcccaaaacggcgcagcccaactcgccgacggcatggtcaaactccaagcagccaccggacaaatgggcaacggcgccaccgaaatcgccaacggcatcgaccaagcagtcggacaattccaaaacgtcgaagtcatccgcggacaactactcaccgccatcaacctcgccatgagcgaccccaaactcgccgacgtcaaacccgacctcgaagacttcaaacgccaagtagaaaccttcaaagtcgacgacaacatcaccagccaaatggacaagcttcgcgacggctcccgcgaactcgccaaccaactagcagtaccaggctacagcttccacgacggaatctactccgccaccaaaggctcaaaagacctctcagcaggactcaacgacctctccggcggcgtagaccaagcactgaccggtgtccgcgacctcgacaacggcgccaaaaaaatcgacgccatggccaaagaaaaccaaacccgcgtaggcaacatccaacgcgcactccccatcaccaaagccggcacccccgaagcacaagaacaaggcgtcacccgcacacttgcaccactgtacgcattcctgatcgcagcaggactcatgctcgcagccaccgcctaccttcgcgaccgcatctggggaaccatcgcctttatcaccctcacacttctcggcggaggactggtctacctactaggaaccgaaatcaccgcaggggtagcagccgcagccgccggtgtcagtgccctcgccgttgctggagcagcactgctcggcacccttttgaccagcatcttcggggagcgcaccggccgtggcctcagcgcccttgtgaccattgcccaagtcgcagtcgttggtttcgtatggaactccgccgccaactccgccttgagcagcgccgcaaaagcactggtcaacttcatgccgctgcactatcccaccttggcgctcagctccatcggtaacgctggcgataccacgaccacagcactcggcgtgggcgtgaccgcagcctgcgcagtgtgtgcggcggccggcgtgatgattctgcgcaaaaaagaggagcaaacgctgccaacggcggag

SEQ ID NO: 18004 - DNA, 1221 bp, Cornyebacterium diptheriae
gtgccaaaactttttgaggctcgcagcgtttccgcaggtcggagatataagaaaagatgcaatttggcacgaactactcactcgcaatcatcacggcagttattacacaatcctcgtagtgccctagactgtgttcacatgagcttttccccagaactgcctgactttatgcagggcctcggcgtgtccgtccatgccatgaccaacgccgatgtccccgcgcacacggactccgttttacgtaacctgaatcgttttgagcagcactttaccgccgacgatcttgctgtagtgccgttgtcggagtacaccttttttaacgaggggcgtggcgatattggcatcgtggtacaagatgcctctggtgccgtcgtgggtaccatgtgcgtgcagtttattaaaggactggcctacctcaaccccgctgtgcctgagatgacgcttcgtttggatgaagcgtggcgcgggaaggggatcggtggctggttgattgagcaggcaaccgagtatggtcgtttgaacggttggcctggtattgcggtgaatgtggaaaagcagtcgccagctcgtcgcctttatgcgcgccatgatttcgctgctcaggaccgtgaggttgaatatggtgctatcatgctgaagaccttgagtccgaagattcgtagtgttgctgtgtattgtggctctgctgtgggggagcgacctgagtatgcgcaggcggcgcgtgagttgggtactgcgttggcgcagcgcggtatcaccatggtttatggtggcggcaggccaggtctgatgggtattgctgccgacgctgccatcgctgcgggtggcaaggtgcatggtgtgatgccgcatgcgcttgttgatctagagcaggcgcatcctggtttgagtgcgcttgatattactgacacgatggcgcagcgtaagacgcgcatggaagagcttgccgacgcctttgtggttctgccaggtggtatgggcactatggaggagatgttccaggtgttggtgcgtcagcagctagggccgtatgcggggccggtggcgttgatgaatattgaggagttctgggatccgtttattgctgcattgcgcacaatgagtgaagagggctttatttcagagcgttatattgatgcgctggtgatggcgaaagattctgaggagcttttccaaggcttcagctcgtgggtgaaccctggtctgaagtggctgtccgac

SEQ ID NO: 18005 - DNA, 276 bp, Cornyebacterium diptheriae
atgagtgaggcaaacgtgaacaaaaaggaaaagggcgcacgcaaggtccgcaccggctacgtggtttctgacaagatgcagaaaaccatcgtcgtcgaactcgaggaccgcaagtcccacgcaaagtacggcaagaccattcgtaccaactcgaaggtcaaggctcacgatgagaaggaaatcgccggcatcggtgacctcgttcgcatcgaagagacccgcccactgtctaaggacaagcacttccgtctcgtcgagatcgtggagaaggcaaag

SEQ ID NO: 18006 - DNA, 714 bp, Cornyebacterium diptheriae
atgcagcagacgcagcgcacaaccggtggtaagcatcgcaagcaagcatcaccagttaaaggccgcgttgccgtcgtcgctttggctacaggcgcagtttcgagcgcaggcgctaccggcgcttcccttgctcacgctacgcacgacaattccactgtaaaaatcaaccttgcgtcggattccaccacgcagaccaataacgattcccctcaggttctttccatcgcagagtttaaacctgcggcttctgacctgaaccagcagctttccaaagcaatccattacagccaagtggttgctgaaaaagatctcgaggctcgtactcctaaaatcagcgtccatacccctgcaaaaggcactctgacttcgccattcggtatgcgttggggcacactgcactctggtgtggacatcgctaatgcaatgaacaccccgatttattccgtgatggacggtgtagtaatcgattcgggcccagcatccggctacggccaatggattcgtgtccgtcacgaggacggcaccatcaccgtgtatgggcatatggagacgctcaacgttgctgtcggtgaaacggtcactgctggccagcagatcgcaggaatgggcactcgtggtttctctactggcgttcacctccactttgaggttcatccaggcggtggcgatgccgtagatccacagtcttggcttgctgagcacggcatctttatc

SEQ ID NO: 18007 - DNA, 120 bp, Cornyebacterium diptheriae
atgaaggtccgtaagtcccttcggtcgctgaagaacaagccgggcgctcaggttgtgcgtcgtcgcggcaaggtctatgtgatcaacaagaaagacccacgtttcaaggctcgtcagggc

SEQ ID NO: 18008 - DNA, 882 bp, Cornyebacterium diptheriae
atgacacacgcactcggtgtcgacatcggcggcactaaaatcgcagtcggaatcgtagacagcacggaccccaccaccgtaatcagccgacacatcgtccccacacccgaccacgacgtgattgaccgcgtacgcgacgcgatcgcccacatcatcaccccagaagtaaccagcattggcatcggcgcgccgggcgtgatcgacgaaaccacaggagtagttgtctcctccggtcccaccatgcaaggctgggctggcacacgcattgcggatactatcgccgcggaattttcgctacccgtcgccgtgcataacgacgtccgcgtcatggggctcggcgaatccatctacggcgccggacgcgactacaccaacgtactctttgtcagccttgggacaggtgtcggcggcgccattgttcgcgacggacgcctcgtagcatccccgcaccacactgcaggcgaacttcgggcactcatcggcaggcttcccgacggccgcgcagacctcctagaaaatttcgccgcaggacccggcttggcacaaagattcggtgaacgctaccccgaacacgcaggccgtgacctgcgattcatcatggagctctaccatgcaggagacacccacgcccgcgactacatcaccgcaacacttgcagcagcaggcgaaaccatcgcaggattcgccagcgccatcgacgtagacgccatcatcatcggtggcggagtaggcaacatcggcgacgccatcatcaaaccatttgcccacggattcgcagcccacgccattccaccgctggacacgatccccatccggcaagcacaacttggcaccgacgcaccgatcgtcggcgcagcacaccttggccacagcgccatcgaa

SEQ ID NO: 18009 - DNA, 588 bp, Cornyebacterium diptheriae
atggacataagcaacggcctccccctcatcgtgatcgccgcccccgaagaagcaggcggcatgcccgccagtattcctaccttgatcaccggcattggaacgctcaacgccgccatcaccctgaccaggtcgcttgccgacgcccacttccgtggccaccgccccagccgcattatcaatgccggtaccgccggtagcctgatccccagctgctccggaatcttcgagatcgaccacgtgatcaaacacgactttgatcatgaaacgctcaccgcgattaccggtcgcccttttgctaaccgcattgatctgcccactgtaacctctttgcccacagcgggccttgctactggcgatacctttatttctgacaccgccacccgcgatcgcctagcccagcaggcccaactatgcgatatggaagggtatgccgttgtaaaagtggcgcgggaattcgggatccccgtcaccttaattaagcaggtcagcgatcatgctgatgaatccgcagccgccaagtggcacgacgccgcacgtggcggggccgccacactaggggaatgcgtagcccagattgtggacctgagc

SEQ ID NO: 18010 - DNA, 480 bp, Cornyebacterium diptheriae
atgcatccacgcagtaaactcagtcaggctcagcgtgagctggcagtcgacctattcgaggaaggctacggctcgcgggcggtggctaaccgcctaggtgtcaggcgtgagcaagtacgtcatctcgaagaccggttccggttacatggcagactatgtctggtgagcaaacctacgaagaagcagtattccttcgacacgaagatggagatcctgcgccgttatcggactggtgaattgaaatccgatcttgccaaggaatatggcttgtcgtcgcccaacttgatctctcattgggtgtggcaggtcaataagggcggttctgatgcattgcagccgaaacccaaaggcaggcctaaaggctcaggccagagtgtgccaatgactgaagaagatacgctgcggcgcgaaaatgagctgctcaaggcggaagtggcgtacctaaaaaaattgcgggacttgagggaacaacgacgaggc

SEQ ID NO: 18011 - DNA, 198 bp, Cornyebacterium diptheriae
atgaacgcattagccacaatcgcacgatggattacagcccctgtgaggtattggggtgaggtccttggcgaaaaagactacgaaaaatatgtagcccacctcaagcgccatcaccctggctgcccgatccccaccgaacgtgaatactggcacaaacggtgggcggatcaggaaaccaatcctggatcgcgctgctgc

SEQ ID NO: 18012 - DNA, 162 bp, Cornyebacterium diptheriae
atggcacgtaacgatatccgcccaatcatcaagctcaagtctacggctggcaccggttacacctacgtcacccgtaagaacaagcgcaacaacccagaccgtatttctttgaagaagtacgatccggtagtccgcaagcacgtcgaattccgcgaggagcgt

SEQ ID NO: 18013 - DNA, 303 bp, Cornyebacterium diptheriae
atggctaagatcgcagacccccgtgacatcattctcgccccggtcgtctctgagaagtcttatggcctgatggagcagaacacctacgcgttcttcgtcgctccaactgctaacaagacagagatcaagatcgccatcgagcagatcttcggcgttaaggttgactccgttaacaccgctaaccgtgcaggcaagcgcaagcgctcccgcaccggttacggcgttcgtaaggcaaccaagcgcgcctacgtgacgcttcgagagggcagcgacgctatcgacatcttcggcggaaacgccgcg

SEQ ID NO: 18014 - DNA, 3174 bp, Cornyebacterium diptheriae
ttggctattacatctacagccatcactaccccagttgacgcgacccctataaccagcacaaatatcgatactgtagtcgaagatgccgccgaaaatcccccactggaccaagagtccgcagcactgccaacagaagtaaccgatgataacctccagcacgttaagctaattattacaaataatatgattagtgctggattcgcaaccattgaacgcaaaaatggcgaatcagaattctatggacacgatcaggtcttgatcgatggcacggaagtgtcagactcctcggtttattctgcgcccgccaccgaaaatcaaggtgatctcatcactattaacttcgctggactttcaattcagtcagggcaaaccatttccttctcctataggtcatccgctaccagccaaaatgacacatggttaccatcagaagccaatgccttcaaatatttagccgcccctgccgaatcggctatcgccaataccgatgaacgcgaagcccagagttttcttcaaggaaattttgagctatctatgtcagtttctcctgcgttggttcaagttgggcaacccgtaacatacacatatacatttaaaaacacgtcgtctgagtatcgtcttttttggtctaattatgccgatggcgctaaaggcgtaatcgaagatcgtctcaatttaaacgatgatgttaaatgcaaatgggatgaaggcaatggttggctcaaaagcaaaacaggtcagcgctatattgataccaatagtgaagcgaccttttcctgtgtgcgcacatttgaacatgtaggaaattacaccaattccgtaaatatcaaagaagcaaagcaaagaactggcccgctcaatggtcaaattggtttgacgttagcacctacaacgattgatgatgcactttccgtcaaagtagttaacgtggtcaattcgcaaacggatccccaatggtctttgactatcagttcttcaaaattttatgtggaccctagcggagaagatgtaacgtacacctataccgtcacaaatttgagtaacgataagatttactatgaggctctcaaacacgatgtctgctctcctataaagattgagaatagccttcagttcgatccggaaaacagaaaatattatattccacaaaatggaacagctacttgggaatgcgccacacgaatcaatcacgaaactacaggtcttgtcagcggcacttttagtgacaataaaggaaatagaagtaccgtaaaagcttctacccagacgaaagttaaaacccctactttgtctaatgggacatcctatggaatccctcggtgcgatgttattgacttcaccacagttaacaaaagcaccggaattggaacacttggctctatagagcaacaaaatggacagtttaaaaagattgaacagtcaaatatttttccagaaaaaggatctccagcacatcacgaccagagaattaaaaataaaggacgcatgacgactgcctctgctacgtcagcacagcacccagagtatgtttactatgccgccttggccctaggagacagcatcagtattagttccgatgccaatatgggtatctatcgcatccataaaatatctggaacagtagaaaaaatcacagctccgcatttttctcaatcagctctgcaaaacaatcagcgattcggcgctacattaacgaaccgactcgcattcgacgctactggaaaactgtggtcttttgcacaggacgggcatctttattcactgccgatggatggcgatggaaaagctgccggagaatggtttgaccatggtgccgttgctggagaagcaatcaatggagaaggcaacgcagtgggttttgaatccttggttttcggcgacattgcttttgatggcaacggtgccatgtggattcttgggtccataagaggattaactaaagaggatacgaacgggcgcgtcatcaaagatgaagttgacccgacaacttacctgttcacactaaaacccccacgggacaatacgccgatcacggaaaaggtacagattgtccaaaaaattacaggcgtaggaacctcaatcgatcaaaaaggtttttttggtcttgcttttggtgtcgacggaaccttgtatggctcttacgacaccagcggtgacgggataagtgattctccaggtgagctgtattcgtttaatctgcgggatggaaaagtcaccaaagtattttcttctccgcttatggcacgtgttcaagatctaagttcctgtgcgtttccagccccacgtatatctgcagaaaaaactgcagcacatgaagtggataaggatacgattacatacaccatcacagtgcgtaactcaggaaaccttgaggcgacgggcacaaagttcaccgataatcttccaggatcttacgtacctaattctgccaagctcaatggaaaaccgattccggatttgcctgtgaacagtacaaaccccaccggaaatcctttccacgatggtctgtacattaaatctcctgacgcagcccctggaacaattgatccgcagtcagaagcagtgattgagatgactatcaacaagttaaattcaacgaacgatggtcgagtttgcaatcaggctgagattaatgcggtcgggcaacaagtaaaaactgatgaccccacattgccaggacacgaggatccaacatgcgtttccgtacccatttctttaaaaatgagcctcaagaaggccatctatgatcccagtgcgcagtctccaaaaatcctcgacaaccttggtggtgcaaaatttgctatttacgcacgcaccgatacaggcgacttaggagaactacgaaaagaagtatcagatgaagaaccttttgaaatttcaccaggaacatatttgctagttgaaacgcaatctcctgctggtttgtcactgctaccaaagccagtggaattcacaatcacaaaaagctcaagcggctttgatgtgaaatccaatagtccactcacggtgtcatttaccaagacggacggcataatcgtagccactgtcagcgatgtcaaaaatggcacccttcctaaaacaggttctaccggattcttacctttcgttttcgtcggattatccatcatcgttctcactgcgctatgggttcaacgacgatcacagtacaaactc

SEQ ID NO: 18015 - DNA, 1164 bp, Cornyebacterium diptheriae
atgctgctaagtatgaaccgtgtcagcaatccttttcgtgcaacgctcggctcgacccctccttaccttgcagggcgccggcatgagatcgaagattttgcagaagcgctggatgacggtccgggggcacatgagcgcatttcattgattacagggctgcgcggtgttggcaagacagtcttacttaatgctttcgaagaagaagcgagagcgcgatcatggtgggttatttctgaaactgctacggcgggatttacagaacgcattattgatgcgttgtttagaaaagcaagtgaaattttgcatacgcaccgccggaaactttcgggtatcactttgccatctatcggcggtattcaattttccgatatcctagagcatcagccgaaaataacattaaggtcggttttgacggagatattgagttggcaagaagaaatcgatcgtaagctagggcaagactctgtaggattgctcattacacttgatgagctgcattatcatcgacgggaagaagttatcgattttggtgcgacgattcaacacctagtacgtgaggatctcaacatttcagtggctatggctggaatcccgcagtcgattaaaccgcttttagccagtgaagaaggcaaaaatcctgtgacatttcttcgtcgcgccaaccgaattgatctcggactgattgataataatgaagttcgaaaggcgttggctgaacccgtcgaaaaggtcggtgttacgtgggagtctgatgcacttactgatgcagctgaagcatgcggtgggtatccgtttatgattcagcttattggccagcagtgcttcaaacggaagagatcaaacttcatcactgttggctcggtggcagaagctgcagtcgtcgcaaaacgcaagctagggcaattggtgcatgaaccagcgctggctgatctatcggaagtggatcgcacttttcttgttgcaatggctgcagatgacggcccatcgacaatgtctgatattgcacagcggttaggagtcaattcgcaatacgcaggcaattatcgacgccgtttgattgatgcagaaattattaccagcagtggatatggtcaagttgactttgaactaccgtacatgcgggaatacctccgcgagcacgcagtggtagatgtgtttaaacag

SEQ ID NO: 18016 - DNA, 183 bp, Cornyebacterium diptheriae
atggccctgaagattacccagcacaagggtttggttggcgctaacccaaagcagcgtaagaacatggctgctcttggcctgaagcacatcaaccactccgtagtacaccaagacaccccagtcgttcgcggcatggtcaatgtggttcgccacatggtgtctgttgaagaagtggcaggggag

SEQ ID NO: 18017 - DNA, 342 bp, Cornyebacterium diptheriae
atggcaacacgcgacgtgatcattacccgagtagcaccaggcagtgcgtttaaaaccgcactctccctgtcgctgatcggacttatctcatggctgatctgcgttgtcatcctgtacttcggcatgcaagccgtaggaatctgggacaaaatcaaccaggtcatcggcggcgttggtggcgaccaaatcgtctccttcgggctgatcatcagcctagcggcgctgctaggaaccatcgtggccatcatcgctacggtgctcgccccgctcacagcactggcatacaacgcattcgttgatcttttcggcggtgtcgaagtaaccatgcgcgaagaactcgac

SEQ ID NO: 18018 - DNA, 1323 bp, Campylobacter jejuni
atgaatccaagccaaatacttgaaaatttaaaaaaagaattaagtgaaaacgaatacgaaaactatttatcaaatttaaaattcaacgaaaaacaaagcaaagcagatcttttagtttttaatgctccaaatgaactcatggctaaattcatacaaacaaaatacggcaaaaaaatcgcgcatttttatgaagtgcaaagcggaaataaagccatcataaatatacaagcacaaagtgctaaacaaagcaacaaaagcacaaaaatcgacatagctcatataaaagcacaaagcacgattttaaatccttcttttacttttgaaagttttgttgtaggggattctaacaaatacgcttatggagcatgtaaagccatagcacataaagacaaacttggaaaactttataatccaatctttgtttatggacctacaggacttggaaaaacacatttacttcaagcagttggaaatgcaagcttagaaatgggaaaaaaagttatttacgctaccagtgaaaatttcatcaacgattttacttcaaatttaaaaaatggttctttagataaatttcatgaaaagtatagaaactgcgatgttttacttatagatgatgtacagtttttaggaaaaaccgataaaattcaagaagaatttttctttatatttaatgaaatcaaaaataacgatggacaaatcatcatgacttcagacaatccacccaacatgctaaaaggtataaccgaacgcttaaaaagtcgttttgcacatgggatcatagctgatataactccacctcaactagatacaaaaatagccatcataagaaaaaaatgtgaatttaacgatatcaatctttctaatgatattataaactatatcgctacttctttaggggataatataagagaaatcgaaggtatcatcataagtttaaatgcttatgcaaccatactaggacaagaaatcacactcgaacttgccaaaagtgtgatgaaagatcatatcaaagaaaagaaagaaaatatcactatagatgacattttatctttggtatgtaaagaatttaacatcaaaccaagcgatgtgaaatccaataaaaaaactcaaaatatagtcacagcaagacgcattgtgatttacctagctagggcacttacggctttgactatgccacaacttgcgaattattttgaaatgaaagatcatacagctatttcacataatgttaaaaaaatcacagaaatgatagaaaatgatgcttctttaaaagcaaaaatcgaagaacttaaaaacaaaattcttgttaaaagtcaaagttaa

SEQ ID NO: 18019 - DNA, 1068 bp, Campylobacter jejuni
atgaagttaagtatcaataaaaatactttagaatctgcagtgattttatgtaatgcttatgtagaaaaaaaagactcaagcaccattacttctcatcttttttttcatgctgatgaagataaacttcttattaaagctagtgattatgaaataggtatcaactataaaataaaaaaaatccgcgtagaatcaagtggttttgctactgcaaatgcaaaaagtattgcagatgttattaaaagcttaaacaatgaagaagttgttttagaaaccattgataattttttatttgtaagacaaaaaagtacaaaatacaaacttcctatgtttaatcatgaagattttccaaattttccaaatacagaaggaaaaaaccaatttgacattgattcaagtgatttaagccgttctcttaaaaagatattaccaagtattgatacaaataacccaaaatactccttaaatggtgcatttttagatataaaaacagataaaattaacttcgtaggaactgatacaaaacgccttgcaatctatactttagaaaaagcaaataatcaagaatttagttttagtatccctaaaaaagctattatggaaatgcaaaaacttttctatgaaaaaatagaaattttttatgatcaaaatatgcttattgccaaaaatgaaaattttgaattctttacaaaacttatcaatgataaatttccagattatgaaaaagttataccaaaaactttcaaacaagaactcagtttttcaactgaagattttatagatagtcttaaaaaaatcagcgttgtaactgaaaaaatgagacttcattttaacaaagataaaatcatctttgaaggtataagtttagacaatatggaagcaaaaacagaacttgaaattcaaacaggagtaagtgaagaatttaatcttactataaaaatcaaacatttacttgatttcttaacttctatagaagaagaaaaattcactttaagtgtaaatgaacctaattcagcatttatagtcaaatcccaaggactatcaatgattatcatgcctatgattttgtaa

SEQ ID NO: 18020 - DNA, 2310 bp, Campylobacter jejuni
atgcaagaaaattacggtgcgagtaatattaaagtcctaaaaggcttagaagctgttagaaaacgcccaggtatgtatataggagatacaaacataggcggacttcatcatatgatttatgaagttgtggataattctatcgatgaagctatggcaggacattgcgatactatagatgtagaaatcactactgaaggaagctgtatagttagtgataatggtcgtggtattcctgttgatatgcacccaactgaaaatatgccaactttaactgttgttttaactgtcctacatgcagggggaaaattcgataaagatacttataaagtttcaggcggtttgcacggtgttggggtttcggttgtaaatgcactctctaaaaaacttgtagctacagttgaaagaaatggagaaatttatcgtcaagaattttcagaaggtaaagttatcagtgaatttggtgtgataggaaaaagtaaaaaaacaggaacaactatagaattttggcctgatgatcaaatttttgaagtgactgaatttgattatgaaattttggctaaaagatttcgtgaacttgcatacttaaatccaaaaatcactataaattttaaagataaccgcgtaggcaaacatgaaagttttcactttgaaggtggaatttctcagtttgttacagacttaaataaaaaagaagctttaactaaagcaattttctttagtgtagatgaagaagatgtgaatgttgaagtagctttgctttacaatgatacttatagtgaaaatttactctcttttgtaaataatattaaaaccccagatggtggaacacacgaagctggttttagaatgggtttaactcgtgtgataagtaactatatagaagcaaatgcaagtgctagagaaaaggataataaaatcacgggtgatgatgtgcgtgaaggtttgatcgctattgtgagtgtaaaggtacctgaaccacaatttgaaggacaaaccaaaggaaaacttggttcaacttatgtgcgtcctatagtttcaaaagcaagttttgagtatttgactaaatattttgaagaaaatcctatcgaagctaaagctataatgaataaagctttaatggcagctagaggaagagaagcagcgaaaaaagctagagaattaacgcgcaaaaaagaaagtttaagcgtaggaactttaccagggaaattagctgattgtcaaagtaaagatccaagtgaaagtgaaatttatcttgtggaaggggattctgcaggaggttctgcaaaacaaggtagagaaagatctttccaagctatactgcctttgcgtggtaaaattttaaatgttgaaaaagcaagactagataaaattttaaaatctgagcaaattcaaaatatgattaccgcttttggctgtggtataggtgaagattttgatctttcaaaacttagatatcataaaatcatcatcatgacagatgcggatgttgatggatctcatatacaaaccttgcttttaactttcttcttccgttttatgaatgaacttgtggcaaatggacatatttatctagcacaaccacctttatatctttataaaaaagctaaaaagcaaatttatttaaaagatgaaaaagctttgagcgaatacctgatagaaacgggaatagaaggtttaaactatgaaggtataggaatgaatgatttaaaagattatttaaaaatcgttgcagcttatcgtgcgattttaaaagatcttgaaaagcgttttaatgtgatttctgtgatacgctatatgatagaaaattcaaatttagttaaaggaaataatgaagaattatttagtgtaatcaaacaatttttagaaacacaaggacacaatatcttaaatcattatatcaacgaaaatgaaattcgagctttcgttcaaactcaaaatggcttagaagaacttgtgatcaatgaagaacttttcactcatccactatatgaagaagcgagttatatttttgataagattaaagatagaagcttggaatttgataaagatattttagaagttcttgaagatgttgaaaccaatgctaaaaaaggtgctactatacaacgctataaaggtttaggggaaatgaatcctgagcaactttgggaaaccacaatggatccaagcgtaagaagacttttaaaaatcactattgaagatgcacaaagtgcaaatgatacctttaatctctttatgggtgatgaggttgaaccaagacgcgattatatccaagcgcacgctaaagatgtaaagcatttggatgtgtaa

SEQ ID NO: 18021 - DNA, 4491 bp, Campylobacter jejuni
atggatttagaaaatatcctagaaaataatcaaagcataggtttatatcacccaaagaacgaacacgatgcctgtggtatcgctgcagttgctaatatacgcggtattgcttcttataaggttatttgtgatgctttagaaattttgatgaatcttgaacaccgaggtggtacaggagctgaagaaaattcaggtgatggggcggggattttaatccaaattccacatgatttttttaaaactcaagaattgggttttgaacttcctaaaaagggtgattatgctgtagcacagatgtttttatcacccaatactgatgcaaaagaagaagcaaaagaaatatttttacaaggtttaaaggataaaaaacttgaatttttaggttttagagaagtgccttttaatcctagcgatataggtgcaagtgctttaaaagctatgccttattttttacaagcctttgtaaaaaaaccaagtaaaataagtgcaggacttgagtttgaaagagtgctttatagtacgcgtcgacttatagaaaaaagagctattaatgtgccaaaattttatttttcaagtttttcttcacgcaccatagtttataaaggaatgcttctttcaactcaattgagcgatttttatcttgattttaaagatgtcaatatgaaatcagccatcgctttggtgcattctcgcttttcgactaataccttcccaagttgggaaagagcccatccaaaccgttatatggtgcataatggagagattaataccatacgcggaaatgttgatagcataagagctagagaaggcttgatgcaaagtgagtattttgaaaatttagatgaaatttttcctatcatagctaagcttagcagtgattctgcaatgtttgataatactttagaatttttagctctaaatggtcgtactttagaagaagcttttatgatgatggtgccagaaccttggcataaaaatgaaaatatggaaagcaaaaagcgtgctttttatgaatatcattctttattgatggagccttgggatggacctgctgctatagtttttactgatggagtgattatgggggcgagtttggatagaaatggttttcgtccttcaaggtattatcttacaaaagatgatatgctcatactttcaagtgaaacaggggctttaaaacttgatgaaaaaaatatcaaagctaaaaaacgcttagaacctggaaaacttttactcgttgatacagcaagaggtagggttatagctgataatgaaatcaaagagcattatgctaatgctaagccttataaaaaatggcttaaaaatttagttgaacttgaaaaacaaaaaagcggagtttataaacatcagtttttaaaagaagatgaggttttaaaacttcaaaaagcttttggttggagttatgatgagcttaaaatgagcgtggctgctatggctcaaaatggtaaagaagctatagcagctatgggtgtagatactcctttggctatactttctaaaacttatcaacctttgtataattattttaaacaactttttgcacaagtaactaatcctcctcttgatgccataagagaagagattgttacttctacaaggatttatctaggaagcgaaggcaatttattaaaacccgatgaaaacaatgcaaaacgcgtaaaaatagccttgcctgtgataagcaatgaagaactttttgaagttaaggctttaaataaatttcaagttaaagaattttctatactttatgattattctaaaaaaactttagaaaaggctttagatgaactttgcgttaagatagaagatgaggttaaaaaaggtgtttctattatcattttaagcgataaaggagtggatgaaaaaaacgcttatatccctgctttgcttgctgtttctggagtgcataatcatctagtaagaaaaaatttaagaacacatacaagtcttatcatcgaaagtggtgaacctagagaaattcatcattttgcatgtcttttaggttatggtgcgactgttattaatccttatttggtttatgagagtatacaaaaactcattgccaataaagatttaaatttaagttatgaaaaggcggtagaaaatttcatcaaggcaagttcaagtggtatagtcaaaattgcttctaaaatgggggtttctaccttgcaaagttataatggctctgcactttttgaatgtctgggcttaagctctaaggtgattgataaatacttcacttctacaacttcacgcattgaaggtatggatttagaagattttgaaaaagaactcattgctttacacaaacatgcttttaacgatacacataaggctttagattctaaaggaattcatggttttagaagtgctaaagaagaacatttaatcgatccgcttgtgatttttaatcttcagcaagcctgtcgcaacaaagactataaaagctttaaaaaatactcggctttagtagatgaaaaacaagttaatttgcgttctttgatggaatttgattttagtgaagctatcagtatagataaggttgaaagtgtagaaagtatagttaaacgctttagaacaggggcgatgagttatggttctatttctaaagaagcacacgagtgtttagcacaggctatgaataaaataggtgctaaatcaaattcaggtgaaggtggtgaggatgaagaacgctatgaaatcaaagagggtgtggataaaaactcagccattaagcaagtagcaagtgggcgttttggcgtggatttaaactacttaagtcatgcaaaagaaattcaaatcaaagtcgctcaaggtgcaaaaccaggtgagggcggacaattaatgggctttaaagtctatccttggatagctaaggctagacattctactgcaggtgtgacgcttatttccccacctcctcatcatgatatttattctattgaggatttggctcaactcatttatgatttaaaacatgcgaacaaagacgctaaaatttcagtaaaacttgtaagcgaaaatggcataggaacggttgctgcaggtgtggctaaggcaggcgcgaatttaatccttgtttcaggttatgatggaggtacgggtgcaagtcctagaacttctataccgcatgctggaattccttgggagttaggcttagctgaaacgcatcaaactttgatcttaaataagcttagagatagggtaagattagaaactgatggaaagcttatgaatgggcgtgatttagccatagcagcacttttaggagctgaagaatttggttttgcaaccgctcctttgattgttttaggttgtacaatgatgagagtttgtcatctaaatacctgtccttttggtatagccactcaagatacagaacttagagatcgtttcaaaggcaaagtagatgatgtgattaatttcatgtattttatagctgaggagcttagagaatacatggcaaggcttggttttgaacgcctagatgatatgataggtcgcgtggataaactccgccaaaaaagtgtgcaaggtaaagcaggaaagctaaatttagataaaattttaaaatccttgcctacttataatagaaccgctgtgcattttaaagattataaagacaataaacttgaaaaaacgattgattatagaattttactaccactttgtaaaaatgctgtggagaaaaaagagcctatcaaactttctttagaagtaggaaatcaaagtcgtacttttgcaactatgctttcaagtgaaattttaaaaacttatggaaaagatgctttagatgaagatagtatccatatcaaagctataggcaatgcaggcaatagctttggagcgtttttgttaaagggtattaaacttgagattataggcgatagcaatgattatttaggcaagggtttaagtggtggtaaaatcatagcaaaaatttcaaatgaagccactttttcacctgaagaaaatatcatcgcaggaaatgcttgtttatacggagctacaaaaggtgaagtgtatttagatggtatagcaggggaaagattttgtgtaagaaattcaggggctttggctgtggttttaggaacaggcgtgcatggttgtgaatatatgacaggtggacaagttgtagttcttggagatgtgggtgcgaatttcgctgctggtatgagtgggggcgttgtttatatctttggaagacacaatgaagctcatgtaaataccgagcttgtggatattaaagatcttaatgctaaggatgaaaaagaattaaaagctgtgatagaaaaacatatcacttatacagattctaaaaaggctaaagatattttagaaaaattcgataaaaaagacttttttaaagtcatgccaagagattatgaaaagatgttaaaaatgcttgatctttgtaaaaatgaaaaagatccaaatttagcagcatttttgaaaatcacacaaaaataa

SEQ ID NO: 18022 - DNA, 1446 bp, Campylobacter jejuni
atgggaaatgcaagaggttttttggactttaaaagaatggattttaaaaaaattgctcctaaagaaaggattttaaattacaaagaatttactatacctttggataaaaaagaacaagaagttcaaggtggacgatgtatggattgtggggtagctttttgtcatacgggtgtgatgagcgaaggaaaagatgtgggctgtcctttaaacaatctcattcctgaatggaacgatcttgtttatcgttctttatggaaagaagcttatgaaagacttgatcttaccaatccttttcctgaatttaccggtcgtgtttgccctgctccttgtgaggattcttgtgtgtgtgcgataaatggtgttagtgtgagcataaaaaataatgaattatccattatagaaaatgcttttaaggaaaatttagtaagagtaaataaacctaagcaatacaatggcaaaaaaatcgctgtcataggaagtgggcctgctgggcttgcttgtgccaatactttaaattcactaggttataaagtaagtgtttttgaaagaagcgataaaataggcggacttttgatgtatggcatccctgatatgaagcttgataaaagtatagttcaaagacgggtggatttgcttaaaaaaagtgggattgaatttaaagtgaatgaaaatatagacagcaaagataaggtttcaaaacttctaaaagaatttgatgctttggtgctttgtacaggagcaagtaagcctatagatcttgatatagaaggtagaaagctaaaaggggttgaatttgcccttgattttttaacgcaaaataccaaaactttgttaaaaacaggcaagggtgcagatatggccaaaggtaaaaatgtcttggttataggaagcggggatacaagtgtggattgtatcgctgtagcgacaagacaaggggctaaatctatagtgcgttttgaaagaagtccaaaaagacctttgcaaagaagccaaaacaatccttggcctttaaaagctgacatttttactactgattatggtttagaagaagccattgctgtatatggcaaagatcctagggaatatcaaaaaatgacaaagaaatttttaggaaaaactcatgtagaaggtgttgaagcaaatgatttaaaacgcgagtttaaagaaggcaaagctataaatgtcgaaatttcaaattctaaaaaaacttataaagcggatttagtgcttttagctatgggttttagcgggtgcgaagaagctatctctaaaaattttggagtgaaattagatgagaaaaacaacataagcacagaaaatttccaaaccactcataaaaaaatctttgcttgtggagatgctagaaaaggacaatctttagttgtttgggctataaaagatggtatagaatgtgctttgagtttgcatcaaaatttagcaaaataa

SEQ ID NO: 18023 - DNA, 576 bp, Campylobacter jejuni
ttgaaaactttatttgacacaaaagaacttttaaacgaatttgatataaatttaatcggtattgatgaagcaggacgcggtgctttagcaggtcctatgatgatggcagcttgcaaactgaacaaacaacttgatgggttgtgtgattctaaaaaactaagcgaaaaaaaacgcgaagaactttatgaaatcatcatcaaaaattcaaactatctcatacttgctttttcttcagaacaaatcgacgcactaggcttaagcacttgtttaaaaaaaggcttaaaacttataaaaaagcattttaaaacagaaaataacttcttatatgatggaaacaccaacctaggtataaacgggataaaaacacaaatcaaagccgacactagcattttgcaagtaagtgcagctagcatactcgcaaaagttagtaaagatagagtgatgaatttcttagctaaagactttccttgttatgaatttgaaaaaaacaaagcctatggcacaaaagctcataaagaatttatagctaaatttggaatttgcaaactccaccgaaaaagttttaaacttttatga

SEQ ID NO: 18024 - DNA, 1677 bp, Campylobacter jejuni
atgagaagcgatgcgataaaaaaaggacatttaagagcacctaatcgttctttacttcgtgcttgtggtttgaaagatgaagattttgacaaaccttttataggtgtagcaaatagctatatagatataatcccagggcattattttttaaatgattatgctaaaatcattaaagatgagatacgcaaaaatggttgcgtaccttttgagtttaataccataggcgtagatgatggtatagctatgggacatgaaggtatgctttattctttaccaagtcgtgaacttatcgcaaattctattgaaacggtgatgaatgctcatcaacttgatgctttaatctgtattccaaactgcgataaaattactcctggtatgttaatgggagctttaagggtcaatgttccaaccatttttgtaagtggtgggcctatggcttcaggagtaaccaaaaaaggagaaaagatcagccttagctctgtttttgaagctgtaggggcttatgaatccaaaaaaattagtgaagaagaatttaaagatatagaatgttcagcctgtccaagtggtggatcttgttcgggaatgtttacagcaaattctatgaataccttatgcgaagctatgggtatagcactagaaggcaatggaaccattttagctttaagtaaagaaagagaagagcttttaagaaaagcagcgcgtcgtatttgtgaaatcgccctagatgaacgttttaaaattcgtaatatcatcactcaaaaagctgtgcgtaatgctatggtagtagatatggcaatgggtggaagtagcaatacagttttacacatgcttgccatttcgcgtgaagcaggggtagcactagatattaaagatttaaatttcatctcaagcaaagttgcacacatagcaaaaatagccccatcgctaaatagtgtttatatggatgatatccacaaagcaggcggtgtgagtgcagttatggctgaaatttcaagcagacaaggacatattttagaacttgatgcactgaccattacaggagaaagtctcaaagaacgcttaaaaaatgccaaaatcaaagatgaaaatatcattcgtaaagtagataatgcttactcaaaagtaggtgggcttgccattttgtttggaaatttagccaagcaaggttgcgttataaaaaccgcaggaataatcggagaaagaaaatttaaaggcaaagctgtttgttttaactctcaagatgaagctataaaaggcattattaaaggcaaggtgcaaaaaggaaatgtttgtgtaatacgctatgaaggtccaaaagggggtcctggtatgcaagaaatgttaagtcctacttcacttttaatgggtatgggtttaggtgctgatgtagctttaatcaccgatggtcgttttagtggggctacaaggggtttaagcgtcggtcatatttcccctgaagcagctgaaggtggtcttataggacttttaaaagatggagatgaaatagaaattgatgtagatgcttatactatccatgcaaatgtaagtgaagaagaaattgctaaacgtaaaaaagaatttgcattgcctcaaaaagaggtgtcttcaagatggcttagaatgtatcaaaaacttgttagcaatgctagtaaaggtgcggttttagatatggaatga

SEQ ID NO: 18025 - DNA, 879 bp, Campylobacter jejuni
atgaaatttgttaattttatacagggtcaaaaacccaatctaggagtactaaattctagtggaaaaattgtaagttttgatgatcttggcattgaaactaacgatatgaatgaatttattatccattttgataaatttaaacacaaacttacagacttggattctaaaatagcctatgaaattccacaagaaaattatctagcccctattatagaacctcgtcaagatattatatgtcttgggattaattttttagatcatgccaaagaatctgccaaatttaagggtgaaaaatttgaagaaagagaatatcctgtatattttggaaaacgctgcaatcaagctacggcaccttttggcgatatacctttacatgcagatgtaacttctcagcttgattatgaatgtgagcttgcatttattttaagtaaagatgcttataaaatcaaagctaaagatgcaaaagattatatctttggctatactattatcaatgaaatttcagctcgcgaacttcaaaaacgccacaaacaattctaccgagcaaaaagtcttgaaggtagcactataatgggaccttatatcacaagcgtagatgaaatttcttatcctcctaaactccaacttcaaagctatgtcaatgatgaactacgccaaaactctaacactcaattgtttatttttgatattgcttatgtcttagaagaacttagcgcaggcatgcttttaaaagctggaagtattatatctatgggaactcctagtggagtaggtatggggttaaatccacctacttttttaaaatcaggagataaagtacgttgcgtcatagaaaatttaggagaactttgcaataaaataaaaaatatcaattattaa

SEQ ID NO: 18026 - DNA, 1329 bp, Campylobacter jejuni
atggttgaaagatatagcagagaaatcatggctaaaaaatgggacatgcaagcaaaatacgatgcgtggttaaaagtagaattagccgctgtaaaagcttggaacaaactcggtctcattgatgacacagactgcgaaaaaattcttaaaaatgcaaaatttgatattgcaagaatagacgaaatagaaaaaaccacaaaacatgatgttatagcttttcttacaagtgtaagtgaaagtttgggagaagagagtcgttttgtgcattatgcaatgacaagttctgattgtatagatacagctgttgctttacagataaaagagagtttggagcttattttagaagatgtttctttgcttttagaagcgatcaaaaagcgtgctttggagcataaaaacaccttaatggtaggaagaagtcatggaattcatggagaacctattacttttggtttggtgttagctatttggtatgatgaaatttcgcatgcaaaagagcttttagaacatgcaaaagaagtgataagctatggaaaaatcagcggtgcaatgggaaattttgctcatgctcctttagaatttgaagaagaagtttgtaaaaatttaggtcttaaggccgctcctgtttcaaatcaagtgatccaaagagatcgttatgctcaggttatttctgctattgcgattttagcttcaagttgtgagcaaatcgctgtagccataagacattttcaaagaactgaagtttatgaggctgaggagtattttagtgtaggacaaaaaggaagttcagctatgccacataaaagaaatcctgttttaagtgaaaatatcacaggactttgtcgtgtgcttagatcttttgtaactccagctttggaaaatgttgcactttggcatgaaagagatatatctcattctagtgttgaaagatttattttgcctgatgcttttatcacggctgattttatgcttatgcgtcttacaaatttgattgataagcttttggtttatcctgaaaatatgatgaaaaatttaaatcttacaggcgggcttgtattttcagggagggtgcttttagaacttccatttaaaggcattagccgtgaagaagcttataaaatagttcaaagaaacgctatgaaagtttgggcagatttgcaaaatggcaaggctgctatcaatgaaaaaaatgaaagtttgtttttgttagcgcttttaagcgatgaagatttaagaaaaagtttgagcgaagaggatgtaagaaaatgtttcgattataactactatacaaaaaatgttgatgcaatttttaaaagaacatttaaataa

SEQ ID NO: 18027 - DNA, 2370 bp, Campylobacter jejuni
atgaaagttattaaaagaaatggtcgtacagaagaattggatgtttctaagatcaaaaaatgcacctctgatgctgtaaaagatttagaaggtgtgaatttaagcgaacttgaacttgatgcaaagattcaatttcgtgatggaatttcaactgaagaaattcaaaaaactttaattaaaactgcagtagataagatagatattgattgtccaaattggacctttgttgcagctagactttttttatttgatttatataaaaaagttaatggtatgaatcgctataatcatttgcgtgagtattttcaaaagggtgaaaaagaaggaagaattttacttggtcttaaagaaaaatatgatttagatgatttaaatgcttatattaaacctgaacgcgatatgcaatttacttatcttggtattaaaactttatatgatagatacttgattaaagatagtaaaggtatgcctatagaacttcctcaacaaatgtttatggccattgcgatgtttttagcgcagaatgaatttaatcctcaagaatgggcgaagaaattttacgatcttatttctaaatttgaactcatgcttgcaactccgactttatctaatgcaagaacaacgcgccatcagcttagttcttgttatataggatcaacccctgataatattgaaggtatttttgattcttaccaagaaatggctttgctttctaaatttggtggtggtataggttgggattggtctaaagtgcgtgctatgggtggaagcatagatgggcataaaaatgccgcaggagggattatacctttcttgaaaattaccaacgatattgctgtggcagtagatcaactaggaaccagaaaaggagctatagccgtttatatagaaccttggcacatggatataagtgattttatcgatttgcgtaaaaattcaggtgaagaaagacgccgtgctcatgaacttttccctgctttatggatcaatgatcttttcatgaagagagtaagagctaatgataaatggactctttttgatcctgcagatacagcggatttgtgtgatttgtatggtgaagcttttgaaaaacgctatgaagaatatgaaaaagatgaaagcattaccaaagaaatcgtagaagctaaagagctttggaagaaaattttgctaaattattttgaaacaggcttgccatttttatgttttaaagatagtgccaacagagcaaatccaaatgctcatgtaggaattattagaagttcaaatttatgtactgaaatttttcaaaataccgagccaaattattatcaaattaaagtagtttttgaaaatggagatgagcttcattttgatgaagagcaaaaggttgtgatcgatgggggatatgaaaaaccagccaaaaaaatctcaactttagatagtattgaaggtaataaagtttatatagtggaaaaatataaaaatgatggaaaaacagccgtttgtaatttagcaagtataaatcttagcaaagtatatactaaagaagatatagagcgtgttgttccaacagctattcgtatgcttgataatgtaattgatttaaatttttatcctcatagaaaagtaaaagatacaaatttaaaatctcgtgccataggtcttggagttatgggcgaggcacaaatgcttgctgaggctaagattcattggggaagcgatgagcatttaaataaaatcgatgagattatggagcaaattagctttgaggctattaatgcgagttcaaatttagctcttgaaaaaggttcttatgaagattttgaaggatcaaattggagcaaggggatttttcctattgatgtagcaagtcctaaggctaaagctttaactttaagagaaggcttatttgatcaaagtgaatgcgactgggttaaacttagagaaaaagttaaaaaagatggtatgagaaatggttatttgatggccattgcgcctacttcttctatttctatcttggtgggtactacgcagactatagaacctgtttacaaaagaaagtggtttgaacaaaatttaagtggtatgatacctgttgttgtgccaaatttaagccttgatacttggcaatactatactccagcctatgaacttgatcaaaaaattcttgtaaaggctgctgctgtgcgtggtaaatggatcgatcaagggcagagtttaaatatctttttatcacttgataaagcaagtgggggatatttaaatgaaatttatcaactcgcttgggagctcggagtaaaatctacttattatctaagaagcgaaagccctgatagtgaaaaagtcaatgttgcagatcgtagcatagaatgtgaaggttgccaataa

SEQ ID NO: 18028 - DNA, 1632 bp, Campylobacter jejuni
atgaaacaaacaaaatatatttttgtaacaggtggagttttaagttctttgggtaaagggatagccgctgcttctatcgcaacacttttaaaaaattcagggcttaaagtgagtattttaaaagctgatccttatatcaatgttgatccaggcactatgagtccttttgagcatggagaggtttttgtaactgatgatggagcagaaacggatcttgatttggggcattatgagcgttttttggatgagagtttatctcaagataataacttcactacaggacgggtttatcaaagtgtgattgaaaaagaaaggcgtggagaatatcttggcaaaaccattcaagttatccctcatatagtaggagaaatcaaagatcgcattaaaaaagcaggagaaggcaaagatatacttatcgttgaaataggcggaactgttggggatatagaaggcttgccttttttagaagctattcgtgctttgcgtttggaagtgggtaaaaataatgctatgaatattcatcttactctagtaccttttattaaggctgcaggggaattaaaaacaaagccaactcaacatagtgtaggcgagttaaggcgcataggcattagtcctgatatgattatttgtcgtagtgaaaaagctcttgatagagatttaaaagataaaattgctatttcttgcggggtggaaaaaaattgcgtgatagaaagtgttgatgcggctagtatttatcaaattccacttaattttttaaagcaagatattttaagccctattgctgaaattttggatttgaaaaatttaaaacctaatatggaaaattgggactctttggtaaaaagagttatagctccaagcaatgaagttaaaatcgcttttgtaggcaaatatgtggatttaaaagaaagttataaaagccttactgaagctattatacatgcaggtgcagccctagatactaaagtggagttaaaatgggtagatagtgaaaaacttgaaaatatggaaagttctgaagtatttaaagatgtgagtggaattttggttgctgggggatttggatatcgtggtgtagaaggtaagataaaagccattcaatacgcaagagaaaataaaattccttttttaggaatttgtttaggtatgcagcttgctttggtggaatttgctagaaatgtattaaaacttaaagatgtaaattcaagtgaatttaatgaaaaatgccaaaatcctgtggtttatttgattgatgaatttatggatacaaatggagaaaaacaaattcgtactgcaaaaactcctttaggtggaactatgcgtttaggggcttataaatgtgatatcaaggaaaaatcccttttggctaaggtttataatgaagtaaagagtgtaaaagaacgccatcgtcatcgctatgaagcaaatccaaaatatagagcagattttgaaaaatacggtttgattgtaagtggtgaaagcaaaggattgattgaagcagttgagcttaactgtcatccttttttcttggctgtgcagtttcatccagaatttacatcaagacttgagcatgttaatcctgtgatttgcagttttatcaaggcagctataaactatgaagataattaa

SEQ ID NO: 18029 - DNA, 1572 bp, Campylobacter jejuni
atgaagataattaataaaaatgaaattaaaaaaattttggcttcacgctttgaaaaagatttgcataccaaactttgtgatctgcctttgccatgctgtttaaaggatgcatataaagcagctaatcgcatcaaagaagctgtagaaaaaaatgagaaagtcgctatagtaggagattatgatgttgatggaatcatttcttgtgttattatggcagaatttttcgatgatataggttttgattatattataagaattccgaatcgttttaaagatggatatggattaaatgctgagatcatcaacgaacttgatgtaaatttaataataacagtagataatggaatagctgctcttgaagcagccaaactctgtaaagaaaaaaatatagatttgattatcactgatcatcatatgcctcaagatattttacctgatgcttttgccattatcaatccaaagcaaaaagattgtgattttccagaaattgaaatttgtggagctcaagtcgcatggtatttgatagcggctttaaaagaggtgtgcaagcttaaatatgacatgtgtaaatttttagaacttttggcgattgcaattgttgcagatatgatggaacttagagatttaaatcgtgctttagtaaggcgtggtatagatcatattaacaaatctaaaagggctgcttttcgggctattaagcattattatcaaaaggataaatttgctcttgataatataggatttttaattgctccgcttataaatagtgctggaagaatggatgatgcaagtatttcttatgaatttttacacactaaagattttaataaagctttagaatatctagagcaaattgttagttttaatgaaagtcgtaaagatgaagaaaaacagctttttgaagatagtttaaatcaaatcgatgaaaacgattcttgtattgtggtatcgggtttaaattggcatgaaggtgttttagggattgtggcaagtcgtttagctaaacattttaataaacctgcttttgtattttctcaaaatgaagaacacttaaaaggcagcgcaagaagtgttggcaagattgatattttagctttaatttctaagacaaattctatattaagcaattatggtggccataaaggtgctgctggaatcagtttaaactctgaaaattttgaacaatttaaaaataaaatcaaaaaagaatgttcgcaaatttctgaaagtgaatttttggatacagatgaaattttaggaatcttagaacctagcgaaattgattttgaaatgcttgaaattttagaatcttttgaaccttttggacataaaaatccacgacctttttttgttttagaaaatctttgtgtaaaaaataaaaaacttctaggtaaagatgaaaaacacttaaagcttgttttaactaaggaaaataaaaccatagaagctttattttttaattttgataaagagccagaattgaatcaaaatatttctttgcttggaagtatttctaagaatgaatttaggggaatggtaactccacagtttgttgttaaagagattttataa

SEQ ID NO: 18030 - DNA, 1203 bp, Campylobacter jejuni
atgcaaaaacacaccaaaattcacggctttgctaaatttaaactcatcgttatccttgctttgatgtcaagcatagcaccactttctacagatatgtatttacctgcactttctcatgtagaacaaagttttcaaactaattcttttttaacccaacttagtatcgcaagtttttttatcgcttttgctttaggacagcttatatatgggcctttaagtgatatttttgggcgtaaaattccagctttggtggggatatttttcttcatcgtttcgagtttgttttgtgtgattatcgatgatatttatgcttttatcgctttgagattttttgaagcacttgggggttgtgcaggtgtggttatcgcaagggctattgtcaatgacttgtttgagatcaaagaagctgcagggatttttgctttgatgatggtttttagttctcttgctcctatgctttcgccaacttttgggggaattttactagagtatttttcatggcatagtatttttgcgactttgtttgctttgggaattttgctttttttgatgatactttttggtttaaaagaatccgcacctcatcttaaaaacaaaaaattttcccatcatgaagcaatgaaaagctacaaatttgttttaagcgataaacgctttttggtttatatactatgtgcttcttttgctttggcggcgatgtttgcttatatcacaggatcaagctttgtttttacgcagttttttagcttaagtgagcaaaaatttgccttgctttttggggcaaatgctttaggttttgtcatctgtgcaaatatcaatgcaagattggttttaaaatacgaaagcgaaaaaattttggcaaaagctttgatgataatgtttatatcgaccgtgattttacttgtaaatgccttttttcatccaaatttcttgctttttgaacttagtatttttacaagtatcgctatgcttggtttcatcgcacccaataccacgactttggctatggcaaggtttaaagaacatagcggaactgcttctgcggtgcttggaacggtgcaatttggttttgcagggcttatttcttttgtggttggggctattaacgcaaatacgccgataatccttgcttttgtaatgtgtgcttgcgtattggttgcaaatatgatatattttctaatcaaaataaaggagaaaaaatga

SEQ ID NO: 18031 - DNA, 1809 bp, Campylobacter jejuni
ttggaaaacattagaaatatagcagttatagctcacgttgaccatggtaaaaccactatggtagatgaattgttaaaacaatcaggcacctttagcgaaagagaacaaatttcagaacgcgttatggatagcaacgatatagaaaaagaacgcggtattaccatactttcaaaaaacacagcgatcaattacaaaggtacaaaaatcaacatcatagatactccagggcatgctgattttggcggagaagtagaacgtgttttaaaaatgattgatggagttttgcttttagtagatgctcaagaaggcgttatgccacaaactaaattcgtggttaaaaaagctttatctttagggcttaaacctatagttgtaatcaacaaaatagacaaaccagctgccgatcctgaaagagtgatcaatgaaatttttgatctttttgtagccctagatgcaaacgatgagcaacttgactttgctatagtttatgctgcagcaaaaaatggttatgctaagcttgatctaaacgatgaaagtgataatatggagccactttttaaaaccatacttgaacgcgttccagctccaagtggtagtgatgaaaatcctttgcaacttcaagttttcactttggggtatgataatttcgtaggtaaaataggcattgctagaattttcaatggggttgtgaagaaaaaccaaagcgtaatgcttgcaaaagctgatggtaccaaggtaaatggtagaatttcaaaactcattggctttatgggcttagaaaaaatggacatcgaagaagcaggaagtggagatattgtagctatagcaggttttgaagctttagatgttggcgatagcgttgtagatccaaacaatcccatgccacttgatcctttacacattgaagagccgactttaagcatagtattttctgtaaatgatggaccattagcaggaactgaaggaaaacatgtaacttcaaataaaatcgctgaacgtttagaagctgaaatgaaaactaatattgctatgaaatacgaaagcacaggcgaaggtaaatttaaagtaagcggtaggggcgaacttcaaatcactattttagctgaaaatatgcgtcgtgaaggttttgagttttgcatgggaagacctgaagttatcgtaaaagttgaagatggagttaaaacagaaccttttgaacatttagttatcgatgtgcctgaagaatttagcggtgcagtaatagaaaaacttggcaaaagaaaagctgaaatgaaaaccatggcaccaacgggcgatggacaaacaagacttgagtttgaaattccagcacgcggacttataggttttagaagtcagtttttaaccgatactaaaggcgaaggtgtgatgaatcatagctttttagaattccgtccttttagcggtgcggttgaaaagcgtaataatggagcgttaatttctatggaaaatggcgtggctttagggtattctttgtttaaccttcaagagcgtggagtacttttcatagagcctcaaactaaagtttataccggtatgattataggtgagcactctcgtccaaatgatttagatgttaatcctatcaaaggaaagaatcttaccaatgtaagagcaagtggaagcgatgatgcaatcaaacttgtgccacctagaaaattaagtcttgaaagagctttagagtggatagaagaagatgaacttgtagaagttacacctgtaaatgtgcgtgttcgcaaacgctatcttgacccaactcaaagaaaaagaatggaaaaagcaaaatcttaa

SEQ ID NO: 18032 - DNA, 1797 bp, Campylobacter jejuni
gtgatgtcaaatttagctccgcaaaatgatgttttaaatcttacgccgagtaaaacttctactactagcagttcttttagtaaaactagtaaaaataaagaacatgaaagtagtgatagtaaaaattcaactcaagatgatacggaaagttttttaaattctttgcttaattctatcaatgaaaccaatgaatttttacctgatcatatgaagatcagtcaaaaagaagttgttaatgaagcgatgagcagacttcaaaaaggagcttttgatgagagcgataagataagcattttcgaatctgcttcttttatgcaaattctttctttgttagataagctaaaaacagatacagcagatgttaaactagcaaatctttctactcaactttcaagtcttattaaaacagaggctaattttaatgctttaaaaggtgcatcaaatcttagtgagcttttggacatagctaaagatctgggcttaaatgtaaaaaatattaaagtagatcgtcttcttgatcttaaagcaacttttccaaatttagataaggccgatttttttaagggtgctgtggataatgtttttaaagaaatcatcaataataaaatttccaatgtgagtaaaaatttaaatcacaatttagaaaatacaactcatactacaagcactcattctatgcaaaaaacaaattctaaagatagcggttctttgctttctcaaactttaaaaaatttagattccatactttcatccaaagaaagcaaacacgaaaaaaacgataaagttaaatcaaaaatagaagaagataccacagatgctaaaaatactttaaaaaatatcaaaaatgatgagtttgcaaaaaatttaacagaagagttaaatataaaagataaaaaaaaccaagataatttaaataaagaaagcaaagacttaaacaaagattttaataaagagttaaataaaaatcaagaaaaaaacaatttaaatcaagaaaatatacaagatcaaaataaaaatttaaagaacaatgatcaaaatttaaatcttgataaaaatttaaataaagaaattgttaaagatactcagaaattagtttcaaatttaacacaaaaagattttaatctaaataaagagcctaaaaacaacaacaaagaaaataaagatataaaacaaaatttctttgatcaaaaattaaattttgaaaatttaaataaaactcaagtagttcaaaacaaagagaataatgcaaattttaataataataatactaataataaagaaacttttactcaagagcaaacaaaaacgcacagtgaaaatgtagataaaaatagcttagatgagttaaattctttagtcaaagatttaaataaagtaacacaaaacaatgctcgcaatatcactcctaaagaaactttgcagtatttttcacaagatttaaaagaggctgtggatcaatacaaagcgcctattactaaacttagtatcactctaaatcctaataatcttggagaagtggaggtaactttgatacaaagaggtaataaccttcatatcaatttcaactccaatgccaatgcaatgaatttgtttatccaaaatcaagccgagtttaaaaattctcttgtaaatatgggatttactggacttgaaatgaattttagtgatcaaggtaaaagagagcaaaatcaaaatcaaggaaaaaatcgtagtggatatggttttaaagatgctttagatggaaaaaatgaaagtgaaaaagtcaatctagagcttgttttagcgaagtatttttaa

SEQ ID NO: 18033 - DNA, 885 bp, Campylobacter jejuni
atgatatcatcatcggattggaatttaaataccactgctacaacttcaggtactacttcttcaggaagtactagtggaacaactagaacagattcaagcagtagctcaggaatagtgagcaatccaaatgctaccttagataaggatgcgtttttaaaacttcttttgatagagcttcaacatcaagatccaacagatcctatggatagcgataaaatgcttactcaaacttcacagcttagtgcacttgaaatgcagcaaaataccaatacaactatgcaaaaaatggttgaaactatgcaaaagctttctgattcttttagtacaagtatgagtacttcagctttaggggctattggtaaaatggcaactgtttcagataataaaatcaaacttacaggtgcagatgagcttatcgctcttaaaatgtatttgcctgaagattctgatgaaaacggtgttacgctagaaatttatgatagcaataataaacttgttttcagtgaaaaaagcgatgctaaatctatttctcaaggtttatttactatggagtggccaggaagaaataacgatggggtttatgcaggtgatggtgagtacactgttaaaatggtttataataataaaaatggtgaaaaaatcactgcaaattacggaacttatcctatcgaaggtgttgtttttaaagatggtgttgcctatgcaaaaatggctggacaagaagttccttttgatgcaatacaagaaataacagattataagcttggttcatcttcatctactggaggaagcggttcaagtggagactcaagtggtggttcaagcgatggagattcttctgggtctggatctacagaagatggcgacaaagaggaaaaggcataa

SEQ ID NO: 18034 - DNA, 723 bp, Campylobacter jejuni
atgaaagttaaatggagtagagattttagcattaaaaatatgcaattagacaaacaacacgaactaatttttgaaattaccaatcttgcaaatgatttagctctaaacattcaagataataatacacaacacaaaaatgatttaaaacaaattcttgtaaagctatttcaatacatcaaaattcattttaaagatgaagaaaaatttatggaaagcattgattttcctttgattgaagaacataaaaaatctcatcaaatattagtagaaaaaactaaagagcttttagaacactcaaatgatattgtaaaaatgtctcaagaactttccatattaaccaaagattggattttagatcattttgctaatgaagatttatggatagctaattttacaaaaaaaaccctacaccttcaagaaatccattataccttagaacaatacataaaactaaaatcaatcaaacaagacctaagagctgaaaaaacctatgattatatttgcaattgttctttgcgtatccatgcagttccacagactatacatcaagagcttgttagcaaagaaaataccttaaagtgcgaaaaatgtgggcaaattttagttcatttggattattttgatttgaatcaaaatttcgaaaaattcaatgctatttttgaagatgcactacaaaatcaccatttcacgactcaagaaaatgatatgaggggggggggatag

SEQ ID NO: 18035 - DNA, 1017 bp, Campylobacter jejuni
atgaaaattctagtcgctatgagcggtggagttgatagtacagtcactgcttataaacttaaaaatttaggtcatgaagttataggttgttatatgaaacttcatggcaaaccaaattatcacgaagaaaatatcaaaaaagtagaaaaagttgcaaactttttgcaaattccttatcatattttagacttacaagaagattttaaaaacaaagtttacatgccttttgtggatacttataaagagggtaaaacaccaaatccttgcgctttatgtaaccgttttatcaaacttggaaaacttttagaatttgctaaaagtttaggttgtgaaaaacttgccacagggcattatgcaagacttgaaaacaacttaataaaaaccgcagtagatgaaagcaaggatcaaagctattttttggccagtgcagataaagaagctttaaaatatcttatttttccgctaggcgaaatgaaaaaagaagatgtgaaaaaatttgcttccactatagaggttttaaaatcttttgccacccaaaaggaaagttctgaaatttgctttgttgaagatacttatgtgcaagttttagatcagtttatggatacaaaaattcctggagaagtattagatagtagcggaaaagtagtaggcaaacatgagggctatatgcactataccataggcaaaagaagaggttttgaagtgcgtggagcacatgagccacattttgttttaaaaatcaatcctaagcaaaatcaaatcatcgtaggaacaaaagaagagcttaaaatcagtgaatttaacctaaaaaatatcaatctttttatagacgctaaagagcttgattgcgaagtaaaaatccgctatcgttcaaaatccacaccttgcaaggtagaaatttatgaagataaaagtgcaaaaatcatcctaaaagatcctgtttatgggcttgctagcggacaaatggcagtcttttatgatcatgataaagtcatagcaagtggttttatagaataa

SEQ ID NO: 18036 - DNA, 606 bp, Campylobacter jejuni
atgaatgaaaaaataagccaagatttagaaaaatttgctaacataccaaacctaaaaaatgccgtaactttttttggttcagcaagacttaaagaagataatttttattatcagcaggctaaaattttggcacaaaaatgtgttcaaaatggtttttgtgtgataagtggtggaggtggtggtattatgcgtgcagccaacgaaggtgctttttcacaaaacaataatacaaattcaatgagttctgtagggtttaatatatttttacctcacgagcaaaaacttaatgattttgtagaatataatattacttttgagagcttagccatacgcaaaatggctcttattgaaaagagtctagcttttgtgatcttcccaggcggctttggaacacttgatgaattgtgtgaaattcttacattaaaacagttagaatttaaaaaagatgttcctattattttgtttgggagtgaattttggcgaggttttgatgagttcgtcagaaattctttactcaaacttgaagtgatttctaaaggagatgagttaaagtataaaatcactgacgacttggattttataattaatactttaaaggaaatttaa

SEQ ID NO: 18037 - DNA, 474 bp, Campylobacter jejuni
atgctaaaaattcaaggagtaaaacactttgaaaaaagtcgtttttttcctttttttagtcaaaatatacgatcttttaaatatttagctcttataggcttaggaagcaatatagaacccgaaaaaaaaagatttgatatgctttttcgagtaatgatggatgataaaagatttaaaattttatccacatctcctatgttgataaatgaagcctttggttttaaagagcaaaaagattttaccaatgctgttatgttgatacaaactaatttgcatgcacgagcacttttgaaagttttactttactatgaagtaaaatttaaacgcaagagaactttcaaaaacgctcctagaacgcttgatttagatcttttatacttttcacaaaaagtcaagcgtgataagtggtgtgaggtgcctcataaaggggctaaagaaagagtgagtgtaattttgcctttaggcatgatataa

SEQ ID NO: 18038 - DNA, 1230 bp, Campylobacter jejuni
gtgtttatagttgctgcaagatatctttttttatgcgatgaagattttacaatactagaaaatcaagcctttgtttttgaagataaaattttagaattgggtgaattggataatttaaaaaaaaaatatcctaaggctaaaatcatcaaaacacctaaaaattcggttattttacctgcttttataaatcctcacacacatttagaatttagtgcaaattcaacaactttacattttggagaatttttaatttggcttaaaagtgttataaattctcgttccatattaaatgcacaggccaaagaagaattaatacttcaaagcattaaaaaaatgcaaaaaagtggtataggcactataggtgaaatttcaagttttgggagtgatttagatccttgcttaaaggctagtcacaagggtatgcgtatagtattttttaatgaaattttgggtacaaatgaaaatcaagttgaagataaaaaacaagaatttttaaaaagatttgaaaattctttgaaatttaaaaatgatttttttatcccggcaatttcgattcattctccttattcaactcatcctagtttggctcattttgctcttgatttagctaaaaagcaaaatttactagctagtacgcattttttagaaagtaaggctgaaaatatctggcttagagagtctaaagggggttttaaaaaatggcttgaaaatttcacacttcatcctaagcctctttatacaccaaaggattttgttaaactttttaaaggagtaaggactctttttacgcattgtgtttatctaaaagaatatgaatggttagataaaaatttacattctattacacattgtgcattttcaaatcgccttttaagtcaaaaaagcttagatttaaaaacggctttaaaaagtggattaaatatccatttaggaaccgatggacttagctcaaatatttcattgtctttacttgatgaaatgcgcgcgaatttgcttatacataagaattttgatttattagagttagcctctaagcttttgcaaatggtaacactttatcctgcaagggctttaaatttaaatttaggagagcttaaaaaaggtaaaattgctgattttaacgtatttgagctaggagaatgtgataaaaagcaagctcctttgcagtttattttaaatgctaaggaagtggataaattatttataaaaggaaaagaatgcaaattttaa

SEQ ID NO: 18039 - DNA, 741 bp, Campylobacter jejuni
atgatgaaaaaagtgtatttttacgccacatgcttaggaagtactgctatgcaacaaagcgttttaaatgcgataaaacttttaaggcgtgagggtattgaagtgattttcaaaaaaaatcaaacctgttgcgcccaaccttcttttaactcaggttatttcgatgaaagtcgtgagatcgctttatataatgtagatttatttgataaagattatcccatcgttgtacccagtggttcttgtgcgggtatgatgagtcatgactataaagagctttttaaaaacagacctgaattttccaaaataaaaacttttagctctagagtgatagaactttcacaataccttgatgaagttttaaaagtagattatgaagataaaggtgtacctataaaagtaacttggcattctaattgccatgctttaagagtgcaaaaaagcatacaagcgagtaaaaatcttatcaaaaaactaaaaaacgtagaattagtagaacttcaatacgaagaagaatgctgtggttttggaggaaccttttcagtaaaagagcctgaaatttcaaatgctatggtaagaagcaaaatcaaagatatacaaaatagcggtgcaaaatatctcatcagtggtgatggaggttgtcttttaaatatagatggcacaatgaaaagaatgggtttggatataaaaggcatacatttatatgactttttacttaaacgcttagaaggagggagactatga

SEQ ID NO: 18040 - DNA, 1563 bp, Campylobacter jejuni
atgaacgaacttagtagcgttgattggtcaagagcgcagtttgctttaactgcactttatcattttttgtttgtgcctttaaccttaggcttgtcttttatgatcgctatcatggaaaccatctatgtaaaaactaaaaatgaaagatggaaaaaaatcaccaaattttggctttcattatttgctataaattttgctatcggtgtagctacaggcattataatggaatttgaatttggaacaaactgggcaaattatagctggtttgtgggtgatatttttggtgcacctttggcggttgaaggtattatggcattttttttagaggctactttttttgcagttatgttttttggctgggataaagtaagcaagggttttcacttactttcaacttggtgtgtggctataggaagtaatctttctgctttttggattttagtggcaaatggttggatgcaatatcctgtaggaatgagctttaaccctgacacagcaagaaatgaaatgcaaagcttttttgaagtagcactttctcctgtagctatttcaaaatttttacataccataggcagtggttatgtaatttcagctttatttgtaatgggaatttcagcttggtttatgttaaaaggacgccatattatcgaggctaaaaaaagcttagttgtaggagctagttttggtttggtttgttcaatctttttgtttttcagcggagatgaaagcgcttaccgtgtaactcaaactcaacctatgaaacttgcagctatggaaggggtttatcaaggtgaacatcgtgcaggacttgtaccttttggaattttaaatcctaaaaaaaccatagataataacgaaagtgtgtttttatttgacattactataccttacgctctttctatattaggaaaccgtgatccaaattcttttgttccaggaattgaagatttgatctatggaaatgaaagcaaaggtatagaacctatgcaaaatcgtatcgatagaggaaaaatcgctatacaaactctaaaagactataaacttgctaaagaaaacaatgatacaatagctatggcaaatcacaaatccattttagaaactcattttaaagattttggttatggatatttagaaaaaccaagcgatactattccacctgtggctttaactttttatagctttcatatcatggttgctttaggaagttttttctttttacttttcatcgttacgctttatcttaccatggcaaatgatattgagaaatttagaaaagtactttgggtgtgtttgttatccattccattgggttatattgccgctgaagcaggttggattgttgctgaagtaggcagacaaccttgggcaattcaagacttgcttcctgtacatatcgcagcaacacaacttggaaaagtcaatgttcaaatttcattttggatttttgcagtactttttacagcattattgattgcagaagttaaaatcatgcttactcagattaaaaaaggttttgacgcacatgcaggacatactccacttatgggcaaaggagaaaaataa

SEQ ID NO: 18041 - DNA, 309 bp, Campylobacter jejuni
atgtatgctattatcaaacacagcggaaagcaatacaaagtaagtgttggcgatgagctaaaactagatcactttgaagctgaaagcaaagcaagtattgaagtaagcgaagttcttgctatcaatgataaagaattaaaggtaggtgcgcctttcgtagcaggtgcaaaagttgttttggaagtgatcaatcacggaaaagataaaaaagttgtgatttacaaaaaaagacgcagaaaagattctaaactcaaacgcggttttagaagacaatttactcgcgttgtagtaaaagatatcaaagcttaa

SEQ ID NO: 18042 - DNA, 255 bp, Campylobacter jejuni
atggcacacaagaaaggtcaaggttcaactcaaaataaccgcgattccataggtcgtcgtttaggtgttaaaaaatttggtggcgagtttgttagagctggaaatatcatcatccgccaaagaggaactgcaactcatgcaggtaacaatgtaggcatgggaaaagatcatactatctttgctctaattgatggttttgtaaaattcgaaagaaaagacaaagatagaaaaaaagtttctgtatatcctgcataa

SEQ ID NO: 18043 - DNA, 1053 bp, Campylobacter jejuni
atgtttattgatagtgttaaaattactttagcttcaggcgatggtggcaaaggtgctgtaagttttcgccgtgaaaaacatgttccacttggtggccctgatggaggagatggtggaaatggtggtgatattattttcgtatgtgataataatacccacactcttgtaaatttcaaaggcaaaagagaattacgcgcgcaaaatggtgctggtggaatgggacgcaataaaaatggcaaaaagggtgaaaatttagaacttatagtgcccgaaggaacgcaagttatcgatgcacaaaccaatgaaattttacttgatcttaccaaagaaggacaaagagagctttttttaaaaggtggaaaaggtggacttggcaacacccattttaaacacgccaccaatcaacgccccgattacgcacaacctggtataaaaggagaaagtcgcttagtcagacttgaacttaaacttattgccgatgtagggcttgtgggctttccaaatgtgggaaaatctactcttataagcgttgtttcaaatgcaaaacctgaaattgcaaattatgaatttaccacccttactccaaaacttggacttgtagatgtaaatgagtataattcctttgttatggctgatattccagggattatcgaaggagcaagtgggggtaaaggcttaggacttgcctttttaaagcacatagaaagaacgagctttttacttttcgtgctagatcctatgaggcaaatgcctttaaaagaacaatttatagtactaagaaaagaacttgaaaaattttccaatgaactttttgggcgtaaatttggcatcatgatttcaaaaagtgatagtgttcgtttaggagaggaatttgctgagcaaattgctttaaacattaatgagttagacaattatctcaaagaaataaataatccacaaagctttttaatcaaagtctcaagccttgaaaaaacaggacttaaagaacttaaattcatgcttttagaagaaattaaaactttaagaaataacaaaaaaaatttaacaatctag

SEQ ID NO: 18044 - DNA, 786 bp, Campylobacter jejuni
atgagcgaaattattacaatagcaaatcaaaaaggtggagtaggaaagactacaacagcagtaaatttagccgcttctttggctgtggctgaaaaaaaagtacttttgattgatgttgatccgcaagctaatgcgactacaggacttggttttaatcgtaataattatgagtataatatttaccatgtttttataggaagaaaaaagctttcagatattattttaaaaacagaattgccacaacttcatttagctccttcaaatataggtcttgtaggtatagaacaagagcttgctaaaggtgaaaataatgagaaaaaaatgctgcttaaaaatcaaattcaagaagtgattgatgagtatgattttattattattgattctccgcctgctcttggaagtattactataaatgcttttgcagcaagtgatagtgtaattatccctatacagtgtgaattttatgcgctcgagggtgtagctatggttttaaatacaattaaaattatcaaaaaaactattaattctaaactcagggttcgtggatttttaccgacaatgtatagctctcaaaataatctttctaaagatgttgtagatgatttgaaacaaaattttaaaaaacaactttttactattaatggaaacgaagatgactttattgtgatccctcgcaatgtaaaacttgcagaaagtccaagttttggaaagcctataattctttatgatattaaatcaccaggttctgttgcttatcaaaatttggcgtattctatattaggataa

SEQ ID NO: 18045 - DNA, 426 bp, Campylobacter jejuni
atgtttgaagatatgcatccttccataatgcttgctactatggctatttttttagctatgatagttattttaaatagtatgctgtataagccgcttttaaaatttatggatgaaagaaatgattctataaaaaatgatgagaataaagtaaaagaaaattctcaagaagttttaggtgtgaatgatgaattagaagctattcatattaacactagagaagaaattcaaaaaattaaacaaagtgctatagctgctgctaaagaagaggcagagcaaattcttagaagcaagaaagaagaattagaaagaaaaatggccagtttttatgcagatttagccgttcaaaaaaaagagttgcaagaacatttaaacatacatttatctgagcttaagcaagctttgcaaaataacataaagaaaatttaa

SEQ ID NO: 18046 - DNA, 1506 bp, Campylobacter jejuni
atgaaatttaaagctgatgagatcagttcaataatcaaagaaagaattgaaaattttgatttaaatcttgaaattgaagaaacaggaaagattatttctgtagctgatggtgttgctaaggtatatggacttaagaatattatggctggagaaatggtagaatttgaaaatggtgataaaggaatggccttaaaccttgaagagtcgagtgtaggtattgttatacttggaaaaggagaaggtttaaaagaaggtgcttctgtaaaaagacttaagaaattacttaaagttccagtaggtgaggctttgattggccgtgttgtaaatgctttaggtgagccaattgatgctaaaggtgtgatcaatgctaatgaatatcgttttgttgaagaaaaagcaaaaggtattatggcgagaaaaagtgttcatgagcctttacatacaggaattaaagctattgatgcgcttgtgccaattggtcgtggtcaaagagagcttatcataggtgatagacaaacaggtaaaactactgttgctgttgatactattatatctcaaagaggtcaaggagttatctgtatatatgttgcaattggtcaaaagcaaagtacagtggcacaagtggttaaaagactagaagaacatggtgctatggaatatactattgttgtaaatgccggtgcttcagatcctgcggctttacagtacttagctccatatactggtgtaaccatgggtgaattttttagagacaacgcaaaacatgctttaattgtttatgatgatttgagcaagcatgctgtagcttatcgcgaaatgtctttgattttacgtcgtcctccaggtcgtgaagcttatccaggtgatgttttttaccttcattcaagattgcttgaaagagcaagcaagctaaatgatgaattaggtgctggttctttgacggcattgccgataattgaaacacaagcaggagatgtttctgcttatattccaactaatgttatttcaattacagatggacaaattttcttagaaactgatttatttaactcaggaattcgtcctgcaattaatgttggtttatcagtatctcgtgtaggtggggctgctcaaattaaagctacaaaacaagtttcaggcacattaagacttgaccttgctcaatatagagagcttcaagcttttgcacaatttgctagtgatttagatgaggcaagtagaaaacaacttgaacgtggacaaagaatggttgaacttttaaaacaaccaccttattctccgcttagcgttgaaaaacaagtagttttaatttttgcaggaaccaaaggtttcttagatgatattgctgtttctagaattaaggaatttgaagatggaatttatccttttattgaggcaaaacatccagatatttttgagcaaattcgctctaaaaaagctttagattctgatttggaagaaaaactagctaaagccattaatgagtttaaagcaaatcatttataa

SEQ ID NO: 18047 - DNA, 948 bp, Campylobacter jejuni
atgaaaaaaatattcacagtagctcttcttggagctactttactttatgcagaaagctcagcttttggtgcaggagatataacaagcaattcttcttatggtttaacttcaaatgaaaaattatttaaagaaaagttagataatttaaataatgaaaatatacaaacaaatgctagaattaatgaaattaacgaaagaatcgagggtttacaaagcactttagaaggtataaattctcaatatgccaaatcaaattctagattaagtcaagttgaagagaataatcaaaatattgaaaataattttactagtgaaattcaaaaattaaaggcttatgttgaagaaagtagaaaaattcaagaagctaataataagcaagtaaaaaaagttttagccgaacttagttctttagtagatgctattaatgcaaattatgtttctaaaaacgaattaaatgatgcaaatttaagcgttaaaactattacacctagtgttgttgtttcaactacagattcaaatagtaccattgaaaacaataatactcaaaatacccaagatgataaagcaaaacaaattgatgaatcttggaaaaagaaaaaaaataatgaaattttagaattagcgataaaagatgttgataaaaatgcttttgaagattccaaagcaaaattaaattttctcataacaaagcagtataaacctgcaagagcaaatttttggttaggggagatcgagtataaacaaaaaaattataacaatgctattgtttattataaaaaaagttcttctttgagtacaaaaggagattatttcccaaaacttttatatcatactgccatttcattggataaaacaggtgatacaaaaacagcaaatggtttttataaagctttaaaaactaattatccaaattcacccgaagcaaaagcttcacctaatagaaaataa

SEQ ID NO: 18048 - DNA, 921 bp, Campylobacter jejuni
atgaatgctgcgtttatatttccaggtcaaggctctcaaagtcttggcatgggaaaagatttttatgaaaactctataaaagccaaagaactccttcaaaacgcaagtgatttttgtaagattgattttaaacatttgctttttgaagaaaacgaaaaactcaatcaaagtgaatttactcaacccgccatcgttttaaattccttaatggcttatagtgttttacttgaaaaaaaacctgatttaagttcgaaatttgctttagggcattctttgggagaattttcagccttagctgtcaatggtgcttttgattttttagaggctctttctttggtcaataaaagagggcttttcatgcaagaagattgtgcaaaagttgaagcaggtatgatggtggttttggggcttgatgatgaaaaggttgaagagctttgtcaaaaagcacaaaaagaaaacaagcaaattttcgctgcaaattataactgcgatggacaaatcgttgtagcaggtttaaaacctgatttagcaagttatgaaagtgtatttaaagaagcaggagctaaaagagctatgcttttaaatatgagcgtggcaagtcattgtcctcttttggaaaatgcttcagctaagctttgtgtggagcttgaaaaggtgttaaaaccaaattttaaagccgtaatttctaatgcaaatgccaaaatttatacaagcaaagaagaagcccttgagcttttaaaagcacaacttatctctcctgtgctttataaacaaagcattaaggcatgtgaaaatgaagtagattatttcatagaatttggcgcaagtgtgcttaagggtttgaataaaaaaatcacttcaaaagaaacttatgctttaacaaatatgaatgatattgatgaatttttaaaggttgtatga

SEQ ID NO: 18049 - DNA, 690 bp, Campylobacter jejuni
atgatgaaaatagcaattttaggagccatgagtgaagaaatcactcctttgcttgaaacacttaaagattatacgaaaatagaacacgctaacaatacttattattttgcaaagtataaaaaccatgaacttgttttagcgtattctaaaattggcaaggtaaattctactcttagtgctagtgtgatgatagaaaaatttggcgcacaagctttgctttttacaggagttgcaggtgcttttaatcctgaacttgaaattggcgatttgctttatgcaacaaaattagctcaatacgatcttgatattactgcttttggacatcctttgggttttgttccaggtaatgaaatttttatcaaaaccgatgagaaattaaacaatcttgctttagaagttgctaaggaattaaatatcaaacttcgtgcaggcattattgcaacgggtgatgagtttatttgcgatgaagcaaaaaaagcaaaaattagagaaattttcaatgcggatgcttgtgaaatggaaggcgcaagtgtggctttggtttgtgatgctttaaaggtgccttgttttatcttaagagctatgagtgataaagcaggggaaaaggctgaatttgattttgatgagtttgtgatcaattcagctaaaatttcagccaattttgtgcttaaaatgtgcgagaaattatga

SEQ ID NO: 18050 - DNA, 927 bp, Campylobacter jejuni
atgatagattttagcaaaaaacccctgtttttagcccctatggcaggtttttcagatctgccttttcgtaatgtagtaaaaaaatttggtgctgatattaccataagtgaaatgataagttctaatgccttagtttatgaaagttctaaaactttacatatgctagaaagagctgaattagaaaatccttatatagtccaaattgcaggtggagataaagaagtgctaaaaaaagcagtgcaaatgctaaatgaaatggattttgtagatgggatcgattttaattgcggttgccctgtaaataaagttgttaaacaatgtgctggcagtgctttgctagaaaatttagagctttttaaaaatcttgtaggagtgattaaagaaaacaataaaaaaagccttacaagtgtgaaatttcgactaggatttaatgaaaaatatcctgaaaaaatggctaaaatttgtgaaagcttgggggtggattttataagtatccacggacgcacaagaaaacagctttatagcggaaaagccgattatggatccattgctagtgctaaagcgagcgtgaaaattcctgtgattgcaaatggcgatattaacgcacaaaacgctaaagaagtttataaaatcacaaaatgtgatggactcatgatagggcgtgcaagcgtaggaaatccttggatattttatgaaatcaaaagcggtaaaagtgtagatgaaaaactcaaaaaagaaatcatactcactcattttgatgaaatgataaaacactacaaagatcaaggcgtaagtatatttcgcaagcatttacacgagtattctaaagggcataaagacgcttcaacctttagagataccgttaatcgtatcgacaatgtcgaagaaatgcgaaaaaaaatagaagaattttttagtttaacttga

SEQ ID NO: 18051 - DNA, 363 bp, Campylobacter jejuni
atgaaaaaaaatgaaatacaaaatttcaaaaatattttagaagaaagaaaaaaagccatcttagaaaatttgcaaagcaattcaaatgaaatcgaagctcttcacaatagcgtcccaagcgatagtgtagatttttctgtcatagaaacaggctctcaaattgactttgctatcagcaccaatctcaaagaagaacttatagaaatcgaagattctttagataaaatcaaaaacggcacttatggaatttgcgaatcttgcgatgatgaaatcgactctcaaagactaaaagtcaaacctcacgcaagatattgtatcacttgccgtcaaattgcagaacaaggaaaaaaacatgaaaattaa

SEQ ID NO: 18052 - DNA, 462 bp, Campylobacter jejuni
gtggaaaataatttgcaagttaatatcttttgtattcaaaaaagtgatgaatttaaaacttgtagtgagaaatactctaaactcatctccaaatacgccactttaaaagaaataaatgtttttaataaaaaaatagccttagctcaaaatttaaatgccatagaagcaaaaaaaagctatgaagaagcttttatgccttataaaaaaggctattgtatcgctcttgatgaaaaagggaaagatcttacaagtatagaatttgcaaaactcatccaagataaaaatgaattaagtttttttataggaggtgcttatggtttaagagaagaatttaatcaaagtttggattttagactatcattaagcaaacttactttagcacatcaatttgttaaaaccttacttttagaacaaatttatcgtgcattttgcatcaacaacaatcacccttatcacaaatag

SEQ ID NO: 18053 - DNA, 843 bp, Campylobacter jejuni
atgaattttgcagatattttttcaaaaataagaagacaacaacctagcgttaaagaagcgccaaatcactgggtaaagtgccaaagttgtcatgctttgatgtattataaagaaatagaatcttgttttaatgtttgtcctaaatgcaattatcacatgagaatttcagctgatgaacgtattaaacttttaagcgatgaaggcagttttattgagtatgatgcaaatttagaagctatagatcctttaaaatttgttgatagcaaatcctataaaaaacgccttagcgaaggtgaaagtaaaacaggtagaaaaagttctgtcatcagtggagaatgtgaaatcaatggtttaaaaacccaacttgttgtatttgatttttcttttatgggcggatctttaggttctgttgaaggagaaaaaattgttagagctatacaaagagctatcacaagcaaaacttctcttgtcatcgtaagtgcaagcggtggagctagaatgcaagaaagtacttattctttgatgcaaatgagcaaaactagtgctgcacttaaacttcttagcaaagaaaaacttccttatattagcattttaaccgatcctactatgggtggagtaagtgcttcttttgcttggcttggagatttaatcatcgctgaacctgaagctttagtaggttttgctggcgcaagagttattaaacaaactataggagcagatttacctgaaggttttcaaaaagcagagttcttgttagaacatggacttatagatgccatagttgaaagaggagaacaaaaacaatatcttagcgatgtactaaaattttttagtggaaaataa

SEQ ID NO: 18054 - DNA, 885 bp, Campylobacter jejuni
atgaaacaattaactttagcaaaaactgtcaaaggtgtaggtataggacttcataagggtgaacccatagaaattactttagagcctttagaagcaaatagtggtatagtattttttagaagtgatcttaatgcaagctataaggcaagtcctgaaaatgtgatcaatactcaaatggcaactgttttaggagatgatcgtggatttatttctacaatagagcatttaatgagtgcgattaatgcttatggaatcgataatgtacgcatagttttaaatgcaaatgaagctcctgttatggatggatcaagtattagcttttgtatgatgcttgatgaagcaggggtaaaagaacttgatgcacctaaaaaaattatggtaattaaaaagcctatagaagtaagagatggtaataaatttgtgcgtttaactcctactaaagaaccccgtattaactatacgattaaatttgacaatgctgttataggtgaacaaagttacaattttgaattcagcaaaaaaaattatatagaaaacatagcaagggctaggacttttggttttttaaaagatgttcaagctcttaggagtatgaatttagcactaggtggaagtttagaaaatactatagtggtagatgaaaatcgtattttaaatcctgaaggtttgcgtttcaaagatgagtttgtaagacataaaattttagatgcaattggagatttaaccttacttggatatcgtgtttttggggattatacttcatatgctgggagtcatcatttaaatcatttacttactaaagaagttttaaaagataaagatgcttatgaaattgtaagccttgaaaaaacaacccaaaaagcttatgaaaaggtatttgcataa

SEQ ID NO: 18055 - DNA, 879 bp, Campylobacter jejuni
ttgaaaattttagttccagctacgagtgcgaatttagggccaggttttgattgtttaggacttagtttaaagctttttaatgaaactcaaatccaaaaatcaggtgtttttagcattagtattggaggcgagggaagtgataatatttttcttaaaaaaaacaatatatttgtaaatattttttatgaaatttatgaaaaactaagcggaaaaaaagataattttcgttttatttttcaaaataacattcctctttcaagaggattaggaagctcttcagctgtgattgttggagctattgccagtgcttattatatgagtggatttaaggtagaaaaagaatgtattttagatgaagctttaatttatgaaaaccatccagataatatcgctccagctactcttggtggttttgtgtgttctttggttgaaaaaaataaagtttatagtatcaaaaaagagattgataaagatttagctgctgtggttgtgatcccaaatttggcaatgagcacggaacaatcacgccaagctttggccaaaaatttaagttttaatgatgcggttttcaacctttctcatgcttcatttttaaccgcttgttttttggagaaaaaatatgaatttttaaaatttgcaagtcaagataagctccatgaaatcaatcgtatgaaaaacttacccgagctttttgaagtgcaaaaatttgccttagaaaataaagctttaatgagcacactttcaggttcgggatcgagctttttttctttagcttttaaagatgacgctttagctttggcaaagaaaatacaaacaaaatttaaagattttcgtgtgcaatatttagaatttgatgataatggctttgaaatttgctaa

SEQ ID NO: 18056 - DNA, 2616 bp, Campylobacter jejuni
atggcaaagattagaattcatgaaatcgcaaaagaattaggttatgatagtaaggaaattattgaaaaggcaaatgaattaggacttggaattaaaacagcatcaaatgctgtagaacctgagattgcggcagctatttatgagtatatacaaacaagagaaattccagaagcttttaagaaaaatatcaaaactcctacagcaaaaaagcctaaaaaagaaaatataaaagaacaagaaaagctaaatgaatctgaaaaaaaagaacctaaaaaagaagaaaagcttaaacaagaagttaaaaaagaagaattaaaaattgaaaaagaaaatgcaaaagaggaagaaaaacaagaaattattgatgctcataagccacaaagccttgctagtgcaactttagccaaaagacgcggacttgttattgttaaaaagaaaaaagacgaagaagaaattcaagttaaaaaagaagaagtaaaaaattcaaatgatatatctatcaataatgaagagcgcttaagtttaaaaactatgttttcaaatgctgatgagagtttaaagaaaaagaaaaaagaaaaaaaatcttttgttgcgagtaaaaaagaaagtaccgaaaaaatgaattttttagatgaacatgattttggtgatatttctttagatgatgaagatgaggtagtattacctgattttagtgtaaaagaacaagaaaaaccacaaaatatcaataaaaaacaacctaattttataagacaagctgttggaaattctgcgggttttgggtttgaaggtggaattcaaagaagaagtcgtaaaaaaccatctaaaaagattgaaaaaaaggaagtagaagaagtaggtagcgttgctatttctaaagaaattcgtgtgtatgaattcgctgataagataggaaaaagcactagtgaagtgatttcaaaacttttcatgcttggaatgatgacaacaaaaaatgatttcttagatgaagatgcgattgaaattttggctgctgaatttggtatagagatcaatatcattaacgaggctgatgagtttgattatgtaaaagactatgaagaagagactgatgaaaaagatttagtgactagagcacctgtgattaccatcatggggcatgttgatcatggtaaaacttctttgttagattatattagaaaatcacgcgttgcaagtggtgaagcagggggtattactcagcacgtgggtgcttatatggtagaaaaaaacgggcgtaaaattacttttatcgatactccaggtcacgaagcttttactgctatgcgtgcaaggggtgcaagtatcactgatattgtaatcatcgttgtagccgcagatgatggggtaaaaccacaaaccaaagaagcgataaatcatgctaaagcagcaggtgtgcctattattattgctattaataaaatggataaagaagcagcaaatcccgatatggtaaaaactcaactcgcagaaatggaaatcatgccagtagaatggggcggatcttatgaatttgtaggagtttcggctaaaacaggaatggggattgaagatttgcttgaaatcgtgcttttacaagctgatattttagaacttaaagccaatccaaaaagttttgctaaagcaagcattatagaaagttctgtgcaaaaagggcgtggtgcggtggctactgtcatcgtgcaaaatggaacacttactgtaggaagtaccgtggttgcaggcgaggcttatggaaaagtgcgtgcgatgagcgatgatcaaggtaaagccttaaaagaaattaaaccaggcgaatgtggggttatcgtagggcttagtgaagtagcagatgcaggtgaaattttaatcgcagtaaaaaccgataaagaagcaagagaatatgctaataaacgccacgaatacaatcgccaaaaagaacttagcaaatccactaaagttagcattgatgagcttggagctaagatcaaagaaggtaatctaaaagccttgcctgttattttaaaagctgatgtgcaaggatctttagaagccttaaaggcaagtttagaaaaacttagaaatgatgagattaaagtgaatatcattcatagtggagtaggaggaatcacgcaaagtgatatagagcttgcaagtgcgagtgaaaactctatagtactaggttttaacatacgcccaacaggggaagttaaagagcgtgctaaggataaaggcgtagaaattaaaacttataatgtaatttataatcttttagacgatgtaaaagccttacttggtggtatgatgagcccgattatttctgaagagcaattaggacaagcagagattagacaagtgatcaatgtgccaaaaatcggacaaatcgcaggttgtatggtaactgaaggggtgattaatcgtggagccaaaattcgccttatccgtgatggagttgtggtttatgaaggaaatgtaagttcgcttaaacgctttaaagatgatgctaaagaagtggcaaaaggctatgagtgtggcgtaggtatagaagggtgcgatgatatgagagtgggtgattatatagaaagctataaagaagtagaggaacaagcaagtctatga

SEQ ID NO: 18057 - DNA, 1203 bp, Campylobacter jejuni
atgtttgatgaaatccgttttaataccatagaaagacttccaaattatgttttcgcagaagtaaatgcgataaaaatggcagcaagacgtgctggagaggatatcatcgacttttcaatgggaaatcccaatggtaaaactccacaacacattatagataaactttgtgaaagtgctaacaaagataaaacctcgggatattctacatccatggggatttataaacttcgcttagcaatttgtaattggtataaaagaaaatataatgtcaacctagatcctgaaaatgaagttgtagctactatgggttcaaaagagggttttgtaaatcttgcaagagcgattataaatcctggagatgttgctattgtgccaactcctgcttatcctatacatactcaagcttttattatagcaggaggtaatgtagcaaaaatgcctttagcttataatgaaaaatttgagcttgatgaaaatcaattttttgaaaatttacataaaactttaaatgaaagcatcccgtgtccaaaatatgtcgttgttaatttcccgcataatccaacaacagtaacttgtgagaaaagtttttatgaaagattgatagcaacggcaaaaaaagaaagattttatattatttcagatattgcttatgcagatttaacttatgatgactataaaactccttctattttggaaattgaaggcgcaaaagatgtagcggtagaaacttacactctttcaaaatcttacaatatggcaggctggcgcgtgggttttgtagtaggaaataaacgcttagtcagtgcgcttaaaaaaataaaatcttggtttgattatggtatgtacacacctattcaagtagcagctaccatagctttagatggagatcaaacttgtgtagatgaaatccgtgcaacttatgataaaagaatgcacattttacttgaagcttttgaaaatgcaggctggaaacttcaaaaaccaagagcaagtatgtttgtttgggcaaaactccctgaaagcaaaagacatttaaaaagtttagaattttcaaagcaacttttacagcgtgctagtgttgcagtaagtcctggggtaggttttggcgaagcaggtgatgagtatgtaagaattgctttaattgaaaatgaaaatcgcatacgccaagctgcacgtaatatcaaaaaatatttaaaagagtaa

SEQ ID NO: 18058 - DNA, 825 bp, Campylobacter jejuni
atgctttattttattcctactcccataggaaatttaagcgatatttcttttagagccttagaacttttaaagacttgcgatcttgtgttttgcgaagatacaagagtaagtaagtctttgatttcgttattaaataccaaatttcacactgatatacatatttctaaatttatagccttacactcccataatgaaaaagaagttttagcaagtattgatttaaagatatttgaaaaaaatgtagcttatttaagcgatgcaggaatgccagggattagtgatcctggcaaggctttggtagaatttgcacaagaaaataatatcacctatgaaattttaccaggtgcaaatgcagccttagttgctcttgtaagctcagcattttgtcaaaaagaatttatctttattggttttttagcaaataaaggcaaagaaagacaaaaagatatagaaaaaattttaaactttccttatccaagtattatttacgaatcccccaagcgtattttatctttagtagaacagattatgattctagacaaccaaagagaaatttttttgattaaagaaatcagtaaaaaatttgaaaaaaaatttaaaggcaatgctaaagagctttctgaaattttaaaaaagtctaatttaaacggtgaatgggttgtagtactgcaatcaaaagagcaaaattttttgcaaaatactctttgtgaaaaagatattatggatttagagctgtctttaaaagcaaaagcaaaattattatcaaagatcaatggaaaaaatgcaaaagaaatttatcaaaaactgcttttaagtcaagattag

SEQ ID NO: 18059 - DNA, 201 bp, Campylobacter jejuni
atgaaaaaagaaattcacccagaatatgtagaatgcaaagtaagttgtgcttgtggaaatacttttacaacaaagtcaaacaaagcagaattaagagtagatatttgttcaaattgccatcctttttttacaggcagtgaaaaaattgtagatgctgcaggtcgtgtagagaaatttaagaaaaaatacgcaatgcaataa

SEQ ID NO: 18060 - DNA, 657 bp, Campylobacter jejuni
atgcaatttttgtataacaagcaagctggagaagagtttatacaacttcaaggtgaaaactttaaccatttaaaagtaagaagagtaaaggaaaattcggagctaaatcttagaaatttacaagataattttctttacaactatacaatcacaaatttaacaagaaattcttgcactttaaaatttttaaacaaaaaatcacaaaatataaaacaaagtgaattaaacttagccttagccattatagatattaaaattttagaaaaaactctacctttcttaaatgaacttggagtaaaaaagttacatttggtttttacaaatttttcacaaagaaattttaaaatcgatttagaaagatttgaaaaaatcattatttcttcttgtgaacaatgcggtagaaatactaaaatggatttaattatccaccaaagcactcaagaatttgttcaaaaatttccaaatgcaattatggttgattttcaaggagaacaacaaagtcatttcgatgaaaaagaattatattttataggtcctgaaggtggatttaacaatgatgagagattattgtttaaccggaaaatctctcttaaaagctctaatattctaaaaagtcaaacagctattatagctatagcttcaaaaattttgctttaa

SEQ ID NO: 18061 - DNA, 582 bp, Campylobacter jejuni
atgattataagaaaattatttgaatttgaaaacgcacacattgttagattttgttcttctaagcgttgcaaaagtagcattcatggacattcttacaaagttgaagttttacttgaaagcaaatatttagataatgctggaatggtctatgattttggacttttaaaaacctatatacgccaaattattgatagttttgatcatgctatcactctttttaaatatgatgacgcaaaatatttagaagaaatgaaaaaatattcaagtcgttggatttgcctgcctgttaatgtaagtgctgaaaatttttgtcgtgtatttttcatacttatagatgctttattaaaacaaacaaaaatggtaaatggagaacaaggagtgactttacaaagcatcattgttcatgaaacaagaacaggctatgcacaaggttttagagaagatgcctatagtgagctaatgccaaaaatttcacttcaagacatagaattttccaatggcattaaagcagaatggaatgatatagatttttataacaaattaaaaaatgaagaaatttttataaatccaaaggagatttaa

SEQ ID NO: 18062 - DNA, 963 bp, Campylobacter jejuni
atgcttatagatcaattcggtagaaagataaattatcttagaatttcagttacacaaagatgtaactttcgctgcctttattgtatgccaaaaattcctttcgattatcagccaaaagaaaatttattaagctttgaagaactttttttatttgttaaagcagctatagacgaaggaattgaaaaaatccgtataacaggtggggaacctttattaagaaaagatttaagtatttttataaaaatgattagcgattataaaagcgatattgaccttgctataactacaaatggatttttactaaaagactttgctaaagacctaaaaaatgctggacttaaacgacttaatatttcacttgataccctagatcacaaaaaagcaaaaactcttgcgcaaaaagatgtattagatagtgttttatctggaattgatgaagctttaaatctagatttgaaagtaaaacttaatactgtagctcttaaaaatttaaacgatgatgaactgatatctcttttggaatttgcaaaatcaaaaaaagctcaaattcgctttatagaatttatggaaaatactcatgcttatggtaaattacaaggattaaaaagagatgaaattatacaaattttgagtcaaaaatatcaaattcaacttataaaaaaagatgaaaaagcacctgtgagtatttacaaggcagatgattatgaatttggaattatagatcctcatagccatgaattttgcgattcttgcaatcgcatacgcttaagtgctgaaggcttgttaataccttgcctttattttgatgaagcattaagcataaaagaagcggttcgaaaaggtgatattaaagccgctgtagaaatattacaagaagtattaagaaataaaccagaaaaaaataaatggagtgttgttgataatgaaacctcatctcgtgctttttatcaaactggaggttaa

SEQ ID NO: 18063 - DNA, 1005 bp, Campylobacter jejuni
atgaaaaaaatcttctttatgtttttaacagctgtttcatttttaggtgctagtgagcttaatatttactcagcaagacattataatgctgattttgaaatcataaaaaaattcgaagaaaaaacaggtattaaggtcaatcatactcaagctaaagcttcagaacttattaaaagactttctcttgaaggaagtaattctcctgctgatattttcatcacagctgatatttcaaatcttacagaagctaagaatttaggacttttatcccctgtttcatcaaaatatttagaagaatttatacccgctcatttaagagataaggataaagaatggtttgcgattacaaaaagagcaagaattattgcttacaacaaaaacacaaatatcgatattagcaaaatgaaaaattatgaagatttagcaaaagctgaatttaaaggagaaattgttatgagaagtgctacagctccttatagcaaaactcttttagcatctattatagctaatgacggaaataaagaggctaaagcatgggctaaaggtgtgcttgaaaatcttgcgacaaatccaaagggtggggatagagatcaagccagacaagtatttgcaggcgaagctaaatttgcagttatgaatacttattatatagggcttttaaagaattctaaaaatccaaaagatgtagaagtggggaattctttgggtattatttttcctaatcaagacaatagaggaacgcatattaacattagcggtattgctatgacaaaatcaagtaaaaatcaagatgcggctaaaaaatttatggaatttatgttaagtcctgaaattcaaaaaattcttactgatagtaattatgaatttcctataagaaatgatgtagaattaagccaaacggtaaaagattttggaactttcaaagaagatcaaatccctgtgagtaagatagcagaaaatattaaagaagcggttaaaatttacgatgaagtcggttttagataa

SEQ ID NO: 18064 - DNA, 1359 bp, Campylobacter jejuni
ttggaccccagtcaggttttggatttaaaccaaacttctacagcatcttttgatgcaggatattctatacttatggttgttgttgcacttgctctagtgtttttaaatggtttttttgttttgtctgaatttagtattgttaaagtacgtcgttccaagcttgaagagatggtaaaagaaaaaaaagctggtgccaagaaagctttggaggttacttcaagacttgatacttatcttagtgcttgtcaattaggaatcactttaagttctctagctcttggttggataggtgagcctgctattgcaaaaatgctagaaattccgcttattaatcttggttttagcactgttattatccatactatggctttcattattgcttttagcattattactcttttacatgtggttttaggagaacttgtgccaaaaagtatagctattgcagttgcagataaagcggttttatttatagctagaccgcttcattggttttggatgctctttttgccttgtattaaaattttcgattttttagcagctataagtttgaaactttttggaataaaacctgctaaagaaagcgagctaactcatagcgaagaagaaattaaaatcatagcaagtgagagtcaaaaaggtggagttttagatgaatttgaaacagagatcatacgcaatgctgttgatttttcagatactgttgctaaagagattatgactcctagaaaagatatgatttgtctaaataaacaaaaaagttacgaagaaaatatgcaaatcatttgtgagcataaacatactcgctttccttatattgatggctctaaagatactattttaggtatgatacacatacgagatataatacaaaatgaattaaaccataaaagtcaaaatttagatacttttgttaaacctttgattttggttcctgaaaatatcagcatttcaaaagtacttgtaatgatgaataaagaacgctctcatactgcattagtagttgatgagtatggtggaactgctggaattttaaccatggaagatatcatggaagaaattattggcgaaattaaaagcgagcatgaagaagacagctataaaaaacttgctgaaaatatctatgaatttcaaggacgatgcgatatagaaactgttgaagaaatgcttgtaataaactatgatgaggatttagaacaagttactataggtggttatgtatttaatcttttaggacgcttgcctatggtaggagatcgcattgaagatgaactttgttactatgaagttaaaaaaatggatgggaattctatagagcgtgttaaggtggttaaaaaaacaaataaagatgaagaataa

SEQ ID NO: 18065 - DNA, 729 bp, Campylobacter jejuni
atgattaaaataggaatttatggcgctaaaggacgaatgggaaaacagattgaagaatgtttaaaaagcgaaacacaagcacgaatttcgatactttatgataagggtggaaatttaggagagctttttgaaaaaagcgatgtgattattgatttttcttccccaagtggaactcatgagcttttaaattatgcaagaactatgcctaaacctttggtaataggtacaacagggcttgatgagaaaattttacatttgatgcaaagtgctagtgaagtgatgccgattttttatgcgaccaatatgtctttaggtgttgcggttttaaactatcttgctagtaaagccagtcaaatgctaagaaattttgatatagaaattttagaaatgcatcatcgccataaaaaagatgccccaagtggtacagctatgactttagctcaaagtgtagcaaaagctagaaatttagaacttgaaaaagtaagagtaagtggaagagatggcattataggtgaaagaagtaaagatgagattgccgtgatgagtttaaggggtggcgatatagtaggacgccatacggtaggtttttacgaagatggtgagtttttagaacttaatcataccgctacttcaagggcgacttttgctaaaggtgcgattaaaatcgctatttggcttagcaagcaagaagcaaaaatgtattcaatcaatgattttttaggaatttaa

SEQ ID NO: 18066 - DNA, 1182 bp, Campylobacter jejuni
atgagcctagctttgacctttcgccctgaaaattttgatgatattttaggacaatatgagcttatagaaattttcaaaaaatttactgctttacaaaaacttcctcatagtattttttttggaacagcaggttctggaaaaacaacttttgctagagttgtagcaaaagaatttggcttagatttttatgaatttgatggaggaaattttaaactcgaagaactaagaaaaattttagataattataaaaatagtctttataagcctttaatttttattgatgaaattcaccgccttagcaaaacccaacaagaaatgcttttaattcctatggaaaattaccgtttaattttaattggtgcaagcactgaaaatccctattttgttttaagttctggtataagaagtcgttccatgctttttgaatttaaatctttaggggcaaaggaacttgaaactttactcttacgcgtacaggaaaaaatgaaatttagtattgataaagaagctaaagattttctacttaaaagtgctgatgcaagagctatgctaaatttgcttgaatttgtcttggttttagatgaaaaacatatcagtcttgaaaatcttaaaaaacttcgcaacaccataaatagtgaaggtgttagctcaaaagatacacattatattttagcaagtgcaatgataaaaagtttacgcggaagtgacgttgatgcagctatttattatcttgcaagacttattgatgcaggagaaagtgcggattttatcgctaggcgtttggtgattttttcaagtgaagatgtcggaaatgccgatccaaatgctttaaatttagcagtttcgactctagatgctgttaaaaatataggttatcctgaagcaagaattatcctagcccaatgcgtagtttatttagcaagcacaatcaaatccaatgcaagctacaaagctatcaatgaagctttaaactatgtaaaaaataatgaagctttagaaatacctaattatcttaacaacaatcatcaagaaaaacaaaactatctttatccacatgattttggtggctgggtagagcaaaaatatcttggtaaaaatttaaaattttatcatagcaagggcttaggagaagaagcaaaattgttagataatttatataaattaaaaaaccataaagcttaa

SEQ ID NO: 18067 - DNA, 606 bp, Campylobacter jejuni
ttgttttacttaaataaaattttatattttttcttaattttatttttattgattggaattttgggtttctttataaattccaatccttcaaatcaaatcatcaaaaaaccctatctaccttttcttgaaataggtgatcttgtctttcgtgcaggaataggaagtgaaagttttttaatagaaaatttaagtcaaagcccttattctcatatcgctatggtagttaaaacttctccaactatactcatacatgctacaacagatgatgacaaaaatgctaaaaaccaagttatcttaagctctatggatgattttttaaaactgagtcataaaattgctattaaaagattaaaatttgatgaaaaaaccaaacaaaaaatagttgctaaagatttggaacatttaggcagaaaatttatcataagtacagataaagatgctttttactgcactacttttttagaacaatctattaactccattaccccatttcatcttcaatatactctaatcaaagctccttttaatgaaggtttatatctttttccacaaactttttttgaaaataatcaaagcgtattaatttatgaaagtcaaaatttttaa

SEQ ID NO: 18068 - DNA, 1998 bp, Campylobacter jejuni
atgatgtacaaaaaacaaaatttaccagaacttaccttaaggggtttgattttgggaagtattttaactattatttttacagcttcaaatgtatatttggggttaaaagtgggacttactttttcatcatcaattccagctgtggtcatctccatggcggttttgagtctttttaagacttcaaatattttagaaaataatatggttcaaactcaagcttcagcagcaggaactttatcatcagttatttttgttatcccagggctttttatgtgtgggtattggagtgaatttccactttggcaaacttttatgatatgtctttgtggtggcggacttggagtgctttttactataccattaagaaggactatggtggttgaaagcaagcttgcttatcctgaaggtagagccgcagctgaaattttaaaagtagccaataaagatcagagtagtaaaaaaggaaaacaaggcattaaagaaatagcattaggctcttttatagctgctatttttagtttgttaagcaatggttttaaactcgctgcaagtgagagtaattttgcttttatttggaataaaatggcttttggtttttctatgggatattctttggcacttttaggggcaggttatttagttggtttagcaggtgctatagctctttttgtaggtatgtttttagcttggggtatttttactccctatctttcaaattttgaattcgatagtacaaaaaatgccgtagatttagcttctagtgtatggagttctaaagtaaggcttataggaacaggagctattgctatagcagcgctttggactttaatagaacttttaaaacccgttattgagggtattaaagaaattgttaaaaatgttaaaattactaatcaagaaaaaaatgaaagaacaaatatagacctttctttaaaaagtatttttatactttttgttttaatggttgtgggtttatttattactttttatagttttgttgaagatgctaacttaagtatttattatcaaatgctattttcatttgttggaactttagtttctgttttaataggtttttttgttgcagcagcttgcggatatatggcaggacttgtaggatcttcttctagtcctatttctggaatcggacttattggtgttattatttcttctattgtttttttggttttaggtgtggaactttttcaagatcctatgctttctaaatttgcagtagcattagctatttttactactagtgttattttagctacagctgctatttcgaatgataatttacaagatttaaagacaggacatttagtcggagctactccttggaaacaacaagttgctttacttgtaggctgtgtttttggtgctttggctatagttcctgttttaaatttgctttatcaagcctatggttttgtcggagcaatgccaagagaaggtatggatgcttcatcagctttagcagcaccgcaagcaaatttaatgagcactatcgcccaaggaatttttcatcacaatatagagtggggttatatggcttttggtgtatttgtaggaattttaatgattattatagataaaattttaaaaggaacacagaaaatgtctttgccgcctttagccgttggaataggtatttaccttccccctgctgtaaatatacctttagttataggcggaattttaaaatatattgtaatgcaacacttgactaaaaaatatgcaaaaaattctcataaagaagaaaaacttgcaagttgtgagcaaagaggcacgctttttgcttcagggcttatagtgggtgaaagtatttttggggtaattatcgcaggaattactgtattttcagtaagtatgggtggtagtgaaaatcctttagctttaaatttagcaaattttcatgatagcgagcttttcgcacttatcttttttgtgggagttgtattatatttcattaagcgtattgttaaaaaagatgcttaa

SEQ ID NO: 18069 - DNA, 1809 bp, Campylobacter jejuni
atggaaaaagaagttattgcgtatttggacaatgagacaataattgactctcaaagtgtgaaaaatacaaatttaaaagaaatttattttgataattctaaagaaagtttagaagtaatccgtcattcttgtgcgcatttaatggcacaggcgattaagagtttgtatcctgaagctaaatttttcgttggtcctgttatagaagatggattttattatgattttcgtgtggaaagtaagattggcgaagaagatttggtaaaaattgaaaaaaagatgaaagaacttgctgaagcaaagattgaaatttcaaaatatgaaatcacaaaaagcgaagctttggctaaatttcaaaatgatgatttaaaacaagaagttttattgcgtattcctgatagagctgtaagtatttataaacaaggtgaatttgaagatttgtgtcgtggtcctcatgtgccaaatacgaaatttttacgcttttttaaactcactcgtgttgcaggagcgtatttgggtggcgatgaaaaaagagaaatgcttactcgaatttatggaactgcttttgcagataaggaaagtttaaaagagtatttaaccattattgaagaagctaaaaaacgcgatcatagaaagcttggaacagagcttaagctttttacttttgatgatgagatcggaggaggtcttcctatttggttgagtaatggtgcaagacttagatctaaacttgaacatatgctttataagatccatcgtttacgtggttatgagcctgtgcgtgggcctgaacttttaaaagcagatgcatggaaaatcagtgggcattatgcaaactataaagaaaatatgtattttacacaaattgatgaacaagaatatggcattaagcctatgaactgtgtgggacatattaaaatttatcaaagtgatgtaagaagttatcgtgatttgcctttgaaattttttgaatacggcgtggtacatcgtcatgaaaaaagtggcgttttgcatggactttttagagtgagagaattcactcaagatgatgcacatattttttgtatgccaagtcagattaaagagcaggttttagaaattttagcttttgtggataatttgatgaaattatttgattttagctatgaaatggaaatttcaactaaacctgaaaaagccataggtgatgatgaaatttgggaaatagcgactaaggctttaaaagaagctttagatgaacaaggtttaaaatacggtattgatgaaggtggcggggctttttatgggccaaagattgatattaaaatcaccgatgctttaaaaagaaagtggcaatgcggaaccatacaagtagattttaacctgccaagtcgttttaaacttgaatacactgatagtgataatgaaaaaaaacaacctgtaatgttgcatcgtgcgattttaggttcttttgaaagatttataggaattttaaccgagcattgtgcgggtgagtttccattttttatcgcaccaactgcggtgggtatagtgccaataggcgaagcacatattgcttacgcaaaagaaattcaaaaagaattattagagcttaatatcgatagcgaggtgtatgaaaaaaatgagagcttaagtaaaaaaattcgtatcgctgaaaagcaaaaattacctatgattttagttttaggcgatgatgaggtggcaaagcgtagcgttgctttaagagatagaagagctaaagaacaaaaaaatcttagcttggacgaatttattaaattagttaaggagaaaatgagtgaggtacacttttga

SEQ ID NO: 18070 - DNA, 519 bp, Campylobacter jejuni
ttgagtaaagaaaaagaagtattgctcaatgaagaaataagagcggatgaaatcagatgtgttggcgatgatggcaaagtttatggtattatcagtagtgatgaagctttagaaattgcaaatcgtttaggacttgatcttgtaatgatagctgcagatgctaagccacctgtttgcaagatcatggactatggtaaattccgttatcaacaagagaaaaaacaaaaagaagcaaagaaaaaacaaaaagtgattgatataaaagaaatcaaactttctgtaaaaattgctcaaaatgatattaattacaaggtaaaacatgctttagaatttttagaacaaggtaagcatgtgagatttcgtgtgttcttaaaaggacgtgaaatggcaactcctgaagcaggtgtagctttgcttgaaaaaatttggactatgatagaaaatgaagctaatcgtgacaaagagccaaattttgaaggtcgttatgtaaatatgcttgtaactccaaaaaaagcttaa

SEQ ID NO: 18071 - DNA, 1188 bp, Campylobacter jejuni
atgaaaatggattataaagaacaaagtcatattatccctacctataagcgttttgatatagttttagaaaaagggcagggggtttatctttttgacgataaggctaaaaaatatcttgatttttcaagtggcataggtgtttgtgctttaggatataatcatgctaaatttaatgctaaaatcaaagcgcaagtggataagcttttgcatactagcaatttatattataatgaaaatatagctgctgcagctaaaaatttagccaaagctagtgctttagagcgtgttttttttacaaattctggtacagaaagtatagaaggagcgatgaaaacagctagaaaatacgcctttaacaaaggtgttaagggtggacaatttatcgcttttaagcattcttttcatgggcgtactttaggggctttatcgcttactgctaatgaaaaatatcaaaagccttttaaacctttaatttcaggggttaaatttgcaaaatataatgatatttcaagcgttgaaaaactggtgaatgaaaaaacttgtgccattatcttagaaagcgtgcaaggagaaggtggaataaatcctgcaaataaagatttttacaaagccttaagaaagctttgcgatgaaaaagatatattattaatcgctgatgaaattcaatgtggcatgggtagaagtggaaaattttttgcctatgagcacgcacaaattttgcctgatatcatgacttcagctaaggccttaggttgtgggcttagtgtgggtgcttttgtaataaatcaaaaggtagcaagcaattctttagaagcaggcgatcatggtagtacttatggtggaaatcctttagtttgtgcaggagtgaatgcggtttttgaaatttttaaagaagaaaaaattttagaaaatgtcaataaactcacgccttatttagagcaaagtttagatgagttgataaatgaatttgatttttgtaaaaaacgcaaaggcttagggtttatgcaagggctgagtcttgataaaagtgtaaaagtagctaaggtcattcaaaaatgtcaagaaaatgcacttttattaataagttgcggggagaatgatttgagatttttacctcctttgattttacaaaaagaacatattgatgaaatgagtgaaaagttaagaaaggctctaaagagtttttaa

SEQ ID NO: 18072 - DNA, 549 bp, Campylobacter jejuni
atgcttataaaatttaaaaatcatagtcccaaactaggtcaaaatgtttttgttgcagagggcgctaaaatcataggagaaatagaaataggagatgaaagtagtatttggtttaattgtgttttaagagccgatgttaattttataaaaattggcaaaagaaccaatattcaagatcttagcacagttcatgtttggcatagggaatttgatgaaaaaggaaagttaaaagatgctggttttcctacaataataggagatgatgtaactataggacataattgcgttatccatgcttgtgtgataaaaaatcgtgttttaatcggaatgaatgctgttatcatggataatgctttgatagaagaagatagcatagtgggtgctggaagcgttgtaacaaagggtaaaaaatttccgccacgctctttgatacttggaaatcctgcaaaatttgtgcgtgaattaaacgatgaagaagtcagctttctaaaacaatccgctttaaattatgtggattttaaaaacgagtttttaaaagatcttcagtga

SEQ ID NO: 18073 - DNA, 1374 bp, Campylobacter jejuni
ttgatgacttctaaaacttctttagccttgctttgtgatttttatgaatttacaatgtctcaaggctatttcaaaaacaataaaaaagatcaaatttgttattttgatatattttttagaaaaattccagattcaggatcttttgctatttttgcaggtcttgaagatattttagactttgttgaaaatttgagttttgatgcagaagatatagaatttttaagaaaacaaggtatttttgatacagaatttttagattttttagctaactttaaatttaagggtgaaatttatgctatgcgtgaaggagaagtgatttttccaaacgaacctttgctatgtattaaagctacaaccatagaagcacagcttttagaaacttttttacttttaagtttaaaccaccaaagccttattgctaccaaaaccaatcgtatcgtgcgtgcagctaaagacagtaaaattttagaatttggttcacgcagagcacaaggaagtgaagcagccttaaaaggagcaagagcagcttttataggaggttgcataggaagtgcttgtactttagcaggaaaaatttataatatccctatcaatggaactatggcacattcttgggtgcaaatgtttgaaaatgaacttgaagcttttaaagcttatgtgaaaatttatccaaaaaatcctgtttttttgattgatacttatgattgtctaaatagcggacttaaaaatgcgattaaagtttttaaagaatttggtattcaagaaggcggcgtgagaatagattctggaaatttacttgagttgagtttgaaaatcagacaagagcttgatcaagcaggacttcaaaaatgtaaaatcatagtttctaacgcacttgatgaatggagcattaaaaaactcaaagaacaaaatgcacctattgatatctttggtgtaggtgaaagattgatcactgcttcaagtgaccctatttttagttgcgtttataaactcgcagccttagaagatcaaggcataaaacctaaaatcaaaatcagcgaaaataacgaaaaatcaaccctacctcattttaaaaagctttttagagtttatgataaaaacacgcaaaaaatcctttttgatgaactttatgtttttgacgaaaacccaaatcaagatgaaaatttagaacgcaaagaacttttagaattagtctacaaagaaaaaagacttcttaaaaagtcatctttaaatactattcaagattatacaaaagagcaaatttcaaaactcgatgagagttttttagatcttgatcgttttgtgaaatttgaagtaaaactctcgcctaaacttcaaaatatcactgaagatcttttaaaaactcgtttttaa

SEQ ID NO: 18074 - DNA, 1023 bp, Campylobacter jejuni
atgcaaagaaaaagaatttacaatccaagttcaaacgaaaccctaggagatcgtaaagtttttgatggcaacccacatggaattttaaatttcactaaggcaaaatatacttgggctttaaaactttgggatttaatggaggcaaatacttggtttccaaaagaagtggatacaactaaagatgcacttgattatcgctgtaatttaactgcaggtgaaaaaagaatgtatgatttggtttggagtcagcttatttctatggatagtttccaaaccaataatttagcagataatatcaacccttacatcacagctcctgaaatcaatgcggttttggcacgccaagcttatgaagaggcaaaccattcaaaatcttacgctgttatggtagaagcgatttgcgataatacagatttgatttatgaaatggaaaagcatgatgaaactttgcgtgaaaaaaatgactttatttcaagtatttatgaagaattagcaggcgatgtagatgataataaacttcttttggctatggtggcaaatcaaattttagaaggagtatatttttatagtggttttactgccatttacgcacttgcacgtgcaggaaaaatgctaggttcagcacaaatgatccgctttatccaaagagatgaaatcacacatcttttattatttcaaaatatgatcaattcagtacgcaaagaaagacctgatttattccatgatgaaaatatcaataaaatttatgatatgtttaaaaaagctggagatcttgagatcaaatggggtaaatacatcactcaaaatcaaatcatgggctttactgatgatatcatagaagaatatatccattatcttgtagatcaaagattaagtgcgatcaatttagataagttatataatgcaaaacatcctattaaatgggtagatgatttttcaaaatttaacgatcaaaagagcaatttctttgaaagtaaagtaacgaattattctaagggtagtataagctttgatgacttctaa

SEQ ID NO: 18075 - DNA, 609 bp, Campylobacter jejuni
atgaatttagagcaaatttataaagattgtggtgcttatttagaagggcattttttactaagttcaggtaagcattcgcagttttatcttcaaagtgcaaaagttttagaggatccaaaattagcagcaaaactttgtgatgaacttgcaaagattattgcaagctataagatagaatttgatagcatttgctctcctgctttaggtggaattttagcaggttatgagcttgcaagagcttgtagtaaacgttttatcttcactgaaagagtaaataaagaaatgactttaagacgtggttttgaagtaaaaaagggtgaaaaatttataatttgtgaagatatcattactacaggtggtagtgctttagagagtgcaaaaatcattgaaagtttaggtggtattgttgtaggttttgcagcattggcaaatcgtggtttttgtgcagtagaaaatttaaaatctccaagaaaagataatgcgaaattacctgaaaatttaccactctttactctaggaaattttgaatttgaaatttacgatgaaacaaattgtccactttgtaaaaaagggaataaagctataaaaccaggaagccgtggaaattaa

SEQ ID NO: 18076 - DNA, 564 bp, Campylobacter jejuni
atgataatgctaaatgaaatttttaacaaacaaaaaacccaaagtgaaaaatctttagaagccttaaaaaaagactttaccactttaagaactggaaaagttaatatccatattttagatcatattacagtggattattatggaactcaaactcctttaaatcaagtagcaactgttttagcaagtgatgcttcaactattagcatcactccttgggaaaaacctttactaaaaaccatagaaagcgctattgcagctgcaaatatcggtgtcaatccaaacaatgacggcgaaagtgtaaaattatttttccctccgatgactagagagcaaagagaagaaaacgtaaaacaagctaaagctatgggtgaaaaggcaaaagtttctataagaaatatacgcaaagatgccaacgatgcagttaaaaaactagaaaaagataaggcaataagcgaagatgaagcaaaaaaagcttatgatgaagtgcaaaaacttaccgacacctatacaacaaaaattgatgagggtgtaaaaagcaaagaaagtgaacttttaaaggtttaa

SEQ ID NO: 18077 - DNA, 1884 bp, Campylobacter jejuni
atgaaaaaaattatttttagtttatgtttttttattttacaccttggagcacaagaatttaaatttattgatgcgaatattagtaaagaagatgaaggaatttatgctttagttgaaaaatatgttgatcttaacaatcaaattaaagaatttaagaaaaacaatgatgaaaattcaagcacttttaatggtattttaagtgaatttgaaaaagacaaaaagactattttagcaaaaatacccgatatgatagtaggacaaaagattaatgaagaggcagtggctagatttttaaaagcaaaagaaaaattactagatgttcaaaaaaagaatattaataagccttacatttatacagatgccactcttaatctagtttattttaacattgtggaaagtttttattcttctttgtttgaagtggaaaaactttttaaaaatacagcaagcagtgaagatttgattgctactgttgataaggcaatggaaaatttacaaaattcttctaatgttaatttagatagttttaaaagcaaaattacaaatccagaagaattagaaaaaattaccctaaaagaaagatatatcagtaatgccgtagattcttattctgaaattcttaagtatttacgttcaaatgcagatttgcttgaaagtaattatattttttcattactcgagcttcaagtttggatagatcgtataaatgaggcaattggggtaagttttgttaatatcggaaaaatagtaatttctgctttggttttagtattttttatatctttaagacgtttttttgcaaatatagtatattttttccttgttcagcttttttatagaaataaaaatgatgtagatgatattaaagtcatttttattgagaatattaaaaaacccgtaggtttcttgttgattgtctatgctatttctctttgtcttactatagcaacttatcctgcacctttgagtgtaaatttaagtaatttttttcatatagtttatgcagttttaattgcatggcttattttaagaatgcttgatggttatggcgtggtattggtttctaaacttgctcaaaaaagtggaaaaaaagaagttgtaaatttaattattaaaattttatattttgtcattattatcatagctttattatatattcttgctcaacttggttttaatatttcggctattattgcatctttgggaattggtggtttagctgttgctttagcggcgaaagatatcattgcaaatttctttgcttctatactcttactttttgataatagctttaatcaaggagattgggtagaggtttcaggcatagaaggaactgtggttgaaacaggacttagaaaaactactattagaacttttgataattgtcttgtatttttaccaaattcaactattatgggagctaatatcaaaaattggagcaaaagacgcatgggtcgccatgttagaatgtatttgggtgttggttatgatgctactcctgaaaaactagaacaatgtgtaaaagatctaagagaatttttgcatacaagtgatttagtagctcacgatgaggatagcgcattaaaatatggcgatcatacaacaaaatatcgtcaaaatcttgtatctattaatgatttagaaggctataaaaatgcttgttatgtggctttaagtgaatttgcagatagtagtattaatatagagctttatttttatatcaaagaaataggtggaaaagattttagagaagctagacaaagtttaatgcttgagtttatgcgtataattgaaaaaaatggtttaacctttgctttcccaagtcgtagtatttatatagaaaatttaccaccccttgatttgcaagcaaaagctataaaatag

SEQ ID NO: 18078 - DNA, 972 bp, Campylobacter jejuni
atgggaaaaaatagtttaattggtggatccatttgggatgagtattcacaaaaagttcaagatagaatgaataatcctcaacatatgggagaatttagtgaagaagatgctaaagcacgcaatgcaaaattgatcgtagctgattttggtgcagaaagttgtggcgatgcagtaagacttttttggcttgtagatgaaaaaactgataaaattatcgatgcaaaatttaaaagttttggttgtggtacagctatagcaagtagtgatactatggtggatctttgtataggaaaaactgtagatgaagcagtaaaaatcacaaatttagatgtggaatttgctatgcgtgataatccagaaactccagctgttccacctcaaaaaatgcactgttcggttatggcttatgatgtaatcaaacaagcagcagcgcattataaaggtataagtcctgaagattttgaagatcaaattatagtttgcgaatgcgctagggtaagtcttggaactattaaagaagtgattaaacttaatgatttgcatagcgtagaagaaatcacacaatacactaaagcgggtgctttttgtaaatcctgtatcaaaccaggcggacatgaaaaaagagattattaccttgtagatattttagctgaaactagagctgaaatagatagagaaaaactcaaaaatacaatgaaaagtgatgtagcttttgatgaaatgaccgtagtgggacaattaaaagcagttgaaagtgttttagatgctgaaattcgccctatgcttcataatgatggcggagatttggaagtgattgatatacaaaaggctgaaggtgcagcaattgatgtttatattcgttatcttggtgcttgtagtggttgttctagtggaagtggtgcaacactttatgctattgaaacaattttacaagaagaattaagtccaaatatacgcgttatgccggtttaa

SEQ ID NO: 18079 - DNA, 402 bp, Campylobacter jejuni
atgacttataatgaaaaaattatttcaatgaataatgatcttttagatcatcaacataaagaactttttgaaatttctaaaaaactctctttaatgaaccaacgtcatgttggaacaaaagaattaaaaattgtcttaagagagttgttaataatgatcaatagacatttttcagatgaagaagcctttatgagagaaatagaatatccttatatcaaccatcatacaagaattcacagaaaaattatcttagaaattgaagaaattatcatcagtgaagctaaatttgtaaatataatgaccgaaaaattaaatctcgttgttcaagattttatctttaaacatacagccaaagaagattcaaaaatagtaaagtattacgaagaaaaatttaagaaatag

SEQ ID NO: 18080 - DNA, 192 bp, Campylobacter jejuni
atgccaaagatgaaaagcgttaaaagcgcagttaaacgcttcaaagtaggtaaaaataaaatcaaaagaggctcagcttttagaagtcatattttgactaaaaaacctgcaaaaagaatgcgtggtcttcgcacagctaaatatgtgcatagcacaaatgtaaaagctgttgaaaaaatgctaggaatttaa

SEQ ID NO: 18081 - DNA, 354 bp, Campylobacter jejuni
atggcaagagtaaaaacaggtgttgttagacgccgcagacataaaaaagttttaaaattagcgcgtggtttttatagtggacgccgcaaacattttagaaaagcaaaagaacaattagaaagaagtctagtctatgcttatcgtgatagacgccgcaaaaaaagagacttccgtcgtctttggattgtgcgtatcaatgctgcttgcagactcaatgatttaagttattcaagatttatcaatggtcttaaaaaagcaggcattgaacttgatagaaaaattctagcagatttagctatgaatgatgctgctgcttttgcaaaaattgcagaggctgcaaaaaaagcactttga

SEQ ID NO: 18082 - DNA, 357 bp, Campylobacter jejuni
atgaagcctaaatatcattttttaaataacgcaagatatgctttagaagggctttttgctttatttaaaaatgaaatggcgtttagaattgaactttgcattattatccccgcgatagtttttagttttttcttaaaaattagttttttggagcatttgttattgataagtgtcttaatacttatcttaattgtagaagctttaaattcggctattgaagcttgtgttgatttgattacaaacgaatggcatgaaaaggcaaaaatcgctaaagattgtgcgagtgcggcagtgttttttagtgtgcttttagctctttttgtttggggctttattttatataatatttacttatga

SEQ ID NO: 18083 - DNA, 1008 bp, Campylobacter jejuni
atgaaacttaaaaatcctttagatatgcatttgcatttaagagataaccaaatgttagaacttattgcacctttgagtgcaagagatttttgtgcagctgtgattatgccaaatttaatccctccgctttgcaatttagaagatctaaaagcttataaaatgcgtatccttaaggcttgtaaagatgaaaatttcactcctttaatgacacttttttttaaaaattatgatgagaaatttctttacagtgctaaagatgaaatttttggcattaagctttatccagcaggaattacaacaaattcaaatggtggagtttcaagttttgatatagagtatttaaaacctactttagaggctatgagtgatttaaatattcctttgctagtgcatggtgaaaccaatgattttgtaatggacagggaaagtaattttgctaaaatttatgaaaaattagccaaacattttccacgacttaagattgttatggagcatattaccactaaaactttatgtgaacttttaaaagattatgaaaatttatacgcgacaatcactttacatcatttaatcatcactttagatgatgttatcggaggtaaaatgaatcctcatcttttttgtaagcctatagccaagcgttacgaagataaagaagccctttgcgaacttgcttttagtggttatgaaaaagttatgtttggaagtgatagtgcgcctcatccaaaagatactaaagagtgttgcggttgtgccgcaggtgtatttagtgccccagtgattttacctgttttagctgaattatttaagcaaaatagctcagaagaaaatttgcaaaaatttttaagcgataatacttgtaaaatttatgatttaaaatttaaagaagataaaattttaactttagaagaaaaagaatggcaagtaccaaatgtttatgaagataaatacaatcaagtcgtgccttatatggctggagaaattttgaaatttcaattaaaacattga

SEQ ID NO: 18084 - DNA, 915 bp, Campylobacter jejuni
atgatctcagcagataaaatttggatggatggaaaattagttgattttaaagatgcaactttgcactttttaacccattctttgcattatggcaatgctgtttttgaaggaactagagcctataaaacagataaaggcttagcaattttcagacttgaagatcacaccaaaagacttttagagtctgcaaaaattactcttttaaattgtcctttttctcaaaaagagcttgaaaatgcacaaattgaactcttaaaagcaaacaattttaaaagcaatgtctatatccgccctttgattttcttaggcgatggagttatgggactttatcatataaaagctcctgtaagagttgggattgcagcttgggaatggggtgcttaccttggagaagaaggtttagaaaaaggtataaaagtaaaaatttcgtcttttgcaagaaatagtgttaaatcatgcatgggaaaagctaaagcaagtgcgaattatcttaactctcaaattgcaaaatttgaagctattgaagcaggctatgaagaagctttgatgcttgatgaagaaggttttatcgcagaaggaacaggagaatgtttctttattgtaaaagatggggttttaatcacacctccaaatgatttttctttaaaaagcattactcaagatacagtgcttaaaatcgctcatgatcttggtattactgtgcttcgccaaagaatttcaagagatgaagtttatactgctgatgaagcattttttaccggaacagccgctgaaatcacacctattaataatattgatgcaagaataataggaaatggtttaagaggatctgtaactaaaaaacttcaagatgcttattttgatgtagtttatggacgcaatgaaaaatacgcatctatgctaacttatatttaa

SEQ ID NO: 18085 - DNA, 441 bp, Campylobacter jejuni
atgatagatgtaatgcaaattcaagaaatcttaccacaccgttatccttttttactagtagataaaattacagaattaaaagttaaagaagtggtgctaggatataaaaacatcagtataagtgaccatgtttttatgggacattttccagggcatcctatttatcctggagttttgattttagaaggtatggctcaaacaggtggagttttagcttttgaaagtatggaagataaagtggatccaaaaagtaaagtagtttatttcacaggcatagatggagcaaaatttagaaatcctgtgcgtcctggagataggcttgattatgaaatgagcgtggttaaaaatcgtggtaatatgtggatttttaaagggcaagcttttgtagatggaaatttagttgcagaggccgagcttaaagctatgatagtggataaataa

SEQ ID NO: 18086 - DNA, 1254 bp, Campylobacter jejuni
gtggaattcctgtctataggggtaaaaataatgcctagaaaatgtagtttttgcaatgaagtggagaatccacaaagaagaattttagcaaatgaaaatgatgatgcttttatttgtgaatattgcgttgaaggtgcttatagtattatttatggagaagaaaaagaatttaaagaacctaaacaaagtcataatacagaatttaaagatatcactccaaaagaattaaaagcttatttagatcgttatgtcataggacaagatagagctaaaaaagtttttagtgttggagtatacaatcattataaaagactttttaaagctgaacttcaagatgatgatacagagctttttaagtcaaatattttacttgttgggccaacaggaagtggaaaaactttattggcgcaaactttagctaaatttttagatgtacctatagcaatttgtgatgcaacttctttaactgaagcaggatatgtaggtgaggatgtggaaaatattttaacacgtcttttacaagctgcagatggagatgtgcaaagagctcaaaaaggtatagtttttattgatgagattgataaaattgccagaatgagtgaaaatcgttctattactcgtgatgtaagtggagagggtgtgcaacaagctttacttaagattatcgaaggaagtttggtaaatattccaccaaggggggggagaaaacatccaaatcaagagtttatacaaattgacacttcaaatattttatttgtttgtggtggagcttttgatggtttggaaactatcttaaaaagaaaacttggagataaagttgtaggtttttttgatgatgcaaaagaagaaaataaagctttacttgagaaaattgaacctgatgatttggttcattttggtttgattcctgagcttataggtcgtttgcatgtgattgcatctttaaatgagcttaatgaagaagatatggtaagaattttaactgaacctaaaaatgccattattaagcaatatcaaaagctttttgctattgatggggtaaatttaaaatttgaagaagatgctctaagagctatcgcacaacttgcattggagagaaaaacaggggctagggggcttagaagtattatagaagaaatgatggtagatttaatgtttgagttaccagagtataaagactatgatattgtaataaccaaagaagttgttaaagacaatgcaaaggcattattaataaaaagaaaaataagttaa

SEQ ID NO: 18087 - DNA, 1041 bp, Campylobacter jejuni
atgatattagatcaacttataggatttttttctagtgatatggggattgatttaggaacagctaatacgctagttttggtaaaagataagggtatagtgataaatgagccttctgttgtggcagttgaaagagaaaggtatgattccaaagcaaaaattttagccgtaggtaaagaagctaaagatatggtgggaaaaactccaggcaatatcgaagctattcgtcctatgaaagatggcgtgattgcagattttgatatgactgaaaaaatgatccgctattttatagaaaaaacacaccgtagaaaaagttttttacgccctagaattatcatttctgttccttatggtttaactcaagtagaaagaaaagcggtaagagaaagtgctttaagcgcaggtgcaagagaggtatttttgattgaagagcctatggcagcagctattggtgcaagtttacctatacaagagcctaaaggaaatttggtagtagatatagggggtggaactactgagattggagtgatttctttgggtggacttgtgatttcaaagtctattcgtacggctggagataagcttgatatgagtatagttaattatgtaaaagaaaaatacaatcttatcataggtgaaagaacaggcgaagagatcaaaatcactataggttcagcaatacaacttccaaaagagctttctatggtggtaaaaggacgcgatcaagtaagtggacttttaagtcgtattgaacttacaagcgaagatgtaagagaagcgatgcgtgagtatttaaaagaaattgctgatgctttaaaaatggttcttgaaatgatgccgcctgatttagcaagtgatatagtagaaaatggtgtagttttaacaggtggcggagcattgattcgtggtcttgataaatacttaagtgaaattgtacgtttgccagtttatatcgcagatgaaccgcttttagctgtagcaaaaggaacaggtaaagctttagaggaaatttcattattgcaacaattaaccaatgaagaataa

SEQ ID NO: 18088 - DNA, 3270 bp, Campylobacter jejuni
atgccaaaacgaacagatattaaaagcattttacttataggaagtggtcctattgtgataggacaagcttgtgaatttgattattctggaactcaagccgcaaagactttaaaagaattaggatatcgtgtagtattaatcaactcaaatcctgcaaccatcatgacagatcccgaatttgcagatgcgacttatatagaacccataacaaaagaaagtattttaagtattattaaaaaagaaaaaattgatgcaattttgccaactatgggtggacaagtagcgttaaatgttgctatggaagtttatgaaagcggacttttaggagatgtgaaatttttaggcgcaaatcctgaggcgattaaaaaaggcgaagatcgtcaggtttttaaagaatgtatgaaaaaaattggcatggatttgccaaaatcgatgtatgcgtataattatgacgaagctttaaaagccgtagatgaaatcgactttcctttgatgatccgtgcttcttatactttagggggtgctggaagtggtgtggtttacaatatggacgaatttaaagaacttaccaatactgctttagctttatcacctattcatgaaattttgattgaagaaagtttgttaggttggaaagaatatgaaatggaagttatacgcgatagagcggataattgtatcatagtttgtagcatagaaaatatcgatcctatgggagttcatacaggagatagtattacaatagctccagcattaactttgacagataaagaatatcaagttatgcgtaatgcttcttttgctattttgcgtgaaattggtgtagatacaggcggaagtaatgtgcaatttgctatcaacccaaaaaatggaagaatgatagttatagaaatgaatccaagagtttcaagatcaagtgctttagcttctaaggcaacgggttatcctatagcaaaggttgcgacacttttggcagtaggttttagcttagatgagattaaaaatgatattacaggaactcctgcatctttcgagcctgtgattgattatattgtaacaaaaattcctcgctttacctttgaaaaatttccaggagcaaatacaactttaggtacagctatgaaaagtgtgggtgaggtaatggctataggacgcacttttaaagaaagtatacaaaaagcactttgttcgcttgagcgttctttaagtggttttgatagggtaaaatttgaagatagaaatgatcttgtttttaaaattcgcaatgccaatgaaaagcgtttactttatgttgctcaagcttttagggaaggttttagcgtagaagaactttatgagctttgtaaaatagatccttggtttttaacacagattaaagaaattgtagattttgaagaacaaattgatatggatattttaaacaataaggctcttttgagaaaagcaaaaactatgggcttttcagataaaatgatagccttgcttgtaaatttgaaagataatttagaattaagccaaaatgatatttattatgtaagaatgaagcaaaaaatcatcgcagaatttagtgaagtggatacttgtgcgggtgaatttgaagccttaactccttatctttattcaagtatcaatgtaagcgaactcactcaaagtaaaaacgatgctaaggataaaaaagaaaaaaaagtgatgattataggtggggggccaaaccgtataggacaaggtatagaatttgactatgcttgcgtacatgcttcttttgcgcttaaagatatgggtattaaaactattatgtataattgtaatcctgaaaccgtttcgactgactatgatacaagtgatattttgtatttcgagcctattgatttcgaacatttaagagcggtgattgagcgtgaaaaacctgatggagtgattgtgcattttggtggacaaactcctttgaaatttgctaagcgtttaagtgcttttggagctaagattataggtactagcgcaagagtaattgatatggcagaagatagaaagaaatttgccgaatttattacaaagctaggtatcaatcagccaaaaaattctactgcaacaagcgtagaagaagcggttcttaaggctagtgatatagggtatcctgtgcttgtaagaccaagttatgttttaggtgggcgtgcgatgcgcgtggtaaatgatgaggctgaacttagactctatatgcaagaagctgtggatgtaagcgataaaagccctgttttgatcgatcagtttttagacaatgctacagaaattgatgttgatgcgatttgtgatggcaaagatgtttatgttgcaggaattatggagcacatagaagaagcaggaattcattcgggtgacagtgcttgttctttgccgccttgcaatatcgatgaaaaaatgcaagaatttattgcacaaaaaaccgcagatattgctttaaatttgggagttgtaggacttttaaatatacaatttgctttacataataatgagctttatatgatagaggtaaatcctagagctagtcgtaccataccttttgttagtaaagctacgggtattcctttagcaaaagtggcaacgcgtgtgatgtggcaaggaaatttaaaagaagctttaaaattttatgatacttttaaagtggttaattttgatactaaaattttacgccctaaaactccaaaatatatgagcgtgaaagaagcagtatttccatttgcaaaacttagtggaagtgatttagaattaggtcctgaaatgcgttcaacgggtgaagttatgggtataagcaaggattttgcaaattcttatgcgaaaagtcaaattgcatcgtttaatcatcttccagagcaaggcgtggtatttatctccttaaaagataaggataaaaaatataccaaaaaaatcgctgcagaatatgtaaagcttggctttaagcttatggcaacagggggaacttgcaaggaaattttagaaagtggttttgagtgcgaacttgtacataaaatttcagaaggacgccccaatgttgaagataaattgaaaaatggagaaattcacttagttatcaatacaagcgatagtcacagttttaaaggcgatacgaaaaaaattcgtgaaaatattattcgttttaaaataccttattttacaaatttacgatcagctttagcaggtgcaaaatcgattaaagctatacagagtaaatcttgcctagatgtaaagagtttgcaagagtggcttaaatcttga

SEQ ID NO: 18089 - DNA, 978 bp, Campylobacter jejuni
atgaaaaatttttctctttggtgtgattttatagaaaatagttttttagataatgaatttttaaatttattatcacatggaattaatggcgctacttcaaatcctgctatttttaaaaatgctattttaaattctccaatttataaagataaaattcttaaattaaaagaaaaaaaaacaaaagatatttatgaagaattagcaatttctgatattcaaaaagcagctgataaattagctcctcttttttatcaaaaaaatgatggatttataagtattgaaatagatccaagacttcatgataacacaactcttagtttaggtgaagctaaaagactttatagtgctattggcaaagaaaatataatgattaaaattccagctacaaaagcttcttatgaagtaatgtatgaacttatgaaaaatggtattagcgtcaatgctaccttaattttttctcttgaacaaagtcaaaaatgttttgaagctttaaatgcaggtttagtcgaatttagaaaaaacaatatagccttaaaagaacaaaacactagaacaccacaagctgttataagtatttttgtaagtcgttttgatagacttttaaatcctaaggctaaggagcaaaatcgtattggaattttaaatgcaaatttagcttataacaatatctactcaaaaaatgaacctaatattcgtgccttgtttgcaagcaccggagttaaaggagatgatctgccaaaagactattatatcaaagaacttctttttgagaattctgttaatactgctcctcttgatgcaatagaggcatttaaaggaaaaatgcattttaaaaaacctttaatgaattttgaaatttatacagaacttaatcaaatcatttctcaaagtgaacgagaaaaagcttgcaatgatttattaagtgatggcctagagcaattttgtattgcttttgaagatattttaaaagctctttaa

SEQ ID NO: 18090 - DNA, 522 bp, Campylobacter jejuni
atgagtaatgaaaaattagagcaaattttgcaaaaacagcaaactcagatggctggtcctgatgtcgatcaaagagaagatgatatcatccaacttgttggctttgtagttggagatgaggaatatgcgattccaattcttaatatacaagaaatcatcaaacctatagaatatactagagttcctagtgtacctgattatgttctaggggtttttaatatgcgtggtaatgttatgccgctcattgatctagctcaacgctttcatttaggaagttctaaaatgacacctcaaacaagatatattgttttaagaggtgagacaaatggaactggagttggaggaaatgctggttttgttatagatagattaactgaagcaattaaaattcacagaaacagaatcgatccaccacctgaaactttagttaaagacaaaggtatgatttatggtataggaaaaagagatgaaaatatcttaactatactcaaagtagaagctttgcttaagcgcgaattttaa

SEQ ID NO: 18091 - DNA, 1095 bp, Campylobacter jejuni
ttgaaaacctttttagtttgtgctttagagccttcagcaaatttgcatttaaaagaagttttaaaagcttataaaaaagattttggtgaatttgaacttcatgggatttatgatgagagtttatgcaaagaatttgatttaaattctaaaccactttatagctcacatgaatttagtgctatgggttttatagaagttttacctttgattttcaaagcaaaaaaagctataaaagaacttgcaaatttaagctttactcaaaaaataaatgggattttatgtatagattcacccgcttttaacataccttttgctaaagctttaaaaaaagcaggcagtaaaattccacgcatttattatatcttgcctcaagtttgggcgtggaaaaaaggtcgcatacctatcatagaaagtcattttgatattttagcttctattttgccctttgataatcaattttttaacaaaagcacctatataggccatccgcttttagatgagataaaagaatttaaaaatcaagaagacattaatcatacattttcaaaaaaagatgatgaaaaaactatagcctttttaccaggttcaaggcgtagtgaaattaggcgtttaatgcctatttttaaagaactttctcaaaaatttaagggtaaaaaaattctttgcgttccctcatttaatcttgaaaaattagaagtttatggtgatattagcgaatttaagatagaaagtaacactccaaaagtgcttaaaaaagctgattttgcctttatttgtagtggaacagctactttagaagcagctttagtgggaactccttttgttcttgcttataaggcaaaggctatcgatatttttatcgcaaaactttttgtaaaattaaaacatataggacttgcaaatattttttgtgatttcgctggaaaagaagctttaaatcctgaatttttacaagataaagtcaatgttttaaatttatatgaagcttacaataaatatgattataaggcattttttgctaaagttgattttttaaaagaatatttacaatttggaagtgctaaaaatttagcaaaaatcctaaacgaaatataa

SEQ ID NO: 18092 - DNA, 825 bp, Campylobacter jejuni
atgagaaaaagtatgattagttttttggaaaaaaaggccaaaaatgaaaaaataaccatggtaagtgcgtatgattatcatagtgcaagaattttagacaatagcgatatagatattatattggttggagattcattagccatgacggtacttggtatgcaagatactttaagtgttactatggatgaaatgttgatttttaccaaagctgtttctcgcggagctaaaaagtctttcgtacttgctgatatgccttttatgtcttatcaaagttcagatcgtgacgctatcttaaatgcctcaagatttatcaaagaaagccacgcaaatggggtaaaagtggaagggggtatagaaatcgcaagtaagattaaattgatttcccaatcaggaatacccgtcgttgctcacctaggactaaccccacaagctgtaaatatgctaggtggctatagggttcaaggtaaagatttacaatcagcccaaaaaattatagatgatgcaaaagctgtgcaagatgcgggtgcttgtatgttggttttagaatgtgtgcctgtaaaactagcacaaaaaataagctctattttagaaattccaacaatcggcataggttcaggcaaatactgcgatggacaagttttagtttatcacgatcttttgggtttaaataaagattttaaagcaaaatttgtaaagcattttgataaaattgatcctcaagtaggagttgaaaaatatagagatgaagttaaaagcggtatttttccttcccaagagcacagctttgattatttagatgatgaattattagataaattatactaa

SEQ ID NO: 18093 - DNA, 750 bp, Campylobacter jejuni
atgaaaaagtttgtagtattttttgggattttgctttttgtttcgtgtttaaatgcgcaaaatttaagtatttttgtagcttcttcagcttcaaaggcgatgagtgaagttaaagatgagtttttgaaaacacatccagaagataaaatagaattggtttttggtgcttctggaaaatattatgagcttttaaaacaaggaagagaatttgatctctttttttcagcggatactaaatatgctaaggctatttatgatgataaaaatgctttaataaaaccaaaagtttatgttttgggagttttggctttgtatagcttggatgaaaatttactccaaggaggcgttgaaaatttaaaagaaaaggcaaacaaaatcacgcatctaagcatagccaatcctaaagtagctccttatggagtagcagctaaagaagtgcttgaaaatttgggtttaaatgagcttcttaaggataaaatcgttttaggcgaaaatatctcagtgcctgttttacatgtagatagcaaaaattcagatatagctatagtggcttattctttagtttcttctatcaatcatcctaagggtaaggctgttataattgatgcaaagtattttagccctttagagcaaagttatgtcatcacaaaatacgctaaggataaaaaattagcctttgaatttaacgaatttattggctcttcaaaagcaaaagaaatttttaaaaaatacggatttagcacaccatga

SEQ ID NO: 18094 - DNA, 1143 bp, Campylobacter jejuni
atgaagcttgaaaaaattttgcaagatctagagcaaaatcacaatctaagaactctaacacctttaaaacatgaaaataaatttgtttataagcaagatcacaaacttttaaatttagtaggaaatgattatctttatttggcgtcttccaaagagttaaaagctgagtttttaaacaccctaaaagaacaagatttgtttttttcaagttcgagttcaagaagtttgagtggaaattttgaaatttatgaaaaattagaaagttttttaaagactaaatttaaagataaggaaattttacattttaatagtggctatcatctaaatatctcttgtatagcagcactttctagcgtttctaagacgctttttctaaccgataaatttattcatgcaagtatgattgatggcttaagacttggcagggctgatttttttcgttttcatcataaagatatgaatcatttagagagtttaatccaaaaacattatgaaaattatgaaaatatcatcgttttaagcgaagctttgtttagtatggatggagattttagcgattttaaaactctgtgtgagcttaaaaggcgttatgataaaattaagctttatatagatgaagcacacagcgtgggttgttttgatgaagagggtttggggcttgttaaaaaactagccttagaaaatgaagtggattttttggtttttacctttggaaaagcccttgcttccatgggtgcttgtataatatgtgatgaaaaatataagaaatttttcatcaacaaggctagagcttttatttattctacagccttgccacctattaatgtagcttggacgcaatttatttttaaaaaaatgccttattttaagaaagaaagagaaaaattagagcttttaagcactttttttaaaagtaaattgcaagaaaaaaatcacatcgttttaggcgatgcttatattatttgcttgcttttaggtgaaaataaaaaagccttagaaatttcacaaaaacttcaaaaagctggtttttttgctcctgcgatcaaagaacctaccgtgccaaaaaatacagccagaattcgtttttctttgcacgcaggacttaacacagaagaacttgaaaggataatagagcttttatga

SEQ ID NO: 18095 - DNA, 1284 bp, Campylobacter jejuni
atgcaaaatcaaatcttaaaaaatctcgatttaaaacacatttggcacccttgcacacaaatgaaagatcacgaaaccctacctttaattcctataaaaaaagcaaaaggtgtatggctttatgattttgatgataaagcttatatggattgtgtgagttcttggtgggtcaatctttttggtcattgtaatgaaaaaatcgcaaatgccattaaaaaacaagttgatgagctagagcatgtgatcttagcaggctttacacatgagcccattatcaagctttctgcaagactttgcgaaaaagtaggcaggaattttaacaaatgtttttatgcagataatggatcaagtgctattgaagtagcacttaaaatgagttttcattatcatttaaataagggagtgaaaaaaagtaaatttttatctttaagcaattcttatcatggtgaaaccttaggagccttaagtgtgggcgatgtagcgctttataaagatacttacaaagccttgcttttagagtgtttaagcacgcctgtgccacaaggcaaagactacactaaagagcttgaaattttaaaagatattttagaaaaaaatgcaagtgaaatttgtgcttttatacttgaacccttggtacaatgtgcaggaaatatgcatatgtatgaagcaaggtttattgatgaggccataaagctttgccataaatttggagtgcaagtgatttttgatgaaattgcagtgggctttggacgcacaggaactttgtttgccttacatcaatgcaaacaaagccccgattttatctgcctttcaaaagggataacgggtggatttatgccactttctgtagtgcttacaagagatgaaatttataatgctttttatgatacttatgaaagccaaaaggcttttttacattctcatagctatacgggaaataccttagcttgcgcggcagcaaatgcggttttagatatctttgaggatgaaaatattttagtaaaaaatcaaattttaagcgagtttatcaaaaaagaattttcaagacttgaaaaatttgactttttgggtaattttagaacttgcgggatgatcagtgcttttgatattttaagcaccaagtataaacgcgtaggactttttgtatttcaaaaagccttagaaaaaggtttgcttttaagacctttagcaaatacgatttattttatgcctccttacatcatcacaaaagaacaaatcgtttatgtactagagagtttagagcagatttttaaggaattttaa

SEQ ID NO: 18096 - DNA, 537 bp, Campylobacter jejuni
atgttagaaggtatcgttagagagagtatcggtagaaaagctgctaaagctttaaaaagagatggttatctaattgcaaacatctatggaaaaggattagaaaacatcaatgccgcttttaaagtaaatgagtttattaaggaagttcgtaaaaaaactactttaatttttgatgtaaaagtaggttctcaaactttaagcgttgtagttgtggattatcaaaaagatcctgtaactgcagaacttaaacatgtggatttaaaagttgcgcaaaaaggtgtgatttctaaatacatggttccagttaaaatcacaggaacagctataggtcttaaaaataaaggtgttttaattcaatcaaaaagaagattaaaagtaaaatgtgcagctgaaaatttaccaaatttcttcgaacttgatgtaagtaaacttgatgtgggtgatgctttacttgttcgtgatattgtagttcctgcgggagtaactatgattgatgctgatagagtagcggttgtaggtgtagaaaaagctagatga

SEQ ID NO: 18097 - DNA, 1029 bp, Campylobacter jejuni
atgataaagctaagtgaagaacaaaaaatggtctatgatgatttatcgatgcctgagaaggtagcgatatttcttatacaacttggcgaagatgcaaccacttctgtgttttcacatatggaaattgatgtaatcacagaaatttcacgttatattgctatggctaaaaatgttgatagatctgtagctactgcagttttagaagaattttacactctgcttcaatcaaatcaatatattaaaagtggtggtttggaatatgctaaagaaatactttttcgtacttttggaccagagattgcaaataaaattcttgaaaaactcactaaaagtatggagaataatcaaaattttgcttatttggcgcaaattaaaccacagcaacttgcagactttattaccaaagagcacccacaaaccatcgctcttattttggcacacatggattctattcatgcggcagaaactttagagtattttagcgatgaattaagggctgaggtggttataagaatggcaaatcttggtgatatttctccaagtattattaaaagagtttctgcagtgctagaaagcaagcttgaaagtcttacctcttataaggttgaagtgggcggcccaagagcagtagcagaagtgcttaatcgtttgggtcaaaaagcaagcaaatcaaccattacttatattgaacaaagtgatgaacgcttagcagagactattaaagagcttatgtttactttcgatgatatacaaaaacttagcactcaggctataagagaaattttaaaagtagccgataagcgtgatttaatgataggtttaaaaggtgcaagtgaagagttaaagcaaaaattcttagccaatatgtctacgcgtgcaagcgaagcttttcttgaagaaatgggttttttgggtgctgtgcgtgttaaagatgttgaagatgcacaaagaaaggttgttgaagtggtgcaaaaacttgcagaacaaggtcttgttcaaacaggcgatgcggatgaaatgatagagtag

SEQ ID NO: 18098 - DNA, 1848 bp, Campylobacter jejuni
atgagtaaaaaatttgcccatactcaagaagagttagaaaagctaagtttaaaagaattagaaaatttagcagcatctatgcgtgaaaaaatcatacaagttgtgagtaaaaatggtgggcatttaagttcaaatttgggtgctgtagaacttagtatagcaatgcatttggtttttgatgcaaaaaaagatccttttatttttgatgtgtcgcatcagtcttatacacacaagcttttaagcggaaaagaagaaatatttgatactttaagacaaatcaatggtttaagtggttatacaaaacctagcgagggagattattttgtagcagggcattctagtacctctatttctttggcagtaggtgcttgtaaggctattgctttaaagggtgaaaagcgtattcctgttgctttgattggagatggtgctttaagtgcgggtatggcctatgaggctttaaatgaattgggtgattctaaatttccttgcgtaatacttttaaatgataatgaaatgagtatttcaaaaccaattggagcaatttcaaagtatctttctcaggctatggcaacgcagttttatcaaagttttaaaaagcgtattgctaaaatgttggatatattgcctgatagtgctacttatatggccaagcgttttgaagagagttttaaacttattacccctgggcttttgtttgaagaattagggcttgaatatatagggcctattgatggacataatttaggtgaaattatttctgcattaaaacaagcaaaagctatgcaaaagccttgtgtgatacatgctcaaaccataaagggtaaaggctatgctttagctgaaggaaaacatgctaaatggcacggggtgggagcctttgatatagatagtggagagagtgttaaaaaaagtgatactaaaaaatctgctactgaaattttttctaagaatttgcttgatttagcctcaaaatatgaaaatattgttggggttacggcggctatgccaagtggaacaggtcttgataagcttatagaaaaatatccaaatcgtttttgggatgtggctattgcagaacagcatgcagtaacttctatggccgctatggcaaaagaaggatttaaaccttttattgcaatatatagcacctttttgcagcgtgcttatgatcaagtgatccatgattgtgcgattatgaatttaaatgtggtttttgctatggatagggcagggatagtaggcgaagatggggagacgcatcaaggtgtttttgatcttagttttttagctcctttgccaaatttcactcttttagccccaagagatgaacaaatgatgcaaaatataatggagtatgcttatttacatcaaggacctattgctttgcgttatcctagagggagttttattttggataaagaatttaatccttgtgagataaaacttggtaaggcacaatggcttgtaaaaaataatagtgaaattgcttttttaggttatggacaaggtgtggcaaaagcgtggcaagtcttaagagccttgcaagaaatgaataataatgctaatttgattgatttaatttttgctaaacctttagatgaagagcttttgtgtgagcttgctaaaaaaagtaaaatttggtttatttttagtgaaaatgttaaaattggcggtatagaaagtttaattaataattttttacaaaaatatgatttgcatgtaaaagttgttagctttgaatatgaagacaaatttattgaacatggaaaaacaagtgaggtggaaaaaaatctagaaaaagatgtcaatagtttgttgacgaaagttttaaaattttatcattaa

SEQ ID NO: 18099 - DNA, 708 bp, Campylobacter jejuni
atgcaaaaacaagaaaaaattatagaaatgtttaatcaaattgcacctacttatgataaggcgaatagaattttaagctttggagctgatgtagcgtggcgcaaaaaagcttgtcaaagagtgatgagtttgtatttaaaaaaagatttaaaaatcgctgatattgcctgtggcacaggggatatgatagagatttggcaagagagtgctttaaaaatggaaaaaaatattttaaatattaaaggtattgatccaagtagtggcatgctaaatgttgcaaaagaaaaatttccaaatgtcgaatttataaaagcaggggcgcaaaatttacctttagaaagtcaaagtttagatattttaagtattagttatggcattcgcaatgttgtagaaagacaaaaagccttaagcgaatttgctagagtacttcaaaaagatggtattttggtagttttggaatttacaaaaagagaaaagggtggatttatagcagcttgtagagatttttatcttaaaaatattttaccaagtataggtgggataatcagtaaaaataaaagtgcttatgagtatttgccaaactctattgaaggatttttaagtaagaaagaattcatcttagaacttaaaaatgctggttttgaaatgcttgattataaaagttttagctttggcgtgagttcaatgtttatagcaaaaaaactatga

SEQ ID NO: 18100 - DNA, 1164 bp, Campylobacter jejuni
atgacaccaacagaattaaatcttaaagcaaaggctttattagaaacacattttgatgatatagttttaagtggagaaatttcaaaaattactttgcatggttcagggcattggtattttgatttaaaagatgaaagatcaagcattgcttgtgctatgtttaaaggagctaatttaaaagtcgggtttaaaccagcggtgggggattttttagagctttgtggaagtgtgagtttatatcctgaaagcggtcgttatcaatttatcgctactagtatgaaaaaagcaggttttggggatttggaagcacagtttttggctttaaaagagcgtttgcaaaaagaaggactttttgatccacgctttaaaaaatctttgccaaaatttcctaaaaaagtaggtattataacttcaaaaacttctgctgctttgcaagatatgttaaaacttattcatcaaaaagaatattttttggcaaaaatttatatttttgatgctttaactcaaggaaataatgctcctttttctcttatacaagctttaaaaaaagccgatgatatggatttagatgttcttattatagcacgtggtggaggaagcagggaagatcttttttgttttaatgatgaaaatttagcaagagagatttttaaagcaaaaactcctattatttcagccataggacatgagattgattatgttattagtgattttgttgcagattttagagctccaacgccttcagctgctatagatactttgttttattctaagttggatatagagcaaagtttggatttaatggaagaaaaattaatgcaactttggaattataaaatacaaaattatgaaaatttgcttttaaatttaagcaaatttttcaaatttaattctttgccaaaaataatagatgaaaaaataaaacaaagccataatatagaaaagcaattaaatcatctattggcaaatcaaatgcgttataatgaattaaaattagataaattgcaaaatgcttatttgcaacatgagaatttttttaataaaagcaaaaagtttatttgtatcagaaaaaatggtaaaatagcaaatttagaagatcttaagagtgatgatatcgttattttaagttctcaaacttctcaaaaagaagcaaaaattttataa

SEQ ID NO: 18101 - DNA, 975 bp, Campylobacter jejuni
atgcttaaagccagtcttaaaagtatagcttcttatattccagaaaaaattttaagcaatgctgatcttgaaaaaatggtagataccaccgatgaatggatcactagacgcacaggtattaaagaaaggcgcattgctagtgaaaatgaaaatactagcgatttgggcacaaaagctgcattaaaagccatagaaagagcaaatttaaaacctgaagatattgatgcgattcttgtagctactttaagtcctgattattttactatgccttcaacggcttgtaaaattgcttcaaatttaggacttgtaaatattagcgcttttgatatttcagcagcttgttctggttttatctatttgcttgaacaagctaaagccttagtagaaagtggtttgaaaaaaaatgttttaatcataggagctgaaaaaacaagttcaattatggattacaatgacagaagtatttgcatactctttggagacggtgcaggtgctggagttgtaagtttggataatgaaaatcatatccttgatgtacatactgcaagcaatggtaattatggagatcttttaatgactcaaagatcgcaaaaatcaagcctatgtcaaacactttctatgcaaatgaaaggcaatgaagtttttaaaatagcagtaaacacgcttagtaatgatgttgtagaaattttagctaaaaataacattttagcacaagaaattgatctttttattcctcatcaagctaatctacgcatcattaaagccgtccaagaaaaactcaatctaagcgatgaaaaatgtgtgatcactgtacaaaaatatggcaatacttcagctgcttctatacctatggcaatgaatgatgcctatgaagaaggtcgacttaaaaaaggaaatctgatcttactagatgcttttggcggtggttttacttggggatctgcgcttttaaaatttggaggagagaatttttaa

SEQ ID NO: 18102 - DNA, 597 bp, Campylobacter jejuni
atgatagttactaaaaaagctttagattttactgctccagcggtattaggaaacaatgaaattgttcaagattttaatctttataaaaacataggtccaaaaggagcggtagtattcttttatccaaaagattttacttttgtttgtccttcagaaattatagcttttgacaaaagatatcaagaatttaaaaaccgcggtattgaagtaattggaatttcaggagataatgaattttcacattttgcttggaaaaatactccagtaaatcaaggtggtattggtcaggttaaattcccacttgttgctgatttaactaagcagattgctagaaattttgatgtactttatgcagaagcagttgcccttcgtggttcgttcttgcttgatgctgatggaacagttcgccatgctgtggttaatgatttaccactaggtagaaatatagatgaaatgttaagaatggttgatactatgctttttacaaatgagcatggtgaagtttgtcctgcaggatggaataagggcgatgaaggtatgaaagctaaccctaaaggcgtggctgaatatcttggcaaaaacgaagctaaactttaa

SEQ ID NO: 18103 - DNA, 1089 bp, Campylobacter jejuni
atggcaggcgaagatcaagaaaaaacagaagaacccacgtccaaaaagatagaagatgcgcgtaaagaaggtaatgttccaaagtctcaagatgcggcagctattgtaactttgataattggagtaactataactttatttatgatgagttttatgggcgagagaattgtaaatttatatagatactatcaaagttttattggtgttgaatttgatttgcgtattattcaagccattatgattaaaagcatttttgaggttttaattattcttgcacctattgttttaagtattatgattgctggggttttgggaaatattatgcaatttggttttatttttacaactaaacctattatgccaaatttaggaaaaatcaatcctctaaaaggtttaaaaaaccttttttcattgaaaaaaattgttgaaagtataaaaattattttaaaagtgggtattgtttttactatagcttttatagttttacttaaatttatgcaagagcttccaagagttgagctttatactatggttgcacagcttacttggctaagagacagagctattgttttagcagctattgttatagttgcttttttaattattgctgttttagatgtttttttggtgcgttttcagtattttaaaggtttgcgtatgagcaaacaagaaataaaagatgagtataaacaaatggaaggagatcctcaggttaaaggtagaattcgtagacttcaaatggaagctgcgcgtcgtcgtatggttcaagatgttgcaggtgcggatgtggtgatcacaaacccaacgcattatgccgtagctattcgttatgatacaggtaaagaacaagcccctagggttgttgccaaaggagtggattttctcgctcttcgcataaaacaagtagcctatgaaaataatgttgtagtttatgaaaatcctcctttagcaagagagctttataaagcttgtgatgttaatgatcttattcctagggaaatgtttaaagctgtagctgaggtgctaggatttgtttataatacaaataataagagtcgtttagctggtcaagtaaaaaaaggaaactaa

SEQ ID NO: 18104 - DNA, 2640 bp, Campylobacter jejuni
atgaaaactttaactattgttgatacttttggattttttttcagactttactacgcattaaaaggttttaaaaattcacaaggacaagctagtggaatgattagcggttttgcaaattttatttatagcttaaaaaatgaatataaaagtgattatattgtttttgcattagattccaaaggaaaaacttttcgtagcgaaattgatccaaactataaacaaaatcgcactccaccgccacctgaacttctagaacaaattccaatttgcataaagatgatagaaaaaatgggtttcataagcgtttctcaagaaggttatgaagctgatgatatcattgcttcttttgtaaaaacttgtgaaaatagagatatttttgtacgtattatcactcaagataaagatctttatcaactcataaaagatggtaaaacaagcatttacagtcctatttctaaaaacgactatgatgaagcagcgtgtttagaaaaatacggagtaaaacctaatcaaatcagagattttttagctctttgtggggatagttctgataatattccaggcgttaaaggtataggtgcaaaaggagctaaaaccttgcttgatgagtttggtagcatagagggaatttatgaaaatttaaccctagtacgtaacgaaagaagtcgtaacttgcttttagagggtaaggaaaatgcatttttaagcaaaaaattagcttctttgtatgacaatttagaagtacaaaatctcatagaaaaagccacttatcctgatgaagaacctcttttaaaaatacttgaaattttagaacattacgaacttaatactttgcttaaaaaactgcgtcaaaatcctgataataaagataaaaatttaggttttaaagccactttagtacaagatgaaaacaaactttttgaaattttaaatacccttgataaagaaagtattattgcttttgataccgaaaccacaggacttgatactaaagaagcaaaaattgttggttttagtttttgcatgaatgaaaatgaagccttttacgtgcctttaactcataattatcttggagtaggtgagcaaatctcattgcaaagtgccaaaaaagctatagaagtaatctttaatcattttgttatagggcacaatctcaaatatgattttaaaatcattcaaaacaattttgacttaaatttacctcaaaaatacgcagatacaatgattttggcatggcttaaaaatccttctttaagagtaaatatggatgatttagccttaagactttttaattacgaaaccttgcattttgaaagccttgttaaaaaaggagaaaattttgcaagtgtagaacttgaaaaagcttgtaaatacgctgcagaagatgcttatatcactttaagattttatctttattttttaaaaaatcttgaaactcctttattagaacttgctaaaaactgcgaatttgatttcattaaaatcattatgatgatggaagaaaatggcataaagcttgatacaaatgcacttgaaatccttatgaaaaaatttgaaaatgaaatcaaaaatttaagtgaagaaatttatactctttgcgaggatagatttaatctaaattcacctaaacaaatgggtgatatactttttgaaaaactcaaactcccaagcggaaaaaaaggaaaaacaggatattctaccgatgaaaaagttttaaatatacttttagataaacatcctgtaattgctaaaattttagattatagagaacttgccaaactttattccacttattgcgaacctttgttaaaactagcgttaaaagataaaaattcacgcatttattcaagttttttacaaactggaaccgctacaggacgtctttcatctaaggatccaaatttgcaaaacatccctgcacacggacaatatgcaaaagattataaatcttgctttgtagctaaagatggatttagttttatctctcttgattattctcaaatcgaacttagaatacttgcacattttagcgaagatgaaaaacttttaaatgcttttgccaatgatgaagatatacacgcaagaacagcaataatgatttttggtgaaagcaattatgaaaccagaagtgttgcaaaaagtataaattttggacttatttatggtatgggttataaaaccttaagtcaaaatttaaaaatagaagctaatttagccaaatcttacatagaaaaatattttgaaaattttactagcattaagaaatattttgaaaaagttaaaaacgaagctaaacaaaatggttttattgttactttaagcggtcgcaagcgttattttgattttgaaaacgcaaaacctatgcaaattgccatgtatgaaagagaaagcattaattcaatcttgcaaggctcagcagcagatgtaatcaagcttgcaatgctagaaatcaataaagaattaaatgaagataaaaagcttattttacaaattcatgatgaattaatttttgaagtaaaagacgatttgtgtgaaaattttgtaaaaaaaactagagatattatggaaaatatagtaaaattaaaagtaaaattaaaaacaagttcaagtatcgccaaaaattggggcgatttaaaataa

SEQ ID NO: 18105 - DNA, 1008 bp, Campylobacter jejuni
atgagacttatcttagacacggacataggcaatgctattgcaggagcaaatactgatgatggtttagcacttgctttgattttgtcatctaaagaaatcaaacttgaaatgctaagcacagtttgcggtaatgttccaagccttgttgcctatagtgtggctaaggatttatttcaacgtttaaatttaaatatccccgtttatttgggagcgaatgaagccctaaaagaaccaagtaaagcttggcgtcaaagacttgatgaaagtgttaaaaattttaaacttgaatatctttgggaaaatataaaaagtcctgaaattttagaaaatataaatcctgatgcgatttttaaaatgggtgagttggtgagtaaaaatcctaaagaaatttctatttgtgcgataggacctttgacaaatatcgctatgactatgaaaatttttaaagattttgatataaatcttaaagagctttttattatgggcggcagttttgatatgccttattacactaaagatacaaattttggttttgatcctgaggcggctagtatagtgctaaattcaagagctaaaattacactcataccttataatgcaaccatgcagactttattaacacacgaggatttaaaagagttgcaaggtaagaatattttatgtgattttatcgttgaaactttaggtgtttggattgattatgcctctaaaacacgtggtacaaagggaacttggatacatgatgctttaacgatagcttgcgcattagattctagtattgcagattttgatgagtgttatgctgatgttatttgcgatagttctttggcaagaggtatgagttggcgttgttttagagaaccaaaaatgagtatgggggtggatttaagcactaaaaattgtgttaaaattttaaaaaatgtagataatgcaaggcttttaaaacttataaaagagaggcttttaaaaggagtttgctatgaaaattatgaaagtataacgacttaa

SEQ ID NO: 18106 - DNA, 2826 bp, Campylobacter jejuni
atgaacgataccataaaaatcattggcgcaagagaaaataacctaaaaaatatccaccttgaaattcccaaaaacaaacttattgtttttacaggactgagcggaagtggaaaatcaacccttgcttttggaactctttatgctgaaggacaacgccgttatatagaaagtttaagtgcttacgccagacaatttttagataaggtaggcaaacctgatgtcgataaaatcgaaggtttaactccagccattgccatagatcaaaaaactacttctaaaaatccacgctctactgtaggaaccatcactgaaatttatgattatctaagacttttatacgcaagagttggcattcaacattgtcatcgatgtggacaaaaaatttcatctatgagtgtaagtgatatagtcagtgaaattttaaaatttccaaaaggtgcaaaaatcatcatctactccccactcatacgagaaaaaaaaggaacttatgcagatttgcttgaaaatttacgcaacaaaggctatgtaagagctcaaattgatggagttttggtaagacttgatgaagaaattgaactagccaaaaccaaaaaacacaccattaaacttgtcatagatagacttgaaattcaagaagatttactttctcgtcttgcaagcgatatagaaaaaggtttacaggaaagctttggagaaatagaaatagaagttttaaatcatgaggaaataaaccttaataaacactatcattttagcgagcattcagcttgttttgattgtaaaatttcctttgttccacttgagcctttaagcttttcttttaattctccaaaaggagcatgtgaagcttgcgatggacttggaattcgttatactttagatatgaaaaaaatcatcgatgaaaatttaagtctcgaaaacggtgctgttaaaatcatgtatggttttaataaaagttattattataaattcctaatcgccttttgcgaacaaaatgaaattcctatcaaaataccttttatgcaattaaacgaagtacaaaaacgtcttgtattgtatggtaatgccaaaactatagaatttctttggaaaagaaatcgcctaaaacgcacttttgaaggcgtggttaaaatggcttatgaaatgctaaaagatgaaaaagatttagccgaatatatgagtgaaaaaatttgtaaagactgcggtgggcatcgtttaaaacctgaaagtttagccgtgaaagtagcaaaaaaaagcttgggtgaaattttagatatgagcatagaagatagtacggccttttttgcagatgagaaaaatttttcttatttaagcgagcaacaaaaacttatttctaaacctatcctaaaagaaatcaacgaaagattgtttttcttgtatgatgtggggctaggttatctttctttagggcgcgatgcaagaacgattagtgggggtgaagcacaaagaatccgcatagcttcacaaattggcagtggtttaagcggagtgatgtatgtcttagatgagcctagcataggacttcatgaaagagatactgcaaaactgattaaaactttaagaaatttacaacaaaagggcaataccctaattgtcgtagagcatgataaaatgaccatagaagaagcagattttattgtagatattggtccaaaagcaggaaaatttgggggtgaggttgtatttagtggaacttataaagaacttttaaaaagcaaaagcgaaactgcactttatatgaatggtaaaaaacaaatttcacaacttcaaaacagaacacagaaagaatggcttgagcttaaaaatgtaaatattaacaatatccaagatttaagcgtaaaatttcctttgcaaaatttagtcgctataacaggagtttcaggttctggaaaaagctctttgatacttcaaaccctacttccttttgcacaagaggaattaaaccgtgcgaaaaaagttaaaaaacttggcggagtacaaatagaaggacttgaaaaacttgataaagtcatttatcttgatcaaagcccaattgggcgcacaccacgttcaaatcctgccacctatacaggtgctatggatgaaatcagaaatctttttgccgccactaaagaagccaaaatgcgtggttataaagccggacgcttttcttttaatgtcaagggtggaagatgtgagaaatgtagcggagatggagaaatcaaaatagaaatgcattttttacctgatgttatggtagtttgtgatacttgcgggggcaaacgctacaatgatgccacgctagaaatcaaatataaaggcaaaaatatcagtgaaattttaaatatgagtgttttagaagcgagtgaattttttacagccgttcctaaaatcaaacaaaaattagatactctagtaaaagtgggtttagattatctaactctaggacaaaatgccaccaccttaagtggaggtgaagcacaaagaatcaaacttgctaaagaactaagccgtagcgatacaggaaaaacgctttatatacttgatgaacctacaacaggactgcattttgaagatgtcaataaactcatcttagttttacaacatttggttgatcttaaaaattctgtttttgtgatagaacataatttagatgtgattaaaaatgctgattatatcatcgatatggggcctgaaggcggagttaaaggtggaaaagttataagcacaggaagcgtggaaaaagtcgctaaagaacacaaaaaaacccgttcttacacaggatattatctagacttagagcttaaaaatacacaaaaatcataa

SEQ ID NO: 18107 - DNA, 1602 bp, Campylobacter jejuni
atgatacttttaattgataattatgattcttttgtttttaatgttaaaagcatgttagagcaactcagcaatgatgaaattttagtaagaagaaatgatgcaatttctctgagtgaaattaaaaatttaaatcctactcatattattttaagtcctggtccaaagcatccaagtcaaagtgggatttgtcttgaaatttttaaagcaaggcttaatatccctgttttgggcatttgcttaggacatcaagctttagctttagcttttgattctttagtggttaagatgcaagagcctatgcatgcaaaaaattctttgataaaacagtgcagggaaaatgaattattttctaatttgccttcaaattttagtgtaatgcgttatcattctttagaggttaaacagcttagtgatgagcttgaaattttagcccttgatgaaaagggtgtgattatggctttgggacataaaaatttaccttattatggtgtgcaatttcatcctgaaagctattttagtgaatatggcttgcaacttttttctaattttttaaaacaagatataaaaaaaccacaaaaacaagaaaatcctttaagtttttatttgcaaaaaatgagtgaaaatcattttttacaaagcgatgattttgagcaaatttgtaagattattatgtctaaagattatgaaattttacaagtagtggctttgttgattttaatcactgaaaagtccttaaatgaaaaatctttaagtgcttttgtaagacaaattttaagatattctcaaacttttagtgatgagagtgagatgattgatatttgtggaacaggtggagatggttttaaaagtatcaatgtttctacgactagtgcttttattttagcagctttaggagtaaaagtagccaaacacggaaatcgtgccatttcaagttctagcggaagtacagatgtgttagaagctttaaatataactactccaaacactttagaatcagttttaaaacaactaaataatcaagggcttagttttttacatgctccattttttcatcctttagtaggagaacttaaagagatcagatcaagacttggagtaagaacggtttttaatgttttaggtcctttattgcaccctaatttaaagttaaaatatcaacttatgggaaattatcacgcacctgtgcataggcttttgatagaggttttaaaaaatttaggacgcaaaaaagctttagtggtaagaggaaatgatggtatggatgagcttagtatttgcgatgaaagtaaaatttatgagctttgtgaaggagaaattttagagtattctatctgtcctgaacaatttggttttaaaagagcttttcatagtgaaatcataggatctagtgcatatgacaacgctaaagatttaaaagatattttaagcggtagaatgcaaggggcaaaatttgatttggtagttttaaatgctatgtttgcactttatacagccaataaagcaagttcgcctttagtggctaaagatatgattttagaagccatttattcaggtaaggttatagaatattttaaggagtatcaagcttatgctaaagcttaa

SEQ ID NO: 18108 - DNA, 1179 bp, Campylobacter jejuni
atgaaaaaagcgtattatggggattttggtgggcagtttttgcctgaaagtgcaatgtttgctttaaatgagctagaaggtgcttttttgaaattttctaaagataaactctttaaaaaagaattaaacgagcttttaaaaacttatgtagggcgtcctactccactttattttgctagaaatttaagcaaaaaatatcagcatgaaatttatttaaaacgcgaggatttaaatcataccggagcacataaaatcaataatgccatcgctcaagcccttttagcaaaaaaaatgggaaagaaaaaaatcatagcagaaacaggagcaggtcaacacgggcttgcaacagccactgcagcagcacttttaggacttgaatgtgaaatttatatgggggcaaccgatgtgcaaagacaggctttaaatgtttataaaatggagcttttgggtgctaaaattcatgcagtacaaagtgggcttaaaactctaaaagaagctactactgcggctattcaagcttgggttggagatattaaaaatattttttatgtggttggaagtgcggtaggtccttatccttatcctaaaatggtaatgcattttcaaagtattataggaaaagaatgcaaaatgcaacttcaaaaactcaataaaaaagtagattatattatcgcagctgttgggggtggaagcaatgcagctgggattttttatgattttatcaaagatgaaaatgttaaacttataggtattgaagcaggggggcttggcattgatacgccttatcatgcagcgactttaaataagggaaaaacaggcattattcacggtatgaaaaccaaggttttacaagatgatttaggcaatatcttgcctgtacatagtgtttctgcagggcttgattatccaggaattggtcctttgcatgcttttttatttgaaagcaaaagagcgcaatatcatgctataagtgatgaagaatgtatgcaggctttaaaattactttgtaaagaagaaggtattattgcagcgattgaaagttcgcatgctttggcatttttagaaaaactttgtccaactttaaaaaagaaaagcgtgatagtagtaaatctttcaggcaggggagataaagatatgcaaatgattagagattataaaaaaggggtgatttatggttga

SEQ ID NO: 18109 - DNA, 246 bp, Campylobacter jejuni
atgtctcttttaattacaaaagactgcgtatgttgtgatgcttgcagagaagaatgtcctgatgaagctatttatgaaaatagtccaatttatgtaatagaccctgatctttgttcagagtgcgttaatgatttttcagagcctgcctgtattgttgcttgcccatatgaatgtatcattcctgatcctgataatgtagaaactatagaagaattaaaactcaaacatagagatagagaattttaa

SEQ ID NO: 18110 - DNA, 609 bp, Campylobacter jejuni
atggaaaatttaataatttacgcttttatatatcttttaggttcaatcccttttgggctaatcctagctaaattttttgctaaaactgatatcaaaaaagaaggttcaaaaagtataggagcaaccaatgttttaagagtagtaaaagaaaaaaatcccaaactagcaaaaaaacttgccattgctacaataattttagattttgcaaaagcagctattcctttattaaccttgaaatttcttcattatgatcaagctttgctttggagcgtggcagttttggctattttgggacactgtttttcaatttacttgttatttgaaggagggaaaggcatagcaacaggagcaggtgctatgatagttttgcttccattggaagtgcttacagcatttattgtatgggtagttataggaaaaatttttaaaatatcttcgttagcttctttagcagcgttacttgcttttgttgtaagttcttttatatttaattatgacttagaaattcatacacatgcacccgttttcattatcgcttttattatagtatataaacatctacctaatattaaaagattgatttttaaagaagaatgcaaagtcatataa

SEQ ID NO: 18111 - DNA, 1338 bp, Campylobacter jejuni
atgaaactttttggaactgatggagttcgtggaaaagcgggtgaatttttagatagttttttggctatgcgtttagcaatggctgcgggtatttattttaaagataaaagtattactaataatatcttagtaggaaaagatacaagaagaagcggctatatgatagaaaatgctattgtttcagggcttacttctataggatataatgttatacaaattggtcctatgccaactcctgcgattgcattcttaactgaagatatgcgttgtgatgcagggattatgatttcagcttctcacaatccttattatgataatggtattaaattttttgatgctcatggaaacaaactcagtgaagatatagagaaaaaaatagaagaaatttattttgatgataagcttatacaagcctctaaggtagatatggagaaaattggtcaagcgaaaagaattgatgatgttataggaaggtatattgtttctattaaaaattcttttccaaaagatcttactttaaagtctttgcgtgtggttttagatgtggctcatggggcagcttataaggtagcacctactgtttttaaggaattaggtgctgaagttatagtaatgagcgataaacctaatggacttaatatcaatgaaaattgtggagctttacatcctgcaaatttagctgctgaggtaaagcgtttgcgtgcagatgtgggctttgcttttgatggtgatgcagatcgtttggtggttgtagatgaaaaaggcgaagtggctaatggggatagtttattgggcgtattggcactttatcttaaagaacaaggtaaattacaatcaagtgttgtggctactataatgagtaatggtgctttaaaagagtttttaaataaacatggtatagaacttgatacttgtaatgttggcgataaatatgtgcttgaaaaactaaaagccaatggtggaaattttggtggagaacaaagtgggcatattatttttagcgattatgcaaaaactggagatggtttgatagccgccttgcaatttagtgctttaatgctttctaagaaaaaatctgcaagttctattttgggtcaagttaaaccttatcctcagcttttaaccaatcttaaaattgcagaaaaaaaagatttagataaaattaaaggtttaaaagaattaaaaaaagatttagaaaataaaaatattaataccttatttcgctattctggaacagaaaatttgataagacttttactagaagccagagatattaagctcttagaaaaagaaatgaaaaatgttgtggagttttttaagaaagctttaaatggctaa

SEQ ID NO: 18112 - DNA, 3123 bp, Campylobacter jejuni
atgttttctaaattttttatcgaaagacctgtttttgcttcagttgttgcaattatcatttctttagctggagctataggtcttacaaatttacctatagaacaatatccttctttaacccctcctacagttaaagtaagtgcaacttacacaggagctgatgcacaaaccattgcttcaacagttgcaagtcctatcgaagatgcaatcaatggcgcagataatatgatttacatggattcaacttcaagttcttcaggaactatgagtttgactgtttattttgatatcggtacagatcctgatcaagccaccatagatgttaataatagaatttcagccgcaactgcaaaaatgccagatgcagttaaaaaacttggagtaacagttagaaaaacttcctcaacaacacttgctgcaatttctatgtattcaagtgatggctcaatgagtgcagtagatgtatataactatatcactttaaatgttttagatgagttaaaaagggttccaggagttggagatgcaaacgctataggaaatcgtaattattctttaagaatttggctcaagcctgatttattaaataaatttggaatcacagctactgatgtaatttctgcggttaatgaccaaaatgcccaatacgcaactggtaaaattggcgaagaacctgtaacccaaaaatccccttatgtttattcaatcactatgcaaggaagactacaaaatcctagtgaatttgaaaacattattttaagaacaaataatgatggatcatttttaagacttaaagatgtagctgatgtggaaataggatcacaacaatacagctcacaaggacgattaaatggcaatgatgcagttccaattatgatcaatcttcaatcaggggcaaacgcattgcatacagcagaacttgttcaagctaaaatgcaagaactttcaaaaaattttccaaaaggtttaacatataaaattccttacgatacaacaaaatttgtaatagaatcaatcaaagaagttgttaaaacttttgttgaagctctaattttagttatcattgttatgtatatgttcttaaagaatttccgtgcaacacttattcctatgatagctgtacctgtttcattgttaggaacttttgctggactttatgttttaggttttagtattaacttgcttacgctttttgctttaattttagccatagggatcgttgtagatgatgcgattatagttgtagaaaatattgataggattttacatgaaaatgagcaaataagcgtaaaagatgctgctatccaagcgatgcaagaagttagctctccggttatttcaattgttcttgtgctttgtgctgtttttgtaccagtttcttttatatcaggttttgttggagaaattcaaagacaatttgctcttaccttagctatatctgtaaccatatcaggttttgttgctcttaccttaacaccttctttatgtgcactctttttgcgacgtaatgaaggagagccatttaaatttgtaaagaaatttaatgatttttttgattggagtacctctgtatttagcgcaggagtagcatatattctaaaaagaaccattcgttttgttttaattttttgtattatgcttggggcaattttttatctctataaagctgtaccaagctctttagttcctgaagaagatcaaggtttgatgattggcattatcaaccttccttcggcttcagcactccatagaacaatctcagaagttgatcacataagccaagaagttttaaaaactaatggagttaaagatgcaatggctatgataggatttgatctttttacaagttcactcaaagaaaatgccgctgcaatgtttataggcttgaaagattggaaagatagaaatgtgagtgctgatgaaatcgccatggagcttaataaaaaatttgcttttgatcgcaatgcttcaagtatatttataggcctacctcctatacctggattaagtatcacaggcggttttgaaatgtatgttcaaaacaaaagcggaaaaagctatgatgaaatacaaaaagatgtaaataaacttgttgctgtggccaaccaaagaaaagagctatcaagagtaagaacaacccttgatacaactttccctcaatacaagcttataattgatagagataaattaaaacactacaatcttaacatgcaagatgtttttaacacgatgaatgcaactataggcacttattatgttaatgatttttctatgctaggtaaaaacttccaagtaaatatccgcgcaaaaggtgattttagaaatacacaagatgcattaaaaaatatttttgtaagatcaaatgatggaaaaatgataccacttgattctttcttaactttacaaagaagttcagggcctgatgatgtaaaacgattcaaccttttcccagcggcacaagttcaaggtcaacccgcaccaggttatacttcaggtcaagctatagaagcgattgctcaagtagcaaaagaaactttaggggatgattattccatagcttggagtggatcagcttatcaagaagtttctagtaaaggaacagcaagttatgcttttgctttaggtatgatatttgtctttttaattctagctgcccaatatgaaagatggcttatacctttagcagttgtaacagctgtaccttttgcggtatttggatcatttttattggtatatttaaggggatttagcaatgacatatattttcaaacaggacttttgctcttgattggactttcagctaaaaatgctatcttaatcgtagaatttgcaatggaagagcgctttaaaaaaggcaaaggagtttttgaagcagctgttgcagcagcaaaacttcgttttcgtcctatcataatgacttctttggcatttacttttggggtcttgccaatgattttcgcaacaggagcaggaagtgcttcaagacactctttaggaacagggcttattggtggaatgatcgcagcatcaactttagcgatattctttgtgcctttatttttctatcttttagaaaattttaatgaatggctagataaaaaaagaggtaaggttcatgaataa

SEQ ID NO: 18113 - DNA, 1104 bp, Campylobacter jejuni
atgaaattatttcaaaaaaatactattttagctttaggtgttgtgcttttactcactgcttgcagcaaagaagaagcaccaaaaatacaaatgccgcctcaacctgtaacaaccatgagtgctaaatctgaagatttaccacttagttttacttaccctgctaaacttgtcagtgattatgatgtcattataaagcctcaagttagtggcgtaatagaaaataaactttttaaagctggagataaagtaaaaaaaggacaaacattatttattatagaacaagacaaatttaaagctagtgttgattcggcttacggacaagctttgatggctaaggcaactttcgaaaatgcaagcaaggattttaatcgttctaaagctctttttagtaaaagtgcaatctctcaaaaggaatacgactcttctcttgctacatttaacaattcaaaagctagtctagcaagtgctagagcacagcttgcaaatgcaagaattgatctagatcataccgaaataaaagctccttttgatggtactataggagatgctttagttaatataggagattatgtaagtgcttcaacaactgaactagttagagttacaaatttaaatcctatttacgcagatttctttatttcagatacagataaactaaatttagtccgcaatactcaaaatggaaaatgggatttagacagcattcatgcaaatttaaatcttaatggagaaaccgttcaaggcaaactttattttattgattctgttatagatgctaatagtggaacagtaaaagccaaagctatatttgacaacaacaactcaacacttttaccaggtgcttttgcaacaattacttcagaaggttttatacaaaaaaatggctttaaagtgcctcaaatagctgttaaacaaaatcaaaatgatgtttatgttcttcttgttaaaaatggaaaagtagaaaaatcttctgtacatataagctaccaaaacaatgaatatgccattattgacaaaggattacaaaatggcgataaaatcattttagataactttaaaaaaattcaagttggtagcgaagttaaagaaattggagcacaataa

SEQ ID NO: 18114 - DNA, 633 bp, Campylobacter jejuni
atgaactcaaatagaacaccatcacaaaaagttttagccagacaagaaaaaatcaaagcagtggccttagagctttttttaacaaaaggataccaagaaacaagtttgagtgatattattaaattatctggaggatcttattctaatatttatgatggttttaaaagtaaagaagggctattctttgaaattttagatgacatatgtaaaaaacactttcatcttatttattccaaaacacaagaaattgaaaatggcactttaaaagaaattttaacttcttttggtttagcttttatagaaattttcaatcaaccagaagctgtagcttttggtaaaattatctattctcaagtttatgacaaagatagacatcttgccaattggatagaaaataatcaacaaaatttttcctataacatacttatgggttttttcaagcaacaaaataattcttatatgaaaaaaaatgcagaaaaacttgctgttcttttttgcactatgttaaaagaaccttatcatcatcttaatgttttaattaacgctcctttgaaaaataaaaaagaacaaaaagaacatgttgaatttgttgtaaatgtttttctaaatggaatcaatagctccaaagcttaa

SEQ ID NO: 18115 - DNA, 213 bp, Campylobacter jejuni
gtgccaggaatcaaggtgcatcctaacgagtcttttgatgaagcgtatcgtaaattcaaaaaacaagtagatagaaatctagttgtgactgaagtaagagcaagaagattttttgagcctatgactgaaattcgcaaaaaacaaaaaatttcagcacgcaaaaaaatgcttaaaagactttatatgcttagacgctacgagtcaagactctaa

SEQ ID NO: 18116 - DNA, 540 bp, Campylobacter jejuni
atgcagacaaaatactttaaatttcttgcttattttagctttatcataagtttaatctatggcttttatcatatcataaaagcctttgattttgtaaaagaagcctatatttacaccggaatatttgctttaatctttttaaatttaagtcttttattttctttacttaaatttaaaaaaacaaaaaattatcctaaaattttaggtatttttgcagctttttgggcgattttgcactttttaaattattttatttttgatagaaatgctcaaattttaaggctttttgatgatatttcacatcgtttattagaagcaattggatttatcgcatttttaatcatatttttaatgcttttaagttcttttaaaatctttaaaaaacttagtaaaatcagaaaactgggatatttatgcttaattttggcaagttatcattattttttaaccccaaaaattcctatgttttgggaatggagtgctttaattatagctttgttttattttatagttcgctatacaaaaacattaaaaagttaa

SEQ ID NO: 18117 - DNA, 399 bp, Campylobacter jejuni
atggcaacgcgtcatcaagttcgccaaagcgtcatctccttactttatgcttttgaattaaattctcaaaacaacgtttttgtagatgaaattttagatgaaaaaaaaatacgcaatgaacaaaaaaattttactttaaatttatataatggaattttagataatttaaacaatattgatgaaaccttaaattcatttctaaatgataatcaaattacagctttaggacatgtagaaagagctatactaagacttggagcttatgagttactttttaccgatactcctagcgccattgtcatcaatgaggctatagaacttgctaaagaacttgctaatgacaattctccaaaatttataaatggagttttagatgccttaataaaggctaaaaaatga

SEQ ID NO: 18118 - DNA, 465 bp, Campylobacter jejuni
atgaatattattgaaggaaaattaaatttagactcaaatacaaaaattgctatcattaatgcaagatttaatcatatcatcacagatcgccttgtagaaggagcaaaagatgcttttttaagacacgggggcaaagaggaaaatctaagccttatacttgttcctggtgcttttgaacttccgtatgcgttaaaaaaagctatagaaagcaaaaaatttgatgcaatttgttgcgtaggcgcagtaattcgtggctcaactccgcattttgactatgtttcagcagaaaccaccaaaggcatagccaatgtgagtttaaatcataatatccctgtaagctttggtgttttaactacagatacaatagaacaagccatagaaagagctggaagcaaagcaggcaataaaggctttgaagctatgacaactgtaatcgagatgttaaatttaagcaaggagctttaa

SEQ ID NO: 18119 - DNA, 816 bp, Campylobacter jejuni
atgaaaaaaatgatactcattgctggtccttgcgtgatagaaagcaaagatttgatttttaaagttgctgaacagttaaaaaattttaatgaaaatccaaatatagaattttatttcaaatcaagttttgataaggccaatcgcacaagtattaattcttttcgaggtcctggtcttgaagaaggattaaaaattttacaaagcgtaaaagatgaatttggtatgaaaatcttaaccgatatacacgaaagcaatcaagcaaaccctgtaagtgaagtagctgatgtcttgcaaattcctgcttttttatgtcgtcaaaccgatttacttgtagccgcagcaaaaactaaggcaaaaattaatatcaaaaaaggacaatttttaaacccaagcgatatcaaatacagcgttaaaaaagttctacaaacccgtggtatagaagatgaaggctatgaagctgctcaaagaaatggtgtttttgtagctgaaagaggggctagctttggctatggaaatttagtagtagatatgcgttctttagttatcatgcgtgaatttgctccagttatttttgatgctacccatagcgtacaaatgccaggggctgcaggtggaagtagcggagggaaaagcgaatttgtagaacctttagcaagagcggcagcagccgtaggcatagatggctttttctttgaaacacatattaatccttgcgaggctttatgcgatggacctaatatgcttaatcttacacgccttaaaaattgcgttaatacattactagaaatacaaaatatcataaaggaaaacaaatga

SEQ ID NO: 18120 - DNA, 1383 bp, Campylobacter jejuni
atgcaaagcattatacttataggtaagccaaatgtgggaaaatcaagcctttttaatagaatggcaagacaaagaatagctattacaagtgatatttcaggcacaactagagatacaaataaaacgcaaattcatattcattcaaaaaaagccatgcttattgatagtggagggcttgatgaaagtgatgaactttttaaaaatgtgaaaaaaaacactttaaaagtagctaaagaaagcgatatcatactttatctagttgatgggaaattagcgcctgatgatgaggatagacagtttttttattctttaaaaaaacttggaaaacctatagccttagtgattaataaagtagataataaaaaagatgaagaaagggcttgggagtttgcaaattttggcgtaaaggaaatctttaatctttcagtaacccataatgtaggcttagatgaactttatgaatggcttgaaaaatttttacatgaagagtttttaatccccgatgaagaagaaaatttagaagattttttagagtattatgaagaaggaaaagaatttcaatttaaagaagtcgatcaaaatcatatcagagtgggtattgtagggcgtgtaaatgttggaaaatcaagtcttttaaatgctttggttaaacaagaacgcagtgttgtaagttctattgcaggaactactatagatcctgttaatgaaagtgtagttcataaagataaagtgatagaatttgttgatactgcaggtattagaaaaaggggtaaaattcaaggactcgaacgctttgccctaaatcgcacggaaaaaattttatctcattctcaaatagcacttttggttttagatgcgcatgagggctttaacgagcttgatgaacgcattgctgggcttgtggctaagcattatttgggtgtgattattgttttaaataaatgggataaaagtgagatggattttgataagactgtaaaagaattgcgtcttgatcgttttaaatttctagcttacgcacccgtgattagcgtatcagctttaagtggaaaaagggtgcatgttttactcgataaaattttgcaaatttttgaaaatttcactcaaaaaatccaaacttctaagcttaataccttgatagaaaatgccacaagagcacatcctttgccgcatgattatgggaaattggttaaaatttattatgcagtacaatatgacttagcaccgccaaaaattgcacttattatgaatcgtcctaaggccttgcattttagctataagcgttatttacaaaatcaaatcagaaaagaatttaattttgaaggtgtgcctttagtgattgcttcgcgtaaaaagggcagtaaagaaaatgatgaaagctaa

SEQ ID NO: 18121 - DNA, 960 bp, Campylobacter jejuni
atgagagtattaacaggccttcagccaagtggcgatttgcatataggtaattattttggtgcgattaagcaaatggtagatgcacaagaaaaaagccaaatgtttatgtttattgctaattatcatgccatgacttcttctcaagatggagaaaaacttaaacaaaattccttaaaagctgctgcggcttttttaagccttggtatagatcctcaaaaaagcgttttttggttgcaaagtgatgttaaggaagttatggagctttattggattttatcgcaatttactcctatgggtttattagagcgtgcacatagttacaaggataaagttgctaagggacttagtgcttcacatgggcttttttcttatcctgttttaatggcggcagatattttactttttgatacacgaattgtccctgtaggaaaagatcaaatccagcatgttgaaatcgcacgcgatattgctttaaaagttaataatgaatggggtgaaatttttacccttccagaagcgagagttaatgaagaagtagctgtggttgtgggtactgatggagcaaaaatgagtaaatcttatcaaaatactatagatatttttagcagtgaaaaaaccttaaaaaaacaaatttcttccatagttacagatagtaccgctttagaagatccaaaagatcatgaaaactgcaatatttttaaaatcgcaaagctttttttagatgaatcagggcaaaaagaattacaaatacgctatgaaaaaggtggtgagggttatggacattttaaaatatatttaaacgagcttgtaaatgcttattttaaagaagcaagagaaaaatataatgagcttttagaaaagccttcgcatttgaaagaaattttggattttggtgcgacaaaagcaagaaaaatcgcccaagaaaaaatgcaaaaaatttatgaaaaaatcggactttaa

SEQ ID NO: 18122 - DNA, 1236 bp, Campylobacter jejuni
atgctagatttaaaaaatttgcaaaataattttgatgaagtggctaaaaagttaaaaaataaaaaagttgatgaaaatatcttaaaaaaacttgctgaactttttgcaagtttaaaaaaagaaaaaatagccttggaagaatttcaagcttttcaaaataaattcagtaaagagcttgctacagccgaagataaagaaagtttaaaagcaaaattaagcgaaaataaaagcaaaattaatgagcaaagcgctaaagtaaatgctttagaaaatgagcttgaggaaatcgctcatgccatcccaaatatccctgatgaatgtgtgcctgtgggtgaagatgaaaatgaaaatgtggagcttaaaaaagttttaaatccacctagctttgattttactccaaaagaacattttgaattaggcgagagtttaaattggcttgattttatgcgtggggtaaaaatttcacaaagtcgtttttgtgtgcttaaaaatgaaggagctttattaagccgtgctttggtaaattatatgatagattttaatagaagtcgtggatttgaatttgttaatgtaccttttttggtaaatggtgctactatgtttgggacgggtcagttgccaaaatttaaagaagatatgtataaggtagatgatgaggatttgtatttgatctcaacttctgaaattccagtaaccaatctttacagcggagaaattttagcgagtgaaactttacctataaaaatgacttgttatagtgcttgttttagaaaagaagcaggcagtgcagggcgtgatacaaggggtattataagacaacaccagtttgaaaaagtagagcttgtaagtatcactaaacctgagcaaagtgatagtgtgtttaatgaaatgcttgagtgtgcaagtgatttgctgagttctttaggtttagcgcatagacatttgatgctttgcactggagatttgggttttagtgcagcaaaaactgtagatcttgaagtgtggcttccaggacagaataaatatcgtgagatcagctcggtttcaaattgtcgtgattttcaagcaagacgcgctaaaattcgctataaaaacgaacaaggaaaaaatgaactcgtccacactcttaatggctcatctttggcagtaggaagaaccttggtagcgattatggaaaattatcaagataaagaaggaaaaattcatattcctgatgttttgaaaaaatatttttaa

SEQ ID NO: 18123 - DNA, 1443 bp, Campylobacter jejuni
atgcttaaaaaaacaaaaattgtagccacagtaggtccagcaagtgaaaaggaagaaattctacgccaaatgattatcaatggtgtaaatgttttccgtttaaacttttctcatggaacacatgagtatcataaaaaaaacttagataccataagaagagtagctaaagaattgcatactcgtattggaattttacaagacattagtggtcctaaaattcgtacaggtgaacttaaagaaccatttgaattaaaaaagggtgatagacttgatttttatcgtgaaacaattttaggggagaagattgctcaaaatcattataaaatcagtatcaatcaaaaatccattttagatatgttaaaaattgatgaatatatttatctgtatgatggatcaattcgtgctaaagtagtaaatatagataatcaaaaaattgaaaccattatagaaaatgatggttttttaaactcaaataaaggtattaattttccgaatactaaaatcaatattgatgttattacacaaaaagataaaaatgatttactttggggtataaaaaatgaagtagattttttagcaatatctttcgtacaaaatgcgcacgatattgatgaagttcgtgaaattttagcacaaaataacgcaaaaatatctatttttgcaaaaattgaaaaatttgatgcagtagaaaatattgatgagattattaaatctagcgatggtataatggttgcaagaggagacttaggtattgaggtaccttattataaagttcctaatatccaaaaagaaattatacaaaaagcaaacaatgcctctaagcctgttattactgcgactcagatgcttttttcattagccaaaagcaaaaccgccacaagagctgaaatttcagatgttgcaaatgctgttttagatggaacagatgcagtaatgctaagtgaagaaagtgccgttggtatagatcctgcaaacgctgttgatataatgtgccaaactataatagaaacagaaaaacgctatccatataacaaatttaatgattttaatgatttagacaatacagataaaatcatgcgttcttcagctcatcttgcaacagatcttaacgctgatgctattttttctttaacaagtagcggaaaatctgctattaagattgcgagatatcgtccaaatatagaaatcatagcagtagggcattctgaaaaaaccttaaactctttaagtatagtttggggagttaatcctgcaatcttggttaacaaaagtaatgaacttacagaattattaaaagactctgtaagatcaagtgttgaaaaaggttttatggatgaagataaatgctatcttctaactgcaggctttccaacaggagtagaaggtactagcaatcttatccgcattctcaataaagagcaaattgcttattatctacaataa

SEQ ID NO: 18124 - DNA, 1347 bp, Campylobacter jejuni
atgagccaacaagaatttgatgtgcttgtcatcggagctggaatttcaggagcagcattattttacgagcttgcaagatatacaaatattaaaaatattgctttgatagaaaaatataatacagctgcaacattaaattctaagggaacgagtaattctcaaaccattcattgtggagatattgaaaccaattatactttagaaaaagcgcgaaaagtaaaaagaacagctgatatgatagttaaatatggactcatgcaaaatgcgcaaaataatttcatgttttctcatcaaaaaatggctctagctgttggagatatagaatgtgattatatgaaaaaacgctatgaagaatttaaagaactttatccttatataaaatttttcgataaagcaaaaatcaaacaaattgaacccaaagttgttttaggagaagattgcaatcaagatagacctgaaaatatctgcgccatgggtgttgaaagcggcgaggtttttacaactgtagattttgggaaaatgagtataaatctaatagaacaagctcaaaaacaaaataaaaatactttcgttgcctttaatcaagaaattattcacatagaaaaaaaggatgatatttttatattaaaaacctcaaatcatcaagaataccatgccaaaagcgtagttgtcaatgctggagcgcactctttatatttagcacataaaatgaacttaggtatggataagtcttgttggcctgttgcaggaagtttttatttaaccaaacaaaaacttttaaatggtaaggtttatatggtgcaaaatcctaaacttccatttgcagctcttcatggagatcctgatttgcttgctgatatgaacacccgctttggacctaccgcacttgttattccaaaactagaacgttatcatggtctaaaatcagttccagaattttttgaagcactaaaacttgataaaactgttttaaaagtaacttttaatatgtttaaagatgcaacaattagaaattacatcttttataattatctttttgaactaccttttgttgataaaagcttatttgttaaagatgccaaaaaaatagtcccaagtcttaaagcaagcgatatttattatgcgaaaggttttggaggcgtaagaccgcaagttattgataaaactaaaggagaattaatgctaggtgaagcaagcatcacagaaacccctggtattattttcaatatgactccaagtcctggagcaacaagttgtctaggaaatgctgaaagagatgcaaagcttgtatgtaattacctaggaatggaatttaacgaagataaattttcttcagaattattgtaa

SEQ ID NO: 18125 - DNA, 1506 bp, Campylobacter jejuni
atgtttgataatattttagagcagcaaagaatagaaaaagctaaggaattaaaaaatttagggatcaatccttatcctcattttttagaaaaagaaatgtctttaaagacttttaaggataaattttcttatattttagagcaagttgaaaaaagagatgaaagtgtcaatgctgttgttgcaggacgtttgaaacttttgcgtatagctgggaaatcgatttttgcaaacattgaagatgaggatacaaatttacaaatttattttagtaaagatagcgtaggcgaagagctttatacgattttaaaaaagaatttagaggtgggtgatattgttttggttaaaggttttccttttgtaactaaaacaggtgagtttagtttacatgcaagtgaagtaaaactcgctacaaaagctattgttcctttacctgaaaaatatcatggattaacagatattgagcaaagatatcgtaaacgttatgttgatatgataatgaatgtcgaagttagaaaagattttttagtgcgttctaaagtggtgagtttaatccgtcatttttttgaaaataaaggctttttagaagtagaaactcctatgatgcatccgattgcaggtggagcaaacgctaagccttttgtaacttttcataattctttaggcgtagaaagatttttaagaattgctccagaactttatcttaaaagacttatagtaggtggttttgaggcggtttttgaaatcaatcgttgttttagaaacgaaggtatggatttaactcataatcccgaatttacaactatagaattttattgggcctatcataattataaagatttaatggatttaaccgaagaactttttgctttacttttggataaacttaatttaggaaaaacaatagaatttgatggaaaaatgataaatttttctaaaccttttgaaagaataacctataaagacgcactttgtaagtatggtggtttagatagggatttaatcgaagataaggaaaaaattcttactaaattaaaagcagatggttttgaagcgaatgaaaagcttgaacttggacatttgcaagctgaactttttgacaattatgtggaagaaaaattgatcaatcctacttttgtgattgattttcctatttccataagtcctttatcaagacgtagcgatgaggattctcagattgctgagagatttgagttgtttatttgcggaagagaattggcaaatggttttaatgagcttaatgatcctcttgatcaatatgagagatttttaaaacaaattgaagctaaaaatgcaggcgatgaagaggcttgtgaaatggatgaagattttgtaaatgctttgggttatggaatgcctccaacggcagggcagggcataggtatagatagacttgttatgcttttgacaaataaaaaatccattcgtgatgtgatattgtttcctgcaatgcgtccattaaaatcagaactaaaggagaaagaatga

SEQ ID NO: 18126 - DNA, 1245 bp, Campylobacter jejuni
atgagtttagaaatgtttgataaagaaatttttgatttaacaaacaaagagttagagcgtcaatgtgaaggtcttgaaatgatagcgagtgaaaatttcactttacctgaagtaatggaagttatgggaagtatcttgacaaacaaatacgcagaaggttatccgggtaaaagatattatggtggttgtgaatttgttgatgagattgaaactctagctattgaaagatgtaaaaaactttttaattgtaaatttgctaatgttcagcctaattcaggttctcaagctaatcaaggtgtttatgcggctttgattaatccaggtgataaaattttaggaatggatttaagtcatggcggacatttaactcatggtgcaaaagtaagttcttcgggcaaaatgtatgaaagctgtttttacggcgtagaacttgatggaagaattgattatgaaaaagtaagagaaattgctaaaaaagaaaaaccaaaacttatagtttgtggagctagtgcttatgcaagagtgattgattttgctaaatttagagaaattgctgatgaaataggtgcctatctttttgctgatatagcacatattgcaggtcttgttgtggcaggtgagcatccaagtccttttccatacgctcatgtagtaagctcaactacacataaaactttgcgtggcccaagaggtggtattattatgacaaatgatgaagagcttgctaaaaaaattaattctgccatttttccaggtattcaaggtggtcctttgatgcatgtaattgctgcaaaagcagtaggatttaaatttaatcttagcgatgagtggaaagtttatgcaaaacaagtaagaactaatgctcaagttttagctaatgttttaatggatagaaaatttaaacttgttagcgatggaacggataatcaccttgttttaatgagttttttagatcgtgaatttagtggaaaagatgcagatttagctcttggaaatgcaggtattactgcaaataaaaataccgttccaggagagattagaagtccttttatcacaagtggattaagacttggaactccagcccttactgccagaggttttaaagaaaaagaaatggaaattgtgtcaaattatattgcagatattttagatgatgttaataatgaaaaattacaagagaatattaaacaagaattaaaaaaacttgcaagtaattttattatttatgaaagggctatgttttga

SEQ ID NO: 18127 - DNA, 837 bp, Campylobacter jejuni
atggaaaatcaaaaaaatgaatttgatgatattattttagaaaaaagtaataaaagtgaaaaagtaaaaaaaattcttttacgagttattgctttagttattttgtttttagctatcatgatagttatgaagcttattaatggtagtggtgatgaaaatacgcaaaatcaaagtgtattgccaagtgaacctatagcaactcaagacaataacaatgatacttcttttgaaagtatgccaattacagataatacttcagcagaagatcaatttgaggcattaagaaaacaatttcaagatgaacaaaatacaactcaaaatacaacaacctctagttcaaataacaatgatactacaaattttgctatgcctgatcaagaagttccagcagaaccaacagcaactacttcagcaaataccactccacaagcaagtactcctaaacaagaagtaacacaaactgcaaaatctaaagaagaagcaaaaaaacaaacagctgtaaaaaaagaaaaagaaagtgcaaaacaaacccctaaaaaagaacaaaatgcaaatgatttatttaaaaatgttgatgctaaacctgtacatccaagtggtttagcatcgggtatttatgtgcaaattttctcagtaagtaatttggatcaaaaatcaaaagaacttgcttctgtaaagcaaaaaggttatgattataaactttataaaactacagttggaagtaaagaaattaccaaggttttaataggaccatttgaaaaggcagatattgcagcagaacttgctaaaatccgtaaggatattgcaaaagatgctttttcttttactttaaaatga

SEQ ID NO: 18128 - DNA, 789 bp, Campylobacter jejuni
atgaaatttttagcagttataggcgatcctatttctcactctaaatcgcctagaatgcataataatgctattaaagccttagggcttgatagcatttatacacgctatcatttaagaaatgctaactgtttaagagaagatttttttaaattaggacttagtggagctaatattactttgccttttaaggaaaaagctttagatattgctgatgtgaaggatgattttgctagaaatattggctctgcaaatactttatgcttaaaagaagataaaatttacgcttataatactgatgctttaggttttttagaagctattaaggattttgataatataaaaaaagctttgattttgggtgctggaggtacagctttggcgcttgcttatgtattaaaacaaaaaggcgtagaagtgtatatagctaatcgtagtaaagaaagatttaaagattttttagcttatccaacttatctttataaaaacttgcaagattttgactttgatttggttataaattcaacttctgctggattaaaagatgaaaatttaccttgtgatagggagcttttagatagaattttacctaaagctaaatttgcttttgaggtaatttatggcagagaaacacctttttatagattgtgtaaagagtatcatttaaaaattaaagatggacttgatatgcttttatggcaaggagtttttgcttttgaacttttttttgaaatacaagataaaagagagatgataaaaaatgcaatgcaacaggcattgattttaaagtag

SEQ ID NO: 18129 - DNA, 705 bp, Campylobacter jejuni
atgagaatatttttaactttatttttattttttaattcattatttgcattaagtgaactagaagagggtttaaaactttacgaggcaaataaatttgataaagcttatgaaatttttaaaagtctttgtgaaaaagatatttctaaagcttgtttttctttagcttttatgcatgaaagtgctaggggtgtgagtaaggatttaaatcaagcttataaattttatgataaagcttgtaaattgggtttagcaaatgcgtgttctaatatggctttgcttttgcaaaatcaaggttatgaaaatgaagctcttttggcttttaataaagcttgcactttaggagaatcattaagttgtaataatatagctttattttatgaaaaagaaaaagatggacaaatggcctcaagtttttataaaagatcttgtgatttaaaaaatgcaagagcttgttatcagttaggatctttatatgataaaggagagcttgttaaagcaagtgtaaaatctgctcttgctttttattctaaatcttgcactttaggttttggtgaggcttgttatttgctaggacgctataatcaactagaaaaacaagatctaacaaaggcaaaaagatattttggtatggcttgtgatcaaaaacatcaagaagcttgtgcagcttataaagaacttaattctaaagatatagagctttattaa

SEQ ID NO: 18130 - DNA, 1722 bp, Campylobacter jejuni
atggctgaagtattaaaaaaagtagatgtagtaacagttggagcaggatggactggaggtatagtggctgcagagcttactaaagcaggtttgaatgtacttagtttagaacgcggacatatgcaaagtactgaaaattttaattatatccatgatgagtggagatatgggattaattatggtttgatgcaagattgctcaaaagacactgtgacttttcgccatgatcctagtggtttagccttaccttatcgtaaaatgggttcgtttttattgggtaataatgttggcggtgcaggggtgcattggaatggttggacttttaggtttatgccttatgactttgaaattcaaaccctaagcaaacaaagatatggtaataaattaggtaatgattataccttgcaagattggggcgtgacttataaggatatggagccttattatgatagatttgaaaaaacctgtggggtatcaggtgaaccaaatcctttagcggaaaaaatgggagcttttagatccagtccttatccacaagaacctcttgaaaatactaaaatgcttaaacgatttgaaagtgcagcaaaaagttcaaatttacacacttatcgtttgccagcttcaaattctaaaggtggctatacaaaccctgatggtcaagatttagctccttgtcaatactgtgcgtattgtgagcgttttggttgtgagtatggtgcaaaagcaagtcctttaaacacagtaattccaaaggctatgagcacaggtaaatacaccatacgcacttatagtaatgtaacgcaaattcttaaaaaagacggaaaagtaacgggggtaaaatttgtcgatactagaacgatgaaagagtatatccagcctgctgatatagttgtacttacaagttatatgtttaacaatgctaagcttttaatggtaagcaacataggtgagcaatacgatccaaaaacaggtaaaggaactttaggtagaaattattgttaccaaatgaacatgggcacaacagctttctttgatgagcaatttaacacctttatgggttcaggtgctttaggaactacgagtgatgattttaacggagataattttgatcattctaaggaaaaattccttcatggagctatgatttatagcgttcagcttggaactcgccctatacaatcagccccacttccagcaggagctccaacttggggtgccgaatttaaaaaagcattaaactataatttcacaagagctattaccgtaggagggcaaggtgcttctttgcctcataagaataattatttaagtcttgatccaacttataaagatgcttttggtatgccacttttacgcttaacttataatttcactgatcaagatagagctttgcataaatttatcacagataaaacagctgaggtagcaaaaagaatgcaaggagtaaaatcaatcaaaaaaggtgcttatcttaaggattatagcgttgtgccttatcaatctactcataacacaggtggaacaaccatgggcgcagatagagaaactagtgtggttaatacttatttacaacactgggatgcggataatctttttgttgtaggagcaggaaatttccaacataatagtggatataatccaactgatactgtgggagctttggcttatcgctgtgctgaaggtattttaaaatatcataaaagtggaaaaagcttagcttga

SEQ ID NO: 18131 - DNA, 573 bp, Campylobacter jejuni
atgaaaaaagttttattgagttcattggttgcggtgtctttgttaagcacaggtttgtttgctaaagaatatactttagataaagcacatacagatgtaggttttaaaatcaaacatttacaaattagcaatgtaaaaggaaatttcaaagattattctgcggtgattgattttgatcctgcgagtgctgaatttaaaaagcttgatgtaactataaaaatcgcatctgtaaatacagaaaatcaaacaagagataatcacttacaacaagatgattttttcaaagcaaaaaaatatcctgatatgacttttacaatgaaaaaatatgaaaaaatcgataatgaaaaaggcaaaatgacaggaactttaactatagctggagtttctaaagatatcgttttagatgctgaaatcggcggtgtagctaaaggcaaagatggaaaagaaaaaataggattttctttaaatggaaaaatcaaacgctctgattttaaatttgcaacaagtacttcaactattactttaagtgatgatattaatttaaatatcgaagttgaagcgaacgaaaaataa

SEQ ID NO: 18132 - DNA, 1578 bp, Campylobacter jejuni
atggttgaagtaaaaaatcttactatgcgttttgcaaatcagcttttatttgaaaatgttaatttaaaacttgttcgaggacaaagatacggacttatcggtgctaatggtgcgggaaaatcgacttttttgaaaattctttcaggagaaattgagtcaagtagtggtgaaatagtatttgatgaaggcttgaaaatcgcagttttaggacaggatcaatttgcttttgaaaactacaccatcaaagatgcagtgatgtgtgcaaataagcgtttatatgaggccttaaaagaaaaagaaaagctttatatgagcgaggaatttactgatgagatcaatgagcgtttaggtgagcttgagataataacggctgaagaagatccaaattatgattgtgaaacacgttgtgaaaaaattttaagttctttaaagattaaagatttcgatgctttaatgagcaccttacaaagtgcggataaatttaaagttttgttagctcaagttttgtttttaggtgccgatgcgctttttttagatgagcctacaaataaccttgatttagaggcgatttcttggcttgaaaatgaacttttaagacatgaaggaactttggttgtcatctctcatgataggcattttttaaataaaatttgcacaaggattttggatgtggattttaaacaaattcgtgattttgcgggaaattatgatgattggtatatggcttcaacgcttttggcaaaacaagctgagcttaaacgcgataaaaccttaaaagaaagagaagaattagaaaatttcattcgccgttttagtgcaaatgcttctaaagcaaaacaagccacaagccgtgctaaggcgcttgaaaaactagagcttgaagagattaaaatttcaagccgtagagatcctagtatagtatttagaactaatcgtgaaataggtaatgaagttttagaaattaaaggtataggcaaggcttatgataaacaattgttttcaaatttggagctaaaaatagaaaaaaatgataaaatcgctttgattggggcaaatggtgtgggcaaaagtactttggcaaaaatcatcgcccatgctataagtccagatagtggatccatacatcttggggcaactatagagcttggatattttcctcaagatacaagtaatttaatttgtgaaaatttgaaactttatgaatggttgatgagtgaaaaatttaaagatctagatgaaatccgtaagtgtttaggtagaatgctttttagtggcagtgatcaagaaaagatggcagcaagtttaagtgggggtgaaaaacaccgtttaatgctttctcgtttaatgctagagcgtccaaatttcttgcttttagatgagcctgataaccatttagatcttgaaagtattattgcactaggtgaagctttgtataatttcaaaggtgtagtgctttgtatcagccacgatagggagttagtttctgcttttgctaatagaatttggcatttagaaaatggtaagcttacggattttcgtggaacttatcaagaatttttaggagaaaatgatggctaa

SEQ ID NO: 18133 - DNA, 1227 bp, Campylobacter jejuni
atggaaaaaatcaaaaattataaacttatcatcattttacttagtcttgatttgttggctttgctttatggaacttcaacactgagtattagtgctgatgaagctgatatttattttggtgagcagggtaaatcacttattttttctcatagtttgctttattatatatctcattttggaacttttatttttgggcaaaatgattttggtttaaggcttccttttttattttttcattttttaagttgtttgcttttgtatttgctagctttaaaatatactaaaactaaaattgatgcttttttttctttattgttatttgttttattgccgggtactgttgcaagtgctttactggttaatgccgcatctttggtgatttttttaacccttgctatattatgtgcttacgaatatgaaaaaaaatggcttttttatatattattgattatagtattatttgttgataaatcttttaatattttatttttaacttttttcttttttgggatttataaaagaaatgctattttatttaccttatctcttgttttgtttggagcgagtatcagtttttatggttttgatacaggtggtcgtccaagaggttattttttagataccttaggaatttttgctgcatgtttttctcctttggtttttgtgtattttttttatactatttatcgtttgacttttcaaaaatataaaaatttattatggtttttaatgagcgtaacatttgtattttgtttgttgctttctttaagacaaaaactttttttagatgattttttgcctttttgtgttatttgcactcctttgcttataaaaactttaatgcaaagttatagggtgagattactagtttttcgattaaggtataaaatctttatagaatgttctataatttttttgatattttgttactttttaatcgtcgctaatcaattattgtattattttataaacaatccaaatcgtcattttgccaataattatcattttgctaaagaattggcactagaattaaaaaaacaagatgttttagagcttgcaacagccccaagtttgcaaaaaagattgcgattttatggaataaaaaatagcaataagttttatttaaaagctttaaaacaagccgataagcatgatatggacaaaaaaattgttaaagtaaaacttggaaaatatgaaaaagtatatcagattttaaactatgattaa

SEQ ID NO: 18134 - DNA, 1209 bp, Campylobacter jejuni
atgaaaatttcactttttggatacggaaaaaccacacgtgctattgctgaaaatttagtagataaatttggaccttttgatatttatgatgatcattttacagaaacaaaaaaagatacactaggaaatttacttttaaatcctaatgattttgatgataatttaagcgatattgaaattcctagtccaggttttccaccaaagcacaaactcattcaaaaagcaaaaaatttacaaagcgaatatgactttttttatgatatcatgccaaaatccgtttggataagcggaaccaatggcaaaaccaccaccacacaaatggctacacatttattatcacacattggtgctgttatgggtggaaatgttggaactcctttagcagagcttaatccttatgcaaaactttggatacttgaaacttcatcttttaccctacactacactcataaagctaaacctgaaatttatgcacttttacctataagtcctgatcatctttcttggcatggaagttttgataattatgttcaagataagctaagcgttttaaaaagaatgaatgaatgtgatgtagtaatactgcctaaaatttatgcaaatactccaacaaaagctcataaaataagctatgaagatgaaaaagatctagctgttaaatttggcattgatacggaaaaaatttcctttaaaagtccttttttactcgatgctatcatggctttagctatagaaaaaattttacttgatactttaagctataagcttttaaatagctttgtaatggaaaaaaataaactcgaagagcttaaagacagtcaaaataggctttgggtaaatgacactaaagctacaaatgaaagtgctgtaatggctgcacttagtcgctataaagataaaaaaatccatcttatcatagggggagatgataagggtgtagatcttagcaatttatttgattttatgaaaggatttgatatagaactctatgctataggtattagtaccgaaaaaatgcttgattatgcaaaaaaagcgaatttgaaagcctataaatgcgaagttttatctaaagctgtaaatgaaatttcaaatcacttaagagtcaatgaagtagctcttttaagtcccgcttgtgcaagtttagatcagttcaactcttacgcagagcgtggaaaagtctttaaagaatgtgtgaataaaatttaa

SEQ ID NO: 18135 - DNA, 1062 bp, Campylobacter jejuni
ttgtattatctttcagatttaagtcattatgctttttttacttatattagtgtgcgtgcaggatttgcattttttatcgctttatgtttgtctttatttttaatgcctaaatttattacttgggcaaaagctaaaaatgctagtcaacctatttacgaatacgccccagaaactcataaaaccaaatgccatactccaaccatgggtgggcttattttcatcagttctgcagtaatcgcaagtttattttgtatcaaatttgataatatttttgctataagtgctttactttgtttgatacttttttgtttgataggactcatagatgatttaggcaaagttctaaaaaaagataatcattcaggacttagtccaagaatgaagcttttagcacaaatcatcgctggacttatctgcatcttacctttatattttagttcagagcttagcacggaactttttatacctttttataaacaccctctttttgatatggaaatttttgccattgctttttggattttggttttaatttctagctctaatgctgtaaatttaaccgatggacttgatggcttagctacagttccaggcattttttctttatctactttagggatattcttatatttgagtggaaatttaaattatagtgaatatctacttttgccaaaaattcaaggacttggtgaagtagtgattatttgtgcagcgctaattggtgctttaatgggatttttatggtacaactgttatcctgcacaagtttttatgggagatagtggaagtttagctttaggtggctttataggatttttagccgttattagcaaaaatgaaattttacttttactcataggttttgtttttgttcttgaaactgtttctgtaattttacaagttggaagttttaaaatttttaataaaagagtatttaaaatggcgcctattcatcatcattttgaaaaagttggctgggtggaaaataaaattatagtgcgtttttggatgatagccttactttcaaatttgcttgcacttgcatcaataaagctaagataa

SEQ ID NO: 18136 - DNA, 744 bp, Campylobacter jejuni
atgaaatttagtggaaaaaatgttttaattactggagcaagtaagggaataggtgcttctatcgcaaaaactttggcaggttttgggcttaaagtttggatcaattatcgttcaaaacctgaacttgcagatgctttaaaagatgaaattattgcaagtggtggtgttgctgctgtgattaaatttgatgcaagcaaagaagatgagtttgaaaacggcgtaaaaactatagttgagagtgatggagagttaagttatcttgtaaataacgcaggcgttacaaatgataaacttgctttaagaatgaaattagaggactttagtggcgttgtggatacgaatttaagctcagcttttttaggttgtagagaagctttaaaaaccatgagtaaaaaacgctttggtgctgttgtaaatatcgcttctattgtcggagaaatgggcaatgctgggcaagtaaattattctgctagtaagggtggaatgatagctatgactaaatcttttgctaaagaaggagcaagtagaaatttacgctttaattgcgtaactccaggttttataaaaagcgatatgactgaagttttaagcaatgaaatcaaacaaacctatcaagataatatccctttaaaacgctttgcagagcctgaagaagtagctaattgtgtagcgtttttacttagtgattatgcctcttatgtgacaggcgatgtgcttaagatcaatggtggtttatatatgtaa

SEQ ID NO: 18137 - DNA, 669 bp, Campylobacter jejuni
atgatgcttttctctaatttaatcaaagaaaatcaaaaaatttggaatgcttatctacatcatgattttgttaaaaaattggaagataaaagcctaaagcaagaaaattttcttttttatctcaagcaagattatatttatttgcttaattacgcaaaatgttatgcaagattagcacttaactcaaatactgcaaaagaacttcgttttgctatgaaatttcaaaattatatagttgaaggagaaatggaacttcatcgtgcaattttatctcttggcattaatgcagatgaactcgatataaaagatgaaagtttagtcaatatagcctattcgcgttatatgttaagcgtaggtgaaaatggagattttttagatatgttagttgctcttagtgcttgcgctataggctatgcaaaaataggtgctgaaattataaatcgtttaaaaaatgaaaatttaaaagatcatccttacaaggaatggattttgacctatggaagtgaaaattttcaaaatgaagctaaagaatttgaagattttgttaattcttatacttcaagtgttggtgcacaaaaattccaaaaactcagcgaaatttttcatactgtaacacgcttagaagtggctttttgggagcattctttaagaatggaattaaatctttaa

SEQ ID NO: 18138 - DNA, 234 bp, Campylobacter jejuni
atggcaacatttgatgatgtaaaagcagtagtagtagagcaattaagtattgatgcagatgcagttaaaatggaatcaaaaattattgaagatttaggtgctgattctttagatgttgtagagcttattatggctttagaagaaaaatttgaagtagaaattccagatagtgatgctgaaaaattaattaaaattgaagatgttgtaaattatattgacaatctaaaaaaataa

SEQ ID NO: 18139 - DNA, 1215 bp, Campylobacter jejuni
ttgaaaagagttgtagttacaggtattggtatgatcaatgcccttggtttagataaagaaagttcatttaaagcaatttgcaatggagaaagcggagtaaataaaattactctttttgatgctacggactttcctgttcaaattgcagctgaagttaaaaattttgatccattagaggttgttgatggcaaagaagtaaaaaaaattgaccgtttcatacaacttggaattaaagcagcaagagaagcaatgcaggatgctggatttagtgaagaattagataaagaagaatttggcattgtttcggcttctggtattggaggtttgcctaacatagaaaaaaattccattatttgttccgagcgaggtccgcgtaaaatttccccttttttcataccttcagcacttgtaaatatgttaggaggtttgatttctatagagcatggacttaaagggccaaatatttcttgtgttacagcttgtgcagcaggaactcatgctataggagaagcttataaaagtatagctttgggaaatgctaaaaagatgttagtcataggtgcagaagctgcgatttgtcctgtgggtataggtggttttgcttcaatgaaagctttatcaactagaaatgaagatccacagcatgcttcaagaccatttgacaaagaaagagatggttttgtcatgggagaaggtgctggagctttagtttttgaggaatatgaagaggctaaaaaacgcggtgctacgatttatgctgaattaattggatttggagaaagtgcagatgcgcatcatattacttcaccaactttagatgggcctttaagggctatgaaaaaagctttaaatatggcagggaatccaaaggtagattatatcaatgcacatggaacttcaacccctgtaaatgacaaaaatgaaacagcagcaattaaagagctttttggcaataatatcccgcttataagttccaccaaaggacaaacaggtcattgcttgggtgctgcaggtgcaattgaagcagttgttagtgttatggttttaagagatggggtagttccacctacaatcaatcagcttgtaaaagatgatgaatgtgatcttgattatattccaaatatatcaagaaaagtagatttaaaagtggtgatgagtaattcttttggttttggtggcacaaatggctgtgttgtatttaaaaaagtagattaa

SEQ ID NO: 18140 - DNA, 939 bp, Campylobacter jejuni
atggcttcttatttagattttgaaaaaaatattcagcaaattgacgaggacattatcaatgctcagattaaaggagatactgaagctgtatcaattttaaagaaaaatcttgaaaaagaaatttctaaaacttataagaatttaagtgattttcagcgtttgcaattagcgcgtcatccagatcgcccttatgctcttgactatattgaacttattttaaatgacgctcacgaaatacatggtgatcgtgcctttagagatgatcctgctattgtttgttttatgggttatttaggagagaaaaaaataattgtaattggtgagcaaaaaggacgtggaacaaaagataaaatcgctagaaattttgggatgccacatcctgaaggatatcgcaaagccttaagagtagcaggacttgcagagaaatttcaaattcctattttatttttgatagatactccaggtgcttatcctggaataggtgctgaagaaagaggacaaagtgaagctatcgctagaaatttatatgaattaagtgatttgaaaataccgaccattgctatagttatcggagaaggcggtagtggcggggcgttagctataggggttgcagataaacttgcaatgatgaaaaattctgttttttcagtaatttctcctgaaggttgcgctgcaatactttggaatgatcctgcaaaaagtgaagctgcaaccaaagctatgaaagtaacagctgatgatttaaaatctcaaggtttaattgatgatgtgatagacgaacctacaaatggtgcacatcgcaataaagaagctgcagcagtagctattgctgattatgtaaaaaaatccctaaatgaacttgaaaatattgatgtacgagaactttctgcaaatcgtatgcagaaaattttaaagcttggagcctatcaagaggcttag

SEQ ID NO: 18141 - DNA, 195 bp, Campylobacter jejuni
atggcaagagtatgtcaaatcacaggcaagggtccaatggtgggtaataatgtcagccatgctaacaataaaacaaaaagacgctttttacctaatctcagaacagttcgtgtaactttagaagatggcaccacgagaaaaatgagaattgcagcttctactctaagaactctaaaaaaacaaaattctaaataa

SEQ ID NO: 18142 - DNA, 1089 bp, Campylobacter jejuni
atggaaaagatagcagatattatcgaatctattgctaatgaaaaaaatttaaacttagagaatgtaagagaaaaggtagctaccgctttaatcaatactgcaaaaagaatttatggacaagaatatgagttttttgtggatcctaaaaatttaaatctttatcaaaaaattaccatagtagcagataatgacgagagattgcaaaataaaagtgagagttttatcgcgttaagtaaggcaaaatcagaagctccagatgttgaaataggagatgaattaacctatgaatgttctttggaaaatttaggaagaactgcggtaaataccttgcataaagaacttgaatatcatatacaaaaattattagaacaaactatttttgaaaagtataaaaacaaagtagggcaaatggtttttggtacagttgttagagtggataatgaagaaaatacttttattgaaatagatgaattaagagcttttttaccgagaaaaaatcgcattaaaggggaaaagtttaaaataggtgatgtggtaaaagctgtgatacgccgtgtttatacagataagggtattaaaatcgagcttagtcgtacaagtcctaaatttttagaatgtttacttgaagctgaggttccagaaatcaaagatggttatgtcaatattataggatgtgctagaattccaggtgaaagagcaaaaatcattcttcaggccaatggaacaaatatcgatcctgtaggagctacagtaggtgttaaaggtgtaagaattaatgcggtaagcaaagagcttcataatgaaaatattgattgtatagaatttacaaatgagagtgaaattttaatttctcgtgccttggctcctgctattgtaaattctgtaaaaattgaagataaaaaagctattgtaagtttaaatagcgaacaaaaaagcaaagctataggaaaaaatggtattaatattcgccttgcttctatgttaagtggttatgaaatagagctcaatgaattaagctcatcgcagctaaataatgccatcagcaatgaagaagcaatgaaaaatcttcaagatttgtttaaaatttaa

SEQ ID NO: 18143 - DNA, 384 bp, Campylobacter jejuni
atgaaatttgaaacaattaatcaagaaagcatagcaaaactcatggaaatattttatgaaaaagttagaaaagataaggatttaggtcctatttttaacaatgctattggaacaagcgatgaagaatggaaagaacataaagcaaaaataggaaatttttgggcaggcatgcttttaggcgaaggtgattataatgggcaacccttaaaaaagcacttagatctacctccttttcctcaagagttttttgaaatttggctaaaactttttgaagaaagtttaaatatagtttataatgaagaaatgaaaaatgtcattttacagcgtgcacaaatgatagcttcacattttcaaaatatgctttacaagtacggcggacattaa

SEQ ID NO: 18144 - DNA, 1200 bp, Campylobacter jejuni
atggctaaagaaaaattttcacgtaataagccacacgtaaatattggtactattggtcatgttgaccatggtaaaactactttaacagctgctatttctgctgttctttctagaagaggtttagcagagcttaaagattatgataatatcgataatgctccagaagaaaaagagcgtggtattactattgctacttctcatattgaatatgaaacagacaatcgtcactatgcacacgttgactgcccaggtcacgcagattatgttaaaaacatgattacaggtgctgcacaaatggatggagcgatcttggttgtttctgctgcagatggccctatgccacaaactagagagcacattcttctttctcgtcaagtaggcgttccatatattgttgtttttatgaataaagcagatatggttgatgatgctgaacttttagagttagttgaaatggaaattagagaattattaagctcttatgatttcccaggcgatgatacacctattatttctggttctgctttaaaagctcttgaagaagctaaagctggacaagatggtgaatggtcagcaaaaattatggatcttatggctgcagttgatagctatattccaactccaactcgtgatactgaaaaagacttcttgatgccaattgaagatgttttctcaatttcaggtcgtggtactgttgttacaggtagaattgaaaaaggtgttgtaaaagtaggtgatactatcgaaatcgttggtattaaagatactcaaacaacaactgtaacaggtgttgaaatgttcagaaaagaaatggatcaaggcgaagcaggagataacgtaggtgttcttcttcgtggtactaaaaaagaagaagttatccgtggtatggttcttgctaaaccaaaatcaattactccacacactgacttcgaagctgaagtttatatcttaaataaagatgaaggtggtagacatactccattctttaacaactatagaccacagttttatgtaagaacaactgatgttacaggttcgattaaattagctgatggtgttgaaatggttatgccaggtgaaaatgtgagaattactgtaagcttgatcgctccagtagcacttgaagaaggaactcgttttgctattcgtgaaggtggtaaaactgttggttcaggtgttgtttctaaaattattaaataa

SEQ ID NO: 18145 - DNA, 159 bp, Campylobacter jejuni
atgagaattaaagttggtttaaagtgtgaagaatgtggtgatattaattatagcacctataaaaatagtaaaaatactactgaaaaattagaattaaaaaaatattgcccaagattaaaaaaacatacacttcacaaagaagttaagctaaaaagttaa

SEQ ID NO: 18146 - DNA, 534 bp, Campylobacter jejuni
atgagtactcataaatggtatgcaattcaaacttatgctggcagtgaaatggcagttaaaagagccattgaaaatttagtaaaagataacggaattgaagaacaacttaaagaaattgttgttccaactgaagatgttattgaatttaagaatggaaaggagaagattagcgaaagaagtttgtattcaggatacgtttttgcacttcttgatttaaatacagagctttggcatcgcattcaatctcttccaaaggttggtcgttttattggagaatccaaaaagccaacccctttaacagaaaaagatattaatttgattttggaaaaagttcacaatcgtgcagcgcctaaaccaaagatttcttttgaagaaggggaaaatgtgagaatcacagaagggccatttgcaaactttactgcaattgtagaagagtatgatatggttcgtggtttattaaaattaaatgtttctatttttggacgttcaactccagtggagatcttatattctcaagttgagaaaataatttaa

SEQ ID NO: 18147 - DNA, 426 bp, Campylobacter jejuni
atggctaaaaaagtcgtaggcgaaattaaattgcaaattgctgccacaaaagcaaacccatcaccacctgttggtcctgctttgggtcagcaaggtgttaatattatggagttttgtaaggcttttaatgaaagaacaaaagatatggcaggttttaatatccctgttgttatcactgtttatgcagataaaagttttacttttattacaaaacaaccgccagctacggatttgatcaaaaaagcagctggaatttctaaaggtacggataatccacttaaaaataaggtgggtaagttaactcgtgctcaagttttagaaatagtagataagaaaattgcagatttaaatactaaagatagagatcaagctgctaaaattattgcaggttcagctcgttctatgggtgttgaaatcgtagattaa

SEQ ID NO: 18148 - DNA, 702 bp, Campylobacter jejuni
atggctaagatagcaaaaagattaaaagaattatcacaaaaaattgattcaaataaagagtatgctttaagcgatgcaattgatacaataaagactttaaagtctgctaaatttgatgagactgtagaaattgctttaaaacttaatgttgatccaagacatgcagatcaaatggtaagaggatctgttgttttacctgctggaacgggtaaaaaagttcgtgttgctgtaattgcaaaagacgcaaaagctgatgaagcgaaaaatgctggtgcagatattgtgggtagcgatgatttagtagaagaaattcaaaaaggtaatatgaattttgatgttttgattgctactccaaatttaatgggacttgttggtaaagttggtagaattttagggccaaaaggtttaatgccaaatcctaaaactggaacagtgactatggatgttgctcaagcagttaataatgcaaaaagtggtcaggtaaatttccgtgttgataagcaaggaaatatccatgcaggtcttggtaaagtaagtttttccaaagaacaattatgggataatgttagcacttttgtaaaggcaattaacaaacataaacctgctgcagctaaaggtagatatattaaaaatgcggctttatctttgacaatgagcccttctgtaaagcttgaaacacaagaattgcttgatatgaaataa

SEQ ID NO: 18149 - DNA, 480 bp, Campylobacter jejuni
gtgactagaagcgaaaaagttgagattattgctaaacttgaagaaggttttaaagctagtgaagctattgtagtttgtaattacagaggtcttagcacaaaaaaactagaagagcttagaaataatgcaagagaaaacaatgtaaaagttcaaattgttaaaaatactttggctaacattgctcttaacaattccggtaaaacaggtctagttcttaaagatacaaatatttatctttggggcgaagatcagctaagtgtttcaaaagtagctgctaaatttgaagaaaataacgataaatttgaaatcaaaacagctcatattgaaggcgaagttgcagatgttgctaaggttaaagctcttgctaaaatgccttcacgcaatgagttgcttgctatgcttttgcaagtttggaatgcgccaattaccaatttcacaataggtttaaatgcgcttaaaaataaaaaagaatctgaataa

SEQ ID NO: 18150 - DNA, 378 bp, Campylobacter jejuni
atggcaatctctaaagaagatgtattagaatatatttcaaatttaagtgttcttgagttatcagaacttgtaaaggaatttgaagaaaaatttggtgtgtctgctgctcctgtaatggtagctggtggtgctgtagctggtggtgctgtagctgctgctgaagaaaaaactgaatttgatatcgttttaactgatggcggtgctaaaaagattgaagttattaaaatcgttcgtgctcttacaggccttggtcttaaagaagcaaaagatgcagttgagcaaactccttcaactctaaaagagggtgtggctaaagctgaagctgaggaagctaaaaaacaacttgaagaagctggtgctaaagtagaacttaagtaa

SEQ ID NO: 18151 - DNA, 4137 bp, Campylobacter jejuni
atgtgcgatatgttagataataaattaggaaatcgtttaagagtagacttctcaaacatttcaaaacaaatagaaatcccaaatcttctacaattacaaaaaaagagttttgattattttttaaatcttgataatggtgaaagtggtatagaaaaagtttttaaatcaatttttcctattcatgatccgcaaaatagattgagtcttgaatatgttagtagtgaaataggcaagccaaaatataccattcgcgaatgcatggaaagaggtttgacttattctgtaaatttaaaaatgaaaatccgtcttactctgcatgaaaaagatgaaaaaacaggggaaaaagttggcgtaaaagatattaaagaacaagaaatttatatccgcgaaattcctttaatgacagatcgtgtatcttttatcattaacggggttgagagagtggttgtaaatcaattacatagaagccctggtgttatttttaaagaagaagaaagttcaacggttgcaaataagcttgtttatacagcacaaattattcctgatcgtggttcgtggctttattttgaatacgatgccaaagatgttttgtatgtaagaatcaataagcgtagaaaagttcctgtaactatgctttttagagctttagggtataaaaaacaagatattattaagttgttttatcctattcagactatacatgtgaaaaaagataaatttttaacagaatttaatccaaatgattttatggatagaatagaatatgatattaaagatgaaaaaggaaaaatcgttcatcaagctggaaaaagacttacaaagaaaaaagcagaacagcttattaaagacggtttaaaatggatagaatatcctgtagaaattttacttaatcgttatttagcaaatcctattattgataaagaaagtggagaggttttatttgattctttaactttgttagatgagagtaagcttgctaagattaaagagcaaaaaagttttgatatagcaaatgacttggctaatggcgttgatgcagcgattattaactcctttgcccaagatggagaaactctaaaacttcttaaacaaagtgaaaatatcgatgatgaaaatgatttagctgcgattagaatttacaaagttatgcgcccaggtgaacctgtggtaaaagatgcagcgaaggcttttgtaaatgatttattcttcaatcctgaaagatacgatcttaccaaggtaggtcgtatgaaaatgaaccataaattaggtcttgaagtacctgagtatgttactgttttgactaatgaagatattattaaaactgcaaaatatttaattaaagtaaaaaatggtaaaggacatattgatgatagagatcatttaggaaatcgtcgtatccgttctataggtgaacttttagccaatgaacttcatttaggtcttgcaaaaatgcaaaaggcgatcagagataaatttacttctttaaatgcggatcttgataaagtaatgccttatgatttaatcaatcctaaaatgattactacaactatcattgaattttttacaggaggtcagctttcgcaatttatggatcaaaccaaccctttaagcgaggttactcataagcgtcgtttgtcagcgcttggtgaaggtggacttgtaaaagaaagagcaggttttgaagtgcgtgatgttcacgcgacacattatggtagaatttgtccagttgaaacacctgaaggtcaaaatattggtttgattaacactctttctacttatgcaaaagtaaatgaacttggctttgttgaagcgccatatagaaaagttgtaaatggtaaagtgactaatgaagttgtttatcttacagcgacacaagaagaaggcttgtttatcgcaccagcttcaactaaggttgatgctaaaggcaatatagtagaagaatttgttgaggctaggcaagatggtgaaactatacttgcaagacgcgaagaagtgcaattaatcgatctttgctcaggtatggttgttggagttgcagcttctttgattccgtttttagagcacgatgatgcaaacagagcgctaatgggttcaaacatgcaacgtcaagctgtgccacttcttactgcttcagctccgatagtaggaacaggtatggaacaaattattgcgcgtgatgcttgggaagctgttaaagcaaagcgtggcggtgtggttgagaaagtggataataaaagcattttcattttaggtgaagatgataaaggtccatttattgaccattacactatggagaaaaatttaagaaccaatcaaaatacaaattatattcaacaccctattgttaaaaaaggtgatatagtaaaagcaggacaaattatcgcagatggtccttctatggatcaaggcgaacttgctataggtaaaaatgctttaatcgcttttatgccttggaatggttataactatgaggatgctatagttgtaagtgagagaattattcgtgaagatacttttacaagcgtgcacatttatgaaaaagaaattgaagcaagagaactaaaagacggtatagaagaaattaccaaagatattccaaatgtaaaagaagaagatgttgcgcatcttgatgagagcggtattgcaaaaattggtacccatatcaaaccaggtatgattttggtgggtaaggtttctccaaaaggtgaggttaaaccaactcctgaagaaagacttttaagagcgatttttggagaaaaagcaggacatgttgtgaataaatccctttatgcaaccgcttctttagagggtgttgttgtggatgttaaaattttcactaaaaaaggctatgaaaaagatgatcgcgcaataaaatcttatgataaagaaaaaatggctttagaaaaagagcatcatgatagacttttgatgatggatagagaagaaatgcttcgtgtttgtgctcttctttccaaagcctctttaaatagcgatcaaaaaattggagataaaaattataaaaaaggacaaactgcagatattagcgaacttgaaaaaatcaatcgttttactttaacaactttgattaaagcttattctaaagagattcaaaaagaatacgatgatttaaaaaatcatttccaaaatgagaagaaaaaattaaaagcagaacacgatgaaaagcttgaaattttagaaaaagatgatattttaccaagtggggtaattaagcttgttaaagtttatattgctacaaaaagaaagcttaaagtcggtgataaaatggcaggacgtcatggaaataaaggtatagtttcaactatagttcctgaagtagatatgccttatttgccaaatggtaagagcgtggatattgcgcttaatccacttggcgttccaagtcgtatgaatataggtcaaattttagaaagtcatttaggtttagttggacttagacttggggatcaaattcaagaaatttttgatagaaagcaaaaagattttcttaaagaattaagagcgaaaatacttgaaatttgttctattccaagacttgcaaacgaaaaagaatttattaaaagcttaagcgatgaagagcttttaaactatgctagagactggagtaaaggagttaaattttctactcctgtttttgaaggtgtaaatatagaagaatttagcaagctttttaaaatggctaagatagatatggatggcaaaacagaactttatgatggacgcacgggggaaaaaattgcagagcgtgttcatgtaggatgtatgtatatgctaaaactccatcacttggttgatgaaaaagttcatgcaagaagtacaggaccttatagcttggttacccaacaacctgtgggtggtaaagcactctttgggggacaaagatttggagaaatggaagtttgggcacttgaagcttatggagcggctcacactttaagagaaatgttaaccataaaatcagatgatgtagaaggtagatttagtgcctataaagcattgacaaaaggtgaaaatgttccagcaacaggaattcctgaaacattttttgtattaaccaatgagcttaaatctcttgctttagatgttgagatttttgataaggatgaagataatgagtaa

SEQ ID NO: 18152 - DNA, 4554 bp, Campylobacter jejuni
atgagtaaatttaaagtaatagaaattaaagaagatgcaagacctagagattttgaagcatttcaactaagacttgcaagtcctgaaaaaatcaaatcatggtcttatggagaagtaaaaaaaccagaaactattaattatagaaccttaaagcctgaaagagatgggcttttttgtgcaaagatttttggacctataagagattatgagtgtctttgtggtaaatacaaaaaaatgcgttttaaaggcgttaagtgtgaaaaatgtggtgttgaagtagcaaattcaaaagtgcgtcgttctagaatggggcatatcgagcttgtaactcctgtggctcatatttggtatgttaattctcttccaagccgtataggaacgcttttgggtgttaagatgaaagatcttgagcgcgtgctttattatgaagcttatattgttgaaaacccaggtgatgctttctatgataatgaaagtactaaaaaagtggaatattgcgatgttttgaacgaagagcaatatcaaaatttaatgcaacgctatgaaaatagcggctttaaagcaagaatgggtggagaagttgttcgtgatttacttgcaaatttagatcttgtagcgcttttaaatcagcttaaagaagaaatgggggctacaaattcagaggctaagaaaaaaactatcattaaacgcttaaaagttgtagaaaatttcttaaattcaaatttaaacgccaataccgatagcgacgaagctgtaccaaatcgtcctgaatggatgatgattacaaatcttccagttttaccgccagatttgcgtcctttagtggctttagatggtgggaaatttgcagtttctgatgtgaatgacttatatcgtcgtgttatcaatagaaatacacgtcttaaaaaacttatggaacttgatgcacctgaaatcattatcagaaatgaaaaaagaatgcttcaagaggctgttgatgcgctttttgacaacggtcgtcgtgctaatgctgtaaaaggagcaaataaacgcccattgaaatctttaagtgaaatcatcaaagggaaacaaggacgttttagacaaaatctactaggtaaaagggtggatttctcaggtcgtagcgttattgttgtaggtccaaaacttagaatggatcaatgcggtttacctaaaaaaatggctttagagctttttaagccacatcttttagctaagcttgaagaaaaaggttatgcaaccacagtaaaacaagctaaaaaaatgatagaaaataaaaccaatgaagtttgggaatgtttagaagaggtagtaaagggacatcctgttatgctaaaccgtgcacctactttgcataagctttctatccaagcttttcatcctgttttagtggaaggtaaggctatacaacttcatcctttggtttgtgcagcatttaacgcagactttgatggggatcaaatggcagtgcatgtaccgctttctcaagaggctattgcagaatgtaaagtgcttatgctttcatcaatgaatattcttttaccagcaagcggtaagtctgtaaccgttccatcgcaagatatggttttaggaatttattatctttcgttggaaaaagcaggtgctaaaggttcgcataaaatttgtacaggcattgatgaagtgatgatggcacttgaaagcaagtgtttggatattcatgcgagcatacaaactatggtagatggtagaaagattaccactacagcaggaagattgattgttaaatccatcttgcctgattttgtgcctgaaaatagttggaataaagtcttaaagaaaaaagacattgctgcgcttgtagattatgtttataaacaaggtggtttagagattacagcaagtttcttagatagacttaaaaatttaggttttgaatatgcaactaaagcaggtatttcaatttcgattgcagatattattgttcctaatgataaacaaaaagctatcgatgaagcaaaaaaacaagtaagagaaattcaaaattcttataatctcggtttgattacttcaggggaaagatacaataaaatcattgatatttggaaaagtacaaacaatgttctttcaaaagaaatgatgaagcttgtagaaaaagataaagaaggttttaactctatttatatgatggcagattctggtgctaggggtagtgcagctcaaatttctcagcttgctgcgatgagaggacttatgaccaaacctgatggttctattatcgaaacgcctattatttcaaatttccgtgaagggctaaatgttcttgaatactttatttcaactcacggtgctagaaaaggtcttgcagataccgctcttaaaacagcaaatgcgggttatttgacaagaaaactcatcgatgttgcacaaaatgtaaaaattaccattgaagattgtggaacacatgagggtgttgaaatcaatgaaattaccgcagatagttctattatagaaactttagaagaaagaattttaggcagggttttagctgaggatgtgattgatcctattacaaattctgtgctttttgcggaaggtactttaatggatgaggaaaaagcaaaaattcttggcgaaagcggtataaaaagtgtcaatatccgcactcctattacctgcaaagctaaaaaaggaatttgtgcaaaatgttatggtatcaatcttggtgaaggtaaattagtaaaaccaggcgaagcagtgggaattatttccgctcaatctatcggtgaaccaggaacgcagctaactctaagaactttccatagcgggggaactgcaagtacggatttacaagatagacaagtaagcgcacaaaaagaaggttttataagattttataatcttaaaacttataaaaacaaagaaggtaaaaatatcgtagcaaatcgtagaaatgcggcggttttacttgtggagccaaaaatcaaaactccatttaaaggtgtgattaatatagaaaatattcatgaagatgtgattgtttctattaaagataaaaaacaagaagtaaaatacatattaagaaaatacgatcttgctaaaccaaatgaattagcaggtgtaagtggcagtatagatggaaaactttatttgccatatcaaagcggcatgcaagtagaagaaaatgaaagtatcgtagaagtgattaaagagggttggaatgtaccaaatcgtattccttttgcgagtgaaattttagtagaagatggcgagcctgtagttcaaaatatcaaagcaggcgaaaaaggaacactcaaattttacatccttaaaggcgatggtttagatagagtaaaaaatgttaaaaaaggtgatattgttaaagaaaaaggattctttgtagtgattgctgatgaaaatgatagagaagcaaaaagacactatatcccaagagaatctaagatagaatttaacgatagtgaaaaaatcgatgacgcaaatactatcattgcaagtgctcctaaaaaagaaagaaaagtgattgcagaatgggatgcttataataatactatcattgcagaaattgatggtgttgtaagctttgaggatattgaagcaggttatagtgccgatgagcaaattgatgaagctacaggtaagcgttctttagtaattaatgagtatttacctagcggagttagaccaactttggtaattgcaggaaaaggtgataaagctgtgcgttatcaccttgaaccaaaaaccgttatttttgttcatgatggcgataaaattgctcaagcagatattttagcaaaaactccaaaagcagcagctaaatcaaaggatattacaggaggtcttccaagagtttctgaactttttgaagcaagaaaaccaaaaaatgcggctgtgattgcagaaattgatggtgttgttcgttttgataagcctttgcgttctaaagaaagaattattatccaagcagaagatggaacaagtgctgagtatttaatcgacaaatcaaaacatattcaagtaagagatggagagtttattcatgcaggtgaaaaacttacagatggagttgtttcgagtcatgatgtgcttaaaattttaggtgaaaaagccttgcattattatttgatttctgaaattcagcaagtttatcgcggacaaggtgttgtgatttctgataaacatatagaagttatcgtttctcaaatgctaagacaagtaaaagttgtagatagtggacatacgaaatttattgaaggtgatttggtttcaagacgtaaattccgtgaagaaaatgaaagaatcattagaatgggtggagaaccagctattgccgagcctgtgcttttaggtgtaacaagagcagcgattggaagtgatagtgtgatttctgcggcttcattccaagaaactaccaaagttttaactgaagcaagtatagcaggtaaatttgactacttagaagatttaaaagaaaatgttattctaggtagaatgattcctgttggaacagggctttatggcgaacaaaatttaaaacttaaagaacaagaataa

SEQ ID NO: 18153 - DNA, 1173 bp, Campylobacter jejuni
atgaaaatgaaaaagataatgggttatagaagggaagatggaaaatttggcttaagaaataaagtcattatcataccaagtgtacattgtgctaataaagtgtgtgaaaatatagctagaaaatgtaatggagcagtttatatcaaccatcagcatggttgctcccagcttgaatttgatgctttacaaactagagatgttttaataggtcatgggagcaatgccaatgtttttggtgttttaattatagggcttggttgtgaggtaatacaagccaaagcagtagcagaaaaaatcaaagaagcaatgccttataaaaaggttgaatatttagtgatacaagaatgtggtggtagtaaaaataccattgaaaatggtatcaaaatagtcaatgaaatgcttgaaagtgctgcaaaattacaaaaaagtgaaggagatttcagtgatttgattttaggcacagaatgcggtggaagtgatagctatagcggacttagtgctaatcccactttaggaagtttgagtgattttgtaatcgatgagggtggtgcggtaattttagcagaaactacagaacttataggttgtgaagccatactagctaagagagcaaaaaacgatgaaatagctaaaaaggtatatgataagattttagcttatgagaatttagtcaaatcttttcatgctgatattcgaggagcaaatcctagcccaggaaatatggcaggcgggcttagtactatagaggaaaaatctttaggctgtgtttataaggcaggaactagaaccttaatggatgtgattgattatgctaagcctgtagtttctaaaggtttaacttttatgaatacaccaggcaatgatatagaacaacttagtgctatggttgcaggtggagcaaatatttgtgtttttactacaggtcgtggcactccaacgggttctgctatcgtgcctactatcaaaatgagttctaatactttttgttatgaaaatatgaatgatgctattgatattaacgcaggaagcattatagatggggtaaaaacaaaagaagaagtgcgtgatgagcttatagaattaatcgtgcgaatttcagatggagaattggtaaaagcagagcttaacgagcaaaatgatttttcagcttggagacttgctacaacttgttaa

SEQ ID NO: 18154 - DNA, 1257 bp, Campylobacter jejuni
atgactgattctaaaaatataaaaatagctattgttttggtaacttctcttttctttttatggggagtaagctatggacttattgatgtgatgaataaaaattttcaaaatcatcttcatattagccagcatgaaagtggctttttacagtttgcttattttggtgcttattttatcatagccttacccgcaggttatatagccaatagattttcttataaaatgggaatcatttttggcttagctctttatgccataggagctttgcttattatacctgctacaaatttggcttcttttcatttgtttttgtttgcgttttttattttagcttgtggtattggttctttagaaactagtgcaaatccctacatgacaaagcttggtgatgaaaaaaatgcgagttttagaatcaatgctgcgcaaagttttaatggtttggggcaatttgtaggacctattataggcggagctttatttttatctattactaaacaagaagagggtgcgagtaaagagcaaatccaggctgcattggtagctaatatgggaaatgtccagcttgtttatataggaattgctgtcattgttattttgattttaattgcttttgttgcaaataagcttccagaaggaagtgcggtaagtgatgattataagcaaaaagatgattctaagcccatatatgtttttaaacacagacattttaacttagggcttttagcgcagtttttgtatatagccaatcaagttgcagcaggagctttttttatcaattatgttgtagaacataatgaaggtttaaaagatgcgcaaggtgcttattatttttctatagctttggttgcatttatgctagggcgcattgtttctactcctttgatgaagataatcaaaggtgaaaaaattttaggattttattctctaatcaatgtgcttatatgctttagcttgtattttgctagcgggttttttagcatagtgcttttaatagctttatttttctttatgtctatttcttttcctactatttttgcggtagcaacaaaaaatttacctttaaatcaagtaaaactaggcggttctttgcttgtgatgagcatagtaggtggagcaattatgcctataattataggttttattaatgatcattatggtacaggcgctgggtatttagcaatggcacctttgtttttatatgtggcttggtatggctttataggctcaaaagtgagaaaaaatgcaaaagatttttga

SEQ ID NO: 18155 - DNA, 318 bp, Campylobacter jejuni
atgcaaagatacggtcaaatcataaaaataaaaaaagaaaaaatagaagaatacaaagagcttcacacaaagccttatgaaggggtttgtgagatgattaaggaatgcaatatacaaaattattccatttatttgtttggggaatatttatttgcatattttgaatatataggtgctgattttgaagcagacatggctaaaatggcaagagatgaaagcacacaaaaatggtggaaagtaacagatccttgtcaaatatctttaggctatgcaggacaaaaatggctaaatatggaagaagtatttcacttagactaa

SEQ ID NO: 18156 - DNA, 1182 bp, Campylobacter jejuni
atgcaagagcaaggaaaaaccagagttttggctagcatagagattaattttacagcagattatatggattatacggccgaatgggctagaagatatgagggtgaaatcatacaaagcgatagggctaatgagcatatatatttatataaaagtgctattggggtaattggtggaattttaccttggaattttccatttttcttaatcgcaaggaagatggcacctgctttactaacaggaaatactattgttataaagccaagcagtgaaactccaaacaatgcttttgaatttgcaaagcttgtttcgcaaagttctttaccaaaaggtgtttttaacttagttgcaggtaaaggcagtgtagtaggatatgaattatcaagcaatgaaaatataggtatggtaagtcttacaggaagtgttgaagcagggactagagtaatggaagctgcagctaaaaatattatcaaagtttctttagaacttggtggaaaggcgccagctatagtgtgcaaagatgcggatattgatttagcagtagaagcgattaaagcaagtagaatttgcaataacggacaagtttgtaattgtgctgaaagagcttatgtgcatacaagcgtttatgatgaatttgtagacaaatttgtaaaagccatgagtaaagtaagtgttggaaataccttaaaaggtgattttgatatgggaccattggtcaatcaagcaggagttgataatgctttggcaatgcttcaaagagctacagctaaaggagcgattgtagaatgtggtggaaaaatcactgatacaagtgggtattattttcccgcaagcgttcttactaatgttaaacacgaagatgagatcatgcaaaaagaaatttttgctccgattttacctattgctaaatttgatacacttgatgaagttattgatatggcaaatgattgtgaatatggtcttacaagttctatttatacacaaaatttagatatagcaatgagagctagcagagaaattaaatttggtgaaacttatattaatcgtgaaaattttgaggctatgcaaggttttcatgcaggctttagaaaaagtggcataggcggagctgatggaaaacatggtcttgaagaatatttagctacccatgtggtatatttgcagtataatactaataaacaatga

SEQ ID NO: 18157 - DNA, 387 bp, Campylobacter jejuni
gtgcctaccataaatcaattggttagaaaagagcgcaaaaaagttttagaaaaatctaaatctccagcgcttaaaaattgtccacaaagaaggggagtttgcactagggtttatactacaacacctaaaaaaccaaactcagcgttaagaaaagttgccaaagtaagacttactagtggctttgaagtgatcagctatatcggcggtgaaggtcataacttgcaagaacacagcattgttttagtgcgtggtggtagggtaaaagacttaccaggggttaaatatcacatcgttcgtggtgctcttgatacagcaggtgttgcaaaaagaacagtttctcgttctaaatatggtgctaaacgtcctaaagcaggcgctgcaaaataa

SEQ ID NO: 18158 - DNA, 471 bp, Campylobacter jejuni
atgagaagaagaaaagctccggtaagagaagtcttgcctgatccgatttatggtaataaagtaatcacaaaatttattaattctttaatgtatgatggtaaaaaaagcacagctacaacaattatgtatggtgctttggaagctattgataaaaaaggtggcgagaaaaaaggtattgatatttttaatgatgcgattgaaaatattaagcctttattagaagtaaaatctcgtcgtgtaggtggtgcaacttatcaagttccagttgaagttcgtcctgctagacaacaagctttggcgattcgttggattatttcttttgcaagaaaaagaagcgaaagaactatgattgataaacttgcagctgagcttttagatgcagcaaatagcaaaggtgcttcatttaagaagaaagaagatacttataaaatggctgaagcaaataaagcatttgctcactatcgttggtaa

SEQ ID NO: 18159 - DNA, 2076 bp, Campylobacter jejuni
atgtcaagaagtactcctttaaaaaaagttagaaatatcggtattgctgctcacattgatgcgggtaaaacgactacatctgaaagaattcttttctttacaggtatgagtcataaaatcggtgaagttcatgatggtgctgcaactatggactggatggaacaagagaaagagcgcgggattactatcacttctgcggctacaacttgtttttggaaagatcatcaaatcaatcttattgacactccaggccacgtggattttacaattgaagttgaaagatctatgcgtgttcttgatggtgctgttgcggtattttgttcagtgggtggggtgcagcctcaaagtgaaacagtttggagacaagcaaataaatatggtgttccaagaatagtatttgtaaacaaaatggatagaatcggtgcaaatttctacaatgtagaagatcaaattcgcaaccgtttaaaagctaatccagttccacttcaaattccaatcggtgctgaggataattttaaaggcgtaatcgatcttgtaactatgaaagctttagtttgggaagatgatactaagccaacggattatgtagaaaaagaaattccagctgaacttaaagaaaaggcagaagaatatcgcacaaaaatgatagaagcagtttctgaaacttcagatgagttgatggaaaaatatttaggcggagaagaattaagccttgaagagattaaaacagggattaaagcaggatgtttaagtctttctatcgttcctatgctttgcggtacagcgtttaaaaataaaggggttcaacctttacttgatgctgttgtggcttatttaccagctcctgatgaagtggcaaatatcaagggtgaatatgaagatggcacagaagtttctgtaaaatcaactgatgatggcgagtttgcaggacttgcatttaaaattatgacagatccatttgtaggacaacttactttcgtgcgtgtttatcgcggttgtttagaaagtggttcttatgcttataactcaactaaagataaaaaagaaagaattggtcgtttgttaaaaatgcactctaacaaaagagaagagattaaagtgctttacgcaggcgaaattggtgctgttgtaggacttaaagatactttaacaggggatactcttgcaagtgaaaaagataaggtaatccttgaaagaatggattttccagatccagttatttctgttgcagttgagccaaaaactaaagcagatcaagaaaaaatgtctattgctttaaataaattagcacaagaagatccaagttttagagtttctacagatgaagaaagtggccaaactatcatttcaggtatgggtgagttgcaccttgaaattatcgttgatagaatgcttcgtgaatttaaagttgaagctgaagtaggtcaaccacaagttgcttatcgcgaaactattagaaaaactgttgaacaagaatacaaatacgctaaacaatcaggtggtcgtggtcagtatggacatgtattcttacgccttgaaccacttgagccaggtagtggatatgaatttgttaatgatatcaaaggtggagtaattccaaaagaatacattcctgcagttgataaaggtgttcaagaagcattacaaaatggtgttttagcaggttatcctgtggaagatgttaaagtaactgtttatgatggaagttatcacgaggtggattcatctgagatggcgtttaaacttgctgcttctatgggctttaaagaaggtgctagaaaagcaggtgctgtgatcttagagcctatgatgaaagttgaagtagaaactcccgaagattatatgggtgatgttattggagatcttaacaaacgccgtggtcaagtaaatagcatggatgagcgtggtggaaataaaatcatcacagcattttgtcctttggctgaaatgtttggttattctactgatcttagaagtcaaactcaaggtcgtgcgacttattctatggaatttgatcactatgatgaagttcctaaaaatgttgcagatgaaatcatcaaaaaaagaaacggttaa

SEQ ID NO: 18160 - DNA, 702 bp, Campylobacter jejuni
atgtcagatttgattacgctagcacaattatcacaagggtatcgttacaatagtgattctttaattttagctgattttattttaaaacaaggaattaaaggcgctgtttttgatgtaggtgcgggctgtggtatcataggtattttacttaaaaaaaatattgcaaatttaagtttatctttgattgatattcaaaaagaaaatatagaattgattgaaaaaaatttaaaatccaacaaaatacaaggcgatatttttcatgatgattttaatcaatttcaaatcataaaaaaatttgacttcatagtttgcaatcctccattttatagacaaggagcttacaagagtgaagatcagcataaagctataagtaaatttcaggaatttttacccttgcatagctttttagctaaaacaaattctatgcttaagccaaatggtactttgtatttttgctatgaagctttagctttagatgaaatttgttttattttaaaagatatgaaaatgaaaataacaaagctttgctttgtacatacacatcaaagcaaaaaagcaagacttgttttgatacaggtaaaaaaaggttcaaaatcgccttgtgagattttacctcctttttttgtatatgaaaatgaaattttaagcaaacaaatgcaagaaattcacttaagatttaggttaaaaagttatgatatttga

SEQ ID NO: 18161 - DNA, 777 bp, Campylobacter jejuni
atgatattggataaaatttttgaaaaaacaaaagaagatttaaaagaacgcaaactaaaacttccttatgatatgttagggcgttctttagcttcaaatcctttctttccaaaagatgtgattaaggctttaaaaagagtagaaaaagaagttaaaatcatagcagaagtaaaaaaagcaagccctagcaagggagtcattagagaagactttgatcctttgagtatcgctttaaattatgagaagaacaaagctgcggcgatttctgttttaactgagccgcatttttttaaaggttctttagaatacttaagtcttatacgccgttatacgcaaattcctttacttagaaaagattttatctttgatgagtatcaaattttagaagctttggtttatggggcggattttgtattattaatcgctaaaatgctaagcatgaaagagcttaaaaaactgcttgagtttgcaagacatttaggtcttgaggctttggttgaaatccatgataaagaggatttgagtaaggctatttttgctggagcggatattatcggtatcaatcatcgtaatttagaggattttactatggatatgagtttgtgcgaaaaacttatcccacaaatcccaaattcaaaaatcatcatcgcagaaagtggtttagaaaataaagaatttttagagcatttgcaaaatttaggcgttgatgcttttttaatcggcgaatattttatgcgcgaaaaagatgaaggaaaggctttaaaagctttgctttaa

SEQ ID NO: 18162 - DNA, 867 bp, Campylobacter jejuni
atgaaaataggtatcataggtcttggaaaaatggggcaaaaccacttaaatgaacttagtaaaaattctcattttaaacttaatgcactttttgacctttgcaaaaatccaaacctaaatatttttgatgatattttttatgatgatttggataaatttttaaatcaaaataatgatattatcatcatagcaacacctacaaattcacatttaacaatagcaaaaaaagtttttaaacaatgcaaatgcgttttaatcgaaaagcctttagctctaaatttaaaagaaatagacgaaatttcaaatttagctaaagaatacagcataaaagtaggtgtaggtttttgtgaaagatttaatcctgcggttttagccctaaaaaaagagcttgaaaatgaagaaattatcagcattaacatacaaagattttcaccctacccacaaagaatcagcgatgtagggattttgcaagatttggctgtgcatgatcttgatttgctttgttttttaagcaaacaagaaataacaaaaaccaatttgcttaaaaaatacacccaagatcaaacaagagaaagtgaaagcattattctatgtgggcttgaaaaatgtattgctagcatacatcaaagttggaatagcacacaaaaactaagaaaaattcatcttattactaaaaatcatttttatgaagccaatttaaatgacttttctttattaaaagatggaaattttatagaacttactcaacaaagtccacttttttcagaacacgaagctttgttaaaacttatcgataatcaacccaatcatttagccagcacgagcgatgcttacaaagttcaagaaattttagaaaggtttgcgtga

SEQ ID NO: 18163 - DNA, 2529 bp, Campylobacter jejuni
atggatatcagaaaagcttatttggatttttttgcatcaaaaggacatgagataaccccgtcaagtcctttagttcctgatgatgcaactttactttttaccaatgcgggtatggtgccttttaaaagtatatttacaggagaaattccacgcccaaaccctccacgcaaaacaagctgtcaaacttgtataagagcgggtggaaagcacaatgacttagataatgtaggatataccgcacgccatcatactttttttgaaatgcttgggaattttagttttggagattattttaaagaacaagccatagcttatgcttgggaatttgtaactgaagttttaaaactacctaaagatagactttatgtaactgtgcatgaaaacgatgatgaagcttttaatctatggcaaaaacacattcaaaaagaaagaatttacaaatttggtgataaagataacttctggcaaatgggcgatactggtccttgtggtccttgcagtgagattttttatgaccaaggacaagagcattttaactcaagcgaagattatatgggcggagatggagatagatttttagaaatctggaatcttgtttttatgcaatatgaaagaagtgctgatggagtgcttagcccactgccaaagccaagtattgatacaggaatggggcttgaaagagtaacagcaattaaagaaggtaaatttagcaattttgatagctcgctttttatgccaatcatcaatgaaatttcaaaactttgtaacaaaacttatgtttatgaaagtggagcaagttttagagtcatagctgatcatataagatcaagtgtatttttacttgcacaaggggtaagttttgataaagaaggtaggggttatgttttgcgtcgtattttgcgtcgtgctttaaggcatggatatttgctaggttttaaacaagcttttatgtataaactagttgatgttgtgtgcgatttaatgggcggacattatacctatcttaatgagaaaaaagactttataaaagaacaaattcgccttgaagaagaaagatttttaagcactatagaaaatgggattgaaatttttaatgaagagcttaaaaacactaaagaaatttttagcggagaagtagcctttaagctttatgatacttatggttttccgcttgatttaacggctgatatgctaagagaaaaaaatcttaaagttgatgaagaaaaatttgaacttttcatgaatgagcaaaaagcacgcgctaaggcttcttggaaaggaagtggagataaaactgcaagcggagattttaaaaacttacttgaaaaatttggagaaaatcatttcgtaggttatgaaaaagcagaatgcgaaagtaaaattttagcccttttagatgaagattttaaagaagtttccacccttaaagatgcgggttgggtgatgcttgaaaacacacctttttatgcaacaagtggggggcaaagtgctgatagtggatttatagctaagcgtgaagttttagatacgcaaaagttttttaatctcaatcttagctttataaaagcaggcgaagaactaaaagttaacgatatagttcatgcaagaatcgatacagaaaaaagagagcaaatcgcacgccaccactcagccactcatcttttacatcatgctttaagagaaattttaggttctcatgtaagccaagcaggatctttggttgaaagcaataaactaagatttgattttactcatcataaagctttaaacaaagaagagctagaaagcattgaaaaaagagtcaataaaatgattataaactcaagcgaagctatcttagaaaatatgcctttagaagaagctaaaaaaagcggtgctatagcattgtttaatgaaaaataccaaggcaatgtgcgtgttttaactctaggtgaaagcaaagaactttgcgggggaactcatgttaaaaatactgctcaaataggaagtttttacatagttaaagaaagtggtgtgagtgctggagttagacgtattgaagctgtggtttctaaagcggctttagaatttgtaaaaaatcaactcgaagaactttctaaagtaaaagatgaacttaaaaataatgatattttaagcgggattaaaaagcttaaaaatgaaattttaagtttaaaaaatgagcttaaaaattcaagtaaaaccgagcttgattctaaaaatatccaaggtgttgaaatttgcgtaaaacgtatagataatggcgatattaaagctatgattgatgattttaaaaacaaatttgctaaagcggtgattttacttatccaagtaaaagatgaaaaaatcactttagcagctggcgttaaagatgtgcctttaaaagcaggagctttggttaaagaagcggcgcaaattttaggtggaaatggtggcggaagagatgattttgctactgcaggtggaaaagatttaagcaaaatcaatgaagctttaaaacaaagcttagaaacgatagaaaaagcactttaa

SEQ ID NO: 18164 - DNA, 1932 bp, Campylobacter jejuni
atgaaaatattaaaatatattttttcattttttactcttttgtttataactggatttatttatgtggcttatcttttcacaagtgctgatactgagggttatacttttaaagaatacaaacctcctcttacaacacaaatttacgatagaaatggcaagcttgtggctaatatttttgaacaacatcgtttttacgctccttatgaagagcttcctccacgccttatagaagctttggttgctatagaagatacaagcttttttgaacataatggagttaatatcgacgccatttttagagctgccgtaaaaattataaaaagtggtggaaaaaccatggaaggagcttccactcttactcagcaatttattaaaaacacggaattaaccccagaaagaactattgcgcgtaaaattcgagaagctttgcttgcttataaaatggaaaccattttaactaaggaacaaattttagaaaggtatttaaattttatcttttttggacatgggtattatggagtaaaaaccgcagctttggggtattttcataaaaatttaaatgaactaagccttaaagagattgctatgctagtaggtatgccaaaagcacctagcagttatgatcctacaaagcatttagatctttccatctcaagagcaaataatgttatttcaagaatgtataatctaggttggatttcaaaagcagattatgatacagccattaaagaaattccgcaagtttatgatgatacgcttactcaaaatgctgctccttatgtcgtagatgaagtgattaaacaattaagccctaatatcaaagacttaaaaacaggtggatataaaatcattttaaatatagacttagatgttcaaaatatggcacagaatgctttaaaatttggttatgatgagatagtaaaacgcgataaagatgcaaatttaagcactttaaacggagctatggtcgtggtaaatcatcaaagtggtgatgttttagctttggtaggtggagttgattatgaaaaaagtaattataaccgcgctactcaaagtatgcgtcaacctggaagctcttttaaaccttttgtgtatcaagtggcgattaatttaggatattcgcctatgagtgaaattgctgatatttctagaatttttgaaggtggagcgggtaataatgaggattggaaacctaaaaatgaagggggtaaatttttaggtttaattaccttaaaagaagctttaacaagatcaagaaatttagctaccattaatctcgcacttgatatggggcttgatgttctttactctaaactaatggaatttggatttaaagatataccgcctaatttatcaatcgtattgggaagttttggtatttctcctttggagtattcgaaattttataccatgtttgggaactatggtacgattaaagatcctcaaattatcagacaagttcaggataaaactggtaaaaccatcatggaatttaactcaaatgagcgtaaagtcagcgatgaagcgcaaagttttctggttttagatatgatgagaaatgttgttgaaaaaggcacagggcgtaatgcaagagtaaaagatatagaaatagcaggaaaaacaggaacaacgaataaaagtgttgatgcttggttttgtggacttacgcctgaaatagaagcaatcatttggtatggaaatgataacaacaagcctatgcgttatacagaaggtggggctagaacagctgctcctgtgtttagagaatttttaactcaatatatagaaaaattccctgatacaactagaaaatttagcattcctaatggagtttatcgtggaaattataaaggagaaagtgcttattataccaccaaatcaccattaccaaaagcaaatatgaaatttaatgaaagcgagattatattttga

SEQ ID NO: 18165 - DNA, 2574 bp, Campylobacter jejuni
atggcaaatatacaagattttttaactgataatatgctttcaaaccttgaaagtgcagcatctttagctatacattctaaaaataatgaagttgtacctttacatcttttatgggctttaagcgtagatagtacaagtattttaaatcaaattttaaataaattaaatatttctaaagaagccttagagcttgaaattaaaagcagaatttcaaaacttgcaacgagttcaaatgtaaaccgtgaaaatatacgcttttccaatgaacttataaattcattagaaaatgctaaaggattaatgagtgctaatggagatagttatttaagtgtggatacttggcttataagtgaaagtcaaaaaagtcctattaaagaaattttggcgcaatttttagatttaagagaatttcaaaaagagcttgaaagtctaagagcgggacgaaaaatggatagcaaaacaagcgatgaaactttagatagcttaaataaatttggtatagatttaaccttaaaagcaagcgagggtaaacttgatcctgttataggcagagaagaagaaatcgaacgtttgatgcaaattttaatacgtaaaaccaaaaataaccctatacttttaggtgaaccaggcgtaggaaaaacagctatagtagaagctttagcacaaagaattattaaaaaagatgttccaaaatctttgcaaaataaaaaagtcatcgctcttgatatgagtgctttaattgcaggtgcaaaatacagaggagaatttgaagatagattaaaagctgtggttaatgaagtgataaaaagtgaaaatatcattctttttatcgatgaaattcacactatagtaggagctggagcgagtgaaggcagcatggatgcggcaaatattttaaaacctgctcttgcaagaggtgaactccataccataggcgcaactactttaaaagaatatcgtaaatattttgaaaaagatgcagccttgcaacgccgttttcaacctgtaaatgtaggtgagccaagtgttaatgaggctttggctatgttaaggggtataaaagaaaagcttgaaattcatcataatgtaaccataaatgatagtgctttagtagccgcagctaaactttcaaagcgttatatagcagatcgttttttacctgataaggccattgatttaatcgatgaagctgcagctgaactgaaaatgcaaattgaaagcgaaccaagttctttaagaaaagtacgcaaagatatagaaactttagaagttgaaaatgaagctttaaaaatggaaaatgatgaaaaaaatcaaaaaagactcgatgaaatcgcaaaagaactagctaatttaaaagaaaaacaaaatgccctaaattcacagtttgaaaatgaaaaaagtgtttttgatggcataagtgctaagaaaaaagaaattgatctgcttaaaaatgaagcttctttggctaaagctagaggtgaatttcaaaaagcagccgagctagagtatggaaaaattccaagtcttgaaaaagaagtagaaattttagaagataaatggaaaaaaatgagtgaaaatggagttttacttaaaaatcaagtagatgaggatttggttgctggaattttaagcaaatggacgggtattagcgtgcaaaaaatgttaacttctgaaaaacaaaaattcttagaagtggaaaaacatttaaaagaaagtgtcataggacaagataaggccttaagtgctttagctagagccattaaacgtaacaaagcagggcttaatgcggacaataaacctataggaagctttttatttttagggccaacaggggtaggaaaaacacaatcggctaaagctttggcaaaatttttatttgatgatgaaaaagcaatgattcgctttgatatgagtgaatttatggaaaaacatagtgtttcaagactcttaggtgcgcctccaggatatataggacatgaagaaggtggagagcttactgaagccgtacgaagaaaaccttatagcgtgcttttgtttgatgaagttgaaaaagcacataaagatgtatttaatgtgcttttagggattttagatgatggtagagcaaccgatagcaaaggtgtaacagtggattttaaaaataccattatcattctaacttctaatatcgcctcaaacgctattatgaatttaagcggaaaagaacaagaagatgcggtaaaaaatgagttaaaaaatttctttaaacctgagtttttaaaccgtttagatgatattatcacctttaatccacttggaaaagatgaagcttatgaaatagtcaagcttttatttaaagatttacaaatgagcttagaaaacaagggaataaaagcaagtttaagcgaaaatgcagcccttttaatcgctaaagatggttttgaccctgattttggtgctagacctttaagaagagctatttatgatcttatagaagataaattaagcgatatgatacttgctgatgaacttcatgaaaatgatagcattatcattgatgcaaaagatgatgaaataatcatcaaaaaagcttaa

SEQ ID NO: 18166 - DNA, 693 bp, Campylobacter jejuni
atgatttacaaaaaaattaaagctctttatttttggattttttttgttttaagtgttgctttggtgattttttgtttttgctttacaaaatctcaaaacacactttggaaaattcgcaaaatttgggctaaatttcaaagatatactatctcttataaacaagaaatcattggtacttttaatccacaagctcagatgattttaatgaatcatcaaagtgctttagatatcatcgctttagaagaattatatcctaaaaatttatgctggattgccaaaaaagaattaggagaaattcctattttcaaagttgctatgaaaaaaccaaaacttctttgtatagatagaaaaaatccgcgtgatttggtgcgagttttaaaagaagcaaaagaaagaattagtgaagatagggttttggctatttttccagaaggaactagatctaaaaatgaaaaaatgcttaaatttcaaagtggagcaaaaattttaagtgaaaaattaaatcttaaagttcaacctattttaattgtggattctgcaaaaattttagacacaaaaagttttagtgcaagcagcggagtacttaaaatcatttgtatggatttagtcgatacaaatgatgaaaaatggcttgaaaacaccagaaaaaaaatgcaagaattactcgatcaagaaagagctaagctttgttaa

SEQ ID NO: 18167 - DNA, 1827 bp, Campylobacter jejuni
atgcaatttcaaaccgaagttaatcagcttttacagcttatgatacactctttatattctaataaagaaatttttttaagagaacttatttcaaacgcaagcgatgctttagataagcttaattttttaagcgtaagtgatgataaatataaaagcttaaaattcgaacctaaaattgaaatcaaaattgataaagataaaaaaactttaagtattagtgataatggcataggtatggataaagatgatcttatcaacaaccttggaaccatagcaaaaagcggtactaaaagctttttagaaaatttaagcggtgatgctaaaaaagattctcaactcataggacaatttggagtaggtttttattctgcttttatggtggctagtaaaatcgaagttttaagtaaaaaagctttagatgataaagcttatctttggagttctgatgcaaatggttatgagattgatgacgcaaacaaagaagaacaaggaacaagcattactttatatttaaaagatgatgagtttgctaatgcttataaaatcgaaagcattatagaaaaatactctaatcacattcaatttccaattttcatggaaaaagaagaatttactcctgctaaagaaggcgaagaagaagggaaaactgaacttaaaatttctcaaatcaataaagccaatgctttatggagaatgcaaaaatcaagccttaaagcagaagattatgaaagattttatgagcaaaattttcatgattcaaacaaacctttactttatcttcacactaaaagtgaaggaaaattagaatacaattctttatttttcataccacaaaatgcaccttttgatttattccgtgtggattatcaaagtggcttaaaactttatgtaaaacgcgtatttatcagcgatgacgataaagaacttttaccaacttatttgcgttttgtgcgggggattatcgatgtagaagatttaccacttaatgtaagtcgtgaaattttacaagaaaatcaaattttaaaaggtatcaaagaagctagcgttaaaaagattttaggtgaacttgaaaaactcaaaaacaatgataaagaaaaatacttatctttctttaaaacctttggtaaggtattaaaagaaggactttatggttttggcggagaaaaagatagtcttttaaaactcatgctttataaaagcactaaaggtgaaaatttacgctctttagaggagtataaaaatgaccttcaaggcgaacaaaaggaaattttttatatagcaggaaataatgaaagtttattaagaacctcccctttacttgaagagtataaacaaaaaaatatagaagttttactcatggacgatgagattgattctttagtaactcctatgctagaatttgaaggtttaaaatttgtatccattaatcaagtagaagataaaaatgaactaagcgacgaagaaaaaaatacttttgctccacttgtagctaaatttaaagaacttctaaaagatcaagttgaagatgtaagactaaccagtcgtttgaaagatagtccaagttgtatagtttatgataaaaataaacctgattttgctatgcaacaactcttaaaacaaatgggtcaagaacaaaatttcaaacctattttagaaatcaatccaaaacacgctatttttacaggtcttaaaaacaacgaaagctttagtgcagatatagcaaccttagttttaaatatggcaaaattaagcgaaggtatgggagtggataatcctgctgaatttaatgcaagccttacaaaaatcatcaacaaggctttttcatga

SEQ ID NO: 18168 - DNA, 504 bp, Campylobacter jejuni
gtggcaatacttcttattggaatgactaatttaggtataggttttaaagtttttagtggtgatttgcttgaaaaaattttagtaaagtcaactgatacaaagataaaaagtatactttttggtactttaagtactttaattatgcaattttcaattttagtttctattgttacgatttcttttttgagtgcagggcttatttctttgggtgcgggcatagggattatttttggagtaaatttaggaaatacggcaagttcttggctgattgttggtttaacaaatattaaaattttaatgttggctatcccgcttttgattattggagtattatttttctttcaaaaagatagtattttaaaaggtttgggtaatatttttattggtataggttttttctttttgggtgtggattatattaaaagtggttttgaaaattttaaacatataattgatctttctcgttttgattttgctggttttaaaggagtttttgttttttag

SEQ ID NO: 18169 - DNA, 1809 bp, Campylobacter jejuni
atgcaagaatataaaaaaaatagggtttcaaaagttgcctttgcctactgcatggcacttttgtttatgattatttttatcagctctactttttttcttacatcaaaacgtcatatacctaacactgaaaaagatcaatacgctcttgctctaagaggatcgattataaccaaagataattttactatcacaagttctaaacaaatttatcgtgctgaaattgatcttagaagcattaacaaagataaatttgatctatttttaaagctttttcaaatttatagtgggataagtaacgatcaagtagcagatattaaaaaaagaatgcaaaatcaaaaaaaacgctcttataattttgttcttttacaaaacttagactccaagcaagcaagctaccttaaagatcttgctaaaaaactttatatacaaggttttttcaaagcttttacaaataactcaggaagagttgaaacaagaggattaaatatcatcgaacatgaagaagatagaatttacatgtcaaaagattcttttactcctattatcggttatactaaaatgatattagatccagaaagtggaattttaaaaaatataggagttaaaggtttagaaaaatactacgatgcatgtctaagccctgttcaaaatgaaaaaattcaaggacttaaagatataggtggaaatattattttaaatctaaattcactacaacaaaaaaagatcaatggttgtgatttatatttaaatctttctttaaaactgcaaaaaagtatagagaaagctatagatcaaagaaatgaggatttaaaagccaatgaaatcatcgttggggtaatggaaagtaaaacaggaagaattttagctctagcaagctcaaggcgttatgacccacaaaatcgcggaaaggatctatcagttcttaatgcaagcgctatagaatacggctatgaagcaggttctgttatcaaaccttttatctttacaacagccttaagacttggtaaaataaaaatggatgaagtgattaatacttatggcggttcttacaagctaggacgtttcaccatcaaagacgatcacaaaatggacaaaatgactatggaggaagttataagatattcttcaaatataggcatgatacaaattgctaaaaggcttaacaatatagaaatcgtatcaggacttaaaatatttaaatttggcgaaaaaagtggtattgatctaccctatgaacaaaaaggagaaattccaaatcctaagcgcttaagagatatagaaaaatctgttttaagttatggttatggacttaaaacaacctttatacaactccttgcagcttataatgttttcaacaatgatgggttttatatcacaccacgtttagctgaaaaattctatcaaaatggacgctttacaaatcttgatgatgatgtaaaaaaagaaaaaattctttctagcgaagccgctaaaacgatgcaaaatgttcttataaatgttatagaaaaaggaacaggaaaaaaggcaattacacaaggtattattgcaggaggtaaaacaggaacggcaagaatagccgaaagacaaggttacacctcaaatcgctacaatgcatccttttttggttttgcaaatgatttaaatcacgcctataccataggagttctcgtaagacatcctactaaaccttatagttattatgctgcacaaagtgctttgcctatgtttaaagatgttgttgatattttaatcaatgaagaatttctaacgcctatacaagacaataaccaaactagcacaaacaactag

SEQ ID NO: 18170 - DNA, 870 bp, Campylobacter jejuni
atgagtatattggttaataaaaatacaaaagtaatagttcaaggttttacaggtaaagaagcaacttttcatgccgagcaatgcatggcttatggtacaaatatagtcggaggcatcactcctcataaaggtggacaaactcatttaggtaaaccagtttttgataccgttgcagatgcggttaaagcaacaaaggctgacgtgagcttgatctttgtacctgcttttgctgtaggtgatagcgtgattgaagcagctgatgcgggtattaagcttgcagttgtaatcaccgagcatacgcctgtaaaggatatgatgtttgctaagcaatatgctaataaaaagggtatgaaaatcattggaccaaattgtccaggtattatcacttctgaagaatgtaagttaggtattatgccaggttttatttttaaaaaaggttgcgtggggcttatttcaaaaagtggaactttaacttatgaagctgctaatcaggtagttcaaggtggttatggaatttctactgcagtaggaattggtggtgatcctatcataggtcttgcttataaagaacttttaagtgaattccaaaaagatgatgaaactaaagctattgtaatgataggtgaaattggtggtagtttggaagtggaagcggctaaatttattaaagaaaatattagcaaacctgtggtagcattcattgcaggtgcaactgctcctaaaggcaaaagaatggggcatgcaggtgccatagtaggaagtgctgatgaaagtgctgcagctaaaaaagaagctttaaaaagctatggaattcatgtggtggattctccggctttaattggtgaagaaattcaaaaaatattaggttaa

SEQ ID NO: 18171 - DNA, 894 bp, Campylobacter jejuni
gtgcaaaaaatagatgaattaataaaacagtttttacaagagcttggctatgaacctattttaaatatgctttcaaatgtaaaatcaggaaagaaattacgctctaaattattattagctatcgcagatgagagtgagattgcttttaaaatttgtgcggctatagaattgatacatcttgctagtttattacatgatgatattatcgatgagagtgaattaaggcgtggagcaagatctgttaatgctgaatttggtacaaaaaatgctcttatgttgggcgatattttgtattcaaaagccttttatgaattaagcaaaatggatgctagatttgcaagtattatttcagatgctgttgtaaagcttgctataggcgaacttatggatgttgatttgggagagaaatttaatatcaataaagaagcttatttgaaaatgatctataataaaacagctgttttgattgaagcaagtgctagatgcggagctattttggctggattatatgaaaaagattttgcagaatatggtaaaaatttaggacttgcttttcagatgattgatgatattttagatattaagagtgatgaaaaaattcttggaaaacctgctatgaatgattttaaagagggtaaaactaccttgccttatatttatctttatgaaaatttacaagaacaagataggatatatttgcagactttatttaaaaaagatttaaatgaaaatgaaaaagaatggctaaaaactaaatttgaagaacaaaaagctttagaaaaagctattttagaagctaaaacttatgcaaaaaaggctagaaaagcaattgaaaaatatgataataacaagcttaatgatattattaaagctatgatagatagggaattttaa

SEQ ID NO: 18172 - DNA, 1299 bp, Campylobacter jejuni
atgtattattgtatatcttttactcataaaaatacagatattgccttaagggaaaagttaagcttttccaatgaagctaaaaaaggtgagtttttaaaaatcattagcactcatgaaaatattgaagaatgtttggttataagcacttgcaatcgtgttgaaattgttgcttttgtaaaaatggcctgtgcggagtttattgttaaatctttggctttactttgtgatgttgataaagatattttacttgaaaaagctgatatttttgaagatagtggagcaatccaccatcttttttctgtagcaagttctttggatagtttggtggttggagaaactcagatagcaggacaattaaaagatgcctttgcttttgctgtaaaaaataatttttgtggagtacacctttcaagagcagtacatagtgcttttaaatgtgctgctaaggtacgcaatgaaactcaaatttctaaaaattctatttctgtagctagcgttgccgtggcaaaagcaaaagaacttgcagatttaacgcaaaaaaaagctgttgttattggagctggagagatgggagaacttgcggcaaaacatttaattgctgcgggtgctaaggtgattattttaaatcgtgatttacaaaaagctaaagatttgtgtgagagacttggtgttttaagcgaatatgatagtttagaaaatttaaaaaaatatttaaatcaatacgagttttttttctcagctaccaatgcaccaaatgctattattacaaattctttaatagaagaactttcttataaaaggtatttttttgatattgcagttccaagggatattgatatcaatgaaaatgaaaatatatctgtttttgctgtagatgatcttgaaattgtggttcaaaaaaatttagcactaagagaacaagaagctcgtatggcttatgggataataggtcgtgaaacaagtgaattttttaggtatttaaacgatttggctttgatgcctattatcaaagctatacgcttgcaagctaaagaatatgcagataaacaacttgaaattgcgttaaaaaaaggatatttgaaaaaatctgataaagaagaggctagaaagttgattcatcaagtttttaaggcttttttacacacgcctactgtaaatttgaaacatttacaaggtaaaatgcaaagcgatacagtgattaatgctatgcgttatgtttttgatttgcaaaataatcttgaaggtttaaatcaatataaatgtgaatttgatatggagaataatgatgagatttactaa

SEQ ID NO: 18173 - DNA, 1710 bp, Campylobacter jejuni
atgatgagatttactaaattttatgcaccaagtttaaaagaagcgccaaaagatgcgagtttacctagtcatatttttttaacgcgtgcgggttttgtagaacaaattggtagcggactttataatttcttgcctttgggaaaaagagttttagacaagattaaaaatatagttaaagaagaaatggataaggctggagcacaagaagtaaatcttagttttatcactcctgcaagtttgtggcaagaaagtgggcgttacaatgtttttggaaaagaacttttgcgttttaaagacagaaaagaaaatgaatttgttttaggtccaacacatgaagaagctatgctttctttggtaaaaaacaaaatcacaagctataaacaacttcctttgcatttatatcaaattggacttaaatttcgtgatgaagcaaggcctagatttgggcttttaagatgtcgtgaatttctaatgaaagatggatatagttttcatgctaatgaagaagatttagggcgtgagtttgagcttatgtataaaacttattctcaaattttacaaagaatggggcttgattttagagcagttgaagctgatagtggggctattggtggaagtggctctaaggaatttatggttttagcaaaaaatggggaagatgatattttaatttgtgaaaattgtgattatgcggctaatgttgaagctgcaaaaagagctaaaaaaacttgtcaagatgagcgtcctgaagcaaattatgcaagtaaatttcacactccaaatattaaaactatagattctttagcacaattttttaaaatcaatgctttttatacgattaaagcagtggtaaaaaaagctatttatgaaaatgaaagcaaattagttgtgttttttataagaggaagtgatgatttgcaagaggttaaggctcaaaatacttgcagtgcccttgaactagtcgatgcgagcgaagaagaattgaaaaaagctggcttagtagctggttttataggttttgtgggattaaaagatatagatttttatatagattttgagcttgaaaacgaaaagcaaatgattatgggtgcgaatgaaaaagattatcatttaatcggtattgatgttgtaaatttaaataaagatcgttttaaagatttgattgaagttaaagaaggggattgctgtgttaaatgtggagcaaaattaaaacaaagtaaaggtatagaagtagggcatatttttaagctaggacaaaaatattccaaagcgatgaatgcaaatttcttagatgaaaatggcaaaagccagcctttttatatgggatgttacggcataggtgtttcacgcttgttggctgtagctattgaagcaaatcatgatgaaaaaggatgtatttggaataaaactttagctccttttgtgcttgaaattattgtttcaaatctcaaagatgaaaaggctttagaatttgctaataagctttatagggatttaactaatcttggattagaagtattgcttgatgatagaaatgagcgttttggggttaaaatgaatgattttgaacttatgggctttccttatgcgttagttattggtaaaggattagaaaataatgaaatagagcttatccaaagagaaggtttggtaaaagaacttataaaaactgatgaacttatggaaattcttaaaaagaaagtgttatga

SEQ ID NO: 18174 - DNA, 924 bp, Campylobacter jejuni
atgaagcttattattgcaacaagaaaaagtcaattagctctttggcaaagtgaacatgtagcccaaattttaaaaaatacacatcaaattgaagtgcttttagaaggttttaaaacaaaaggcgatgttttgcttgattctcctttggcaaaaattggtggtaaaggactttttacaaaagaacttgaagaaagtatgttaagaaaagaagcacatttagcagtgcatagtttaaaagatgtgcctagtttttttcctcaaggtttagttttggcagcggtaagcaaaagagagcaaagcaatgatgctatgctaagtcaaaattataaagattttctttctttaccaaaaggtgcaaaaataggcactactagtcttagacgcaagatgcagcttttattattaagacctgatttagagattatttctttgcgtggtaatgtcaattctcgtatagagaaattaaaaaataatgattttgatgcgattattttggcaatggcgggaattaaacgcttaaacttagataagcaagtgaattttgtttatgaatttagcaaagatgagcttattcctgcggcttctcaaggagctttaggtatagaaagcataaatgatgaaaaaattttagaacttttaaaatgtttaaatgatgaaaatgctttgattgaaacaagcattgaaagagaatttattgctactttagaaggaggttgtcaagttcctataggtattaacgcagaactcttaggagatgaaatttgtgtgcgtgcggtacttggactacccgatggaagtgaaattttaaaagataagagaatgattaaaaagaatgattttaaaggttttggagagagtttggctaaggagtttattgctaaaggtgctaaagaacttttaaaaaaagctgagagtatgatatga

SEQ ID NO: 18175 - DNA, 1086 bp, Campylobacter jejuni
gtgaataaaatagaaatactaaagcaacactttaaagaaattgctaaattaaattcaagcgaacaagtttggcaaatgcctttttttgcggctttaggcgtaggtatagttttagggcttagtgtattttttggaaaattaaactatggactcattgccatgataggagctttgtcttttttatatgttccaagcactcctttatatcatagaatggctgttgtgatgtgctgttcttttggcatagtttctagttttttcttaggaattttaactcattttttgcctgcaatttttgccttcatccctataggaattatggccatgggaagttctattttaattagatactataacattggtgcacctggatattttttctttgtattttcttgtgttttaggagcctattctccttttgaagctaaggattttatctttttagtaggtcttgtttttcttggagcaatggtagctaatttaatggctttgttatattctatcgttgtgatttatggatttaaaaatgctttacctagcgaaattccacctagagaatacataggttttgatgcagtttttgtggattctttgatcatgggttcttttgtggctttttctatatttataggaacttttttagaacttgaaagaagttattggatagccatttcttgcacagctattatgcaaggtgtaactttaaattctatatggattaaacaaattcaacgcatcataggaacggccttaggagtatgttttgcatggtggcttttatctaaacaatttcacgatatagagcttattttacttatgatgtctttgttttttataggacaatttttagtcaatcgaaactatgctttagctatgattttctttactccttatgctacttatctttcggaagcagctaattttatgagtgaaaatgcagataaattaatactcgctcgtttaattgatgttgtaataggaagcattttagggcttttaggtggttttgtgatttacaaaccttatctaagagtgcattttgaacgcattgcaaaatacatctttaggataaaacaaaaagcttaa

SEQ ID NO: 18176 - DNA, 1233 bp, Campylobacter jejuni
atgcgaaatttgcttgaaaatattaagaaaaattctcaaaaactacttaacttaacacccaaagataaagaaaaaattattctaaaattagctcaaattttaagagaaaatttcaaaattatcctagaagcaaataaaaaagatatggcaaatttcacaaaaagcggagcaatgaaagataggcttttgttagatgaaaaacgtattttagctctttgcgaaggcctagaaaaaatcgcttacatcgaagatcctataggcaaaatttctaaaggctggaaaaattatgcgggtttgagcatacaaaagatgagtattcctttaggactcatttgtgttatttacgaagcaaggcctagtcttagcgctgaaatcgcagctttaatgataaaaagttccaatgcttgtgtatttaaaggcggaagtgaagcaaaatttacaaatgaggctatatttactcttgttaataaagtacttaaggaatttgatttgcaagattgttttgctatgtttacccaaagagatgaaatcttgcaaattctagcctttgatgatttaatcgatgtgatcatacctcgcggaagttcaaatatgatacaagaaattgcaaacaataccaaaattcctctcattaagcaaaataaaggcttgtgtcatgcttttgtagatcaaagtgctaacttagatatggctttaaaaataatccttaatgcaaagtgtcaaagagtaagtgtttgtaacgctttagaaacgcttttaatccatgaaaaaattgctaaaaattttataagtcttttaatacctgaatttgaaaaatttaaggtaaaaattcacgcccatgaaaatgctttggcttattttaacaactcaaatttaaaaatttttaaagcaaatgaaaatacctttgatacagaatggcttgattttgctttaagtgtaaaattagtaaaagattgcgatgaagctatagagcatatcaataaacacagctccttgcattctgaaaccattatctcaaatgatgcttcaaatatcgctaaatttcaacgccttataaactcatcttgtatttatgctaatgcttcaacgcgttttagcgatggaggagaatttggctttggtggagaagttggaatttcaaccagcaaattgcatgcaagaggtcctatggggattgaagatatttgcacttataaatatataatcaatggggaaggacaaattcgagagtga

SEQ ID NO: 18177 - DNA, 1377 bp, Campylobacter jejuni
gtgcagcaagagtattatgacttggatttagaacgagctattttaagcagttgtatcatgagtgaagaagcttatgctagtatagcaggtgatattagcccaaaagattttagtcttaaagctcaccaagatatttttaaagcggttatagcttgtagtaataacaaagagcccatttctgtaagttttttaagaaaacataaaaaaatagatgagcaaattttagcagaaattcttgccactccttctatgatagatttgcctgcttatgtaaatgaacttcacgaaaagtccgtaaaaagacaactcttgagttttgcacatcttttgccaactcgtatcaatgaagatcgtgctgtaagtgaaatcgcagatgaaattggtaaagaaatttttagcattacaaatcgtgtgaattctagagatattaaagatgttgatatggtaatatcagaactttttgaagaatttaaaaagcaaaaaactttagaaaataaaggtattatagggcttgatacaggttttgaaggtctaaataaaatgacaaaaggctttaaagggggtgaacttataataatcgccgcgcgtccaggtatgggaaagacaactctttgtttaaatttcattgataaggttttaagacaaaaaaaaggcgtggctttattttctcttgaaatgcctgcaactcaaatcatgcaaagaatgctatcttctaaaacttctattcctttgcaaaaaattttaactgcagatttaaacgatgatgaatgggagcgtttaggagatgcttgcaatgattatagtcaaaagaaattatatatttacgatagtggttatgcaactattgctgatgtaagggctattttaaggcgtttaaaatctcaagatgaaagtataggactttgtgtgattgactatatagggcttatgatgagtaattcaaattttaatgatagacatttgcaagttagtgaaatttcaagaggacttaagcttttggctagggagcttgatatgcctattatcgcactttcacaacttaatcgtggcttagagcaaagggcaaataagcgtcctttgatgagtgatttgcgagaaagtggagctatagagcaagatgcggatgctattttgtttgtatatcgcgatgaggtttatagagaacaagaagaaaaagaaagagagaataaagctaaagctgaaggcaaagcttatcaaaggctttttataccaaatcctatgcaagaaaatgctgaaattattgttggaaaaaatagaaatggacctgttggaactatagaagttgtatttttaaaagaaaaatcttgttttgtagataaacctataggctatgaaactactgaatttacaggctag

SEQ ID NO: 18178 - DNA, 1020 bp, Campylobacter jejuni
atgaaatttgttagcgtagaacaagcgattaaggatttacaagcaggaaaaatgcttgttatggtagatgcagaagatagagaaaatgaaggcgatttaatctttcctgcgcaatttagcactcaagaaaaagtaaatttcatgataaaagaagctcgtggtgtggtttgtgtagccttagatgaaactttggcaaaaaaatttgaacttcctttaatggtgcctaaaaatacttcaaaccacgaaactgcttttactataaccgtagatgcaaaagatgctacaacgggagttagcgcctatgaaagaaatatgactatacaaatttttgccgatgataatgctaaagcgagtgattttgtaagaccaggacatatcaatcctttaatcgcaaaaaaaggtggggttttagaacgcacaggtcatacagaaggcacggttgatctttgtaaattagcaggattaaaaggtgcttgtgtgatttgtgaaattgtaaaagataatggagatatggcaagaagagaagatctagaaattttttgccaaaaacatgatttaaatatgatagccgtaagcgatcttatagaatatcgcctaaaacatgaaagccttattaagcttgaagaaaaaagtcaaagtgttttagcaggctttaaagcagaaaaatttatctttagtgatcataatcaaacccaacacatagctttttgctttaaagatatcaaaaaatgtgaaaatgttaaatttcatatcagtggtagtgattttgagcttttaacttcagataaattttcaaaacttttagagcaaatcaaatttcttagtgaaaatggtggcgttatagttttcatgcaaggagaaaaatccagtactactcaatacaaaaactatggtataggagcacagattttaagatattttggtatagaagaaattaaacttttatctcaaagttgtgataaagactatataggtttagaaggttttggtttaaatcttaaagcttgtaattttaactaa

SEQ ID NO: 18179 - DNA, 444 bp, Campylobacter jejuni
atgactttaaaagaacaaattttaaacgatatcaaagaggcaatgaaacaaaaagatgattttaaaagagatagtttaagaactctaaatgcagcttttaagcaaatagaagtggatgaaagaatagagttggataatgaaagaatttataaaatcattgcaagtgaaatcaaaaaacgcaaagacgtaatcgaactttatcttaaggcaaatcgtgaagatttagcacaaaaagaacaaaatgaaataagtctttttgaaatttatctgcctaaacaactaagtgatgaggagttaactttagccttaaaacaacttatagaagaattgggcgtaagttcactaaaagaacaaggtttggtaatgaaagaagctaaaataaaattaggtgcgagtgttgatggcaaaagacttaatttagcacttaaagagcttttacaataa

SEQ ID NO: 18180 - DNA, 1701 bp, Campylobacter jejuni
atgaaagagttaagcggttcggcaatgatttgcgaggctttaaaagaagaaaatgttaaaattgtttttggttatcctggaggcgctgcgcttaatatttatgatgaaatttacaatcaaaagtattttaaacatattttagtgcgtcatgaacaagcggctttgcatgctgctgatgcttacgcaagaatgagcggagaagtgggcgtagctatagttacaagcggaccaggttttacaaatactattacaggtctagctacggcttatagcgattctatccctttggtgttgatttcagggcaggtggcaaattctcttattggtacagatgcttttcaagaaattgatgcagtaggcatttcaagaccttgtgtaaagcataattatttagttacttgtatagaagagtttccacgcattttaaaagaggctttttatatagcaagaagtggtagacctgggcctgtgcatatagatgtgccaaaagacgtaagtgcaactttgggactttgggaatactctaaagaaatttccatgaagacttataagcccgtttataagggtaactcaaagcaaattaaaaaatttgcagagcttttaaaagaagcaaaaagacctttgttttacttaggtggaggttgcatcagttctaatgcaagcgagcaaatcagagagcttataaaatttacaaaaattccagcagttgaaactttgatggcgcttggaactttaagaagtgatgatgtttttaatcttaaaatggcaggcatgcatggaagctatgctgctaatatggctttaagtgagtgtgatttgcttgtgagtgtaggagcgagatttgatgataggattacaggaaaaacaagtgaatttgctaaacatgcgactatagttcatgttgatattgatcctagttctatttcaaagattatcaatgcgcattatcctatagtaggagatattaaagaagttcttaaagagcttttagaagagcttaaaaaggaaaatttcaacacaacttttaaagaatggcatgaaactttaaagcgttataatgaactttatccgctttcttatgaagatagcaatgagattttaaaaccgcaatgggtgattgaagaatgtgcgaaaatggctccagatgcaaggattattaccgatgtgggtcagcatcaaatgtgggtagcgcagttttatccttttaattatccaagacaacttgcaacaagtggagggcaaggaactatgggatattctttacctgctgctttgggtgcaaagcttgctgtgggtgaagaagtggtgattaatttcgtaggtgatggatcggttttaatgaatatccaagagcttatgactgcttatgagtatggtataaaagctataaatattattttaaataatgcctttttaggtatggtaagacaatggcaaagtatgttttataaagagcatttttcacaaactgatttaagcactcagcctgattttatcaaaatagctcaaggttttggttgtgaaggttatgaaatttcaaacaaagaagaattcattcaagcttttagccaagctttaaaaagtgataaaacctctcttttaaatgtaaaaattgatcgctttgaagatgttttacctatggtgcctgcaggaggtgcgatttataatatgattttaccaaaggcaaaggatagacaatga

SEQ ID NO: 18181 - DNA, 465 bp, Campylobacter jejuni
atgagaagggttttatcggtaattgttttaaatgagcatggggttttatctcgtatagtaggacttttttcaggaagaggttataatattgactcgcttacagtagcacctttggaaaataaagaattttctcgtattaatatagtcacttcaggaaatgaaagaacttttgagcagatagtcaaacaacttcataagctcattcctacttataaagtgatagaaagtgaagaatttattgacaaagaaatggctttagtgaaaattcctttaaatgaaaatttaggtggacttgatgccgttttgaaagcttataatggtactattgcaaatagcaatgagaattttttgtttttaatggttgctgatgatgcaaatcgcattgataattttttaaaaacaattaaaaaatacaatcctagtgatatagttcgcagtggatctgttttgatggagattaaatga

SEQ ID NO: 18182 - DNA, 966 bp, Campylobacter jejuni
atgaaattaagtgaaatagcagaatttttaagcttggaatataaaggcgaggatatagaaatcagtgctttaaattctttattgaaagcaaattttacagagcttacttattgtgatggtgagaaaaataccaaagatatacctcacacaggagctgctgctattttagtatctaaagaatatgaaaatttagtacctaaagatactaaagctttgattactcaaagtccacatttgagttttgcttttttaagcaagctttttgctaaacctttgataagcacagctaaagaaaaagtacaaaatatcgcaaaaagcgcaagaatcatgcctaatgtttatataggtgataatgtaaatatcggtgaaaatgtaatcattatggcaggagcttatataggcgataatgtcagcattggtgatgagagtattattcatcctaatgtagtgatttataatgatactaaaatcggtaaaaaatgtcatctgcttgctaattgtgtaataggaagtgacggttttggttatgcgcacaataaaaacggcgaacattataaaatttatcataatggcaacgtggttttagaagattttgtagaagtgggggcttgtacaactatagatagagcagtttttgatagtactattatcaaagcaggtactaaggtagataatctagttcaaatcggacataattgcaatataggtcaaaattgtatcattgtggcacaaactggaatttcaggttcaagtgagttaggacgcaatgttattatgggtggtcaaagtgcaacgagtggacatttaaaaataggcgattttagcactatagctgcaagaggcggtgtgagtaaaaatttagaaggcgggcgtgtttatggaggttttcctatcatgcttcaaaaagattggctaaaacttcaagctaaaatagcaataaattttaaagaaaaatcacaagattag

SEQ ID NO: 18183 - DNA, 1029 bp, Campylobacter jejuni
atgaataaagacttacttctttcaagctatgattacactctagctaatgaactcatagccaactatcctacaaatccaaaagaagatgctaggcttttggtttttgatcgcaaaaacaaagaaatttttcatactacttttaaaaatttacaagactttttacccaactgcgcgatttttttcaatgataccaaagttattaaagcaagaatttatggcaataaagcaagcggaggaaaaatagagcttttcttgcatcaaccttttttaaattctcacaatccgctttttctagctcaaattaaagggcgcattaaaaaagatgaaatcttatattttaaagaggatttaaaagtacgcgttgtagaacttttaaatgatggtcttcgaaaagttcaattttttcaaaatgataaaaccttagacacctcaaatctttacaacctgcttgacaagataggacatatacccttgcctccttatattaaaagagaggatgaaaaaagtgatttgaaagattatcaaagtatctttgcaaaaaatttaggcgcagtggctgctccgactgcaagtttacattttagtgagactatgcttgaaaatttaagaaaaaaacacgaaatttatcatttaaccttgcatgtaggagctggaacctttaaaagcgtggaatgtgaaaatatacaagagcataaaatgcatagcgaattttttaatattccgcagcaagcatgtgaaattatagattctaaacaagctattttaggcgtaggaacaacggtaacaagaaccatagaatattatacaagaactaaaacaaaaaatggtttttgtgatctttttttacacccgcaaaatccacctataagacaaaatcatcttttaaccaattttcatttaccaaaatctactcttatcatgctagtttcagcttttatcggtagagaacagtgtttaaaactttatgaactcgccataaaagaaaaatatcgcttttactcttatggcgatgcgatgctaatcttgtga

SEQ ID NO: 18184 - DNA, 1203 bp, Campylobacter jejuni
atgcttatagttcaaaaatatggtggaacaagcgttggaacacttgagcgtatcgaagcagtagccaatagggttatccaaagtgcgcaacagggtaatcaacttgttgttgtagtatctgcaatgagtggggtgacaaatactcttatcgagcaagctgaatattttagtaaaactcctaatggtaaagatatggatatgcttttaagcagcggagagcgtgtaacaagcgctttactttctattgctttaaatgaaaagggttgtcccgctatatcgttttctgggagaaaagcaggaattattacagatagtgtttttacaaaggcaagaattcatcatattgatacaaaagcgataaaatcagaacttcaaaatggtaaaatagttgttatagcaggttttcaaggtgtagatgaggaaggtaatgtaactaccttagggcgtggtggaagcgacttaagtgctgtggcggtggcaggtgccttaaatgcggatttgtgtgaaatttataccgatgttgatggggtttatacaacagatccaagaattgaaccaaaggcaaagaaattggataaaatttcttatgaagaaatgcttgaacttgcaagtttaggtgcaaaagttttgcaaaatcgctctgtagaacttgcaaaaaaattaaatgttaatttagtaactagaagtagttttaacaataacgaaggaacaatgataacaaaggaagatggaatggaacaagctttagtaagtggtattgctttggataaaaatcaagcaagagtgactttaagaaatatagaagataagcctggaatcgcagctgaaattttttctgttttagcaaatgaaaatattaatgtagatatgattatacaaaatgttggagttgatggtgctacaaatttgggttttacggttcctcaaaatgaacttgaattagccaaaaatgctatgcaaaaaattttaagctcaaaaacaactatagaaagtgatagtgctgtactaaaagtttctatagtcggcgtaggtatgaaatcacattcaggagtggcaagtaaagcttttaaagctttagctgatgaggggattaatatcggtatgatttctactagtgaaataaaaatttcaatgatagttcatgaaaaatacggagaacttgcagttagagcactacatgagtgctacggacttgataaataa

SEQ ID NO: 18185 - DNA, 1143 bp, Campylobacter jejuni
atgaaattttttaaaatcaatccaaacaccgattttaatttgctttgttctttcataaaccctcataaaatgggacaaaagatcatgagtgaaaaaacaaaaattcattttatttttatcaaagatatttctactcctgcggcaaatattttaaaacaagatgctttaagagtaggagctgaacttattactcataaagaagtaattactgcaaaaatcactcattcaaatgcgcttttaatggcaagtaaagagcaaattcaaaagcttgttgtcaaagaaaaacttcaagattttggacttaaaaatttggctctttttttgcaaaaagattttttaaaaccgaaaaaagccgagcttatggcagtgattaatgtcaatgaagacagttttaatgcaaaaagtcgtgtgagtgaagaagactttgaaaaaaggcttaatgactttcttgctttaaagcctgaatatatcgatataggtgcggtaagctcaagacctgggagtgagtattgtggcaaggaagaggaatttaaaagactgaaaaaagtacttgacttaatttatgagaaaaattattacgaacaagcaatttttagtttagatagttttgatgaatattgtctagaatatgctttaaataagggttttaaactcattaatgatattacaagtttaagaaatcttaatctagccaaacttgcaagtaaatatggggcaaaatattgcttaatgcacatgcaaaacaatccaaataacatgcaagataatcctttttatgaagatttgcttgatgagatgactttgttttttaaagaaaaacttgagcttttagaaagttttggagtaaaagaaagtattttagatgtaggtattggttttggaaagagtgcggggcataatatgattttaatcaaacacttagaacattttttgcaatttaataaacctttacttataggtgcgagtcgtaaaagtgtgattaatgcgtattttcaaagcgagattaaagatcgtttagcgggaactttatatttgcatttaaaggcttttgaaaatggtgctagtattataagagtgcatgatttatatgagcataaacaactttttgctttagcgcaggcaatggataatataggagtttag

SEQ ID NO: 18186 - DNA, 1944 bp, Campylobacter jejuni
atgaaaaaagaagagtatttagaaaaagttgctttagctaatttgtggatgagggcatattatgaaaaagatgaacccttggctagcgatgaagaatacgatgctttaatcagagaattaagagtttttgaagaacaaaataaagatgaaatttcaaaagactctccaacgcaaaaaatagctcctactatacaaagtgagtttaaaaaaatagctcatttaaagcgtatgtggtcgatggaagatgtgtttgatgagagtgagcttagagcttgggcaaaacgcgcaaaatgtgaaaaaaacttttttatagagcctaaatttgatggagcgagtttaaatttgctttatgaaaatggtaaattagtaagcggcgccactaggggcgatggcgaagtgggtgaggatataacgcttaatgtttttgagatagaaaatatacctaaaaatatagcctataaagaaaggatagaaattcgtggagaagtggtgattttaaaagatgattttgagaaaatcaacgaaaaaagagcccttttaaatcaaagtttatttgccaatccacgcaatgctgcaagtgggagtttaaggcagcttgatacaagcatcactaaagaaagaaatttgaaattttatccttggggagtaggggaaaataccttaaatttcaccaaacacagcgaggtgatgcaatttatcagagagcttggttttttaaaggatgattttgtaagactttgcgctaatttagacgaagttttgaaagcttatgatgagcttttagctctaagagaaaaaaaacctatgatgatggatggaatggtggtaagagttgatgatcttgcactttgtgaagaattaggctatacggtaaaatttccaaaatttatggcagcttttaaatttcctgcgcttgaaaaaaccacgcgtttaataggggtaaatttacaagtaggaagaagtggagtgatcactcctgtggcagttttagaacctgtaaatttagatggggttgtagtaaaatcagccacccttcataattttgatgaaattgcaagacttgatgttaaaatcaatgattttgtaagcgtgataagaagtggcgatgttatccctaaaatcactaaggtttttaaagagcgtagagaaggtttagagatggaaatttcacgccctaagctttgtcctacttgccaaagtgagcttttggatgaaggaactttaataaaatgtcaaaatatagattgtgaagatagacttgtaaattctatcattcattttgtttctaaaaaatgtcttaatatcgacggactgggagaaaatatagtagaacttttatacaagcacaaaaaaatcactacgcttgagagtatttttcatttaaaatttaatgattttgaaggtttggaaggctttaaagaaaagaaaattaacaatcttttaaatgccatagaacaagcaagagaatgtgagctttttcgttttatcacagctttaggaatagagcatattggcgaggttgcggctaaaaaattaagtttaagttttggtaaagagtggtacaagcaaagctttgaagcttatgccaatttagaaggttttggagagcaaatggctttaagtctttgcgaatttacgcgtgttaatcgcacaagaattgatgagttttacaagcttttaaatttgaaaatagaaaaacttgaaatcaaaagcgatggtgtgatttttggtaaaacttttgtgattacaggcactctttcacgcccaagagatgagtttaaggctttgatagaaaagcttgggggtaaggtaagcggctcggtttctaaaaagactgactatgtgctttttggagaagaggcaggttctaagcttagtaaggctaaagagcttgaagtaaaatgtatagatgaaagtgcttttaatgagcttgttaaagaatag

SEQ ID NO: 18187 - DNA, 855 bp, Campylobacter jejuni
atgttgaatatttttactactatatcaaaaattaatattacctctttagccataggttgttttgatggtatgcatttaggacatctaaaacttgtaaaatgtttagatgagaatggggctttattagttattaataaatttaagggtcaatttctttgttcaaatcgtcaaaaagaagaaatttcaggaaaaaaagttatagaagtggattttgaaagtataaaatctttagatggtagagattttttaagctttttgaaaaaagaatttgtcaatttaaaatttatagtggtgggatatgatttttcttttgggaaaaatagagcttataatgctaaagatattgagtctttaagtgggataaaaactataatagttgatgaatttagcatagacggaataggtgttcatgcaagtttaattaaggattttttatcaaaagcaaatttgcaaaaagcaaaagaatttttaggaagagattatagtatcaaagggaagatgattaaaggacaaggtttgggctctaaagaactttttgcgactataaatttagattgtgaaggttattttttacctcaaaatggtgtttatgttactttgttaaaaagtcaaagaaaaacttataaaagtgtgagttttttaggtgtaagatcaagcgatgaaaattttgctatagaaagtcatattttagaagaattgggtgaaaatttcacgcaaggagagttttttgaactcgagtttatatcttttctaagagagaatcaaaaatttcaagatctaaaaaaacttaaaaatcaaattgctaaagacatagagcaagctagagaattattaaggaaaaatgatgaaagatga

SEQ ID NO: 18188 - DNA, 1065 bp, Campylobacter jejuni
atgggtgttttagacattgtaaaagcaggggtgattagcggagatgagcttaataaaatttatgactatgctaaagcagagggttttgctatccctgctgttaatgttgtaggaactgattctattaatgcagttttagaagctgcaaaaaaagttaactctccagttattatccagttttcaaatggtggggcaaaattttatgcagggaaaaattgtcctaatggagaagttttgggtgcaattagtggggctaaacatgtacatttacttgctaaagcttatggtgtacctgtgattttacacactgatcatgctgcaagaaaacttttgccttggattgatgggcttattgaggcaaatgcacaatataaaaaaacccatggacaagctttatttagttctcatatgcttgatcttagcgaagaaagtttagaagaaaatcttagcacttgtgaagtttatcttcaaaaacttgatgctttaggtgtcgcgcttgaaatagaattaggttgtacaggtggcgaagaagatggagtggataatacaggtattgataattccaagctttatacccaaccagaagatgtagctcttgcatatgaaagacttggaaaaattagtgataaattttcaatcgcagcaagctttggaaatgtacatggagtttacaagccaggaaatgttagcttgcaacctgaaattttaaaaaattcgcaaaaatttgtaaaagataaatttgctttaaatagcgataagcctataaattttgtatttcatggcggtagcggtagtgagctaaaagatattaaaaatgcagtaagctatggcgtaattaagatgaatattgacacagatactcaatgggctttttgggatggggtgcgtgaatatgaacttaaaaatagggcttatttgcaaggacaaattggaaatccagaaggtgatgacaagccaaataaaaaatactatgatccgcgtgtttggttaagaagcggtgaagaaagcatgataaaacgtcttgaaatcgcttttgaagatttaaactgtataaacaaaaactaa

SEQ ID NO: 18189 - DNA, 1344 bp, Campylobacter jejuni
atgcaaagacaaacatggagtagcacactaacttatattctaacagttgctggagcaaccataggatttggagcaacttggcgttttccctatcttgtaggagaaaatggtggcggtgcttatgtattagttttttgtatagccatgattatcataggcattcctgttattttagttgaaaatgtcataggcagaaaagcgatgacaaatagcgtagatgctttcaaacaaaaatggcaaagtattggatatatgggacttttaggaagctttggcataatggcttactacatggtacttggaggatgggttttagtttatatttgggaattaaccctagggaattttagtcttgccaatgtagtaagcaaagaatttactcatcagttttttaacgacaaaatagccttcaatcctttaggagttggtatttttaccactgtttttgtaattattaattatattattttaaaaagaggcattatagatggtatagaaaaatccgtaaaatttttaatgcctttattatttatctgtcttattattgttgtaggacgcaatttaacccttgatggggctatggctggagttaaattttatcttgaacctgattttagtaaaattttatcaccaaaacttttaatcgatgttttaggacaagtcttttttgctttatccctaggttttggggtaatgataacactttcatctcatcttaataaaaatgaaaatatggcaaaaaccgctatttatacaggggttttaaatactatcatagctgttttggctggttttatgatttttccagcacttttctcagcgggacttgctccagatagcgggccttctttggtttttgaaactttacctatagcattttctcatatccattttggcactattgtgtgtattttattttttgtcttactcttgattgcagctttaaccacaagcttgccaatttatcaagttattattagcgtattagaagaaaaatttaaatattctaaaaatctttctattaacctaactctagggtttatcttcatacttggcaatcttccttgtattctaacttatgggccttggcgtgatattgttatcatcaaaggaaaaaacatttttgatagttttgatttcattagtggaaatattttgtttgttttaactgcatttttttgctgtatttatgtaggttggattttaggcaaacaagaaagtctaaaagaacttagcaataacaatacacttaaaagttcatggtttggaatttggttttattatgtaaaatatatagtacctttgattattttaatcatttttatctatggaattttaaactga

SEQ ID NO: 18190 - DNA, 882 bp, Campylobacter jejuni
atgcaagaaaataattctccaaaagcgcaagcggttgttaaaaagaatgaaatttatgtttctgttaaaagaaagaaaagtacaatagaatatgaaaaagatttaaagaatttgcaaattgagcttttgaaatttcaaaatcatgttaaagccaagggtttaaaggttcttatacttatagaagggcgtgatgcggctggaaaaggtggggcgattaaacgtttgattgagcatttaaatccgcgtggttgccgcgttgtggctcttgaaaaacctagtgatgtggaaaaaacacagtggtattttcagcgttatatagcacatttgccctcagccggtgagattgtgatttttgacagatcttggtataatcgtgcaggagtagaaccggttatgggtttttgtacaccgcaacaacataaagattttttaagagaagtgcctttgtttgaaaatatgatttcaaatagtgatattattttttttaaattttatttttcagtatcaaaagacgagcaaaaaaaacgttttgaaaaacgccgaagcgatccacttaaacaatataaattatctcctgtggatcaaaaatcgcaagaattatgggataaatatactttagctaaatactctatgcttttagcatctaatactccaacttgtccttggactattatttcttctgatgataagaaaaaagcaagattaaatttattgcgttttatactttctaaggtagaatatccaaataaaaaaactggagatttttccaaaattgatgcaaaattagtgcgtagtggagaagaagaaatacgaaaaatggaggcgaatttggaaaaacttgacagtaaaaaagcagatgagaaaataaaagatttagattaa

SEQ ID NO: 18191 - DNA, 915 bp, Campylobacter jejuni
ttgttaaaagaaaaaataatcaaatttgcactttttttatgtgcttttgtaagcgtgatagtaagttttgctatcatgcttacaattttaattgaagctttaaaattctttcaaaaagaaagcgttgttacctttttattctcaagtcagtgggcagctgatgcagcttttatgaatgcagatggcacgagtaaacaaggtgtttttggggcgctatcgcttttttggggaactttttatatttcattgattgctatgctaacggctttacctttaggggttatgtgtgctatatatttaggtgtttttgctggcaaaaaatctaaaaattacttaaaacctattttagaaatcattgcagggattcctactgttgtttttggattttttgcggctatagttgtagcgccttttatagtgtggtttttttctttatttggcatacaagcaagctttcaaagtgctttaggcgcaggttttattatggggatcatgatagtacctatagtggcttctttatctcaagattgcattgaagcagtaagcgagaaaaggattaatggcgcttatgctttaggtatgacaaaaaaagaagtggtttttgccgtgattttacctgaggctattcctggtatagttgcagcttgtcttttaggactttcaagagccttaggcgaaactatgatagtggtgatggcagcttctttgcgtccaaatttaactttaaattttttagaagatatgacaacggtaacggtaaaaatcgtagaagctttaagtggagatcaagcttttgatagttctttggctttaagtgctttttctttaggtttggtgctttttgtcatcactttaatcatcaatatgtttagcgtttatcttatcaatcgctttcacaaaaggaaaaatttatga

SEQ ID NO: 18192 - DNA, 741 bp, Campylobacter jejuni
gtgatagcaaaaacaacaaatttaaatttattttatggaaaaaaacaagctttatttgatatcaatatgcaaatagaacaaaacaaaattactgcactcatcggtgcttcaggatgtggtaaatccacttttttgcgctgttttaatagaatgaatgataaaattgcaaaaatcgatggtttagtggaaattaaaggaaaagatgttaaaaatcaagatgtagtagccttgcgtaaaaatgtaggcatggtttttcaacaacctaatgtttttgtaaaaagcatttatgaaaacatctcttatgcaccaaaacttcatggtatgattaaaaacaaagatgaagaagaagctttggtggtggattgcttgcaaaaagtggggctttttgaagaggttaaagataaattaaagcaaaatgccctagctctttcaggcggacaacaacaacgtctttgtatcgcaagagctttagcgatcaaacctaaacttttgcttttagatgagccaacttctgcacttgatcctataagttcaggcgtgattgaagagcttttgaaagaattaagccataatctttctatgatcatggttacgcataatatgcaacaaggcaaacgcgtagctgattatacagcattttttcacctaggtgagcttatagaatttggagaaagcaaggaattttttgaaaatccaaaacaagaaaaaaccaaggcttacttaagcggtgcttttgggtga

SEQ ID NO: 18193 - DNA, 744 bp, Campylobacter jejuni
atgtgtaaagattgcggctgctctataaattcaagccatacgcatggtcatcatcacgaccaccatcatgaaaatccaagcttaaaagagggtaaaaccatagaagtgatttctaaaattttaagcaaaaatgatgaagaagctaagcataatagagcgcattttaatgaagctaacacgctttgtatcaatttaatgagttctccaggtagtggaaaaaccacgcttttagaaagcacgattaaggctttgaaaaatgaacttaaaattgctgtgattgaaggggatttagaaaccaataatgatgctctaagggtaaaaaatgccggagctttggcgtatcaaatcactacaggacaaagctgtcatttggacgcttttatggtgcatgaggctttgcatcatttagccattgatgatgtggatttgctttttatagaaaatgttggaaatttggtttgtcctgcaagttatgatttaggagagcatttaaatgtggttttgctttcgataactgaaggaagtgataaaccgcaaaaatatcctgtgatgtttaaaaaggctgatatagttttaatcacaaaggcagatttagctcatcattttgatttcgatattaaagaggcgactaggttgattaaagaattaaatcctagagcagatattatcacccttgatgcaaaaaatggcaccaatatggagctttggtataaggtgcttaaacttaaaaaggagcttttttaa

SEQ ID NO: 18194 - DNA, 1092 bp, Campylobacter jejuni
atgaatttcatcgatgaatttagagataaagaaagcattttagctttaaaaaaactcatagaacaagaacttaaaaatcctattaatatcatggaaatttgcggtgggcatacgcatagtatcatgaaatatgctttgccttctattttgccaaaggaaattaactttatccatgggccaggatgtcctgtttgtgttatgccaagagttcgcattgatacagctatcaagttagcctccatgaaagatacgattttttgtactttaggggatcttttaagggtgcctggaagtgaaatttctttactggatttaagagctaaaggggctgatgttagagcgctttattctccacttgaggttttggaaattgctaagcaaaatttaaacaaaaatatcatcttttttgctataggttttgaaactactacgcctatgagtgctttacttcttcaaaaggttatagaagaaaaaataaataatgtcttttttcatatcaatcatatcacagttccagcacctgtagaagcgatcatgaatgatgaaaatgtaaaaatcaatgcttttttaggtccttctcatgtgagtgtgataacaggttatggtatttatgagcctttagcagcaaaatttaaaacccctatagcggtgagtggttttgagccagttgatattttagaaagtgtgttaaatatcataaaacaaagcaatgaaggcacttttaaagtgtataatcaatacaaaagagccgtaagcaaagaaggcaatgttaaagcacaaaatttagtaaaaaaatactttagggtgtgtgattttgaattccgtggcttaggacttattaaagatggaggcttggagttaaaagaagaatttagcgcttacgatgcgagtaaaaaatttgattgtacggttcaaagtaaaaatgaaagcaaagcctgtatttgtgggcaaattttaagaggtttggccaagccttatgattgtaaagtttttggcaaggcttgtacgccaagaagtcctataggaagttgtatggtttctggcgagggtgcttgtgcggcgtattataaatactcaaaggtgaatgcatga

SEQ ID NO: 18195 - DNA, 2937 bp, Campylobacter jejuni
ttggggggggggagtaaagataaccctaaatctataatcaataattttagtaatagtggaactattcactctaatactggtgaaagtatttattttggtaacgccaaaatatcaagttttgttaatagtgggactattaagagtaaacaaggtgcaggagtaaatatatctcaaggaacaagtatagagaattttaacaataccggaaccggaattattgaaggcaagagaatgggtgtaaatgttcgttcaacaataaataccttcgtcaatgacggtttaattgctgcaacgaacgatggaatacagataaatgctaatgtaaaaacattaataaataagggaaccataaaaggagatgctatatctataagatcattaggtggaactatagaaacattgaccaatgaaggcattatgtatggtaaaagtgctggtatttacatgaacagaagtcttgttaaaactcttacaaatagcggtaccattaatcaaaacaattcggcaacttggtctgctggtataaaactcgaaaatggtagtatcatagaaaatatcatcaacacaggatctatccgttctaatgcttttggaatatctgtaactggtggtaaatttggaacacttaccataaaagatggaggtatggtttatggaaaatactcggcaataggagtgggtcgatcgcaaactctaggagatttatatatagatggacgttcaaataatggcacagtaagtggaatttatagtgaagaacatggaattttattagagaataactcacgaactcaaaaaatagaacttaaaaatggcggcattataaaaggtaatatcgatggtataagattgataaactcggcctctttaagtggagaaatgattttatctggcgaaggttctagggtagaaggtggaagaggtgttggtatattgaatcgaagtggaaaaatagaaggctctataaaagtagaagatggagcaactgttacggctacttcgaatcgagccatagctaactctggctcaggaagtataacaggtggtattactgttagtgggaaaaacactaaacttgaaggaaatataatcaatacaggtaatgcttctataggtagtgatatcaagatagaaggtggagctaaggtagaaggtggtcttgttaatcaaggtaatggaagtatctcaggaagtgttcaagtaagtggtggtagtagtattgattccattaccaatgagggtaatggagctatttctggttcaattactgtatataaagatagtaaacttgattctatcactaacacttctacatcatctacaggtataagtggttctattactaacaatagtgataataaacttgaaatttctaattcaggtaatatcggtggtaagattgaaagtacaggtagtgctgatatggtgattagcaatagtaatggtggaactattagtggcggtattagttcttcaggaagtggaagcactagtatttccaattcacaaggctcaaccataaataacggcatcactgtttcaggatcagcacaagttgaaatctccaatcaaggctcagtaggtaaagatgaaaatggtaatacagtaactaacaatggtagtggtagtgttggaatcaaagattggcttgtttctacagataaaaacacaggtaaattaaacactgtggttataggtggaagtagagcttttaatgtaaaagtagaaaacatcaccgtagatcaaagcaatgttgatcttgaagagctaaacgatataaacaacatcatctcaggtgttaatcaaaacaatattggcaatataggaaccaatggaagtggagaaatatctttaagctttgatccaataacaggaaagcttactacagattttaatcttaatgcttccatatcaggtgcaacctttagatctttaatctctactacttcaagaagatcaacctttatagataatgttatgggtaattctatgcaaagctttgctttagcttcttcaagtaaatctcaaagcatcgctatgtctgaaaagggtaatttatatgcagatgcaagtgattatataaagagtgatttaaataatggaagctatggttctaataaagaacattctttattcatccttccttatacttcttcacagaatgttgaactttctttaaatgaagaaagtaaaggacacactaaaggaaccattataggttattctactttaaaagacagtggaatatatggtgtgtatgcaggttatgaagatacaaaaatgggttcaacttattttgatattaataatagaacctattatgcaggtttaaaatactttaataccttatttactacagaaaaaggtcaagaagtttatatcaaagctcaaggtaaagctgctttgattaaaaatgatttaactgaaaaaataggaaataatgaagctaaagctgaacctaattcttatgcttatggagtcaatacagccttaggtatgaattttatttctaataaagatatattctctcctgaaataggtcttgcttatgaaggaggttatactgaagctttttctatgaaagacaccataggacaagcaacagttaaaggtggagaaagaacctatgcaaactatttaaatcttttctctactaaaacaagtcttacttggtttagagattggttgcctaatttaaaaacttcagtagaacttggagctaagtttaatatcaatcctaaagtagaagctgaggctagatttggtaatataaaagtaagtgatgagtttgatttaccaagagtacaaaaatttgtaagcacttcttttatcgttcctgttaatgaagctttctattttagtttaaactataatggaatgtttgataaagatggcaatacccatacaggatttgctcagtttaattatctttggtaa

SEQ ID NO: 18196 - DNA, 1023 bp, Campylobacter jejuni
atggctattacagtatattatgataaagattgtgatttaaatttaatcaaatcaaaaaaagtagcaattataggctttggctctcaagggcacgctcatgcgatgaatttaagagataatggcgtaaatgtaactatcggacttcgtgaaggtagtgtaagtgctgttaaagcaaaaaatgctggttttgaagtggtgagtgtgagtgaggcttctaagatagcggatgtgattatgattttagctcctgatgaaattcaagcagatatttttaatgtcgaaataaaaccaaatttaagtgaaggcaaggctatagcttttgcacacggttttaatatccattatggtcaaattgttgttccaaaaggtgtagatgttatcatgatagcacctaaagcaccaggtcatacagtaagaaatgaatttactctaggtggtggcactccttgtttaatagctatccatcaagatgaaagcaaaaatgctaaaaatttagccttaagttatgcaagtgcgatcgggggtggacgtacaggtattatagaaacaacctttaaagccgaaacagaaacagatctttttggtgagcaagctgtgctttgtggtggacttagtgctttgattcaagcaggttttgaaactttggttgaagcaggttatgaacctgaaatggcttattttgagtgtttgcatgaaatgaaactcattgtggatttgatttatcaaggtggtattgcagatatgcgttattctatttcaaatactgcagaatacggcgattacatcacagggccaaagattatcactgaagagactaaaaaagcgatgaaaggtgttttaaaagatatacaaaatggtgtttttgcaaaagattttatcttagaacgccgtgcaggttttgctagaatgcatgcagaacgcaaaaatatgaatgattctttgatagaaaaaacaggacgcaatttgcgtgctatgatgccttggatcagtgctaaaaaattagtagataaagataagaactaa

SEQ ID NO: 18197 - DNA, 1083 bp, Campylobacter jejuni
ttgtcaaagaaaaaattagttcaaattcagcgttatttaatcatagctatactttttttactttgcatagctttagctttgggaattttagtaaaatatcaaaattcccaagatgtttcttctgttaagccggattattttattgataagcaagaagatttaatttcattaaataaagatcattatgaaattggtatttttcaagagaatgagtttgataataataaatctgtaagtattttagagcaaaaaattcaagaaattgatgatttaaatacaagtttaaatgagcaaaatttaagcagtgtggagcagaatttaagtttagagcaaaatcagagtttagaacaaaattttattctaaaagatacaaatttaacccaagatcaaaatttaacttttaatgaagatattcatttaaataaaatttctaaaaaaccaaaacttgccattattatcgatgatatggcaaatgcaagtcaggttagaggtttaaaagctttaaatttaaagttaaatccttctttttttccgccagataaaaaccatagcgaaacgccaaaacttgctttaaaatttgatttttatatggtgcatttacctttagcagcaattaattacaataaacccgagcttgatactttaaatccaaatgatagcaaagaaagaatttttaaaaaaatcaagcaaattaaaaaagattttaaggatttaagatatatcaataatcacacgggaagtttatttacaagcaatgaagaagctatgaaaaagctttatgaggctttaaaaaatcaaaatatattttttgtagattctaaaactataggcaattctaaggcaaacaaaatcgctaaagaacttagtatcccttatatacaaagagatgtgtttttagataatgaagatgatgttaattatgttaaaaaacaactcgaaaacgcagtaaaactcgcacaaaaaaaaggttttgttatagccataggacatcctaggaaaaatacttttaaagccttagagcaaagtaaagatttgttaaaaggtgttgatcttgtgtatttgagtgaaatttatggcaagtga

SEQ ID NO: 18198 - DNA, 579 bp, Campylobacter jejuni
atgaaagaattgtttttaatcataggtgcaccaggtagtggaaaaactaccgatgctagtttaatcgcacaagcagatgcgacaaatatcacacactattcaacaggggatcttttaagagctgaagtagcaagcgggagtgagcttggaaaaactatagatagttttatctccaaaggcaatcttgttcctttagatgttgttataaatactatagtttatgctctaaaagctgctccaactaaaactatcatcatcgatggctatccaagaagcgtagaacaaatgatggaatttgacaaggttttaagtgagcaaaatgaaatttgtcttaaaggtgtcatagaagtaagagtaagcgaagaagttgccaaagaaagagttttaggcagaaatcgtggtgcagatgataatgaagaagtgttttataatagaatgaaagtttatacagaacctttaaatgaaattttagatttttatcaaaagaaaaaacttcattttattatcgatggggaacgcactatcgaacctatcgttgcagacatgaaagaactgattaaaaaaattcaaagtatataa

SEQ ID NO: 18199 - DNA, 1752 bp, Campylobacter jejuni
ttgcgaagtcattataatacagacttgggaatttcccatgttggtcaaagcgttaaactttgcggttgggtaaatagctaccgcgatcatggtggagttatttttatagatttaagagatagaagcggtattatccaacttgtttgcgatccaaatgatagtaaagaagctcatgaaatcgcttccaatgcaagaaatgaatttgtacttattacagaaggtactattcgtccgcgtggcgaaggacttgtaaatcctaagttaaaaacaggagaaatcgaagtagttgtttctaaacttaccatagaaaatgaaagtgccgtacctccttttgctatcgctgatgaaagtgtaaatgaagaattacgcttaaaatatcgctttttagatttaagaaatcctaaactttatgaaaattttgccttgcgttctaaagcttgtatagcagctagaaattctttggcaaatatgggatttttagaagttgaaacccctattcttaccaaagctactcccgaaggcgcaagagattatctcgtgccttctcgtgtgcatcagggtgaattttatgctcttccacaaagccctcagcttttcaaacaacttttaatgtgtagcggttttgatcgttattttcaaattgcaaaatgttttagagatgaagatttaagagctgatcgccaacctgaattcacacaaattgatgttgaaatgagcttttgcgaacaaaaagatgtgatcaaggtagctgaaacttttttaaaagatattttcaaagcttgcggcaaagaaattcaaaccccttttagacaaatgcaatacaaagacgctatggaaaattatggctctgataagccggatttaagatttgatcttaaatttattgatgtgattgatattttcactaagtcaaataatgaaatttttgcaaatattgccaaagatacaaagaaaaatcgcatcaaagccatacgcgttccaaaaggcgatactattttttcaaaaagacaaatgcaaagatttgaagaatttgtgcgtaaatttggcgcccaaggcttagctttcatacaagttaaaaaagatgggcttaaaggtccactttgtaaattctttagcgaagaagatttaaatgagctaagcaaacgctgtgagcttgaagtaggagatgtggtatttttcggtgcaggagctaaaaaaaccgtgcttgattatatgggaagatttagaattttcttagccaacgagttaaaacttatagatccaaatgccttggaattcttatgggttgttgattttcctatgtttgagcaaaatgatgacggaagttattctgcgatgcaccatccttttaccatgccaaaaaatattgatgagactgatttagaagaaatttcatctattgcttatgatgtagtgttaaatggcgttgagctaggtggaggtagtataagaatccataaaaatgatattcaacaaaaagtatttaaacttttaaatatcgatgaagaacaacaaaaagaaaaatttggtttcttgcttgatgctttaagttttggcgctccaccacatggaggcatcgctataggacttgatagactcatcatgctagttacaggagcaaacagcataagagaggttatagcctttccaaaaacccaaagagcgcaatgcttaatgacagatgcgccatcgcctgctagcaatgaagcaatgagagaattaggaatcaaattaagggagaatataaaatga

SEQ ID NO: 18200 - DNA, 861 bp, Campylobacter jejuni
atgcaaaataaaatagattataaaaatattaaaaaaattggacttgttacgcgacccaatgtgagtttagataaggaaattttaaaacttcaatcgattttatctatatataaagttgaacttgtattgcttaaagaaagttctgaaattttagatttgccaaagtatggattggatgatttgtttaaaatatccgattttgttatttctttaggtggagatggaactttgatttctttatgccgtaaagcttgtgaatatgataaagcagttttaggaattcatgctggacatttaggttttttaacagattttaaagttgatgaagctgaaaatttttttcaagctttttttcaaggagaatttagaatagaaaagccttatttgttaagtatttttttagaagataggcaaggaaaaattttagaaaaattggcttttaatgatgtggttatcagtaaaaacaatcaagcttctatggctcatatagaagtttttagaaaagaaaagaaatttaatgaatattttggagatgggcttattgttgcaactcctgcgggttcaacagcttataatttaagtgcaaatggacccatagtttatactttagctcaagcttttatcttaactcctgtttgttctcattctttaacacaacgccctattgtcttgccaaaaggttttgaaatagagattatggcaaaggattgcatgctttgcattgatgggcaagaaaattataaaatgaatgattttaaaagtataaaagtgggtttaagtgataaaaatgtggctttaattcatccaaaaaatagggattattttcaaattttaaaagaaaaattacactggggaaattga

SEQ ID NO: 18201 - DNA, 816 bp, Campylobacter jejuni
atgttcttaaatcttgattttcaagatggtttaaggattgttgatacgcattgccatctagacagtgaagcatttaaagatgatttagatgaaactttaaatcgtgcttttaaaaatggtatagagaaaatcatcatacctggtgctgatataaaagacttgccttatgcagctacaattgctcataaatataaaaatattttttttgcagcaggggtgcatccttatgaaattgataattatgatgagaaaattttaagacagtatttatgcgatgaaaagtgtgtagctgtaggtgaatgtgggcttgattatttccgttttaaaagtgatcttgctgaagaaattcaaaaagaaaaagaaaatcaaaaaaagatttttattgcacagcttgagcttgctattgaatttaaaaaacctgttatcattcactcaagagaagcaaatcatgatacttatgagattttacatgggtattctaaggatcttgtaggaggagttttacactgctttaatgcaagcgaacatttgctaactctttttgaagagggattttattttggtattgggggagttttaacttttaaaaatgctaagaaattagttgagattttgcctaaaattccaaaagataaactactacttgaaactgatgctccatatcttactccagagccttatcgtggtaaaagaaatgaacctttgttaactcaatttgtagtaaacaaaatgtgtgaagtattgaatttatcaagaaaagagcttctagaaatttgttttaacaattctgaaaaattattttttaaaggttattaa

SEQ ID NO: 18202 - DNA, 876 bp, Campylobacter jejuni
gtgaaaagtggctttgttagtatcatagggcgtactaatgcaggaaaaagtactttaatcaattccttactagaagaaaaaatcgccctagtttctcacaaacaaaacgccacaaggcgtaaaatcaaagccatagtgatgcatgaaaaaaatcaaatcattttcatcgataccccaggacttcacgaaagcggtgctacgcttaatcaactgcttgtccaaagtgctattaaatccatgggggattgtgatgtgattttatttgtggcgagtgtttttgatagtacaaaagactatgaaaattttcttagtctaaacccacaagtaccacatatcatcactttaaataaagtagatttaaccgacaatgctacacttttaaaaaaacttagcgaatatgcaaaatttagccaacattttaaggctatcattccttattcttctaagaaaaaaagctataaaaaaggcttgttagatgagatagtaaaatatcttgacgaacatgaatatttttatgatcctgaatttttaagtgcgagtagcgaaaaagaaatttatagagatttcatacttgaaagtatttatgaaaatttaagcgatgagcttccttatagtagcgaagtgcttatccatcgcaccaaagacacacctaatcttttaatcctagaagccaatatcatcacagatacaaactctcacaagggtatgcttataggaaaagaaggggcaactttaaaaagaataggcaaagatgcacgctttaaaatttcaaaacttgcccaaaaaaaggtacttttaaagctttttgtaacagtgaaaaaaaactggcaaaaagatgaagaatttttaaaaaaacttctaaatgatgaaaattaa

SEQ ID NO: 18203 - DNA, 543 bp, Campylobacter jejuni
atgtttcacgcaacaacgattttagcttacaaaggtaaaaataaatccgtaattggcggagatggacaagtaagctttggaaatacggtgctaaaaggcaatgctgtaaagattagaaaactcaacaatggcaaagttttagcaggttttgcaggatcaacagctgatgcttttaatctttttgatatgtttgaaaatctccttcaaagttctaaaggcgatcttttaaaagcagcaattgacttttctaaagaatggagaaaagacaaatacctaagaaaacttgaagccatgatgctcgtacttgatagaaatcacatttttctactttctggtacaggcgatgtggtcgaacctgaagatggacaaatcgcagccataggaagtggtggaaactatgcgctttcagctgctagagccttagcaaaacataccgatttagatgaagaagaacttgtaaaatcaagtcttcaaatcgcaggtgaaatttgcatttataccaataccaatatcaaaacttatgtaattgaggatgagaaatga

SEQ ID NO: 18204 - DNA, 444 bp, Campylobacter jejuni
atgaaagtattattaatcaaagatgtaaaagcacttggaaaagcaggagaaataaaagaagtaaaagacggctatggacaaaatttcttaatcgctaaaggctttgctaaagcagctactaatgaagttttaagaaaatatgaaagcgacaagaaaaaagaggctgaaaatttacgctttgaaatcgcaaatttagaaaaactcaaagaagaacttagcaaaatcactcttgaaatttcaaaacccgtaggtgcaaatggaagtttgtttggtggcgtaaccaaagatgaaatcgctcacgccctaaaagaacaaagccatatagaaatcgataaaaaaagtttagaatgtgataccttaaaaagcttaggaatccacgaagtaagcgtaaaacttggacacgcaatccatgctaaatttaacataaatataaaggcagaataa

SEQ ID NO: 18205 - DNA, 246 bp, Campylobacter jejuni
atgagagtagataaatttttaaatgtagttaatatcacgaaaagaagagctatttctgaagatatgtgtaaaagtggtgtagtggggattaatggcgttattgttaaggcgagtaaagaggttaaggtagatgatattatcactttacattttactgaatacactcaaaaatataaagtgctagctctacctagtacgaaaagcattcctaaaaacgcacaaaatgaatatgtggtaaaattatga

SEQ ID NO: 18206 - DNA, 729 bp, Campylobacter jejuni
atgagtaaattagaaattgtaaatttagaaaaaattattaaaaaaactaagattatacatggaatttctttggaggttaatagcggagaagttgtggggcttttagggccaaatggtgcaggaaaaacaacaactttttatatgatatgtggacttatttccccaagtagtggaaaagttcttttagacggtttagatgtgacaaaagatcctttaaataaaagagctagatcagggataggttatttacctcaagaaagtagtatttttaaggatttaagcgtagaagataacctgcttttagcggctcagattttttataaagataaaaaaattttacatgataaagttgagcaaatgcttgaacttttaagtatagagcctattcgtttaaggaaaggtttaagtttaagtggaggtgaaagaaggcgttgtgagatcgctagaagcttgatgtgtgaacctaagtttttgcttcttgatgagccttttgcaggtgttgatcctatagcagtggctgaaattcaaactttaattaaagagcttaaaagattggggattggggttttaattaccgatcataatgtgcgtgagactttagctatttgtgatagagcttatgttataagatcgggctctttgcttgctagtgggaatgctgatgaaattgcaaccaataaagacgtgaaaaagtattatttaggagcggagtttaaactccttgattga

SEQ ID NO: 18207 - DNA, 2046 bp, Campylobacter jejuni
atgtctaaaaaacaaaataaactcattacaaaagaaattttaaataatgccataaaaggagcatttttaaaatttgatccacgctttatggtaaaaaatcctgttatgtttatggtggaagttggatcgattcttactttgattttaagtatttttcctactttgtttaatggaaattctgatgaaagaatttataacatcttaatcacttttattttatttataatcttgttttttgcaaattttgcagaaagtattgcagaaggaaggggtaaagcccaagcagctaccttaagacaaagcaaaaaggattctaaagctagacacataaaaagtgatggcagtgaagaaatgcttaattctagcgagttaaaaataggtgatatagttttagttaaagcaggtgaacttatacctaatgatggagaaattatagaaggtactgcaagtgttgatgaatcagctattacaggtgaaagtgcacctgttatgcgtgaagcgggcggtgatttttcttctgttacaggtgggactacggttttaactgattttttaaagattaaaattttagttggagctggggaaagttttttagataaaatgatcaatcttgtagaaggtgctgcgcgtcaaaaaactccaaatgaaattgctcttaatactcttttaattgtacttagtttgagttttttgatggtggttgtaagtttatatccttttatgcaatttttaggcgtgagtttgcctatttcatggttagtagcattgcttgtatgtcttattcctacaactatagggggacttttatcagctataggaatagcaggtatggatagggtaacgcgttttaatgtgatcgcactttcaggcaaggctgttgaaagttgtggtgatgttgatactatgattttggataaaacaggaacgattacttttggaaaccgtttggcaaatgaattttatgaagtccaaggtataagtaaagaagaaatgattaaagcttgtgttttatcctctttaaaagatgaaactccagaaggtaaaagcatagttgcattggctcaaaaaatgggttatgaattagaaggtaatgatattaaagaatttatcgaatttagcgctcaaaatagaatgagtggtgtggatttgcaagataatacaaaaattcgcaaaggtgcttttgatgctataagagcttatataagcgaaatgaatggaaaaattcctagcgatttagaaactaaggtaatggaaatttcaaatcttggcggcactcctttggtagtgtgtaaaaatgaaaaaattttaggagtgatttatctaaaggatacagtaaaaccaggacttaaagagcgctttgatgagcttagaaaaatgggcataaaaactttaatgtgtaccggagataatcctttaacagcagctactataactaaagaagcagggcttgatggatttatagcagaatgcaagcctgaagataaaataaaagccattaaaaaagaacaagcccaaggtaagatagtagccatgacaggagatggaaccaatgatgctccagttcttacacaagctgatgtaggtatagctatgaactcaggaactcaagcagccaaagaagcagccaatatgatagatcttgattctaatcctactaaaattttagaagtagttgaaataggaaaaggtttgcttattactagaggtagtcttacaacttttagtatgacaaatgatattgctaagtattttgctattttacctgctatgtttagtgtggttttacctcaaatgcaaattttaaatattatgcatttggctaccccgaaaagcgctattttatcagcacttatttttaatgctattattatacctttgctcatacctattgctatgcgtggagttaaatttaagcctatgaaaagcgagcatttgcttttaagaaatttgagtatttatggtttaggtggtatgatagcaccttttatagggataaaaataattgatattcctacagcttggatacttagaattttaggagtgtga

SEQ ID NO: 18208 - DNA, 1821 bp, Campylobacter jejuni
atgcaaagacaaagtcctgaacaaattcttaaaaaacttgaggttaaagctaaggaagaagaaaaaaacaaacttgtaaaattaaaaattttcttaggttatgctgcaggttctggaaaaacttatgctatgttaagtgaagccagaactttaagggataatggagttgatgttgttttaggctatatagagcctcacgatagacctgaaacaatggctttagcacaaggttttgaaagtatagctaatcttgaaattccttataaaaatatagtattaaaagaatttgatttagacgctacccttaagagaaagcctgctttggttttagtagatgagcttgcacacactaatgctaaaggcttgcgtaatgaaaagcgttttcaagatatagaagaacttctaaaagcagggattgatgtttatactactttaaatatacaacatttagaaagcttaaatgatttagtcgctaatatcagtaagatagaagttaaagagcgtattcctgatcgtatttttgatgaggctgatcaggttgaacttgttgatattgaacctaataagcttttaaaaagaatgcaagatggtaaaatttataaggaaaaacaagctaaactagcacttgaaaatttctttcgccaagaaagacttatagctttgcgtgagattgccttaagaagacttgcttcaagagtgaatttaagagcaagtgaacaaaggcttattaatgatgatttagcttatcatactggagagcatattttagtttgtattaatgcttcaaatgcaaaggttattcgtgcagctgcaagacttgctttagcttttcatgctaaattgagtgcgctttatataaaaaatcccaatattaaagaagcaaaagccttagaagaaaatatagaactagctaaaagttttgatgctaaaatcattagcgtatatgatgatatagcaagacaaattgcagagtattcaagccttagcaatgtctctaaaattgttttaggcaaaaataaagataaaaaaagtttaaagaagagatttttgaagctgtcgctaaaaaagcacccgatattgatttatatcttgtcaatgaaaatcaaatttctactcctaaaatacgaagtaaaaaaaagttttgattttttaggttttttaaaaatcacaggagttttgcttttagcaacttttatagcttttgtatttcataaatttaatactcagccaagtaatatagttatgatttttattttagcagtttttgcttcttcttttatttctgataataaaattttcgccttttattcttctttggtaagtgttttgatttataattttttctttttagaacctatttttagtcttaaagttcatgatagtggaaatattattacttttacaactatgtttatagttggatttttaacagctgtttttactagaagattaaaattgcaatctaaagaactcactaaaagggcttatagaacagctattttacttgaaaatagtgaaaatttagcaagagtgaaaagcaaacaagagctttgggaacaacttggaaatcaagctttaaaattattaaatttacctattattatttatcctataaataaaaacaatattttatcgaaacctttgttgttttttaacgatgataagcaaatgttaaaaaattgttttagtgctgatgagattgctattgctcaatgggttgcaacaaataaagaaagagcaggtgtttgtacaaataccctacctaatgctaatgctatgtatttacctatagaagatgggaaaaaactaaaggggttatag

SEQ ID NO: 18209 - DNA, 1074 bp, Campylobacter jejuni
atggagtataaaagatttaaaaccagacaaatcaaagtaggaaatgttttaataggcggtgatgcacccatttcagttcaatctatgctttttactaaaacaagagatatagaaggttctttagaacaaatcaatcgtctttattttgcaggagcaaacatagtgcgtttggcgtgcttggatatggctgatgcaagggctttaaaagagattaaagctaaaagtcctctacctttaatcgtagatattcattttaatcataatttggctgtatattgtgctgaatttatcgatggcgtgcgtataaatcctggcaatataggctctaaagaaaatatcaaagaagtggtaaaagcatgtaaagaacggggtatccctatacgtatcggtgtaaatcacggctccatagaaaaacaatttagcgataaatttggctatggtgtcgatgctatgctagaaagtgcgatgtataatatcaagcttttagaggatttagacttttttgatattaaaatttccatgaagacttcagatgctcaaaaaactatagaagcttatgagagattaagaccgctttgtgattatccttttcacttaggggtaactgaagcaggaactaaatttcatagcactgtaaaaagttctatagctttaggaaatttacttcttaaaggtataggcgatactatgcgtgtttctatgactggcgaacttgaagaagaaattcgtgtagcaagggcgattttacaagatagcggagtgcaaaaaagcggagtaaatattatttcatgtccaacttgcggtaggattcaaagtgatttgttaagtgcgattaaaatcgtagaggaaaaaaccaagcatataaaagaacctttaaacatcagtgtcatgggttgtgtggtaaatgctttaggcgaagctaagggcgctgatgtggctatagcctttgggaaaaatcaaggacttgtcataagacatggtgaagttgtagctaaattaaaagaaagtgaacttgtagatagatttttagctgaagttgaagatgaggttaaaagtagggttgtaaaagaataa

SEQ ID NO: 18210 - DNA, 1506 bp, Campylobacter jejuni
atgatggcaaatctttatttgatgagatctagaagtgatgagttaaatactattattagtacaaatttgcttaaaaattatagcaaaatttacaaaaatatcgcaatttattgccctgtgatatacatacatcgcgttcctgttttgcagggttggttggaagaatttaatatcaatcaaaccgtaaaaagcgcttatggttttacctttagagaggcaatggaggaatttagcaaagatcctcataatttttttaatgttattttagaagaatacgaagagttaaaacgcaaatacgattttgtgcttgtaaatagtttttgcgaatttggaatacttgatggatttgatcttagtataaaattggctaaaaatcttaatacccctatcgctgctattattaacgatgaagataaacttatagctcaaaaatattttgatcatgctctagatggtcgtaattatgttttgattaatgaaaattttaattttgaagaagtgcaaaaacttaaagaatatgattttataactcctcatcgttttaaatatgaattaatcaaacaaagtataaaaaataaaaaaaccgttgttttgccagaaagtaatgatgagagaattttaaaagccgctgaaattttattaaaaagtaaagttgttgatcttattttattgggcgatgaagaaaaaatcaaacaagatgctactagattaagtcttgatttaagtgctatgcaaattatgaatccacttaattcagaatataatcaaaaatttacttctattctttatgaagcaagaaaatctaaaggcatgagtttagaagaggctaagatgctagttcaggataaaacttattttggaactttgcttatacatactggaaaagctgatgctatggttagtggagcatcaactactacggctgaaacgattcgccctgcattacagcttattaaaactaaagaaggtattagttccgtttcaggaattttctttatggggcttgaagatcaagttttagcttttgctgattgtgctgtaaatccaagtccaactgccgaacagcttgcaactagtgcttatgtaagtgctatgactgctaaatcttttggacttgaaccaagaatagctttgctttcttattctagtggtgatagcggtaaaggagaaagcgtagatcttgtaaaagaagcattaaagattgctaaagaaaaatatcctgagttgaatatagatggtcctatgcagtttgactgcgcttatgatccaaaaactgcagcaaagaaaatgccaaattctaagatagcaggtcatgcaaatgtgtatatttttcctgatcttaacgcagcaaatatttgttacaaagcagttcaaagaactgctaatgctttagcaatcggtcctattttgcaaggtcttaaaaaacctgttaatgatttaagtcgtggatgtttggtagatgatattgtagatactgtaattttaagtgcaatacaagctcaatag

SEQ ID NO: 18211 - DNA, 939 bp, Campylobacter jejuni
ttgattttggaaattcctcatatcccagttttacttaatgaagttcaagagatttttaaaaatcttaaaacaggttattttttagactgcactttaggatttggcggacatagtgaagctttgcttaaaaatcatcctgatcttaaattcattgcttgtgatcaagatcaacaagctttaaaattttctaaaaaacgtcttaaagattttcgcaataggataacttttatgcaaagtaattttagtgaagttttagaaaaaatttcacataaagaagaattaagaggtattttagcagacattggagtttcttcatttcagcttgataataacgaaagaggttttagtgtaaattctgactttttggatatgagaatgaatcaaaactccaaaatatcagcttatgagattattaatacttatacaaaagagcaattaacttccatttttaaagattatggagaattacatgatgcacattttattgctgaaaaaatttgcctagaaagaagtaaaaatctaatcaaaagcgccaaagagctttatcaaatcataggaaaaggtaaacaaaatcatagaaaaatttccaaagctactttagcatttcaagccattagaatagaagtaaatcaagaacttaaagtgcttaaagattttcttgaacatttagaaaatttaaaaccaaaaaattgcattttagctatcattagctttcattctttagaagatagaatagtaaaacaatttttcaaaaaatggtcaaaaaactgcatttgtaatgaaaaaataatgcgttgcgaatgtggaaataaccatagcctaggacaaataataactaaaaaagctataagtgcgagcaaggaagaacttttaaaaaattctcgctctagttgtgctaaaatgcgggctttttattttaataatttggacaataaataa

SEQ ID NO: 18212 - DNA, 1389 bp, Campylobacter jejuni
ttgattttgaatatattaggaattgacttaggctcaacccagacttgtgccattattgctcaaaaagatgaagatggattaaaaattattggtttttccaagtcgaaaaccaacggggttaaaaaaggtgccattaccaatatagagcttgcttctaaatctattgaagaggctgttagaagtgctgagatgatgagcggagttcattatgatagggttgtggtgtctatatcaggtgcttatactaaaagcgttgatagcataggtgttgttaatattccaaatcatgaaataggcattaaagaaattcatcgtgctgtaagtacagctaagcatactgccaatctaccaagtggttatgaaattatccatgttttgccttataattttaaggttaatgatcttgaacatgttgatgatcctttgggaatgagtggcaatcgtttagaagtttcaacccatatagtgatttcacaagaatctcatattaaaaatcttaagaaagcagttgaattagctgatttaagagtggataatatagttctttcaggatatgcttcagctatagcttgtttagatgatagcgaaaaggaattaggtgctgttttgattgatatgggtggagcgatttgtgatatggttgttcatactggaaattcaattagatataatgattgtttgcaaattggctcgattaatatcactcaagatttatcaatggcattgcatacacctttaaaagaagcagaaaaaatcaagcttaattatgcagctctttcacaacagcctaatacccttatacaaattccttcaatgggtgatgaaagaaaggttaatgaagtttctttggatattatttcaaacgtaatttatgcaagagcggaagaaactttgatgattttggcaaaaatcttaagtgataatcgttatgccaatgctataggtggcggagttgttttaacaggtggaatgactaagttagcaggtattgatgagctagctcctgcaacatttgataatcgctcagttagactggctactgcaagaaaagatttgattactggttttagtgaaatttttaatgatcctgaaaatacttgtgctataggactttgtttatatggagcgggatattttacgccttatgaacttgattctaatgagaaattaagatataaaggggaaattgaaaattttaatcgtcaaattaaacaagatattgttttgcaaaaagatgcagaaagtgaaataaaatctgatttttttgatgaaaatttgcaagaaaatgatacaattgcaatacaagaacaattagattttaaagagccaaaagaaaaaaaacctagtgttttttcaaatatctggcataaaattatgaatcaattttaa

SEQ ID NO: 18213 - DNA, 1113 bp, Campylobacter jejuni
atgagtgaatttttagtagaagaaatgcaacataataaaggtgcaaaaattaaggttataggctgcggtggcggtggcggtaatatgattaaccatatggttaaaatgggattaaatgatcttgatttaattgcagcgaatactgatgcacaagctatttcaatttcattagcaaaaactaaaattcaacttggcgagaaaaaaactaaaggtttgggcgctggtatgcttcctgaagtaggtgcagaaagtgctagagaaagttttgaagaaataaaagcaagtcttagtcaaagtgatattgtatttattgcttcaggttttggtggaggtactggaacgggtgccactccagttattgcacaagcagctaaagagattggagctttaactgtttctgttgtaactatgccttttgcattcgaaggaaaacaaagaaaaaaacttgctgaaagcggtctccttgagcttaaaaaagaaagtgattctattcttgtaattcaaaatgaaaaattattgagcattattgataaaaaagcaggtattaaagatgcttttaggttggttgatgatattttagctcgtgctgtaaaaggtatggtgtctatcttacttgataatggagatattaatgttgactttgcggatgtaagaaccatcatgagtcatcgcggactcgcgcttatgggtgttggtagtgctagcggtgaaaatgctatagaagaggctctttcaaacgctatagaatctcctttgcttgatggaatggatattaaaggtgccaagggagttattttacattttaaaacaagttctaattgctctttgtttgaaatttcggcagcagcaaatagtatacaagaaattgttgatgaaaatgctaagattatttttggttctactacagatgatagcatggaagatagagttgaagtaactattattgcgacagggtttgaagataaagatacagtagctaaaaaatctaccgaagaagctcaagcttctaagaaaaatccttatttaagtcttaaaaaggtaagcggtggttacgatgaagagataatggcgcaaattgaaacaccaactttcttgcgtcgtcaaatggattaa

SEQ ID NO: 18214 - DNA, 1431 bp, Campylobacter jejuni
atgggaaaatttgttaataatatagatgattttttcaaattttgcaaacaaaatgaagtgctttttgttgattttcgttttacagatatgataggaacttggcatcatattacctataatcttcatgcaatcaatgaagaaacatttcaaactggcattccatttgatggaagctcaattcatggatggcaacctatagaaaaatcagatatgattttaaaacctgatgctcaaagtgcttttttagatccttttacggctgatcctactatcatagtattttgtgatgtgtatgatatttacaaaggacaaatgtatgaaaaatgtccaagaagcatagcaaaaaaagcaatagaacaccttaaaaatagtggcatagctgatactgcttactttggaccagaaaatgaattctttgtttttgatagtgtaaaaatagttgatactactcattgttctaagtatgaagttgataccgaagaaggagagtggaatgatgatagagaatttaccgatagctacaatactggacacaggccaagaaacaaaggtggatattttccagttcagccaattgattctttagtagatattcgttctgaaatggttcaaacccttgaaaaagtaggtcttaaaacttttgttcatcatcatgaagttgcacaaggacaagctgaaataggagtaaattttggcacgcttgtagaagcagctgacaatgttcaaatttataaatatgttgtaaaaatggtagctcatttaaatggcaaaactgccacttttatgccaaaacctttatacggagataatggcaatggtatgcatgttcatatgagcttatggaaaaatggagtaaatttattttacgataaagatggatacagtggacttagtcaaactgctataaattatataggtggaattttaaaaaatgctagaagtgttgcagcttttacaaatccaagttccaactcttacaaaagaatagttcctggctttgaagctccttgtattttaacttattcttgccaaaacagatcagcaagttgtcgcgttccttatggcataggtaaaaattcagctcgtatagaaattcgcttccctgatagcactgctaatccttatttagcttttgttagtcttttaatggcaggtcttgatggaatcaaaaataaaaccattcctgtgggtcctatggatgaaaatttatttgatcttactttggatgaaatacgtgaaaaagggatagagcaattaccacatactctaagaggaagtttggaagctttaatccgacataattcttatttaaaacctgtaatgagcgatatttttatcgatgactatcagcatttaaaatttgaaacacaagtttggccagtagaagctcgtccaactgcttatgaatttaaaacttgctactcttgctaa

SEQ ID NO: 18215 - DNA, 1254 bp, Campylobacter jejuni
atgatcattcctgaaatagtagctcctgcaggaaatttcacaaaattaaaaattgctttagcttatggcgcagatgcggtttatgcgggtgtgaataatttttctttaagatcacgcactgcaagagaatttaattatgaaagttttgaagaagctatcaaatatactcatgagcgtggtaagaaaatttatgttactttaaatggttttcatttgagttctcaaattgaaggtttaaaaagacatattttaaaattgcgtgagatgaaacctgatgcttttattgtagcttctgttggagctatgcgtcttgttaaagaacttgcacctgaaatttctttacatgtttctactcaggcaaatattttaaattatttagatgctcaagtttataaggatatgggtgctaaaagggttgtaattgccagagaattagggcttaaagacgctaaagctttaaaggaaaattgcgatattgaacttgaagcttttgtgcatggttctatgtgttttgcttattcagggcgttgtttaataagctctgtgcaaagtggaagaatgagcaatcgtggatcttgtgcaaatgattgtagatttaattatgagctttatgctaaaaatccagaaaatggcactttatttcgcttagaagaagatgaaaatggtactcatatttttaattctaaagatttaaatctttgttcttatatagaaaaaatcatgcaagaaaattgtatcagtgcttttaaaatagaagggcgtactaaaagcgaatattatgttgcgcttacaacaaggacttataaaatggccatacaagatgctttagagggtaaatttgagtcaagtaagtatgaaaaagagattgctacacttaaaaatcgtggttttacagatggctatcttgtttcgcgtcctttagaaaaaaccgacacacaaaatcataatacaagcatagaagaaggttctcatcaagtgcatgctataagcgaagatggaagattttttaaatgtaaagggaaaatcgttttaaacacgccttatgaaattttaacccctttaggcgatgtgattcaaacttgcgataatgaactaggtaaaatttatcaaaaagagggtaaatattttatagagtttaaaaaacttattgctaaaaacaataaagaatttagcgaaattcatagcggtaatgaacatgaaatccaattaccaaataaaatcagtgcattaagttttttaagaaaggaaatatag

SEQ ID NO: 18216 - DNA, 864 bp, Campylobacter jejuni
atgactttttcacaaatgatacttaatttacaaaattattggcaagagcaaggttgtgcgattatgcaaccttatgatatgccagcaggtgcaggaacctttcatccagcaacttttttaagaagtttaggaaaaaaaccttgggcagctgcttatgtggctccaagtagaaggcctactgatggacgttatggtgaaaatcctaatcgcttaggtgcttattatcaatttcaagttttaattaaacctagtcctgataatattcaagaattatatcttaaaagtcttgaaaatttgggttttgatttaaaaagtcatgatattcgttttgttgaagataattgggagagtccaagtttgggtgcttggggtttaggctgggaagtatggcttgatggtatggaagttactcaatttacttattttcagcaagttggcggtatagcagtagatttagtaagtgctgaaattacctatggtcttgaaagaatagccatgtatcttcaaaatgttgataatgtttatgatatagtttggagtgaatttaatggagaaaaaattaaatacgcagatgtgcataagcaaagtgaatatgaatttagtaaatacaattttgaagtaagtgatgttaaaatcttaaatgagcagtttgaaaattcttacaaagaatgtaaaaatattttagaacaaggactagctttacctgcttatgattattgtatgcttgctgcacatacttttaatcttttagatgcaagaggagcaatttctgtagcacaaagacaagattatatgttaaaaattcgtgaactttcaaaaaattgtgctgaaatttataagaaaaatttaaatgaagctgagtga

SEQ ID NO: 18217 - DNA, 1338 bp, Campylobacter jejuni
gtgtttgagttagtcagcgaatcttttaaatcagcgattaataaattacgttttgttgatgatgaaaaagcacttaagaacgctttagaaaccttaaaaaaagctcttttaaaagcagatgttcaccataaggtaactaaagagcttttgactttgatagaagaagatgcaaagcaaaacggaataggtcaaaaacaatttttaaatgccattaaaataaatttagaaaatattttaagtgtcaatggcaaaaatcaaggttttgtttttgcttctaaacccccaacagtagttctaatggcaggtttgcaagggggcggtaagactacaagcactatcaaacttgcaaattatttaaaattacgcaataaaaaagttttagttgcagcttgtgatttacagcgtttagcggcagtggagcagctaagacaactttgtgaagctaatgaaattgaacttttcttcatagaaaatgaaaaagatcctattagggttgctaaagaggctttaaaaaaggctgaaagttctatggtggatgttttgcttgtggatactgctggacgtttggctatagatgaagctttgatggatgagttaagagcagttaaggatgtcttaaatcctgatgagattttttatgttgctgatgcaatgagtggtcaagatggggttaagactgctgctagttttaatgaagttttaggtatcagtggggtaattttatcaaaatttgatgcagatactaaaggtggagtagccttaggtatagcaaaacaaatcggtattcctttaagatttattggtgtgggtgaaaaagtagcagatttagaagtttttataccagatcgtatagtaagtcgtattatgggtgagggtgatttggcaactttagctgaaaaaactgctgcgattattgatgaaaaagaggctaaaaaactcaatcaaaaaattaaaaaaggtgaatttaattttaatgattttcttaaccaaatggaaagtattaaaaaattaggaagtatgaagtctttaatcggtatgataccaggacttggtggaatggcaaatgcggtaaaagatatagatttggataattctaaagaaatcatacgcattaaagcaatgatttcttcaatgactccaaaagaaagagaaaatcctgatttattaaataatgctagaaagcgtcgtatagcagagggagcaggtctttctcaggtagaagtcaatcgttttttaaaacaatttagcaatgcagcaaaacttgcaaaaagattttcaggtaaaaaaggaatggagagtttgacacaaatgatgagtcaagctagaagacagttttaa

SEQ ID NO: 18218 - DNA, 228 bp, Campylobacter jejuni
atgacagttattagacttacaagaatgggtagaaccaaaagaccattttatcgtattgtagttacggacagtagaaaacgtcgtgatggtggttggatagaaagtattgggtattataatcctatggtagaacctgaagtaattaaagttgatgcagagcgtttagcttattggaaaagcgttggtgcaaaacttagcgataaagttgcttctatcactagcaaataa

SEQ ID NO: 18219 - DNA, 243 bp, Campylobacter jejuni
atggtagagaattttcttagagaatacgcaaaattaattgcagattatcctgaacagattgatactcaaaaaattgaattaagtgaaaatttttttgagattgttctttttgcacataaggttgatacaggtaagcttataggtaaaaatggaaaaatgatcaatgctataaaaaccgtaatctctgcttataagagcaaggatgcaagttcttatagagtaacggtaaaagcacttgagtga

SEQ ID NO: 18220 - DNA, 540 bp, Campylobacter jejuni
ttgagtgaaaaagattttgttcaagttgcaaaacttggtaaaactgtgggtcttaagggttatgtaaaattgcataacctgagcgacttttcttctcaatttaaaaaagatgctactttttttataaaaaacaccaaagaaatgttaaagattaagcattataatgcaaacaattctactgttttatttgaaaattatgaagatatagaaaaggccaaagaattaactaatcttattctttttcagagtatcgagaaaagcagacaaacttgtaaattaaaaaaagatgagtttttttattttgatattttagagtgtgaagtttttgaagaagataaaagattaggtaaagtggttgatatcttggaaactggagcttcttatttatttgaaattcaaagtgatgaaaaatgggttgaaaaaaaatatcctaaaatattttttattccatatttggataaatttgttaaaaatatagatatagaaaaacgacagattttttgcacgcaagatgcttttttaattttagaaaattcatga

SEQ ID NO: 18221 - DNA, 705 bp, Campylobacter jejuni
atgaaatttagtttcgtttctttgttccctaatcttatggaattttactttcaagattctatacttgcaagagcaaaagaaaaaaaacttttcaaacttaatttttataatccaagagatttttctaaaaattcttatcataaagtcgatgattataaaataggtggtggagctggacttttgatgcaagctgaacctatgtatgaggtgctaagaagtattcaagaaaaaaaagaaaatccctattttatttttttaaatccaagtggtaaaacctttaatcaaaaagacgccaaacgcttaagtaaaaaagaacatatagtttttgtatgtgggcgctatgaaggtatagatgaaagagtgcttgaaatttttgcgaatgaagtttttagtataggggattttattttaactggaggagaattacctgcgcttgtaatgtgtgatgcaattttaagaaatgttaacggggttttaggaaatatggaaagtttggaagaagaaagctttgaaaataatttactcgaagcgcctgctttttcaaaaccttttatttttgagaaaaaaaataaaaaattttatactccttcagagtttttaaagggtaatcacgctagaattgcaagtttaaaaactactttggcgtcttgcaaaacgaaattttttcgtccagatttatttttagagcatgaacgcaaaaaataa

SEQ ID NO: 18222 - DNA, 357 bp, Campylobacter jejuni
atgaaaaataaatatatagaacaatttgaagcaaaacaaattgaaggtaaaaatgttccagattttcgtgctggtgatactttaaagcttgcaattcgcatcaaagaaggagataaaacaagaatccaaaattttgagggtatttgtattgctagaagaggtaatggcgtaagtgaaacttttatcgtgcgtaaaattggcgctaataatgttggcgttgagagaatttttcctatttatagtgaaagtttagaaagtattactgttttgcgtcgtggtcgtgtacgccgtgcaagattattctacttaagagatagacgcggtaaagcagcgcgtattaaagagcttaaaaaataa

SEQ ID NO: 18223 - DNA, 3603 bp, Campylobacter jejuni
atgagtcaatttacacacttgcatttacatacagaatattctttgcttgatggagccaataagcttaaagaattagctttgactttaaaagagcagggtgctacaagtgtggctatgacagatcatggaaatatgtttggggcaattgatttttatcaaacaatgaaagcacaaggtttaaaacctatcattggtatagaagcgtatttgcataatcatgatgagttagatgataaaagttctcgtcagcgttttcacctttgtttgtatgcaaaaaatgagattggatatcaaaatttaatgtatttaagttctcaaagttatattaaaggtttgtattattatccgcgtatcaataaaaagcttttggaagattatagcgaaggtcttatttgctcttctgcttgcttgcaaggtgaagtaaattggcacttaaatacttatagtgaaagaaatgtgcgttttggtgcaaaaggctatgaagcagcaaaagaagcggcattatggtataaaaaagtttttaaagatgatttttattttgaaatcatgcgtcatggtataggcgatcaaagaatgatagatgatgatattatcagactttctaaagaattaaatataaaaatcattgctacaaatgatacgcattatacttttaaagaaagagcggctgcccatgaggtttttatgtgtatagccatgggaaaaaaacttaacgatcctgatagaatgcgtcatagtgtgcatgaattttatgttaaaagtcctgagcagatgagtgagctttttgcagatattccagaagctatagaaaatacacaagaaatcgcacaaaaatgtaatttagagcttaatcttggcaatcccactccaccgaattttaaatttacaagagaatatgctaaagatcataatattatcttacctgaagaaacaaaagaatttagctttgataatgatgacatggtttttgaagaactttgcaaaaagggacttgaagagagattaaaatttatcgatgaaagtaagcatgaagaatacaaacaaagacttgaagtagaaattaacatcattaaaaatatgaaattttcaggttatatgcttattgttcatgattttattaaagtggctaaggataaaggtattccagtaggccctggaagaggatcagctgcaggaagtttggtttcttattgtttaaggattacggatttagatcctattccttatagtctactttttgagcgttttttaaatcctgagcgtgtgagcatgcctgatattgatgtggatttttgtcaagacagacgtgctgaagtgattgattatgtgattgataaatatggagcggataaggttgcacaggtgattacctttggtaaacttttggctaaaggggtgattcgtgatgtggctagagtttgtgatatgagtattcaagatgctgatgagcttgctaaacttgtgcctgaagagcttaaaatcactcttgatgctgcttatgaaaaagaacctaaaatcaaagaatttatcgatcgtcatcctaaaggtcttgaagtttgggagtatgcaagagctttagaaggattaaatcgcaatgcgggtatgcacgcagcaggtgttgtaatttctaatgaaagtttatggaagaaaactccgctttttagacaaagtaaaaatgatgaaagacatttggtaacgcagtattctaaagatcatttagaagatgtggatttgataaaatttgactttttaggtcttaaaaccttaacagtaatcaataatgcgatcaagcttattaaaaagcgttacaataaagacattatttgggaaactatagatgtaaatgatagcaaagtttataaaaccatacaaagtggaaatactttgggaatttttcaaatcgaatcaggcggtatgcaaagcttaaatgcacgcttaaaaccagagcgttttgaagatatcattgcggttcttgcgctttatcgtccaggccctatggaatcaggaatgcttgatgattttatcgacagaaagcatggtttaaaaagtatagaatatccttttgacagtttagaaaaggttttagagcctacttatggggttattgtttatcaagaacaggttatgcaaattgttcaaattataggtggcttttctttaggaggtgctgatgtagtgcgtcgtgctatgggtaaaaaagatcctgagaagatgaaaaagcttaaaactgattttgcagatggagcagaaaaacaaggatatgatagagcaaaagctgaggatttatgggagcttatcgtaaaatttgcaggatatggttttaataaatctcactctgcggcttatgcattgattacttttcaaacagcttatttaaaaacttattatcctagtgaatttatggcagcgcttttaacaagcgaagaaaacaatgtggataaaattgctgtttatattgatgagatgaaaaaaatgaatattaaacttttacctccatcgattaacaaagcgatccgtgaatttagtgctttagagcaagatggcaaggatgctattatatacggacttggggctataaaaagtgtgggtattcctgcagttgaaaatttacttgaagcaagacaagatggagaatttaaggatattaatgatttcttaggtaagatagatcccaccaaaataaaccgtagaacattagaaagtcttattaaggcaggggcttttgatgagtttggttttactagaaaagctttgtttgataatatggaaaatcttagcgaagcatcgcgtaaaatggctgaagtaagaaaaaatgctgcaagttctctttttggtgaagaggaattaacttcaggtgttcaagtaaattttactcccaaaaatgaagaatttgaagtgatggaaaaattaggatatgaaaaagaaattttaggaatttatgtttcaggccatcctttagatcgattttatgaacaaattaatgccatagattatgttaaaagtttagattttgaaagtttaaaaaacaatggagaaattttaagtataggtaaaattgaagatttcaaatccatgatgagtaaaaataataagcgttatggtagaattgaaattttggattattattcttcgtttgatgctactgtatttgaaagcaatgtagaagaaatagaaaacatcatcaaagatgaaaatttaaaaaataatgcctatggttttgtattgggatttaaagctgaaggaggggagaagcctagcttttttttaaaagcaattaaagatttgcaaagtcttgaagatggcgagattaaagctataaaaaaatttggagcaaaaaaagattttaaaaataaagaagaaaatcattttaccgcagaacctaaggaatttgaaaaaaatatcatagagctagatttgacaagattgaatagagaattaatctatgaaattcatgaaattgctagaaatgcacataatcctaatgaaaaaaataataaaaaacttgttttaaaagttattagtgcgggatcttgcttgctttatcatacagattttattatctctgatagtatagtagaggaaatttctaataaatatgcttaa

SEQ ID NO: 18224 - DNA, 633 bp, Campylobacter jejuni
atgactttagagcaaattttagaaaaaaccaaaaacgttcgtcttgtagccgcaagcaagtatgtcgatgcaagtataattgaaaagctttttgatcaaggtatagtagaatttggagaaaatcaagtccaagctctagcacaaaaaaaagaaaatcttgatgaaaaaaaactagacataaagtggcattttataggaacgctacaaagcaacaaaatcaatctcttaatcaaacaaaaacctatattatggcactcttgcaatggtattaaaatagctaaagctatggacaaaagacttgattataaattaaatactttattagaaatcaatagtgcaaatgaaaatagcaaaagcggtctagatccaaatcaagccgtagaagaatatttacaaatacaagaagaatgctctaatttaaatctttgtggcgtaatgagcataggatcacacagccaagataaagaaaatattataaaaagctttgaaactacatttaaaatttatgaaattcttcaaaaacatggggctaagatttgctctatggggatgagtaatgattttgaaattgctataaaatgcggatccaacttggtaagactcggaagcattttatttaaaaatcttaagtaa

SEQ ID NO: 18225 - DNA, 816 bp, Campylobacter jejuni
ttgactataaaaaatgctcttatggaagctaaatctagcttaaaaggttatgaaaatgaagcggtatttatactttgcgaatatctaaaaaaagataaagcttggttatttttaaaccaagatataaaaatagatcatgaaccttattttgagcttataaagcgttttaaatctggagaaccttttgaatatatatttgaaaaagtggatttttggggcttagaatttaagataaaaaaaggcattctaatccctcgctacgatagtgaaattttactttttcaaattttaaatttatgcaaaaaaaatacttttaatgggattttagaaataggatttggaagcggaattttaagcattgttttagccaaagaacttgggttaaaaatcacagcctgtgatatcaatcccaaagccttagaattagctttagagaatgcccaattacacaaagtcgatcacttgattgactttaaactttgtaattttaagcaaattaaagaaaattatgattttattttttcaaatccaccttatattaaaaattcatatcctatagatatttgggtgcaaaaagaacccaaagaggctttatttggcggagaaaaaggatatgaaattctagaagaaatcatacatttttcccttgataaaaaagttaaatttttagcttgcgaatttggctatgatcaaaaagaaattttggaaaaaattttatatcaaaataatttcattgttgattttttcaaagatgaacaaggttataatcgtgcttttatagctaaatttacaaatatgcgttatgataaaaaataa

SEQ ID NO: 18226 - DNA, 543 bp, Campylobacter jejuni
atggatacaataaacataggaattttaaccctaagcgatagagcaagtagtggtatatacgaagataaagccactgctgaaattgaaagagtgttaaattcatatataaaaaatgatattatttatcataaagaattaatccctgatgattatgatttgatcattaaaaaattactttatctagcagatgaaaaaaaatgcgatttgattgttacaagcggaggtacaggtccagcacttcgtgatgtaaccccagaagccacggaagccgtgtgtgataaaatgatgccaggttttggagaacttatgcgcttagaaagtttaaaatatgtcccaacagctatactttcaagacagagtgcaggaattcgcaataaatcttttatcattaatttaccaggaaatcctaaggctataaaagaatgcctagagcctgtttttccggctataccttactgtatcgatttgatagaaggtgcttatatagaagcaaatgatgaagttattaaggtttttcgccctaagaaaaaatgtcaaaattaa

SEQ ID NO: 18227 - DNA, 756 bp, Campylobacter jejuni
atgaaaaaaatattaagcattgctctagttgctttagttggtttatttttaggtgcttgtagtgattctaaaaataaagaatcaaatgcaagtgtagaattaaaggttggaactgctccaaattataaaccttttaattataaagaaaactcaaaacttacaggttttgatactgatttggttgaagagattgccaaaaaaaatggtattaaaattgtttgggttgaaaccaatttcgatggattgattcctgctttaaaagctggcaaaatcgatatgattgcctcagctatgagcgcaactgacgaaagaagacaaagtgttgattttaccaaaccttactatatgagtaaaaatctttatcttaagctaaaaaacaacgactctcttcaaacgaaaaatgatttagaaggtaaaaaaataggagttcaactaggaactttacaagaaaatactgcaaaagctatcaaaaatgcacaagtacaaagcaataaagatttaaacatagctgttttagcactaaaaaacaacaaaatcgatgctattgtagctgatcaagatactgctaaaggttttttagctgaaaatccagaattggtaagcttctaccaagaaacagatggaggggaaggctttagttttgcttttgataaaaataaacaaaaaaatattattgaaatatttaacaaaggcatagatgaagcaaaaactgatggattttatgatactttaattaaaaaatatgaattagaataa

SEQ ID NO: 18228 - DNA, 1872 bp, Campylobacter jejuni
atgagtaaagttataggtatagatttaggaacaaccaattcttgtgttgctgtgtatgaacgcggcgagagcaaagtaatcccaaacaaagaaggaaaaaacacaactccttcagtggtagcttttacagataaaggcgaggttttagtaggcgatagtgcaaaacgccaagcggtaactaaccctgaaaaaaccatttattctatcaaaagaattatgggtttaatgatcaatgaagatgcggctaaagaagctaaaaatagacttccttaccacatcaccgaaagaaatggtgcgtgcgcaatagaaatcgcaggtaaaatttacaccccacaagaaatttcagcaaaagttttgatgaaattaaaagaagatgcagaagcttttttgggtgaaagtgttactgatgcggtgattactgtgcctgcttattttaacgatgcacaaagaaaagcgacaaaagaagcgggaacgatagcaggacttaatgtattaagaattatcaatgagcctacttcagcagctctagcttacggacttgataaaaaagatagtgaaaaaattgtggtttatgatctaggtgggggaacttttgacgttactgtgcttgaaacgggcgataatgtagtagaagttttagcaacaggtggtaacgctttcttaggtggtgatgattttgataataaacttatagattttctagctaatgaatttaaagatgaaacaggcatagatcttaaaaatgatgttatggctttgcaacgcttgaaagaagcagcagaaaatgctaaaaaagaattaagttcagctaatgaaactgaaattaatttaccatttatcacagcagatgcaagtgggccaaaacatttggttaaaaaacttactagagctaaatttgaaggtatgattgattctttagtagctgaaaccatcactaaaatcaatgaagtagtaagcgatgcagggcttaaaaaagatgagatcaaagaaatcgttatggtagggggctctactcgtgttcctttagtgcaagaagaagtgaaaaaagcctttaataaagatcttaataagtctgtaaatcctgatgaagttgtggctatcggtgcggcgattcaaggtgcggttataaaaggtgatgtaaaagatgtgcttttacttgatgttactccgctctctttgggtatagaaactctaggcggggtaatgactaagattatcgaaaaaggtacaactattccaactaaaaaagagcaagttttctcaaccgctgaagataatcaaagcgctgtaactatcaatgttttacaaggggaaagagaatttagtcgtgataataaatctttaggaaattttaatcttgaaggaattccaccagcaccacgcggtatgccacaaatcgaagttacttttgatatcgatgcaaatggtattttaactgttagtgcaaaagataaagcaacaggtaaggctcaagagatcaaaatcacaggttcaagcggacttagcgaggaagagattaataacatggtaaaagatgctgaacttcacaaagaagaagacaaaaaacgcaaagaagctgtagatgctagaaatgcagctgatagcttggcgcatcaagtagaaaaatctttaagtgagttgggtgaaaaagttgccgctgctgataaagaaaatattcaaaaagctcttgatgatttgcgtgagactttgaaaaatcaaaatgcaagcaaagaagagattgaaagcaaaatgaaagctttaagcgaagtttctcataagttagccgaaaatatgtataaaaaagatgagccaaacacagcaaatgataaaaagaaaaaagatgacgatgtaatcgacgctgaagttgagtaa

SEQ ID NO: 18229 - DNA, 639 bp, Campylobacter jejuni
atgaatttttggggtattataaaagaagatttttctcagccaaaggcacaagatccagcttttaattcttgtatagaacttttttttaattaccctggagtatgggctgtagtaaattaccgctttgcacattttttttacataagaaattttaaacgcattgctagaatgattagcggaatttcacaattcttaactggggtagatttgcaccctggagcagaacttggaaggcgtatttttatagatcatgccaatggagtggttataggtcaaacagcaattatagaagatgatgttttaatttatcaaggcgttactttaggtggaacaagccttgaaaaaggtactaaacgccatccaaccataaaaaaaggagtgatcataggctcaggcgcaaaagtgcttggcaatatcaccataggagaaaatgccaaaataggctcaaatgctgtagtggttaaagatataggtgcaaatttaactgccgttggaattcctgcttatattatcgaagagcgtaaaaataaaaacattagagccatagatgcaaattgcgatgacaaactagaaaagttagaaaagaaaattttagaacttgaaaatcttatattaaaacaacctgaatcacaaaaataa

SEQ ID NO: 18230 - DNA, 1227 bp, Campylobacter jejuni
atgattaacgctttaaaaggaatgaaagatttattagataaagatgcatattattatgaaaaagtgattaaaatctgcgaagaagtagctaaaaactatggctttacttttatcaatacaccgcatttagaactttgcaccctttttaaaagaagcgtaggagaaagttctgatatagtaggtaaagaaatgtatgaatttatcgataaaggcgaaaatcatgtttgcatgcgtcctgaaggaactgctggggtggtgcgtgcctatatagaaaaaaaactcgataaaaacactagtgtgaaaagatggttttattatggttctatgtttcgttatgaaagacctcaaaagggtcgcttaagagaatttcatcaatttggagttgaaagccttggcatacctaatgtttatgaagatgcaagcattattttaatgctagtagaaattttctcacgccttggtattgattttaaacttcaacttaattctttaggctgctcacaatgcttgccaaaataccgcgataggctcgttgaattcttagattccaaagaaggtttttgtgaagattgtttgcgtagaaaaaatttaaatcctattcgtgtcttagattgtaaaaatgagcattgtcaaaatttgcttgaaaatgctccgcttttgatcaataatttatgcacctcttgccaaaaagactttgaaacactgcaacaaattttaaaggataatggagttaaatttgagttagattcaaaacttgtgaggggtttggattattattctaaaacggcttttgaatttataagcgatgaaataggagcaaaggctgctatcgcaggtggaggacgctacgatagacttatagagtatttaggtggaaaaagtggctatggtataggttttgccatgggtatagaaagaattataactattttagaacaaaaagaagaaaagattcaaagagaaggaatttatctttgtgctatggatgaaatttatatccaaaaacttttgcatatcgctacaaatttaagaaaagaatataaagtacttttaagctatgaagcaagaaaactagccaaacatcttgaaaacgcggataaaaataatactgaaatttttctttgcatgggagaaaatgaagcacaaaatgaaagtttgttttataaaaatttagcaaaaaaagaagaaaaaatgattaaaatttcagacttaaagaaggttttatga

SEQ ID NO: 18231 - DNA, 579 bp, Campylobacter jejuni
ttgtatgtagtttttgaaggtattgactgcgtaggaaaaagtacgcaaatttcacttttaaaagaaatttataaagacgccattttcacactcgaacctggcggaacagaacttggaaaacatttaagagaaattttacttaataaaactcatcctattaacaaaagagctgaactcttgctttttttagctgatcgtgctcaacattttgaagaaatcttaaaaaccaatcaaaacaaactcattattagcgatagaagttttatttcaggcatggcttatgccaaagattttgaaaacgatttgctttttgctttaaatagttttgctttagaaaatttttttccacaaaaaattatctttttaaaaggagatgcaaaccttatccaagaacgcctcagtcaaaaagaactagatagtatagaaaaacgtggcattgagtattttttaagcgtgcaagataaactcgaaaaagtgcttcattttttaaaagaaaaaatttctgtagaaattttaacacttgacgcaaaagaaagtaaagaaaaattacaccaacaaataaaggaatttttacaatga

SEQ ID NO: 18232 - DNA, 777 bp, Campylobacter jejuni
atgaatattaaaaaaatatttttaagtgttttatttacaattagccttagttttggggcagataaaaccataatcataggtgcaacaccaacgccttatgctgaaattttaaatttctctaaacccttatttcaagaaaaaggttggaagttaatagttaaggaatttaatgactataatatacctaacatcgctttaaatgaaaaagatttagatgcaaatttatatcagcataaaccttttttagatgattttaatacccacaaaggaacaaaattaagttctttaggtgctattgttttagttcctatggctatatattctaactccataaaagatataaaagacattcctaatggtgctaaaatcgctatacctaatgatgctaccaatgaaagcagagctcttgatttactagctaaagcaaatttaatagagtttaaaagtcaaagcacccttaaaacccctattgacataagtaaaaatccaaaaaaacttaaatttatagagcttaaagccgcacaacttccaagagccctaaatgatactgatttggctattattaccacaaactatgctcttggagcaggcttaaaccctttaaaagatggtatttttatggaagataaagatagtttatatgctattgttttagctacaagaaaaggtgaagaaacaagtcaaaaaagtcttgttattaaagaaattttaacaagcgataaaattaaaaattttatcatagaaaaatacaaaggctctgttatccctactttttaa

SEQ ID NO: 18233 - DNA, 771 bp, Campylobacter jejuni
atgaatttatttaaaattattatactcgcttgcattctaaatttatctagcctatttgcacaaaacattactataggagccactccaaatccttttggtagcttactagaactaatgaaagatgattttaaaaacaaagggtatgagcttaaaatagtagaattttcagactatattttgcccaatcgtgcattagaggaaaaagaacttgatgcaaatttatatcaacacaaaccttttttagaagaatacaacctaaaaaaaggttcaaatttaattgcaacaacgcctgtacttatagctccagtaggagtttatagtaaaaaaatcaaaaatttagaaaatcttaaagaaggtgctagagttgctatacctaatgatgcgaccaatgaaagcagagctttagagcttttagagaaagcaaaattaatagagcttaacaaaaatactctaaaaaccccattggacataaacaaaaatccaaaaaaacttaaatttatagaacttaaagccgcacaacttccaagagctttagatgatgttgatattgctataattaattctaatttcgcacttggagccggtctgaatccaagtaaagatactatttttagggaagataaaaatagcccttatgtaaattatgttgtggtacgctcagaaggtaaaaatagcgaaaaaaccaaagtaattgatgaaattttaagaagcgataaatttaaagccatcattaatgaacattataaagatatattaatcccagctttttag

SEQ ID NO: 18234 - DNA, 774 bp, Campylobacter jejuni
atgaaaatcaaatctttatttatagcaagtattttaacattaagtcttaatgcaaatgcattagaaaccatcacagttgcagcaactcccgtccctcatgctgaaatcctagaacaagtaaaacctgatttagaaaaacaaggctataaacttgaaatcaaagaatttacggattatgttttgcctaatctagctgttgataacggagaagccgatgcaaattttttccaacatactccttatttggaagaatttaataaaaacaaaggcaccaaacttatcaaagtagctgccatacacatagaacctatggctgtttactccaaaaaatacaaaagtctagatgatattaaagaaggggttaaaatcgccattccaaatgatccaaccaatgaaagtagagctttagatattattgcaaaaaaaggtttggtaaaatttaaagataaggctttaaaaacacctcttgatattatagacaatcctaaaaaaattaaatttgtagaattaaagcccgcacaacttccaagagctttgaatgatgttgattttgctgtaattaattccaactacgctctctctgcaaatctaaatcctgcaaaagatagcgtatttatcgaagataaagaaagcccgtatgcaaacattcttgttgtaagagtgggacatgaaaacgatccaaaaatcaaagccttaatccaagctctacaaagtgataaaatcaaacaatttatcatagaaaaatacaacggatctgttttacctgctttttaa

SEQ ID NO: 18235 - DNA, 912 bp, Campylobacter jejuni
atgaatgaagaaaacatctctattgtcagtgctttttttagtagaatttctcaattttttaatgaattttcttggcaggatattaaagaagtgagtttaagttctatcacgagtttcaatgaaaattatgaaaacattttaaaacctgcacttaatgaaacaatttatatgagtttaatggctgtactatttggatttttattggctatcattcctggaattttacttgctatttgggataaaaatggaattaaagaaaataaaatcgcttatagtattttagattttattaccaatatattacgcgcctttccatttttaattcttatagttgttcttttaccactttctaaaatcatagtaggcacaagcataggtacaaatgctgccatagttcctttagctatcggaatagctccttatttggcaaagatgcttgaaagcgcttttaaagaaatagacaaaggaattatagaagcagcaaaaagttatggtgctagcaatattcaaattatcttcaaggttatctttagtgaagcccttcctgctataattagcggaattaccctaactttgatctttaccattggtttttctgctcttgctggaactgtcggtggtggaggattaggagatgtagctattcgctatggttatgaaagatttaacaaagaagttatgattcaaactgtagttattttacttatattagttcaattagttcaaattctaggtaatttattttatacttgggctaaaaatagtaaaactacatatatcattgccactctattgattttacttggagttagtatagttatcaatataaacaatgatgaaaatttcttttggcaagtaattgtttttatcttatttttaggaagtttgctttataaaggtttcaaaaaataa

SEQ ID NO: 18236 - DNA, 2613 bp, Campylobacter jejuni
atgtatgataaaaatttagaaaaagagtattatcaaatttgcgaagaacgcggatattttgaaatcgatggcaataaaaccatacaagaaaaagataaaaatttctgcattatgatgcctcctcctaatgtcactggagttttacacataggacatgctttaacttttactctacaagatattatgacgcgttataaaagaatggatggctataaggttctttatcaaccagggcttgatcacgcaggtattgccactcaaaatgttgtagaaaaacaactccttactcaaggcattaaaaaagaagaactaggtagagaggaatttatagaaaaagtctgggagtggaaagagcaaagcggtggaaaaattttagaccaaatgagaacactaggcatcactcctgcatggagtcgcttgcgttttactatggatgaaggtttggttaatgccgtaaaaaaagcctttgtagaactttatgataaaagacttattgtacgtggaaactacatgataaattggtgtactcatgatggcgctttaagtgatatagaagttgaatacaaagaaaacaaaggaaaactttatcatattaaatactttttaaaagatagcgatgaatttttagtagtagccacaacgcgtcctgaaactttttttggcgatactgcagttatggtgcatcctgatgatgaacgctatgctaaatttgtggacaaagaagtgattttgcctataagcaaaaaagccattaaaatcatagccgataaacatgtagaaaaagaatttggaacaggagttgtaaaagttactcccgctcatgacatgaacgattatgaagtaggacttagacataatttagattttataagtgtttttgatgaaaaaggaattttaaacgagcattgtttagagtttcaaggtttagaacgcttagaagcaagagaaaaaatcgtagccaaacttgaaagtcttggttttatagaaaaaatagaagagtataacaatcaaataggatattgttatcgttgcaacaatatagttgaaccttatatctccaaacaatggtttgtaaaaaaagaaatcgcccaagaaagtatagaaaaagttgcgcttggagaaagtaaattttacccaaatcactggataaatagctttaatgcttggatgaaagatttaagagattggtgtatttcaagacaactttggtgggggcatcaaattcctgtgtattattgcgaatgctctcatgaatgggcaagccaacatacgcctaaaacttgtccaaaatgtcaaagtcaaaatttcaaacaagatgaagatgtgcttgatacttggttttcttcaggactttgggctatgagtactctaggctggggaaatgaaaattggggtaaagataaaatttggtctgaaaaggatttaaaagatttttatcccaattctttactcattacaggttttgatattttatttttctgggtggctagaatgatgtttcaaagcaccaatgtcttacatcaacttccttttaaagatatttatttacatgctcttgtgaaagatgagcaaggtagaaaaatgagtaaaagccttggaaatgttatcgacccaaatgaaagcattaaagaatatagtgctgatattttacgctttactttagcacttcttgctatacaaggacgcgatattaaacttagcaatgataaacttttacaagttagaaattttacaaataaaatttataatgctaaaaattatctgcttttaaatgaaagtaaatttgaagatttggaaaatatcacacttcattcagaattagcaaaatatatttatgccaaatttcaaacttgtgttaaggatgtaagagaaaatttagacaattatcgctttaatgatgcggctaatactctatataaattcttttgggatgatttttgcgattggggtatagagcttagcaaagccgaaaaatcaagcgttaaagaacttggtagtattttcaaagaagctttaaaacttttaaatcctttcatgccttttatcagcgagtatttataccacaaactaagcgatacagaacttaaaacaagcccttctattatgataagcaaatatccaaaatttaaagaacaagataaaaatatagaaaaaatcttttctttgctcatagaaagcatagttagtatccgccgtgctaaaagtttaatcgatcttggaaattctaaaatagaaaaagcttatatcaaatttaacgataaaaaaatcaaagatgaaatcaaagcttatatgaattttatcataatgctcgcaaagtgcgagcaaatagaatttagtgaagaaaaattaccaaaggcaatatgtgatgttagcgagaatttagaaatttttattacgcttgaaaatgttgatttaagtggtattttaacaagacttgaaaatcaaaaaaataagcttgaaaaagaaagtttcaagcttaactccatgctttcaaatgaaaaattcatcgctaacgcacctaaagaggtggtggagcaaaataaagaagctctagaaaatttaaaaattcaacttgaaaaaatatcagttgaacttcaaaatctaagaggttaa

SEQ ID NO: 18237 - DNA, 1119 bp, Campylobacter jejuni
ttgcaaatatcgaagataagcttaaaaaataatcccgatttacagtttatcgctgagtttttaaagccttataccaaacgagcgtatttggttggaggtagcgttagggatttgtttttaggtttaaaaatttgcgactatgatatagagctttatgatataaaacctaaagattttgaaaagattatgcaaaaattgggcgcacaaggctttggaaaaagtttttttgtatataagtttaaaaattatgatttagctcttgctagaaccgaaaataaaataagctatggacataaaggttttgaagttcaaatttgcaatgatgaaaaacttggcgccaaaagacgcgattttaccataaattctatgatgattaatctttttaacgatgagtttttagatttttatggaggattaaaagatctaggagtaggctttttaaggcatattgataaacaaagctttcaagaggatagtttaagggtattaagagcagtagtatttgcctcaaggtttaactttaagataactagtgaaagcttgaaattgatgcaaagtatggatataactgatcttagcaaagataggatcaatgcggagctttgtaaattctttaaaagtcctagacttgatgttggctatagatatttacaagaacttggcttagagaaacaggttttcggctttgagagtgtttttaagagttcggaatttcaaaatttactcagacaaagtagagaatttgtaaaaagcgatgctttattcttgtatttgtatttgaatttttttaatttagaaaaagatatattttttaaaagaactaaacttaaaaaagaatacctaaaatacgcaaatcaagctttttatcttgatgatataagtgattttgaactagcaaaaattgcttttgaaatgcctttgaaggaatggcttggactttggagtaaaaagcgtattgagcaagctaaaagattagggctttatgagaataagtttgaaagtaaaattttagcaaaagatttcataaatgctggattttgtggtaaaattcttggtttaaagcttcaagaagcaagagagaatgaattaaaagaatatataaaaggtttagctaaatga

SEQ ID NO: 18238 - DNA, 825 bp, Campylobacter jejuni
atgatttctgtattaaaaatttgcaccaaagatcaaaaaggtttaatttatagaatttctgatgttatttttaaatatcatatcaatatagtaaaaaacgatgaatttgtaggtgaaggaatgtttttttttcgtgctcttttagaaggtgagtttgataaagaagcttttataggaacgcttgaggctatgcttggacaagaagccttgatagagctttgcgagaagagaaaaaaagatattgttgtttttgctactaaagaaagtcattgtttgggagatttgctaataaagcattatagtaacgaacttgaagcaaatatcaaagctgtgatttcaaatcacaactctttaaaggatttagttgagaaatttgaaattccttatcattttatcagcgctgaaaatttagatcgtaaagagcaagaaaatcagattttaaaatgtcttgaacaatataaatttgattatttggttttggcaaaatatatgagaattttatctcctgattttgttaggcattttgaaggcaagattataaatattcaccattctttcttacctgcatttataggagcaaatccttataaacaagcctttgaaagaggggttaaaataattggagctacggcacattttgtaaataataatcttgatgaaggtcctattatcactcaagctgtttcgcctgtaaaccatgaatttacttggcaagatatgcaacaagcaggtagaaatatagaaaaagatgttctttcaaaagcacttgatttggcttttgaagatagaatttttatacataataataaaactataatattttaa

SEQ ID NO: 18239 - DNA, 1020 bp, Campylobacter jejuni
atgaatgaaagtattttaaaaagtttagactcaaatgaaaaagaaaccctacaaaaaggcttagaaagtcttatagaacaaacttatgtaatagaaaatgaatacaaaactttaaatgaaaactataactccttacgcgcaatggttgatgagattatagaggtgttgcctagtgcgctttggattttagataaagaaaaaaatattattttacaaaatcaagaagccttgaaaaatccaaaattacttagtatcattagtcttgataaaattcgtgatgagcttgaatttgaaggtaggttttatgcggtaaaaatcatagcgcataatgaaaaaactatagtttcagctacagatattagcgatgaaaaacgcaatgaaaggcttgcaagcatgggtagtgtagcggctcatttggcacatgagataagaaatcctattggatctatatctttacttgcttcaaccctttttgctcgtagtgagcttaaaaataagcatatagttcttgaaatccaaaaggctattgctagagtggagcgtatcgtaaattcaactctactttttactaagggtgtacacatcaatgctttaaattttaatcttttagagttaaaagaagagtgtgaaagtgccattaactcttataatttcacttctcaaatagactttgaaatatcttttttggataagcagatttgtgctgataaagctcttcttggtttggttttgcaaaatttgatttataatgctattgatgcgatagaagaaagcgaatgtgaaaagcctatgattaaaattttagcaagttatgataatgaaaaaatatgcatcagagtgtatgataatggttgtgaaataaaagatgagaaattggtttttgaagcttttaaaacaacaaaacttaaaggcaatggacttggcttgtctctttctaaagaaatcataaacgctcataagggagagttaagttttcaaagtgatcctaagaatttttattttaccttacctttggtgtga

SEQ ID NO: 18240 - DNA, 1428 bp, Campylobacter jejuni
atgcttatcaatactctttattttatcaattctttattttttaatttttgtatagctttttatcttatgagtgctttacaatggtattcttataaatttaaacgcgtgttttttcattatcataaacctttgtggcatttgtattttttatttattccttattttttattcttagcttttcctttatactctttggtatattttgcattgatccatactccgattttgtatttttggaataaaggcatagataaaaagcttgtttttacaagtaaggttaaatggttttttgtttttgtttttgtttataatgctatttttaccatccttgctttgcgtttttcttttctttttaatctttttagtcttccttttgctttattgagtcttaaaatttatgagttttttacaaatttatattataaaaaacaagccaaagccaaactaagagccaatgaaaatttaaaaatcatactcattaccgcaagttttggaaaaacaagtattaaaaattttttatacgaacttttaaaagatgactttaaaagctacaaaacaccacgctctgtcaataccttactaggtatagttgctgatatcaatgctaatttaagtcaagatactcaaatttacatagctgaagcaggcgctagacttaaaggcgatatcgatgaaatcacgcattttttacaacctcaaatcagcatagtaggagagataggcaatgcacatttagagtattttaaaagtgttgaaaatatccgctcaaccaaacttgaagccttaaattccgaaagactagaaaaggcttttttacactctagcacccaaaaagaagaagataaactcatcagcctttatgatgataaattaagtcttattcattcaagtcttgaaggtttagaatttaaagtcgatatagaaaataaatcctatgattttaaaagtcaaattttaggggattttaatgcgcaaaatctttgtgtttgtatactttgtgctcattatcttggcataaaactagaaaaaattcaaaagcaagttttaaatataaattccgtagaacatcgcttgcaagtgctttcaagagagcctaaatttatcatagatgatggttttaatggaaattttaaaggtatgagcacaagctataaactttgtaaaagctataaaggacgcaaagttttagtaagtcctggtatagtagaagtaagcgaagaagaaaatataaaacttgccaaaatcatcaatgagtgttttgatcttgctatcattagtgcacaaatcaatgctgaaattttcaaaaaagagttaaaaataaaaaccattatacttaaagaaaagagtcaactagttcaaactctagctaaagaaacaaaacacggagatttgatactcttttcaaacgatgcacctagctttatgtga

SEQ ID NO: 18241 - DNA, 720 bp, Campylobacter jejuni
atggctcaaactcaactttcttataaaaacaaaacttatcaaatttcttatgaaattttaggtgatctttccttaccgcaaatacttatcttacacggctggggagctgataaaaaacttatgaaacaaagtttttgtccttttttgaaagatttttgtcaaatttatatggatttagcaggttttggaaattcaagcgtggaagaaattttaaacactcaagattatgccaatatcacagaactttttttaaaacaaaaaaaactcaatgtctgttttttcatggggcattcttttggtggaaaagtaagtaccctactcgcaaaagaaaaagacaccctaatcttactttcaagtgcaggaattttggctaaaaaatccctaaaagtgcgttttaaaatccgtatttttaaaattttaaaactctttggtttgggaaaattttatcgctattttgctagtaaagatggagcaaatcttagtcctataatgtatgaaacctttaaaaaggttgttgatgaggattttagtgaaatttttgccaagcaaaaggctaaaagcttgattttttggggaaaaagcgatgaagctacgcctttgtattgtggtgaaaaaatgcatcaatttttaaaaaatagtactttttatcctttagagggggatcattttttctttttaaaacactctgctttcatagctcaaaaaatcaaggaaatttaa

SEQ ID NO: 18242 - DNA, 1041 bp, Campylobacter jejuni
atgaaatttgcaatactttttggcggaaattcttatgaacatgagattagtatagtaagtgctgtagtgcttaaaaaagttatcaatcaaaatttagaatttattttttgtgatgaagaaagaagattttatcatatcccaagtgaaaaaatgaattctaaaacttttagcaccaaagcttataaaaaagaaaaagaactcttcatcaaacaaggaggtttttttagcaaaggctttttaaaagaaaataaactagagtgcgaatgcgtgatcaatcttatccatggtagagatggagaagatggaaaaattgcggctttatttgagttttattctattaaatttataggacctaggcttgaagctagtgtattatcttttaacaaagaacttaccaaactttatgccaaaagcgttggagtaaaaacacttgattataccatactaagaaaaaatcaaaactctaaagaaaagcttagttttccttgcattatcaaacctgcaagacttggaagtagtataggtattagtatagtaaaagatgaaaaagatttagaatacgccaaagatgtaggttttgaatttgacaatgatcttgtagtagaagaatttaaaaacaatatcaaagaatacaatcttgcaggatgtatgatcaatgatgagtttgttttttccattatagaagagccaaagaaaaaagaatttttagactttgaacaaaaatatcttagcttttcaggacacaatgaacttatagaagcagatttaagcgaagaattaaaagaaaaactcaaagatagctttaaaaagatctacaatcctttgtttaaaggtgctttaatacgctgtgatttttttatactggataatgaaatatatttaaatgaaatcaacccaaaccctggttctttggctaattatctttttaaagattttaataccactttaaacgctttagctgatcaaatttcacttgaaaaaatgataaaaatcaattacaacttccttcactccattaacggacaaaaaggaaaattataa

SEQ ID NO: 18243 - DNA, 1452 bp, Campylobacter jejuni
atgaagagtttagtatttaaaaattttattatcaatgctttaggaattttattttcaagaattttagggcttgctagagatgttttaatagcgctttttttaggagcagggctttatagtgatattttttttgtggctttaaaaatgcctgctttttttagaagaatttttgcagaaggggcttttggacaaagttttttgcctaattttgtaaaagcgaaaaaaaagggagctttttgcgttagtgtaatgatgcaatttagccttatagtttttttattttgtcttttggtaagttttttttcctctttttttactaagctttttgcttttgggtttaacgcagatactatagctttagcggctcctttggtggcgattaatttttggtatttgttttttatttttttagttacttttttaggagctattttaaattatagacaaaaatttttcattacctctttttctgcggcattatttaacttaagtattgttatagctgccttttttgtggataaaaatgcaccgcaaaatacactttattatttttcttatgcaacggttttaagtggggtggcacagcttattttacatttgcttgttttaaaaaacaatcctgtaatacgtgctatgactttaagtataaaatttaaaaaaaccaaggcgaaattacaaggtttttatggcaatttttttcatggagttttaggttcttctgcgactcaatttagctcattgcttgatacaactatagctagttttttaatgagcgggagtatttcttatctttattatgcaaatcgtgtcttccaactccccctggcactttttgctattgctttaactcaagtttcttttccaaaaattttaaaacatttaaaaagtgatcaagaaaatttagccttaaaatttatgcaaagagcattagcgcttttaagcattttgcttattgcttctagtattgtaggttctgtgtttgctttggaaatttcaaagcttttatttgaaagaggaaatttcactcacgaagatagtgtgattacggcttatgttttgattgcttatcttatagggcttttaccttttggtttgcaaaagcttttttctttgtggctttatgcaaaatttaaacaaaaaacagcagcttggatcgcggtaaaatctttaattatcagtgctttatgttctatggcttttatatttttgattaaagatgaaagtttaaaggttattgcagtagcactttcaagctctattagtgctttttatttgcttggagctaatatcaaagaatttggttttaagaaattttttgctttaatatctattaaaatttgcttattggttatagttgctttgattgtttttacgatcttacttattttgattaaaccttatattttaagtttttttataggaatttttacaagttttaaaggagttttttaa

SEQ ID NO: 18244 - DNA, 1389 bp, Campylobacter jejuni
atgagattattagatagtgtaacaaaagagaaaataaaacttgataaaaaagatattagtatttatttatgcggacctacggtttatgatgatgcacatttaggacatgcaagaagtagtgtttgttttgatcttttgcgtagggttttacttgctcaaggcaatagggtaaaatttgctagaaattatacagatattgatgataagattttgaaaaaaatggctcaaagtggtcaaactttagaggaaattacggaattttatatcaaaagttatgaagaggatatgagggttttaaatgtattagatcctgattttaaacctcgtgcaacgcattatataacagctatgcttgatttgattaaaaagcttgctaaggatgggtttgtttatactctagaagatggaatttattttgatacaagtaaagatgaaaaatatttaagcctatcaaatcgcaatttagaagaaaatatctctcgtctaagtaatgaagtgcaaaaaagaaatgaaagcgattttgtgctttggaaatttgatgaaaatttttacgaaagtgaatttggcaaagggcgtccaggttggcatactgaatgtgttgctatgattgattctatttttgaaaatacccttgatatacatgctggagggatagatttgctttttcctcatcatgaaaatgaagctgcgcaatgtcgttgtggatgtaagagaaaattagcaaatatttggcttcacaatggttttgtaaaaatcgatggcgaaaaaatgagtaaaagtttaaataatagtttttttataaaagatgctttaaaagaatttatgggcgaggctttaagattttatcttttgagttctcattatagatctcattttaattattctttatcggatttagaaaatgctaaaaaacgtttagataaattttatcgccttaaaaaaagattggatttaggtgaaatttctgattttgatgttttaaatgatattggaataaaaagcgaaattgctaagcaaattttagagattttaaatgatgatttaaatgtttctaaagccttagctcttttggatgattttatcagtagtgcaaatttagagttggataaagaaagcaaaaataaaattttaaaacaaaatatcaaagaagctttaagtgagctagctaaaatttttggctttggttttatggatgcaactttatattttcaatggggtgtaagcaaagaagaacgagaagagattgaaaagttaattttagaaagaactgaggctaagaaaaacaaagattttaacacagctgatgcaataagagagcaattaaatagtaaaaaaatcactcttttagatactccaaatggaacaatttgggagaaaataaatgcataa

SEQ ID NO: 18245 - DNA, 1743 bp, Campylobacter jejuni
atgcataatgagatgaatttaaaagaggttttaatacgctttaagcccttttataaaagatattggaaacaatttgctatagctatttttggtatgattttagcaagcggaggaactgctggaagtttttatgctttagagcctattttaaattatattttcgttgaaaaaaatgaagctttactttatacagtaccttttttgctagtattgatgtatttttttaaaaatcttggaacttatttacaaagtttttatgtttcctttataggaacagatatgttaagagtattgcgtgctagggttttaaaaaatgttttacgcttggatatggatttttttaaacgctatagaagcggagagcttgtaagtcgttgtactaatgatattaatgcacttcaaagcatagtatcaaacattattcctgatttttttagagagcttttaactgctataggactgcttgcggtagtcttgtatcaaagtcctactttggctttttttgctttagtgattttgcctttagctatttttcctttggtatggtttgctaaaaaacttaaaaaatatgcaagaaatatacaagaaacaaattcggatttactttcttatttgggtgaaattttttcaaatattgaattgatcaaagctaatgataatgaaaaaaaagaaagtgataaatttgctaagcataatgatactttatgtaaattaaacctaaaatccgcacgtattgatgcacttacaagtcctttaatggatatgatgggttctgttggggttgctgtggtgattattgtagggggtagagaggttatcaatggttctatgagtgtgggaagttttatcagttttgtttcggcactttttgcgatatatactcctttaaagcgtctttcgtctttatatggaaaacttcaaggtgctgttgcggcaagtgaaagaactttttatttattggatttagaacctcaaattaaaggtggaagcaaagaattaaaaaacattgaaaaaattagctttgaaaatgttgaatttgcttatgaaaacccgcataaaagtgttttaaaaggcgtaaattttgattttgttaaagggcaaatgcttgctcttgtagggacaagtgggggtggtaaatcttctattattaatcttttgatgtatttttatgaaaagcaaaaaggtaaaattttactcaatcaagaagatattagcacttttaccatagaaagcttacatgctaaaataggacttgtaacgcaaaatatttatctttttaatgatagttttgctgcaaatattgcttatagcgaagagttagaagaagaaaaagtcatccaagctttaaaattggccaatgcttatgaatttgttaaagaaatgggcgggatttgggctgaagtgaaagaacatggtaagaacttaagtggagggcaaaaacaaagaatagcaatcgctagagctttatataaaaatcctgatgtgcttatttttgatgaagcaacttcagctttggataatgaaagtgaaaaagcaatagttaaaactatagaaaatttaaaacaagatagattgattttagtggttgcacatcgtttaagcactatagaaaatgcggataaaatagtagtattggataagggtaaggtattggcaataggtaaagatgaagagcttttgcaaacttgttctttgtatcaaaaatttaaaagcaaagaaaaaacaaagcccagctttagttaa

SEQ ID NO: 18246 - DNA, 1251 bp, Campylobacter jejuni
atgattgcttatgaaaaaattcaattaaaaaacaagcttgaagtttatgctttgcctgtaaataaaaatagcgatgtgattagcgttgatattttttataaagtgggttcaagaaatgagatcatgggaaaaagtggcatagctcatatgttagaacatttaaattttaaaagtactaaaaatttaaaagctggcgaatttgatgagattgttaagggttttggtggtgtggataatgcaagcacaggttttgactatactcattattatattaaatgtgcgaagaaaaatttagataaagctttagagctttttgcagaacttatggcgaatttaaatttaaaagatgaagaatttcagcctgaaagagcagtggttttagaagagcgtagatggagaacagataataaccctttaggatatctttattttaggctttttaatcatgcatttatgtatcatccttatcattggactcctataggtttttttaaggatatagaaaattggagtattgaagatattaaagaatttcacagtatttattatcaacctaaaaatgcgattttacttgtaagtggcgatatagaaagtaaggaagtttttgagctttcaaaaaaacattttgaaaagattaaaaatactaagactatacctaaaattcacacaaaagagcctaagcaagatggagtaaaaagaatatatttacataaaaactcagatactgaactattagcccttgcttataaaattccaaatttcaagcacaaagatatacctgctttaaatgctttatccgagcttttaggaagtgggaaaagttctttaatgagtgaaattttgattgataaattaaatttaatcaatgattattatgcttatgttaatgattgtatagatgaaaatttatttatttttatttgtaattgtaaccccaatgttaatgcagaaaaagtagaaaaagagcttttaaaaatcattgataaacttaaaatgggtaaaatttctcaaaaagatttgcaaagagtgaaaaataatgtcaaaagtgattttattttctcacttaacaatgctagtgcagtggcaaatatttatggttcatatctagcaagaggagatatcaatcctttgttaaattatgagaaagatatacaaaatttggaattaaaagatttgatttcttgtgctaaaaaatattttattcaagaaaattcaactacggtaattctaagaaaggattcaaatggataa

SEQ ID NO: 18247 - DNA, 741 bp, Campylobacter jejuni
atggattggcaaaagattacggaaaaaatgtgtgattttatacaagaaaaagtgaaaaattctcaaagtcaaggtgtggttttggggcttagtggcgggattgattctgctttagtagcaacgctttgtaaaagagctttaaaagagaatgtttttgctcttttaatgccaactcaaatttcaaacaaagccaatcttgaagatgctttaaggctttgtgcggatttaaatcttgaatataaaatcatagaaattcaaagcattttagatgcttttataaagcaaagtgaaaataccactctagtatctttgggaaattttgcagcgcgtattagaatgagtttgctttatgattattctgctttgaaaaattctttagtcataggcacttctaataaaagcgaattgcttttaggttatggtacgatttatggggatttagcttgtgcttttaatcctataggatcgctttataaaagtgaaatttatgccttagcaaaataccttaacttgcatgaaaatttcatcaaaaaagctccaagtgcggatctttgggaaaatcaaagtgatgaggcggatttaggtttttcttatacaaaaatcgatgaaggtttaaaagctttagaaactaatgatgaaaaacttttaagaacacttgatccttctttgattgctatgttaaaaaatcgcatgcaaaaaaatgcttttaagggaaaaatgcctgaaattttggaaatttaa

SEQ ID NO: 18248 - DNA, 1413 bp, Campylobacter jejuni
gtgaaattggtcgagagtagaaatgtaaataatgtatcaagttttaaggaagctttgattaacccaaacgctccagaaggagggctttactcacctttaaatttgcctatttttgaaggagaaaaatatgccaatttgtcttataaagattttgctttaaagcttatagaaagttttggttttggcgaagaagagctttttaaaaaggctttgaaaagttacgaaagctttgatgataaaaatacacctatttctttgcaaaaaatctctgaaaaaacctatattaacgagctttggcatgggcctacaagagcttttaaagatatggctttacagccttttggcgtgcttttaagcgaattttcaaaggataaaaatattttaattatctgtgctacaagcggcgatacagggcctgcaaccctaaaaagttttgaaaatgcaaaaaatgttaaagtagcttgtatgtatccaaaaggtggcacaagtggagttcaagagttgcaaatgcgagctttagataaggataacttgaaagtttttgccatagatgaggattttgacgcagcgcaacgcactttaaaagaattgcttttttcaaaagattttcaaaatgaaattaaagctttaaattatgagctttgcgcagctaattctgtaaattttgggcgtattttatttcagattatttatcattattatgcgagtttaaaactttttaatgagtttttagaagaagtacaaatcatcgttccaagtggaaattttggcaatgctttaggagctttttatgctaaaaaaatgggagctaaaatttcaaaaatcaaaatcgcttcaaacgcaaataatattttgagtgaattttttaatcaaggcgtttatgatttgcgtgaaaaaagtcttaagaagactatttctccagctatggatatacttatttcatctaatatcgaaagacttttgtttgcgaaatttaaagataaaagaactaaagaactgatgaatttgttaaaaaatgaaagatattttaaacttgaaaaagaagaattacaaagtttgcaagaagattttgaggcggatttttgcaccgatgaagaatgtatgcaatttatcaaacaaagcaagattttaatcgatccgcataccgcaacttgttttaaaatgcttgatcctttaaaacctagcattatcacttctacagcagaatggacaaaatttactccaagtatgataaaagctttatatgatagggattctaagaatgaaaaagaagatttaaaatttatagctaaagagtttaatgtccaagttaaagatgaaattttggctttatttgatttgaaaaatagcgatgaaaaggtatttgaagccagaaatataaaaaaagaaattttagattggatgcaaaaatga

SEQ ID NO: 18249 - DNA, 771 bp, Campylobacter jejuni
atgaaaaaaattattttgatttttatctctttttttgctttaaatttgagtgcaaaagatttggttgtaggaatggagcttggatatccgccttttgaaatgagcgataaaacaggcaaagcaagtggaattagcgtggattttttagaagcttttgcaaagaaaaacggctataaacttgtagtaaaaaatatcgcttgggatggtttaatacctgctttaaaaacagccaagatagatcttattatgtcctctatgacaattaccgataagagaaagaaagtggtggattttagcattccttatgctaaggcaaatttggctattttaactcctttgaactctgatattacaaatatcaaagatttagataaaaagggcaaagttttggctttaaagcgtggttctacagggcatttatatgcggttaaaaatttaaaaaatgcaactattaatttatttgataaagaaaatgctgctattttggaagtgattcaaggcaaggctgatggatttttttatgatcaacttacgatttatcggacttggcaaaagcatcaagatacaaccagagccattttagcgccttttcaagaaaatcctgagttttggggtatagctgtaagaaaaggtgatgaagctttaaaggacaagcttgataatttcattgatgagagtaggaaaaatggctttttagattttttgggcaataagtatttaaaagacattaaagaagtttttaagcaaaataatatcacttttttcttgtag

SEQ ID NO: 18250 - DNA, 1290 bp, Campylobacter jejuni
atgaaaacttctattttgattttagcggcaggattaggcactagaataaaatcacaaaagccaaaggttttgcaagagctttgtcaaaaaagtatgattttacacattttaaaaaaggcttttgctttaagtgatgatgtaagtgtagttttatcgcatcaaaaagaacgcgttgaaaaagaaattttagaatattttccaaaaacacaaattttagagcaagatttgcaaaattatccaggaactgcgggagctttaagtgggtttgagcctaaaaatgaaagagtgttgattctttgtggtgatatgcctttggttgagcaaacaagtttggaagctttgttgggtaataatgcaaaattaaatctagcagtttttaaagcaagagatcctaaaagttatggtagggtggtgataaaaaacgatagcgttgaaaaaattgttgaatttaaagatgcaaatacgcaagaaaaagagataaatacttgcaatgctggggtttatgtgattgactcgaggcttttaaaagagcttttacctttgattgataacaataatgcggcaaaagagtattatttaaccgacattgtaaaactagcaaaagaaaaagatgtgatgattaaagcagtttttgtagatgaagatgaatttatggggattaatgataaatttgaactcagtatagctgaaaatttcatgcaaaaaaaaattaaaaaatactggatgcaacagggtgtgatttttcatttaccgcaaagcacttttataggtgcagatgttgaatttgtaggtgaatgtgaagtatatgaaaatgtaaggatagagggcaaaagtaagattataaactctatcattaaaagttcaagcgtgatagaaaattccatcgtagaaaatagcgatgtagggcctttggcacatttgcgtccaaattgtgagttaaaaaacactcatataggaaattttgtagaatgcaaaaatgcaaagttaaataccgtaaaagcagggcatttgagctatttaggagattgtgagatagatagtggaaccaatataggctgtgggactatcacttgtaattatgatggggtaaaaaagcataaaaccatcataggaaaaaatgtttttgtaggttctgatacgcaatttatcgcacctgtaaaaatcgaagatgaagtaatcatagcagcaggaagcacagtaagtatcaatgtagaaaagggtgctttgtttatcaatagagcagggcataaaatgataaaagattattattataagaaatttcaaaaatga

SEQ ID NO: 18251 - DNA, 669 bp, Campylobacter jejuni
atgaatgaattaaaacaccttgctgttgttatggatggcaataggcggtgggctagagctaagggttttttggcaaagcttggatattcccaaggagtcaaaactatgcaaaaattgatggaagtttgcatggaagaaaatatttcaaatttaagcctttttgcttttagtacggaaaattggaagcgtcctaaagatgaaattgattttatctttgaacttttagatcgttgtttagatgaagctttagaaaaatttgaaaaaaataatgtgcgtttaagagctataggtgatttatcgcgcttggaagataaagtaagagaaaaaattaccttagttgaagaaaaaacaaagcattgtgacgcactttgtgttaatttggctataagttatggtgcaagagatgagattataagagctgctaagcgtgtgattgaaaaaaaacttgagctaaatgaagaaaatttaacgcaaaatttagatttacctttagatgtggatttgatgcttcgcgttggaaacgctaaaagactttcaaatttcttactttggcagtgttcatatgctgaaatttattttagtgaaactttatttccatctcttaccaagagagaatttaaaaggattattaaagaatttagaaatagagaaagaacttttggaaaatga

SEQ ID NO: 18252 - DNA, 726 bp, Campylobacter jejuni
ttgatgaaaataaaaattatattttcttatgatggctctgcttttttaggttctgctactcagcctcataaaaaaggtgttcaagatgctttaagtggggccttatcgcatttgggtattttttcacctcttttgatggcttctcgtacagataaaggagtacatgcaagctatgctgtagctagtgtggagtgtggagattattttacaaatttagaatatcttcaaaaacaacttaataaattttcccatccttttatccatatcaaaaaaattgaaaaagtaaaagatgattttgaagtaagatttgatgtaaaaagtagagaataccgctatatattttctcacgcttcttatagtccttttatggcttcttatgtacatttttatcctaaatttgacctaggtaaagctaatgaacttttgggtttttttgtaggaaaaaaggatttaaagtttttttgcaaaagtggaggggataataaaacgactttaagagaaatttttattgctagagcttatgcttataaagattttagcatttttcattttaaagctaatggttttttaagagggcaaattagattaagcgtagcaagcgttttaaaagttttagaaggaaaaatgagtgaaaaagaactcaaagaacagattgaggctaaaaagcaatacaatcactttttagcaccgccaaatgggctttatttaagccgtatatgttattaa

SEQ ID NO: 18253 - DNA, 2547 bp, Campylobacter jejuni
atgtcttttatgcaagaatacaataaacttgttgaagaaagagccgctttgggtataccaccccttcctttaaatgcaaatcaaactagagaactttgtaaattacttgaaaatgaaaataatgaagagcttgcaaatcttttagaaaatagagtaaatcctggtgttgatgatgcagctttagtaaaatgtgaatttttagattccatacttaaaggcaaaatcagtgctccaaatatagacaaaaaaagagccttaagaatgcttggaactatgctaggcggatataatgttaaagttttaatcgatgccttaaaagatgaaaacatagccaaagatgctgcagaagtgttgaaaaatattatttttgtacatgataatttccataccatagctgaacttagcaaaaacaatccacacgctaaggaagttttacaaagctgggcaaatgcggactggtttaataaaaaagaaaaactaccacaagtgattaaatgtatagtttttaaagtagcaggggaaacaaataccgatgatctaagccctgcaggagatgcttttacaagaagcgatattcctttacatgcaaatgccatgctaaaggtaagacaaacaggatccttagaaaaaatcaaagagcttaaaaaaagcggtcgcgaagtggtttatgtaggtgatgttgtaggaacaggttcaagtagaaaatcggcaataaattccatacaatggcacttaggaaaagaaatagaaggtgtgccaaacaagcacagcggtggtataataatgggttcaactatagcaccgattttctttaacactgctcaagatagcggggctttacctatcatctgtgatgtaacaaacttagaaatgggcgatgagtttgaaattcatccttatgagggaaaaatcataaaaaatggctctacaatcgcagaatttacactcagtccaaacactctcttagatgaagttagagcaggaggaagaatcccacttatcataggtcgcgggctttgtactaaggctagagaatttttaggaatggaaagtgaaaatatctttaccaaacctgaacaacctaaatcttcaagcggtggttataccttggctcaaaaaatgctaggtcgtgcctgtggagttgaaggtgtgcgtccaggtatgtatatagaacctataactttaactgtaggctctcaagataccacaggtcctatgactagagatgaaattaaagaacttgcaagcctaggttttaatgcagactttgttatgcaaagcttttgccatacagctgcgtatccaaaagtaagcgattcaaatttacataaaaccttgcccaatttcatgacaagtcgtggtggggtaagtttaaaaccaggtgatggagttatccactcttggcttaatcgttttgtattgccagataccgtaggaacgggcggggattctcacacacgctttcctataggaatttctttccctgcaggaagtggacttgtagcttttgctgcggttactggttctatgcctttaaatgtacctgaaagtgttttagtgcgttttagtggagaattgcaagccggagttaccttaagagatttggttaatgctataccttattatgcaatcaaacaaggacaacttaccgttgaaaagaaaaataagaaaaatatttttgcaggaaaaattttagaaatagaaggcttgccaaacttaaaagtcgaacaagcttttgaacttagtgatgcaagcgctgaaagatctgcagctgcttgcagtgtggatttaagcatagaaagtgtaagcgaatatatcaaatccaatatctctttaattgaagctatgatagaagtaggatatgagaataaagctacccttgccagaagggctgaaaaaatgagagaatggcttaaaaaccctactcttttaagagcagacaaagatgcaaaatatgcgtacattatcgatattaatcttaacaatatcaaggagccaattctagcttgtccaaatgaccctgatgatgtggcaaccttaagcgaaattttagccgatgacaagcgtccaaaaaatatagatgaagtttttgtaggttcttgtatgacaaacataggacattatagagctttgggagaaattttaaaagataaaggcatacttaaaaccagactttgggtagtgcctccaacaaaaatggataaagcacaacttatcaatgaaggttattacagcatctttggcgcagcaggtgctagaatagaagttcctggttgttctttgtgtatgggaaatcaagcaagagtaaatgatggtgctgttgtcttctcaacctctacaagaaactttgacaatcgtatgggtatgggtgctaaagtatatctaggaagtgctgaacttgcagcagtttgtgcgattttgggtaaaattccaagcaaggaagaatacttacaaattgtcagcgaaaaactaagtaatgagcataaggcaaatatctatagatatttaaattttaatgagattgaaaatttcaaacttgaaaattaa

SEQ ID NO: 18254 - DNA, 453 bp, Campylobacter jejuni
atgtttaaagtttattataaaatgcctttatgttacctatctttacatagtgatggaaaatttttaactagagtcgatttttgtgataataaaagatcagaaaaaaattgtagtttgcttgacttagcaaaatatgaacttgatttatattttactcataagcttagaaaatttagcattcctgttttgatacaaggtacggattttgaatcaaaggtttacaaggctttaatggaaattccttatggcaaaatagctacttataaagatatagcagaaaaaattaatcatccaaaagcttttagagctgttggaaatgcaaattctaaaaatcaaattcctatttttataccttgtcatagagttattgcaagcaatggcataggaggatataatggagggcttgaaataaaaagatttttgcttgaaaatgaaggagtgaatttaaaataa

SEQ ID NO: 18255 - DNA, 1887 bp, Campylobacter jejuni
atgcgttatattacaacaccaatttattatgtaaatgatgtacctcatttaggtcatgcttatactaccatcatagccgatactttagcaagattttatcgtttgcaaggacatgaaacaagatttctaacaggaacagatgagcatggacaaaaaatcgaagaagctgccaaactaagaaattccactcctcaagaatacgctgataaaatcagttttgaatttaaaaaattatgggatgaatttgaaatcacctatgatatttacgcaagaacaactgatacaaggcatattgaatttattaaagctatgtttttaaaaatgtggcaaaaaggtgatatttataaagatgaatacgaaggacactattgtatttcttgtgaaagcttttttactcaaagtcagcttattaacgattgttcttgcccagattgtggcaaacaaactagaattttaaaagaagaaagctattttttcaaactttcaaaatatcaagataaaattttacaatggtatgaagaaaaagatcccatcttgccaaaaaacaaaaaaaacgaacttataaattttgtccaaaacggccttaaagatctttccattacaagaacaagttttgattgggggattaaactgcctcaagaaattaatgatgataaacatattatttatgtatggcttgatgcactttttatctatgtaagctcacttgactttcaaaacaagggagaaaatgctaaattttggcctgcgcatgtgcatttagtaggaaaagatatcttgcgttttcatgccatttattggccagcttttttaatgagcgtggatttgcctttgccaaaatttataggtgcacatggctggtggactaaagaaggtgaaaaaatgagcaaatctaaaggcaatgttgtaaaacctaaagaagtagttgatgcctatggaagtgaagcttttagatatttcttgcttagagaagtgccttttggtaacgatggggattttagcgaaaatatgctgataaatcgtatcaatgcagagcttagcaatgaatttggaaatttacttaatcgcattataggtatgagtacaaaatattctcaaggaaatatttcaaaagaaggtgttttaaaattttacaatgccgaactaaatcaagcaaaagaacacttaaatttagcggtagaatttttagaaaacttacagtgtaatcgttatttagaagaactttttaaagccttaagtgtggcaaatttagccattagtaaatacgaaccttggagtttaatcaaagaaaacaaacacgaacaagctaatgctttagtagcactttgtgcaaatattttagccaaaacaagccttttattaagccctactctaccaaagtcctctcaaaaggtggccttagctttaaattttgaaatttcgtctgcaaattacacaaaaatgatacttgataatgaacttttagattttaaagcaaatccttgcgaagctttatttccaaaagtagaaaaagctcttttaaaacaagaaattaaagaagaacctaaaaaagaagaaagtcctaaaataaaaatcgatgattttgcaaaaattgaaatcaaagttgctaaggtacttgattgtcaaaatatagaagggagtgaaaaacttttaaaatttcaactcgaacttgacgataaagaaatccgtcaagtactctcaggcatagcaaaatactataaggccagtgatttaatcggtaaacaagtttgcgttataagcaatcttaaaaaagctaaaatttttggacatgaaagcgatggtatgatactttctgcaaaaagcggagataaacttgttttaatcgcccctgaacaacttgtgcaaaacggctctttagtgggttaa

SEQ ID NO: 18256 - DNA, 2160 bp, Campylobacter jejuni
atgattaatactcaactagcaagtcaaattgccaatacgcaaaaaaatgatttaaaagtagataactctgcttcaaaagataaaacaaatttaaaagacaatccaaaagaagcacttgcacaagctttaaagcaaaatttaggtttaagcaaggacgctagtagtgaggaaatactagcaaaatttgttcaaaatgaaacaggtaccaaattaaaagaacttgttaataaacttttagatcaaatcaatgctcaaaaaaatcccgattcccctgtacttaaacaaggaaaaaatttaaatttagctcctaattttgctaatgaattaaaaatcttaagtacagaacttgcaaaaagtgatacttttacacaagttttagacagattaaatcaaattttaaaacctgccagtgaaataaaaaacaataacttagctcctttgtttaaaaattcaggcgtatttttagaagctaaattaaaagatgccctaaacgaagaattactacccaaaagttttcactctcttttaagtacaatcaaaggtcttagtagcgaaaaactaagcgttcagatagcccagcttgcaaatacaaatttaagcccaaaagacactttaaaagaattaaaaaatattattaattctagcaaaaatgaaaataagcaaattttaaatcaaagttcttttaaagcacttttaaatttaagttctaaattggaaaattttaaaaattatataagtaaaaatcccagtcatgctcaagaaaaaatcacccctatagctaataaaattttaaaagaattaaattccatcaaaaatgattttttcaaagctcttaataagccagaaaatttaatgataaaagatccaaacatccttaagcaaactgctaccgcctttgaaaaacttgaaaatactttaaaaaatatactaggcaatcaagcttctaaaatacaagataaagaaaatattttagaaaatcttttaagtaacaaagaaaatatgaaagaagaaaaacttaatcataacacaaaaaaccaagatgaagaaaaacatataaaagcatcaaaagaagatgaaaatttagattctggtataaaaacccatgaagaagatacccaagatacaaaaaatgatattcaaaataatgaaacagaaaataagccagacaatgatataaaaaattctactccaaaccaagaaaaaattaaagatgaaaaacaagaaaaatcaaaagaaaatatcaaagaaaatccaaaattttatgaaacaaaaacagaaaacaaaacttcaatcaatacaaataccaacacttcaaatcctaatacaaacaatacgcaaaatttaaataatactcaaaatattcaatctaacaataaccaaactatgcaaaatatttttaaaaatcaggaatttataaaacaaaatattgtaaaaaatttagcatttaatgtagaaaatttagatctagaacaagtgcaagatttaagtaaaaatttaagcaatctttctcgtagacttaatgaaagcttaaaagaacttgaaccctatactcaaaatgccaagcttaatcaagcagaacttaaaaatctcgaacacaaactcaatctttctatcaaagatctagcgcaaattaaaccaaaaacagaacaagatatagctgaatctttacatcatgatgtaaaatcaacacttttgcaaatttcaaatttagctaaaaatgaaggcaatgaagctgtatacaatcaagctaatcgtcttttagcgcaaattgaaatcaatcagcttatgtctttagctaatgattctatcaatacttatctgcctttttcttgggatgatttaaatgattctaaaattatgtttagacgcggaaaaaaggacaaattttttgctcagattaaactcgaatttgcaaaacttggggatttggaaattcttatttctttaaataatgaaaaatatatagatattaatattatggcagaaaatattgaatttagaaaaaccatctatgaaaatgcccatgagcttaaaagaaatatcaataaagcaggacttttaagtgcaaatttctttgtaggtgatatcataagaagtaaatttgatactagaaatatgaaaaatttagatcttgaaatgggtatggataaaaaagtatga

SEQ ID NO: 18257 - DNA, 849 bp, Campylobacter jejuni
atggaaattttaaagaaattatataaattttcacagtcttggactggaactgtagttattgttcttttggtgatttttttctttatacaagcttttgttattccttctggttctatgaaaaacaccttattagtaggggattttttatttgttaaaaaatttagctatggtatcccaactcctcatattccttggttggaaattcctgttttgccggattttaataaagatgggcatttgataaaagcacaagggccacaaagaggagatatagttgtttttagaaatcctagaaatgaaaaagaacactttgtaaagcgttgtgtaggcacaggaggagataggatagtttatgcaaataaaacactttatgtaagaatgcatgagggtgatgaatttatgaaagaacattatccgaatgatcttgttactcttggagggcaaatttatgtaaaagaaccttataaacaaaaaggtattcattatgatccaaaaaaagatatagaaagcgatattttacgctttcttagcataggtgattttgccatgtctccagcttatattaaagaacttggaaatcatataggttttagcggcggaaatgcttatgtttttgatgtacctgaaaatgagtatttcatgatgggtgataatcgcgattattcttatgatagtcgtttttggggttctgttccttataggttgatagtaggtaaaccttggtttgtatatttctcttgggataaagataaaaatgttcgctgggaaaggatagggcgttttgttgataccttggaaaacgatgaacaatatatccatgatcatgatgatgaggataaattaagctaa

SEQ ID NO: 18258 - DNA, 1257 bp, Campylobacter jejuni
atgacttatctagaaatcgaaggcacaaatcatctaagcggaaatgttacaataagcggagcaaaaaatgctgccctacccttgatcgtttcaagtatacttgctaaaaatgaagtaaaaatcaacaatgttcctaatgttgctgatataaaaactcttatatctttgctagaaaatttaggagctaaagtcaattttcaaaacaatagtgctttattaaacacaaacactcttaatcaaaccatagctaaatatgacattgtgcgtaaaatgcgtgcttctatacttactctagggcctttgcttgctcgttttgggcattgtgaagtatctttgcctggtggatgtgccataggacaaagacctattgatttacatcttttagccttagaaaaaatgggggcaaatatacaaatcaaacaaggctatgtcgtagctagtggaaatttaaaaggcaatgaaattctttttgataaaatcacggttacaggtagtgaaaacatcatcatggcagcagctctagctaaaggtaaaaccaaactcttaaatgttgcaaaagaacccgaagtagttcaactttgcgaagttttaaaagacgcaggacttgaaattaaaggcataggtacagatgaacttgaaatttatggtagcgatggagaacttttagaatttaaagaatttagcgttatacctgatagaattgaggcaggaacttatctttgtgcaggggctattacaaattctaaaattactttagataaagttaacgctactcatcttagtgcagttttagcaaaacttcatcaaatgggttttgaaactttgattacagaagatagtatcaccctacttcctgctaaagaaattaaacctgtagaaatcatgacaagtgaatatccaggctttccaaccgatatgcaagcgcagtttatggcactagctttaaaagctaatggaactagtattattgatgaaagactatttgaaaatcgtttcatgcatgtaagtgaacttttaagaatgggtgcggatattaaactcaatggtcatattgctactatagtaggcggaaaagaacttaacgctgctgatgtcatggctacagatttgcgcgcttcttcagcccttatcttagcagctcttgcagctaaaggtacaagcaaagtccatagaatttaccatcttgataggggttatgaaaatttagaagaaaaatttaaagatttgggtgcgaaaatcacaaggcttgaagaatga

SEQ ID NO: 18259 - DNA, 873 bp, Campylobacter jejuni
atgggcgtatttttagttcttttgggaggtattttttgggctattagcggtgttttagctgaatacctttttaaaaataattatagcgtagattgggtttgtttttataggcttttatctacagggttgattttgatttttttaagttttaaagctcaaaagattttagtttttacaaatttaaaagaaagcttaagtatttgtatgtttggattttttgggcttttgctaacacaatttggttattttaaggctatttattataccgatgctggaactgcaacaatgatacaatattgtgcacctttgattataatgctttatttgtgctttaaaaataaaaaatttcctaaattgatagaaatttttgctttgattttgattatttttgctttgtttttgcttgcaactaaaggagatattgaagcggtggttttaaattattggggtattttttgggctgttataggagcttttggagttgctttttattctttaagtgctagagaagtgatattaaaatatggtcttttttggataatgggttgggcgagtctttttgcttcttttgtatttttattaatcttgcaatttgataagggtttaattcactatgcttttaacttaaaagcatttttttctatgggtgggattgtctttatcggaactataggggctttttgtttgtatttaaaaggagtggaatatataggtgctctaagggctagtatgattgcctctatagagcctgtagcagctgctttgatgagttttttatttttaaaaacccgttatagcttgcttgatatttttgcttttgttttgattatattgagtgttattttaaatgcaaaaaagactaaagtttcataa

SEQ ID NO: 18260 - DNA, 1785 bp, Campylobacter jejuni
gtgactcttgaaaactatgctgtttttggtaaatatttttaccatgatttaaaacacactttaaaagcctttaaccacaaagaaagtaaaaaatgctttaaatttatagagaaatataaaaatgatttttatattttaatgcttactgattatgaactatatagatattttcaagataaaaatttcacaagcaaaaaggcttatttgtctgtatttgcttttaaaaaaagaaaaaaatttcaaaaagaagatattgatgaagaaaaatttattcctgaatttataaattttttagatcaagataattacaaagaaaatttcatcaaggttaaagaggcaatctccaaaggaagagtttatcaaatcaacctcactcaaaattttaaatttcatagcaaaatggattcttttgaactttttaaacttttactttctagacaagatactgaatttaaagcttttataaaagatgaaacaagagaaattttgtccttctcacctgaacttttcttcaagaccaaaaaaagaaaaatatttacaaaacctatgaaaggcacaattaagcgtgataaagatcctataaaagatgaagaaaataaaattttcttgcaaaatgatacaaaaaatctgagtgaaaatgttatgatttgtgatcttttacgcaacgatctttcaaaaatcatcacaaaaaaaagcttaaaaaccaaactttttgaaattcaaagtcaccctactttacatcaaatgacttcaagagcacaaggaaaacttaaaaaaaatatttctttacatcaaatttttaaagctctctttccttgtggttctattacaggtgctccaaagcttgaaagcattaaatttattgaagaattagaacaaagagatcgtggtatttactgcggaactataggtttaatacacaaaaataaaaataaatttagcgtagccatacgcaccttagaaaaacaagatgaaatttatacttatagcaccggtagtggcttggtttgggactcaaaattcaaagatgaatttgaagaattaaaacttaaaagcgcaatcttaaatccttgtgattttcatctttttgaaaccatgtattttaaaaattctcaaattttatttttaaaagaacatttattaaggcttataaattcagctcttaaatttaattttaatactcacaagctctttaaagatttttataatattttaaatcaaaaaagttcttataaaaaatatcaaaattttacactttttaaactcgatgaaaaaattttccacaaaaaacactctttattttataattttcccctaccctttaaaaatccacataaagaaggaattttaaagcttattttatacaaagacggaagatacgaatttcaacaaagtgccttaaagcaaaattcaaacgatattttgcttttaagtgatgataaaattaactcaaaaagtgacaatctctatcacaaaagctctttgcgtactttttataatcaacactcatacaaatggcagcaaaacttgtgttatgacatagctttttttaacgaaaaagatgaactttgcgaaggctcaagaaccaatctcatcttagaaaaaaactctcaattttatactccacaaattcaaagcggtatgttaaatggagtatatagaaatttcttaatcaatcttggtttgataaaagaaaaagcattatttaaacaagatttatttgaagcagaaaatatttattgtattaattccgtgcgtggtttaaaaaaggtaaaattacaatga

SEQ ID NO: 18261 - DNA, 1065 bp, Campylobacter jejuni
atgaaataccctttagattgtgaagaaaattttgaaaaatcattcttattttggttagcaaaatatgtaaaatttaaactcaactcactatctaacaaagagttaaaaaatccacaagctttagcagaagttaattttgctcttacaaaaggtgtaaaaaatattgatgaacttgacgctctagcaaaaaaagcaagaaatgctggtttaagtggagttaatacttattttaatcctttaaaaaaagtatttgaatatttaaatttttataagctttactctttaaaacagattgatgaagaacttattgtagaagttttagcaagtataacaggtgctttatcagatgcaagcaaaaaaaattaccgtattgctgtgattaatttttttgattttttagacaagcaaaatgaagaagatgaaaaagcacatattttcgatatcaatcttaaaaactgggcaggtatagcaggttctaaaggggtaaaattacctgaatttatgagtaaagaagagcttaaaaaatttcttgatgctattgaaaatgcagattttaaaaacaataccatacgcaataaacttattattaaaatcatcatttttacaggcatacgggtaagtgaagctatcaatatcaaaatgggtgatattagcgaagaaaacgatctttatatcataagaataagagctaaaggcaataaatatcgtgttgtaatgataaaaaaagaacttatttacgatttgcttaaaaatgtaagtattaattatataagtaaagacgccctactttttgtcaataaaaaaggcactccactgactcaatcttatgtcagtcgcatagtagaacagcttttatttcgcgcaggaattcgcaaacaaaaaaatggtgctcatatgttgcgtcatacttttgccaccctgctttataaaaagcaaaaagatttagttttagttcaagaagctttagggcatgcaagtttaaatacctcaagaatttacactcattttgataatgataaattaaaacttgccgcacaggttgcaaaggaattaagtgactcttga

SEQ ID NO: 18262 - DNA, 642 bp, Campylobacter jejuni
atgcgtaattttttttgcaaatttgttttagctcttgtattttattcaagttttgcattagcaaacaatagttttattacccttaatccaagtttacctagctctgaaaatagtgtaatagaagcattttcttataaatgtatacattgttataatcatcataaatttggaactcttgaaaaactgagagaagcttttccaaatttacattttaaactctatcctgtaagtttaatgaatggggaattttccaaagaaatgaatgagctttttacctttgctcaatacaaagatgagcaaaatggtaaagatgcgagttattctgatagtttatctcataaacttgctgatgtttattttgtttcttattttttaaacaagcaaagaaatttttcaaatttagatgaattttacgacataggtttaaaggctatgaatgtaaataaaaatgaagtattaaattttttaaataccccaaaagctaaagaaattttaagcgagtttcaaagagctaatgatatagctaaaacctatggtacccctgcttttgttgttaatggaaaatatcaaattaacccaagcgcaatcaattcgatgcaagatttagaagatctagttaaaaaattaagtaatatgaaataa

SEQ ID NO: 18263 - DNA, 411 bp, Campylobacter jejuni
gtgctatttaccaaagctagcgaatacgctttactttctttaatttatatttctcaaaaagaaacacctcaagatgtagattctttagctttagagcttgatattcctaaaagttttttagctaaaattttacaaactttagctaaagatggcttgttaaaatcctttaaaggggcaaaaggtggttttgttttaatcaaagaaccaagtcaatatactataaaagaaattgttaatagtgctgaaaaaaaggatatcagtgtatttgaatgcagtggtggcacttgtccaaataataaagaagaaaattgcaccttaatgcctatgttagtaaatttacaaaataaagtagatgaatttttagattctattactttagaagatattatgaaaaataatggcaaaaaataa

SEQ ID NO: 18264 - DNA, 273 bp, Campylobacter jejuni
atggctttggattcggccaaaaaagcagaaatagttgcgaaattcgctaaaaaaccaggtgatactggttcaacagaagttcaagtagctcttttaactgcaagaattgcagaacttacagaacatttaaaaatctacaaaaaagacttttcatcaagattaggacttctaaaacttgtaggtcaaagaaaaagacttttatcttatcttaaaagaaaagattataattcttatagtaagttaattactgaattaaatcttagagataaataa

SEQ ID NO: 18265 - DNA, 2841 bp, Campylobacter jejuni
atgctagcacctggcatgggagaatgggtttacaaggctaatttatttttatttggagaatttgcgtattattatccttttttcttatttattttaaattatgtttattataaaagaaattacaaattagctaattttacaagaagagagctttttggtataggatttgcctttttctcgagtttgcttttatttgcagttttttatcctaattcaggctatatactagagcttgcttatgcgattttttctactattttggggcatactgggagcggaattttcgctcttttacttctactattttctttggttttattgtttccaaaatttgcaaaagaaattttaaaaatagaattagattttacttatttattaaaagtagagcaagcttttaaatctttacttatgcgtgtatttggtggagaaaacgagaaagaagatgtaggtaaatcagaacctatagttccaaaattaaatattttgcaagatagtatttatggaaatttacaaataaacaaaaaaggggaaaccaataacttagaacagataattaaagatagcaatatcaatgcaagtaaaaattcaattaccacggccaaggaaaattttgaaaaactaaaaaatcaaattttagatgaaaccatagagattgataaacaaagtttaaaagaatcaagaagttttgttcatgagcattctcaacaagtgcgaaatttcgcacaaaaggctagtaaaatgagcattagtcttgatgaagattttaattttatttcagaagaagaggtagatatgattcctgaacgttttttaaaacctaaaaaacttgaagatataaagcaaatagatacaaataaaaatttagatgagccaagttataaacgtaaaaatattgaaattccagtttctaatcaagaagttaaaccaaaaatttttacaaaagagcttgaacttagagagaatttgataaaaaaagaaaaactagaacaagaatacaaagcctatcaaaatgaaattttagaaaataaagtaaaacaagaaattaaaaaattagaagaatatgatgcgataaattcaagcgatattatagaagggaataaatatagttttaatagcccaaaaacaattaaaacagaaacagaagaatcagacaaaataaatgaaaataaaaatctagataaagcagacaatatctttgaatttgctcccattgtagaagagttaaatcatccttatatagaacctactcctataaaaaatataaatgaaatagttatagaagaaaaaaatacactcgattttatccaaaatacagaaactaaaatcgataatgaaaaaacaaatgatcaagaaattaaacttcaaaaagcagttttagccaaagaaattgctattaaccaagctttattgcgtgaaatagagcagggcgaaatagaaaaaccaaaagatttcaccttgccgccattagattttttagctaatccaaaagaacacaaacaagaaatcaatgaaagtgaaatagataaaaaaatttataatcttcttgaaaaattgcgtcgttttaaaataggcggcgatgttataagcacttatgttggtcctgtggtaactacttttgaatttcgtcctagtgcagatgtgaaagtaagtcgtattttaaatttacaagatgatttaactatggctttaatggcaaaatcaatccgtattcaagctccaataccaggaaaagatgttgtaggtatagaagttccaaatgatgaaattcaaaccatttatttaagagaaattttacaaagtgaagtttttaaaaacgctaaaagtcctttaaccatagctttaggtaaagatatagtaggcaatgcttttgtaaccgatcttaaaaaacttccgcatttactcatcgcaggaacgacaggtagtggtaaaagtgtggggataaattctatgcttttaagtcttttatatcgcaactctccaaaaaccttgcgtttgatgatgatagatcctaagatgcttgaatttagcatttataatgacattcctcatcttttaactcctgttatcacagatccaaaaaaagcagtcaatgcgctttcaaatatggtagctgaaatggaaagacgctatcgcttaatggctgatgcaaaaaccaaaaatatagaaaattacaatgaaaaaatgaaagaattaggcggagaaaaacttccttttattgtagtaattatcgatgaacttgctgatttgatgatgactgcgggtaaagatgtagaattttatataggaagacttgcgcaaatggcaagagcaagtggaatccacttgattgtagctacacaacgaccttctgttgatgttgtaacaggactaattaaagcgaatttaccaagtagaatttcttataaagtagggcaaaaaattgactctaaagttattttagatgctatgggtgctgaaagtttacttggaagaggggattgtttatttactcctcctggaacaagctctatagtgcgtttgcatgcgccttttgcaagcgaatttgaaatagaaaaaatcgtggattttctaaaggatcaacaaagcgtagaatatgatgaaagctttttaaaggatcagcaaagcgtaggtgttacaacaaatgaaagctttgatggggaagcagatgagctttatgaagaagctaaaagagtaatcttagaagatggaaaaacaagcatttcttatttacaacgccgtttaaaaatcggctataaccgctctgcaaatattattgaacaacttacgcaaaacgggattttaagcgaacctgatgccaaaggacaaagggaaatcttgtaa

SEQ ID NO: 18266 - DNA, 1932 bp, Campylobacter jejuni
atggctcttatagatttaattgaagcttcaaaaaaatttggagacaaaatagttttaaatgaagtaaattttagcgcaaacgagggagaaaagattgctattataggcaaaaatggagaaggaaaatctacttttttaaaaacgcttttaggcgcacttcctttagatagcggtagaataataagacaaaatggaaaaagcatagccatgctttcacaaaccgttgattttaatgcaaatttaagcgtaaaagaagccatcaagcaagagcttgtagaaatttacaataccttagaagaatatgaaatactgcataaaaaattagaagaagatcctagtaataaagattatcttcaaaaaatagatacgcttatgactttgattgatagtaaagatgcttggagtatagaatctaaaataatacgcgttttaaaagaatttagtttacttgagtatgaaaatcgcattatatctactttaagtggtggagaaatacgccgcgttgggctttgcatacttttactaaaaaatcctgatattttattgcttgatgaaccaactaatcatttagatgtatatatgacaagctttttggaagaattgctaaaaaattcaaagatgtgtgtgatttttatttcccatgatagatattttattgacgctatagcacacaagtgtgtagaagtagagcagggtaagcttagtatttttaaaggcggatatgcaaactatttagagaaaaaaacacaaattttgcaaagccttgctaagagccatgaaactcttttaaagcaattaaaaagcgaagaagaatggcttagaagaggggttaaagcaagacttaaaagaaatgaaggacgaaaagaacgcatttttaaaatgcgtgaagaagcgaaaaaaaatcctggggcaatcaaacgcttaaaacttgaaatttcaagagcggctttaaattttaatggagaaaaaacgatcaatcgtaaaaaaatgctttttgagcttaaaaatataagcaaaaatataaacaataaaaatctttttaaagatttttcaacgcgtattttacaaggtgaacgcatagctatcgtaggaagaaatggttgtggaaaatcaacattgttaaaaattcttctagggcaaataaaacaagatagcggtgaaataaaacgcggagagcttaagataggatattttgatcaggctagaagcttggtaaattctgataaaagcttgcttgaaattttttgtcccaatggtggagatagggttgaagttcgtggtaaaaatatgcatgtttatggatatttgaaaaattttctatttcctaaggaatttttagataaaagcgtggctcttttaagcggcggagagaaaaatcgcgttgctttagccttgctttttgctaaagaatatgatgttttgattttagatgagccaactaatgatcttgatatagctacgattaatatattagaagaatacttacttagttttgaaggggctattttgctagtatcacacgatagatattttgttgataaaatcgcaacaaaactttatgcttttgagggaaatggatatataaatattttacacactctttatactgaatatcttgaaaatgaaaaagaaattgaagaattggataattttgctttagagcttcaaacccaagagcaaaataataaccaaaaagaaaaaagctccaaaaaattgagctacaaagaaaatgagatattaaaaaaccatcctgaaaaaatagattttttagagcaaaagatagctaaattaaatcaagatttatccgatccaaatgtatatcaagaaataggtattaacaagctttatcaagagcttgaagtaatgcaaaaagaacttgaaattctagaaaatgagtattttttagtattagagaaaagcgagaatttataa

SEQ ID NO: 18267 - DNA, 1671 bp, Campylobacter jejuni
atgagcgaggtgaacaaaaaagttcaagacggcgtagatgattatcttgaggaagaagattttggacagcttttagaagcttttgataaatcaagagaagaggctacaacagagggtgtgattgtagagatcaaaaatgatgaagtttatgtagatataggtaaaaaatctgaaggtattttagctcttagcgaaatacaaggtgacaattctaagctattgtttaatgtaggtgatagtattaaagttgctgttatgggttctcgtggtggcagatctttactttctcataaaaaagctttgagaaaagaaaaagttattgaatttattaaaaactatcaagaaaatcaagatgatatttttaccgtaaaagtagttggaaaaaataaaggcggattgatagttgttgatgaaaatgatgttgaatttttcttaccaaaatctcaatatggctttaaagaaacaaataatattataggcaaaacgtttaaagttaaaattattaaaatcgacaaagatgagcaaagtatcattgtttctcgtaaaaaaactttagatgatgagagaagaaaacgaaaagaattgatcaataatgtagcacaacaagaagatttaattgaaggtattgtaaaaaaaattaccacttatggtatgtttgtagatgtaggaggtgttgatggccttgttcattacagcgaaatttcttacaaaggacctgtaaaccctggaacactttataaagagggcgataaagttccagttaaagtaataaagtatgataaagaacgcaaacatttatccttatctataaaagcggctttacctgatccatggagcgagataaaagatactcttgatataggtgataccattaaagtaatagtatcaaatatagagccttatggtgcttttgtggatttaggaaatgatatagaaggatttttacatatcagtgaaatttcttgggataaaaatattaaaaatccaaaagattatatcaataaaggtcaagaaattgatgttgaagtaattgaaatcaatccaaatgaaagacgcttaagggtttctttaagaaatttactttctagaccttttgatgaatttatgaaatcttacaaaattgcagatgtggttgaaggagaaattacctcagtaacttcttttggtgcatttgttaaacttggtggtattgaaggtttattgcataatgaagatgcttcttgggatagaaacgataaatgcaaagacaaattctctcaaggggataaaatcaaggtaaaaattatcaaaatagatgaagaaaaccaaaaaatatcattaagtacaaaagaattaagcagttctccagtgcaagaatatgctaaaattcataaagtcggcgatattgtaaaaggtgctatccgtgatattaaagattttggtgtttttgtagagctaagtaaaaatgttgatgctttaattcataaagaagatataagcacttctatgcttgaaaatttaaaaattggcgacgatattgaagctgctatagtttttattgatgaaaagaaaaatagaattcgcctaagtgttaaaaatcttgttagaataaaagaaagagaagttcttaatgaaatcaataatgatgataaagtaactttaggtgatatcattaaagatcagctagcttaa

SEQ ID NO: 18268 - DNA, 2322 bp, Campylobacter jejuni
atgataattactaaaagttggttgaatgattggttagaacttgaagaaataagttcagataaaatagctaaaactttaaactctataggtatagaagttgatagggttggcgctttaaaggctccagataaagttgttgtaggctatgttaaggaaaaaattaaacatgaaaattcagataaattaagcatttgtcaagttgatatcggaagtgaaaccttgcaaattgtctgcggtgctgcgaatgttgatgcaggacaatttgtagctgttgcaactaaaggtgctatcatgtcaaacggtatggaaataaaagaagcaaaattgcgaggagtggattcttgtggtatgctttgttctagtttagaactgggttttgaaaaaatcaatgaaggaattatgcttttagatgagagtatagggaaattagaacttgggagacctttaaatacttatgaaatttttaatgatgagctaatagaagtggaacttactcctaataggggtgattgtttaagtatttatggtatagctcgtgatttagccgcagctttaaatttaaatttaaaagaaccaaaaccatttaaagaaagtgaaaatgttttaggtatcggtagaattttgcgcttagcagctgagaaagaacttaatggactttataattatcgagccatagggctaaaagaagaaattcaaacaaatttattgcttagtttaagacttgctcaaattgaaggtttgggaaaaaattccatagaaaatttattaaattatgcaacgcattcaactggtgttctttttaatgcttatgatttaagtagtttttctgaaaaagatgaagaatttaccattaatttaagcaagcaagtgcatggagaaacaaaagtatcttacaaagataaacttttaagctttagcggaattttccaaaataatgaaagtagatgtaaagatgattctaaaataattattattgaggctaattataccgatccattggtaattgcagatgctaaaatatatcataaagatcaagatgaaaaaatgctttatagaagttttaggggaagtgaacctaaattaaatttaggaatggattttttgcttggtatttttgagcagattccaaatcttgttatttatagttcttctcaacaaattttaactgacaaagaattaccaatcataccaataagtattgaaggtattagcgatataataggacaaaatgttgataaagatgaagtattaaaaatattaaagaaattaggttttgagctcatactttcaggtgaagggcttataaatgttaaagcacctttacatcgtcctgatattaaaaatttatcagatatttgcgaggaagttgtaagaattataggtattgataatattgcttccaagggtttagaatttatagaaaaaaatcgtttaaattctgcatataaaaattatattgagtttttaaatttaagaaaaagagcagtagctagtggttattttgaaagcttacattatgttttggataatggagaagaacttaaaagattaggttttgactctgttaaattaaaactaatcaatccaattacagcagaacttaatactttaagaacaacccttttaaatcatttgttaaatgcagcaagtttaaatgcaaaaaattctaaaaaaattattaaactttttgaattaggggctgttttcaatgttaataatcaagaattaaatcgtattgcatttatccattctggcttaaaagaagaagctaaaatttccaacaaggccaaacctgaatcggtgcaattttatgattttcttttagatattaaaaatattataggtgattttaaactaaaatcatcaaaatataatattttaagcccttatgaacaagcagatatttatctatcggatattaaagtaggttttataggccgtttgcatttaaaaatagaaaatgagagagatttaccaaaaacatatatttgcgaacttgatttagatttaatcaggcaagattttaaaatagctaagccttactccaaattcccagctatcactagagatcttagcgtgttaatacctaaaggttttgaatacaatcagattaaaaattgtatcgaagaattgaatttagaaatacttgaaaattttcgtttagttgatatttatagtgatgaaaaccttaaagaattttatagcattactataagtttttcttttagggatataaataaaactctagaagataatcaagtgaatgaatgtatggataaaattttaaatactcttaaaaatttgggtcttgatttaagatga

SEQ ID NO: 18269 - DNA, 993 bp, Campylobacter jejuni
ttgcaaaattttatagaacagattcaaaaatgtgagaatttaaatgatttggaagccattaggatttccgttcttggaaaaaaaggtattttaacagaaggctttacaaagcttaaagagttagaagatgaggcgaaaaaagaatttgctgctaaattaaatgcacaaaaagaaatatttaatgaggcttatttagccaaatttaaagatttggaaaatcttgctttagaagaaagaatgaaacaagatgctttaaattttaactattttgatgaaagtattacaacaggtgccttgcatcctgttatgagcaccatggataaaatcatagaatattttatagctttgaattttagcatagaaaaagggcctttaatagaagatgactttcataattttgaagcgttaaatttacctaaatctcaccccgcaagagatatgcaagataccttttattttgatgataaaaggcttttaagaacacaaacttcgccagtgcaaatacggacaatgcttgcacaaaaacctcctattaggatgatagcccctggtgctgtatttagaagagattttgatattacgcatactcctatgtttcatcaagttgaaggccttgtggtggaagaagggcaaaaggttagctttgcaaatttaaaaagtgtattggaagattttttgcgttatatgtttggagatgtgaaagttcgttttcgtccaagttttttcccatttacagaaccttctgctgaagttgatatttcttgtgtattttgcaaaggaaagggttgtagagtttgcaaacatacaggttggcttgaagttttaggatgtggaatagttgatcctaatgtttataattttgttggttatgaaaatgtaagtggttatgcttttggattgggagtagaacgttttgcaatgcttttgcatcaaattccagatttaagatctttatttgaaggtgatttgagattattggagcagtttagatga

SEQ ID NO: 18270 - DNA, 729 bp, Campylobacter jejuni
atgattgaagttaaaaatttacaaaaaaaatatggagaattagaagttttaaaaaatattaacactacaatctcaaaaggcgatgtaatagctatcataggtccaagtggaggcggaaaaagtacatttttacgctgcatcaatcgcttagaactagctgatagtggggaaattttaatcaataagcaaaacatacttgataaagaaattgatattaataagatcaggcaaaaagttagcatggtatttcagcattttaatctttttgctaataaaaatgttatggaaaatttatgtttaacaccaattaaaacaggaattttaagtcaagaagaagccataaaaaaagcaaaattacttcttgctaaggtgggtttagcagacaaagaaaatataatgccccataagctctctggtggacaaaaacaacgcatagctattgctagaagcttgatgatgaatcctgatgttattttatttgatgaacctacttcagctctagatcctgaaatgataggcgaggttctaagcattatgaaagatgttgcaaaagaaggtttaactatgcttgtagtaactcatgaaatgggctttgctagaaatgttgccaatcgtatattttttatggataaaggaaaaattgctgttgatgcaagccctaaagaagtatttgaaaatcctagcaatgaaagattgagagaatttttaaacaaggttttaaatcattaa

SEQ ID NO: 18271 - DNA, 468 bp, Campylobacter jejuni
atgtttaatatagttttagttcaccctagaataccgcaaaatacaggtagtataggtagaatgtgctttaatgctggttttaaacttcatattgttaaaccaattgtttttgatatttcacaaaaggctgttagaagggcaggacttgattactgggataaattagagcctattatttgggagaatcttgaagaatttttgaatgaaaatatgatttataaaaatcgcttttttttcgcaacaactaagagtcaaaaagcttattttgatgcagaatttcaaaaaaatgatttcttattctttggaagtgagagttatggtttgcctatggaattaatgcaattaaattgggaaaatgctataactatacctatgaaatcttatggaagaagtttaaatttagccacaagcgttggtataatctcttatgaagctttaagacaaaattttagaaattttgcttcttaa

SEQ ID NO: 18272 - DNA, 987 bp, Campylobacter jejuni
atgtctttaataaaaattgatcaaaaagcttatgaatacaatttaagacatattgctaaaaaaatagggagttttcaaagattaatttgtgtttttaaagataatgcatatggacatggagctaagcttttagctccattagccaaaaatttaggagtttcttttgttgctgttaagagtgaagaagaagctcgagaaatcgaagaattttttgagaatatattaatactatcacatcgtcctcatggtaatgaaaattctcgatttatttatgctttaaatgacatttctcaagtaaaaaattacaagcaagatataaaaatacatctaaaaatagatacaggcatgcatcgcaatggaatttgtgtagaaaatttagagcatgctataaatcttattcaaggtagtgatttaaaacttactggaatgtttacacattttgctagtgcagatgaaatggatggaagtttttttgttcaaaaagaaaattttcaaaaagctaaaaagatagtaaaaaaatatttttcaaatttattatttcattcgtataattctgcagcattatttagagggaaaattcctgaagatgaatattgtagagttgggcttgttcaatttggatatggggattcaaatttaaaaagagttttaagtttgtatgctcatagattaagtcaaaggattttacaaaaaggacagagcataggatatggaggcatttttactgctgcaaaggatatggaagtagcaacttatgatttgggttatgctgatggtctttttcgctacaatggaaggggggagttagtgcttggaaatggaaaagcaatgcttggaaagatgtcaatggatagtttttcttgtgaaaattctggtgaggaaatttgcgtgtttaaagatgctgatatttgggctgatttttttcatactattaactatgaaattttagtaaaattaaatcctaatattcaaagagttctagtataa

SEQ ID NO: 18273 - DNA, 900 bp, Campylobacter jejuni
atgaaagtacatgaaaaagtaagtgagcttataggaaatactcctattatacatttgaaaaaatttggtatcaatgtttttgctaaatgtgaatttttaaatcctagtcattctataaaagatagagcagcttttgaaatgattaaagatgctttagatagtaaaaaaattaatcaagatactacaatagttgaagcaactagtggaaatactggaatttctttggctatgatttgtgcagatttgggacttaaatttattgctgtaatgcccgaatctatgagtttagaaagaagaaaaatgataacactctttggcgctaggttagaattaactcctgcaaatttaggaatgaaaggagcggttgataaagcaaatgaaatattattaaatactccaaattcttttatggtttctcaatttgaaaatatttcaaataaaaatgcgcatcgtaagaatacggctttagaaattttaagagatttggataatgaacttgatatttttgtagctggttttggaactggcggtactattagtggagttggggaaatactaaaagaaaaattagaaaaagtgcatattgttggagtcgagcctctaaattctccattgcttagcaaaggtgaagcgggaagccataaaatacaaggaataggggcgaattttatacctgctattttaaataaagaagttatagatgaagtgatcacagtaagtaatgaagatgctataaatacagccaaagaacttgccaaaagtggtttaatggtaggtatatcaagtggagcaaatgtatttgccgcaagtatgctagcaaagaaatttccagataaaagaattttaactatgctaaacgatacggctgaaagatacctctcaaccgatctttttgcttaa

SEQ ID NO: 18274 - DNA, 297 bp, Campylobacter jejuni
atgactaaagcagatttcatttcattagttgctcaaacagctgggctaacaaaaaaagacgctactactgctactgatgcagttatttctactattactgatgttttagctaaaggtgatagcatcagttttattggttttggtactttttcaactcaagaaagagctgctagagaagctagagtaccaagcacaggaaaaacaatcaaagttcctgctacaagagttgcaaaatttaaggtaggtaaaaaccttaaagaagctgttgcaaaagcaagcggcaaaaagaaaaaataa

SEQ ID NO: 18275 - DNA, 414 bp, Campylobacter jejuni
atgagagatatgggagaaccaaaattaaaaattgtagctatgccaagtgacacaaatccagcaggaaatatttttggcggatggatactttcacaaatcgatttagcaggagctatcgcagcaagagaactttctcctgaacgcgttgtaaccatctctatggataaagtagtttttaaagaacctgtttttataggcgatataatttcttgttactctaaagttgtaaatgtgggcaacacttcaatcagcgttgaagtagaagtcacagctcaaagagtggattctcaaggttgtacttcttgcattaatgtaacttcggctttagtaacttatgtaagtgttacaagagatggaaagaaaaatcctattagtgaagaacttaaaagaattcatggctttttaaatgcttaa

SEQ ID NO: 18276 - DNA, 198 bp, Campylobacter jejuni
atgaatttcaaaaaatttaagtattattatgaaaaagccgaaaggttttttcatcccttggtgggactttctagttatgataagtatttagaacacatgaaacaaaaacatccaggaaaaattccaaaaaccagaggggaatttttcaaagaatgtctagataaaaaatataatagtggcggtttaaataaatgctga

SEQ ID NO: 18277 - DNA, 930 bp, Campylobacter jejuni
atgcgaggttataaaattttttcaggctcagctaatgtcgaatttgcaagacaagtttctaaatatctctccctgcctttaagtgatgctggagtaaagcggtttagtgatggagagattagcgttcaaattgatgagagtgtacgcggaaaggatgtttttattattcaaagtacttgcgctcctacaaacgataatttaatggaacttttaattcttacagatgctttgcgtcgctcaagtgcaaattcaattacggctattatcccatattttggctatgcgagacaagatagaaaagcaaatcctagagtgccaattactgctaaacttgtggctaatttgattcaagcagctgggattgatcgcgtagctacgatagatttgcatgcaggacaaattcagggtttttttgatattccagtagataatctttatggaagtatagtttttaatgattacattaaagccaaacattttaaaaatgctattataggaagtccagatatagggggtgttgcaagagctaggagtgttgcaaagcatttaggacttgatatagttatagttgataagcgtcgtgaaaaagccaatgaaagtgaagtaatgaatattattggagatgtaaaagataaagaagttatcttagtggatgatattattgatactgctggcactatagttaaagccgcggaagctttaaaagaaaaaggtgcaaaatctgttatggcttgctgtactcatgcagttttaagtggaaaagcctatgagagaatagcaagcggagttttagatgagcttgtggtaacagatactatacctttaaaagagcaattaccaaatattaaagtattaagcgttacacctgtttttgctgaagtaatacgtcgtgtttatcataacgaaagtgtaaattctctctttatttag

SEQ ID NO: 18278 - DNA, 438 bp, Campylobacter jejuni
atgcttagggaaaaaatttatattgctagtgatcatgctggttttgaattaaaagaaaaaatttgcgtatttttaaaagaaaaaaatataatttttaacgatttaggaacaaacacttgcgcaagctgcgattatcctgattatgcgcatttacttgccgaaaaaataaacaaacggagctttggcattcttatttgtggaagtggaattggaatttctattgcagcaaatcgtcataaaaacattcgttgtgcattatgccacgaaagcttaagtgcagaacttgcaagaaggcataatgatgccaatgttttggcattaggcggaagattaattggggttgaattagctatagatattatagaaaaattcattcaaactccttttgaagaagggagacatatgcaaagaattcaaaaaattgaggtaaaaatataa

SEQ ID NO: 18279 - DNA, 333 bp, Campylobacter jejuni
atgtttacaaactggcttgttttaactatattgatttgtgcaactatctatcttattgtaatgttgttttactataaaactctacttaataaagaaaaaacatcaaaagattttatcaaaaacaatcttgatgatactgagattgtcattagaaaactacaaattcaacttcaaagaagtcttggaaatatagatatactcacagaagaacttaataaaatcaaagcagaccttacatctttaagaaccagaaattctcaatatcgcttggaaaatgacaaactaagacaaagaattaaagaattagaagcaaaaattgaggcattattatga

SEQ ID NO: 18280 - DNA, 1452 bp, Campylobacter jejuni
atgaaatttgaattaaacgataaaaaactagatgctataaaagcagactttgaacttgtttttatacaggataaaaatttaaaaatttttaacaaagaaaaagatttttttaaacttaataattacaaaggcgaaggtgcattattagacttaaacaataaaaagctttatttagagcttaaaagtcttgcttatgaggatataagattaagtctttgcacagcatataaaactcttgagaaacttaatattaaaagcgtaaaacttcctagcataataggagattgtgtagttagaagttttgcatctttagttgaaggcgtactttttggagcttataaatttgacaaatataaaagcgagaaaaaaacaagtactttggaaaaatttattatttcaaacgaagaattaaatggtaagaaatttaataaagatgaagctaagataggtttagagcgtggagaaattttagccaatgctacaaattttactaaaaatatagtcaatgaaattcctgaaatttacacccctttaaaaatggcagaagatgcgcaaaatttagctaaagaaaataaaaacattatttgtaaaatttatgatgaaaaatttttagccaaagaaaaaatgaatgcctttttagcggtaaatcatgcctcggtacacccaccacgcctcattcatctaagctataaagccaaaaatgcaaaaaaacgtgttgtatttgttggaaaaggcttaacttacgatagcggtggattaagcttaaaaccagctgattttatgcttacaatgaaagctgataaaagcggtgcagcagcagcaatgggaatcataaaagccgtagctgaacttgctttagatttagaagtgcattgcattttgggcgcaactgaaaatatgataggcggcaatgcttataagcctgatgatgtgttaatcagtcgtgaaggtgtaagcatagaagtaagaaatacagatgcagaaggacgcttggttttagctgattgtctttcttttgcacaggatttaaaacctgatttacttatcgatatggcaactcttactggagcttgtgttgtaggacttggagaatttacaagcgctattatgggaaataatgaggaattgcaaaatgatttttatctaagctctaaaaaaagcggagaatataccacaatcttacatttcaaccctcacttaagagaacttataaaatcaaatattgccgatgttagtaatactgcctctagtcgctacggaggtgcaattaccgcagggttatttttagataaatttattcgtaaagaatataaagataaatggctacatcttgatatagcaggacctgcttatacagaaaaatcttggggatattctagttttggcgcaggtggagctggagttagaatgtgtgttaattatttaattcaaattttaaggaaagctaaatga

SEQ ID NO: 18281 - DNA, 1104 bp, Campylobacter jejuni
atgagtttaagcgtaggtatagtaggacttccaaatgttggcaaatcaacaacttttaatgctttaactaaagcacaaaatgcccaaagtgcaaactatcctttctgcaccatagagcctaataaagccatggttgaagttcctgatttaagacttaatgaacttgctaaaatagtaaaacctgaaagaattatgcattctttaatagaatttgtagatatcgctggacttgttaaaggcgcaagtaaaggcgaaggcttgggaaataaatttctttcaaatatacgtgaaactgaggttattttgcatatagtacgttgttttgatgaagaaaatattacccatgttgaaggtggagttgatcctttacgtgatgtagaaattatcaatacagagcttattttagcagatattgaacaactgagtaaaaaaatagaaaaactcaccaaagaagccaaagccaatcaaaagggtgctaaagaaagtctcgaacttgcaaattccttacttgatcatttaaacaaaggcttagctgcaagttcttaccctgaaaaagaaagtgaaatttatcaagccttaatcaaagaattaagactgctttctgctaaagaagtgatttatggtgcaaatgttgatgaaaatggtattagtgaagataatgattatgtaaaagctttaaaagaatatgctaaaaaaaatgatcatgaagttatcaagctttgtgcaaaaatcgaagaagaattagtaggattaagcgatgaagaaagtcatgaatttttaagttctctaggagttaacgaaagcggtcttgatcaaatcatacgcactgcttttgctaagcttggactgatcagttattttaccgctggtgtagttgaagtgcgttcttggacaatcaaaaaaggctggaaagcaccaaaagcagcaagtgtaattcacaatgactttgaaaaaggctttataaaagctgaagttatttcctatgaagattatatccaatacaaaggcgaaaatggcgccaaagaagcaggaaagctacgccttgaaggaaaagactatatcgttttagatggcgatgtaatgcattttaaattcaatgtttag

SEQ ID NO: 18282 - DNA, 1383 bp, Campylobacter jejuni
atgaaaaatgaaatgtggtcaggacgttttagtggtgcaagtgatgagcttttaaaagaatttaatgcaagtttaaatgtagataaaactttgttcaatgaagatatacaaggttctatagcacacgctacaatgcttgaaagttgtggtattttaaaaaaagaagaattagatgctattataaaaggtttagagcaggttagaagtgaaatagagcaaggtaaatttatttttgatattaaagatgaagatattcatatggctgtagaaaagcgtttaagcgagattataggtagtgaaattggcggaagactacatactgcaagaagtagaaatgaccaagtggctactgattttaaactttttgtaaaaaaatctcatattgaactcataaagcttttaaaagaattgattcaaaccatgctcgaacatgctaaagtgcataaaaaaactattatgccaagttttacacatttacagcacgctcagcctgtgagtttttctttttatattttagcttatgcttttatgttaatgcgagatattaagcgtttgcaaaatagcctagaacttgcagacttttcaccacttggatcttgtgcatgtgcaggaacaagctatgctatcaatcgtgagttgagtgctaaaattttaggatttaaagatattatgccaaatgctatggatggagtgagtgatagggattttgctcttgatttgctttatgatatagcagttatttttacacacacttcaagactttgtgaggaaatgattttattttcaagctcagaattttcttttataaccataagtgatagtttttcaacgggaagttctattatgcctcagaaaaaaaatcctgatgtttgtgagcttatacgtggaaaaacagggcgtgtttatggaaatttgatttctcttttaactataatgaaagctttacctttagcctataataaagatatgcaagaagataaagaagggatttttgatagtgtaaaaaccgctaaagatagcttaatcatcttaaatgcaatgctaaaagaaatacaaattaataaagaaaatatgcttaatgcttgtaaaaaaggtcatttattggctaccgatttggcagattatttggtgcgtgaaaaaaatattccttttagaaaagcacattttatagtgggaaatgttgttgcacaagctgaagcacaaggtattgatataagtgaaattaaagatctttcaaaaatagatcctgtatttgatgaaaaagctatggaacttttaaattttgaattttctttaaattctaagcaaagtgaaggctcaagttctattgcaagcgtagaaaagcaaattcaaattttggaaggttttattcaaaatttataa

SEQ ID NO: 18283 - DNA, 1575 bp, Campylobacter jejuni
atgaaaaaatttgataagttaggtttggataatataaaggaaatttttcataatttaagttatgatgaattaaatgctcatgaaaaagcaaataatgaaggtttaagcacggataatgatactttttgtgtagatacagggatttttacaggtagaagtcctaaagataaatattttgtaaaacaagatccatctagtaaatatatagcttggggaaaggtaaatcagcctattacaaaagaattatttgataaacttttaactaaagcaaagcaagaattaagcggaaagaaaatttatgttcaagatgttttttgcggtgcttctttgcaaagtcgcaaagcagtaagatttgttactgaaattgcatggcaagcgcattttgttaaaaatatgtttattcgcccaagtcaagaggaacttgagaattttaaagcagattttattgtttataatgcttgcaaatgcatcaatgaagattacaaacaagatggtttaaattcagaggtttttgtgatctttaatgttgaagaaaatatagcggttattggtggaacttggtatggtggagaaatgaaaaaaggtattttttctatgatgaattattggttaccactagaaaataaactttctatgcattgtagtgcaaatgtcggagaaaaagacgatgtggcacttttctttggacttagcggtacaggaaaaactacgctttcaaccgatccaaaaagaagactcataggtgatgatgagcatggctgggatgatgaaggtgtgtttaattttgagggcggttgctatgcaaaaacaatcaatcttgatcctgaacatgagcctgaaatttatggagctattaaaagaaatgcacttttagaaaatgtagttttaagagctgataagagtgttgattatgctgatgcctcaaaaacagaaaacacgagagtttcttatcctatagagcatattgaaaatcatgagcctagtctaaaagcagggcatccaaaaaatattatatttttaagtgcagatgcttttggaattttacccccggtaagcaaactaagcaaagagcaggctatgtattattttttaagtggctatacagcaaaagtagctggaactgagcgcggcataacagagcctcaagcaactttttcagcttgttttggagaaccttttatgcctttacatccaacggtttatgcgagattgcttggtgaaaagattgaaaaacatgaagttaatgtttatcttgttaatacgggttggagtggcggaagctacggtgtgggtaaaagaatgagcattaaggctactagggcttgcattaatgccattctagatggaagtattacaaaatgcgaatttgaaaattttgaagtgtttgatttagctattccaaaagctttagaaggtgtagaaagtgtacttttaaatcctataaatacttggttagataaaaatgcttatattgcaacaagagataaattagcacatatgtttatacaaaattttaaacgttatgaagatgtcaaagaaggcattgaatttagcaaatttggaccaaaaatttaa

SEQ ID NO: 18284 - DNA, 1800 bp, Campylobacter jejuni
atggctaaaaaattcatcgatgtaatggatacaagctttagggacggttttcagtctgtttatggagctagggttttaatggatgatttttttcctgcagtagaagcagcaaaagaagcgggtattactcattttgaatttggtggtggtgctagatttcaaagcttgtatttttatcttaatgaagatgcttttaccatgatggatagatttagggctattgtaggaaaagatgctaatcttcaaactttagcaagaggggttaatactgttactttagatactggaagtagtgagcttattgatttgcatgcaaaactttttgcaaaacacggtaccacaacgataagaaattttgatgctcttaatgatataaataatttaaaatttagtggtgaatgtatagcaaaacatggattaaaacatgaaatcgctattaccttaatggatctaccgccaaattgcaaaggtgctcatgatgtgcctttttatgaaaaaattttgaaagaaattttagcagcagaaattccttttcacagcatttgttttaaagatgcaagtggaacttcaaatccaaataaaatttatgaaaccattaaaatggcaagaaaaattttacctcaagatatgcatattagacttcatacgcatgaaactgcaggggtgagtatagcctgctatcttgcagcacttgaagcaggtgttgatggtatcgatttggctgcagctcctgtaagtggtggaacttctcagcctgatattttaaccatgatgcatgccttaaaaggtaaagattatgatttaggtggacttgaagaagaaaaaattctaaaatacgaagaagttttaaaagattgtttaaaagagtattttttaccccctgaagctactatggtaaatccacttattcctttttctcctatgccaggaggagctttaacggcaaatacacaaatgatgagggataataatattttagataaatttccacaggtcattcatgctatgagagaagttgtagaaaaaggtggatttggtacttcggttactccagtttctcaattttattttcaacaagcatttaataatgttatgtttgggtcttggaaaaaaatcgcagaaggttatggaaaaatggtgcttggttattttggaaaaactccagttgcacccgatgcaaacattattgagcttgcttcaaaacaacttaatttagaacctactacagagcttgctataaatatagctgataaagatgagagtaaaagtatagcttataccaaaaccttgcttgaaaaagagggtatagaaacgagtgaagaaaatatatttgttgcagcagcttgcaaagaaaaaggtatagcatttttaaaaggagaggcaaaggtaaatatacgcaaattagccagtatgccaaaacctatgagtgcagatgaaaacaaatttaccgtagctgtaaatggtaataaatatcatgtagaagtaagctatggctttgataaagatgttaatgttaaaagtgtgaaaaaagtagaagaaaataaaaatattatttcttcaaattcaacaagttctgtagatgctgaaaatgaagttttagcaggtatttcaggtaatgtctttaaaatttatgttaacgaaggcgaagaagtaaaatcaggtcaagctatcatggttttagaagcaatgaagatggagattgaggttaatgccccaaaagatggaattattttagagctttgtattaaaataggtgatactgttaatgaaggcgaagtattagctatttacaagaattaa

SEQ ID NO: 18285 - DNA, 339 bp, Campylobacter jejuni
atgaaaaaagttctttttttattattagcatgtacagcagtagcttttgcagctgaaactaatgctccagtagagcaagaagctattaatgtatggattaaagcattttcagttcttgcagcaggcttaggtcttggtgttgcagcacttggtggtgctatcggtatgggtaatactgcagcggcaacaattgcaggaacagctagaaaccctggtcttgggccaaaattaatgacaactatgtttatcgctttagcgatgattgaagcacaagttatctatgctcttgttatcgcgctaatagcactttacgcaaatccttttatagttttacaataa

SEQ ID NO: 18286 - DNA, 786 bp, Campylobacter jejuni
ttgtctttgtttactcaaaaaaataagaattttaaacctttaaaacctctatcaaagtcaaaaataatcactaatttaattcttttgattttatttttaatattgttttgttattgtagttttagtataagtgcttatcattttgattttagcgcaattgcaacctataaagaaaaatttcttcaaggttttttaaatactttaataatcagttttttttctttattgttgagtataattttgggtggagttttttgtgctttttctttaagttcgattgtttttttaagatttttatctacattttacatagagcttgtcagaggaacccctttactagtgcaggtattattgatatattatatcattgcaaataatttaggacttgataatcgatatgtggctggagttattattttatcatgtttttctgctgcttacttagctgaaatatttagagctggaattttaagtatttctatatctcagcttgagagcgctagggctttagggttaaaagagatgcaggtttttgcgtatgtaatttttccccaagctttaaaaaatattttagcaccgctgagtggacaatttgcaaatttaattaaagatagttccttattaagcgttattgctgtaaatgaattaacccaaagtgcgcaagagataaattcttatacttttgctactcttgaagcttatgtaattttggctattacatatcttgttttgactttacctataagtatattttctcgttatttggagagaaaatgccaaaaatga

SEQ ID NO: 18287 - DNA, 1206 bp, Campylobacter jejuni
ttgaataaaagcgttttaaaatatttactttttaagtatttaagatttgataaagagcaaccctttatcaatctttctatgcttttggcctttttaggagtttgtgtaggactttgcgttttgcttgtagctatggcaattatgaatggttttgataaagaatttgaaaaacgcttttttgtgatgaattatcctattactattttgcctaaattctacgctcctgtaaatgatgaatttatagatgagttaagaaaaacatttccaaatttgttatttagcccttatttaagcactcaagttgttgtaaagggagataatcgttttgaaggtggtgtgctttttggcgttaattttaatgatgaaaaaaaaataaacgaagtggttgctaaagctttaaaggatgagaatttaagtggttttgatatacttgtaggatcagcacttactgatgaatttggtttgcataaaaatgacaaactttcacttattttttcaaatcttaatcctagtggattttctttagtaccgcaaactaaacgttttgatgttaaagcgcgttttacttcagggcttgcattttatgataaagcttatatgtacacagatgttgatgcattgaaaaaagtacttggaatacctaaaaatccaaattatgatggaattcatgtatatagcgataatgcttttaaggatgttgaaaaaattaaatcttatttaaaagatgattatgctgtggtgggttggtgggagcaaaataaaaattttttttcagccttagaacttgaaaaaagagcgctttttatagtgttgatgcttattattttggttgcaagtttaaatatagtaagttctttattgatgatagtaatgaatcgtcgcagtgaaatagcacttttacttgctctaggtgcaagcaaaaatgaggtaaaaaagagtttttttgccttaggtatgcttattggtggtggtggtatgatagtgggtgtggtacttgcattttttgctttatggcttttgggaaattttgatattgtaactttacctgttgatgtttatggaaccagtaaattaccacttgatttgtctttaatggatttttctttaaccattgtgggtgctttaataatcatagctttatcatctttttatcctgcaaaaaaagcaactcaaattaatattttagatactttaagaaatgaataa

SEQ ID NO: 18288 - DNA, 2589 bp, Campylobacter jejuni
atgtttttaaatgctttaaaagccgtgtttggcacaaaaaatgatcgtgaagttaagaaatatttcaagcgtgtagcacaaatcaatgctttagaaggcaactatcaaaatttaagcgatgatgaattaaaagctgaatttgcaaaatttaaagagcaaattttaagcggagaaaaaaacgaaaatgatgttttaaatgatgtttttgctatagtcagagagacaggtaagagaactttaaatatgcgtcattttgatgtgcagttaatcggtggtatggttttgcacgatggaaaaatcgcagaaatgaaaacaggagaaggtaaaactcttgtagcgaccttacctgttgttttaaatgccatgagtggcaaaggcgtacatgtcgttacagtaaatgattatctagccaaaagagatgctgagcaaatgagtgcgatttataattttttaggttttagtgttggcgtggtgctttcttctcaaaatagtgatatagaacacaagcaagcttatgattgtgatattacttatggaaccaataatgagtttggttttgattatttgcgtgataatatgaaattttcaaaagctgaaaaagttcaaagagagcataattttgttatcgtagatgaagtagatagtattttaattgatgaggcaagaactccgcttatcatcagtggtcctacaaatcgtactttagatggttatattaaagccaatgaagtagctaaacaaatgcaaaaaggtgaagcagttttaccccctgcaaaacctgagggtgattttgtagtagatgagaaaaatcgtaatattttaattacagaagcaggtattgctaaggctgaaaaactttttggcgtagaaaatttatacagtcttgataatgctatcttagctcatcagcttgatcaagccttaaaagcacataatctttttgaaaaagatgtgcattatgttttaagaaataatgaagttatcattgttgatgaatttacagggcgtttaagcgaaggacgtcgttttagcgaaggattgcatcaagctttagaagctaaagaaaatgtaaaaattcaagaagaaagccaaactctagcagatattacttttcaaaattattttagaatgtacaataaacttgcaggtatgacaggaactgcacaaacagaagcgactgaattttctcaaatttatagtttagatgttatttctataccgacaaatattcctattaaaagacaagataaagatgatcttatctataaaactcaaaatgaaaaattcaaagctgtaattgaagagattaaaaaagccaatgctaaaggtcagcctgtacttgtaggaaccgcaagtatagagcgcagtgaagtttttcacaatatgcttgtaaaagagaaaatccctcatcatgttttaaatgctaaaaatcacgagcaagaagctttgattatccaagatgcaggtaaaaaaggtgctgtaactatcgctacaaatatggcaggtcgtggtgtggatataaaaatcgatgatgagattagggctttgggtgggctttatatcatcggtacagaaagacatgaaagccgccgtattgataatcaacttcgtggtcgtgcaggaaggcagggtgatcctggaataagtcgtttttatctaagtttagaagataatcttttaagaatttttggtggggatcgtattaaaagtattatggatcgtttgggcatagaagagggcgaaagcatagaatcaagaatcgttacaagagcggttgaaaatgcgcaaaaaaaagttgaaagcttgcattttgaaagcagaaagcatttgttagaatacgatgatgtagcaaatgaacaaagaaaaactatttatcgttatcgtaatgagcttttagatgaaaactatgatattagagctaaaatttctcaaaatatcgctgaatatagcgcaaatgtaatgaatgattatatgcttgacgaaagcggttctaatgtaaattttgaaaatttgaaagcaaaaattttgtatgaatgttcaactcagattagtgaaaaagattttgagaatttaagcgtcattgaaatgcaagacaagctaagtcaaattcttgaaaattcttataatgaaaagatgttaagacttgagattaaagaattgcgtaatatagagcgtattttatatttgcaagttttggataatgcttggagagagcatttgtatcaaatggatattttaaaaacaggaataggacttcgtggatacaatcaaaaagatcctcttgtggaatataagaaagaaagttataatcttttcttggagttggtcaatcgtattaaatttgatagtattaaactactttttagcgtgcaatttaatcaagaagaggcgcaaaatttagaaaataaagccaatgaagaaaatgaaaagctacttcaaagctcagtagaaatgggcgcaagcgaagataatcttggcgaagctgaatttaaaaaagttccacgcaatgctccttgtccttgcggaagtggaaaaaaatttaaagaatgccatggaaaaagtggtcctaagcaaggaattttagcttga

SEQ ID NO: 18289 - DNA, 2187 bp, Campylobacter jejuni
atggataaagaaaccataaaagcacataaaatcagcgatgaagaatatgcacaaattttagaaattttaggacgtgagccaaatttattagaacttggggttatttctgcgatgtggagtgagcattgctcttataaatccagtaaaaaatatcttaatggttttccaactaaagcaccttgggtgattcaaggtccaggtgaaaacgcaggggttattgatatcgggcaaggtatggcagcggtttttaaagtggaaagtcacaatcaccctagttttatcgaaccttttgcaggtgcggctacaggagtagggggaattttgcgtgatgtttttactatgggtgcaagagtggttgcggggctaaattctttaaaatttggcgatattcatgatgaaaaatgcggcaaacatcaaaaataccttgttaaaggcgtggtaaatggaatttctcattatggaaattgcatgggtgtgccaactataggcggagaatgtgcttttgatgagtgttttaatggaaatatcttagttaatgcctttgctttaggggtttgtaaaagtgaagatatcttttatgctaaggctgaaggtgtaggaaatcctgtgatttatgtgggttcaaaaacagggcgtgatggacttggtggagcggttatggcaagtgatagcttcaatgaagaaagcaaatctttgcgtcctacagtgcaaattggcgatcctttcagtgaaaaacttcttatggaggcttgtttagagctttttaaaaccgattatattgtgggtattcaagatatgggtgctgcagggcttacttcaagttcttttgaaatggcaggaagaagtggcagtggcatgaaactttacttagataaaactcctatgcgtgaaagcggtatgactccttatgagttaatgcttagcgaatctcaagaaagaatgcttatttgtgcgaaaaaaggctatgaagataaggttatagagattttcaaaaaatgggatttagatgctgtggttatgggtgaagttaccaatacaggaaaaatggagcttttttggcatgatgagcttgtaggacttattcctatcgagcctttaagtgaaaaagcgccgattttaagtcgccctacaagtgaaccaaaatatttaagtgaaattaaaaattataaatttgagttaaaatcaagcgttcaagagctttttatacaaatgcttcaaaatgaaaatattaataataaagcttttatttatgatcaatttgattcaagtgtgcaaaccaataccataaaagctgatggaagattaggtgctagtgttattcgtatcaaagaaaatggtgcaagtgtggctatggctatagaatgtaattcacgcttaaattatgtaaattctaaaataggagcagctttagcagtagcttctgcaggaagaaaagttgcttgtacgggggctaaacctttggcaataagcgattgtttaaattatggaaatccgcaaaatcctgaagtgatgtggcaattcgcacaaggttgcgaaggtattaaagaagcttgtaaagagttaaataccccagtagtaagcggcaatgtttcgctttataatgaaactgaaggcgtaagtatttatccaagtcctactatagtaagtgtaggggttttagaagatgcaaataaaaccctaaaagctagttttgaaaaagaaaatttaagcgtttatcttttgggtgaaagtttaggagaatttagtggatctatggtaatgaaaatccaagataaaaaagtatcaggaagtcttaaagagcttgattataaagctgaacttgcactttgggatttgctttataaagccaatcaaaattctttacttgagtgtgccaatagcgtaggaatagggggtattgctatgactttggcaaaaatgtttgctatttctagtgtgggtgcaaatttaacaagtgattttgatgatgaaaaaatgatttttgatgagagtgcaagtcgtgctataatagggcttagtaaagaaaatgaagaagcttttttaaatttagctaaagaatttggagtaaaagcttataaattaggtgtgagtacaagccaaaaacattttaaacttgatagcattgagttaagcaaggctgaacttgataagctttattttgaaagttttaaagagcaaatccaatga

SEQ ID NO: 18290 - DNA, 1329 bp, Campylobacter jejuni
atgagtgatactatagcggctattgccacagctcatggtgtgggttcgatttctattgtaagattaagcggtgaaagggctttagaatttgccttaaagcttagccacaaaaccaaacttaccccgcgccatgctacttttacaaaactttttaatcaaaataatgaaattatcgatgaagctataatgatatattttaaagccccttatagttttacaggggaagatatagtagagtttcaaactcatggaggatttagtgtgagtgaagttttactcgaagaacttgtgagtttaggagcaagacttgctttagcaggggaatttagcaaaagagcgtgtttaaatggcaaaatgactcctttaaaagctttaaatatacaagatctcatactttcaaaatctgcacttgcagctaaaattatagcacgcaacatgcaaggaaacttaggagaacttttagaaaaaattcgcacagatttggttaaaaccttggcttttgtagaaactagcattgattatgctgatgatgatttaccttctgatttattagagcaaatttctactatgtgtgaagaaaattctaaaattttaaaagaaatttatacgctttctcaaagcaaaaaaggactcatagaaggttttaaaatcgctattgtaggtaagccaaatgtaggcaaatcttcgcttttaaatgccttgctttcttatgaaagagctattgtttcagatatagcaggcaccactcgtgatactatagaagagaactttaaattaggaacgcatttattacgcattatagatacagcgggtattagggaaagtaaagatgttatagaacaaatcggcgtagctttaagtaaaaaaagtttagaagatgcagatattattttggcagtctttgatgcttcaagagtgcaagataaagaagatgagaaaatttttgacttattagcaaatactgataaaaaaatcttttggattttaaataaaagtgatttagaaaatgttttcaaaaatactcaaaataaaaattttatcaagcttagtgctcaaaaagacattactttgttaaaagaagaattgcaaaattatcttaattcttttgatagcgaaggtattatggtaagttctttagatcttattaatgcttgtaaaatttcaagtgaagcgatttttagagctaaggggcttttagaggaaagttctttagagttttttgcttttgagcttaatttagctattaatgaacttgcaagatttaccaaagattttcaaagagatgaaattttagacgaaatgtttggtaatttttgtttaggaaaatga

SEQ ID NO: 18291 - DNA, 1587 bp, Campylobacter jejuni
gtgaataattcaaataatatttttcagcaaaagcgtatacttttagctgttgtgatttcttttttattttttgttatttatgattattttttcattccaaagcaacctttaaaaatagaacaaaacattacacaaaaaaatcaacaaaacacaagcataaataacactcctaatatacaaaatgccaccacaaatactccaagtgcggctttagtttcgcaagatagtgtgatatctaaggttcaaagcaagcattttgaagcacaaattgactcttttggtagaatttctgctttttatttaaaagatagaaaataccaaaatgagaaaggagaatttataaatcttgttagcaaggaaaatagtccttatcctttagaaatgcgttttagtgatccaagtattaactcagaggcttttaaaattccttatgttgctaacgctagcaatctttttgttgatgaaaatggaagtcaagttttaaaactcactcaaaatctttctggattgaaaatcgaaaaagatattactttttatccaaaaggaaattatgagatagaagttaaactcagcaagaatgcaaattattttataagtccaggatatcgtccaaatattgccgtagatagttatacagttcatggtgctttggtaatggataataaagaaaccatcgaaacttataaagatggagatgtagaaaaggatgaaagtgctaataatgtcgtaatgacttcggcttttgatagatactatgcaactttcttttataattttgataaacctttaaatgtggcaatcagcaaggatgctaatcaaaaccctatagtttttgcttatagtgataatgaatttaaagcagggggctatataggctctaaagaacatgtgattttaagaagtatagatccacgccttgaagcagttgttgaatatggttggtttacttttattgctaagcctatgtttgagtttttgaatttcttgcatcagtatataggaaattggggttgggctatcgttgtgatgactttaattgtgcgtattattttattcccgctaacttataagtctatgatttctatgaataaacttaaagatcttgctcctaaaatgaaagatattagagagcgttataaaggcgatccacaaaaaatgaatatgcacatgatggagctttataaaaaacatggtgcaaatcctatgagtggttgtttgcctatacttttacaaattcctattttctttgctatttatcgcgttttgcttaatgctattgagctaaaagcagctccttgggcgttttggatacatgatttatcggtaatggatccttattttattttgcctattttaatgggtgcaacgatgtttttacaacagcttattacacctatgactatacaagatcctatgcaagctaagattatgaaatttttaccagtgatttttacttttttctttatcactttcccagcaggacttacgctttattggtttgtaaataacctttgttctttggttcaacaatgggttatcaataaaatatttgctaaagaacatcacaaaaaaacaagcggagcatga

SEQ ID NO: 18292 - DNA, 327 bp, Campylobacter jejuni
gtgaaaaattttgataaatttagcacaaacgaggaattttcatctgtatataaagtaggcaaaaaatggcattgcgaaggtgtgatcattttttatctgaatagttatgaaaaaaaaatagcagttgttgctagtaaaaaagttggaaaagcagtggttagaaatcgttcaaaacgaattttaagagctttgtttgctaagtttgaaagatatcttcaagatggcaaatatatttttgtagctaaaaatgaaatcactgaactttctttttctaggttagaaaaaaatctaaaatggggattgaaaaaactagaatgtttcaaatga

SEQ ID NO: 18293 - DNA, 135 bp, Campylobacter jejuni
atgaaaagaacttatcagccgcatggtactccaagaaaacgcactcatggtttccgtgttcgtatgaaaactaaaaatggtcgcaaagtgatcaatgcaagacgcgctaaaggtagaaaaagacttgctgtgtga

SEQ ID NO: 18294 - DNA, 2289 bp, Campylobacter jejuni
atagagaaattttgttttaaactttctattgttaccttcttaagcatcaacgcttttgcagccactcaagcaaatactacagacaatcgaaatttcaatattccagagcattattttaatgataacgaactttatgataaaaccaattctacttataaaaaactccaaggtataaattattatgctaagagttctaaacaatatattaacaatattactttaatatataacaatcctaaaccaaatattacaaatataaacgatttaaattttaaacattatttacttactcctgatatgagagaagatgaagttctttcttttaaagcaaggcatggtgttaatacagccggtcatagtataaaaacagttagagtgcttccttttttaatcacagcaaaaaccgatcatgctgatgcaagttataataaacttatattagaacaaggagaacttagttcagttttttatcttaaacctaaagatactcatataaaaaaccctagtaattctaaaagcaatcaacgcatgaatttcttaatgagttctacctttactcattatggtaatgcaagctataaccaaaccatacttcaaaaagatgcccatattagtatgggagttgagaacacttatgatttagccttaaatggtgctccttatttaatcggagctatagccacttatggagattctacaaataatagtttaaatatagaagcaggtagcagtgtagagttttttacttccttacctaaaaaagataaaaatggtaataatacctttgatgaaagaatcactcaccttgtaggtggtttagcttatcaaggtaatgtaaaaaacaataaaatctttatcaaagatgctaatatgattatccatggtccaagcaaagcttatgctagtttagctgctgctcatattagcgcaggttatatagatagtggaacagataaaaactttcaagccagtaaaaaccttttagacatagatggttttaatcttgatatgtatatgaaccatgataaacaacccttagcttataattctgttttatttgctgatttttggggtggaaaaaccgaacaaggacaagccttagataatactatcaatttaaaagatattaaaaacctaaaaaaagataaaaacaatgagaacatttttgctcaagctttgtttaacttctatgcaggagcttctaataatggagaagcaaattataataccttaaacatagaattaaaacatcctttagaaatcgctaataacttcttaggttataaccaacattctttttatggtggctttgcaactaaaggagctaatcataataccattaacattaaaaacgatcttaccacaaccgatctttctcaaagctataaagatgctttaaatattgtagctgctagaaccttagaaggcagtgcggattataataaagtttatattaataattctatgtcaaccttacctgtatacatttatacagctaagaaaaacattcttaataaccaagacttttatcctagtagtgctaataacaatgaagtagtgattaaagactttgcttcttttagaaatttaactgtattaacagaagctaaagaagcctcttataatactataaattataacaatgttcaaagcattaccgatgtaagtaatatagataaaggttctaaaatcatcataagagctttagataaagccaatcataatactatagatataaaaaactattcttctaatgcagctgataatgcttatttgattatggcttataatgaagctgcttataataaaatcattatcaatgatactttatttggtgtagcttcagataaaagagaaggaattttaagtattatagctggactttcaaacaatgcccatgataataccttaatcataaacaatcttaatcttgatgagtacaaaaataacaattctatttttatagctccttcagccattacaggtttaagtgaagctaaatcttataataataccttatatataggtgggaatttaaatatatttaaaaacactttcatagatatattagcaggagcgttggtgcattatgaagataattatagtgcttctaatgctgcagctccttcagatatcagtttaagtaaaaacaatagactgattttaaatactaaagttgaagctagaattattaataactttgagcattattatcttattgtatccaataaaatcaacacaactccccttttgaagtcatacgatgctcctattaatatttctagctag

SEQ ID NO: 18295 - DNA, 1725 bp, Campylobacter jejuni
atgttagaacaatctccttataaagaagatgctaactcaaaaaactacaacaacactttaaaagtaaaagatggagtgattatcatagatcattctaatactagtgatgataataattcaaaaaccatcaacacaaagaaaaacactcaaaaaaatcaacctaacttgtctaatgataatactttaaaaactaaaaccccaaattcaaacactccttctttaaaaaatacttctaaagaagaatcaattcataaagttagctttagctttcatattaccaataaaaacataaactttaaagatctaggtttagatgagcaagttttacaagaagccttaaacgattacaaaaaagaaagtatttcagttcaagacttacaagatatagccaatatcatttcttattatgttcaagttagtggttatcctgctgctacagcttatatcccacaacaagaactaaaagatcaaattcaaatcaatatcaccttaggtgttttaggtaaatatgtggttcaaaacaattctagtgtaagagattatgctatagaaagtaaattacctaatcacaaaggtgaaatcatcactactaaattagtagaagatgcagtttataaagtcaatgaaatgtatggcatacaaacccttgcttctttaaaagcaggagataatccaggtgaaacagatgtagtgatagaaactacccctagtgatagctttgtttctgtattgttttatggggataattacggtataaaagaatcaggcagatatagggatggtgccagtatgagttttaataacatagctcatcaaggagatagtcttaatgcttatttgcaaagaagcgatgaagcacaaactaactatagtataagctatactactttcttagggaatttaaaaatcactccaagttattctaaaagaaactatgctttaggaggagcttataaaaatgcaaactttataggaacttctgaaaatctaggtatagatttaaaatatcctttgtggattacgacttataattctttttatttaacttcaagttattatcataaaaagcttagtaattcaagattaaatatcatgactatagataaaagctctgatacgataagctttagtatagaaggagtttataatggcattagtaatgatagtttttcttatagtgctaatgtaagctatggtaatgttaaagatgggggaactactatattaggaatgagttctaaaacagatggagatggctttggaaaatttgctaaactcaatgtcaatcttaacaatgcttatttctttaatgatacttttactcatctttttagtttaaattatcaacaagttgtcaatggagctacattagatagtagtgaaactatatctttaggagatccttatggagtaagggcttataataatggagatggagaaggagataatgctgtagtggctagctttggacttagaatggctactcctttaaaagatttttatatcactcctttttataatataggttattcttggtatgagaatgattctaaactatatagagcaagtgaaacaaactatatggatgcttatggtttacaactgctttataataaaacagggaatttttatgtcaagcttgatttagctagagctttaaagaaatataaactagatgatgattatagttctaaagcttatgtaagctttgggaagtatttttga

SEQ ID NO: 18296 - DNA, 984 bp, Campylobacter jejuni
atgtttaaaagatttagaagattaaggcttaatgaaaacttaagatctatggtaagggaaaattctttaagtgtaaatgatttgatttatccgctttttgtggttaatggaacggggataaaaaaagaaatttcttctatgcctgatgtgtttcaaatgagtttagatgaaattttaaaagagtgtcaaaatgtagttaatttaggcattaaagccattatactttttggtgttttagaaaatgagaaaaaagacagttgtggaagcgatgctttagatgatgaagggcttgttgcaagaagtataagagagattaagaaaaattttccagatctttttataatcagtgatctttgtttttgcgaatacacagatcacgggcattgtgggattatcgatccaaaaataaaaagcgtagataatgatgcaactttagaaatttcagccaagcaagccttagttcatgcaagagcaggggtagatatgatagcacctagtggaatgatggatggtgttatcactactttgcgcaaagctttagataaggaaggttttgaaaatttgcctataatggcgtattctactaaatttgcatcaagttattatgggccatttcgagatgtagcagagtcagctccaagttatggagatagaaaaagctatcaaatggattttgctaatggtaaagaagctttagaagaaagcttagaggatgaagcacaaggagctgatattttaatggtaaaacctgctcttgcttatcttgatgtggttaaagaaatatcccttcattctaacttgcctttgtgtatttataatgtaagcggagagtatgctatgttaaaggcagctaaaaatgcaggagtgattgattatgaaaaagttttgtatgaaactataatagcttttaaaagagcaggggcaaagcttatcatcacttatcatgctaaagaattagctaaaatgttaaaaggagaaaaatga

SEQ ID NO: 18297 - DNA, 567 bp, Campylobacter jejuni
atgatttttaaagattatgattttttgcaaaactacgatttaaaaaactttgaagaaaaggtaaaaatttataaagaattattatctaaatttaaccgcattcacaatcttactcatttaaaaaatatagatgaaaatatctttgatagtattaaaattttagatttttatgatttttctaaagcaaaaaatattgccgatataggaagtggcgcaggatttccagttgtatttttagcttttttactgcaaagcaattttcatcttttcgaacccaatcccaaaaaagctgcctttttgcggacattaaaaatagaatgtgaacttccaaatttacatatttacaaagaaaaagttcaagaatacaagaatacctttaaagctgatatcatcacttcaagagccttaatggatgtcaagcctttgcttgaaatttgtaaaaatctaaaagatgaaaatacagtttttattttatggaaaggtagtgaaatttatcaagaacttgaaaatataaaagattatgaaatttttgaaaataatttaagaagatattgtattttaaagtag

SEQ ID NO: 18298 - DNA, 1869 bp, Campylobacter jejuni
atgaacgccaaaactcaagaagctgaattagaagaattatttcaagaaaatgcaaaagattatatcacatatgaaaaattggtaaaatatcttacaaaacaaccaagtgcatcaaccactaaaaaagtgcaagcattaatgaaaaaacacaaagtgcaacttttttcagcagctgaaattgcacaaatgaaaaacatagaagatgcaaaaagacttcaagaagaaaaacaaaaactccaagatacaagccttgagaacgaatttgatttagccaatgaaaacgatttattagaatggagcagatcagactctcctgttcgtatgtatttaagagaaatgggacaaattgctttattaaacaaagatgaagaaattgaaatttccaaaaaaatagaacttggcgaagatattatcattgatgctttttgttctgtaccttatttgatagattttattttagattataaagaacctttaataaacagagaaagaagggtaaaagaactatttaaaagctttgacgatgaagaaaaaagtgatgacaaacttgatgaacttgatatagatgaagatgaagaaaacgaaacagaattagaatcagatgaagaaaatactaaaaaaaacagcaaaaaagaagatgaaagaactttaaaagttatagaaaaatttaaagctctagaaaaagctaaaaaagattggctaaaaacatccaaagacaaagaaagcggagatgaacttttagataaattaagcattgcgttcaaaaaaaatattttaaaagaaaaattaatggatctaggccctacttcaaaacttattagcgaaatcgtaaaatcaatggaaactgcactaaaaagtgatgaagaatttgacaaagaacttaagcgtttagaataccgcttacctatgttttctgatgaacttaaaaaacgccatgcagatattttaaaagatattacaaaattgagcaaagaagaaatcacagagcgagctttagaaacaaccatggtaagcacttatatggaaattaaaaaactatttcaaactaaagaagccagtgaaaaaagctttgatcttgaaaaatcacgcttaaaagaaattttggagcaaattaaacgcggtaaaaaaatctctgatgaagcaaaaggaagaatggcaaaatcaaacttgcgccttgttgtaagcatagctaaacgctacacaaatcgtggtctgcctttcttagaccttatccaagaaggaaatataggtttgatgaaagctgtggataaatttgaatacaaaaggggttataaattttccacttatgcaacttggtggatcaggcaagctatttcaagggctatagctgatcaagcaagaaccataagaattccaatccatatgatagaaaccatcaatcaaattaacaaaattatccgcgaacatctacaaaaagatggaaaagaacctgatgtcagtgttatagctaaagaagtaggtttaagcgtagataaggttaaacaagttattaaaatcacaaaagaaccaatttctcttgaagctccaataggaaatgaagatgatggtaaatttggagattttgttgaagatagaaattcactttctccaatggatcatatcttaaaggatgatttaaaagaacaaattgatgaagttttagatcaattaaacgatagagaaaaagcggtaattcgtatgcgttttggtttaatggatgatgaaagtgatagaactttagaggaaattggaaaggaacttaatgtcactcgagaaagagtgagacaaatagaaagctcagctataaaaaaactcaaacaccctaaagtaggaagaaaactaaaaaattatatagaaggttggaagtaa

SEQ ID NO: 18299 - DNA, 1122 bp, Campylobacter jejuni
atggaatttaaattaaagcataaagatggaatggcaagggtttgtgaaatcactaccgcacacagcacttttttaacccctgtttttatgcctgttggcacagtaggagcggttaaaagtcttgatgctaatgatatgaaaaatgagcttgatgcaaaaattattttagcaaatacctatcacatgtacttgcgtccaacttccaaagtagtaaaagattttggaggtttacatggatttacgaaatttgatagaagttttttaaccgatagtggtggttttcaagctttttctttaagtaaaaattccaaacattttaatgaaggcatagaatttaaaagtcacattgatggaagtcgtcatctttttactccaaaaagtgttttagatactcaatatgattttaattctgatattatgatgattttagatgatttagtagccctacccgcaaccaaagaaagggttaaaatttctgttgatcgcactatactttgggcaaaagaggctattacttatcataaaaatatgcaaaataaaggtataggtatagggcaaaatatttttggtattatccaaggtggtacagattatgaagaaagaaagcgttgcgctttaagtttaaatgaaatgccatttgatggtttagctataggtgggcttagcgtgggcgaagaaaacgccttgatgtacgaaacagtccaaaacttaaacccttatctagatgaaaatcgtccaagatatttaatgggcgtaggaacgcctgaagatttagtagaaaatgttgagcgaggagtagatatgtttgactgtgtgatgccaactagaaatgcaagaaatggaacatttttcacaagttttggaaaatttaatatcaaaaaagcagaatttatcaacgatcatgaagttatagattctacttgctcatgttatacttgtcgtaatttttcaaggggttatttaaaccatctttttaaagctaaagaacttactttttttcgtttggcaagtctgcacaatctacattattatcttgaacttgcaagaaagatgcgtgaagcaattttgaacaattcttttacgcaatttaaaagaaatttttatcacttaagaggcaaataa

SEQ ID NO: 18300 - DNA, 1053 bp, Campylobacter jejuni
atgatggttagaattaaggtttcacatttaatctttttaattgcttcaattatttttattttcatttctccttatatttttggggattatggattaaacattgttaatcaaattgctatttttattattttggctgtgagttacaatcttattaatggtgtaactggacaattttcactagaacccaatggatttgttgcgattggagcttatgcggctgctttagttcttttaagtgctgatgcaaaaaatgatcagttttttttagatggtcctagttcttttattttagctatccattcaaattcctttattctagctttaattgtggctggaatttgttcatctttacttgccctgattttggcttttgctgtatttcgcgtgagaggggattatttggctattgtaactttaggctttggaataattattaaaatagctgctattaattttccttctattactaatggctcaagagggctggtagatattccacaattttccacgatctattggacaggtggtattgctattgtagcggttattttaattttaaatatagtttattctaaatatggtcgtgcaatgaaggctataagagatgatgaagatgctgcaagcgctatgggaataaatactttttggataaaaactttagcttttagcacttcagcatttttagaaggtgtaggtggcggacttttagcttgtctgttgactaccgtatctccaactcaatttgattttttacttacttttcagcttttgattattattgttttaggtggacttggttctactacaggtgctattataggtgcgatattggttattggtggaagtgagtggcttagatttttagatgagttaaatataaaaatagattctttaaatcttgatatccaatcaacgccagggcttagaatggttgttttttctattgttctgattttagtaatgctttttgcaagaaaaggcataatgggttattatgagttgagtgatgtgattagagggattaaaaagcgttttaaaaggagcaaaaaatga

SEQ ID NO: 18301 - DNA, 1032 bp, Campylobacter jejuni
atgtcaaaaaaacaaaaaatagccattgtgggtgctactggtgcggttggggaagagcttttaaatgttttagatgaacttgatttcccagtggaaagtattttacctttagcaagtgcaaaaagtgtaggtagtgaagtagaatttaaaggcaaagcttataaagtcaaagaacttaccgaaaatgtatttaaagaaaatcctattgatattgctttttttagcgcaggtggaagtgtgagtgaaaaatatgctaaatttgcagtagaatctggtgctgttgttattgataatacaagtcattttagaatggaaaaagatgttcctttggtggttcctgaatgcaatcctgaggatattaaagattggaaaaaaacagggattattgctaatccaaattgttctactatacaaatggtgcaagttttaaaacctttaaatgatgcatttaatttaaagcgtgttgatgtaagtacctatcaggctgcaagtggagcaggaaaagaaggaatgcaagaattggttgaagctatgcaaagtttttttgcttttaaacttgatgaatttgaacctcaaacttttccttatactttggcacttaatcttattccacaaattgatgtttttatggataatgattacactaaagaagaacttaaaatggtcaatgaaactcaaaaaattttacataaaaatttagaagtttcggcaacttgtgttagagtgcctgttttaagaagtcatagcgaagccattactatgcattttgaaaaagaaatagatgtaaaaaaagctaaagaaattttaaaaaaagcaccaagtgttattgtcatagatgatcctaaaaataaaaaataccctatgcctttaatgactagcgatactaatgaaacttatgtaggaagaattcgtgctgatgtgtatgataaaaaaatactccatctttggtgtgtggcggatcaaattcgtgtaggtgctgcaacaaatgctgtgcgtattgcgcaaaaatggttagaattaaaaaataaataa

SEQ ID NO: 18302 - DNA, 2592 bp, Campylobacter jejuni
atggagaatatttttagcaaagattctgatattgaacttgtagatatagaaaattctataaaaagtagttatttagactattctatgagtgttattataggtcgtgctttgcctgacgcaagagatggtttaaagcctgttcatagaagaattttatatgctatgcaaaatgatgaggcaaaaagtagaacagattttgtcaaatcagcccgtatagtgggtgctgttataggtcgttatcacccacatggagatacagcagtttatgatgctttggttagaatggctcaagatttttctatgagatatccaagtattacaggacaaggcaactttggatctatagatggtgatagtgccgctgcgatgcgttatactgaagcaaaaatgagtaaactttctcatgagcttttaaaagatatagataaagatacggtcgattttgttccaaattatgatggttcagaaagcgaacctgatgttttaccttctagggttccaaatttattattaaatggttcaagtggtatagctgtaggtatggcgacaaacatcccacctcatagtttaaatgagttgatagatggacttttatatttgcttgataataaagatgcaagcctagaagagattatgcagtttatcaaaggtccagattttccaacaggtggaataatttatggtaaaaaaggtattatagaagcttatcgcacagggcgtggtcgcgtgaaagtgcgagctaaaactcatattgaaaaaaagacaaataaagatgttattgttatcgatgagcttccttatcaaaccaataaagctaggcttatagagcagattgcagagcttgttaaagaaaggcaaattgaaggaatatctgaagtaagagatgagagcaataaagaaggaatccgcgttgttatagagcttaaacgtgaggctatgagtgaaattgttttaaataatctatttaaatctaccactatggaaagtacttttggtgtgattatgttggcaattcataataaagaacctaaaattttctctttgttggaacttttaaatcttttcttaactcatagaaaaacagttattattagaagaacgatttttgaacttcaaaaggcaagagcaagagctcatattttagaaggtcttaaaattgcacttgataatatagatgaagtgattgctttaattaaaaatagttctgataataataccgcaagagattctttagtagctaaatttggtcttagtgagcttcaagccaatgctattttagatatgaaacttggtcgtttaacaggacttgaaagagaaaaaatcgaaaatgaacttgcagaattaatgaaagaaattgcaagacttgaagaaattttaaaaagtgaaaccttgcttgaaaatttaattcgcgatgaattaaaagaaattagaagtaaatttgatgtgccacgtattactcaaattgaagatgattacgatgatattgatattgaagatttgattcctaatgaaaatatggttgtaactatcacacatcgtggttatattaagcgtgtgcctagtaaacaatatgaaaaacaaaaacgaggtggaaaaggaaaattagccgttacgacttatgatgatgattttatagaaagtttctttacggcaaatacacatgatacgcttatgtttgtaacagatcgtggacagctttattggcttaaagtttataaaattcctgaaggctcaagaacggctaaaggaaaagcagtggtaaatcttatcaatttacaagctgaagaaaaaatcatggctattattccaaccacggattttgatgagagcaaatctttatgtttctttactaaaaatggtattgtaaagcgtacaaatttgagtgaatatcaaaatatcagaagtgtaggagttagagcgatcaacttggatgaaaatgatgagttggtaactgctattattgttcaaagagatgaagatgaaatttttgccactggtggtgaagaaaatttagaaaatcaagaaattgaaaatttagatgatgaaaatcttgaaaatgaagaaagtgtaagcacacaaggtaaaatgctctttgcagtaaccaaaaaaggtatgtgtatcaaattcccacttgctaaagtgcgtgaaatcggccgtgtaagtcgtggggtgacggctattaagtttaaagagaaaaatgacgaattagtaggtgcagttgttatagaaaatgatgagcaagaaattttaagcataagtgcaaaaggtataggaaaacgcaccaatgctggagaatatagattgcaaagcagaggtggtaagggtgtaatttgtatgaaacttacagaaaaaaccaaagatcttattagcgtagttatagtagatgaaactatggatttaatggctcttacaagttcaggtaagatgatacgtgttgatatgcaaagcattagaaaagcagggcgtaatacgagtggtgtcattgtagttaatgtggaaaatgacgaggtggttagcatcgctaagtgtcctaaagaggaaaatgacgaggatgagttaagcgatgaaaactttggtttagatttgcaataa

SEQ ID NO: 18303 - DNA, 3018 bp, Campylobacter jejuni
atgtttaaactagctataaaccgacctattaccgtgctaatgtttttcttagctcttatgatttttgggctaatctctgcttttagcatgagtgtaaatttatttcctaatgtttccatacctcttataaaaatcacaagcaagataaatggggatttaaatttcgtagaatcaaaagtcactaaagaaatagaaaatgctttaagtgaaatcgatggagtaaagaccataacctcagctgcatatgataattttagtgtaagtgtagtcgagtttaaactgggtaaaaatcttgaagtagctgccaatgatgtgcgtgataaaataggaactttaagcctaccttctaagcctgaaattgaaaaaatcagttcagattctggttctgctatttcactttttctatattctaaagataaattacaactcatgcgtgaaatcaatgacaaaataaaaccttttttgcaaagagttgaaggagtaggtaaaatcgaagctaaggggtttttagaaccccaaattcgcatagaattaaaaccaaaccaacttagaaaatacaatcttaacgcccttgatgtagcaaatatcatcaaaagtcaaaattttaaacaagccctaggcgaacttaacaacaatcaagataactatatcatcaaaggctattttgaagccacaaatttagaagaacttagcaatcttcgcataaaaacaggagtatttttaagtgatattgctaatatttcaagcctttatgaagatgaaaaacaaagtgctttatacgaaggtaaagaaggggtgcttttagaactcggaaaaatcacaaattataacacccttgaaatgattaaaaatgtcaaaaatgccttgcctattttagaaaaacaaattccaaaagatataagcattaatatgctttatgataaaagcttaaatatccacaagcacctttctcaagtgatttttgatatggttttggggatttttctaacccttgttatcgtgtttttatttttaagaaatttaagtacaactctcattgcttgcatagctatacctacttctatcatttcaactttttttattatcgatcttttaggctatgatttaaaccgcttaacttttatagctttaaccttaagcataggaatttttatcgatgatgctatagtagtgattgaaaatattgctaaaaaactaaaaacttatccgcctttacaagctgcttttttaggtatcaatgaaataggttttagcgttttaagcataagtatagttttactttgtgtttttatccctatttcttatatgaactctatatcagggctttttttcaatgccttaggcataagcgttgcaagtgggatagttataagctttttggtttctgtatttttaatacctagtattggggcaagatttttaaatccaaaagaaaacaagttttatgaaaaaacagaagctttttttgaaaaaatagagcaaaagtatgaaaatttactctataaaattttacaaaataaagtaaaatttatcctagccactcttgtttttatagggctttcttttgctttagccactcgcatagggcttgattttttacctatggaagatgatagtgaaattcaagttttgcttgaaagcaaaaaggatttaagtttagaagccatgaaagaaaaaagtttaaatttgcttgaaaaaatcaaaaatgatagcaatgtcaaatacgcttttttacttgtaggctatgatgatgccaaagatgctacaaaggctaaaatttatgttaaacttaaaaatttagacgaaagaaatttaagacaaagtgccatagtaagtttatatcgtcaaaaatttcaagatgaaagtttaaaaatcaaaattttagaacttccaaagatagagggtgcaggcattgatgatcccgtgcaatttttaatcttaggagatgatttaaacactctgaaagaagctgcttctcaggcaaaagaaattttaggcactaatgcacgcattgtagatataagtgataatgctaatgctacaaaagatgaagtagccttacacatcaacaaagaaaaagccaaacttttagatgtcaatcctcaatatatcgctggggttttagggtattctttctcgcaacttagcgtaggaagcatggatagaggcaattcaaaagatgatattatcctaagttttgctccagaatttaaaaaagacatagaagctttaaagcgcattagcattaaaaacaaccaaggtataaatttagaactttcaagcgtggtggattttatatacagtaaagatttaaaaactatcaatcgttacaataaaaaccgctctgtgaaaatcacagctggagtgaatgatctttccttaggagcggtgcaaaaacttttactagataatatggataaaattttaaataacaatccaagtcttagctatgctttttcaggctttatcaatcttttaggtgaaaccgtgcaaggttttgctatggcagtagcacttgcttttgttttaatttatcttgttttagccgcactttatgaaagttttattctgcctttaatcatcatgataaccatgcctttagcctttggcggagcttctatagggctttttatcacagggcataatttttcactttttgtacttattgccatcatcttactttttggtatggtggggaaaaatgctattttactcgtagatgtagctaataaaaaatgccatgaaggtttagatcccgataaagctcttttaatcgctggaaaatcgcgcttaagggctatattgatgacaacttttgctatgatttttgctatgctcccacttgctctttcaaggggtgcgggctatgaagctaattctcctatggcaatagccattatctttggacttataagttcgactttgcttaccttactcgtagtacctgcactttttaaattttgttttaaactagatagcaaattaagaaaaatttatgagagagaaaaattaaattaa

SEQ ID NO: 18304 - DNA, 1446 bp, Campylobacter jejuni
atgaatcaaatccataaaattctcatagcaaatagagctgaaatagctgttagagtaatccgtgcttgtagagatttacatattaaaagtgttgcagtttttacagagcctgatcgtgaatgtttgcatgtaaaaatcgcagatgaggcttatcgcataggaacggatgctataagaggatatttagatgttgctcgtattgtcgagattgctaaggcttgtggtgctgatgcgattcatcctggttatggatttttaagtgagaattacgaatttgctaaggcttgtgaagatgctggaattatttttataggtccaaaatctgaagtaatccataagatgggaaataaaaatatcgctcgtaagttaatggctaaaaatggcatacctattgttccagggactgaaaaattaaattcctatagcatggaagaaattaaaatttttgctgagaagattggttatcctgttattttaaaagcttcaggtggtggaggtggacgcggaattcgcgttgttcataaagaacaagatcttgaaaatgcctttgaatcttgcaaaagagaagctttaacatactttaataatgatgaagtatttatggaaaaatatgtagttaatcccagacatatagaatttcaaattttaggagataactacggaaatattatccatctttgtgaaagggattgttctattcaaagaagacatcaaaaggtaattgagatagcaccttgccctggaatttcagataatcttagaaaaaccatgggtgttacagctgtggcagctgctaaggctgtaggttatacaaatgctggaactatagagtttttgcttgatgattataatcgcttttattttatggaaatgaatacaagaattcaagttgagcatccaattactgaagaaattacaggtattgatcttattgtaagacaaattcgtattgcagcaggagaaattttggacttagaacaaagcgatattaaacctaggggttttgctattgaagctagaattactgctgaaaatgtatggaaaaattttattccaagtcctggaaaaataggagaatactacccagctcttggaccatctgttagggttgatagtcatatttataaagactatactgtgccgccttattatgattccatgcttgcaaagcttattattaaagcaacaagttatgatttagcggttaataaacttgagcgtgctttgaaggaatttgtgattgatgatattagaacaacaataccatttttaattgccattacaaaaacaagagaatttagaagggggtatttagacacctctttcatagaaacacatatgcaagaattattagaaaaaacagaagatcgtcatcaagaaaataaagaagaagttatagctgcaatagctgctacgcttaaaaaaatacgagaaagtagggaataa

SEQ ID NO: 18305 - DNA, 1164 bp, Campylobacter jejuni
atggttgctgataaaagattattttatttaagttgtattttaatcaccataggaatagtattttcatactctcttacagcttttactgttctttttcttgactatagcgaatttcatttttttattcgtcagcttttttttggaattagtggcatacttataatgttttttatttctcgattggatcctgataaagcactttctaaaaaaattattttagctattttgattgtttcttttatctttatcatcattttaccatttttaccttctgtattagcaacagctagcggaggagctaaacgctggatacgcttaggcccactctctatctctcctgtggaattttttaaaataggattgatttattttttagcatggagctatacaaggcgtattgatgatagcaaaaaagctatcagacacgaggctttaattcttctgccttattgcatcttagcttctatagttataggatatatttatatcactcaaaacgatttaggacaaagtgtaatttctttctttttgattctagctttagctttttttgcaggagctagtaaaagactttttgcttttggaactttaatcattatgatgataggtataatggtaatttttagtaaccaaagaagaattcaaagaatcgcttcttggtgggggaatatacaagatgcttttttacctatgcttcctgattggctggcaaatgctttaagagtaagtagcaacagcgagccttatcaaatttcacactctttaaatgctatagcccatggaggaatgtttggcgaaggcctaggacttggaacttttaaattaggctttttaagtgaagtgcatactgactttgttctttcaggaattactgaagaaataggacttttaggtcttggggttatttgctatatttatctttggatgattttaagaatttttagaattgcaggaagatgtgaagctaaacaagattttattttttgttcaggcatagccttacttttacttttttctttctttatgaatgcttttggtattatttctcttactccactaaaaggtgtagcggttccacttttaagctatggaggaagttcaatgtgggcaatttgcataggcataggatatgtattaatgatttcaaaaaaggttaaattatga

SEQ ID NO: 18306 - DNA, 1029 bp, Campylobacter jejuni
atgacaatagctttaacaggtggtggaactggaggacatttggccatagtgcgttgcttattagaaagtgcgattaaaaaaaatatagaatgtgtatacataggcagtcaaaatggtcaagataaagcttggtttgaaaatgaagtacgctttaaggaaaaattttttttaagctctaaaggagtggttaatcaaagcaaatttgacaaaatcagttctttactccacaccttaaaactctccaaagattgtagagaaatttttaaaaaataccacatccaagccgtttttagtgtaggtggatacagtgcagctcctgcatcttttgcggctttattctcacatttgcctctttttatacatgaacaaaattcaaaaagcggctctttaaatatgcttttaaaacctttcgctacaaaattttttagcgcctttgaaaaagaaattagcccttatcctgtagcagataaattttttgataatgctaggattcgcaaagaattaaaaaatattattttcttaggaggatcacaaggagctcaatttatcaacgaactagctttaaatttagcaccaaaacttcaagaacaaaatatcaaaatcatccatcaatgtggaaaaaatgattttgaaaagtgcaaaaaacattatcaaagcttaaatatccaagctgatatttttgattttagtttaaatttggaagaaaaaatgaaaaatgcagatctagctatatcaagagcaggtgcaagtactctttttgaactttgtgctaatactttgcccactatttttataccttatccttatgcagctaaaaatcatcaatactttaatgctaaatttttacaagatcaagctttatgtcaaatttttatgcaaaactctattaatcttgatgaattttttaagtcaatattaaaactaaatctagaaaatatttctacaagattgcaaaatataacccaaaaaaatggcgcagatatgctaatccaaaaagctttatttgataatttgacttttataagataa

SEQ ID NO: 18307 - DNA, 891 bp, Campylobacter jejuni
atgaataaaattctttctttaccagaagatttaaagcaattaaaaggtgtcaattataaaaaaattaaatcttgcacttttgctaaatatacacaaacggatacttcgcattctacttttgttaatgtaggaagtcatcttttaacttttgttcgcaaaggatataaaattttacacactgcatcaaaagattataagattaactcttatgaaactttgtttttaaaagctgggagctatactttaagcaatgtaggacttagtaaaggagtttatgaagcttatttatttttttttgacaatgcatttttaattgagcttatttataagtataaagatttttttaaactagatcaaaagtttcaaaactatgaaattttttgggtaaaaaatgataagattttgcaaggaattttggaaagtttttcaccgcattttgaagaaaatacgcaaattttagatcctatagtgagtttgaaatttgaagagatttttttacatttgcttttaaataagaatatttattttattagttttttatcaggaattttaaaagaatttcgccttgatctttcccaactttttgagtattgtggtagagaatttttaagcgtaaatgaaatgtctaattttgcgaaattagatttagcaactttttctaaagaatttaagaaatgttttggacaaagtcctaaaaaatggttagatgaaaaaaggttgcaaaaagcaaagattttacttaaattttctaaaaaaaatatcaatgaaatagctaatgagtgcgctttttcttcggtagcttggtttattgaaagatttaaagagaaatatgagcaaactcctaagcaatatcaaaaaacaaaaaacttgtattttttatcaaaaaactag

SEQ ID NO: 18308 - DNA, 2211 bp, Campylobacter jejuni
atgatgaatgatacaaaagaagaattgatctcaaagcttgatttaaacagctatttagaagagtttaaagccctttttgcaagagataaggagatttttttgcaaggagattctaatctccattttaaacgcatacatgagctttgtgaggtggaatttcctactatgccagagcttagcaatcttgataaagccttagtacatttaagtaagcaaggaattttacatttagatgaaatttttgaatttgtaaaaatttttcgttattttgaaaagttaaaaaaaataaaactaggaacaaatttaggctcttggctacaaaagatagaatttgttagcggggctttggagctttgtttgaatttcgatgagaaaggagaattaaaagaaagtttagatgaaagacttgtaaatcttaatgccgctctaagattaaaaaatgaaagcataatagctgagtttaagaaattttgctatacaaaagctttaatgccttatcttatcgatacacaaatccatcttataaacaatcttgaagccttgcttgtaagaggcgggtttaatcacgctattaaagcaaaaatcataggtagaagtagtggcggtggcttttatatcgtgcctttaagtgttgaaaatttgcaaaatgatatagaaaaaatcaaaaatcaaaaagaagaaatttattatgaatacgctaaaaatttctcagcttttttagcaaaaaacctaccttttttaaaatttatcaatacagcctttgatctttttgatcattatagtgctagggttttgcttgctaaaaaaagggattttgaatttgttttgtgtgatcaaagtacagatttggttcttaaaaatttcgctcatcctgctttaaaaaatccaaaaagcgtgagtttggaatttaaaaaacaagttttaatcatcacaggggtaaatgcaggcggaaaatccatgcttttaaaatccatgctaagtgcagcatttttagctaaacatcttttgcctatgcatatcaaagcaagtgaaagtaaaattggtacttttaaagaatttgatgccatcatagaagatccgcaaaatgttaaaaacgacatttcaacttttgcaggaagaatgttgcacttttccaggcttttttctaagaaaaatttgcttttaggtatcgatgaaatagagcttggaacagattttgaagaagcggcttgtttgtatagtgtgttaatttcaaaactcatagctaataatcttaaaatcatcatcaccacgcaccacaaacgccttgccatgcttttagcaaagaatgagcaagttgaactcattgctgctttatatgatgaagagctttcacgcccaaaatatgagtttttaaaaggtactataggaaaatcttatgcctttgaaactgctttgcgttatcagattccgccgaatttagttagcgaggctaaaaagctttatggcgaggataaagaaaatttagaagagcttgtgggtaaaaatatcaatcttgaattagaactaaaagctaagcttgaaaatgttgagaaaaaagagcaaaaagtcgatgaaattttactttctttaaaagagcaaaaagaaaaaaatgaacaagaatttcgtacgagtttgagaaatttagaatttaaatttcacaaagccatagaagaagctaaaaaaaccatacagcttaaagatataaaagacaagcaaagaagtcttaataaaaccaatgaacttaaaaaagaaatcatcttgccaagtatggagcaaaacgaagaattgcgtgtgggggattttgtaaaatatgaaaaaattaagggtaaaatcataagcatttctaaaaacgatgctatggttgaaagtgatgggatcaaacttcgtgtgcctttaaaactgcttaaaaaaagcactcctacacctaaaataagtccaaaaacaagcattagtgtggcaaaaccgactaatcttagcgttagcttggatttgcatgggcttaggagtgatgaagctatttcaaggcttgataaatttatttcagatgctttgcttgcaggctttgatgaagttttagtttaccatggtataggaacaggaaagcttgcctttgctgtaagagagtttttgaaaactcataaaagtgtcaagggctttaatgacgcaccgatcaatcaaggtggctttggtgctaaggtggtgagattataa

SEQ ID NO: 18309 - DNA, 1299 bp, Campylobacter jejuni
atgatgcaaaatatccattttatcggcataggcggtataggaatttccgctttagcaagatttttaagagaaaaaggttttaagattagcggaagtgatcttaaagagagtaaaatcactaaagaactagaaaaagaaggggttaaggtcagcatccctcatcataaagacaatattttaaacaaagatttagttatttattctgctgctatcaaagaagaaaatcctgaatttaaatacgctaaagaattaggcattaaatgcctttcacgcaaagaggctttacctcttattttagaagataagcgcgtttttgcagttgcaggagcacatggaaaaagtacgacttcaagtattttagcttctttgcttgatgatgcttctgtgattatcggagcgattttaaaagaatttggttcaaatatgatttataaagaaagccaaaaccttgtttttgaagctgatgagagcgatagttcttttttaaattcaaatccttatttggctatagttactaatgcagaagcagagcatttagatcattatggcaatgaagtttcaaaactccatcatgcttatacgcagtttttagatgtggctaaaattcgcgtgattaatgctgaagatgagtttttgaaaaattataaaaatgagtcaatcaaactttatccaagcaaagatatcaaaaactgcaccatgtgtatagaaaatttcaaaccttttacaagttttgagttgaaagatttaggtgagtttaaggtttttggtatgggatatcatttagctcttgatgcgtctttggcgattttggcggctctaaattttttagatatagaaacgataagaactaggcttaaaaattatcaaggtattaaaaagcgttttgatattttacatgctgatgaaaatttggttttaatcgatgattatggtcatcatcctactgaaataaaagcgactttaagtgcagcacaagaatacgtaaaattaggtggatataaaaaaatcacagctatctttgaacctcaccgctacacgcgtttggctacaaatttaaaggaatttgcaaaggcttttgaaggtgttgatgagcttgtaattttacctgtttatgctgcaggagaagagcctatagaacttgatttaaaagcggtttttcctaaggctttatttgtagaagatatcaaaagagagggtaaatttttagtagcttccaagggacaggtttttgaagaagggcttattataggttttggtgcaggagatatcagtaataaattaaggcaaaaaaatgagtag

SEQ ID NO: 18310 - DNA, 1974 bp, Campylobacter jejuni
atgagaaaaattttacttcaaatttttatttttagcgtattatttatagcaacttttgccattaatcgtattttaatgcaaaattctttcatccctacaggtttaattagtgataaaaatgaaatctttttaatgtatcttttgggtgtttttcatgatataagatttttaagcgcagcgtttttaccattcttgctttgtggttttttaagtttaattttttctaatataaaaataaataataagttagtaatatatagtaaaaatttttatttcattttttcaagcgtttatataattgttctttcttgtctttgtataggattttcttatgtaaaatactattattacgaaatttacaagactaaatttgatatttttatgtttactctaaaagatgataatacaaaaactattttaagtattatttatcatgattatccaattttaaaaattttagctttaatgttgatttttggagtttttgtattttttttaaatttgaaaatattaaatttaaagctaaaacctgttaatttaagattatttcccttgatagctttaaatttaatattaattattgtttatgttatagccttaaggggcccctttaagcatgtggctataaatgtacaaaattattcttttagtgagtatagtgttgtaaatgatacaatgttaaatccaattatggcattttcttgggctttaaaacaatataaagaagaagcggctttgaaggttatcacacctttgaaagcacaagaacttaaagaaaaactttttgattatttgcatcaaagtcctataaatctaaaagctgaaaagaatcatcctagtgtatttgttaacttaatggaaagttttgggcttaatttggctgattttacaaatacagaacataattttttaggttcattagataaacattttaagcaagattttttattcaaacgctttttgagttctagtaatggaactataccaagttttgcaaacttattttttgtaagtccattttctaatatttctacaagtaaatttcagaaaacttatttggatttaacacctattgctgtttataagaaagcaggatataaggtgatttttgtaagtgcaggtaatggatcttggcaaaatattaaaaattatctcagtattttgggagtagatgagattatagatgaaaatattttaatgaaagagtataatggagcaaaagatagtgaaaatggttatgggatagctgatgagtttttatataaaaaagtttatgacttgcttcaaaaaaatccacataaaacccttataattgctcttaccatatccaatcatccaccttataaaattccacaaaatgatttgccaaaattacaaaacattccacaaactttgcttaatatgcttccttatgaaaaagataaacaagataatattatcaaagcttatacttatgcaaataatgaatttggaaaatttctagataaagtaaaacaaagtccatttaagaatagtgttattatagcagcaactggagatcatagagtacgcgaaatgagtatggatttaaattcccaaaaagcttttgcttatagtgtacctttttatctttatattcctaaggatttgcaagataatatttattatgataaagatcgtgtaggatctcataaagatatttttccaactctttatgctttaagtttaaataatgtcaagtatttaagcgtaggcggaagaaatatgttagcaagaccaagtgatgagaaattagaatttgggatcaacgatgctgtatggattgataaaaaaggtatttatagtggcggtaaagggtattattttgaaagtaatgatactttaaaagatatgaataaagcttttaaccttgatggttatactaaagactttgataaattttatagagagttaaatttatatcaattagccgagcgtttaggcatttcaaaatag

SEQ ID NO: 18311 - DNA, 1362 bp, Campylobacter jejuni
atgataactttaaaagaagctttaaaatactccaaagaagaacttgaaaatttaaaaaaagaactcaatgaaaaagcaaaaaaagaaaaaaaattaggtgcttatattgaacaatttttagataaagacttaagcgtttcaggtgaaggtgtgcctgtagctataaaagataatatcagcgtaaagggctgggagcttactagtgcgagtaagattttacaaggttatattgctccttatgatgcaagtgcgattgttaatttaaaagctaatggtttttctccttttgggcgttgcaatatggatgaatttgctatgggaagttcaacagcgagttcttgttatggaaaaactttaaatcctttaaattttgagcgtgttccaggtgggtcaagtggtggaagtgctgctgcggtagcgggtggcttggctttggcaagtttgggttctgatacaggtggatctgtacgccaacctgcggctttttgtggttgtgtaggatttaaaccgagttatggaagagtgagtcgctatggcttagcttcttattcttcaagtttggatcaaatcggggttttaacgcaaaatgtagaagatgcggcaattttatatgatgcgatcgcaggatatgacaaaatggatagcacaagtgcaaatatcgagtttatcaaaaccgttccaaatttaaatgcaaataaaaaattaaaaatcgcagtgattgaaaattatgtcaatgatgcagatagtgaagtaaaaaacgcacttttaaaaaccatagatatgttaaaagctaatggacatgagattgtatataaaaatttgcttgattctaagtttgatattgcggcatattatatcatcgcaacagctgaagcaagtgcaaatttaagtcgttatgatggggtgcgttatggcaagcgttctgaaaatatccaaaatttaaaagaaatgtatgtaaatacacgcagcgaaggttttggcgaagaagtaaaaagaagaattttgttaggaacttttgttttaagcagtggatattatgatgcgtattatatcaaagcacaaaaagctagagcttttatcaaggcaaaatatgaagaaattttgcaagattgtgatcttatttttatgcctgtaacgcctacgacagcttttaaatttgatacccaaaaaagccctatgcaaacttatttagaagatgtttatactatctctgtaaatttagcagggcttggaggcattagtgtgcctgttgcaaaagataaagaagggcttaatatatcagcacaactgatttgtaaagcttatgatgaacaaaccttgttagatggggctttaagtttagaacaaatgattaaaaattaa

SEQ ID NO: 18312 - DNA, 2754 bp, Campylobacter jejuni
atggactacaaagaaactctacttttgcccagcactacttttgctatgcgggcgaatttagcggaacttgaaccgcaaagatttaaaaaatggtttgagcaaaattatgcttatgaaaaaatgaaagaaaatcgcaaaaatgcgaaaaaaagttttaccttgcacgatggccccccttatgctaacggacatattcatataggacatgctttaaataaaattttaaaagaaactattatcaaaacgcattattttaaaggtgagagtgtgcgttttactccagggtgggattgtcatggtttacctatagaacaacaagtagaagtaaagcttggagaaaagaaaaaaagcttaagcaagaaagaaattcgtgagttttgcagacaacatgcgagtgaatttgtagatatccaaagagaagaatttaaagatttaggcattattgcggattgggataagccttatttgactatgaaatttgagtttgaagcagcgatttatagaactttatgtgagattgctaaaaaaggcttactttgtgagcgttctaaacctgttttttggagttgggcggcaaagtcagctttagcggaagctgaagtagagtatcaagataaagaagattattctatctttgtggcttttgatttagatgtaaaagcttgcgaaaaattaggtgtttcaaaagcaagcgcagtgatatggacaactacgccttggactttggtggctaatcaagctatagccttaaatcctaacgaaaattatgtgatcactaaagaaggtttgatttttgcaagtgctttgcttaaaagcatggtagaaaaaggacttacaagtggagaaattcaaaaagaactcaacgcaaaagaatttgaaaaacttgaagctatcaatcctttaaatggaagaaaatctgttttaatcatgggtgagcatgtattgatggatggtggaagtggacttgtacatactgcaccaggacatggcgaagatgattactatgcttgtttgaaatacggtattgaagttttaatgcctgttgatgatagtggatgttatgatgaaactttaagagctaaagggcttttgccttctcatttgcttgaagagtttataggtcttcatatttttaaggccaatgaaaaaattttagaacttttaggcgaaaaacttttacattcttctaaatttatacactcttatccattttgttggagaacgcataagcctgtgatttatagagctactaaacaatggtttattttaatggatgaaccaaaacttcaaggaaaaactttaagagagtgtgcaaaagaacaacttttaaaaacaaccttttatccgcaaagtggggtaaaaagaataggttctatggtggaaaatcgcccagattggtgtatttcaagacaaagggactggggaacgcctatagccttttttagagataaaaacactaaagaagtgatttttgatgatgaactttttgactttgtagcagctatttttgaaaaacacggtgctgatgcgtggtgggagtttgaaatcaaagatttaattcctacaaattcaaaatacaaagctgaaaatttagaaaaagtatatgatattttagatgtttggtttgatagcggaagtacttttaatgcagttttaaatagcggactttatgacgcaggagaaaaaagagcaagtatgtatttagaaggaagcgatcagcatcggggttggtttcaaagctctttgcttgtaggtacagcgatcaatgaaagcgcaccttatgaaagcattttaactcatggttttaccaccgatgaaaaagggcaaaaaatgtctaaatctaaaggcaacgtgatcgcttctgaatatgtagcaaaaacctatggagttgaaattttaagactttggatacttttaagtgattattcaagtgatttaaaaatttcagacaatatcttaaaacaagtgggcgaacaataccgcaaaataagaaacactataagatttttacttgctaataccaatgatttaaaagatttagaagttaaagaatttagttttattgataaatggatattaagtcgtgcaaccaaagtttttaaagcaagtaaagaagcattttttgcttatgaatttgccaaaggttttagtttgcttttaaattttttaagtgcggatttaagtgggatttatcttgatatcagtaaagataggctttattgcgatagtgaaaatgcccaaagaagaaaatctgctcaagtggctatggctttgatggcaaaagagcttttaaatttacttgctccaaatttaagctatagtgtagatgaggctctagaacatgctaatgttttaatcaaaggcgatgcaaaagatgtatttgatctgagtttaactcaagattttgattatgattttggtatagatgatacatttttaatgagcgctagagagaaattttttgaacaaattgatatacttaaaaaagataaaatcattaaatctactttggaattaaatttaaacatcagttttaataaattcccaaatgaggaattagccgattggtttatggtaagtcaaatcagcaatgaaaatgaagaaattttggctgaatttgaagtagagaatgagaaatttaaaatcaccaaagcttcactttgtaaatgcccaagatgttggaaacttcaaagtaaaaatgaagaaacaccttgtttaagatgtgaagaagttttaaaaggagttcaatgctag

SEQ ID NO: 18313 - DNA, 537 bp, Campylobacter jejuni
atgaatttacccaatatcttggcgatttttagaatggttttagcgcctttgctattttttttgttaattcataaatttgaaaatattcatcaaagttggattaactattttgctgctttaactttttcattagcagctttaagtgattttttcgatggatacatcgcaagaacttggaaacaaactacaaaactaggcggaatcttagatccattagccgataaaatgcttgttttagcagcttttttagggcttttacttacaggaaaagctaatgaatgggtaatttatattatactagtaagggaattttttatcacaggttttagagttgtaatgatcagtgaaaatttaaatgtcaatgcttcttttgcaggcaaacttaaaaccgcttttcaaatgactgcgataggatttctaatcatggagtggataggcggagaaattctactttacatagctttgattttaactctttattctggatttgaatacatctatacttatataaaagctcagaaaaaaggagaaaaatga

SEQ ID NO: 18314 - DNA, 378 bp, Campylobacter jejuni
atgaaacattatgaggttttatttatcttaaaaccaacacttactgaagaggaagtgaatacgaagttggaattcgttaaagaagtcctaaccaaaaatagtgcagaaattgaaactgttgttccaatgggtactagaaaattagcgtataaaatcaaaaaatacgaaagaggaacttattttgtgatttatttcaaagctcctacaaacttgatcgctgagcttgaaagggtgttaagaatcactgaagaagtaataagatttttaatcgtaaaatatgaaaataaaaaagaaattgcagcttgggaaaaactaagccacgggattaagcaatctaaaaaagaaattaaacctttagatgctcctgaaattcaataa

SEQ ID NO: 18315 - DNA, 552 bp, Campylobacter jejuni
atgtttaacaaagttgttttggttggaaatcttacacgtgatatagaaatgcgttatgcacaaagcggtagtgctattggagcttccgctatagcagtaacaagaagatttaccgcaaatggagaaaaaagagaagaaacttgctttattgatataagcttttatggtcgcaccgcagaagttgcaaaccaataccttacaaaaggttcaaaagtactcatagaaggacgtttgagatttgaacaatggagtgatcaaaatggacaaaatcgctctaaacatagcattcaagttgaaaatatggaaatgcttggcaattccaatgctccacaacaaggcggaaattttggcaataatagcttttcaaacaacaattatagtggaaactatgaaaatcaaagctatgatccttatatgagtgaaaatcaaaattttaataaagcaaaagcaaaccctgctccacagagaaaccaaagcccacaacacgaagaaaaattaaaagaaattgatatcgatgcttatgatagcgatgatactaatttaccattttaa

SEQ ID NO: 18316 - DNA, 261 bp, Campylobacter jejuni
atggcagaaaaaagaaaatactctcgcaaatattgcaaatacactgaagcaaaagttgaatttattgattataaagatacagcaatgttaaaacatgctttatctgaaagatttaaaatcatgccacgccgtttaacaggcacaagcaaaaaataccaagaaatggtagaagttgcaatcaaacgcgcaagacatgtagcccttatcccttatatagtggatagaaaagaagtaatcaataatccttttgaaggactataa

SEQ ID NO: 18317 - DNA, 2376 bp, Campylobacter jejuni
atgcagattgaagagatacaaaattatccagcaaatttaccagtattggttgaagatgaattatttttatatccttttatgataactcctatttttattaacgattcatccaatatgaaagctttagatcttgcgattaaaaatgatagcatgctttttgttgcaccttcaaagttggaaaatggaagaaattttgatgaaatttataattgcggagtgattgggactatcatgcgaaaagttcctttacctgatggaagggtgaaaatactttttcaaggatatgctaagggtaaaattatagagcaaatttctaataaacctttagaagccaagatagaacttataaaagaagactttttagaaggaactaaaaaagaagcgcttcttgaagttttaaaagagaaggtaaaaaatttggcaaatattagtcattatttttctccagatcttttaagaacaattgaagaaggttttgatgcgtctaggatttgtgatttgattttaaatactgtgcgtattaaaaaacaagttgcttatgagttttttgttttaacagatcttgagcaaaaattagtaaaattaatagatttaattgcccaagaaatagaagccaataaaattcaaaaagaaattaaaaataaagtacattctcgtattgataaggtaaataaagaatattttttaaaagaacaattaagacaaattcaaaaagagcttggttctgacacacaaaaagaagatgaggttagagagtatcaaaagcgtctggagctaaagaagaaatttatgcacgaagacgcttataaagaaatcaaaaaacaaattgaaaaattcgaacgcattcatcaagataattccgaagcatcgatgattcaaacttacatagaaacagcattagatattccttttgaaaaaatttctaagaaaaaacttgatattaaagaagtttcaaaacagctcaaccatgatcattatgcattaaataaaccaaaagaacgcatagaagaatattttgcagttagggaacttttagaaaaaagaaaaatagcagaaaaagatggtgctaaagttatactttgtctttatggacctcctggcgtgggtaaaacttcactggcaaattctgtttcaaaagctttaaaaagagagcttattcgcatagccttaggcggacttgaagatgttaatgagctacgtggtcatcgtagaacttatataggcgctatgcctggacgtattacccaaggactcatagaggcaaaacaaattaatcctgtaattgtattggatgaaattgataaattaaatcgcagttttagaggcgatccaagtgcggtgcttttagaaattttagatccagagcaaaattctaaatttagggattattatttaaattttaatattgatttaagtaaagtcatttttatagcaacggcaaatgatattagcaatattcctgcacctttaagagatagaatggaatttatagaacttagctcttatactccaagtgaaaaatttcatataatgaaaaaatatttaattccagatgagcttaaaaaacatggcttaaaatccaatgaattatctattgatgatgaaactatagagttaatcattagtgattatactcgtgaatcaggagtcagaaatttgcgtcgcaaagtggcagagttgtgtcgtaagagtgctaaaaaactacttttagaaaatattaaaaaagtcattattaatacaaaaaatttgaatgaatttttagataaaaaagtttttgaaatagaaaaaaataatggagaaaatcaagtaggtcaggttaatggtttggcttggacaagtgtaggtggagatgttttaaaagtagaggctgtaaaaattaaaggtaaaggagaattaacgctcacgggaagtttgggtgatgtaatgaaagaatcagctagaattgcttttagcatgataaaagttttaatcgatgaaggaaaaataaaaatacctaaaaaaataattattgatcctaaagttaatgtttatgatagttataatattcatatacatgtgccagatggagctactccaaaagatggcccaagtgcaggtattacgataagcacagctattgcttctatttttagtgataaaaaggttaaagcagatgttgcaatgacgggtgaaatagatttaaaaggaaaagttttaccaataggcggattaaaagaaaaattaattgcagcttataaagcagatataaaaacagctttaatcccaagaaaaaattacgaaagagatttaaaagatattcctagtgaggttagagacaatatggaaatcattgctgttgatactttcagtgatgttttagaatatactttggtttaa

SEQ ID NO: 18318 - DNA, 630 bp, Campylobacter jejuni
atgaaaatttatctcttaaatgaaactccttttgaaggggtggaaaatcttattttaaatgagattgttttttatgattttagtgtggatttgagtttgtatgatgctttaatctgcacttcaaaaaatgctttaaaagctttacaacatgcaaaaatcactttaaatttcaaactcaatttatacgctgtgggacaaagtacagctcaatacgctaaaaatttaggttttaaaaagattaaaattccatcaaaggcttatggaaaagatctttttcttgaatttaaagaggagttaaaaatgcaaaaatgtttgtatctaagggctaaaaatattgtttcaactttaaatttggatcttaaaaatgtaggtgtggatttagatgaaatgattgtttatgaaaatgtttttaaaaaaggcgacaaaaagcttatccatcctgctatttttatattcacctctcctttaagtgtagaaaattttttaaaattttacagcttaaaagaagaagataaggttgtagttatagggcaaagcacagcaaagaagcttttaaattttaaaaatctttatatatgcgaaaatcaaagtcttttaaactgtgttaagctcgctaagactttggtttaa

SEQ ID NO: 18319 - DNA, 633 bp, Campylobacter jejuni
atgaaaaataaattagatcttagcctttatttggttgctactaagggaagtaaaagcgaggagtgttttttaaatactttagaaaatgctataaaaggcggagtaagtatcatacaacttcgtgaaaaagagcttaatgcaagagaattttataaactaggcttaaaggtgcaaaaactttgcaagtcttataaaataccttttttgattaacgatagggtggatatagctttagccttagatgctgatggggtgcatttaggacaggaagatttagaagcaaaattagctagaaagcttttaggagatgaaaaaatcataggcttaagtcttaaaaagttagaacaacttgagtttatacaaggagtaaattatctaggttgtggagctattaaggcaacgcctactaaagaaagttcgcttttaagccttgagcttttaagtcaaatttgtgataaaagccctataggggttgtagccataggtgggattgacaaagaagcacttgttgagttaaagggtataaatttaagcggtgtggctgtggttagggcgatcatggatgctaaagatgcttttttggcagctaaagagctaaagcgtaaaatctatgaaaatttatctcttaaatga

SEQ ID NO: 18320 - DNA, 2937 bp, Campylobacter jejuni
atgcaagcttcattttatgaatacttacaaaatccaaaaatttgtgaactttttctttgtaaagatgaaaaacaagcagatttactcgctcaagtttcacgatttaagggtttaaaaacctttgttttacctgattttagagcgcagtttggagatgatttaagggctttttctaaagaactttttgatctttgtaagattttaaatgcttatcataaagaagaagaaaaaaaaatccttatttctcctttaaatactgttttaaaaaaacttccttcaaaaaaacatttacaaaattatcatatcgataaaaaacaaaattttgatttgaaatgttttgaagatgaaatttcaagattgggatacgaatttgtagatatagttcaggataaaggtgaaatttcaattcgtgcggatattattgatattttttgtatcaatgaagaaaatcctattagaattttactttttggcgaagagattgaaagtataagatattttgatttgcaaagtcaaaagtctattcctaacgaactagaacattttgaaatttgtccttttttaaaatattttgacaaagaaaattatgaaatttttaaggacaaattagaagattttcaaagcgatgctttaatacatgatatcaattctttaggcttttggtgtattgatgatttttttgattatttagaacttgattttttagcttgtgaaaagtttgatattaatgaatatgaaaaagatataagttttgtgaatgcaaaaattttacctcaagctaaaaaatttaaagaattgcaaagttcttacaataaagatttttttgaatttcataaaaataaaaaaatcacacttttagctaaaaacgaagctttatttaaagctttagagcttgaagatactcaaaatatccattttgtaaaaagtgatttaaggcttaatcttattagtcctgaagagctaattatttctttaaatcaaaaagaaaaacaaaaaacaagaaaaaaagctagtttgattatagatgagcttaaaaatggggattatatagtacacgaagattatggggtaggtaaatttttaggtcttgagatgatagtgataagcggagcaaaaaaagagtttgttgctatagagtatcaaaattctgataagcttttattaccagtggaaaatctttatttgattgataaatatttgggcgtgagtggatctattccaagcttagataaactaggtaaaacaagctttattaaacttaaagaaaaattaaagactaaacttttagccatagcttctgaaattgttattatggcggctaaaagatctttggtgcaagcaaaaaaaattacagtggatttaaatagacagactgattttatagctagtgcgggttttatttatacaagcgatcaagataaagcctgtcatgaaattttgcaagattttcaaagtggaaaagtcatggataggcttttaagcggtgatgtgggttttggaaaaacagaagtcgctatgaatgctatttatccagtagttaaaagtggattttgcgcatttttatttgcgcctacgactttgctttctcatcagcattataaaaccttaaaaaagcgttttgatccttttgatataaaggtttttaaactggatcgctttacaagtagtgcagaaaaaaaacaagttttacaaaatttaaaagaaaataaagcttgtgtagttgtaggaactcatgcacttttaagtgtagaatgtgaaaatttagcccttgttattattgatgaagagcataaatttggagtgaagcaaaaagaaaagcttaaagaaatcactcaaaattcacatattttatccatgtcagcaacccctataccaagaagcttaaatcaagctttaagttctataaaatcttatagtgttttgcaaactccaccagaagatagaatggatgtaagaacttttgtcaaagaaaatgatgacgcacttttaaaagaagctatagcaagagagttaagacgtggtgggcaaattttttatattcataatcatattgcaagtatagagcaatgtaaaaagcatctattagaacttttttctactttgcgtattttgattttacattctaaaatcgatgccaagatgcaagaagaagaaatgttgaaatttgaaaacaaagaatatgatttgcttttaagtacctctatcgtagaaagtgggattgatttaccaaatgcaaatactatcatagtagaaaaaagcgatcgttttggcatggctgatttgcatcaattgcgtgggcgtgtaggaagaagtgataagcaaggttattgttattttttaattgaagataaaaatgctatcacaaaagatgctttaaagcgtctagtttccttagaaagtaattcttttttaggcgcaggttctattttggcttatcatgatcttgaaattcgtggcggtggaaatttattaggcgtagatcaaagtggacatattgagcaaattggatatagtttatatcttaaaatgttagaagatgaacttaatgctttaagtaaaaatgaagtggatcaaaaagaaaataaacttgatttaaaactcaatgttaatgcctttttaaacagcgaacttatcagcgaagatcgcttaagattagaactttatagaagacttagcaagtgtgagcaagttcatgaggtttatgagatcgaaagtgaaattgaagatcgctttggaaaacttgacatttatactaagcaatttttatctttgattactattaaaattttagctttaaataaatttaaaagcattagtaactatgagcaaaatattcaatttactgctttaaatgatgaaaaagaactcatcaaggcaaaaagcaaagatgatgatgatattttagaggcaattttaacgcatttaagaaaggcttaa

SEQ ID NO: 18321 - DNA, 2430 bp, Campylobacter jejuni
atggcttatgaagcaagtttaatagaaaaaaaatggcaaaaaatttgggatgaaaatgaatattttgagccaaaagatgacttaaatttgcctaaaaaatatattttatcgatgtttccttatcctagcggacgcattcacatggggcatgtaagaaattatactataggtgatgctttagcaagatattatcgcaagataggttttaatgttttacatcctataggttttgatagttttggcatgcctgctgaaaatgcagctattaaacataaaattcatcctaagtcatggacttatgaaaatatagcttatatgaaaaaagaacttttttctttaggtttttctttttctaaaaaaagaatgcttgctacttcagatccactttatacaaaatttgagcaagaattttttattaagatgtttgaaaaaggtttgatttacactaaagaagcaaatgtaaattggtgtgaacaagatcaaacggttttggctaatgagcaagttgaagacggaaaatgttggcgttgtggtcatgaagtggtgcagaaaaaaatgccaggttattatgtaaaaattactgcttatgctgaggaacttttaaaagatttagaagaattaaaagataaatggcctaatcaagttttaactatgcaagaaaattggattggtaaaagcgaaggtttggaattttctttaaatttagacgaagaaagtaagcaaaaaaccaaagaaagttctttagaagtttttactacaagagcagatacaatttatggagtttcgtatatcgctttagctccagaacataagattgttcaaaatttgctttcacaaaatttattaaatcaagatgtattaaataaaatcaaagttattcaaaatcaaagcccaagagaaagacaaagttctgaaaaagaaggttattttttaggaatttatgccattcatcctttaagcggagaaaaaattcctttatgggtggctaattttgtcttggctgattatggtagtggagcggttatggctgttccagctcatgatgaaagagattttgaatttgcaacaaaatataatcttgccatcaaacaagttattcaaactcaagaaaatttaccttatatgcaaaaattaggaaaattaattaatagtcaagaatttgataatcttgattgtaatgaagcaagattaaaaatcatttctcagtttgaagctaaaaatataggaaaaagggttgtaaattttaaaattcgtgattggggtgtttcgcgtcaaagatattggggtgcgcctattcctatgattaaatgtcaaagttgtggtatagtacctcaaaaactagaaaatttacctattactctgcccgaagatgtgcaaattacaggtgagggtaatccacttgataaacatccaacttggaaaaattgtatctgtccaaaatgtggtaaagaggctcaaaaagaaagcgatactttagatactttttttgaaagttcttggtattttgcacgttttgcaagtgatgagaaaacttggcaggaaaaagctttagatgaaaaaagtgtaaagtattggatgagtgtggatcaatatataggtggtattgaacatgcaatcttgcatttactttatgcgagatttttccaaaaagctttaagagatttgggttatttaacacaaaatgaaccttttgatagacttttaactcagggtatggtgttaaaagatggtgctaaaatgtcaaaatcaaaaggcaatgttgtagatcctgatgagattatagaaaaatacggtgctgataccgcaagactttttatactttttgctgcgcctccggctaaagagcttgaatggaatgatgatgcggttgaaggggcttatagatttatttgcaaactctatgatagggcgcaaaatgttaaaaaaggtgagcttgtagaattaaaacaagaaaatttaaacaaagaagaaaaatatgcaagattaaaggtatatgaagctttgaaaaaatcttttgaagtttatcatcaaagttttgcttttaatactttaattgcagcttgtatggaagctttaaatgctttagcactttgtaaaaatgaagctttggagcaagaggctttttatattattttaaatattttagagcctattattcctcatgtttgttttgagcttagcgaggagctttttaaatgtaaaaatttcaaaaaattagaacttaaagaagaggtttttgtaaaagatactttaaatttagctgtaagtattaatggtaaaaaaagggctgaatttgaaatttcaagtagtgcgagcaaagaagaaattttagcttttgcaaaagaaaatactgctaaatggcttgaaggtaagagtatagttaaagaaatttatgtggaaggaaagctagttaatctagtgattaaatga

SEQ ID NO: 18322 - DNA, 1326 bp, Campylobacter jejuni
atgaagttaaaattgaattttctgccatatttttcctttattccaaaaaaattaaacactaattctatcatttttaaaataataaaagtcttttttattgcaattttactttcaaattctatttatctatcattttttgaaaatatttttacacaaaccattagtccatttttagctatttgggggttagttttacttctaaaaagtaaaacttctaaacaatatttttggataggtttttttgtagggattctttggttttggtggattggtttatcttcaatttattttaatctaaactatttagtaccaattataccaattatcattggttttatttatgggttactttttagattatgttatttattaaaatttgattttttaaggctttgtggaattttttgcataagttttatccatcctttaggatttgattggtttaattgggggatttttacagtttatggtttttttgacccaagttatcgtggcattatttgcatatttttaatagcatatttcatctatgagggttatatatcaagatattataaaatagcaattgttcttattttattctttagtggatttcaatataatgaaaaacaagctcaaactcttaatttaaactacaaactcatcaatactaatatctctcaagatcaaaaatttttacaagaaaatttaaaatcaaattctgatatcttaattcaagatatacttcaagctataaatgaaaaaaaagaacttgtaatcttgcctgaaaccgcttttgcttttgatttaaaaaataccaaatatgagcttatgcttaaagaattatcttataaaatcaccattattacaggagcatttcatgttgaaaaagagcatacttacaatagcacttatatctttaaaaaaggcaatgtctatattttaaataagcattttttagttccctttggtgaagaaattccattttttaaagacttaacaaaaaaatattttctcaaaaatattgaagaattttccaaaggtcctatacaaagcaaatataaattagataatcaaattatcacaaatgcaatttgttatgaagctaccaaagaacaaaactatcaaaattcacaaattattatagccctaagcaacaatgcttggtttaataatagtagcgaatacaaactccagcaactcttaatgaaattttatgcaagtaaatatggggttagtgtttatcatgctacaaatggcaaagagaatatagttatactccctaaaaagcttttaagcaaagattggaaaaatttatccaaagaaatatttaatgataaaaaataa

SEQ ID NO: 18323 - DNA, 1197 bp, Campylobacter jejuni
atgtatctattcacttcagaagtcgtaagtgcaggtcatccagacaagtgcgctgatataatcgctgatacgatagtggatatactcttgaaaaatgacaaaaattcaagggtggcgagtgaggtttttgtcgcaggaaataaggttgtgataggaggcgaagttaagtcaaatcacaaacttagtaaagctgattacgataatttagttaaagatgttttaaaaaacattggttatgacggagcaggccattttagcaaagagcagtgtttacatcctgatgaggttgatgttatggtgtttttaaatgaacaaagccctgatatcaaccaaggtgtcgatcaagaagatggcgaaacaggagcaggtgatcaaggcattatgtttggttttgcaagttgtgaagctgaggaatatatgccagcagctattagttatgcaagaatgctatgtgatagagtttatgcttatgcaaaagcaaatccacatgaacttggagtggatattaaaactcaagtgactatagattatggcactaaggcgaattttgaaaattgtaaaccgcaaagtattcatactatagtagtttctgcaccttgtgttgaaagtatgaaaatagaagatttaagatctttagtgatgaaacttatcttagatagtaatttaccaaaagaactttttgatcctaataagactagaattttaatcaatccaactggtaaatatgttaatcattcttctttacatgatagtggtttaacaggaagaaaacttatagtagatagttttggaggttattctccaataggtggtggcgcacaatcgagcaaagattatactaaagttgatagaagtggactttatgcaggtagatggttagctaaaaacatagttgcagcagggcttgctaaaaaatgtatagttcaacttagttatgctataggtgttgcaaaacctacttcggtaagcgtggattgtatgggcacaaataccagtgtaaatgacgatgttttaagtgattttgtaatgcaaaatttctctttaacgccaaattggatccgtgataaatttcatctggataaaccaagtaaagaaacttttctttatgcggatgtagcagctcgtgggcaagtaggacaaaaggactatccttgggaaaaacttgatgctctagaacagtttaaaaagctactttaa

SEQ ID NO: 18324 - DNA, 2076 bp, Campylobacter jejuni
atgaatctatttgaagatttaaatgatagtcaaaaacaagcggtaagccacattgatggagccatgcttatcctagcaggcgcaggtagtggaaaaaccaaaactatcaccactcgtcttgcttatcttatcggtgaagtaggcatcccctcacataacactcttactcttacttttacaaataaagcagctagtgttatgcgtcatagagcattaaattttctacaaggcaatcacaatcctttgctttgcacctttcataaatttggacttttatttttaaaactccattttgaaagattggagcgtaaaaatagttttattgttatcgatacagatgatacaaaaaaaataattaaagacttaatccatgataaaaacaaagataatgtctatgatattatccaatacatatcttattgcaaaaatgaaggcaaaagagtaagcaatgtctttgaagatttaaatttactaaaagaacataattttgaaaaatatcaaaatgaatacaaatttgccaactattaccgtgcttatgaagaatacttattaaaacaaaattttgtagattttgatgatcttttattgctaagcaatctcattttagaaaatgatataaattttgccaaagaacaaagcttactttataattacattacagttgatgagtatcaagatactaataccttgcaatataaaattctaaaaaatctatgttgtatgcatgaaaatatcacagttgttggtgatgatgatcaaagtatttatagttggcgtggagcaaaaattgaaaatattttaaattttcaaaatgattttaaaaatgttaaacttgtaaaacttgaacaaaactatcgttcagtagggactattttacaagcagcaaataatctcatatctcacaatgagcaacgacttggaaaaactttaatctgcactaaagatactggggaaaatattaaaatattaaaaaacgaaaacgaaaaagatgaaggtttatatatcgctcaagaagtgaaaaaattgctaaattctggagtagaagctaaagagatcgccattttatttcgagttaatgcactatcaagagcaatagaagaagcatttatgaagaaacaaatttcttataaactacttagtggtatgcgtttttatgagagattagaaataaaagatttaatctcgtatcttagacttatcttaaatccaagcgatgatttgtcgtttaaacgtattattaatcgccccaaaagatccataggagaaaaagccctaaaaaatttagaagaatatgcaaaaaaacgtcaaatttcactttttgatgccctatgcgaaagcgatggtggtgtaggaattttaacaacaaaaaaagcacaaaatgaagcaaatatttttatacaaaatattcacactctaaaaagctacgataatgcaaaaaaggtttttgacaatatagaagaattatttaaaatcaaagattatttttcagagcaagatgatggagatgaaagaatcagaaatcttgatgagttttatgctaatctaagagaaaaactcaaagaagatcccgaagcttctttagaagatctacttagtgaaatttctttattaagtgatcaagataatttagatgaagaatgtgtttgcttgatgagtattcatgctagcaaaggtttggaatttgattatgtttttataataggctttgatgaaggattttttcctttaaatagcgaagaaaatctcgaagaagaacgccgtcttgcttatgttgccatcactcgcgccaagaaatttctcacaataagtgttgcaaattctcgtttttatcatggttcaagagcaaatatcaatcctagtcgcttcttagaagaaagtaaattaatcaatgaaaaatcaaaaaatcaaaatatacaaaaaactagtttttgcaaaggagatctagttaaacataaaatttttggcattggcagggttgttgaagctaataaaagcggaaaagaggaaaagcttaatattaattttggtggtataatgcgtgtaatcatggcaagctttgtggaaaaagcagtatga

SEQ ID NO: 18325 - DNA, 819 bp, Campylobacter jejuni
atgaacaagatctttgcagcctttaaaccaaggggtttgagttctaatgcctttttaagtactttaaagaaaaaatataaaaataaaaaagcaggatattctggcactcttgatcctttcgccaaaggggttttaatcgttgcatttggacaatatacaaaacttttccgttttttaaaaaaaactccaaaaacctataaagctactttatggcttggagtttactccttaagtcttgatgatcaaaatataaaagaaattaaaaatataaaagaatttgatcttccaaatttacaacaaatcattgatcaaatgcaaggaattatctcctatacaccaccgcaatttagcgccaaaagaatcaatggaactcgcgcctatgaacttgcaaaaaaaggtatagaagtaaatttaaaaccttgccaaatggaagtatttgattgcaagatcttaagctataatcatccttttttaaatattgaaatcacagtcagtgaaggtgcttatataagatcttattgtgaactttttgctagaaaactaggtattaatgcgactttaagctctttagagcgcattaaagaaggcaaatttgtttataataatgagaaaagcttaaatgtgttaaaatacattaacctaaagccaaattttatcaaggatttaaataaactcgaaaatggtgctaaaatttttgtcgaagaattagaatttcatgataaaggagattattatattgaaacagaaaaatattttagcataattaatattaaagaaaatacagtaaaatatcttctaaataaggttgaaaaatgttaa

SEQ ID NO: 18326 - DNA, 228 bp, Campylobacter jejuni
atgttaatattatcaagaaaagaaaatgaaagtataattatcggagaaggtatagaaatcaaagtcgttcaaacagggaaaggatatgccaaaataggcatagaagctccaaaatcccttatgatacttagaaaagaacttgttcaacaagtaaaggatgaaaatttgcattctgttgttcagaatgatattaaacttgatgacttaagcaaaaaactaatcaaatga

SEQ ID NO: 18327 - DNA, 453 bp, Campylobacter jejuni
atgaaaattattgcgagaaataaaaaagctttatttgattatagcatcatagaacgctttgaagccggaattgtccttaaaggaagtgaagttgtagccttaagagcaggaagagcaaatcttaaagactcttttgttcgcattataaaaaatgagatttttttacttaattctcatatttcattgcttcatactacacattctttctataaacacgaagaaagaggtgctagaaagcttttaatgcatagaaagcaaattgataaattattaggtaaagtaagtatagaaggatatactatcgttgcattagatctttattttaacacaaaaaataaagtaaaagctacccttgctttagctaaagggaaaaatttgcacgacaagcgtgaaactttaaagaaaaagcaagccgatttagaagctagagctgctatgaaaaattacaaataa

SEQ ID NO: 18328 - DNA, 1938 bp, Campylobacter jejuni
atgaataataatacccaaaataataagggtaatccgcagggtaataatttttttaacaaaaatcccatttttatttttgcgatttttgcaattataatgataattatttttaagggattttttgatggcaatggttcttttggcggggcattgaatggcaatgaagtaaataaaaatgtcccttattctgagttaaaaaagcttattgaaagtggacaaatcaatcaagttagtataggacaaacaacaatcaaagcgatttcaagctctcacaatactgtttatacagcaaaaaaagttaatgatcctgagcttgtgagtttactagatagtaaaaatatcgcttatggtgcgtattctgaaacaaattggtttacggatatacttttttcatgggttttgccagtatttattttctttggtatttggatgtttttggcaagtcgtatgcaaaaaaatatgggaagttctatattgggtataggaagttctaagaagcttgtaaattcagaaaaacctaaagtaaaatttagcgatgtagctggtgttgaagaagctaaagaagaagtaaaagaaattgtagattttttaaagtatcctgaaagatatattaaattgggagctaaaattccaaaagggcttttacttgttgggcctccaggtacaggaaaaactttgcttgcaaaagcagttgcaggtgaagctgatgtgccgttttttagtgtttcaggttcgtcttttatagaaatgtttgtgggtgtaggtgcttctcgtgtgagagatttgtttgaaaatgcaaaaaaagaagctcctgctattgtttttatagatgaaatagatgctattggtaaaagtcgtgcagcaagtggcatgatgggtggaaacgatgaaagagagcaaactttaaatcagcttttggctgaaatggatggctttgggacagaaagttccccagtcattgttttagcagcaacaaatcgcccagaagttttagatgcagcgcttttaagaccaggaaggtttgatagacaagttttagttgataaacctgattttaaaggtaggtgtgatattttaaaagtgcacatgaaagatgtcaaaatatctccaaaagttaaagtagaagatatagcacgcttaaccgcagggcttgcaggagctgatcttgcaaatattattaatgaagcggcacttttagcaggtagggattctaaaaaatatgtagaacaaaatgatttagttgaagctgttgaaagagctatagcaggacttgagaagaaatcacgtcgtattaatgaaaaagaaaagaaaattgttacttatcatgaatgcggtcatgccttgattgctgaaactaccaaaggtgcaaaacgtgtaagtaaggtttctgtgattccacgtggtcttgcggctttaggttatactttaaacacccctgaggaaaataaatttttaatgcaaaaacatgaacttattgccgaagtagatgtgcttttgggtggtcgtgcggctgaagaagtgttcataggtgaaatttcaacgggtgcaagtaatgatttggaaagagcaactgatatcataaaagctatgatttctatgtatggtatgagtgaaattgcaggacttatggtgcttgaaaaacaaagaaatactttcttaagtggtgggcaaactataaaagactattctgaaaagatggcagaatctttagatgattatgtaaagaaaaccttagatgaacgctataaagatgttaaagatactttaaatacttataaaggagcgattgagactatggttgcagccctttatgaagaagaaactattgaaggtaataaagtgcgtgagattattaaagagtttgaggatcaaaatagtctaccaactcgtttacaagaactcgaagaagttaaaactgaagttaaagtagaagaatga

SEQ ID NO: 18329 - DNA, 393 bp, Campylobacter jejuni
gtgaaattgttagttgttgatgacagttctactatgagaaggattattaaaaataccctaacaagacttggacacgatgatgttttagaagctgagcatggcgttgaagcttgggatttattaactaaaaatgaagatgtaaaagttttaattacagattggaatatgccagaaatgaatggcttggagttggtaaaaaaagtaagagcagagaaaaaatatgaagatatgcctatcatcatggttacaactgagggtggaaaagctgaagtgattactgctttaaaagctggcgtaaataactatattgtaaaaccttttactccacaagttttaaaggaaaaacttgaagatgttttaggaacaggaagtggagaaggtgcagctgagtaa

SEQ ID NO: 18330 - DNA, 1773 bp, Campylobacter jejuni
atgattttttataaaagcaaaagattagcattttttttaacttcagatattgttttaattttacttagcgtttatctggctttttctttgagatttagtggagatattccgagtattttttatcatggtatgatggtttctgctattattttgcttgttttaaaactttcatttttgtttgtttttagaatttataaagtagcttggagatttttttctctcaatgaagcaagaaagatttttatcgctttgcttttagctgagttttgtttttttcttattttttatttttttagtgatttttttaatccttttccaagaagtgctattgtgatagattttgttctttcttatatgtttataggtactttaagaattagcaaaagaatgcttgtggattttaaaccttctagaatgaaagaagaagaaactccttgtattgtagtaggggcaacttctaaggctttgcatttgttaaaaggtgcaaaagaaggttctttagggctttttcctgtaggcgtagttgatgcgagaaaagagcttatagggacttattgtgataaatttattgtagaagaaaaagaaaaaataaaatcttatgtagaacaaggggtaaaaactgccattattgctttaagacttgaacaagaagagcttaaaaaactttttgaagaacttgtagcttatggtatttgcgatgtaaaaatattttcttttacaagaaacgaagcaagagatatcagtatagaagacttgcttgctagaaaaccaaaagatttagatgatagtgctgtggcggcttttttaaaagataaggtagttttggtaagtggagcaggtggaactataggcagtgaactttgtaagcaatgtattaaatttggtgctaagcatcttatcatggttgatcatagtgagtataatctttataagatcaatgatgatttaaatttatataaagaaaaaattactcctattttactgagtattttagataagcaaagtttagatgaggtattaaaaacttataaacccgagcttattttacatgcagccgcttataaacatgtgcctctttgcgaacaaaatccacattcagcagtaatcaataatattttaggaactaaaattttatgcgacagtgctaaagaaaacaaagtagctaaatttgtgatgataagtacagataaagcagtacgaccaacaaatattatgggttgcactaagagagtttgcgagctttatactttaagtatgagtgatgaaaattttgaagttgcttgtgtgcgttttggtaatgttttaggttctagtggtagtgtgataccgaaatttaaagcacaaattgccaataatgagcctttaactttaacgcaccctgatatagtgcgttattttatgcttgtggctgaggcagtgcaacttgttttacaagctggagctatcgcaaaagggggagaactttttgttttggatatgggtaagcctgtgaaaatcatagatttagctaaaaaaatgcttttactttctaatcgcaatgatttagaaattaaaatcacaggcttaagaaaaggtgagaagctttatgaagagcttttgattgatgaaaatgatgctaaaacacaatatgagagtatttttgtagcaaagaatgagaaggttgaccttgattggcttaataaagagatagaaaatttacaaatatgtgaagatatttcagaggctttattaaagattgtacctgaatttaaacacaataaagaaggtgtataa

SEQ ID NO: 18331 - DNA, 603 bp, Campylobacter jejuni
atgtatgaaaaagtttttaaaagaatttttgattttattttagctttagtgcttttagtgcttttttctccggtgattttaatcactgctttacttttaaaaatcactcaaggaagtgtgatttttacccaaaatcgtcccgggttagatgaaaaaatttttaaaatttataaatttaaaaccatgagcgatgaaagagatgaaaagggtgagttattaagcgatgaattgcgtttgaaagcttttggaaaaatcgttagaagcttaagtttggatgagcttttgcaactttttaatgttttaaaaggggatatgagttttgttggacctagacctcttttggttgagtatttgcctctttacaataaagagcaaaaattgcgtcataaagtgcgtccaggtataacaggatgggcgcaggtaaatggtagaaatgctatttcttggcagaaaaaattcgaacttgatgtgtattatgtgaaaaatatttcttttttgcttgatttaaaaatcatgtttttaacagctttaaaggttttaaaacgaagtggggtaagcaaagaaggccatgttacaacagagaaatttaatggcaagaactga

SEQ ID NO: 18332 - DNA, 930 bp, Campylobacter jejuni
atgcctaaactttctgttatagtaccaacttttaatcgtcaagttttgttagaaaaggctattaaaagcatacaaaatcaagattttaaagatttagaaattattgtaagcgatgataattctagcgatgatactaaaagtgtggtgcaaaatttacaaaaagatgatgatcgcattaagtattttttaaatcaaaattacaaacaaggtccaaatggcaataaaaacaatggcttagatcaagcaagtggcgagtttgtaacttttttagatgatgatgatgagcttttatccggggctttaagtaccttgatgcaaaaagcaaatgagggttatgctcatgtttttggaaattgtttgatagaaaaagaaggaaatttaagcaaggaatttagcggcaagggcttggaaaaagatagtgaaatttctaaaaaagattttttaatggctaaatttagcggagagtttttttctgtttttaaaaaatccctacttgaaaataagcgttttaatgaagaattttatggcaatgaagccacgctttgggtaaatttatacaaagaaaaaagtttttatatccataaggcttttaggatttatagaatttttaggcaagatagcgtgactttaggggcgagtaaaaatgcttatagggtgtatttgggatatttagagcttgctaaaattttagaaaatgaacttagaatgagtaaggataaagattataaaaaaacttgtgcgagttattataaaatggcagcttattatgcaaaacttgcaaaaaattataaagccctttataaatgtttgtttaaaagcctaagtataaaaatcaacgctcctgctttgatattactcattttaagtataattccaaataatatgattgaaaaattatcaaaaattcgggtggctttatgcaaaaattag

SEQ ID NO: 18333 - DNA, 1029 bp, Campylobacter jejuni
atgaaaatagcaattgttcgtttgtcagcacttggtgatattatacaaagtgccgtggttttgcaatttatcaaaaattttaaaaaagatatagaaattcattggtttgtagatgaaaaatttgaaggcatacttaaaaaccatcctttaataaacaaactctatgccctgcccttaaaagacaaaaaaattttaaaaagcctaaaaattcttcttaaagcaagaaaaaacaactataatgcagtaatagatctacaagggctcataaaatctgctattgtaagtcgaattttaagtagaaataattttggttttgataaaaatagtcttaaagaaagttttgctcataatttctacaaccaaaaacttgagttagattacaatgaaaatgtatttgtaagatacttaagtcttacctcctttatgttaaatactgattttaatgtcaaaaatttagcctttaaacaagatatttttagcgtagatgaaaatttaaaacaactcttaaataataaactcaaactcgacaaaaacgaaaaaaacatactcatacatgtgggctcaagtgtagaaaataaaatctatcctaaaaccaaacttgctatactttgtaagcttttaatcaatgaatttcaacaaacaaaaatttggctcgcttggggaaatgtaaaagaatacgaatttgctaaagaggttttaaatcttagtggtattgatgaaacacatatagaattagcgccaaaattcaatcttgaagaactaatggcttttacaaaaatgatgaatttaatcataggaaatgatagcggcccaacacatttggcttttgctttaaataaggcatctattacgatttttggtgcaacaccaagctaccgcaatgcttttcaaactcatatcaataaaatcattgatgcaggtaaaaaaatccaaaatgccaagcatatcgataaaagtgatttttgtatcacgcgtatagaagaagaagatatcttcaaacttgccaaaggcttacttaatgaaaaatag

SEQ ID NO: 18334 - DNA, 912 bp, Campylobacter jejuni
atgagtcaaatttccatcatactaccaacttataatgtggaaaaatatattgctagagcattagaaagttgcattaaccaaacttttaaagatatagaaatcattgtagtagatgattgtggtaatgataaaagtatagatatagctaaagagtatgctagtaaagatgatagaataaaaatcatacataatgaagagaatttaaagcttttaagagcaagatatgaaggtgctaaagtagcaacttcaccttatatcatgtttttagattctgatgattatttagaacttaatgcttgcgaagaatgtattaaaattttggatatgggtggggggggtaaaattgatttgttgtgttttgaagcttttattaccaatgcaaaaaaatcaataaaaaaattaaatataaaacaaggaaaatacaacaacaaagaatttacaatgcaaatacttaaaactaaaaatccattttggacaatgtgggctaaaataatcaaaaaagatatttatttaaaagccttcaacatgttaaatctcaaaaaagaaatcaaaataaatatggcagaagatgccttattatattatcctttgacaatattatctaatgaaatattttacttaacacaacctttgtatacccagcatgtaaatagcaattctataacaaataatattaattctttagaagctaatattcaagaacataaaattgttttaaatgttttaaaatcaattaaaaataaaaaaacacctctatattttctaattatatatttattaaaaattcaattattgaaatatgaacaaaattttaataaaagaaatataaatcttatttattataaaataaatattttatatcaaaaatatcaattcaaatggaaaaaatttttatataatttaattccgtaa

SEQ ID NO: 18335 - DNA, 1116 bp, Campylobacter jejuni
atgaaaaaaatagtttttgttagcggaactagagctgatttttctaaaataaaatctctaatgatgaaagttgaaaattcaaatgaatttgaattatttatatttgtaaccggtatgcatatgagtaaaaagtttggttctacttatatggaaatagaaaaatgtggttttaaaaatatatataaatatataaatcacgataagtattatcagatggataaggctttatcatcaacaatagatggtttttctaaatttatacatgagatagagcctgatttaatagtagtgcatggtgatagagtggagcctttagctgctgctatagtaggaagtttaaataatatcttagtggcacatatagaaggcggagagctttcaggaactatagatgagagtttaagacatgctattagtaaattagcacatattcatttagtaaatgatgaaatagcaaaaaaaagattaatacaaatgggtgaagatgagaaatctatttttattataggttctcctgatttagaattgctaaataatactatatctttagatgaagcaaaaaaatattatgatataaaatttaaaaattatgccatagctatatttcatccaattacaaccgaaataaactctttatataaacaaagtgaagaatttgtaaatgctcttataaaaagtgaaaaaaattatatagttatttatccaaataatgatttaggatttgaattaattttgcaaaattatgaaaggctaaaaaataatgaaagatttaaaatttttccttctttaagatttgagtattttataagtttgctaaaaaatgccaattttatcataggaaattcaagttgtataataaaagaagctttatatcttaatataaatggaattttagttggttcaagacaagatggtagaactgacattaataaaacaataagagtaaatgcagaggaaaaggatatattggaagcgattttaaatactagtaaatgcactaatattacaaataaaagactagaaattttaaatagttctgagcaattttataggttattgaaaaataatattttatttactataaacaagcaaaaaatattcatggataaaaaatga

SEQ ID NO: 18336 - DNA, 825 bp, Campylobacter jejuni
atgccacaactttctatcataatcccgctttttaattcttgcaattttatctcaagagctttgcaaagttgtataaatcagactttaaaagatattgaaattttgattatcgatgataaaagtaaagataatagtttaaatatggttttagaatttgctaaaaaagatccaaggataaaaatctttcaaaatgaagaaaatttgggcacttttgcaagtagaaatttgggagttttgcattctagttctgattttataatgtttttagatagtgatgattttttaactcttgatgcttgtaaaatagcgcttaaagagatgaaaaaaggttttgatttgctttgctttgatgcttttgtacatagggtaaaaaccaagcaattttatcgttttaaacaagatgagttttttaatcaaaaagaatttttagaatttctaagcaaacaaaggcatttttgctggtcggtttgggctaagtgttttagaaaagatattatcttaaaaagttttgaaaaaattaaaatagatgagcgtttgagttatggcgaagatgtgcttttttgttatgtttattttatgttttgtgagaaaatagctgtttttaaaacttgcatttatcattatgaatttaatccaaatggaagatatgaaaacaaaaataaagaaattttatggcagaattatcaagataaaaagaaaagcaatgaacttgtaaaaaagctttgtttaaactttaaaaataatgattttcataagaagttgtttgaggttttagagaaagaagaatttgatttacaaagaagggttgatgaagcaagaaattag

SEQ ID NO: 18337 - DNA, 561 bp, Campylobacter jejuni
atgataaatttagtggaaaaagaatggcaagaacatcaaaaaattgttcaagcaagcgaaattttaaaaggacaaatcgctaaagtaggtgagcttttgtgtgagtgtcttaaaaaaggtggtaaaattttaatttgcggaaacggtggaagtgcggctgatgctcagcattttgcggctgaacttagcgggcgttataaaaaagaacgcaaggctttagcaggcatagcacttacaaccgatacttcagcacttagtgccataggaaatgactatggttttgagtttgttttttcaagacaagtggaagctttagggaatgaaaaggatgttttaatcggtatttcaacgagcggaaaaagccctaatgttttagaagctttaaaaaaagcaaaagagcttaatatgctttgtctagggcttagcggaaaaggtggtggaatgatgaataagctttgtgatcataatcttgttgtgccaagcgatgatacagctagaattcaagaaatgcacattttaatcatacacacactttgtcagatcatagatgagagtttttaa

SEQ ID NO: 18338 - DNA, 1386 bp, Campylobacter jejuni
atgcttgagtttttaagtcagcaaaaacctaaaattttgattataggagattttatggtggataattacacttggtgtgattgttcgcgtatcagccctgaagcccctgttttaatagctaaaactcttaaagaagataaaagattaggcggggctgcgaatgtttatgcaaatttaaaaagcttgggagctgatgtttttgcgctcggtgttgtgggcgatgatgagagtggaaaatttttacaagaaaatttaaaaggagaatttttgatccaaaaaggacgcaaaactccttttaaaaatcgtattatggcgcataatcagcaggttttaagactggatgaagaagatataagtgagattttgcttgaaaatgagcttattgctttgtttgatgaaaagattaaagactttaaggctgtggttttaagcgattatgccaaaggtgttttaacccctaaagtttgtaaggctgtgatagaaaaggctaaggttttaaatatccctgttttggttgatcctaaggggagtgattttaacaaatacagcggtgcaactttacttacacctaataaaaaagaagctttagaggctttgaaatttgaaaatttagagggtgaaaatttagaaaaaggcatcaaaaaattaaaagaagatttttctttgcgttattctatcatcactctttcagaagctggaattgcactttttgatgagggtttgaaaatcgcacctgctaaagccttagaggtttatgatgtaacaggagcgggcgatagtgtgatcgcagttttggctttttgtttggcaaatgaaattgaaatttttaaagcttgcgaacttgccaatgaagccgcagctgttgtggtaagtaaaataggtagcgtgagtgtgagttttgatgagattaaaagttttaagcgcgtggattttgagaaaaaaatcaaaagcaaagaagaacttttggtacttttgaaacaaaataataaaaagattgtttttacaaatggttgttttgatatcgtgcattttggacatataaaataccttgacaaagctaaaagattgggcgatgttttgattgtaggtttgaactcagatgcgagtgtgaaaagactcaaaggcgagagtcgtcctgtaaattcagaatttcaaagagcttgtatgttggcagctttttattttgttgattttgtagtgatttttgatgaagacacgcctttagaacttataagctttttaaagcctgatattttggttaaaggagctgattataaagataaacttgttgtaggtgcagatatcgtttcaagggttgaattaatcgactttgaagaaggatttagtacaagtaagatcatagaaaagattaaggataaaaaatga

SEQ ID NO: 18339 - DNA, 2358 bp, Campylobacter jejuni
atgattatgaaatgtgaacattgcaaacttgattataaacaagcccaaatgatagagtataagggtaaatttttttgttgtaaaggttgtgagagcgtttgggaaattttgcatgaaagtggattagatgagttttatgaaaagcttggaaatcaaactttaagccctgtaaattttcaaaatgaaatgaaaaattatgatgagtttatcactaaaaccaaagaaggatttagtgaaatttatctcatgatacacggtatagaatgtgcagcttgtgtgtggcttaatgagaaaattttaaccaaacaagaaggaattttagaacttgatattaatcatttaaaccataaagcacgcattgtttttgatgagcaaagcatttctttggtgcaaattttaagacttattgaaagcataggctataaagcgagtgcttatgatgcgagcaaggcttcaaaaaaagcggatttactaaaaagggaattttattctaagcttgttgtggctatagcttgtgtgatgaatatcatgtggatagcagtggcaaaatacgcaggattttttagcggtatggataaggacactaaggatattttaaattttgctgaatttatcctttgttctcctgtgcttttttatacgggatctcatttttataaaagtgcttttaaaactttaaaaatgcatagtttaaatatggatgtattggtgattagcggagcgagtttggcttatgtttattctttatgggccatgttttttagggtaggggaggtgtattttgactctgtggcgatgataatttgctttgtttttataggtaaatatcttgagatgtttagcaaaaagcgtgctttagatactatagatgggcttaatgattttttgcaaaatgaagttttagttttcaatggtaaagaatttgtctctaaagaagtgcaaaaggtttgtttgggggatagaattttgcttaaaactggagataaaattttaatcgatgggatttgtaaaagtggtgaaatgagcgtagatacttcttctttaaatggagaaaataccccaaaactcatacaaaaagaagatgaaattttttcagcttgtatagtgcttgatggaagtgtggagtatgaagcaacaaagttttacaaggattcaaaactcagtcaaattatccagcttttagaacttgcaagttctaaaaaagcaaaacttgaaagtttggtcaatagtcttttggcttatttttctagaacggttttattgatcgcttttatttgttttgctttttggtttttttataaagaagagagtttcgaaatttctttagtcaatgcgattgcagttttgattatcgcttgtccttgtgctttggctttagcaacgccagtgagcaatcttgtggctttaggtagggctttaaaaaagcatattttatttaaaagttctagcgtgatagaagatttaagcaaatgtgattgtgtggtgtttgataaaacgggtattttaaccaaaatagagcttgaacttaaagaggtttttttagataaagcgcttgatttaaacgagctttataattttgtaaaactttctaaacatcctatctctcaaaatattgtgttatatttaaagcaaaaaggagctaaggatttaaatttggattttaaaaagcattcgagtattcaagctaaaggtttaagtgctgagttaaatgaagggttgcttttaggcggaagttctaaatttttgcaagaaaagggtattgtggctaaagaatttgataatacgcattttatttttgccaaggaaggtaaaattttagctttttttgagtttgatagtgttttaagagaaggtgcaaaagagcttatcgcttatcttaaaaaagaaaagaaagaattaatgatactcagtggcgatcatcaaaaagcagtggaaaaaatcgctaaaaagttagaaattcaaaattatcaagcttcttgtttgcctgaagataagatgaaaactatagaaaatttaagtaaaaattacaaagttttatttgtaggtgatggggtaaatgatgcactagctttaaaatacgcaagtgtttcaatgactttaagagaaggaagtgatctagctatagaaagtagtgatgttttgcttttgaaaaatgacttgctttctttaaaaaaagccatcaaattatctaaaaacacctttaaaattatcaagcaaaatcttgctttttctttgttttataatgcttgcaccatacctttggcttttttgggtatgataaatcctttatttgctgctatttctatgtcttttagtagtataatagtcgttttaaatgctttaaggattaaagaatga

SEQ ID NO: 18340 - DNA, 1299 bp, Campylobacter jejuni
atggaaaaagaaaaaaaacaacatcaaagaacccacgttccagtggaaggttataaaatcgaagaattaaaattattagatttagaaaatctagttaaaatcgccaatgaatgcgaaatcgaaaacccaagagaatttcgccgccaagaacttatttttgaaattttaaaagcacaaacaaaaaaaggcggttttatactttttacagggattttagaaatttcttccgaaggttatggctttttaagaggtatggactctaatcttagcgatagtgttaatgacgcttatgtttcaaattcacaaattaaaaaatttgctctgcgtgtaggcgatatcgttacaggacaagttagagaaccaaaagatcaagaaaaatactacgctcttttaaaaatcgaagcgatcaattatctgcctttacaagaagccaaagaaagacctttatttgataacttaacccctatttttccaacagaaaaaatcaaactcgaatacgatgcaatgaagcttacaggtcgtgttttggatctttttactcctataggaaaaggacaacgcgggcttatcgttgctccaccacgcacaggtaaaacagagcttatgaaagaacttgctactgctattgcaaaaaaccacccagaaatgcatttaatcgtacttttagtcgatgaaagacctgaagaagttaccgatatgcaaagatgtgtaaaaggcgaagtttttagttctacttttgatttacctgcttataatcatgtgcgtgtagccgaactcgtgatagaaaaagccaaaagaatggtagaaacaggcaaagatgttatcatcttacttgatagtatcacaagactggcacgtgcttataacaccgcaactccaagcagtggaaaagtcctaagcggcggggtggatgctaatgccctacacaaaccaaaacgcttctttggtgcagctagaaatatagaaaatggaggctctttaaccatagttgctacagctttaattgatacaggttcaagaatggatgatgtgatttttgaagaatttaaaggcacaggaaatagcgaaatagttcttgatagaaatatcgctgatagaagaatttatcctgcgattaatatcatcaaatcaggaacaagaaaagaagaattgctccaaggcgtagcaaatcttcaaaaaatttgggcaatccgttcagcgatttctcaaatggatgatgttgaagcgttgaaatttttatattctaaaatgcttaaaaccaaagacaatgtagaacttttatctataatgaacgagtag

SEQ ID NO: 18341 - DNA, 1530 bp, Campylobacter jejuni
atgcttcaagctttagcgattaaatacagaccaaaaacctttgatgaactcataggacaaaagacagttagcgtaagtttaaaatacgccctaaatcataatcgcttagctcatgcttatcttttttcaggacttagaggaagtggaaaaacttcgagtgctagaattttttctcgtgctttagtttgcgaacaaggaccaagtgatactccatgtggcacttgcaaacactgtcttgcagcacttgaaggcaaacatatagacattatagaaatggatgctgcaagcaaccgtgggcttgaagatatacaagccttaatcgaacaaaccaaatacaccccttctatggcaagatttaaaattttcatcattgatgaagtacatatgcttaccccacaagctgcaaatgcgcttttaaaaaccttagaagaacccccaagttatgttaaatttatacttgcaaccacagatcctttaaaacttccagctactgtgctttcaagaacacaacattttcgctttaaacaaattccacagagtgaaattttaaatcatcttaaagaaattttacttaaagaaaatgttaaatttgaagaagaagctttaaaatttatagcaagaagcggcaatggatctttaagagatactttaaccttgcttgaccaagctattattttttgtcaaaatgaaatcagcattagtaaaattacagatatgctaggatttttagatcctcaaaaaatcaaagccttttaccaggctatcttaacaaaagacaaggaaaaagtttttgtgtatttagaggaattacaagactatgaagcctcaagcgtgattgatgaaatgcttttttatttaaaagaaagtttttttgcaaaaagcacagaattttctactttaatttatgaaagatttttccgtattttatcaaaagctaagaatatgctttgcgatgatgatggctttacgctttgtgttatggcttttatgatgatggaagcaagtcatttaaaagaaattgacgcacaaatccaagaaatcaaacaagaaaatacaacaaatattatatctaggatcacaccttctcctatcatacctcatcttgagaaaaaaacagaaaaaaatgcttatgaaatcttgcttgatagtatttatgatagggattttgatcttgcagaatgctttaaacaaagtacaaattttattagttttgaaaacaatactttaaatataaactcaaacgcacaaggacaaaatcgcgatacactcaataaaggttttaaactcatacaagaactttttaaagctaaatttggagaaaatgctaaaattaatgtgcaaaaagcactaacaattgatgaaaataagcttcaatccttaactcaagaattaccaaacaatgaaaataaaaacatagatattcaaagttctattaatatgcttaaagaaggggccaaaaaatttgacccacaagaagatcttaaagaggctcttaaagattgttttggagagcctagtatagaaaattaa

SEQ ID NO: 18342 - DNA, 228 bp, Campylobacter jejuni
atgagaaaaatactttttgcaagtttattacctatcattgctttggctgattgtgcaagtttgatggcaaaatacgaagctccagagccagagtcaaaaacaatgaaacaagttgaacgctggattaataaaaaagttagcgatccagctgatgctgctgttttaaaagagtgcatgatcgctcgtgcagcagacaatccaaatcaagtttcagttgcaggtaaataa

SEQ ID NO: 18343 - DNA, 1593 bp, Campylobacter jejuni
ttgaaaagtattatttttaatgaaattaaaaagattttagagtgtgattttgcgcttgaaaatccaaaggataaaaatttagcacattttgctacccctttggctttttcactggctaaggaattaaaaaaatcccctatgttgatcgctagcgacttagcgagcaaatttcaaaatcatgattgttttgaatcagttgaagctgtaaatgggtatttaaattttagaatttccaaaacttttttaaatgaacttgcaaatcaggctttaacaaatccaaatgattttactaaaggagaaaaaaaacaagaaagttttttgcttgaatatgtgagtgcaaatcctactgggcctttacacataggacatgcaagaggcgctgtttttggagacaccttaacaagacttgcaagacatttgggctataaatttaatacagaatactatgtcaatgatgcgggtaatcaaatttatttactagggctttctattttactaagtgtgaaagaaagtatacttcatgaaaatgttgaatatccagagcaatattacaaaggcgagtatatagtggatttagcaaaagaagcttttgaaaaatttggtaaagaattttttagcgaagaaaatatccctagtttggctgattgggcaaaagataaaatgcttgttttgattaaacaaaatttagaacaagcaaagattaaaattgacagctatgtaagcgaaagatcgtattatgatgctttaaatgcaactttagaatctttaaaagagcataaaggaatttacgagcaagaaggtaaaatttggcttgcttcttcgcaaaaaggcgatgaaaaagatagggtaattatccgtgaagatggacgcgggacttatttggcagcagatattgtttatcataaagataaaatgagtcgtggttatggaaagtgtattaatatttggggagcagatcatcatggttatatccctagaatgaaagctgcgatggaatttttgggatttgactctaataatcttgagattattttagcacaaatggtttccctacttaaagatggagaaccttataaaatgagtaaaagagcaggaaattttatcttgatgagcgatgtggttgatgagataggaagtgatgctttgcgttatatctttttgagcaaaaaatgcgatacgcatttggaatttgatattagtgatttgcaaaaagaagatagttctaatcctgtgtattatatcaactatgcacacgctagaattcatcaagtgtttgctaaagctggtaaaaaaatcgatgatgtaatgaaagctgatttacaaagtttaaatcaagatggcgtaaatttgctttttgaagctttgaatttaaaggctgttttaaacgatgcttttgaggctagagctttgcaaaaaattcctgattatcttaaaaatttagctgcaaattttcataaattctacaatgaaaataaagttgtaggctctgcaaatgaaaatgatttgcttaaattattttctttggttgctcttagtattaaaaccgcattttctttaatgggtattgaagcaaaaaacaaaatggaacattaa

SEQ ID NO: 18344 - DNA, 1629 bp, Campylobacter jejuni
atgaaaattttacttttaaatgaaaaccctgtagtttcaagacttgtaagccttagtgctaaaaaaatgtcttatgattttgaagaacttaatgcttatagtgaaaatttgggtaattatgatgtgattgttgtagatagtgatactccagcacctttaaaaattcttaaagaaaaatgcgataggttgatttttttagccccgcgaaatcaaaatgtagaagatatagatgcgcaaattttacaaaaaccttttttacctacagattttttaaatttacttaataataaagatgcgaacaagcatacatctattgatttgccaatgttaagcaatgatgaaaatccttatgctgatataagcttggatttagataatttaaatttagatgatttgcctgatgaaaattctttagatataaattcagagggaatggaagatttgagttttgatgatgatgctcaagatgataatgcaaacaaaactttagaaactcaaaatttagaacatgaaacaattaaagaacagactcaagaagacactcaaattgatttagatttaactttagaagatggcgaaagtgaaaaagaagacttaagccaagaacatacagctttggatactgagcctagtttagatgagctagatgataaaaatgatgaagatttagaaatcaaagaagatgataaaaatgaagaaatagaaaagcaagaattattagacgattctaaaacaaatacattagaaatgcaagaagagcttagcgaatctcaagatgataattcaaacaaaactttagaaactcaaaatttagaacatgacaatttagaacaagaaacaattaaagaacagactcaagaagacactcaaattgatttagatttaactttagaagatggcgaaagtgaaaaagaagacttaagccaagaacatacagctttggatactgagcctagtttagatgagctagatgataaaaatgatgaagatttagaagataataaagaattacaagctaatataagcgattttgatgatcttcctgaggttgaagagcaagaaaaagaaatggattttgatgatcttcctgaggatgctgaatttttaggtcaagcaaaatataatgaagaatcagaggaaaatttagaggagtttgctcctgttgtggaagaagatattcaagatgaaatagatgattttgcttcaaatttgagtactcaagatcaaatcaaagaagaactagctcaacttgatgagcttgattatggtattgatagtgacaatagtagcaaggtcttagaagattttaaagatgaaccaattttagacgataaagaattaggaacaaatgaagaggaagtggttgtgccaaatttaaatataagtgattttgatacattgaaagaaagtgatatacaagaagctcttggagaggaaatcttagaaaaaaatgaagagcctatagtaagtgatgtaactaaagatgataatagcgaagagatagttaatgagcttagccaaagcatagcaggagcgatcacttcaagtattaaagatgataccttaaaagctgctcttaagggtatgaatatgaatataaatataaacattagttttaaagaggattga

SEQ ID NO: 18345 - DNA, 1074 bp, Campylobacter jejuni
atgactgaaattactgctgcaatggtaaaagaactccgcgaaagtacaggcgcggggatgatggattgtaaaaatgctttgagtgaaactaatggagattttgataaagcagtacaacttttaagagaaaaaggtttaggtaaggctgctaaaaaagcagatagacttgctgcagaaggtttggtaagtgtaaaagtaagtgatgattttacaagtgcaactgtaagtgagattaattccgaaacagattttgtggcaaaaaatgatcagtttatcgctttaacaaaagatactacagctcatattcaaagcaatagcttgcaaagtgtggaagaacttcattcaagcacaattaatggcgtaaaatttgaagaatatttaaaaagtcaaattgcaactataggagaaaacttagttgtaagaagatttgcaactttaaaagcaggtgctaacggcgttgtaaatggttatattcatacaaatggccgtgttggtgttgtgatcgctgcagcttgtgatagtgctgaagtagcttcaaaatcaagagatttattaagacaaatttgtatgcatattgcagcaatgagaccaagttatttaagttatgaagatttggatatgacttttgttgaaaatgaatacaaagctttggttgctgaacttgaaaaagaaaatgaagaaagacgcagacttaaagatccaaataaacctgaacataaaattcctcaatttgcaagtcgcaaacaattaagcgatgcaattttaaaagaagctgaagaaaaaatcaaagaagagcttaaagctcaaggtaaacctgaaaaaatttgggacaatattatcccgggtaaaatgaatagttttatagctgataattctcaactcgatagcaaacttactttaatgggtcagttttatgtaatggatgataaaaaaactgtagaacaagtgatcgctgaaaaagaaaaagaatttggtggaaaaattaaaattgttgaatttatttgctttgaagttggcgaaggtttagaaaagaaaactgaagattttgcggctgaagttgctgcacaactttaa

SEQ ID NO: 18346 - DNA, 792 bp, Campylobacter jejuni
atggttagtatgagagatttattagaatgcggtgtgcattttggacaccaaacaagacgctggaatccaaagatgaaaaaattcatttttggcgagagaaaaggtatttatgtaattgatttacaaaaaactttaagatattttagatatacctataatatcgttcgtgacgctgctgctgaaggaaaaactatactttttgttgggacaaaaaaacaagcaggtggagcgattaaagaatacgctgaaaaatgcggtatgccttatgtaaatcatagatggcttggcggtatgatgacaaattttggtactattcgccaatcaattagaaaattagaagtaattgaaaaaatggaagaagatggaagtattaaacttttaactaaaaaagaagctttaatgcttacaagaaaaaaagaaaaattattagcttatttaggtggaattcgttatatgaaaactcaacctgatatgatttttgttattgacacagtaaaagaaaaaattgctgttcaagaagcaaatagattaagaattcctgttgtagctccactagatacaaactgcgatcctgacttggtaacttatcctattccaggaaatgatgatgcaattcgttcagtgcaacttttctgccaagaaatggctgaagcgattaatgaaggaaaagctttaagagaacaagatggcgaagctttagtaaatgaagaaaaagaaatcaccgatgaagagaaaaaagaagttttagatgaagcgatgagcgaagaagacttcggtgaggagcaagaataa

SEQ ID NO: 18347 - DNA, 1860 bp, Campylobacter jejuni
atgtttgatgtcattgttataggtggtggacatgcaggtgttgaagcaagtgctgctgctgctagaatgggtaaaaaaaccttacttttaactacattgattgagcaaataggagcggcaagttgtaatccagctataggtggacttgctaaagggcatttggtaaaagaacttgatgccatgggtggtcttatgggtgaaatcaccgatgaagcagggatacaatttcgcattttaaatgaaagtaagggtgtagccgttcaaggaagtagggcacaaattgatatggataaataccgtatcattgcacgtaataaacttttaaaacttccaaatttagaaatttctcaagaacaagcgagtgttttaatcgtagaaaatgatgaagttaaaggcgtaaaaacaaatttagaaaatatatattttgccaaaaaagtcatcctaacaacaggaacttttttaaatggacttattcacgtaggtgaaaataaacttcaagcaggaagggtaggggagcttgcttcggtaaatttaggaaattatctgcaaactttgggtttaaaaatgggacgtttaaaaacaggaacttgcccaagagtggatgcaaaaagcattgattttagcgtgcttgaaattcaagatggtgatgtaaatcctaaagcttttagttttcgttcaagaaatttcaatcctactcaacttccttgttatatcgcacgcactaatacaactacacatgagattattaagaataatttttatcgtgctccgctttttacaggacagattgaaggtgtggggccaaggtattgtccttctatagaagataagatcaatcgttttagcgacaaagaaagtcatcatctttttatagagcctcaaactatcgatgcgacggagtattatattaacggtttttctacttctttaccttatgaagtacaaactcaaatgttgcgttctgtagagggttttgaaaatgctaaaataacccgttttggttatgctatagaatatgactatatagagccaactgaacttaagcatactttagaacttaaaaagattaaaaatctttattgtgcaggacagattaatggaactacaggttatgaagaggctgcagcacaaggctttatggcgggaatcaatgcaagcttaagcatagatatgaaagagcctttgattttaaggcgtgatgaagcttatataggagttttaatcgatgatttggtagtaaaaggcacaaaagaaccttatagaatgtttacttcaagagcggaatttagactgcttttaagggaagaaaatgctatacttagacttggaaaatatggctatgatttagggcttttaagcgagcaagattttacttatatacaaaatatcgcaaacaatcttcaaaaaggacttgaatttttactttctaaagaatttacgcctaacaaccaaaataatgcttttttagagagtttaggagaagataaaatttcttctatagtcaatcttcaaaaaattgttgcaagagcaagttttgatatagaaaaattaaaaaaacttgaccctatatttgaaaccatggatcattactccttaagagagattttaaatgaggcaaagtattatcattacattagtatgcaaaaagctcaagtagaaaaaatgaaaaatcttagcgagcttaaaattcctgaaaattttgattttaaaagtgtaagtggtttgagtaatgaggttgtagaaaagcttaatcatcataaacctccaaccatttttgctgcaagtcaaatcagtggaatcactcctgcagcgttggatattttgcaaatttatatcaaaatgcaaaagaaaaaagcttaa

SEQ ID NO: 18348 - DNA, 1377 bp, Campylobacter jejuni
ttggaaactttaagtcaaactttagctgaaagaaaaccgcctttatataaacgtattatcaaaagtcttggattttgggtgattataggcattattacaggtattgtacttggctatacagataaagaattagccattgctagcaaaccaggagttgattattttataggtgctttaaaggttcttataggccctattatttttgttactttggttttgggcatcattagtcttgaaagtttaaaaaaagtaggtagcattggtgctaaagcggttatttactttgaagttgtaagtactttagcacttgctataggtatttttatggcaaatgttatgcaaccaggccatggaatgaatcttgatccaagtcaacttgatacaaaaagcgttcaaaaatacatttctcaaaccacagaagtaagtgcgagctctgagattatgcatattttaaaagatgctatgcctactgatattatcacaccttttacagaaggaaaaaccatacaagttttagttattgctataattactgctttgattatttctttaatgagaatagaagacaaacaggcaattcaaagagtttttgaagtggtacaaaattttgtttttaaaattctacaaatcattatgtattttagtcctattgccgccttttcagcaatggctgtactcatagctcaatacggaattggctctttgatcaacttagcatatttacttttagtaatgctgatttcatgtcttgtttttatatttggaatcttaggtctgatttgttattttgcaaaagtaaatatcttcaaatttatgagatttatctcaagagaagtattgatcgtttttgcaaccagttcaagcgagtctgcacttgctcctttaatgagaaaactagaaaaagcaggactttctaaagcaacagtcggacttgttttaccaacgggatatagttttaatcttgattgtacaaatatttatctagctatgagcttaatctttctagcacaagctttcaatgtaaatttaagtttagcacacgaaatcagtattttaatagtattaatgatagcctcaaaaggtgcagtaggtgtaactggatcaggttttatagtgcttggaagtacgcttgcggctctaggaaatatggaaatttcagaagcaaatgcaaccttagcacaagttctaccagtagctgctataggtgttcttttaggtgttgataaatttatgtctgaaatgagagcggttggaaatctttgcggaaattcagtagcagctttaatcgttgctatctgggataaacaaattgattgggaaaaattccgctacgctatggacaatccagaaaaatttcataatgctggaatgaactaa

SEQ ID NO: 18349 - DNA, 1527 bp, Campylobacter jejuni
atgcaaaaagacaacctcatagcttttgttatttttattatcagtactatcgcatttgttatttggggatttggttatatttcgcaacatcaattgattctttttattcttgcttctatatttggcatttttatggcatttaatataggtggaaatgatgtagccaattcttttggaacaagcgttggcgcaaaaacagtaaccattaaacaagctttaattatagcagctgtttttgagctaagcggggcaatcttcgcaggcgcagaagttactaaaaccatacgcagcggtattgttatttttccaaattctttagatcctatgctttttgttatcattatgcttgctgcacttttaagctctggggtttggatttttattgcaaccaagaaaggcttacctgtatcaaccacacacagtatagttggtgggattgtaggtgctagcattatgatggggcttttaaaatttgatggaatccaaacactctctatggttaaatggagtgaaattttaagaatagctatttcttggatagcttctcctcttttagggggtattgtagcttatattatttattcatatattgataagaaaattttaaaaccatcagaaaaactaaatgatgatttgaaaaatatcaaaaaagaaagaaaaaaattcaaagaagaatattttttaaatttaaaaacaaaatcccaagaagaacaaatcaaagaactttccgctatagctttggatgaagaagaacaagaaaataatttctatagaaataaaatgaaggaatttaaggatcaagaaaaagatatagatatttactctattttaaaaactcatatgccaatcattgcttgtattgctgctgctatcatttcggcaatgtttttatttaaaggtttaaataatgttagcactttggatattttacaaaacttttggattatcggaattataggaactataagttatgttgtaacatttgctatagtcaaaatcgttaaaaaaacagaacttaataaaactactgatagaattttctcatggtttcaaatatttacagcctctagttttgcattttcacacggagccaatgatatagccaatgctataggtccttttgcagcgattttagatgtcttaaaaaacggtacaattaacgcgacttctcctgtaccttttgcagctttagctatgtttggagttgctctagttgtagggctttggtttttaggtaaagaagtgattactacagtgggttcaaaacttgcaaccatacgccctactactggattttctgcagaacttggtgcaagcatagttatactcttagctacacaatttggaattcctgttagctccacccatatactcataggtgctatattgggtataggagtgtataataaaaacgcaaattggattatgatgaagcctataggattggcttggattatcactttaccagccgctggtattatggcagcacttgtatttttaggatttaaactatctttaggaatttaa

SEQ ID NO: 18350 - DNA, 1179 bp, Campylobacter jejuni
atgataattaaaaatgcaaaaatttatggagattctttacaagatatagagattaaagaaggaaaaattaccaatattgattctaatttacaaggcgaagaaattttagatgctaaaggtatgactttacttccatcttttgtggatttgtgtgtgagtttaaaaaacgataaattttctttagctaatttagagcttttagaaaatgagtgtctaaaaggaggaatttctagtatagttttgcgtgattgcatggattttgatgaagaaagttttgctttatttttacaaaatttagctcaaagaaagatgcaaattttttcaagtgtgcgggttaaggatgcaaacggcaagcttaaaaatttagccactcttttaaataaaggtgcttgtgctctagaacttgacagctctttagatgcaaatactttaaaagtaagttcacaatatgcttttatgaaagactctccaatttttgtgcgttgttatgataaggattttgatgataatggagtgatgaatgattgtgaaatgagttttgagctagggcttataggcatgagtaaaatcgctgaaactagccagatagctaaaatgaaagaattggctaaattttataaaaataaagttatttttgatcttttaagtttgaaagattctttagtattattagatgaaaaggatttaaaacttgtaagcattcatcatcttatcaaagatgatagtgcttgtgaagattttaatacggctgcgaaacttatgccacctttaagaagcaaagaagatgttttggctttaagagaggttttaaaagaaggaaagattagctttttaacttccctgcatagtgcaaaatcaatttctttaaaagatttagcttttgatgaagcggcttttggaattcatagcgtatgcgaatttataagtctttgttatacttttttaatcaaagaaggatttttaaattggcaagagctttgtcgatttacaagtaaaaatcctagtgaatttttaggtttaaatagtggagttatagaagttggcaaagaagctaatctagttctttttgatgagaatgaagaaatttttgctccaaaaagttctctttattctgaggataaactttttggaaagattaaaatgcatataattaaaggaaaaaatattttagaaaaataa

SEQ ID NO: 18351 - DNA, 897 bp, Campylobacter jejuni
ttgatgcgtatagcggttattggtgcgggaaaatggggcagtgctttacatctagccttaaaagaaaatcacaattgttttatcagttctttgcatcagcgtgatttagaagattttgttagcataaaagaagctttagaatgtgaatatcttgtttttgctttaagttctcaagggatgcgtgcttggcttaaagaaaatttcatcaacaaggggcaaaaaattttaattgcttcaaaaggtatagaagatcaaagttgtcaatttttagatgaaatttttttagattttgtaccaaaagaaaatttttgtgttttaagcggtccttcttttgctgctgaagtgatgcaaaaacttcctactgctttgatgattagcgggataaatcaagagctttgtaaaaaatttgcaagttttttccctgattttattaaaacttatattgataatgatgttcgtggtgctgaaatttgtggtgcttataagaatgttttagcaattgcaagtgggattagtgatgggttaaaacttggtaataatgcaagagcagcactgatttcaagaggacttatagaaatgcatcgttttggtaaattttttggcactaaagaagaaacttttttaggattgagtggggcaggggatttgtttttaactgcaacgagtgttttatcaagaaattatagagtgggtttaaaactggcgcaaaatcaaaaattagatagtattttagccgaacttaatgaagtagcagaaggtgtaaaaactgcttatgctatagaaaaactagcaaaaatgaaaggaatttatacacctattgtaaatgaagtagtggcaatttttaagggtaaaagcgtgcaagaagcaacgcagaatttattaaagcaaaatgattaa

SEQ ID NO: 18352 - DNA, 1419 bp, Campylobacter jejuni
atgtttgaagtagttataggtcttgaagttcatgctcagttaaatacaaaaacaaaaatcttttgctcatgtgcaacttcttttggagaagctccaaataccaatgtttgtcccacttgtttggccttaccaggagctttgcctgttttaaatgaagaggctgtaaaaaaagctatagcttttggaaaagctgtcaatgcaacaattaataaaaaaagtgtttttaatcgtaagaattatttttatccagatttacctaaggcttatcaaatttcacaatttgatatccctatagtagaaaagggtgagctttttatcaatgtaaagggtgaaaataaacgcataggtattacaagagcgcacttggaagaagatgcaggtaaaaatatccatgaaagtaatttttctaaagtagatttaaatcgtgcaggaactcctttgcttgagattgtcagtgagcctgagcttagaagtagcgatgaggcagtagcttatcttaaaaaacttcattctattatacgctttttagacatttcagatgcaaatatgcaagaaggaagttttagatgcgatgcaaatgttagtataagacctaagggcgatacaaaactttatactagagtagagattaaaaatcttaattcttttcgttttatccaaaaagctatagaatatgaggtaaaaagacaaagtgaggcttgggaagatggaacttacgaacaagaagtagttcaagaaactagactttttgatacgacaaatttagttacaagaagtatgcgtggcaaagaagaagcggcagaatatcgctattttcctgatcctgatttattgcctgttttattaaaagatgagtttttggatattaaaatccctgagcttcctgatgagaagaaagtacgctttatagacaagcttggtataaaagaaagtgatgcagaggttttaatcagttctttagaaatgagtcgtttttttgaaagtcttatttctcaaaatttaaatcctaaactttgcgtaaattggttaaatactgaacttatgggacttttaaaaggagaattgactatagaaaattctcctgtagatgctcaaaagcttggagttttaattaaacgcatagaagatggcactatcagtgcaaaagcggctaaagatgtcttagcttttgtatttgaaaatactagcgtggaaattgatgaagctatagaaaagctaggacttaagcaagtaagtgatgattcagccatagaagcggtgattgaacaaattttaaatgcaaatgccgataaggttgcagagtataaaagtggtaaagacaagctttttggattttttgtgggtcaaacaatgaaagaaggcaaaggagcttttaatcctgcaaaagtaaatgaaattttaaaaacaaagcttggttga

SEQ ID NO: 18353 - DNA, 789 bp, Campylobacter jejuni
ttgcgtaaaggagaaaaaatgactttatttactaaagctttttgcgtcgctactctttttaccggttttgcatgggcaaatgaagaacttaaagttggctcttctataacacctcatgcagatattttaagatttataaaatcagcacttcaaaaacaaggttatgatttaaaaatttatgaattcaatgatggagtaatccctaatgtaatggttgaaaatggtgagttagatgctaattattttcagcatgagccttatttaaaagaattcaatcaaagacaaggcacccatcttgtaaaagttgccagtatccatatagaacctatggcagtgtattctaaaaaacacaaagaatttcaccccaaggaaggacaaagcatttctatacccaataatcctacaaatgaaagccgtgctttacgcattgtagtaagcaaaggacttatagaagttaaggataatgagctcatcactcctttagatatcactaaaaatcctaagaagcttaaatttgtagagttaaaagacgctcaacttacaaggagtttagatgatgtagattattctcttattaatagcaattttgctattttagcaggtttaaaccctgtaaaagatgggctttatacagaaagtaaatatagtgaatatggcaatatcatcgccgttaaagaaggtaatgaaaaccttcctaaaatcaaagccctagtaaaggccttgcaaagcaatgaagttaaaaaatttatagaagaaaaatatcagggtgctttaatccctacattttaa

SEQ ID NO: 18354 - DNA, 849 bp, Campylobacter jejuni
atgtgtagtttttcttttgaagtttttccaccaagaaaggatgaaaatatcaaaaatcttcatgctatcttagatgatttagggcaattaagccctaattttatcagcgtaacctttggagctggaggctctattaactcacaaaatactttagaagttgcaagcttaatccaggaagaatatcaaattcctagcatagtacatttaccttgcatccattctagtaaagaaaaaatcactcagatacttcaaaaatgcaaagaaaaaaatcttaatcaaattcttgccctaagaggcgatatatgtgaaaatttaaaaaaaagcaaagatttttcttatgctagtgatttaatttcttttataaaaaaacaagaatactttgaaatttatgccgcatgctatcccgaaaaacataatgaatctaaaaatttcatcgaggatatacaccatcttaaaactaaggtaaatgcaggaacagataagctcattactcaacttttttacgataatgaagatttttatacttttaaacaaaattgtgctttagcagatattgacatacctatttacgcaggtattatgcctattactaacaaaagacaggttttaaaaatttctcaactttgcggagctaaaatccctcctaaatttgttaaaattttagaaaaatatgaaaataatactttggctttagaagatgcaggtatcgcgtatgcttgcgatcaaattgtcgatttaatcacaagtggtgtagatggaattcatctttatactatgaataaatccaaagcggctattaaaatttatgaagctgtaaagcatttgcttaaagaagagcttcatgcttag

SEQ ID NO: 18355 - DNA, 681 bp, Campylobacter jejuni
atgaaagatttatttttatttagctctttgcttgatgcaagtcatactttttcttatttttttcacataggtttggtagctttaattgctgttatagtggctatgatggctactcgttctatgcaacttgttccacgcggtatgcaaaatttaggtgaggcttttttagagggagttttatctatgggtagagataccatgggaagtgaaaaaggtgcaagaaaatatcttcctttggttgcaactttggggattatagtgttttttagtaatattataggtataatacctggttttcacgctccaactgcaagtttaaatttgactttgtccttggctattatagtttttgtatattatcattttgagggtattagggcacaaggttttgtaaagtattttgctcatttcatgggacctattaaacttttagctcctttgatgtttcctatagagatagtctctcatctttctcgtgtggtttctttgtccttccgtttgtttggaaatattaaaggcgacgatttatttttaatggtaattttagctttagttccttatatagctccacttcctgcttatgtgcttttaacttttatggcatttttacaagcttttatttttatgattttaacttatgtatatttagcgggtgcaactgttgttgaggaaggtcattga

SEQ ID NO: 18356 - DNA, 1341 bp, Campylobacter jejuni
atggcaaaaaataaagcactttttgaatgtcaagcttgtggaaatcaacaaagcaaatggcttggaaaatgtcctgattgtggagcttgggatagttttgtagaattaaaagctgagcaaattaaagttttaaaagagcttgcgcaagttagcatgaaaacaagtgaggctgtttgtattgaagatgtggagttagagcattttacaagatacagcacagatgataatgagcttgatttggttttaggcggagggcttgttgaaggttctttagtgcttataggcggaagtccaggtgtgggaaaatctacgcttttgttaaaaattgcttcaaatttagctaaacagggtaaaaaagtgctttatgtcagtggcgaagaaagtaaagcccagattaaattaagagctgatcgtcttgaggctaatactccgaatttatttttacttactgaactttgccttgaaaatattttagaagaattgcacaaaaaagattatagcattcttatcgttgattctatacaaactctatattcaaataaaatcacttcagcagcaggaagcatcactcaggtgcgtgagattacttttgagcttatgcgtgtgagtaaggcttataatatcagtacttttatcatagggcacattactaaagaaggtgctatagcaggacctagagttcttgagcatatggtagatgtggtgctttattttgagggagatgccactaaagaaatcagacttttaagaggctttaaaaatcgttttggtggaacgaatgaagtaggtatttttgagatgactgctaagggtttgatcagtgcaaaagatttggcaaatcgtttttttactcgtggaaaggctatttcaggaagtgctttaggtgttgtaatggagggatctcgtgctttggttttagaagttcaagctttggtgtgtgaaagttcttatccaaaacgcagcgctacgggctatgaaaaaaatcgcttagatatgcttttggctttgcttgaaagaaagcttgaaattcctttggggcattatgatgtatttgtaaatattagtggcggagtaaaagtaagcgaaactgcggcggatttggctgtggttgcagctattatttcaagttttaaaaatcgccctttgagcaaagatagtatttttataggggagcttagtttaaatggagaaattagagaggtttttagccttgatacgcgtttaaaagaagctaaaatgcaaaaatttaaaaatgccattgttccttctaagcctttggaagatatagggcttaagtgttttgttgctaaagaactttcgcaagttttagaatggatgtaa

SEQ ID NO: 18357 - DNA, 867 bp, Campylobacter jejuni
atgtttaatttttttaaaaaaggacttgcaaaaactcttgaaaatattgttggagttaaaggagagaataaaaagataaccaaagatttgcttgaagaaattttgcttgaagcagatgtaagttatgaaatagttgaagagataatttattatttaccacctcaaaatgaagtaaaaaaagaagatttaaagcgtgttatgggttcttattttctttatgaaaaaaaagaaaccaatcaagaaaaaccttttgtagagcttattttaggagtaaatggagcaggaaaaacaacaagtattgccaagcttgcttatttatacaaaaaccaaaatcaaaaagtgattttaggagcgtgtgatacttttagagcaggtgcgattgagcaattaaaactttgggcgcaaaaagtggatgtagatatagttttaactgcacaagggcatgatccttcagcggttacttttgataccatttctaaagcaaaagcaaaggattttgatagagttattatcgatacagcagggcgtttgcaaaatcaaaaaaatttagctcatgagcttgaaaaaattgtaagaatttcaaacaaagctttagaaggcgcaccccatagaaaaattttagttttagatggaacacagggaaatgctggaattttacaagctaaagcttttaatgagcttgtaaaacttgatggtgtgattatcacaaagcttgatgggacagctaaagggggtgcactttttagtatagcaagagagcttgagcttcctattttttatgtaggcgtgggtgagcaaatgacggatttacaagaatttaatgcaagtgcttatttagatactttattagatcctatttttgaataa

SEQ ID NO: 18358 - DNA, 627 bp, Campylobacter jejuni
atggaaaaaacagattttagggcattgcaaaaaatacgccttttcaaacattcaaaactaaatttcaaacaagattataaaatatttaaagaatgtcttaaaataataaagctatttaaagctaaaaatattttaatttttattcctttgcattatgaaccaaacttaataaaatttcgccatattcttaataaaaattacaaactttttgttccatttatgcaagataaaagtttaaaaattgtaaaattaagattgccttttattaaaaaaaggtttggggttttagagcctatagattctttttttaaagcaaaaattgatttagctattgtgcctgtaattggcgtcgataaaaatttaaaaagaataggacatgggcaaggtttttatgatagattttttgaaaatttaaattacaaacctcatataatatttatccaaagtatagatgctttaagtcaaaataatctaacacaaaagcatgatatttcaggaaaattatacataaacccttataaaaaatattacaagaaagaaagaaaaaatgatagaatcacttatcgcacttatagccgctatagtcggactcggtataggatatttagttgcaaaaaaaatcaatga

SEQ ID NO: 18359 - DNA, 1554 bp, Campylobacter jejuni
atgatagaatcacttatcgcacttatagccgctatagtcggactcggtataggatatttagttgcaaaaaaaatcaatgatgccaaatatgaaattttcgtagaacaagccaaagctaaagccaaagctatagaatacgaagcggagcttattttaaaagatgcaaaaaattcaattcttaatgcagaattagaagttaaaaaaaaatacgaagaaaaaactcacaaatttcaaaaagattttaatcaaaaatttgatgatctttctaaaaaagaacaaaaacttcagcaagaagaagaaaaactaaaagaagataaagaatacctttgcaagtcacaaaaacacattcaaaacttacaatctgatgttgataaattaaaaaataaatatcaagaaaaacttgacgatgttttaaaaattttagaacattcgacaggacttacacaaaatgaagccaaagaaatcattcttaaaaaagtagaagaaaattctcgcgagcaaattgcacatatagtaagaaaatatgaagaagaagcaaaaaatgaagctaaaagaaaagctaatttcatcattgctcaagctacttctcgttttgcaggtgaatttgcagctgaaagacttatcaatgttattaacattaaaaacgatgaacttaaaggacgtatcattggtaaagaagggcgcaatgttaaaaccttggaaatggttttaggtgttgatattatcatcgatgatacaccaggtgctattatagtaagttgttttaatctttatcgccgtgctattgctacaaaagttatagaacttttagttgaagatggcagaattcaacccgcgcgcatagaagaaattcacgaaaaagtgtgtaaagaatttgatagtgccattctagaagaaggcgaaaccatagttatggatctaggtttaaataaaatacaccctgaaattgtaaaactcataggaaaactcaaataccgagcaagctatggacaaaacgctttagcacattctttggaagtggctcaccttgcaggaatcattgctgctgagtgtggtggagatgagaatttagcacgtcgtgcgggaattttacatgatataggaaaagcattaacccatgattttgaaggatctcatgtggatttaggtgcagaactttgcaaacgctacaaagagcatcctgtagtaatcaatgctatttacgcacatcatggacacgaagaagctacaagcatagaatcagcagctgtttgtgcagcagatactttaagtgctgcacgacctggagctagaagagaagtgttagaagctttcttaaaaagagtcagtgagctagaagatatcgctaaaagtaaagaaggaattaaaaatgcctatgcaatcaatgccggaagagaaattcgcgtcatagccaatgctcagcttgttaatgatgatgaaagtgtacttttagctaaggaaatagcagctgaaattcaagaaaaaatgcaatatcctggtgaaattaaagtcaatgttatacgtgaacttagagctgtagaatacgctaaataa

SEQ ID NO: 18360 - DNA, 1161 bp, Campylobacter jejuni
atgaaaaaattattgcttttatttatttttgttgttcaaagttttgcagctttaagtgttgaagagctaacttgggataatggagataccttgcttaaattcctacaaagaaattccatacctatgtcgctttattatggacttgatagagaagatcaagaacttgcttctgatatagcctataaaataaaatatcaagttttaaaagatgaaaacaacaacatagaacaagttttaattccaattagtgatgatttacaaattcatatctataaagataaagatggacaatacactcttgcttttactcctgtatcttatcaaaaagaagatagaattttacatttaaccattaaaagctctgcttatcaagatgtctatgaagaaagtggtagcagtactttagctcgtgctatggttcgtgcttttcgaggaagtataaattttcgcaatatccaaaaaggtgatgaagtaaccctatattatgaacaaaaaagacgcatgggtaaactttggggtgatataaatataaaaatggcaatggtagaaatcaataaaagcgctagagaagtcttttcttataatgatatattctatgatcgtgatggcaaagaattagaatcttttttacttacaaaacctgtgaattacactagaatttcttctccttttacaacagcaagatatcatcctatattaaaacgctatcgtgcccatcttggtatagactatgctgcacctactggaactcctgtgaaaagtgctggcaaaggagtagtaacctttataggcacaaaaggtggttatggaaatgtaattcaaatcaagcatgactcaggttatatgactttatatgctcatcttagtcgttttgcaaaaattaaaaacggacaaaaggtaaatcaaggacaagtaattgcatatgttggttcaacaggtatgagcacaggtcctcatttgcattttggagtatatttaaataataaagctataaatcctgcatctgttgtaaaaatcgccaaatcagaacttagtggaaaagcgaaagagaattttaaacatatcatagctggatacgagcaggttgttaaagaagccctagcctcgaatcaacctaatcctccaaaagaagaagattttgaaaactatatagaattttaa

SEQ ID NO: 18361 - DNA, 612 bp, Campylobacter jejuni
atgtttaatggactcataagagaaattgctaaagttcaatcttatcaaaacaatactttaagcttaaaagcaaaatattgcccaaatcttggcgatagcatagccgtaaatggagcttgtttaagtgtaacaaaactttatgaagggggttttgaagtggagctttctcgtgaaagtcgcactcatatagttatagagaatttaaaagataaagttcatatagaacctgctttaagatatggcgatagaattgatggacatcttatgcaaggacatattgattttatcggcacacttgaaaagattcaaaaagatgaaaatggagtggatttttatatatctttacccaaagaagctatgaaatttatggcagaaaaaggaagtataggcgttgatggggtaagtcttactatcaatgaaattttaaaaaatggtattaggcttactattattcctattacttttaaagaaacgctttttaaagactatcaagtaggtagaaaaatcaatatagaaagtgatttacttgctcgttatatttatgcacaattacaaggtaaaaacaaaggattatcatgggaagaagtcgaaagaatttcttatctttattag

SEQ ID NO: 18362 - DNA, 1638 bp, Campylobacter jejuni
atggcaaaagaaattattttttcagatgaagcaagaaataaactttatgagggcgttaaaaaacttaatgacgcggtaaaagtaactatggggccaagaggacgcaatgttttaatccaaaaaagctttggtgctccaagcattactaaagatggcgtaagtgttgctaaagaagtagagcttaaagatagtcttgaaaatatgggtgcttcactcgtaagagaagtagcgagtaaaacagctgatcaagcaggcgatggaacaactactgcaacggttttagctcatgcaattttcaaagaaggtttaagaaatatcacagcaggtgcaaatcctatcgaggtaaaacgcggtatggataaagcttgcgaagctatagtagcagaacttaaaaaactttctcgcgaagtaaaagataaaaaagaaattgcacaagttgctacaatctcagccaactctgatgaaaaaatcggaaatttaatcgctgatgctatggaaaaagtgggcaaagatggtgttatcactgttgaagaggcaaaatcaatcaatgatgaattaaatgtagttgaaggtatgcaatttgacagaggttatttaagcccttattttatcactaatgcagaaaaaatgacagtagagctttcaagcccttatatcctgctttttgataaaaaaattacaaatttaaaagatttattaccggttttagaacaaattcaaaaaacaggcaaaccacttttaattatcgctgaagatattgaaggtgaagcgcttgcaactttggttgtaaataaacttcgcggtgttcttaatatttcagcagtgaaagctccaggttttggcgatagaagaaaagctatgcttgaagatatagcgattttaacaggtggagaagtgatttctgaagaacttggaagaactcttgaaagtgcgactatacaagatcttggacaagcttctagtgtaatcatcgataaagacaatacaaccatagtaaatggtgcaggcgaaaaagcaaatattgatgcgagagtcaatcaaatcaaagcacaaattgctgaaacaacttcagattatgacagagaaaaattacaagaaagacttgcaaaattaagtggtggtgttgcagttattaaagtaggtgcagcaactgaaactgaaatgaaagagaaaaaagatcgcgttgacgatgctttaagcgctactaaagcagcagttgaagaaggtatagtaattggtggtggtgcagcgcttatcaaagcaaaagctaaaatcaaacttgatctacagggtgatgaagcaattggcgcagctatcgttgaaagagctttaagagcacctttaagacaaattgctgaaaatgcaggatttgatgcaggtgtggttgtaaatagcgtagaaaatgctaaagatgaaaacacaggatttgatgctgcaaaaggtgaatatgttaatatgcttgaaagtggaattatcgatcctgttaaagtagaaagagtagctttactcaatgcagtttctgtagctagtatgcttttaaccacagaagcaacaattagtgaaattaaagaagataaacctactatgccagatatgagcggtatgggaggaatgggtggcatgggcggaatgatgtaa

SEQ ID NO: 18363 - DNA, 1191 bp, Campylobacter jejuni
atggctaaaaaagtcattaggcaaattttattaatctacctaacaactacaggtatttttttaactattttttttgcattatggtatcaaaaattatatgaagaattagttgttttaaagggtgccactttgagagaaaatcatagaaacattgttataagcatcttaaattctcgttttacccctatagatataagtgcaaaaaatattgctcaaagcacagcactaaaatttgctatatttgatgctaaaaagattgtttttagtaatatagattttgatttaagaaaggcaaagatagagcttaaaggtagaggtatttgtgataataaggtttttttccttgcttctatgagtgcagatcattattttttaagacatgctagcaatgaagaagtaaatactaacgatggtttgcaaattttaatacagggtgaagatgttggcaaagatcttttttggattagaacgaaagtttttagttttgctattatggctttttgcatattgggtttaatatcttatattttagtaaaaattgctctaaagcctttggaggataaaatcagcacactaaatcgttttattaaagattcaactcatgaactcaataccccattaagtgttattttgatgagtatagaacaacttgagcatcaaaatttaggagataatactaaatttacaaggattaagcttgctgcaaaaagtttgtctcaagtgtactctgatcttgttttttataatttccctaataccttagaaacagaaaaacaaaaatttgatttaagaatactacttgaagaaagattggaatattttaaagtattttttgagcaaaaaaaaattacactaaagcttgatttaaatcaagcaaatatttttgctcctaaaagtcaaatttctaaattgattgataatcttataagcaatgctattaaatacaataaaaaaggtggagtaatttctataattttaaaagccaattttttaagtattgcggatacaggttgtggaatttcaaagtcaaatttaaatcatatttttgatagatatacaagatttaataccgatcaaggaggatttggtatagggctttctttggtaaaaaaagtttgtgatgataatgatattaagattatttgcgaatctgtagaaaatcaagggagtgtttttaaattaaattggtaa

SEQ ID NO: 18364 - DNA, 600 bp, Campylobacter jejuni
atgcttccaaaatgggataacagctatagtgtgcacaatgctaaaattgatgagcagcataaaaagctttttaaacttgctgcaaaagttgaagttgtatcagatagatctgtaagtaaaaatgaagtcaaagaacttttggctgaattttttaattatatgaaagatcactttaatgatgaagaaaaatacatgcagctaataggctatccaaatttagaagaacatcgaaaaatacataaagaaatcatccaaaccatgattaatttaatcaaagatatcaaatcaaccaatgatcttaaagaaaaactttatatagtggctaaaaagtggcttttagaacacatactatatgaagacatgaaagttgaaaaatggagaagttcttctttgtctacagatgatggtggcgatgttagctttgaagcagcagaagatgaagataatgagcatccacaattttatctttatacctgtaattgtcctggtaaaattcacgatgttccttatagcattcatcaaaaaatagaattacaaggtcgtaaatttacttgtaaaacttgtaaacaagctataaaattttacaaaaaatattcttaa

SEQ ID NO: 18365 - DNA, 675 bp, Campylobacter jejuni
atgacaaatattcttatgatagaagatgatttagaattagcagaaattacagctgaatatttggaaaaatttgatatgaaagttgatatagctcatgaaccttatataggtctttctaagcttgcattaaaagaatatcagcttatcattttagacctttctttgccagggcttgatgggcttgaagtgtgtgaagagattcgtaaaaagtatgatacgcctattattgtttcaagcgcaagacatgatattacagataaggttaatgctttagagcttggagcagatgattacctaccaaaaccttataatccaaaagaattacaagcacgtattaaaagtcatttaagacgtatttcaaatacaaaaagcgccatagcaaaaagtgtaaaagatcttgtttatgatcaatataagcatattattaccatgaaaggacaagagcttactttaactaatgctgaatttgatattttaagctatttgattaaaaaagagggtggagtggtaagtcgtgaagagcttgtttataattgttcttctattagtgaggattctagtaataaaagtatagatgttattatcagtagaattcgtcaaaagatgggagatgatccaaaaactccaaaatatattcactctatacgtggaataggttataagcttactcaatga

SEQ ID NO: 18366 - DNA, 1419 bp, Campylobacter jejuni
atgaaaaagatttttttatcattaagtttagcaagtgctttatttgctgcaagtattaattttaacgaatcgactgcaacggctaatcgtgtgaatcctgctgctggaaatgcagtgctttcttatcatgattctattaaagatgcaaaaaaatcagtggttaatatttccacctcaaaaactattacaagagcaaatcgtccaagccctttggatgatttttttaatgatccttattttaaacaattttttgattttgatttttctcaaagaaaaggaaaaaatgataaagaagtggtgagttctttgggatcaggggtgattatttcaaaagatggttatatagtaacaaataatcacgttgtagatgatgctgatacgattacagtgaatttaccaggaagcgacatagaatataaagcaaaacttataggtaaagatccaaaaacagatttggctgttataaaaatagaggctaataatctttcagctattacttttacaaattctgatgatttaatggaaggagatgttgtttttgcacttggaaatccttttggagttggttttagtgttacaagtgggataatatctgctttaaataaagacaatataggtttaaatcaatatgaaaattttatacaaacagatgcttctatcaatccaggaaattcaggtggagctttggtggatagtcgcggatatttagtaggtattaattcagctattctttctcgtggtggtggaaataacggcataggttttgccataccttcaaatatggttaaagatatagctaaaaaacttattgaaaaaggcaagattgatagaggatttttaggtgtgactattttagctttgcaaggtgatactaaaaaagcttacaaaaatcaagaaggagctttaatcactgatgttcaaaaaggttcaagtgctgatgaagcagggcttaagcgtggagatttagttactaaagttaatgataaggttataaaaagtcctattgatcttaaaaattatataggaactttagagattggtcaaaaaatttcattaagttacgaaagagatggagaaaataagcaagcaagttttattcttaaaggcgaaaaagaaaatcctaaaggcgtacaaagcgatttgattgatggtttgagtttgagaaatttagatccaagacttaaggatcgtttgcaaattccaaaagatgttaatggtgttttggttgatagtgttaaagaaaagagcaaaggaaaaaattctggtttccaagagggtgatattatcataggtgttggacaaagtgaaattaaaaatttaaaagatttagaacaagctttaaaacaagttaataaaaaagaatttaccaaagtttgggtatatcgcaatggttttgcgactttgcttgtgcttaaataa

SEQ ID NO: 18367 - DNA, 894 bp, Campylobacter jejuni
atgaatagtttatacgaaactcttggagttagcaaaaacgctagtgcagatgaaataaaaaaagcttaccgtcgcctagctagaaaatatcatcctgatatcaacaaagaaaaaggtgctgaagaaaaatttaaagaaattaatgctgcttatgaaattttaagtgacgaaaaaaaacgagctcagtatgaccaatacggcgattctatgtttggtggacaaagttttcatgatttttcaagaaatactggtggggtaaatttggacgatattttaaaagatctctttggaggaggctttggtggacgctcaagagggggttttaacggcttttcttcaaaaggctttagcagtggttttggaggatttggaggttttgaagaagaaattttagacagcaatctagagcttcacattcctttcgaaaaagctgttaaaggcggggaacatagttttaattttcaaggcgaaaccattaaatttaaaattccacatggtataaaagaaggcgagaaactaagaattcgctctaaaggaaaacaaagcagaaatggagctagaggagatttaatcattattgtaaaaatagaagaaagtcctatttacacaagagaagatgatgatttatatcaaaaggttgatatttctttaaaaactgcactttttggtggaaaaataaatataaaaacactcaaagaaggcaaggaagaagcaataattaacataacgcctaattcaaaaaataaccaaaaaattcgtttaaaaggctatggtgtgcaaaatagaaaaagtgatatttatggggatatgtatttgattttaaatgttgttttgccaaatttagatacccttgatgaaaaatttatagaactcttaaaagaaaaattaccttaa

SEQ ID NO: 18368 - DNA, 1995 bp, Campylobacter jejuni
atgagtgaattattaatagaaattggtacagaagaattacctgctattcctttgctaaaagaattagctaatatagaaaaaaaatggaacaatgttttagaagaataccgcttggtaagtgattttaaattttattatactccgcgtcgtttagttttttttcatgaaaattttgcagacaaacaagaagatagctttgctgaatttataggagcacctaaaaatgttgcttataaagatggagttttaactcctgcgggacaaagcttcctgcaaaaagcaaggatcagtgaaaatgaactctcttttaaagaaatcaaaggcaaggaagttttgtaccatcaaaaagctattaaaggtttgcaaagtcaagaaattttaggagaaatggtagaaaaatttctaaaaagtcttagttttggcaaaagtatgcgctggggtgcaaattcttttgaattcatccgtgcgatccgttctatagcttgcattttaaatgatgaacttgttaattttcaaagctatggagtaaaaagtactaaaaaaactttcattcacagaagcgtaagttatgatttgcaagattttaacaatgcaaaagaatattttgaactactagaaaaaaactatatcatccttgatccaatcaaaagaaaggaaaaaatacttgagcaatttaaactcatagaaagtcaaaaaaatatacaaattggagaagatgaagagcttttagctgaagtagttgctatcacagaatatcctaatgcacttttaggaagttttgaagaagaatttttagaaattcctagcgaagtaatcatcacttcaatgagagaaaatcaacgttattttgcagtttttaacgataaaggcttaagtaatcattttatagtagtaagtaatgcagtatgtaaggattattcaaaaatcatacatggaaatgaaagagttttgcgtgcaagacttagcgatgcaatgtttttttatcaaaatgatttacaaaatggcttaaaacctgaaaaacttgccaaaatgacctatcttgaaggtttaggcacaatgcaagataaaagtttaagagagattaaaattgctgaaattttatgtcaaatgctccataatgataaaatcgaaaatatcagcacagcactaaaatacgccaaagcagacttagccacacaaatggtttatgaatttactgatttgcaaggcattatgggaagttattatgcgcaaaaaatgggcttagattatcaaatttgcttagctatcaaagaacaatatcttcctaattccgaacaagctccacttccaagtacagaattttcaagcatagtagcccttgcaaacaagcttgatacccttataggactttttagcataggaaaaattccaagcggaacaaaggatccttatgccttaagaagagctgccaatgggatcattaaaattgctttaaatttaaataaagaatttgatatccaaattttattagaaaaactttcaaatcattataaaagctttgatatgcaaattttaaaagattttatttttgaaagactttatactttttatacagtcaatgcttcttttgtaaaagcggttttaagctcacaaaatacagatcttatccatatcaatcaaagcgtaaatgctcttataaaacttagcaaaaaagataattttaatgaaaattttgcaacctttaaaagactagccaatatcgccactaaaaatcctcataaagttgatgaaagtctttttgttcaagaagcagaaagtaaactttacaaagcttttcaagaaaaaactaaagccaactctttacaagaaaaacttgaaaatctttttgcacttaagccttttattgatgagttttttaatcaagtgatgattaatgctgaagatgaaaaacttaaaaataatcgccaagctttggtttatgaaatttatgcggagtttttaaaaatcgccgatcttaaagagttaagcctatga

SEQ ID NO: 18369 - DNA, 1200 bp, Campylobacter jejuni
atgcaaaattacaaaaaagctctttttgcactagctcttagtgctttttgtatgggcgtaactgaatttgttatggcaggagttttggttgatgttgaagcgtattttagcgtagatgcaaaaaccgcgggctatcttacaaccttatatgctataggtgttgttataggtgctcctcttatcaccatacctttaagtcgttttcatagacatacacaacttttaatcaatcttggaatttttgctttagcaaatttcatcatcttttttagccaaaatttctatcttactgcttttgcacgctttatagcaggaacacaacatggggtattttttgtcattgccaccttagctgtaagtgctataactccagatgataaaaaatcaagtgctctagctataatggtcacagggcttactgtagccttagttactggagtgccgcttggaacttttatagggcattattttggctttaaatttatctttttactcatttttatcattacaagtctagcattttttggagtatggcatatgatgcccaaaaatttacatcctagcccaaccaatcttaaaaatctaatccctgctttttctcatcaaaatttgttaaaaacttatactataaccatttgtagttgtggggctcaatttgttctttatacttatttgcaaaaaatacttgtagaaataagcggttttaaagtccaagatacagcttatatcttgcttttatatggaatttgtgcaatttgtgggaatttatggggcggaaaaatagtagataaaaaaggtgctattttttctttgcgtcttattttaagcatacaagttctagtatttttaagtgtatttctcaccatgcattctaaaattttaatcatttttagcgtagctttgataggattttttgccttttcaaccatacctgcactaaaaatgcttagcattactaaagctaaacgccatacttataaagtcatagacagtacagtaagtgtgaatgaagcagcttttaatgtaggcatagctttagcaagttttttaggtgggattgttttagcaagattgggtatagaatttaatgctttattttcagcactttttgtaagccctgctttgatttttgccttgctttttgccaaagataaattaaattataaaaaatttcaaagaaaaagttttacaaaggtataa

SEQ ID NO: 18370 - DNA, 1536 bp, Campylobacter jejuni
atgaaaaaagcagatattttagttttagactttggctctcaatacactcagcttatagcaagacgcttaagggaacaaggagtttatgcagaaattttaccttttaatgtaagcttagctgatattaaggcaaaagaaccaaaaggtattattttaagcggaggtccagcaagtgtatatgcaactgatgcgtatttttgcgataaaggtatatttgacttaaatctacctgttcttggaatttgttatggtatgcagcttatggcacatcattacaaagctacagtagcacctgcaggacataaagaatacggcaaagcaaacatagaaattaaaaaagataacgctttgtttaaaaatcttccaaaaaaacaaaccgtttggatgagtcattctgataaagtagaaaatttacctcaaggttttgaagttttagccacaagtgaaaatagccctttttgtgtttttggaaacgaagataagaaattctttgctctacaatttcacccagaagtacaacacagcgaatttggcaaaaatatcttaaaaaattttgctaaatatgcttgcaattgtgaaagtatttggaatatgggttcttttgcaaaaactcaagcagaaaaaatccgtgaagaagtaggcaatgataaagtgctttgtgctgtaagtggcggagtagatagtagcgtagttgctgcacttttagctagtgctataaaagagcaaattatagtagtttttgtagataatggacttttaagaagtggagaaaaagaacaagttgaatttatgtttaaaaacactttaggcatcgatctcatcagcattgatgcaagtgaaattttcttaagtcgcttagttaatgtcacagatcctgaacaaaaaagaaaaatcataggaaatacctttatagaagtttttgaagaagaagcaaaaaaacataaagatgtaaaatatcttgctcaaggcacactttatactgatatcatagaaagttctgttgtaggtgcaagcaaaaccattaaaagccatcataatgtagggggcttacctgaaaaaatgaatcttaaactcatagagcctttaaaagaaatttttaaagatgaagtgcgtgccttaggacttgagcttggacttagcaaagaagtagtttatcgtcatcctttccctgggccaggtcttgctatacgcattatgggagaagtaaatcgcgctagcttagaactattacgcaaggctgatgtaattttacttgaggaacttaaaagtacaggttggtatgataaaacttggcaagcattttgcgtacttttaaatgttaaaagcgttggagttatgggggataaccgcacttatgataatgcagtttgtatacgcgttgtagatgcaagtgatggtatgacagctaccttctcgcatttaccttacgaaattttagaaaacataagtcgccgtatcatcaatgaagtagaaggtataaatcgcgttgtttatgatatctcaagcaaaccacctgcaactatagaatgggaataa

SEQ ID NO: 18371 - DNA, 1461 bp, Campylobacter jejuni
atgcatggaaaaatagctatttatatggattctacaggacgtggaaccgttacaaactcagcaaataccttttttgactttaatcgccaaatttggaatgataaaaaaagtatgccaagtgttggtatgcttgtggaatttagaactctttctagcgaaaaaaaagcagaagacggcaaactcgttcaaacaagcaaaaccataacaggtataaaaccttcaaaatttcaagaattcaaagaaggggattttatcactgagcatgatttttggaaaactgataatgatgatgaattagaagacttgcaaaactcaagaagaagtgcttatataacagaactctatagaacaacagactttgacactatagaaaaaattcctctttcttttactatacctcaagctatacaaaaatattttgcccatgaaattttatccgtagaaacgcttcaagccaatctacaagatgaaaaggaaattccttgtatacttgattatcttatacttaaaagatttttatttaaagcttatgatactttaatttttatggataatagcatagaccaaacccaatttagcgcattaaaaagcatcatgatgcatttagagaattcgtataagcaaatgatggctgatcaaaaaccaaatatcactaaaatttttaacgaaacttttttatctttgcagtgtcattaccaagctttagtagccaccatagatacaagaaaaaatcgtctagcctcacttgaagcacaaatgaaaactttacaatctgaaataaatcttaaaagcaatgcgaccgatgcagaccctgaaaaacttaaagcacgacaagaaagattggctaaactacaaaaagaagcagaatactacagaacaacactaaaaagacttgatgctataagggaagatttttataagaaaaattacaatattttcgaaaatgcttttaaactttcacgagaaaaactctttaaaaaaattgtcacaggtttaaacctatgtgcaaccataatggatgtcaaaatttggcacttatctttaaaatcatcaggggttaaaaattcttattttactatgagtaatatagaaaattctttctgttctctttcttttgcagaacattacttaagtcgcttaaataaatccgctctaaatccttttgatcaaaaacttttagtgtatattcaaaaaatcacaaaagaacaaagaaaaaaatttttagttgtcacatcggatttagatttattatgcaaattaaaaattgaaaacttttcacaaaatccgtattatttagtaaaatacgcacctaaaaaagtaaattatcaatctttaatgcgtgataacacctttgatatagtctatattgatgaaaaacatgtttgggaaaatgttgccgatattattttacaaggaaagcattttgacaaatcaggaaaaaccaaatttaaactgatttaa

SEQ ID NO: 18372 - DNA, 2160 bp, Campylobacter jejuni
atgcaatacagcatagaaattaacaaaaatacagaaatatttgatatagacaaagtcgccaaacaagctgccggtgctgttttaatgagacaaggcaaaagcgttgttctagctacagttgcaagagaagaaaaacaagttgaagaagattttttacctctaaccgtccaatacatcgaaaaagcttatgccgcaggaaaaatccctggtggttatgtcaaaagagaaaccaagccaagcgatgcagaaaccttaacagcacgcattattgatagaagcttacgccctctttttccaaaaggctatgcttatccgactcaaatcgttgtgatggttctctcagctgatcctaaagtagatttacaagtaatgagcttaaatgccgcaagcgtggcactttatcttagtgatatacctatgaaagctccagtatgtggcgtgcgtataggaaagatagatggaaatttcatactcaatccaaacaatgaagagcttcaaaatagcaccctagatctctatgtagcaggtgtaaaagatgagcttttgatgatagaaatgagagccttacctgatcaaaaagaaaatgaaatctttatcgaagctccttatgccgatgttttaactcaaaccacttcacaaaatatgaatgaacttagcgaagatgaaattttagaagctctaaatttagctcaaaaagctatattaaatggttcaaatgcttatgaagaagcctttagcaaacacaaaaaaaattctcaaatcgaactaaaaaatgagattgaacatcctgaaattttagcttttatagaaaataatttccaaaaacaaatcaaagaagccatcaatcaaatggcaaaaagcgaaagagcaagcgaactaaataaaatcgctaaagaaattttaaatcttgaaatcactaaagactggagcgaagaaagtgtcttaaataccttagctaaagtcaaacgcaaacttattcgtgagcaaattttaaatgaaggcaaaagagctgatggtagaagtttaaacgaggttcgtcctattagtatagaaaccaacatcttaccaaacgctcatggttcttgtcttttcactcgtggacaaactcaagccctagtggttgcaaccttaggcggagaaaacgattctcaaatgatagacttgcttacagaaaaaaatcctataagcgaacgctttatggtaaattataattttccaggtttttcagtaggcgaagcaagtcctatcaaagctccaggaagaagagaactaggacatggaaatttagccaaaagagcactttatccaagtgtggatgaaaactatccttatgtaatccgcttagtcagtgaaattttagaaagcaatggctcaagttccatggcaacggtttgtggcggatctttagccttaaaagcagcaggagtgccaagcttaaaacttgttgcaggagtagccatggggcttatctttgaagataacaagtatgctgttttaacagatatcatgggacttgaagatcatgatggggatatggactttaaagtagcaggaagcaaagacggcgttactgctcttcaaatggatataaaactaggtggaatcgatcaagaaatactaaaacaagctttataccaagccaaagaaggaagaattcacattctaaatatcatggaagaagccgccaaagaaatcatagtcaatgaagaagttttacctaaacttgagctttttagcgttgatccttcaaaaatcgttgatatcataggacaagccggaaaaaccatcaaagaaatcgtagaaaaatttggcgtttctatagacttagatcgcgaaaaaggtgaagtaaaaatagcaggtagtcaaaacgagcaaatcaaagccgcaaaagactacatcataaacatcacaagctctcaaaaaggaactaaaaaaggccctaaagacaaagatatatcaggctttgaacttgggcaagaatttcaaggtattgttaaaaaaatcgctccttttggagcctttgtggaacttaaaaatggtgttgatggtttattgcatagttcaaaaatcaagcatcttaatttaagcgaaaaccaaagtttaaaggtgaaaatcagcgaaattaaaaacggaaaaatttctgtggatttgtgcgagtga

SEQ ID NO: 18373 - DNA, 1185 bp, Campylobacter jejuni
atggaaaatttcaatagaactttgcttgtgtgttggtttggtgtttttaccacaagtatggggcttagtcaaatcgctccgattttgcctttttatatcaaagaactaggacatgttgatacgagcgagatagcgttttattcaggacttgcttttgggatcactccgctttttatggctgttttttcacctttgtgggcttttttgggtgcaaagtatggttataaaaatatgcttcttcgtgcaagttttggaatgtccgttttaaccttatggcttagctttgctcatagtgctttagaagtggtttttgtacggggtttaacagggataatttcaggttttacttctgctgctgttgtgtttatcgccgtgatagcgcctaaagaaaaagtggcttatgctttaggaactctttctacggcttctataagtggaagtttacttgggcctttgtttggtggctttgtggctgaattttttagcattagtgcggtttttgatgtggtggcttttttgatcgcttgttcttttgtgacgatttattttttcatccatgggagaaaaattcaaaaagaggcgaagaaaaatactcaaaaagtgaaagaaaacaaaacccttatcatcgttctttttatcactacttttgtgatacaatttggtacttttggagtgatgccgattttaagtatctatgttgagcaaattcatcaaggtggaaatttggctctttgggcgggtatagtggtggctgcaagtgggattagcaatctttttttcgcaccaaaacttggaaaaatcgccgataagatagggcctagtaagattatttttggagctttgatattttgtggaatttgcttttacttgcaggctgtagcaagtaatgtttatacgcttattttcgtgcgtttacttataggtgtaggacttggagggcttttgccttgtgtgaatgccttgcttaaaaaaagtgtgagtgctaaaaatttaagtgtgatttttggttttaatcaaacttgtcaatttttgggaaatttttgcggtgcttttggcggagggcttatggcttctcattttagcgtggaatttgtttttacttttgtgtgtttgatttttatcattaatgcttttattttcttggcgtttgagaaaaaatatatcttttcaaatcaaggtttataa

SEQ ID NO: 18374 - DNA, 672 bp, Campylobacter jejuni
atgattaatgtgttgatgatagaagatgatcctgactttgcacaattattatctgaatatttagcgcaatttaatattaaaatcacaaattttgaaaatcctaaaagtgctttaaatgtgggtattcaaggctatgattgtctgattttagatttaactttacctggaattgatggtcttgaagtttgtagagaaatccgacaaaaaagcaatattcctattatcatctcatcggctagaggtgacttaagcgataaagttgtggggcttcaaatcggtgctgatgattatctaccaaagccttacgatccaaaagaaatgtatgcaaggattatgagtcttattcgtcgcacaaaaagagttgaacacactaataatgaaaatattaactctgctttcaaaattgatgaaagaagacatgagatcacctatgaagataaggttttaacacttactcctgctgaatttgaaattttagaataccttatccaacaacacggatatagtgtttcaagagaacagcttgtaagtcgctgtaaaaatctaaaagataaagattctaaaagccttgatgttatcatcggtcgcttaagggtaaaaataggagatagttcaaaatctccaaaacatattttttctgttagaggtataggatataaactgataggatga

SEQ ID NO: 18375 - DNA, 573 bp, Campylobacter jejuni
atggtaaaaggcctggaaaaattcaatgaacttgttgaaagttttgcaaatttacctaccataggaaaaaaaaccgccataaggcttgcttatcacctttgcataaataatcaaatcgatggtatgaaactcgcacacaatatagaaaatgctatccgctttataaaaccttgtgagcaatgcggtgctttaagcgaaaatgagctttgcgaaatttgtagcgataaagaaagaaataaaaacattttatgtatagttgaaagcccaaaagatatactaacactcgaagagagtcaaagttacaatgggctatattttgttttagatgagttaaatgaagaaaaacttgaaaaactaaagcaaatcatacttaagctaaatatctctgagctcatttttgcattgacacatagcattaattctgatgcaaccatcttttttatagaggataaatttaaaggcttaaacctaacttttagtaaaatcgctcaaggaattccaagtggtgtaaatttagaaaatgtggatttaatctctttaaataaagctatgaattttagaacaaaaatttag

SEQ ID NO: 18376 - DNA, 1980 bp, Campylobacter jejuni
atggctaaaatttttgtatttttagtatttgttttcacaactctttttggagtttatgaaaatgaacttgcaaattttgataaaaattttatcggttctaaaagtgaagtgcaagtaaaatttcaccatcagctcaaaagcctttatatacaaagtgttattaatgaagatgaaaaaactaaaattgaaattttaaaaagattgattatcagttcaaatactttaaatttagatgacaagtcatatgctaatgagttaaaagaaagtggtataagtgaaacaagtattaatgctttaagaaaggctgttattaaagatattaaggttcaaaatatttctcaagacactgaaaaatcaacttttgaacctataaaaacagttcaaaaaaatgaaaaaaaatcatctaacgaacaaataaaaaatacagaaaaaacaaattctaaaacttcgcaagcaccaaagagcagtatcgtttctaaagcaaaaagcgatgataaaatttatgttttaaagtcaagtaaaacaaaccaaggtgtagagtttgaactaaatgcagatttggataaggatcaattaaaaagttttgctttagacgaaaaaggaaactatcgttttattagtgattttgatggggttttagaagggggtaaaaaagagtttaaatttgatgactatcgtttagtgatttcacaatttaatcccaaaaccatacgcatagtggtttatgctaaagaaaaaattcctattgatatatcttttaaagaagaaaaaataattttttcaaaagaaactactagccaaaaaaagactgagcaagttagtaaaatttcagagaaaaagcaagatcaaaaaacagaaattaaaaccaaagttttagaaacaaaaaaacaagataaaaaaaccaataatgaaaaagaaaatcaagaacctttatatgttttagatgtggataaaatttctaatgctgtggtgttaaatttaagcgatgatttagatgaaaaagaaatagcagtatttgataccaaagatcaaaaattccgatatgttgtaagttttaagggtgtgttagaaggtaatagaaaaagctttacttttggacaaaatgtgattacagttactcaatacaatccaaaaaccgttcgtgtggttttgagtgctcctaaagaatttaaacttttaaaggagttggataataataatctcactttaggtttttatatacaaactacaaatcaaaatgcaaacaaaaaagcaactcaaagttctagtaaaactttaaatacaaattacaaatcaggaaagcttgtggttatcgatgcggggcatggtggaaaagatagcggtgctttaagtgataaaaaaggaagtttaaaagaaaaagatatagttttaagtacggctttaaaacttggaaatgaacttaaaaaacgcggttataaagtgctttatactagaagttcggataaatttatcaatcttcgtgatagaaccaaatatgccaatgataaaagagcggatttgtttatttctatacatgctaacgcagcaccaaatgccacaaaagccaaaagtagcgaaggcgtggaaactttctttttaagtcctgcaagaagtgaaagaagtaaaaaggcagcagaaaaagaaaatcaaggggattttgaagagattaattatttctcaaaacaaagtattttaaatttcttaaatcgtgaaaaaatcgttgcttcaaataaactagccattgatgtacaaaaaaatatactcactcaaacacgcaaaaagtataaaattgtagatggcggtgtaagagaagcacctttttgggttttagtaggtgcgcaaatgcctgcaattttgattgaaattggctatattacacatccaaatgaaggcaaaagaatcgccaataaagcttttcaagatttattggttaagggtattgctgatggagttgagagttatttttataacaaccgatga

SEQ ID NO: 18377 - DNA, 1092 bp, Campylobacter jejuni
atgaatttacaacccttacaaataggaaaacatactataaaatatcccatttttcaaggaggaatgggactaggcataagctgggatagattagcttctgcagtttctttaaatggtggacttgggattatttcttctgtgggaacaggatattatgaagaaagaaagtatgcaagtaaagaattaaacgctaagccttatggaagtgaaaatttttactcacgcaagggtttgcaagctttgattaataatgcaagaaaagtttgtggcgatgcacctttggggtgtaatatcttatgtgcaagtaatgattatgcaagaatagcacgcgatgcttgtgaggttggttttaatgtgattgtttcaggcgctggacttcctacaaatttacctgaatttactgcagattttcctgatgtggctttagtgcctatcatttcatctgcaaaggctttaaaaattatttgcaaaagatggcaaagccgttacaatcgcttacctgatgcagtggttttagaagggccaaaaagtggaggtcatcaaggttttacttatgagcagtgcttagatccgaattatcagctagaaaaattaattgctcctgtggtagaagaggctaaaaattgggggtcttttcccgtgattgctgcaggtggaatttgggataaaaaagatatagaaaatgctatttctttaggggctagtggtgttcaaatgggaacgcgtttcataggaacttttgaatgtgatgcgagtgaagagtttaaaagcgttttgctagcttctaaagaagaagatatagagcttattaaatctcctgtgggctatcctgctcgtggagttagaaccaatcttttaaatttggtagataaaagaatgggtccaaagattaattgtataagcaattgtgtagcgccttgtggacgtggaaaagaggcgactaaagtagggtattgtatagcagataggctttttgatgcgtggtcaggcaaaaaagaaacaggacttttctttacaggtgcaaatggatatcgtttagataagcttatcagtgttaaagaacttatggaaaaattggttaatggtgaataa

SEQ ID NO: 18378 - DNA, 1206 bp, Campylobacter jejuni
atggatataaaaaaaatattagcagaagttaagcgtggttgtgcagagcttattgatgaagaaagaatagaaaatttaattaaaaattattatgaaaagggtgaaaatttctttataaaggcagggtttgatcctacagcgcctgatttacatttaggccatagcgtggttttaacaaaaatggcttttttgcaaaaacatggagctattgtgcagtttttgattggagattttacaggacaaattggcgatccaagtggaaaaagtgcaacgcgtaaaaagctggataaagagcaagttttaatcaatgctaaaacttataaaacgcaggtttttaaggttttggataaagaaaaaacacagattaagtttaattctacttggcttaatgaacttggagccgcgggtatagtagagcttacttcaacttttagtgtagctagaatgcttgagcgtgacgattttaccaagagatttaaagagcaaagtcctatttcgatttgcgagtttttgtatcctttacttcaaggatatgatagtgtggctttaaaaagcgatattgaaatgggtggaacggatcaaaaatttaatcttttgatgggaagacagcttcaaagagtttataacataggaaaagaacaagctgtgattatgatgcctttactcgaaggtttagacggtgtaaacaaaatgagtaagagtttaaataattacattggtgttacagaaaaagctaatgatatgtatgctaaaattttaagtattagtgatgaattgatgtttagatattatgaacttttaagtcaaaaaagtctagaagaaattgcgcaaataaaaaaagatatagaacaaggcaatttacatcctaaaaaagctaaagaaaatttagctttagagattacagagcgttttcactccaaagaagaggctaataatgctaagtctgaatttgatagaattcattctcaaaatgctttgccaagtgatatggctgagtttgaaatacaaggaaaaatttggcttgctaaggctttggttgaatgtggtttggaaagttctacttctgcggcaagaagaagcatcagtgctaatgcagtaagtgtaaattctcaaaaagttagcgacgagcaaatgtatttagaacaaggagaatacatcttacaaataggtaaaagaaaatttgcaaaattaaaggtaaaagaatga

SEQ ID NO: 18379 - DNA, 2196 bp, Campylobacter jejuni
ttgaaaccaatcgatgaagaattattgcttgaacaattaatcgataatgtaaaaaattgtaaagatttagaagctgctaaggctttgcttttcgaaatttgtggccatgatgccattcttgaaaaagcggtagattactgtatattttgccatgaagggcagtttagaaaaagtggagagccttatgcggtacatcctattttagtagcaacactggttggatttttaagtgaaaataaaagcaatattttagctgctttattgcatgatgtgattgaagatacaaactgcactgaagaagaacttagagagcagtttggttctgaggttttaaaacttgttttaggacttactaaaattatagaaattagagaagataatctcatttcatcaaaatctaaaaaaagtttaactaaatcagccttgactttcagaaatatgcttttagcaagtattgaagatgttggggttttgattgtgaagttatgcgataggctgcataatatgcttactcttgatattctaagagaagataagcaaaaaagaatcagcgaagaaactttagttgtatatgccccaatagcccatagacttggtatttcaagcataaaaaattatttggaagatcttagttttaaatatcttatgccagatgagtataagcttattgacaattatatcaattccaataatcaagaaatgcaattaggtttaaatgaatttatttccaaaatcgaacttttatttttgagtaatggctttagacaaggtagttttgaaattcaaaaacgcattaaacatagctattctatttatcttaaaatgcaaagaaaaggcattggtattgaagaagttcttgatttgcttggggtaagaattttggttgaaaaagtaagtgattgttacttagctttgggaattttacatacacattttaatcccttggtttcgcgttttaaggattatatagccttgcctaaacaaaatggttatcaaactatacataccacactttttgatgctaaaagtattatagaggcacaaattcgaacttttgatatgcataaaattgcggaatttggtatagcagcgcattggaaatataaagaagatggcagcgtggttgcgcctcgtcttgattggcttacagatatttcaatgcaaagtataaacaatcttgaaaatgcagaagattataatgctattgagctttatgaatatgctaaagatagtctttatgttgaagatgtcgcagtttattctcctaagggagaaattttcactttgcctcgtggtgcaacggttcttgattttgcttatgaagtgcataccaaagtagggcttcatgcaaaaagtgcttatgtaaatcgtattaaagtacctttgttaaccgagcttaaaaatggcgatattgtgcgagtggttactagcaatgataaattttatcgctgttcttggatagatagtgttaaaacaggaaaagcaaaagcaagtataagggaattttgcaagcaaaaaatcagagagattaatctagcaagttctattaatatgttaagttttatttttggagttgataaaaacagaattgaaacttggatagaaaaagaaaatttagtcagacgtattagacaagtagcaacagatagtgcttatttgaaagatatagttaatggtcttaaaaaatacgccaagaagtcatattggtttgataaatatgagattaaagagcaaaaaataggaaattttactctatattgtaaccataaaatcgctaatgtggattttgatttttgctgccatccaaaaagaggtgatgctgttttagcttttgttaaaggtggtaacgctattgtccatcataagctttgcgatagagctgataaaatgatagataataatcaagatatggtatttataaaatgggattctaacatccctaaatcttataaattgattttttctttggaaaataaaaaaggtgttttagcggaatttttggcatttttagctaaaatgcagataaatttattaacaattaatttatcaagtgatttaaattcggcggtagattattttgagattacaatggaaattcctgataatatcaatccagatagtgtcaaggataggttaaaatctcgttgtaaaattttagattttacatctttaaatgatgcttataaagaaagttaa

SEQ ID NO: 18380 - DNA, 720 bp, Campylobacter jejuni
atgcaagagagaaaaagagttttagtaaaattttcaggagaggctttagcaggtgaaaatggctttggtatagaaaattctattttaaaattcatagcttcagagattaaagaacttataaaaaatcaaatagaagtaggcatagttataggcggtggtaatattattcgcggagtaagtgctgctaagggcggattgattaaaaggacaagtggagatcatatggggatgcttgctacggttatcaatgctattgctatacaagaagctttggaaagctctggacttgaagttagggttcaaagcgccattcagatggaagcattttgtgaaacttatattatgagaagagcgcaaagacacttagaaaagggtcgtgttgtggtttttgctgcaggtactggaaacccttattttactacggatacaacagctattttaagagctgtggaaattgatgcagatatggtaataaaagctacaaaagttaatggagtttatgataaagatccaaaacaatttgatgatgcagtatttttaaatactttgagttatgatgaggctatgcaagataatattaaagtgatggatgatacagctatagctttagctaaagataacaaacttcctattgtggtttgtaatatgtttgaagagggtaatttacttaaaatcatacaaggtgatactagcctttgttcaaccgttaaaaataattaa

SEQ ID NO: 18381 - DNA, 1344 bp, Campylobacter jejuni
ttgaaacaatttggactagatagacgaacttttaaaattttactagctggttatattattattgcattgtttggggctttattgctacattcaagctgggcacatacaactcctattgattttttagatgccttttttacaagcacatctgctgttagtatgacaggattagtagttaagaacactgcggttgattttaccttagcaggacaaattattatcttagctttggtgcaaattggaggcttgggatatatgggtataggtttatttgtttatatactcatacgcaaaaaagttggttttagtgcaagaaatttactaaaagagtctttattttatccatcaatggatggtttatttaaattttttaaaaaggttttgctgttcatttttactatagaattgataggtgctatacttctcaccatgcgttttgcccttgaaatgaattttaagaaagctttatggtttggaatttttcattctattagcgcttttaataattctggatttactatatttgaacatggatttatagcttataaacatgatatagcaattaatcttattatcacttctttgattattattggagggcttggatattttgttttggttgaattatacttttttcaaagaaaaaaattgcaaaatttaagcctacatacaaaaatggttgttgttgcaagtatttttcttattttctcttcaacgcttattatttttgcttttgaatactcaaatcctcaaactataggacatttttcattttttgataaaattttaagctcatattttatcgctattaattaccgcacagcaggatttaataccttagatatgggacatttgcatgatgcaagcttattttttggatcattgtttatggttattggtggtgcaccaggtggaacagctgggggtatgaaagtaacaactgtaatggttttattgctctatgcttattggagtatccgcgatggaagagttagaatttttggacatgaaattccaagagaaactatatctaaagcttttattatagctgtaggttcagctgtttatatagtaatagctgttattttgctttccttgctagagtcaaaatttgattttatagccttgctttttgaaacttcttcggcttttgcaaccgtaggaatttcagtaggaaatggtggaactttatctttatgcgctttgtttagtgatcctagcaaggtgattatcatcattatgatgctaagtggtaggataggtgtttttgcttttttactctcggtattcaaacaagacaaagctattcatttaaaattccctgaaggaaaggttaatttataa

SEQ ID NO: 18382 - DNA, 627 bp, Campylobacter jejuni
atgaaaaatattcattgtatcaatcatccattgatcgaacataaattaggaattttaagggctaaagagacaaagccctttcaatttcgtatgttaatcgatgaaatttcatcttttttgctttttgaagcgagtaaagatttttctttaaaagaaattgaaatttcaacacctatacaaaaaactacagtaaaaaaacttgatgaaaaaattatgatttgtcctattttaagagctgcattaggaatgcttgaaagtgtttttaagatgattcctgatgcaagtgttgggtttttggggtttgtgagaaatgaagaaactttaaaggcggatttttattttcaaaaacttcccaaagatgcaaaaaaacgcactgctattgttatagatcctatgtttgctacaggtgggactgctatagatgcttgtaattttttaaaaagccaaggagttaaaaaaataaaatttatatccatacttgctgctccacaaggtttgaaaaaatttagccaaatgcatgatgatgtagaagtttttgtggcttgtattgatgaaggtttaaatgaaaaaggttatattatcccagggcttggagatgcaggagatagagtgtttaacactctataa

SEQ ID NO: 18383 - DNA, 1392 bp, Campylobacter jejuni
atgcacgaaaaacttacaacgcgttttgctccaagcccaacagggtatttgcacataggtggacttagaacagctctttataattatttatacgctagaaaaaatggtggaaattttttacttcgcattgaagatacggatttaaaaagaaattccaaagaagctactaaagcaattatcgaagcttttaaatggtgtggtttagaacatgatggagaagtaacttaccaatcagagcgttttgatctttataaagaatatgttaaaaagcttttagatgaaggtaaagcgtattattgttatatgagtaaagaagaattagaagaattgcgtgccaagcaagaagccgccaaagagcgcccaagatatgatggaagatatagagaatttacaggcacgccacctcagggtatagaacctgttgtgcgtattaaagcgcctcaaagtggcgagattgtttttgaagatggggttaaaggcgaggtgagatttaaagcagaagatataatggatgattttatcattgcaagaagtgatggaaccccaacttataattttactgttgttattgacgatgctttaatgggggtaagcgatgtgattcgtggggatgatcatctttcaaatactcctaaacaaattgtgctttatgaagcattgggttttaaaattcctaaattttttcatgtggctatgatacatggagaagatggtaaaaagctttcaaaaagacatggggcaactgatgttatggaatacaaagaaatgggaattttacctcaagctttgcttaattttcttgtgcgtttaggttggagtcatggcgatgacgaggttttttcactagaagatttgaaaaaactttttgatccttatcatatcaataaaagcgcatcttgttataatgctaaaaagcttgaatggttgaatgctcattatattaaaactttgccttttgaagagattaaccgtcagcttaaagatcttggctttgatttatctgtttatgaaaaggcaggatttttacttgatttattaagagagcgtgcaaaaaccttgcatgatattatcaatggtgcaaaaagcatagttaatgcaccgcaaaattatgatgaaaatgcagtgcaaaaatttgttaacaaaaataatttagaattgctccaagcatttgccaatacacttaaagatcaaaaaacaggtaaagattttgaagattttacaaatgattttttagaaaaaaaagaagcaaagttaaaagatttggctcagcctatacgcatagctttaacagggagtgcggtaagtcctagtatttttgaagtattagaatttttaggggttgatgagtgtaaaaaaagaatagacaattttttaaaagttagaggaaaataa

SEQ ID NO: 18384 - DNA, 1332 bp, Campylobacter jejuni
atggaaattaaaagcatattaattgctaatcgtggagaaatagcactgcgtgctttaagaacgattaaagaaatgggtaaaaaagcaatttgtgtgtattctgaagcagataaagatgctttgtatttaaaatacgctgatgcaagcatttgtataggtaaggcaagaagttctgaaagttatttaaatatcccagctatcatcgcagcggctgaaatagcagaagctgatgcgatttttccaggatacggatttttaagtgaaaatcaaaattttgttgaaatttgtgctaaacataacatcaaatttataggtccttctgtggaagctatgaatttaatgagtgataaatcaaaagcaaaacaagtcatgcaaagagcaggcgtacctgtgatcccaggaagcgatggggctttggcaggagctgaagcagctaaaaaacttgccaaagaaataggttatcctgtgattttaaaagcagctgcaggtggtggtggtcgtggtatgcgtgtggttgaaaatgaaaaagatcttgaaaaagcgtattggtcggctgaaagcgaggctatgacagcatttggcgatggaactatgtatatggaaaaatacatacaaaatccacgccatatagaagtgcaggttataggagatagttttggcaatgtgattcatgtgggcgaaagagattgttctatgcaaagacgccatcaaaaacttatagaagaatcccctgcgattttgcttgatgaaaaaacacgcactaggcttcatgaaactgctattaaggcagctaaagctataggatatgaaggtgcgggaacttttgagtttttagtagataaaaatttagacttttattttatagaaatgaatacgcgtttgcaagttgaacactgtgtaagtgaaatggtaagtgggattgatatcatagaacaaatgattaaagtagcagaaggttatgccttaccatctcaagaaagtattaagcttaatgggcattctatagaatgtagaatcacagctgaagattctaaaaccttcttgccaagtccaggtaagattactaaatacattccacccgcaggacgcaatgtaagaatggaaagtcattgttatcaagactatagcgtgcctgcttattatgattctatgataggcaaacttgtagtttgggcagaagatcgtaataaagctattgcaaagatgaaagtagctttagatgagttgcttataagtgggataaaaacgactaaagattttcatctttccatgatggaaaatcctgattttattaataataattacgatacaaattatcttgcaagacattaa

SEQ ID NO: 18385 - DNA, 456 bp, Campylobacter jejuni
atgacaaaagaagaaattaaagagttagtcaacctttttgctgaagcaaatattagtaaaattaagatcaaagaacaagatggttttgaaatagaacttgaaagagatatgtgctgcgatgttccagctcctgtttgtcctccagttccagctccacaacctatcaatgtaagcgttgtaaacgaagctcaacctagtcaaagtgtaaaatcaaacaaaccaagtataaacagccctatggtaggaactttctatcaagctccaagtccaggtgcagcaccttttgtaaaagtaggtagtacggttaaaaaaggcgatactatagctattatcgaagcgatgaaaatcatgaatgaaattgaagcggaatttgattgtaggatcgctgaaattttagttgctgatggtcagcctgtagaatttggaatgcctttatttgcggtggagaaattataa

SEQ ID NO: 18386 - DNA, 1005 bp, Campylobacter jejuni
atgtttaacaaaaaaaatatcttaatcacgggcggaacaggctcgtttggaaaaacttatactaaggttttgctagaaaactataaacctaataagattatcatttattctcgtgatgagctcaaacaatttgaaatggcaagcgtttttaatgctccttgtatgcgttatttcataggagatgtaagagataaagagcgtttaagtgctgctatgcgtgatgtggattttgttatacatgctgctgcaatgaagcatgtgcctattgctgaatataaccctatggaatgtataaaaacaaacatacacggtgcgcaaaatgtcatcgacgcttgttttgaaaatggggttaaaaaatgtatcgctcttagtacggataaggcttgtaatcctgtaaatttatacggtgcaaccaaacttgcaagcgataagctttttgtcgctgcaaacaacatagcaggtaacaagcaaacacgctttggtgttacaagatatggcaatgttgtaggttcaagaggttcagtggtgcctttctttaaaaaactcatcagcgaaggagctaaagaacttcctatcaccgatacgagaatgactcgtttttggatcagccttgaagatggagtaaaatttgtactgagtaattttgaaagaatgcatggaggagaaatctttatccctaaaattccttcgatgaaaatcaccgatctagcccatgctctagctcctaatttaagccataaaatcataggcataagagcaggagaaaaactacatgaaatcatgatttcaagcgatgatagccatttaacctatgaatttgaaaactactatgctataagcccgagtattaaatttgtagataaagataatgactttagtatcaatgccctaggcgaaaaagggcaaaaggtaaaagatggtttttcttatagctcggataataatcctttatgggcaagcgaaaaagaacttttagaaatcatcaatcatactgaaggtttttaa

SEQ ID NO: 18387 - DNA, 1509 bp, Campylobacter jejuni
atgacaactcatatctatgattttttagaaaaaagtttaatcaaatttagcgaaaaaactgcttttgtagaaccctttgtcaaagaaagaaaggaaatcacttacaaagactttgatctcttttctaaaaaactagccagtgaaattttaaaaactttaggaaatgataatcctactcaagctcctgttttaatcatcttgcctaaagggattgattgtttgatttcattttttggagtggcactcagtggaaatttttatacacttttagatgaaaaaagtcctaaagaaagagtagaaaaagtcatagaagttttaaagcctaaactttttatcacttcaaaggacttaaattttaacttagatttacctacgctttatacacaagactttgaaagttttaatatagatgagagtttaataaagcatgccaaagaaaaacatatagatactaatttactctatgttttctttacaagtgggagcacaggcattcctaaaggagtaagcatagctcataagagtgtgattgattatactttttgggtgtgtgagacttttaaatttgatgagaatgaaattttagccaatcaagcgccattttattttgacaatagcattttagatattttttcaagtgtaaaatcaggagcgactttacaccttttacctaatcatctttttgcctttccaaataaaattttagaatgccttgaaaaagaaaaagtaagcactatattttgggtaccttcggtgctgatttattttgcaaatactgaagctttgaataattttagtttaaacgccttaaaaaagatgcttttttgtggtgaaatcatgcccaataaacagctcaatatttggcgtaaacacttacccaatgccttatttgccaacctttatggcccaacagaaatcactgatgtatgttctttttatatcatcaatcgcacttttaaagatgaagaacttttaccgataggaaaagcgtgcaaaaacacagaacttttagtttttgatgaaaatatgaatttcataagtcctaaacaaataggtgttaaaggggagcttttcgtgcgtggaacttctttgtctttagggtattataatgacaaagaaaaaaccaaacaagcttttattcaaaatcctttacatgataattatttagatttactctataaaacaggagatatcgtttcttataatgaatttggagagcttttatgctacggaagagcagataatcagataaaatatatgggacatagaatagaacttggagaaatagaaagcgtgataaattctcatgtgaatattaaaaacagtgcttgtatttttaaagaagatattatttgtttttatgaaagtgaagaagaaattaattttaaagattttttgaaagataaattaccttcttatatgatcccaaaaaattttattaaactcgacaaatttaagcttaatcaaaatggtaaaattgatagaaaggttttaaaagaacttgtttaa

SEQ ID NO: 18388 - DNA, 747 bp, Campylobacter jejuni
atgttaaaaactagaattatcccttgtgtgttattaaaaaattctcaacttgttaaaagtatagaatttaaagattttcgcactatagggcatttaacttcaacaatgagaatttataatgcacgcaatgttgatgagcttattatcttagatatagatgcttcaaaaagtggagaaatagattttgaaagtatagaagatcttgctaaagaatgttttatgcctttaactataggtggcgggataaaaacccttgaagatatacaaaagattttaaatttaggtgcggataaaatttctatcaattctaaggccttagaagatatggattttataagtaaagcgggtaatcgttttggttctcaatgtatagtttgttctatagatgttaaaagaaaaggagatcaattttgtgtttatgataggggaaatttacttgaaaaaagtcctttagaacttgctttagaatatgaaaaaaaaggagctggagagcttcttttaacttctgtggattttgagggaaaagcaaagggttatgatttagaacttttaaagatttttcaaaataaacttaaaattcctcttattatcaatggaggacttagcaagccaagtgatggagttgaggctttaaatttaggcgccgatgctttagcgggtgcttatatttttcatttttctaaatatacccctaaagatgtaaaagaagaattagctaggcaaggctttgcagtgagattgctttaa

SEQ ID NO: 18389 - DNA, 1008 bp, Campylobacter jejuni
atgaaaaatcttatcctagctatagaaagttcttgtgatgatagttctatagctatcattgataaaaacaccttagaatgtaaatttcataaaaaaatttcccaagaattagatcatagtatctatgggggagtggtacctgaacttgctgcaagacttcatagcgaggctttaccaaagatgcttaagcaatgcaaagagcattttaaaaatctttgtgccatagctgtgacaaatgaacctggacttagtgtttctttgctcagtggaatttctatggcaaaaaccttagcaagtgcgctaaatttacccttaatccctataaatcatcttaaaggtcatatttatagtctttttttggaagaaaaaatttctttagatatgggaattttgcttgttagtggtgggcataccatggtgctttatcttaaagatgatgcaagcttagagcttttagcaagtacaaatgatgatagctttggagaaagttttgataaagtggctaaaatgatgaatttaggttaccctggtggggtcatcatagaaaatttagcaaaaaatgccaaacttaaaaatatctcttttaacacacctttaaagcattctaaagaactcgctttcagtttttcagggcttaaaaatgcagtgcgtttggaaattttaaaacatgaaaatttaaatgaagacacaaaagcagaaatagcctatgcctttgaaaatacagcttgtgatcatatcatggataaattagaaaaaatttttaatctttataaatttaaaaattttggcgttgtaggtggagctagtgcaaatcttaacttgcgttcgcgtttgcaaaatttatgtcaaaaatataatgcaaatttaaaactagctcctttaaaattctgctctgataatgctttgatgatagcaagagccgcagttgatgcttatgaaaaaaaggaatttgtaagtgtagaagaagatattttaagccctaaaaataaaaatttttcaaggatatag

SEQ ID NO: 18390 - DNA, 726 bp, Campylobacter jejuni
atgtttaatacaactagaattatttcagctcttgtgatgataggggctattattattatcgcgttgattgatcaattttttatcaattttatcgtttttgcggttttattgtatctatcttttagtgaagcaaaaaaactttttgctttagaaaatatctctattatccctttggctatagcttttattttgggaagtttatcgcataaagctttgctttttgggattttagttttgttattagtcgttggatatttggtttataaaaaggcttccttaaaaccagctcttatttatatttatcctagtttgcctattttagcactttggcaagtgtatttagatcagggtatgtttgcacttttttggcttatcattatcgttgcagcttgtgatagtggggcgtattttatcggaaaacttatgggtaaaactcctttttctccaacaagtccaaacaaaaccttagaaggtgttataggtggcttgatttgtgcgagtgttattggaactattttgggagtttttgtttatagtttttggctttctttgctttgttcgttttttgtagcgatttttgcagtgattggagatttgcttgagagttattttaaaagagaagcaggtgtaaaagatagtggagatcttatccctggtcatgggggcgtgcttgataggatcgatgcggtgatcattgctgcttttgtgatggttgctcttttatga

SEQ ID NO: 18391 - DNA, 1308 bp, Campylobacter jejuni
atgaaatacacagaacttttacaattacaaacttttttttctcggtttaaaaaaattgattttatcaagcgtatcaatgacaatattttggaattaagctttgatagagaaagatttatttttgatcttactcgtgcaatgagtgcgatttatacagctaaatttaatgcaaaaaattataatgcaccttttgattttatgcttaaaaagtattttagcaatgcttttataaaggaagttaaagtccttgaaggcaatcgtattttatgttttagtgtaaaagctaataaggcttataaaagctatgagagcaaaatttattttgaatttacgggtaaaaataccaatgttattcttacagatgaaaaagatttgatcatagaggctttaagacacattgataaaagttatcgtgttgtaaaacctaatgtgattttagagtctttaaagccttataaaatggatgaaaattttgaggaaattaaagactttgcagattatttttctcgcaaatttacaagcatttatgagagtaaaatcaaacaaataaaaaatttaaaacttgcacaagtggataaaaaaatacaaaatttacaagaacttttttctagtttagatgaagaaaattctttactcttaaaagctttagaatacagaaaaagggctgatgtattgtttgcaaatttgagtgttttaaaagattatgaaagggaatttaagcttgatgattttgaaggcaaagagcttgaatttaagcttgaatttaatcctaagcaaagcgctaatttatattataaaaatgctaaaaaattagaacaaaaagctaaaaatttaaacatacaaagacaaaatttaaaagaaaagttagattttaccttgagtttgaaagaattattgcttcaagctaagagtgagatagagcttgaaattttactacctaaaaaaaatagcaaaaaaaatcaagatcataaacaagaagatcttgtcgcaaatttttattttaacgagtttaaaatttgcgtgggtaaaaatgaaaaaggcaatgaatttttacttaaaaatgctaaaaaagatgatttgtggcttcatgtaagggatattcctagcgcacatactttgattgtatcaaacaagcaaaaaatcagcctcgatgtgatagaatttgctgcaaggctttgtgtaagcttttctaagttaaagaaaggttcgtattgggtcgattatactttaaaaaattttgttaaggttcagcaaaaggcgtttgtaaattatacaaattttaaaagtattaatatcacaaaggattaa

SEQ ID NO: 18392 - DNA, 969 bp, Campylobacter jejuni
ttgttttttaagcatatattgagtttaaaagtgcttatagctttacttttattctttggaatgataagtttatttataggagttatcagtatcaatgtaaaagatattcttaatcttaactccactcaactagaaatcataactctcacaagaattcctagacttatagcgattttactcacaggaatgagtcttagtatatgtgggcttatcatgcaacaactcacgcaaaataaattcgtttccccaactacagcagggaccatggattgtgctaaatttggcatacttatttctttaatattttttactggagcgtcttttttcactcaagctatcattgcttctatatttgcacttttgggttcttttatatttatccaaattttaagaaaaatcaaactcaaagatgtgatttttgtacctttgataggcttgatgtttggaggtattattagtgctataaccactttttttgcctatgctttaaattatatacaaaatatccaaggttggctacaaggcagtatggcaaatgttatgcagggaaattatgaattgctctacatttctttaccactttttatacttgcttattttttagctcataaaatcaccatagttggcatgggtgaagatatagctttaaatcttggaatttcttataatggtatattatttttaggcttaatgattgtaagcattatcactagcttagtgattgtaagcgttgggattatcccttttttagggctaattatcccaaatttagtagctctttatctaggtgataatcttagaaaaaatcttatctatatagcactttgtggagctttgtttttacttgtttgcgatatcatttcaagacttgttatctttccttttgaaatgcctttaagtatcactacaggtgttttagggtctttaatctttatctttcttttactaaaaaggaaagtttatgcgtaa

SEQ ID NO: 18393 - DNA, 756 bp, Campylobacter jejuni
atgattaaactaaaaaatatcaccaaattttatgataataaagtcattatttcagatcttagccttgattttcataaaggcaaaatcacttctataataggagccaatggcgctggaaaatccactcttttagctctagcaagtcgtttgataaaacctagtagtggagaaatttatatcgatggaatgaatttaaaaaattataaagagcaaatcttagcacaaaaaatttccattctcaaacaacaaaacaatatcaatttaagattaaaagttgaagaattagtcgcttttgggcgttttccgcattctcaaggaagacttaatacaaacgataaaatcaaaatcaatgaagctttagaatacatggaacttagcaacttaagaaatgaatttttagatacattaagcgggggacaaaagcaaagagcttttatagccatgatcatcgctcaggatactgaatttataatgtttgatgaacctttgaacaatcttgatatgaagcatagcgtacaaatcatgcaactaatgaaaaatttagtcaaagactttaacaaaagtatagctgttgtattacatgatattaattttgcttcgatttattctgatgaaatcatagccttaaaagatggaaagcttttaaaacaaggctcaaaagatgaaatcatcaatcaagaaaatttaaaacaaatttatgatatggatatacccgtaagtcaaattaatggtaagaaaatttgtatttatttttaa

SEQ ID NO: 18394 - DNA, 1797 bp, Campylobacter jejuni
atgtgtggaatcgtaggctatataggaaataatgaaaaaaaacaaattatactaaatggacttaaagaattagaatatcgtggctatgatagtgcgggtatggcagtgatgcaagaaggagagcttagtttttttaaagctgtaggaaaacttgaaaatttggcgaataaatgcacggattttgaaagtcaaggttatggttttgctataggtcatacaagatgggcaactcatggtaagcctactgaaatcaacgcacatcctcatttaggacagtattcttgtgtgattcacaatggtattatagaaaattataaagaaatcaaagataaacttgaaaaagaaggcgtgagttttttaagtcaaaccgatacagaagttattgtccagctttttgaattttatgcaagaaatttgggagtttttgaagcttggcaaaaaaccatcaaagaacttcgcggtgcttttgctactttgttggtaacaaaaaaagatcccaatcatgtgtattttgcaaaaaatgctgctcctttgattataggtaaaaatgcaaataaagaatggtatttttcttcaggtgatgcgcctttgataggaagttgtgatgaggtaatgtatcttgaagatttaagcttgggatacgcgagtaaagatgagcttgtcgtttatgaaaatgatattttaaaatcactttgtttttctaagctttcaggcgataaggcttatgcaaaaaaagacggctttcgtttttttatggaaaaagaaatttatgaacaaagtcgcgtgatgagtgaagttttaatggggcgtattcaaggcgatgaagtcgtttttgatgagctaaacaatgaagatttaagtcaagtagatgaaatcacgctttgtgcttgtggaacaagctatcatgctgcaatggcaagtgcttatttgtttgaaagaattgctaaagttaaagctaaagtagaaattgcaagtgaatttcgataccgtgaagcaattataaaaaaagattctttatttatcgttatttctcaaagtggagaaacagcagacactttagaggctttaaagattgcaaaagagcagggtgctaagacttttgcaatttgcaatgtggataattctaatatagtgcgtttagcacatctaagtcttttaactcgtgcgggcatagaaaaaggagttgcttcaactaaagcttttgctactcaggttttaacactttggatgcttgctatttttatggcacaaaaaagaaatttaaatgtttctgctgaaattaaagcacttttgcatactccaaattgcgtgagtgtaaaacaggctttacatgaaaaaattcatcgtttatccaagcgttatttagatggacatggctttttctttataggcagagatgtgttttatcctttggctttagaaggagctttgaaacttaaagaattatcttatcttcacgctgagggttatcctgcaggagagatgaaacatggccctattgctttggctgattctaagctttatactatagctttaatgccaaagcacatgctttatgaaaaaacaaaatcaaatgttgaagagcttattgctagggattctacagtgcttagcatttcacctttagaatttgatttaagtgatgattttataaaaaccaatgagcaagatcattatatgtgtgaattttttgaaatgatggtcattactcaacttttggcgatggaaatttccataagacttggcaatgatgtggatatgccaagaaatttggctaaaagcgtaacggtagaatag

SEQ ID NO: 18395 - DNA, 699 bp, Campylobacter jejuni
ttgagaataaaatttatatcttttattttaattttttttactatttttgcttttgctaaagaacaaaatttagatgattttgaacaagaataccaaaactatcaagtaaacgatccactttcaggatataacaaagctatgacaagctttaatgtggctttgtatgattatggtttgcgtcccgttcttaagggctataacgctatcactcctgaatttataagattaggggcaagaaatttctttgataatttacttgctcctttgcgttttgtaagcaatgttttgcagtttaaatttgaagaagctggagaagaatttaaaagatttaccgccaataccatcatgggttttggtggacttatggatgtggcatcaaaaatgggtcttaaaaaacatcccgcggacttaggaaccgttttggctcactggggtgtaggaagcggttttcatattgtcttacctatacttggtcctagcaatcttagagacactcttactttacctgcaacttggtatgcaagttttaccgcttacattgatcctacttgggcaagtatagctataagtgcttatggatttggtaatgaacttagttttaggcttgatgaaattgatgaaatttatcacaacacgcctaatttatatccattcttgcgtgatgcttacgagcaaagacgcaatgaacttagcaaataa

SEQ ID NO: 18396 - DNA, 603 bp, Campylobacter jejuni
atgaagattatcctagctacgagcaataaacataaagttttagaacttaaagaaattttaaaagattttgaaatttatgcttttgatgaagttttaatgccttttgagattgaagaaaatggaaaaacttttaaagaaaacgccttgattaaagcaagagcggtttttaatgctttggatgaaaagcaaaaaaaagattttatcgctttaagtgatgatagtggcatttgtgtagatgttttagaaggaaatccaggaatttattctgctcgatttagcggtaagggcgatgataaaagtaaccgtgataaacttgtcaatgaaatgataaaaaaaggttttaaacaaagtaaggcatattatgttgctgctattgctatggtaggtttgatgggggaatttagtacgcatggaaccatgcatggaaaagtaatagatacagaaaaaggtgaaaatggttttggttatgatagcctttttattccaaagggttttgataaaaccttagcccagcttagcgtggatgagaagaataatatctctcatcgttttaaagctttagagcttgcaaaaatcattttaaagattttaaataaaggataa

SEQ ID NO: 18397 - DNA, 1425 bp, Campylobacter jejuni
atgaaaaaattgactaacgattttggaaacattatagctgataaccaaaattcattaagcgcaggcgcaaaaggacctttacttatgcaagattatcttttgcttgaaaaacttgctcatcaaaatagagaaagaattccagaaagaaccgttcatgctaagggaagtggagcttatggcgaaataaaaattacagcagacttaagtgcttataccaaagctaaaatttttcaaaaaggcgaagttactccattatttttacgcttttcaacagtagcaggtgaagcaggtgcagcagatgctgaacgcgatgtgagaggttttgctattaaattttacactaaagaaggaaactgggacttggtaggaaataacactccgacattcttcatccgcgatgcttataaattccctgatttcatccatactcaaaaaagagatccaagaactcatctaagaagtaataatgctgcttgggatttttggagtttatgtcctgaaagtttacatcaagtaaccattcttatgagcgatagaggaattcctgcaagttatcgtcatatgcatggatttggaagccatacttatagttttattaatgataaaaatgaaagattttgggtgaaattccattttaaaacccaacaagggattaaaaatcttaccaaccaagaagctgccgagcttatagcaaaagatagagaaagtcatcaaagagatctctataatgctatagaaaataaagattttccaaaatggaaagttcaagttcaaattcttgctgaaaaagatatagaaaaacttggatttaatccttttgatttaacaaaaatttggcctcatagttttgtacctttgatggatataggcgaaatgattctaaacaaaaatcctcaaaattattttaatgaagttgaacaagctgcctttagtccaagcaatatcgttcctggaattggctttagccctgataaaatgttgcaagctagaattttttcatatcctgatgcacaaagatatagaataggaactaattatcatcttttaccagtaaatcgtgcaaaaagcgaagtgaatacttacaatgtcgctggtgctatgaattttgatagttataaaaatgatgctgcttattatgaaccaaacagctatgataatagcccaaaagaagacaaaagctatcttgaacctgatttagtcttagaaggcgtagcacaaagatatgctccactagataatgacttttatactcaaccaagagctttatttaatcttatgaatgatgatcaaaaaactcaactttttcataatatcgccgcttctatggaaggagttgatgaaaaaattatcactagagctttaaaacattttgaaaaaatttcacctgattatgcaaaaggaattaaaaaagctttagaaaaataa

SEQ ID NO: 18398 - DNA, 825 bp, Campylobacter jejuni
atgattatgaagggtaaaaaaggccttattgtaggggttgcaaataataaatctattgcttatggcatagcaaaagcatgttttgatcaaggagccgagcttgcttttacttttttaaatgatgctttaaaaaaacgcgtagaacctatagcacaagagtttaattctaattttgtttatgagcttgatgtaaataataacgagcatttagattctatcgctgaaaaaatcaaaaaagatttaggcgagattgattttgtagtgcatgcggttgcttttgctccaaaagaagctttagaaaattcttttttagaaacttcaaaagaagcttttgatatagctatgcaaacttctgtgtattctttactttctttaacacgtgcggttttacctattttaaaagataagggttcgattttgactttaagttatcttggtggggttaaatatgtacctcattataatgttatgggtgtagcaaaagccgcacttgaaagttctgtgcgttatttagcaagagatctaggagtaaaaggaattcgtgttaatgctatttcagcaggtcctattaaaactttggcagcaagtggaataggggattttagaatgattttaaaatacaatgaaatcaattctcctttaaaacgcaatgttagtatagaagatgtaggtaattcggctatgtatttacttagcgatttagcaaatggtgttacaggtgaaatacattatgttgatgcaggatataacatcatgggtatgggcgatgttgaaaaaaatgaagaagggcaaactgttctttgttgggataatcaaaaaggataa

SEQ ID NO: 18399 - DNA, 1203 bp, Campylobacter jejuni
atgagtgatattatttctataaaagacattgatttagctaagaaaaaagtttttataagatgtgattttaatgttcctcaagatgattttttaaatatcactgatgatagacgcataagatcagctattcctacgataagatattgtttggataatggttgtagtgtgattttagcctctcatttagggcgtccaaaagaaattagctctaaatattctttagaacctgtggctaagcgtcttgctagacttttagataaagaaattgttatggcaaaagatgttatcggcgaagatgcaaaaaccaaagctatgaatttaaaagcgggtgaaattttacttcttgaaaatttgcgttttgaaaaaggcgaaactaaaaatgatgaaaatttagccaaagaacttgcttctatggttcaagtttatatcaatgatgcttttggagtatgccatagagcacattctagtgtagaggcgattactaaattttttgatgaaaaacacaaaggcgcaggatttttactccaaaaagaaattgattttgcaagcaatcttatcaaacatccagcacgtccttttgtcgctgttgttggaggttcaaaggtaagtggaaaacttcaagcattgacaaatttattaccaaaggtagataaattaatcataggcggaggtatggcatttacttttttaaaagctttaggttatgatataggaaattcacttttagaagaagaacttttagaagaagctaataaaattcttaccaagggtaaaaatttaggagtgaaaatttatcttccagtagatgttgtagccgctcctgcgtgctcacaagatgtgccgatgaaatttgttccagcgcaagaaattccaaatggttggatgggtttagatataggacctgcgagtgtgagactttttaaggaggtgatttctgatgcgcaaacgatttggtggaatggacctatgggtgtttttgaaattgataaattttcaaaaggtagcattaaaatgagtcattatatcagcgaaggacatgcaacttctgttgttggaggcggtgatacggctgatgtggttgcgcgtgcaggtgatgcagatgaaatgacttttatttctactggaggtggtgcttctcttgaacttatagaaggcaaagaacttccaggtgtaaaagctttaagatctaaggaaaatgaatga

SEQ ID NO: 18400 - DNA, 999 bp, Campylobacter jejuni
atggctgtaaaagttgctataaatggttttggacgcataggcagatgtgttgcaagaatcatcttagaaagaaatgatattgagcttgtggcgataaatgatactacggatattgaacttacaaaatacctttttaaatacgatacagtacatggtgaatttaaaggcagtgttgatagtgaaggagatgatttagtggtaaatggtaaaaaaatcaaagtatttaaaagtcgcaatgtaaaagatcttgactttgcaaaacacggcgcacaaattgttttagagtgcacaggagcgcatttaactatggcaaaatgtcaagaatttatagatatgggagtacaaaaagtgatcatgagtgctcctgcaaaagatgatactcctacttatgttttaggagtaaattcagaactttacaagggtgaaagcattatttctaatgcaagttgtacaacaaattgtttaggtcctgtttgtcgtgttttacaagataattttggcatagaaaaaggacttatgacaacaatacatgcttatacaaatggacaaagtattattgatgctaaagctaaagataaacgccgttctcgtgctgcagcgcaaaatatcattccaacttctacaggcgcagcaaaagctatgaaacttgttatgcctgaacttaatggcaagcttcatggacaaagtatgcgtgtgccagtgattgatgtatcaagcgtggatttaactgcacaactaagccgtaaagttagcaaagatgaaatcaatgaagctttcagaaaagctgcagctacaaatttaaaaggcattttaatggtagatgatgatgaaagagtttcaagcgattttatcacttgttcttatggagctattgtagcaagtgatttaactcaagtgattgcggatgattttatcaaggtaattgcttggtatgataatgaatggggctattcaagtcgtctagtagatatggcagtatatattgcaaataaggcttaa

SEQ ID NO: 18401 - DNA, 351 bp, Campylobacter jejuni
atgaaaaaaatacttattctacttacactatgtgcttttgcttttggtgcaagtgaatgtgatagaaaaatcgatcgtatcaataaagaaatcagtttttctaaagcgcataatgatacagctagaactttaagcttagagcttgctttaaaacaagtacaaaatgattgtgctaaagatcctatgttttatgataaaaagttagaagctaaaaaacttaaagaacaagaagtggaaaaaatcgaaaaagaacttgatgctttaaaagaacaaaaagattatatgagcaaggctgagtataaagctaaaaaagaagctttaaaagaacaaaaagagaaaatcaaaaaataa

SEQ ID NO: 18402 - DNA, 348 bp, Campylobacter jejuni
atgcgtgtaggctgtgatatcatcgccatttctagaatagaaaaaattcattctagacatggcaaaaattttttggataaatttctaaacccaaaagaacaaatactcattaaaaatccagcaactctagcaggtctttgggctgctaaagaagccgctagcaaggctttgggtgttggaatttgtgaattatgcagtttttttgatattgaaatatcaaaagatgaaaaaaacgcgcctaaattaaaatattctcaaaaaattacaaaagattttaatatcactcaaacttccctaagtatttctcatgataatggttttgctatagccatagtggctgtagtttga

SEQ ID NO: 18403 - DNA, 513 bp, Campylobacter jejuni
ttgaaaaataatccttatattatttggcttactggtttagctggaagtggaaaaacaactataggtcaagctttgtatgaaaaattaaaattaaaatataaaaaccttatttatctcgatggagatgagttaagagaaatattaggacattatgcatacgatagacaaggtcgcatagatatggctttgaaaagagctaaatttgcaaaatttttaaacgatcaaggtatgatggttattgtcactacgatttcaatgtttaatgagatttatgattacaatagaaagcaattaaaaaattattatgaaatttatatagaatgcgatatgcatgaattaatacaaagagatcaaaaagggctttatactaaggctttaaataaagaaattgataatgtagttggtgttgatatagaatttgataaaccagaggctgatttagtgatcaataattcttgtcgaaataatttagaagaaaaagttgaacttataataaagaaattggcattgtga

SEQ ID NO: 18404 - DNA, 1107 bp, Campylobacter jejuni
atgtatgattatttaattgttggttctggattgtttggtagtatttttgcttacgaagcaactgaaaaaggttatacttgtttagttgtggagcaaagggaacatattggaggtaattgttataccgaaaatattaaaaatatcaatgtgcataaatatggtgctcatatttttagaacttcagatcagaatatatgggattatatgaatcaattttgtgaatttaatcattttatcaattctcctattgcaatctataaagatgaaatttataatttgccttttaatatgaatacttttagtaaattatggggaattaaaactccaaatgaagctagaaaaataattgaaatgcaaaaacaaataattcaacatcctccaaaaaatttggaagaacaagctatatctttagttggtacagatgtatatgaaaaacttattaagggttatacagaaaaacagtggggtagatcttgtaaggatttgcctgcttctattataagaagattgcctgttcgatatatttatgacaataattattttaatgatccctatcaaggtatccctaaaggcggctatacggcaatttttgataaaatgctaaaaaaaagtaaagttattttaaatactgattttttaaaatataaagataaatttaaaaataaagctaaaaaaatagtttttactggttgtattgatgcttattatgattatcgatatggagctttggaatatagaagtttaaaatttgagcataaaatattaaatttagacaattttcaaggagtggcagttgtcaattatactgacaaggaaataccttatactagaattatagagcataagcattttgaatttggaaatacagatacaacagttataagcgaagaatatcctttagaatggattaagggtattgagccttattatccaataaatgatgaaaaaaatcaagctttgtatgaaaagtataagcaattagcaaaacacgagagtaatgtatattttgggggaagattgggagaatatagatattatgatatgcaagatgttgtaagatcggcattattattttgtaaaaatgagttaaaaaataagcaaggatga

SEQ ID NO: 18405 - DNA, 1182 bp, Campylobacter jejuni
atgaaaatagtcattgttggaattggttatgttgggcttgcaaatgctatactcttttcaaaaaataatgaaaatgaggttgtattgttagatattgatgaaaataaaatccaaagtattaataatcataagtctcctattaaagataaattaattgaaaagttctttgtgcaaaatataagtaaattacatgctacttcaaatatcaaagaggcttattttaatgcagattttgcagttattgctactccaactgattatgatgaacagcttaatttttttgatacaagaagtatagagaatgttttaaaagatataaaaaatataaattctaagatcaatgttattattaaaagcactgtgcctataggatatacaaaaaccataaaacaaaaatttaatatgtctaatattgttttttctccagaatttttacgggagggaagtgctttatatgatagtctatatcccagtagaattattattggtgataaaagtgttttgggtaaaactattggagatttgtttttaaaaaatatagagaaaaaaaatgttgatattttttatatggattcggatgaggcagaaagcgttaagcttttttctaatacttacttagcaatgagagtgggattttttaatgaagttgattcgtatgcaagaaaacataatttaaattcagcggatataattaagggtattagtgctgatgatagaattggaaaatattacaataaccctagttttggatatggtggatattgtttacctaaagatacaaaacagttgcttgcaaatttttataatattcctaatagtttaattaaagctatagttgaaactaatgagataagaaaaaaatttataacccagcttattttagaaaaaaaaccaaacattttaggtatttatagattaattatgaagcaaaattctgataattttagaaattctgtgattatagatattataaaatatttacaagaatataatagtaatattgaattaataatatacgaacctttggttaaggagaaaaaatttttaaatattaaagtagagaatgattttaatgtttttggagctaaagttgatttgatcatagccaatcgttttgatgataagcttaaagagattaaagataaagttttttcagcagatgtattttatactgatatttag

SEQ ID NO: 18406 - DNA, 1659 bp, Campylobacter jejuni
atgaaaaaaatattaattttactttttagttgtattttatgttttggagctgtggatgtttcacaaatcatttcagcagaggatcaaggttctgctacaactagcatagatcaaaatttaagctcaaattatgatatagcaaataaagaaaataatcttacaaaaattcatcaaattttagtatttggcgctcatctttttaatggaaattttaaaaattacaatcaaagagtttataacccagattataagattgcagttggtgatcaaatcagtcttaaaatttggggagctgttgagttttcgcaagttttagtggtggattctcaaggaaatatttttatccctaaagtaggagctgtaaatttactaggtgtgaaaaatagcgcccttgtaagtgttataaaagcacgtgttaataaaatctataaaagcaatgtttttgtttatgcagatatgaatgcttatcaaaatgtcagtgtttttgtaacaggaaacgttaatgctccaggactttatcaaggacttagttcggattcagtgatccagtatcttgataaagcagggggtataaatttagaatatggaagttttagagatattcaaattttgcgtaataacagcgtgataaaaaatattgatttatatgattttttactaaaggggcaaatggatctttttccttttagaagtggagatgttattttagtaggaaatgttcaaaattacgcttttgttaacggtgatgtgcaaagaccttttcgttttgaactttcaaatgatattaaaactttagctgacttagctagagtatcaggtgctaaacctatcgtaactaatgctatcgtaaaaagttatggtgaagatcataaacttgatgtcagtgcttataataaaatgcaattttcaaaagttttacttagaacgggagatgaggtagaatttcaccctgagtatgtttctgaaaatataactataagtgtaaatggcgagcataatggtttaaaaactttagttgtgggtaaaggaacgactttagaagatatttctaaattaattaaagctaatccacaatcaaacatgcaagctttacaagtgtttagaaaaagtgtagctagaactcaaaaagaacttatcaatgctcagcttaaagagcttgaaactctagctttaactagtggttctgttacagctcaaggtgcagctataagagctcaacaagcaaaaacgattttagaatttatccaaagagctaagcaagtagagcctaagggtcaaattgtcattgataatccaaagtcttataattcggttattttagaagatggtgatactattaatgtaccaagtaagaataatctcatcatagttcaaggtgaggtttctttacctggagcttttgtgtatgataagggcaaagatttaagatattatatcaatcttgcaggaggttatggagaaagagcggatacttcaaaagttttggtgatacgaagcaatggaaaagctgaaaaatatcatagtggtatagatatgaaacgaggcgattctgtgttggtattgccaaaagtggatagtgagaatttacaaattttttcaatgttgactcaaattctttatcaaattgctatcgcaaccaatgttgtgcttaatctttaa

SEQ ID NO: 18407 - DNA, 1119 bp, Campylobacter jejuni
atggaagaaaataaaactttattagaaaaaatcaaagatttaagtatatttgattcttttaaaattgtttggtttataatgatttttgttgtgatttattatacattgattgcagcaccaagatatgtaagcacgatgattttagatgttagatcaacaagtggagaaagtgctcaaacaagtggaatcttgtctttgcttagtagtacttctacagcaagcgaagatttaaattatctaaaaggttatatagaatcaagtgatatgttaaagattttggatgaaaaaatcaaacttaaaaatctttatcaagagcaacatatagatttaccttttaaaatttgggattcaagctcgatagaatcttatcttaaatactaccaagcaagagttaaggttcatacggatgaaaccactaaacttttaaaagttgaagtagagggttttacacctaaatcagctcatttgattgctcaagctattatgcaagaaagcgaaaaatttatcaacgaaatctctcataaagcagctagagagcaaatggcttttgctgaaaatgaagtgcaaaaatacaaagaacgttatcaaaaagcacaaaatgatttgattgcttttcaaaataaatatggagtttttgatcctttaaaacaagctgaaactaaagcaagtttagttgcgcaaattgaggctaatttagctcaaaaagaagctaaacttttaactttacaaagctatatgaatgatgcagcacctgaagtagtagcacttaaagcagaaattgaagcgattaaaaaacagcttttaagggaaaaatctaaaatttcagctaacaattcttctcaaaagcttaacgatttggctgctaaatttcaggatttaactatagaagctacttttgcgcaaaaagcttatgaagcagctttaaaagcttatgaaagtgctagaatagaagcattaagaaaaataaaacaacttgtcatcatccaaagtccagatattccagaaagcgcaaaatatcctgaaagaatttatgatattttaacagcatttattgtattatctttgatttttgggattgttaaatttattaaaatgataatagaggagcataagtattaa

SEQ ID NO: 18408 - DNA, 663 bp, Campylobacter jejuni
atgataaagttaattaatctaacaaaatcttatcctttatttagtggtggaagacattatgtttttaagaattttacttttgagtttcctgaaaattgtagcataggtttgatggggtataatggagcgggtaaatctactcttatgcgtcttttaagcggggcagaacttcctgatagtggtaagataattactaataaaaaattatcttggccattgggtttaaatggggcttttcaaggttctttaacagctagagataatgctaaatttgtagctagagtatatggttataaaggaaaagaactccaagaaaaagtaaaatttgtggaagattttgcagaacttgggaaattttttgatgagcctatgaagacttattcttcgggaatgagtgctaggatagcttttggacttagtatggcctttgattttgattattatttgattgatgaagcaggagctgttggagatcctgcttttagggaaaaaagtgtgaaattatatagagaaagattaagcaaatcaaaagtgattatggtatctcataatgtagctgaaattaaagaatggtgtgataaaataatttatatgaaaaatggacaaattacggtttatgatgatgtagatgaaggaatagctgtatatcaaggaaaagtttaa

SEQ ID NO: 18409 - DNA, 966 bp, Campylobacter jejuni
atgcaaattaaagatgaaattttatcccttttaaaaaggggtaaaaatttactcgctttttcttatggaagtgattctagtgtgcttttttatcttttaatgcaagaaaagatcgactttgatcttgtgatgataaattacaaaactagaaaaaatagtgatttagaagagttaaaagccaaagaacttgctttaaaatttcataaaaaaattttcataaaacacgctcctaaatttcaaagtaactttgaaaaaaaagccagagattttcgctatgatttttttgaaaaaatttgtcttgagcaaggttatgaccatcttatcttagcccatcatttaaacgatcaatttgaatggtttttgatgcaactttcacgaggcgcaggtttggctgaaattttaggtatgcaagagtgtgaaaaacgctcaaattatacacttttacgccctttactctttataagtaaagatgaaatttcatcttttttaaaagaaaaagatattttttatttccatgatgaaagtaatgaaaatgaaaaatattttagaaattatataagaaaaaatttctctaatgcctttgtgagtgaatttcatcagggtttaaaaagaagtttttcttatcttgatgaagacaggaaaaaactttatgattttgaaaatatcaaagaaattcaaggacttcttatttgccctaaaaatgaaagcttgattgctagagcggtgaaaatgaaaggtttgcttttaagcacggcacaaagaaaagagcttttaaagggtgattgtgttttaggtggtaaaatagcacttgcatataaaaacgaacaagctattgtttttgagtatgaaacttgtcaaaaattacctaaaaatttcaaagaagagtgtagaatagctaaaattccaagacttttaagagcttatttatataatcataaaatcgatatttcaagccttagcttttag

SEQ ID NO: 18410 - DNA, 1320 bp, Campylobacter jejuni
atgtcaaaactttatcttatgtctttaggttgtaataaaaatttagtcgatagtgagatcatgctagggcaccttagtgcttatgaactttgcgatgaaccaagcaaagctgatgttttaatcgtaaatacttgtggttttatcgatagtgcaaaaaaagaaagtattaatgcgattttggatttgcacgaacaaagaaaaaaagattctcttttggtggttacgggttgtttgatgcagcgttaccgcgaagaacttatgaaagaacttcctgaggttgatcttttcacaggtgtgggtgattatgaaagaatcgatgaaatgatacttaaaaaaacaaatttattttcaaattcgacttatttgcaaagtgaaaattctaaacgtattatcacaggttcaaattcccatgcttttataaaaatcgccgaaggttgtaatcaaaaatgctctttttgtgccatcccaagttttaaaggcaagttaaaatctcgtgagataagtagcattatagctgagcttaaagatttggtagctagaggttataaggacttttcttttattgcacaagatacgagttcttatttgtttgataagggtgaaaaagatgggcttatacgcttaatcgatgaggtggaaaaaatcaaaggcataagagcggctagaattttatatctttatcctacgagtgcgagtgaagctttgattaaacgcattatagcttctgaaatttttataaattattttgatatgcctttacaacacataagtgataatatgcttaaaatcatgaagcgtggggcaaatagcacaagacttaaagaaatgctaaatttaatgaaaagtgcgccaaatagttttttacgcacgggctttatcgtaggacatccaggtgagagtgaggcggattttgaagagctttgtgagtttgttaaagattttggttttgataggataagcgtttttgcgtattctaaggaagaagatacggctgcttttgatatggagcaagtgccttttaaagtgatcaataaaaggcttaaaatcatagaaaaaattgttgatgaagtcatagaaaaaagttttgaaaaagaagtagggcaaaagcgtttagtagtttgcacaggaaaaagtagcgagggagagtttttcatcgcagctaaagatttaagatgggatagagagattgatggggaaattcttatcaatgaaagtgaatgtggaaatttagaaatggggcaaatttatgaatgtgaaattttacaaaaccttgataaaaagctccttgctaaggctttaagaaaagtagatgcaaattaa

SEQ ID NO: 18411 - DNA, 1098 bp, Campylobacter jejuni
atggataattacgaatttagcgaacttttaaaaactttaaaaaacaaagtcggcaacatagcctccatcatcaagcctgaaaatatccaaacaaggcttaaagaaatcgaagagcttgaaaattctccttctttttggagtgatgttaaacaagcaggaatcataggtaaagaaaaaactaaaatcaccaatctacttaaaaactatgaaaatgcttttaatgctctaaatgacgcaagcgaacttttcgatctggccaatagcgaaaacgatacagaaacacttgaagctttatttaatgacgcaccaaaacttgaagataccatcacaagtcttgaaatttccatgcttttaagcggggaaaatgatggtaaaaatgccattgtttccattcacccaggtgcaggtggaacggaaagtaatgactgggcaagcatactttatagaatgtatttaagattttgtgaaagagaaggttttaaagtcgaaactttagactttcaagaaggcgaagaagcaggacttaaagatgtgagctttttagttaaaggagaaaatgcttatggttatttaaaagctgaaaatggtatccatcgtttggtaagaacttctccttttgatagtgcaggacgccgtcatacaagcttttcaagtgttatggtaagccctgaacttgatgatgatatagaaattgaaatcgaagaaaaagacataagaatagattattacagagcaagcggtgcaggcggacaacatgtcaataaaacagaatcggctgtgagaatcacgcattttccaaccggcatagtcgtacaatgccaaaatgacagaagtcagcacaaaaacaaagccaccgcttttaaaatgctaaaatctcgcctttatgaacttgaactcatgaaacaacaagatagtgctaatactggagaaaaaagcgagataggttgggggcatcaaatccgttcttatgtgcttttcccttatcagcaagtcaaagacaatcgcagcggagaagctttttctcaagtggataatatccttgatggggatatcaaaaaaatgatagaaggcgttttgattgctttaaaagcggagtaa

SEQ ID NO: 18412 - DNA, 822 bp, Campylobacter jejuni
atgaacaaagaagattttattatcaaagcttttttaaataaaaaaaatggtgatgatggagctattattgatgattggtgttttagtaaggatttgttttttgaaaatgtgcattttaaaagagagtggtttagcttagagcaaattgctacaaaagcaatgcttgttaatatctcagatgctatttcaatgaatgctgtaccaaaatacgcacttttaggacttgctttaccaaaaaatttaagcgaaaatgagatcaaagccttgcaaaaaggttttttaaaaacagctaggaaatttaatataaaaatcataggcggtgatactataagcaatgataaaatagacattagtcttactatcatttcaaagattaacgataaagctgtttttagaaaaggtttaaaaaaggggcatttacttgcttatacgggaaaattaggacgaagtttaaaagggcttgaaattttacaaaatgggggcactttaaaaccaaaccatgtatttataaagccaaaattaagagctagttttttttatgaaatcgcacctttaatttcttgtgctatggatatttcagatggtttaagcaaggatttatcaaggcttttagctttaaataaatgcggtatttcttggtttaaaaaacttgatgattatgcgctttatagcggagaagaatatgaaattttgtttgcttttgatgaaaaagaacggcaaaatatagaaataatagccaaaaaacacggcgtgaaattaaatatctttggaaaagcagtgaaaggaaaatatgaatttagaggaagagaacaccatttttaa

SEQ ID NO: 18413 - DNA, 1419 bp, Campylobacter jejuni
atgataagattaatattaatattaattaacattcttttttgccattatctttatgctttagattgtcaaaagcgtctttttgatatcagtattaacgaaaaattaagcatacaagaaagtcttgatgagcttgcaaaatattgttctttcagtattattgttaaagataaaattgccaaagaaaaattagaaacattgcaaaactctgtcaatattcatcaaatgagtttggacgaaatttttaatttttttatcaaagagcatgatcttagctatgattttgatggtaaaattttaagaatttcaggcattaatacgaagatttttaagataagttatatcacttctatcagagaaggacaaagcataactaaagcgtctgtagacgctaaaccaaggcaaagtgaatatagcggtagttttgatgatgcagaagacaacatgattaaaagtatggaaaaatttgatttttggcaaaatatagaaaaagagattattgtattattaaaaaattctcatgaagattatgaggctaaaactcccattataaatcccaatgcaggtcttattatagtaactggaacaaattctcagttaaaaagtgtgaaaaattatttgcaaaaactagaaaatcgtcttaaaaaacaagttattatcgatgttagcatacttgctgtgagtttaaatgaaagccattctagtgggattaattggcaaaattttaatataggtttaaattcacaagtaaataatgaaaattcttttattcagtttcaaaatgggcaaggttttgttaagaatttgggtttaagggcgaatttaaattttgattctattattaactttctttctcaaaatggaaaaactagcgtgctttctaatccaaagcttatggctttaaataaccaacaagccattatttctgtaggcgatactataaattatcaagttaaagaaagttctaaaggtactgaaaatgggactactgttagtgaaagttataataattattctatttttgtaggcattttactcaatatcttgcctgaaatttctgatgatggaaaaataatgcttaggattaatccaagcttaagtgattttaagtatccagaagataataaacgacaaaaagaaccaagaactattgctcctgataccatacaaaaaaagctttctagtgttgtgcaagtagagaataatcaaactttaattttaggcggattgatttctcacgataaatctaatgagaaaaattctatcaattttctatcaaaaattccaatcctaggttctttgtttaaaggagaagttttaaattctaaagcaaccgaaatcgtttttattatcactccaagtatagtagatagcgtaaatgctccaagtcttaaagatctaggatttaagcattatgagtaa

SEQ ID NO: 18414 - DNA, 390 bp, Campylobacter jejuni
atggcaacaacatacgcaacaggtaagagaaaaactgctatcgcaaaggtatgggtaaaaccaggtagtggtaaaattagtgttaatggtgttgatttaaacacttggcttggtggacacgaggcgattaagcttaaagtggttcaacctttacttgtgactaaacaagaaacttcaatggatattaaagcaactactttaggcgggggctatagtgctcaagctgaagctttaagacatggaatttcaagagctttagcagctatggatgctgattttagagccttattaaaacctaaaggacttcttactagagatagtagaactgttgagcgtaaaaaatatggacgccgcaaagcaagaagaagcccacaattctctaaacgttaa

SEQ ID NO: 18415 - DNA, 426 bp, Campylobacter jejuni
atgacaaagataacaaagccaaacgaagtaaaacgagaatggattgttttagacgcagaaggcaaacgctttggtcgtcttttaactgaagtagcaacaattttgagaggtaaaaacaaaccttgctttactccaaatgttgattgtggtgattatgtaattatcatcaatgcttcaaaagctgtatttacaggtgctaataaagcagaagataagctttatcatagacattcaggatattttggaagtgtaaaaagcgaaaaatttggtgatttacttgaaaaaaatcctgcaaaattatataaattagcagttagaggtatgcttcctaaaacaaatttgggcagagctatgcttaaaaaattaaaaatctatgcgggtagtgagcacccacacactgcacaaattgctaaagaaggaaaataa

SEQ ID NO: 18416 - DNA, 660 bp, Campylobacter jejuni
gtgagtatagattttttagctattatcagcgttgcttttttatctagttttggacactgctattctatgtgtggtggttttaatttactttttataaatttgaattcaaaaagcaataatttatttttattaacttttatttataatttgtttagaatttttgcttatattgttttagggataatttttgggacttttgggaatatcttggcaatcaatgccaaggttcaaagtttgtcattttttattcttggtatatttatgatgattttgggttttgctcttatttttagaggtaatatgttatcttttattgaaaataatgttttttttgatagttttgtaaagaaaattattaaaaaatctaaaaattttaaaggattaaaatcagccatatttttaggattttcaaatggttttgttccttgtggattggtgtatttttttatagccaatgcaatgagtaagcaaaatatttttgaaggtattttggtaatgatgatttttggaatatcaactttacctgcgatgttatttttttctaaaatttcacagttttttagtgattttttgaaaaatttatttaattatttatcgtatggcgttattgtttgttacggtataaatcttgcctatataggttttaaggcttttcaatga

SEQ ID NO: 18417 - DNA, 1119 bp, Campylobacter jejuni
atgaaggcttatatttatttagaaaatgatatttttttaagtgctaaggcttttggaaagagcggtactttttttggagagcttgtatttaacacttctttaacagggtatcaagaaattatttcagatccttcttatgcagggcaatttatcgtattttccatgccagaaattggtatagtgggaaccaatgaaaatgataatgaaagcaaggaaatttttgcaagtggtgttttaatgcgtgaattaagttccagtttttcaaattttcgcgctaaagaaagtctgcaagattatcttgaaaaacatggaaaaataggaatttatgaacttgatacgagatatctagtaaaaatgataagaaataatggcaatttaagagctgtaatttcaactgaaatttcaaataaagaagatttaaaaatcgccttagaaaaatcagcaaaaattgatgaagtaaattttgtaaaagaagttagcactaagaaaaattattctcataaacaaggcgtttggaacgctagttttcaaaaatttaatgatgctaaaagaagtgagaaaaaagttgctgttatagattatggtgttaaaacaaatatcttaaatgaacttgtagaagtaggttttgaagtagaagtttatccatataatgttaaagcagatgagttgattactctgtataaaaaaggtgaaattcaaggcgtgtttctttctaatggtccaggtgagccaaggattttaaaacaagagattgcagagattaaaaaacttgcagaagctaaaattcctatgcttggaatttgcttaggtcaccagcttttaagtaatgcttttggatatgaaacttataaaatgaaatttggacaacatggagcaaatcatcctgtgatcaatcttgatacaaaaacggtagaaattaccgcacaaaatcataattataatgttccagaagaattagctcaagtggctcatatcactcatagaaatttatttggcgataatgttgaaggagtaagatataaagactatcctattatttcagtgcaacatcatccagaaagttcttcaggtcctcatgaaagtaagtatatttttaaagaatttatgaatttgatgtga

SEQ ID NO: 18418 - DNA, 1251 bp, Campylobacter jejuni
atgagcaaagcagatattattgtcggcattcaatggggcgatgaaggaaaaggtaaggtagttgataaattatgtgaaaattatgattttgtttgcagaagtgcaggtggacacaatgcaggacatacgatttgggtaaatggtgtaagatatgcgcttcatcttatgccaagtggagttttgcatccaagatgtattaatattatcggaaatggagttgtggtttctcctgaagtattgattgctgaaatggctcaatttgaaaatttaaaaggtagattatatatcagcgatagagctcatttaaatttaaaacatcattctttaatagacattgcaaaagaaaagctcaaaggcaaaaatgccataggaacaacaggtaagggtataggaccttcttatgcagataagattaatcgtacaggacatagagttggagagcttttagaaccacaaagactttgcgaggctttgataaaagattttgaagctaataaaactttttttgaaatgcttgaaattgaaattccaagtgctgaagaattgcttgctgatttaaaacgttttaatgaaattttaactccttatattacagatactacaagaatgctttggaaggctttagatgaagataaaagagtacttttagaaggagctcagggttctatgcttgatattgatcatggaacttatccttatgttacaagttcaagtactatttcagcaggcactttaacaggacttgggttaaatcctaaagaagcgggaaatattataggtattgtaaaagcttatgcaacgcgtgtgggaaatggagcttttcctactgaggataagggcgaagatggagaaaaaattgcgcaaattggaaaagagattggcgtaagcacgggacgcaaaagacgctgtggatggtttgatgcggttgctgtaagatatacagcaaggcttaatggtcttgatgctttatctttgatgaagcttgatgttttagatggttttgaaaagataaaaatttgtcgtgcttatgaatataagggtatggaaatcgactatataccaagtgatttagaaaatgttcaacctatttatgaagaaatggatggttgggataaagtttttggtataaaagattatgatttattgccagaaaatgctaaaaaatatatagcaagacttgaagagcttgcaggggttaaggtaaagtatatttctactagccctgaaagagatgatactatcatcttatga

SEQ ID NO: 18419 - DNA, 2805 bp, Campylobacter jejuni
atgtcaagtgtaggtgaaaatatcaagcttacgcgtcgttcttttcttaaaatggcagcactttcaagcctagcaacaccgttgcttgctagaagtgaaactttaagagaagcgagtgctgatgagcttaaagaagcttatgaaggtagtaaaaaagtaaaaacagtttgtacagcctgttctgtaggctgtgggattattgcagaagtgcaaaatggtgtttgggtgcgtcaagaaatcgctcaagatcatcctgtgagttcaggtggacattgctgcaagggatctgatatgatcgatatggtgcgttcacatgtgcgtttaaaatatcctatgaaaaaagaaaatggagaatggaaacgcataagttatgagcaagctttaagtgagatcggagaaaaactagctgcttatcgtaaagaaaatcctgaaagtgttatgtttttaggttctgcaaaacttaataatgaacaagcttattatataagaaaatttgcagcattttttggaacgaacaatgtagatcatcaagctagaatttgacacagcgcaacagtcgccggtgtggcgaatacatttggttatggcgctatgacaaaccatcttggagacatccaaagaagtaaatgtatcattatcattggagcaaatccagcggtaaatcaccctgtgggttttagacatttcttaaaagcaaaagaaaaaggtgcaaagcttatcgttgtagatcctagatttacaaaaagtgcagcaaaagcggatatttatgcaagaattcgtccaggaactgacattgctttcatgtatggaatgttaaaaatcatttttgatgaaggcttggaagatacaaaatatcttgatgaaagagtttttggaattgataaaattcgtgaagaagcagcaaaatggacagttgaagaagtggaaaatgttacagggatctctaaagaacttttggtgcaaatcactcacgaagtagctaaaaacaaaccaactacgcttatttgggctatgggtttaactcaacatactgtaggaacttcaaatacacgtttagcacctattgtgcaaatggtacttggaaatataggtaaatttggtggtggagttaatatcttacgcggacacgataatgttcaaggtgcttcagatatggcttgtttgagcgaaaatttaccaggttattatcctttaaatgaagcgacttggagatactatgccaaaatttggggtgtggattatgagtggcttttaggaaattttgtaagcaaagattggatgcataaaactgggctttcacttgctagatggtgggcagcggctttaaatggaaaagatggaaatgatgctatcgataatgcaggaacgcctttaaaagctttagtagttatgggaaatggtattacttcgactgcacaacaagtaaaagttaaagaaggtttggaagctttagagcttttagttttagccgatccttttgtaaatgaagcagggattattgcagaaagaaaagatggaatttatcttttacctgcagcaacacagtttgaaacaagcggaagtgtaacagcaacaaatcgtagcggacaatggagatttaaagttgtagatccactttatgaaagcatggaagatcaagaaattttatttgagcttgctaaaaaattaggtttttatgaagactttaccaagactttacgcgatgaaaaaggtgagattgtttggcctgaaaatgcaacaagagaaattgcaaaagcagttagaagtatagggcttaatggttggagtcctgaaaggcttaaaaagcatactttatactgggataaatttgatgaggtaactttagaaggaaaagacgaagttgctggcgagtattacgggcttccttggccttgttggagtgataagcacccaggttctcctgtgctttataataccgacattgaagtagcaaaaggtggtatgggctttagaaacaattttggacttgaatatgaaggagagagtttacttgctaagaatgcacctttaaattcacctattgatacaggttatccacaaattactaaagataatatagaaaaagttttaggtattactttaagtgctcaagaaaaagaaaaaatgggatcaacttggtcttatgatgatagcaatatcatagcaactaaatgtatagaaaaaggcatagttccttatggaaatgctaaagctagagctgtagtttggacttttaaagataaaattccactccaccgtgagcctttacattctccaagaaacgatttggtgcaaaaatatccaagttttgaagatcaaaaagcgctttaccgcgtggatactaaatttgtttctgtgcaacaagctaaggattattctaaagaattcccgcttaatcttgttactgcaagacttgtgaatttaaatggtgcaggtatggaaaatagagcatctatgtatctaacgcgtttaacacctgaaatgttttgtgagatcaatcctgaattagcaaaagagcaagacattaaagcaggagatatgatttgggtgcattctccagaaggtactaaaattcatgtaagagtgaaggttaatccaggtgtagcaaaagatatgattttcttgcctttccattttacaggagttatgcaaggcgtggatttaacgcacaatttcccagaaggaactaagccttatgcaagcggagaaagtgctaatacggtaacaaattatggttatgatatcatgtgtcagattccagagactaaaggtggactttgtagaatcagtaaggatggaaaatga

SEQ ID NO: 18420 - DNA, 1191 bp, Campylobacter jejuni
atgctaatgtcttatgaagaaagtttaaaaattttacattctcatatcaaaacttatgaaaagattgaaaaaatagctcttacagagtgtttaggacgcattttagctcaagatataaaagcccctaaaaatcagcctgaatttccaacctcggctatggatggttatgcgatcaaatttgaagatcaagacaagcctttaaaaattttaggcctcacacctgcgggtactatgccacaatttagcgtacaaaatggcacttgtgtaaaaacctttacaggctcactcatgagcgaaggaagcgatactttagtccctgttgaaaatatacgcatagaaaataatactctttttatagaaaaaaaagttccccaagcttttgccgtgcgtgcggtaggagaaaactataaaaaagatgaaattttactcaaaaaaggcacaaggttaaattatagcgagatagctcttttagctgaacttggattttttcacattagtgtgtttataaaacctattgtaggggttttaagtagtggaagtgagatcaaagatctaggagaagccttggaaaatcctgctcaaatccgctcttcaaatcatatcgccatagctaatttagctaaaaatttaaattgcgatacaagggtttttcctcttttaaaagatgatgagaaagccactttttccacccttgaaagtgctttgcaaagttgtgatattttggttacaacgggcggggtttctatgggagattttgactttttaaaaaaagccatcaaagaatacgaaatcatcatcgataaagccgacataaaaccaggtagacatatcaaaatagctaaggctaatgaaaaattcatcatcgccttaccaggttttccttactcggctatggtaatgtttaatctttacacaagagagattttaaactcttggttacttcaacctaaagactatatttgcaaagcctttttacaaggaagttacaagaaaaaaacaccttatttggaatttgtcgcttgcaatatagagtttaaaaatggacgcattttagccaatcttgaaggcaaaaaagaaggctctagtgcgattataaacaatcttaacaataaagctgcccttatggtggtgccaaaagaatgtgaaatgttagaaaatgaaagtttagtagatattatctttatgccttaa

SEQ ID NO: 18421 - DNA, 450 bp, Campylobacter jejuni
atgtcagttacaaaacaattattacaaatgcaagcagatgctcatcatttatgggttaaatttcataattatcactggaatgtaaaaggtttgcaatttttttctatacacgagtacacagaaaaagcttatgaagaaatggcagaactttttgatagttgtgctgaaagagttttacaacttggcgaaaaagctatcacttgccaaaaagttttaatggaaaatgcaaaaagtccaaaagttgcaaaagattgctttactccgcttgaagtcatagaactgatcaaacaagattatgaatatcttttagcagaatttaaaaaactcaatgaagcagcagaaaaagaaagtgatactacaacagctgcttttgcacaagaaaatatcgcaaaatatgaaaaaagtctttggatgataggcgctactttacaaggtgcttgcaaaatgtaa

SEQ ID NO: 18422 - DNA, 1221 bp, Campylobacter jejuni
atgttaaacaatacgcttttttttaaacaaagtgaaattcacactataagttcttatgcaaatcgtattaatgatgaggtaaaaagtggagatatagggtattatcatcttattgacacaagtttgaatttaatcgatgagagcttgcaatttattcaagataaagagtatgtaaaaaatatcgttttagtgggaatgggaggttcaagttgtggtgtaaaagccttgcgtgatatgctttttaatgaaaaaagcaaccaaagagagctttttatactcgataacacaagctcgcattcttttaataagactttagaaaaaatcaagcttgaagaaagtttgtttttaatcatcagcaaaacaggtagtactatagaagttgtatcgctttttaaacttcttattgaacattttaaacttgatatgcaagaattaaaaaaatactttgtttttattaccgataaggattcaaaacttcatcaagaaggtgaaaatttaggtattaaatgcttttttatccctgcaaatgtaggaggtcgttttagcatactttcagccgtaggtatagttccactttgtttttgtggctataatgccaaagctcttttagaaggagctaaagcttgttttgaagatttttttactcacaaaaaagatgaaattttacaaaaagcctatcattattgtacacacaaaaatgccaatatcaatgtacttttttcatatagcgatgcttttaaaggctttaatgaatggtatatccagcttattgctgaaagtttaggtaaaaagcaaggctataaacgcataggtttaactcctattgcactcattggcgcaagagatcaacatagttttttacaactcatcatggatggacctaaaaataaaactgtaacttttttaaaaatcaaagacgctcaaaaagcacctattatccctgatattcattttaaatttttagattctttaagtaataaagtcaatcttcacgaacttttaaacgctcaatgtgatgcaactatgcacgctttaatcgctgaaaatttgagtgttgatgtgatagaacttgaaaaacttgacgcttggcatgcgggatatttgatgtattattatgaactttttacttcaacttgcggtgttatgctagggattaacacttatgatcaacctggtgtggaagttggaaagttgatcttaaaaaatatattaaattcttaa

SEQ ID NO: 18423 - DNA, 825 bp, Campylobacter jejuni
atgcttcaaacttgtattttccctgcggcaggttatgggacgagatttttacctgcaacaaaaactttacctaaagagatgttacctatcttaaccaagcctttgatccattatggagttgatgaagctttagaagcaggaatggaaaatatgggatttgtcacagggcgtggaaaaagagctttggaggattattttgatatttcttatgaacttgaacatcaaatttcaggtacaaaaaaagaatacttacttgatgaaattcgctctttgatcaatcgttgtacctttacttttacaagacaaaatcaaatgaaaggcttaggtgatgcggttttaaaaggtagacctttggttggcgatgaagcttttggcgtaattttggctgatgatttgtgtgttaatgaagaaggcttaaatgttatggctcaaatggtaaaaatttatgaaaaatatcgctgcaccatcatagctgtgatggaagtaccaaaagagcaagtttcaaactatggagtaatttctggaaattttgtagaagaaaatcttatcatggttaattctatgatagaaaaaccaagtcctgatgaagctccaagtaatcttgctatcataggaagatatattttaactcctgatatttttggaattttagaaaatactaaagcaggaaaaaatggtgaaattcaacttaccgacgcgcttttaactcaagcaaccaatggtatggttttagcttataaatttcaagggaaacgctttgattgtggaagtgtagaaggctttgtagaggcgacaaattatttttacgagaaaagtaaatgttaa

SEQ ID NO: 18424 - DNA, 1974 bp, Campylobacter jejuni
atgcttaatcaaaataatcaagagctttttaagccaagtaaagaattttctcgtaatgctcgtataaaaaatttatgtgaatactatgatttatgcgatgaagccaaggaagattttgaaggtttttggaaaagacaagcatttgagaagattgagtggttttcgcctttttcaagagtgctaaatgaggataaagctccattttataaatggtttgaaggtggaactttaaatgtaagttatcaatgtcttgatcgtcatatgaaaacaagacgcaataaagctgctttgatttttgaaggtgaaatgggggattatgaagtttatacttatagaagattattgcatgaaacttgcaaggcggccaatttgcttaaaaaattcggagtaaaaaaaggcgatagggttgtaatttatatgcctatgattccagaaacagctatagtaatgttagcttgtgcaaggattggggctattcatagtgtagtatttggagggttttctcctgaagccttaagagatagaattatagatgcaggagctaaacttgtagtaacggctgatggtgcttttcgtcgtggcaaaccttatatgttaaaacctgcagtagataaggctttaagtgaagggtgtgaaagtgtagaaaaagtacttatagttatacgcaataatgagcctatagaatatattaaaggaagggactatgtttataacgaacttgtgaaaaatgagtcttataagtgtgaacccgaaattatggatagtgaggatttgttgtttttgctttacacttcaggatcaacgggcaagccaaaaggagttatgcatgcaagtgcaggatatatactttgggcacaaatgactatggaatgggtttttgatattaaagattatgataattattggtgtagtgctgatgtgggttggattacaggacatacttatgtagtttatgggcctttagcatgtggggcaacgactataatgcatgaaggaactcctacttatccaaattctgggcgttggtggagaatgatagaagagtatcaaataagcaaattctacacttcgccaactgccataagaatgcttcatgctgatgcacctaatgagccaagaaaatatgatttaagtacgcttgaagtgcttggaacggttggagagcctatcaatcctagtgcttggaagtggttttatgatgaaatagggggaactaaaagtcctatagtcgatacttggtggcaaacagaaacaggtgggcatatgatcacgcctttaccaggcgccactcctttaaaaccaggttgtgccaccttgcctttgccagggatttttgcggaagttattgatgaagaaggcaataaaaaagatgaaggtgaagatgggttgctttgtataactaaaccttggccttcgatgattcgtggaatttggggcaatgatgaacgctatatagaaagttatttttctcaagctaaaaaagatggaaaagctgtatattttagtggcgatggtgctttttatgataaaaatggttatattaccatcacaggaagaacagatgatgtggttaatgttgcaggacatcgtataggaacggctgaaattgaaagcgctattgctaaacatccaagtgtagcagaatcagctgtagtgagtattttggatacgattaagggcgagtcattgtttgcttttgtggttttaagtcctgcatccagttgtgatcttggcggagctatagaaactttaaaagaacttaatgacattttaagagtagaaataggacctatagctaaaatagaaaaaattctttatactccaggtttgccaaaaactagaagtggtaaaataatgagaagaattttaagaactatagcaagaggcgaagaaatcaaacaggatatttcaacacttgaagattctaaagtagtagaaaccattgttaaattagctaaggcagagtttgaataa

SEQ ID NO: 18425 - DNA, 768 bp, Campylobacter jejuni
atgttcaaagtggatttaaatagtgatttaggggaaagttttggcgcctataaaatgggaatggatgaagaaattttaaaatttgtaagttcagtaaatgtcgcttgtggctttcatgcgggtgatccttgtgtgatggatgaaaccttaaatttagccaagcaaaatggtgtttgcataggagcacatccatcttatcctgatcttttgggttttggaagacgcaatatgcaaataagctttgaagaggctaaaaactatgccttgtatcaactaggagctttatttggctttgctaaggcaaaaggtatgaaaatacagcattttaaagcccatggggcgctttataatatggcagctattgatgaaaatttagccttagcactttgtgaggcagtggcgagttttgatgaaaatattatttttctagggcttagtaattctgctatgaatgaagcagctaagaaaaagggtttaagatatgctaatgaagtttttgcagatcgtgcctataatgatgatggcactttagtttcaagaaaattagaaggggcgttaatacacgatgaaaatttagctatcaaacgcgtgataaaaatgataaaagaaagcaaagttacaagcataaatggcaaagaaattgatttaaaagccgatagtatttgtgttcatggggataatgcaaaagctttagaatttgttaaaaaaatcaaagaaaatttaaaaaaagagcaaattcaaatttgtgctttggaaaattttatataa

SEQ ID NO: 18426 - DNA, 1077 bp, Campylobacter jejuni
atgcaatacaaaattttagaaaacaatcgcatcgcaagtaaaggctatgcaatgcttagcaaggatgcgaaatttacaccctttgaatttagccgccatgctattggcgataatgatattttgattaaaatcctatatgcaggcatttgtcatagcgatattcacaccgcaagaagcgagtggggagaagctacttatccttgcgtgcctgggcatgagatagcaggagaagttatcgctgtgggtaaaaatgtgagtaaatttaaagtaggagattacgcaggggttggttgtatggtaaattcatgcggtgagtgcgatgcttgcaaacgctcacaagagcagttttgcgaaaatggcaaaaccatctttacttacaatagttgtgatgtatttcatggcaatgaaaacacttatgggggctactcaaacaacatagttgtaagtgaaaaatttgccgtttgtgtgccaaaagatgcaccgatggaaaaagtcgcgcctttgctttgtgcaggaattaccacttattctccgcttaaattttcaaatatcaaagaaggctcaagcgtagcagtagcgggatttggcggacttggtatgatggcggttaaatatgctgtgaaaatgggtgcaaaggttagcgtttttgctagaaatgaaaacaaaaaagccgatgctttggctatgggtgtaagctcattttacacaagctgcgataaaaacgctgtaaaagaacgttttgatttaatcatctcaaccattccaacgccttataatcctgctatttatttggatttgcttaaatttggcggtgaaatggcgatagtgggtttgccacctcacgaagttgctccaagtatcagcgtgataacctttgtacataaggcaggtaaaaaggtttatggctcgttaattggtggtattgctgaaactcaagaaatgcttgatttttctttaaaacacggaatttatccagaaaccgagcttattaccccacaagaaatcgataaagcttatgaaaatctaacctcaggaaaggctaaatttcgctatgtcattgatatgacaaaagaataa

SEQ ID NO: 18427 - DNA, 3096 bp, Campylobacter jejuni
atgagcaaggcgaagactagtgagtttgatttagagcagtttgttatatcatcactacttgagcatgggtggtgctatgaaaagcctgtaagagccactgatgaagttttgctagaaactagccttgtaaatgcactttgtaggctaaatccacagcttgatttatcaaaagctaatgaaatttataaggagctaaaaagcaaaaatcatcttagccttttagatagcaatgaaaactttcattataagcttgtaaatggggtaaatataaacactacaaaagacggcgaaagcagagctgatatcataaatctaattgattttaataatgcaagcaacaatgaatttatagcaacaaaccagctaagcatcacagaagctaaagaaaacaaaatccccgatgtagtgctatatataaatggaattccgcttgttttaatggagctaaaaagcccaagcgatgaaaacgccacgataaactcagcttataatcaaataaacacttataaacaaacaatcccaagtatttttacatataatgctttttgtgtgataagcgatgggtattttgctagggcggggagtatttcggctgatttttcaaggtttatggcgtggaaaagtagcgatgggataaactacgctccaaacaagtctttagaaattaaaaccttaatagatggtatgctaaatccaaaaaccttgctagatatcatttgcaatttcatagtttttgaaaaagagcaaataagagatttaaatggtattttaagtataaaaactaccaaaaaaatcgcttgctatcatcaatactacgcagtaaataaagccattagtagaacaatcacagcaagtagcaaagacggagataaaaaaggtggcgtggtgtggcatacgcaaggtagtgggaagtctttgtctatggtgttttatagtgctaaagcgataaaggctttaaataatcctacgattttgcttatcacggatagaaatgatctagatgatcagctttttggtacttttgcaagttgtgcgaaccttttaagacaagagccaaaacaagcaaacgataaagagcatttaaaagagcttttaagggtagctagtggtggagtggtatttactactattcaaaaatttagtccagaaaatgataatgtatttgagtgcttatcgcttagagataatatcatcgtaattgcagatgaagcacacagaacccaatacggctttgatgcaaaagtagtagaagaaaagtcaaaaagtggcgatgtgctagggcaaaagatagtttatggtttcgcaaaatatctgcgtgatgctttgccaaatgctacttatataggatttacaggaacgccaattgaaagccatgatataaacacccctgcagtttttggaaactacatagatatatatgatatatcaagagctgttgaagatggtgctactgtgagtatatattatgaaagcagacttgccaaaatagagctaagcgaagaaggaaaaaggcttgtaaatgaattagatgaaaagcttgaaaaccaagatagccaaaaagcaaaagctactaagctagaagctttagtaggtagcacaagcagactaaaacaaatcgctaaagatatagtaaaacactttgaaacaaggtctagtaagctcggcggaaaaggtatgatagtaagtataagccgaagcgtagctataaaactatatgatgaaatcataaaaataagaccaagttggcatagcgatgagctaagtagcggggctataaaagtagtgatgacttcaagctctagcgatggggtagagtttagtaaacatcatacaagtaagattcaaaagcagtttttggcaaatcgtatgagaaatatagacgatgaattaaaactagttatagtggtggatatgtggctaactggctttgatgtgccatcgcttcatactctttatatagataagcctatgaaagggcataatctaatgcaagctatagctagagtaaatagggtttataaggataaacctagtgggcttgtggtggattatcttgggattgcaagtgatttgaaaaaagctttatcattttatagtgaaagtggtggcaagggcgatataatcactactcaagaagacgctgtaaaagtgatgatagaaaagcttgaaatcgtagaacaaatgctgccaaatgactatgaaaaatactttgaacttgatacgggggctaaacttgaatatatacttgatgtagaagagcatatattatcaaatgaagatggtaagaacagatttataaaagaatttgcagcacttgataaagcctacacgatagctatgccacacgaaaaagctttgagcataaagaataaaatcgcttttatgtatgcgataaaggctaggtttttaaagtttgctaaagaaaatgagaatgaaaatttgcttaatcaagctttgataaagcaagtagtagataaagctattgtatcatctaaagtggtggatatttttgatgctagtggtataaaaaagcctgatatatctatactttctgatgagtttttactagaagtaaagaatatgaagcgtaaaaatttagcctttgaaatgctaaaaaagatactaaatgatgagataaaagcaagagaaaagctaagcctaacaaaggctaaaaaattagcacaaatgcttagtgatgctatcaaaaaatataacaataagctaatctcatcaagcgaggcactagatgagctaataaatatgagtaaaagcatagtaagtatggaagatgaggctaagaagttaggtttaaaagactatgaatacgccttttactcagcacttgcttgtaatgatgagtatgaaaagattttaggcaatgaaaaactattagcactcgttagtgaaatactgcaaattatcaaaaacaatgtaagtatagactggatgataaaagaaaatgtaagagcaagattaagagtagctgtaaaaagagtgttaaataagtatggttatccacctgatatgcaacaacttgcaattgatggagttttagctcaagctgaaattttggctaaggaattagctaacgagtag

SEQ ID NO: 18428 - DNA, 1503 bp, Campylobacter jejuni
atggcaaagaaaaaagaaataaaactagaagatgcgttatggaaaagtgctgataaattacgcaaaaatatcgacgcagcagagtataaacacatagttttaggacttatatttttacgctacattagcgatagctttatgcaaaaatacgaagagttattaaaagaacaagatgatggagccgacccagaagatgcagatgaatacctagctgacaatatcttcttcgttccagaaaaatctcgctacaactacataagagataacgccaaaaatcccaaaataggcaaaatgctagatgaagcaatggacgagatagaaaaacacaacgatactctaaaaggagttttgccaaaagtctatgccaaagataacttagatagtaaatgcctaggcgaacttatagatcttataggaaatatcgcctttgacactggtaaaagcaccgatgttttaggtcatgtatttgagtattttttaggtgaatttgccctagctgaaggcaaacaaggcggacaattctacactccaaaatgcgtcgtagagctcctagtaactatgcttgagccatataaaggcagagtgtttgatccttgctgtggaagtggcggtatgtttgttcaaagcgaagagtttgtaaaatctcaccaaggcagactagatgacatctcaatctatggtcaagagtcaaatcagactacctacaaactcgccaaaatgaacctagccataagaaaaatcgaaagctcacaagtgatatggaacaacgaaggctcatttttaaacgacgctcataaagacttaaaagccgattttattatagccaatccaccatttaacgactcggactggagcggcgaactgttagaaaacgatggcagatggaaatacggcgtcccaccagcaagcaacgccaactacgcttggatacagcactttttatatcatctatcaccaaacggcggtgtagcgggatttgtcctagctaaaggcgcacttacaagcaacaccacaaatgaagcagccattagaaaagcacttattgaagatgatttgatagattgtatagtaaatctacccgcaaagctgtttttaaatacaggtattcctgcatcactttggtttataagacgccaaaagctaccaaagacagtcaaaaaaacgctttttatagatgcaagagatttaggaactaggataaatagacgcaacaaaaccctaaacaaagacgatataaaccaaatcgcaaatatttataaagcatggaaaaacggcactgattatgaagacataaaaggcttttgtaaaagtgttagcatagatgagataagagagctttcttatgtgcttaccccagggcgttatgtggggcttgctgatagtgatgatgagtttgattttgatactagatttaacgagcttttagcaaagttaaaatcccaaatcaaaactgagcaagagctaagtgaaattatcttaaaaaacttagagaagattaaatga

SEQ ID NO: 18429 - DNA, 180 bp, Campylobacter jejuni
atgcaaaaatttttagccattatttcggcgatcaatgatgaaagtagggttttgattttacatcatcttttaagatacaaagaactttgtgtttgtgatctacaagagctcttaaacatgggtcaatcaagactttcaagacatttaaaaattttaaaagatgcgggtttttgtatgtaa

SEQ ID NO: 18430 - DNA, 1791 bp, Campylobacter jejuni
atgcaaaatttagctttgatttctctttttagtccttttgtagcttttttgtttgcaagttgttttgctttgagtgagaaaaaacaatttgtagggataatttgttcacttttagtagctttgagtgctttttgttctttgtatttgcttttttgcaatgaagcttttaatgtgagtttgtttgaatggtttgctggagtaaattttggctttgatatagatgctatttcgcttactatgatgagtgttgtaggtattgtagctacttgtgtgcatttttatagtattttttatatggctcatgatgaaggttttaataaattttttgcttatttggggctttttgtcttttctatgctttttttagttatgagtgataatttcttaggacttttcgtaggttgggaaggcgttgggctttgctcttggttgctcataggtttttggtataaaaatgatacttattcttttgcggctaatgaagcttttattatgaatcgtattgcggatttgggtatgcttttaggaattttttggctttatttgcaagcaggaactttaaaatatgatgaagttttttccatggcacaaagcctagatcacaatgctttgatcttaatcgcaacttgtttatttataggggctatgggaaaatctgcacaatttccttttcacacttggcttgctgatgctatggcagggccaactcctgtttctgcattaatccatgcagcaaccatggtaacagcgggggtttatttggtaattcgtgcgagtacgctttatgatttagttcctgaagtttcttatattattgccttacttggagcttttgtagcgatttttgcagcctctatggctttggtggttagggatttaaaacgcattattgcttactctaccttatcgcaacttggatatatgtttgtggctgcaggacttggggcttatggtatagctttatttcacttagctacgcatgctttttttaaatctttacttttcttaggcgctggaaatgtaatgcatgctatgaatgataaattagacattaaaaaaatgggtggactttttaaacctttaaaaattacagctattttaatgtgtataggatctttagctttagcaggaatttatccttttgcaggatttttctctaaagatttgattttgggatattctttcatttcttttcaccatggtatttttttagtgctcttaatcgcagcttttttaacagcattttatagctttagacttttaatgttggtattttttacccctgcaagacatgatgaacatccacatgaagcaagtaaaatcgcacttttggctatgagtcctttgatggttttagctattattgcaggatttttcgaacatagtttttttgaatatttaagcacaaaattagtttttattgatgcgcaaaatcaaattgtaatgatttgtgcgagtgtagcagctattttgggtgcaattttggctatttttgcttataaaaattcttggtttaaggaaagtattgaagaaaataaaattcataaacttttaagtaatgattattttattcctcaattctatcatcaatttatcgtttcaaaatatgaaagcttatgtgcgattttaaagcattgtgatctttatatttttgatagaatagttgaaaaaattgctttgtattctcaaaatatttcacaaaaaatgattatgccaaacagcttaaacttaatgcttaggtttttggtggcagcttttgtgattttgttgattttagtatggatggtgtaa

SEQ ID NO: 18431 - DNA, 945 bp, Campylobacter jejuni
gtgctaaaacgcttagtttttagtattttcatagcattttttagcacttttttatgttttgttttacttcattttagtaaaggcagtatagcttatgctaatggagttaattcacaaagtaaagaatttgttcaaagaatagaacaaaatttagggcttgataagcctttgctagagcagtataaaatttggctttttaaggctttaaaaggggacttaggggtttcttttttaagtggagaaagtgttttaaagcttataaaagaaagaatttttaatacttttattttgggttttagtgccttaatgcttttatttttgctcagtgtttttttggcacttttgggatattattataaagaaagttttatagataaaatcatcacttttttagcttttaatttttttgctttacctccttttgttttggctttattgtttgttttgatttttggaattttttggaaaattttgcctgttatgggaagtagtgatataggctttgaagatgattttttaaatcgtttagagcatttgattttgcctgttttggtgctcgttttatcacatttggcgttatttttaaggattgctagaaattttatcaatgaaagtttttctcaaatttttattcaaaatttatacgctagggctttaagggagaaagatatttattttttagttttgaaatattctttaagtcctattgtggcttattttgggggaagtgctttaagttttatgatgggaacttatgtggtagaaagtgtctttgcttacaaggggcttggatctttactttttaaaagtattatttttaaagattatcctattgtgcttgcgcttatattttttagtgttttgcttgcagcattttttacatttttaagtgatattgtagctaggattttaaatcctagattaagaaggcttgattttgtttaa

SEQ ID NO: 18432 - DNA, 1536 bp, Campylobacter jejuni
gtgcttagatggtttgttttactatttttattgtttttgaatcttgaggctaaaattccaaaagatacacttattatagcagttgaaaatgaaatcgcaaggataaatcctgcttatagcgaggatcatgatgcagtgattaatcttgtattttcagggcttacgcgttttgatgaaaatatgagtttaaaacctgatttggctaagtcttgggatattagtaaagacgggcttgtttatgatatttttttaagagatgatgttttatggcatgatggagtcaaatttagtgctgatgatgtgaaatttagtatagaagcctttaaaaatcctaaaaacaattcttctatttatgtcaattttgaagacattaaaagtgtggaaattttaaatccttctcatgtaaaaatcacactctttaaaccttatcctgcatttttagatgctttaagcataggaatgcttcctaaacatttgcttgaaaatgagaatttaaacacaagctcttttaatcaaaatcctataggtacaggtccttataaatttgtaaaatggaaaaaaggtgaatatgttgaatttaaagccaatgaacatttttatcttgataaggtaaaaactccaagacttattataaaacacatttttgatccttctatagctagtgctgagcttaaaaatggcaagatagacgcagctttaatcgatgtttctttgctaaatatttttaaaaatgatgaaaattttggaattttgcgtgaaaaatcggctgattatcgggctttaatgtttaatttagataatgaatttttaaaagatctaaaagtaagacaagctttaaattacgcagtcgataaagaaagtatagtaaaaaatcttttacatgattatgcttttgtagctaatcaccctttagagcgttcttgggcaaattctaagaattttaaaatttacaaatatgatcctaaaaaagccgaggatttgcttgtgagtgcaggttttaagaaaaataaagatggaaattttgaaaaagatgggaaaattttagaatttgaaatttgggcgatgagcaatgatcctttaagggtaagtttagctggaattttgcaaagcgaatttagaaaaataggagttgtaagcaaggtggtggctaaacctgctggaagttttgattattctaaagtagatagttttttaataggctggggaagtcctttagatcctgattttcacacttttagggtatttgaaagttcgcaagatagtgctttaaatgatgagggttggaattttggacattatcatgataaaaaagtggatatagccttgcaaaaagcaagaaatacttcaaatttagaagagagaaaaaaatattataaagattttatagatgctttgtatgaaaatcctccttttattttcttagcctatcttgattttgctttagtttataataaagatttaaaaggtatcaaaacaaggactttaggtcatcatggagtgggttttacttggaatgtttatgagtggagtaaatag

SEQ ID NO: 18433 - DNA, 219 bp, Campylobacter jejuni
ttggcaaaagatgatgtaattgaaattgatggcaccgtacttgaagcattgcctaatgcaaatttcaaggttgaacttgacaacaaacatgtaattttatgtcatattgcaggaaaaatgcgtatgcattatataagaataatgccaggtgataaagtaaaagtagaacttacaccttatagccttgataaagggcgtataacttttagatataaataa

SEQ ID NO: 18434 - DNA, 114 bp, Campylobacter jejuni
atgaaagtgagaccatcggttaaaaagatgtgcgacaaatgcaaagtagttcgccgtaaaggcgtggttcgcattatttgcgaaaatccaaaacataaacaaagacaaggataa

SEQ ID NO: 18435 - DNA, 366 bp, Campylobacter jejuni
atggctcgtattgcaggtgtggatttaccaaagaaaaaaagaattgagtatggactaacctatatttatggtataggacttttcacttcaagaaaaattctagataaagtaggaatttcttatgataaaagagttcatgagttaagtgaagatgaagcagcagctatccgtaaagaaattcaagaaaactatatggttgaaggggatttgagaaaacaagttgctatggatattaaagcacttatggatttaggaagctttagaggtttaagacacagaaaaggcttaccagttcgcggacaaaaaacaaaaacaaacgcaagaactagaaaaggtaagagaaaaactgttggtgcaaaatcataa

SEQ ID NO: 18436 - DNA, 393 bp, Campylobacter jejuni
atggcaaaaagaaaaatcgtaaagaaaaaagtagttaaaaaaaatatagcaaaaggtattgtttatatcagtgcgacttttaacaatactatggttacagtaactgatgaaatgggaaatgctatcgcttggagtagtgcaggtggtttaggatttaaaggttctaaaaaatcaactccttatgcagcacaacaagcagtagaagacgctttaaataaagcaaaagaacacggaattaaagaagtaggcattaaagtacaaggaccaggaagcggtagagaaactgctgttaagagtgtaggtgctatggaaggaatcaaagtaactttcttaaaagatatcactccattagctcacaatggttgcagaccgcctaagcgtcgtcgtgtctaa

SEQ ID NO: 18437 - DNA, 627 bp, Campylobacter jejuni
atggcaagatatagaggaccagtagaaaaattagaaagacgctttggtgttagcttagcattaaaaggagaaagaagactagctggcaaaagtgcactagataaacgcccttatgcaccaggacaacacggagcaagaaaaggtaaaattagtgagtatggacttcaattaagagaaaaacaaaaagctaaatttatgtatggagtaagcgaaaagcaattccgtcgtttatttgctgaagcagcaagaagagaaggaaatacaggggtattacttatccaacttttagaacaaagattagacaatatagtatatagaatgggttttgctacaacacgtcgttttgcaagacaacttgtaacacatggacatgttttagtaaatggtaaaagagtggatattcctagctttagagtagaagcaggtgctaaaatcgaaattatcgaaaaaagcaaaaacaatcctcaaattacaagagctatcgaacttacagcacaaactggaatcgttgcttgggttgatgttgaaaaagataagagatttggaattttcacaagaaaacctgaaagagaagaagttgtcattccggttgaggaaagatttatcgttgagctttactctaaataa

SEQ ID NO: 18438 - DNA, 1014 bp, Campylobacter jejuni
atgagaaatattacaacatctgcttatacgccaacagaatttacaatagaaaacattagtgatactgtggctaaaatcagtgcttggccttttgagatcggctatggaatcaccctagcccatcctttacgccgtttactttacactagcaccataggatatgctccaactgcgattcatattgatggcgtagctcatgaatttgatagcatgcgtggtatgcttgaagatgtagcactttttatcattaatctaaaaaaactacgctttaaaattaaaggcgactcaaataaagaaatagtagaatttagctttaaaggctcaaaagaaatttacggcaaagatctaaataatgatcaagtagaagtagtaaataaagacgcctatctagcaacaatcaacgaagatgctgaactcaaattcacattgatcgttgaaaaaggtattggctatgtaccaagcgaagaaattaaagagcttataaatgatcctaaatttatagctttagatgctttctttacacctgtaagagaagcaacctatgatattgaaaaagttttatttgaagataatcctgattatgaaaaagtggttttaaccgtaacaactgatggacaaatcactccaaatgaagcttttcaaaatgctctagaagctatgtataaacaattatcagtatttgataaaattaccaatgttagaagtgtaattaaaaatcaagcaacaagcaatgaactagaaaatactaaattattgcaaaacattacagatttaaatttaagtgctagaagttataattgtcttgaaaaagcaggagtggtttacataggcgagcttgctttgatgagtgtaagtgaacttgcagggcttaaaaatttaggtaaaaaatctcttgatgaaattaaaaacatcatggaaagcataggttttcctgtgggaacttctaagcttagcgataataaagaaatacttaaaaataaaatcgcagaattaaaagcacaaaacgaaggataa

SEQ ID NO: 18439 - DNA, 354 bp, Campylobacter jejuni
atgagacataaacatggatatagaaaacttggcagaacttcatctcatcgtgctgccttattaaaaaatttaactatagctttagtaaatagcggaaaaatcgaaaccactctaccaaaagctaaagaattaagaggttatgtagaaagattgattactagagcaagacttggagattttaacgctcatagagcagtttttgcttcattacaagataaaaacgctaccaataaactagtaactgaaattgctccaaaattcaaagatcgcaatggcggatatacaagaatcatcaaaacaagaattcgccgtggtgatgccgctgaaatggctttcatcgaatttgtagcttaa

SEQ ID NO: 18440 - DNA, 900 bp, Campylobacter jejuni
atgcaagaaaacactcgtttacgcattgcgatacaaaaatcaggtagactttcaaaagaatccatagagcttctttcagaatgtggtgttaaaatgcatatccatgaacaaagcttgatcgctttttctacaaatttacccatagatattttacgcgttagagatgatgatatccctgggcttatttttgatggggttgtagatttaggcattataggggaaaatgttttagaagaaaatgaacttgaacgccagtctttaggagaaaatccaagctataagcttttaaaaaagctagattttggatattgccgtctttctcttgccttacctcaagaaaataaatttcaaaatttgaaagattttgaaggcttaaggatagctacttcttatccacaacttttaaagcgttttatgaaagaaaatgggattaattataaaaattgtacgcttacaggttctgttgaagtagcccctagggcaaatttagccgatgcgatttgcgatcttgtttcaagcggggcaactttacaagcaaacaatcttaaagaagttaaagtcatttatgaatctcgtgcttgtttgattcaaaaagaaaatgctttaagtaaagaaaaacaagccttagtggataaaattatgttgcgtgtagcaggagtaatgcaagcaagagaatctaaatacattatgcttcatgctccaaaagaaaagcttgataaaattcaagccctacttccaggagttgaaagaccgactatcttacctttagcacacgatgaaaaaaatgtagctttacatatggtaagtaaagaaaatcttttttgggaaaccatggaggctttaaaagaagaaggtgcgagttcgattttagttctgcctatagaaaaaatgttaaagtga

SEQ ID NO: 18441 - DNA, 1116 bp, Campylobacter jejuni
atgagtgaaatgagcctcattatgttagcagctggaaattctactcgttttaatacaaaggtaaaaaaacaatttttacgacttggaaatgaccctctttggctttatgcaacaaaaaatttaagctctttttatccttttaaaaaaatagttgttacctctagtaatatcacttatatgaaaaaatttaccaaaaactatgaattcatagaaggtggtgataccagagcagaatccttaaaaaaagccttagagctcatagatagcgaatttgttatggtaagtgatgtagcaagggtattggtgagtaaaaatttgtttgatcgtttgattgaaaatttagataaagcagattgtattacccctgctttaaaagttgcagatacaacactttttgacaatgaagccttgcaaagagaaaaaatcaaactcattcaaaccccgcaaatttctaaaaccaaattgcttaaaaaagccttggatcaaaacctagaatttacagatgatagcacagctatagctgcaatgggtggaaaaatttggtttgttgaaggtgaagaaaatgcaagaaaactaacctttaaagaagatcttaaaaaacttgatttgcctacacctagctttgaaatttttactggcaatggttttgatgtgcatgaatttggagagaatcgccctttgcttttagcaggagtgcaaattcatcctactatggggcttaaagcacacagcgatggagatgttttagctcactctttaaccgatgcgattttaggtgctgcaggacttggagatataggagagctttatcctgatactgatatgaaatttaaaaatgccaactccatggagcttttaaaacaagcttatgataaagtcagagaaataggttttgaactcattaatatagacatttgcgtcatggcacaaagccctaaacttaaagactttaaacaagctatgcaaagcaatatagctcatactttagatttagatgaatttagaatcaatgttaaagccacaacaacggaaaaattgggttttattggaagaaaagaaggtatggcggtgcttagtagtgtaaatttaaaatattttgattggacaagattatga

SEQ ID NO: 18442 - DNA, 264 bp, Campylobacter jejuni
atggcaaaccataaatctgctgaaaaaagagcaagacaaactattaaaaaaacagaaagaaatagattctatagaacaagacttaaaaatataactaaagccgtaagagaagctgcagcaaatggaaataaaaatgctgctaatgaagctttaaaagtagctaataaaagcattcatgctatggtaagtcgcggtttcattaaaaaacaaactgcttctcgccgtgtaagccgcttagcccttttagtaaataaaatcgcataa

SEQ ID NO: 18443 - DNA, 1068 bp, Campylobacter jejuni
atgttagctagcaaactagatcctttttttaaacgctttgaagagttaaattctcttcttagcagttctgatatactcaacgatatcagtaaaatgactacactctctaaagaacaaaaaaatttagaacctatcgttttaaaagctaaagagtatttaaaaactttagacaatatagaagaaaataaagctttgctaaacgatccagaacttggggaacttgcaaaagaagaactaaaaactttagaagaattaaaaccgaaacttgaagaagagattaaaattttacttcttcctaaagatcccaatgatgaaagaaatatttttcttgaaattcgtgcaggcacaggtggcgatgaggcatctttatttgtgggagatcttgtaaaagcttatgcaagatatgctgaaaatcgcggctataaacttgagattgtaagctctagtgaaggaagcgtaggtggatttaaagaaatcatcatgcttgttaaaggaacaggggcttattcaagacttaaatatgaaggtggaacgcaccgtgttcaaagagttcctcaaacagaatcccaaggacgcgtgcatacttctgctatcaccgtggcagtaatgccagaagttgatgatatagaaatcgaaatcaatccaaacgatcttaaagttgatgttatgcgatcttcaggacatggtggacaaagtgtaaatactactgattcagctgttcgtatcactcatatccctacaggtatagttgtagtcaatcaagatggaaaaagccaacacaaaaataaagaaagtgcgatgaaagtcctaaaagcaaggctttatgaaatgcaagagagtgaaagactagcaaaagaaagtgaagcaagaaaatcacaagtaggaagcggagatagaagcgaacgcattcgcacttacaattttccacaaaatcgtatcagcgatcatagaataaatcttactttatatcgcttagatgccattatgcaagatgggctttttgatgaaatcatagaacctttaatcactcatcatcaagcccaagctttacaagaacaaaatttataa

SEQ ID NO: 18444 - DNA, 987 bp, Campylobacter jejuni
atgttgaatttaaatacgcattctaaaattttagtgattatagggcttttggtagcttatataatcgcttcttttacagcactttgcttaggagatgagaatttaaatccaaaagagcttttttcatatatctttagccaagatgaaattttaagacaaataatcatagatggacgcttaccacggattataatggcgattttaatcggtatgcttttagctagtagtggggctatcactcaaaatgtattttcaaatcctatagctgatccttatatcataggtatagcttctgcggcaacctttggagcggttttggcgtatttgttaaaattgaatgattattattatggaattttaggttttgtttgctctgccttttttgccctaggagtttttaaaatttcttctaaagcttctatagcaactttactcattatcggcatagcagcttcatcttttttaggggcttttacttcttttttcacttatcttataggcgaggattcttttaaaatagtcgcttggcttatgggaaatataggcaatgcttcttggtttcgtgtgggaattttaatcttgcctttaattttttgtttgttttatttttacgctcataaaaacgaattaaacatacttttaagcggagatgatgaagctagaaatctaggggtaaatgctcaaaaattaaagataaatttactcattgtctcatccttagctgtatcttttgcggttgcttttagcggacttataggctttgttggactcatcattcctcatactataagacttttgcttaaaaattataataatgccttagttatccctttatgtacagcatttggaggattatttttacttatttgtgatactttagcaagaactcttttagctcctgtgcaaattccgattggaattttaactgcattttttggagctcctatttttttatacttagctttaagcgctaggagatttttataa

SEQ ID NO: 18445 - DNA, 807 bp, Campylobacter jejuni
atgaaaaaaattttaattattatgagtttgtttttaatcgcactaaatgcaaaagaacgccttgtagtgcttgatcctgcaagcatagaaaccctttttatgcttaaggctgaagatcaaatcgtaggcattgctactttacaacactcaaatatttatcctaaagatcaaacctcaaaacttacaagcgtaggcactttttcaaatccttcgcttgaaaaaatagtagcattaaaaccaagtttggtgattttaagctcttattctttaaatttagaagaaggacttaaaaattttggtatcaaaagtatcaatttaaaagccgagcgtttagaagatataacaaaaaatatcacaaccttaggccaaatcaccaaaaaagaaaaagaagcagagcttttaaaacaagaatttaaccaaaaatttaaaaaattaagcgataaacccctaaataaaagtgcgatttatctttattctagcaaccctttaatggcctttaatgataattctttaatagctgatattttaagacttatagggattaaaaatttaagcccgcaaagtcaaatttcaagacctgttatatcagcagaatacatactgaaacaaaatccagacatactcattcttggaattaatgctaaaaacaatcttttagatacaaatgctttattgaaaaataccaaagcagttaaaacaggaagtatttattttaacaaagatacacctatattattacgtcttagtcctaagataatagatagaattcaagaatttaaaacaaagctagaaaataacaatttttaa

SEQ ID NO: 18446 - DNA, 1011 bp, Campylobacter jejuni
atgtcaaattttaaaatacaaggtaggcaaatgaaagaattttatatgaatttagctttaaatgaggcttggaaatatcagtttttaacctatccaaatccggctgtaggctgtgtaatcttagataaaaatgaaaaaattttagccataaaagctcatgaaaaagctggattagctcatgcggaacttaatgccatagctcatgcttttaaaagcttaagacctgaaatttcattgcccaaagaagcaaacgccttacatgagtttatttgcaaaaaccatcaaggtgtatttaaagatagcatagcttttgtaacgcttgagccttgctctcatcaaggaaaaacacctccttgtgcaaaactctttagcgagctaggttttaaaaaaattttcatcagcgttaaagatgaaaataaaatcgcaagcggtggggctgaatttttaaaaaaacaaggtatagaggttgaatttgacatacttaaagaagaaggaaaaaaacttttaaaaccttttttaaaatggcaaaaagggcaatttaaactttttaaattagccctttctatgaacggctcaccttttggcaaaatcgtaagcaatgagctaagtcgcacttatgcacatgaaattagagcggtgattgatttgcttgtagtcggtggagaaaccataagaaaagattgccctatattagatgctaggctttgcaaagcaaaagcgcctaatctttgtatcttaagccgtcaaaatatagataattttgataaaaatatccctttatttaaagttccaaaccgccaaatttatacccaaattccaagtgaagctaaatttttaatgtatgagggtggagaaaattttctcaaaatctttaaagatgaaatagatatgtttttgattttccaaagttcaagtttaaatgatgaaaaaaatgttacaatacctttaaatttcaagccactttacaggaattttttagggagtgatacttatggcatttatgaactttag

SEQ ID NO: 18447 - DNA, 1365 bp, Campylobacter jejuni
atgagtaatttaagcatttttaaaataggtgttggcccttcttcttctcatactttagggcctatgcttgctggaaatttattttgtaaaaaagttgctaaaaagcttgatgaaattgatagagttgaggttactctttatggttctttgtcgttaacaggcaaaggacacttgagtgataaggctgtgatttgggggttaaatggcttagaagctaaaaatttaagtgcggcaatacaagatgaagtaaataaaaatgctattgaaaatgctcaaattgatttttgtggcgagaaaaaacttagttttaattatgaaaaagatttgatattttctaaagattttttacctttacatgagaatggtatgaaaattaaagcttatgattgtaaaggtgggttagttgatgaggaaacttattattctgtaggtggaggctttgttttaacagctgcggaattagaaaaaaaaggtaaaaattctaaccaaaataaaaagaaaaaactagatatagagcttaataacgctaaagaagctttagagctttgcgataaaagagattgggatttggcagagctttcttatcgttatgaattgcaatttcacactaaagaggaaatttgtgcttattgtcttgaaatttgggaagtgatgcaagaagtgtattataatggtacgcacccgaatgaagattatttgcctggaaaacttcatttaaagcgtagagctaaaggacttaaagaaagagtagcgatgacagctgatcctatgggtattatcgattttatttctttatatgctattgcgattgctgaagaaaatgctagcggagcaaaagtcgtaaccgcaccaacaaatggagcatgtgctgttatccctgctgttatgctttatcttaaaaatcatactataggttttagtgatgaaaaggttatagagtttttattaacagcaatgcttataggttctttttataagaaaaatgcaagtattagcggagcagaagcaggttgtcaagcagaaattggtagtgctagttctatggcagctgcggctatggcaacagttttaggagctaatgcttttaaagcatgtaatgctgctgaaatggcaatggaacatcatctaggtctaacttgcgatccagttgcaggacttgtgcaaattccttgcatagaaagaaatgcctttggagccattaaggccataagtgctgctagaatggcaatgacacgcaaatccactcctatggtaagccttgatgaggttatagaaaccatgtatgaaacaggaaaagatatgaattataaatataaagaaacttctttaggtggtcttgctacaaatttaaaaacagtatgctaa

SEQ ID NO: 18448 - DNA, 1251 bp, Campylobacter jejuni
atgaatactcctaaatggactagtcacgatacaaggtgggttttatctctttttggaacagctattggagccggcgtacttttgttgcctattagtgctgggcttggtggattgatacctttgttagttatacttgttttagcttttcctatgacttacttagctcatagaaatttatgtcgctttgtgctttcaagttctaatccaaaagatgatattacttttgttgcagaaagttattttggcaagggcggtggatttttaattacacttttgtatttttttgctattttgcctattttattggtttatagtgctaatcttacaacaactttgcttgagttcttaatcaatcagttcaatttcaatgcagatcttactcatgctgctcgttggtgggtgagttttttgattgttggagttttggttttgatttctattcttggtgaaaatgttgtaacaaaagcaatgagttttcttgtttttccttttattatatttttatttattttttcattgcttttaattccacaatggaatttatcgttatttgcaaatgttgatttttccgtaatttcaacaagtaatttttgggttactttatggcttgttattcctgtgatggtatttagttttaatcactctcctatcatttcttcacttgcttgttattgtaaaaaagaatatggtggttatgctgaacctcgcgctagaaaaattatttctttggcaattattcttatggtttttgttgtaatgttttttgttttttcttgtgctttaacctttacaccagaagattttgcatcagcaaaagatcaaaatatcaatattcttacttttatagcaaataaatttcctgaagtttctttactagcttatgttggacctattgttgcacttgtggctattagcaaaagtttcttagggcattatcttggttctcaagaaggcttaaatggtattttatataaagcaagtaatggtagaattcaaggtaaattcgctcaaactttaacagcgatcattacctttgctatcgcgtggcttgttgcgtataaaaatccaagtgttataggaattatcgaggctattggtggtcctgttttggctattttgcttttcttaatgccgctttattgtatttatcgttttgatattttggcaaggtttcgtaataaatttttagatctttttgttttggtaatggggatagttgcaatttctgctgcaattcatgatcttttataa

SEQ ID NO: 18449 - DNA, 684 bp, Campylobacter jejuni
atgaaaactttatttttaaatcataaataccaagcttcttatataacttttatagtctttatacctttactttttgtcatttttcactcaaatgacttttttaaaatggaaattaaaaatgaagattctttttctttagcaataaaacaatttacccaaactaatccaacaaatgagactaaaccaacagaatccattatagaacctatcaaaccaaaacctcagccaaaagttattaaaaaaactcctgaaaaaatgcaaaaaaagataaaaaaaacacctccacacccaataccaaataaaaccccaatagcaccaactcaagaagttaaaacttttgcaaaaacaactgatacaaatgtcaaacctaagatcactcaattaacacaaggaaaagataatcaccctgtattaaaagaaatccaaaaagctatacaacaagcacaattttatccaaggcaagcaaaaaaaatgcgtatgcaaggaactgtaaaagtagaatttttatggaaagaaaacaaaactttagcagatttaaaaatcatagaaatctcgggatatgatttgttagataaaagtgctttagaaagcataagaaaagcttctttaaattttccacactataatggagatttaagaattacactacctattatatatgattttaaaaccctaagaggataa

SEQ ID NO: 18450 - DNA, 870 bp, Campylobacter jejuni
atgaaaatcgatacttctgctagtttaacccattctttaactaataatgttgataaaaaagagcttagcgtattaaaaaaagaagatcaagataaaattcccgtgcaagatctttcgagtttaaatagcgatggtgttaaggttgtttttgaaaataagcaaggtgaacttatagctttaaatttaagcgatgaaaattatagtagtttacaaaaaaatttcggttcttatatgaattatgttgctagaaatgatggtagtataaggcttaatggcgaagtaaatcaatttgtttcaaattggtttgaaagtgtaaaagataattttggttctttaaattcaaatttaaataataaacaacaaagtgtaaaattaaattttaatacaagtacccttcaacaaagtatgcaaaatttaggctttaaaacaagcgatgaaaaaatatctgatgatgcaaatatagaagaaaaattaaatttttttattgataaagatgtaaataaagatggtaaagttgatgatagtgatgttaaagaacctagcatgagagaaattttaagcgacattaaagaagcatcaggtggtggagctaatgctatgaaaaccatagatccgcaaaaaatcaataaaaaagatgataaggaaaataatatcaaagaaaaagaagacgaagatttgcttcaaaaagctcaagaaaaaggtttaagtgctttaagtgctgatgagcaggcaaagcttgaggctagcaatcctgaagaatttgaaaaactgaagcaaaaatctttgcaagaattaagtcagaatttaagtaaagattttcaaaataaaattgaaaatcaagaagcacaaattgtagataagagagtgtag

SEQ ID NO: 18451 - DNA, 1089 bp, Campylobacter jejuni
gtgaatacctttggtacgagattgaaatttacaagttttggtgagtctcatggtgtggctgttggatgtattattgatggaatgcctgctggggttaaatttgatgaagaatttttgcaaaatgagcttgataaacgcaaaggcggaagtaaatttgcaacaccaagaaaagaaagcgataaagctcaggttttaagcggggtttttgaaggatatacaacgggtcatcccatagctatagtagtttttaatgaaaatgctcattctaaagattatgataatttaaaagatctatttcgtcctgctcatgcggattttacttatttttataaatatggcataagagatcataggggtgggggtagatcaagcgctagggaaagtgttgctagagtggctggtggtgcagttgcagcgatgcttttgcgtgaatttgatatttgtgttcaaagtggtgtttttggagtaggaacttttgtatcaaatttgaaagaagaagaatttgattttgaatttgctaagaaaagtgaaattttttgccttgatccaaaactagaaagtgactttaaaaatgaaattttaaatgctagaaattcaaaagatagcgtaggcgctgctgtttttacaaaagttagtggtatgcttataggacttggagaagttctttatgataagttagactctaaattagctcatgctttaatgggaattaatgctgttaaagcagttgaaataggcgaaggtattaatgcaagcaaaatgcgcggatcgtgtaataatgatgctttaaaagatggcaagtttttaagcaatcatagcggaggaattttaggaggaatttcaaatggagaaaatcttattttaaaaacttattttaaacctactccttctatttttgccaagcaagaaagtatagataaatttggcaataatttgaaatttgaactcaaaggtaggcatgatccttgtgtaggtgttagaggaagtgttgtagctagtgctatggtacgtttagttttggctgattgtttgcttttgaatgcgagtgcgaatttaaacaatttaaaaaatgcttatggattaaaataa

SEQ ID NO: 18452 - DNA, 1818 bp, Campylobacter jejuni
atgataactaaagaaagtatagaaaatttatcccaaagacttaatattgttgatattatagaaaattatattgaagtaaaaaaacaaggctctagttttgtatgtatctgtccttttcatgcagataaaaacccgtctatgcatatcaatcctatcaaaggtttttatcattgttttgcctgcaaggctggtggagatgcttttaaatttgtaatggattatgaaaaattaagttttgctgatgcagttgaaaaagttgcaagccttagtaattttactttgagttatacaaaagaaaaacaagaaaataaaaaagagctaaagtctatactaccaagcttaaatgcgtattttaaagataatctcaaacaccacaaagaagttttaacctatctttaccagagagctttaaatgacaaagatatagccaaattcgaattaggttttgcaggagcaagtgaagatagtataagattattgcaaaatcaaaaaattcctttagaagatgctatgagtgttggagctttaaaaaaagatgaaaataatgaattttacgcaagttttatatggcgtatcacctttccaatctacgatcataaagacttattggtagggtttggagggcgcactttaaatcccaatgtaccggcaaagtatgtaaattcaccccaaaatatactttttgataaaagtagaattttttatgcttttaacatcgctaaagaaaatatagccaaaaaaaaagaaataatagtatgtgaaggctacatggatgcaatagcttttcacaaagcagggtttaacaatgctgtagcagttcttggaacagcattaaccgaacatcatctacccttaatccgccgttatgatgcaaaagtgattttatgttttgacaatgatgaagcaggattaaaagctgcgacacgatctgcatttttattaagcacaaacaaaatagacggtaaagtggcaattttgcaaggcggaaaagatcctgctgagctcgtagcaaaaaatgaaagcacaaaactccataatatactcgatgaaggaatagagcttggtgaattttatatcagacgcttaatatccactcattccataatttctgctcttgataaacaaaaagctttagaaactatacaaaaattcacctttaatcttgaacctttagtggcaaattcttacactagtctagtttcaaatttattaaaagtggatgaaaaatttattgtcttatcacaaaattcaaaaaaaaccatacaaacccctttaatttctcaaaataaatacaattttcctaaagaaaaaattcacattgcagaattagaacttatagcttttttaaaacagcatccagatatatgtaacgattttaagcaaattagtgatagtgtttgttttaaacataagattttattggataaaattttagaaaaaaaaggttatgaagatagtgatattagagaatttgaaagtaaaaatattcgaaaaaatttaaactatagcgaattcttgttaggtatttgcaaggttaatttagcttttttaaacaatgtaaaaattaaaaattctacactcgcattaaaaaaacaactttttacgcttattgataaaaatttaaatcttttaattaaaaatttaaataccgcagaattaaataattttttaaaagaatatttaagcttcttaaaatatgaaaaaaacgaagaaattctgcaacaatcatttagaaacttaaatggaatttttggtaacaaaaactttacagcttatgatttaggatttagcatacaaaataatgacgaacctttttaa

SEQ ID NO: 18453 - DNA, 1284 bp, Campylobacter jejuni
gtgaaattaaaacttgaaaattcattcattacagataacaccttagagtgtgaaaaagaatgcttttttttgcaaaccacacaaaatgctaaatttcacgctcaagccttagaaaaaggtgcaaaaatcattgatgtaaatgagtgtaaaaaacttttaaaaatcgatgaaaagattcaaatcataggaatcacaggaaccaatggcaaaaccacaaccgcagcagcgatttattctatcttattggatttaggttataagtgtgggctttgtgggacaagaggagcttttatcaacgatgaacaaatcgatgaaaaatccttaaccacctcccctattcttaaaaccttagaatacctacaaatagccactcaaaaaaaatgtgattttttcatcatggaagtaagctcacacgcactcgttcaaaaccgcatcgaaggcttaaattttgctgctaaaatttttaccaatatcactcaagatcatttagattttcacggtacttttgaaaattataaagaagcaaaagaacttttttttaccgatgagagtttaaaatttatcaacaaagatgctttggctattaaatttaatgtgcgtaatgcttttacttatggcatagaaaatcctgctttatatcaaatcaaagcttattctttagaagaaggcattagtactattgtaacaaataaaaatcaaacttttcacatagactcgcccttgctaggactttttaatctttacaatcttctagttgctagtgcttgtgtgaatgaactcgtaaagcctgatttaaaagacttggaaaaagctatcagtggatttggcggggtttgtggcagggtagaacaagtagcaaaaggtgtgattgtagattttgctcatacgcctgatggcattgaaaaagtgcttgacactcttaaaaataaaaaactcatcgttgtttttggagcaggtggagatagagataaaaccaaacgccctttaatgggaaaaatcgtcgaacattttgcaaaaattgctatcattacaagtgacaatccacgcagcgaagaaccaaaaaccatcatggaagaaattttatcaggctttactaaaaaagaaaaagttttaatgatagaagatagaaaagaagctataaaaaaagctttagaactaaaagaaaatgacgatttagtcgttattttaggcaaaggtgatgaaactactcaagaaattaaagggataaaatatccttttagtgataaagtagttgttaatgaaattttaaaaaatcaaggataa

SEQ ID NO: 18454 - DNA, 312 bp, Campylobacter jejuni
atgtttgaaaatatggatttttctaaaatgggagaacttttaaatcaagttcaagaaaaagcaaaaaatatagaactagaacttgcaaatcgtgaatttagtgccaaaagcggagcaggacttgttaaagtaagtgccaatggaaagggtgaaattatcgatgttagcattgatgattctttacttgaagataaagaatccttgcaaattttacttatttctgcaattaatgatgttttggctatggttgcacaaaatcgttcaagtatggcgaatgatgttttaggcggttttggaggtatgaaattatga

SEQ ID NO: 18455 - DNA, 846 bp, Campylobacter jejuni
gtgaatttaaaagaactttttatccatcacttagaaaaaaatctacccaaagttgaaagctttcatccttttttcaatgaagctttagcacttatgttaaaagcaggaggaaagcattttcgcgcacaattgcttttaagcgtagtgcaaagcaataaacctgaacttttaaatcaagctttagatgtagctttagctttggaatttatccatacttattcactcatacacgatgatttacccgctatggataatgcggactttagacgaggaattccaaccttacacaaaagctacgatgaaactacagccatcttagtaggtgatgctttaaataccgaagcttttttagttctaagtcatgctcatttaaaagatgaaatcaaaatcaaactcatcaaaacccttgcctttaatgcaggacttaatggaatggtcataggacaagctattgattgtttttttgaagacaaaagactgagtttaaatgaacttgagtttttgcatacacataaaaccgcaagattgatcgccgcagctttaaaaatgggttgtgaaatttgcgaacttaacaacgaagaaagcaatcaaatttacaaacttggtttaaaactaggactgatttttcaaatcaatgatgatattatcgatgtaactacaagtcaagaacaaagcggaaagcctaccaacaacgatattcataaaaattcttttgtcaatttgcttggacttgaacaagccataaaaacaaaagaaaatcttcttagtgaatgcgaacaagacttagaaaaacttaatgaaaaactcgcacaaatgatacaaaatttaataattcaatacttataa

SEQ ID NO: 18456 - DNA, 1899 bp, Campylobacter jejuni
atgaacattcaaattttacaagaacaggcaaatactctaagatttttaagtgctgatatggtgcaaaaagcaaactcaggacacccaggtgcacctttgggcttagcagatattttaagtgttttaagttatcatttaaaacacaatcccaaaaatccaacttggctaaaccgagatagacttgtattttcaggcggacatgcaagtgctttgctttatagttttttacatttaagcggctatgacttaagcttagaagatcttaaaaatttccgccaacttcattctaaaacccctggacaccctgaaatttcaactcttggagtagaaatcgctacaggccctttaggacaaggcgttgccaatgctgtaggctttgctatggcagcaaaaaaagcacaaaatttgctaggcagtgatttaatcgatcataaaatttattgtctttgcggagatggggatttacaagaaggcatttcttatgaagcttgttctttagcaggacttcacaaacttgataacttcatacttatttatgatagcaacaatatctctatagaaggcgatgtaggtttagcctttaacgaaaatgtaaaaatgcgttttgaagcacaaggatttgaagttttaagtataaatggacacgattatgaagaaatcaataaagccttagaacaagctaaaaaatccacaaaaccttgtcttatcatcgcaaaaacaactatagcaaagggtgcaggagagcttgaaggcagtcataaaagccatggcgcacctttgggtgaagaagtgattaaaaaagccaaagaacaagcaggctttgatccaaatatcagttttcatatcccacaagcaagcaaaatccgctttgaaagtgctgtagaacttggggatttagaagaagcaaaatggaaagataagcttgaaaaaagtgctaaaaaagaacttttagaaaggctattaaatcctgattttaacaagatagcttatcctgattttaaaggaaaagatcttgctacaagagatagtaatggtgaaattttaaatgttttagctaaaaatttagaaggatttttaggtggaagtgcagacttaggcccttcgaataaaacagaacttcacagtatgggagactttgtagaaggtaaaaatatccattttggtatcagagaacacgctatggcagcgattaacaatgcttttgcaagatatggaattttcttaccattttcggcaacttttttcatctttagcgagtacttaaaacctgccgcaagaatagcagctctaatgaaaatcaaacattttttcattttcacacacgatagcataggcgtgggcgaagatggaccaacacaccaacctatagaacaacttagcacttttagagctatgccaaattttttaacctttagacctgctgatggggtggaaaatgtcaaagcttggcaaatagccctaaatgctgatattccgagtgcttttgtgctttcacgccaaaaactcaaagctctaaatgaacctgtttttggagatgtaaaaaacggagcgtatttactcaaagaaagcaaagaggctaaatttacacttctagcaagtggaagtgaagtttggctttgtctagaaagtgcaaacgaacttgaaaaacaaggttttgcttgtaatgttgtttccatgccttgttttgaactttttgaaaaacaagataaagcttatcaagaaagattgttaaaaggtgaagttataggtgttgaagcagcacattctaatgaactttataaattttgccataaagtatatggcatagaaagttttggagaaagtggtaaagacaaagatgtgtttgaacgctttggatttagcgtttcaaagcttgtaaattttatccttagcaaataa

SEQ ID NO: 18457 - DNA, 753 bp, Campylobacter jejuni
gtgaaaataggtgtatttgatagcggagtaggagggcttagtgttttaaaatctctctatgaagctaggctttttgatgaaattatctattatggagataccgcaagagttccttatggagtgaaagataaagatactattataaagttctgtcttgaagcattggatttttttgaacaatttcaaattgatatgcttatcattgcatgtaatactgctagtgcttatgctttagatgctttaagagcaaaagcacattttccagtatatggcgtaattgatgcaggggttgaagcaacgataaaagctttgcatgataaaaataaagaaattttagtcattgcgacaaaagcaaccattaaatcagaagaatatcaaaagcgtttgttatctcaaggatatacaaatataaatgctttagctacagggctttttgtgcctatggttgaagaaggtatttttgaaggagattttttgcaaagtgctatggaatattattttaaaaatatcacaactccagatgctttgatactcgcttgcactcatttccctttactaggacgttctttaagtaagtattttggtgataaaacaaaattaattcattcaggagatgctatagttgaatttcttaaagaaagagaaaatatagatttgaaaaatcataaagcaaaattacatttttatgcttcaagcgatgttgaatctttaaaaaatactgctaaaatttggctaaatttattaaggaaataa

SEQ ID NO: 18458 - DNA, 2091 bp, Campylobacter jejuni
atgaaaatttttaaaattatatttttaattataagtatttttttatcaagctcagcttttgctagggtagatgattatattaatgaagcaaatcttatcaaagatatgctaaaacaaagcatagaaacttataaaaagggcgataatctaggcgccaaaaagcttagcgaagatgcgtattttcaacattttgaaaatatggaaggctcaataggaagaaacataggaagaaaagctatcactatggagcgtaaatttgtaaatttgcgtcgcatgtataaagatgaagctcctttgacacaaattaatgctttaattgatagtctttattatgatcttgatgaagtagctccgattttacaaaatggatatcgtttaaaagcagaagcaagcgatataaactatgataaggctaaagctgaaaaatcaagcctagaagccaatgccaaacgcgaagctgatgcagaagctttaatcgcacaaatgatgggtgtagataaaaaagatttagcacaaagctctttaaccacccaagctcctatacctataaataatgatacaagcaaacttacagatgataatgcaagcactgatttacaagctgccgctgcaatggacgtaagattgcaatttatactagataatatctctaccaaattttcacaggcagctaatgcttttaaagaaaaaaactaccaaactagtaaagattttttaaatgatgccttatttagtgattatcgcaataccaaagtagaaattttagtaaataaatttaccaaagcaggaaacgatcaaaaaattcaacaagccatacgcacccttatacgccaaatcaacgatgcaaaaatagatgaaaaaggcttaagagatggcttagataacatagaagaacaaatttttgatgttttcttacaaattccaaattcagaactttcaagtttgcaaatttcaggctttaatgatgaaacaaaaggcaaagattatgccaaagtttctaatgatatcaaacttgctttagatgaaattttaaaaaattatgatgggtttagtgcttctatagtagatgatttacaaggaatttatctagatatttttgaagcaagcggtatggaaaataaaatcggtgctgtagatagcggcttaaaacttaaaatagaaagtttattttccaaaagcgtagctcttatcaaagcaagtacagataaaaaagagcttgaagctacttttaatgacttagaacaactcatagccagcagcgtggataaaattcaagattctactccttattcgctgtttatatgggctttaggtattattttgcgtgaaggcttggaagctttgattatcgttgtagccattgtttcttatcttgtgcaaagtggcaacaaaaatcgtttaaatatcgcctatagtgctctttttacaggagtaattttaagttttgttaccgcttttggagtttcttggctatttaaagaaaatgcaggacaaagtagagagcttatagagggtattaccatgcttatagccgtattactactcttttatgtgggcttttggctactttcaaacgcacaaaataaaaaatggacaagctttatcaaacaaggtgctatagatgctatatcaaacaatagtgcaaaaaccctttggattaccgtatttttagctgtttatagagaaggtgcagaaactgtgcttttttatcaagccttgctttttgatgctaaaacaagcactgattttggtgctgtttttggcggacttggacttggaattttaatacttattgttttatattttcttttaaaagcaggagccattcgcatacctgtaaaacaatttttctatatcacttcttacattattttttacatggtttttgtttttacaggcaaaggcatagccgaactcatagaaggaaaagtcatcattcctagtcttatacctatgaattttgaaccgattttatggcttggaatttatccttactatgaaactttaatccctcaatttatagttttaattatgctaattattggcattttaataacaaaacaaatttcaaaaaaaggagtaaaatcatga

SEQ ID NO: 18459 - DNA, 1404 bp, Campylobacter jejuni
atgagtatatattttgtgcattttcttatcagtgttttaccgctaagtattttaatggcctttatcactcctaataaaaaatatatttttaaaagttttttcgtagtttttttgggctttttatttggatattttgctttttttatcgcagcacaatttttaaaaaccgaaaatttaatctttaattttgattttgtttttataggtttattgctagtaagctttatattttatttttggaaaaaaattgaaattttaaattttattttattgggaattttaagtttttgcaccgctttgcattattattttttaagtcaagatttccctatttttactagctctttaatcgatagcgaaggtataagttctttaggttttattgctttagccttgcttgtttgtattttgattttcttctttttaaaatggcaaaaaaattttaatcaaaaaacaagctttatgctgtttttactgcttatccttatagaaagcgataaagctctagccaatatcttgcttactttaatgcgaaattccatcatagaaactcatgcttttttggtgagttttgtaggaaaaagtaattattttggtgtttttggaatttatgtttatttaattttcatcacttttttagcattcttaagcttaaaaattcgcaaaaaaaatataagcaaaaaacaaattttagatataaattatcgcaaaaacgaagctaaaacaagtcttattaatcgctatttttccagtgtttttatctcctgtgttgtaagtttttgcattgttttatacttttttatggtaagctctaagcctttaaccatagatgagcctaaagaaattttacccgataagaatggcaaatttatctttgatatagctcttttaagggacaacaaactccaccgctttgcttatatcagtgctgaaggcaaagtgataaggttttttcttatcaacaaaagagaagataaggattctcctgtagctgtttttgatgcttgtatgatttgtggagatatgggctatatcaaaaaagatggacaactcatttgcatttcttgcaatgtgcgtattttcttgccaagtgtaggtaaaagcgggggttgcaatcctatcccactcaaatacgaatacgatggtaacaaaatcaccatagatgttaaagatgtaatagcaggatctaattattttagtcaaatcaaagaaattgaagtgcaagatcctgtatcaaaaacaaaggttataaacacccaagctcctttttcttatagctataaaggggttacttattatttttcaaatcaaaacaactatgaagaatttaaaaaagatcctacaaaatatgtagaagaaaacgaagcccaatttttaatccaaaggagaaatgatgttggctaa

SEQ ID NO: 18460 - DNA, 1245 bp, Campylobacter jejuni
atgttagtaattgaagatgttagagcctatgaagttcttgatagtagaggaaatccaaccgtaaaagccgaagttacgctaagcgatggaagtgtaggtgcggccatagttccaagtggtgcaagtacaggttcaaaagaagccttagaattgcgtgataatgatgaaagatttggcggaaaaggcgttttaaaagctgttgcaaatgtcaatgagaccattgcagatgaaattttaggactagatgcttttaatcaaactcaacttgatgatactttgcgtgagctcgatggaacaaataattactcaaatttaggtgcaaatgcgactttaggcgtatctatggcaacagctcgtgcggctgcagctgctttgggaatgcctttatatcgctacttaggtggtgcaaatgcgagcattttacccgtgccaatgtgtaatatcataaatggcggtgctcatgcaaacaacaatgtagattttcaagaatttatgatcatgccttttggttttactagctttaaagaagctttgcgttcagtttgtgaaatttatgcgatattaaaaaaagaactcgcaaattctggacattctacggctttaggtgatgaaggcggttttgctccaaatttagctaacaacacagaacctatcgatcttttaatgacttgtatcaaaaaagcaggttatgaaaatcgtgtaaaaattgctcttgatgtggcaagtacagaatttttcaaagatggtaaataccacatggaaggcaaggctttttcaagcgaggctttgatcgaacgctatgtagaactttgtgcaaaatatccaatttgcagtatcgaagatggcttagctgaaaatgactttgaaggctggatcaagctgactgaaaaattaggcaataaaattcagcttgtaggcgatgatttgtttgtgaccaatgaagatattttaagagaaggtatcatcaaaaaaatggcaaatgctgtacttatcaaaccaaatcaaatcggaactattacccaaactatgagaactgtgcgtttagcgcaaagaaataactataaatgtgtgatgagtcatagaagcggcgaaagtgaagatgcttttatagcggattttgctgtggctttaaatacaggacaaattaaaacaggagccctagcaagaggcgaaagaaccgcaaaatacaatcgcttacttgaaattgaatttgaaagcgatgaatatttaggagaaaagctctga

SEQ ID NO: 18461 - DNA, 1032 bp, Campylobacter jejuni
atggatgataataaaagaaaatctctagacgctgccctaaaaagtttagataaaacctttggaaaaggcactattttaagactaggggataaagaagtcgagcaaatcgatagcataggcacaggttcagttgggcttgatcttgctttaggtataggcggtgttccaaaaggaagaattatagaaatttatggacctgaaagttcaggtaaaaccactctaactttacatattatcgcagaatgccaaaaagcaggtggagtttgtgcttttatcgatgcagaacatgcgcttgatgtaaaatatgctaaaaatttgggtgtaaatacagatgatttgtatgtttctcagcctgattttggagaacaagccttagaaattgtagaaactatagcaagaagtggcgcagtagatcttatcgtagtagatagcgttgcagcacttactccaaaagcagaaattgaaggcgatatgggcgatcaacatgtaggacttcaagcaagacttatgtctcaagctctaagaaaacttacaggtatagttcataaaatgaataccacagtaatttttatcaaccaaattcgtatgaaaatcggtgctatgggttatggtactcctgaaaccacaacaggtggaaatgcattaaaattttatgcttctgtgcgtttagatgttagaaaagtagcaaccttaaaacaaaacgaagaacctataggaaaccgcgttaaagtaaaagtagttaaaaataaagttgctcctccattcagacaagctgaatttgatgtgatgtttggagagggtttaagccgtgaaggtgaattgatcgattatggtgtaaaacttgatatcgtagataaaagtggtgcgtggttttcttataaagataaaaaacttggacaaggtagagaaaattcaaaagctttcttaaaagaaaaccctgaaattgcagatgaaatcacaaaagcaattcaaaattctatgggaatagaaggtatgatcagcggtagcgaagatgacgaaggagaagaataa

SEQ ID NO: 18462 - DNA, 777 bp, Campylobacter jejuni
atgatcattgattttaaaaaatactcttctgtgcgtataggaaatgaatttgaagttttagttttggatcaaatttgtgattttgatggttttttaataggtggtgcaaacaaccttttagttagtccaaaacctaaaaatataggaattttaggagatggttttaattttatacaaattttagatcggaataaagattttatacatcttcgcataggctgcaaaacaaaatcaagtaaaatgtatcgctttgccaaagaaaacaatcttaagggttttgagtatttaagcaaaattcctggtacacttggcgggcttttgaaaatgaatgcaggacttaaaggagagtgtatcagtcaaaatttaatcaaaattgctacttctcaaggcgaaattctaagagcaaatataaattttgattatcgtttttgtcctttaaatacgcattttttttgggctgaatttaaactaaactttggctttgatacccttaaagatgaagctttaaaaaatgcaagaagcaaccaacctagtggagcaagctttggctctatctttaaaaatccgaaaaacgactttgcaggacgtttaatcgaagctgtaggacttaaaggatttagcaagggagatgctatgttaagcgataaacacgcaaattttttaattaataaaaaaaatgcaagttttgaagatgcgttttttcttatcgaattggctagaaaaaaagtctttgaagaatttggcacaaacttagaaaatgaagtgattataatctaa

SEQ ID NO: 18463 - DNA, 2787 bp, Campylobacter jejuni
ttttttgaaggaaagaataccaacatacaaacctttaataacagtggttttattagtgcaaataagggtgtagatataggcaacataggaaccataaaaaattttaataacaacggaactatacaaggctcagaagtgggagtggctataaatacaaaaatagatacttttactaataatggttttattaattcccctggtagtggacaatggaataatggtatatggataagtagcaatgctaccatagaaaagcttgttaacaatggcacaataaaaggaggacattctgctataatggtaacatctcagcatataaaaactgttgaaaatacaggaattatacatgctgaaggagaatggggttctagtatattattagaatatggtggttttatagagcatataatcaatactggaaccataagtaataataatgttggtataggttcagcttatggagtatttggaacacttaccataaaagatggaggtatggtttatggaaaatactcggcaataggagtgggtcgatcgcaaactctaggagatttatatatagatggacgttcaaataatggcacagtaagtggaatttatagtgaagaacatggaattttattagagaataactcacgaactcaaaaaatagaacttaaaaatggcggcattataaaaggtaatatcgatggtataagattgataaactcggcctctttaagtggagaaatgattttatctggcgaaggttctagggtagaaggtggaagaggtgttggtatattgaatcgaagtggaaaaatagaaggctctataaaagtagaagatggagcaactgttacggctacttcgaatcgagccatagctaactctggctcaggaagtataacaggtggtattactgttagtgggaaaaacactaaacttgaaggaaatataatcaatacaggtaatgcttctataggtagtgatatcaagatagaaggtggagctaaggtagaaggtggtcttgttaatcaaggtaatggaagtatctcaggaagtgttcaagtaagtggtggtagtagtattgattccattaccaatgagggtaatggagctatttctggttcaattactgtatataaagatagtaaacttgattctatcactaacacttctacatcatctacaggtataagtggttctattactaacaatagtgataataaacttgaaatttctaattcaggtaatatcggtggtaagattgaaagtacaggtagtgctgatatggtgattagcaatagtaatggtggaactattagtggcggtattagttcttcaggaagtggaagcactagtatttccaattcacaaggctcaaccataaataacggcatcactgtttcaggatcagcacaagttgaaatctccaatcaaggctcagtaggtaaagatgaaaatggtaatacagtaactaacaatggtagtggtagtgttggaatcaaagattggcttgtttctacagataaaaacacaggtaaattaaacactgtggttataggtggaagtagagcttttaatgtaaaagtagaaaacatcaccgtagatcaaagcaatgttgatcttgaagagctaaacgatataaacaacatcatctcaggtgttaatcaaaacaatattggcaatataggaaccaatggaagtggagaaatatctttaagctttgatccaataacaggaaagcttactacagattttaatcttaatgcttccatatcaggtgcaacctttagatctttaatctctactacttcaagaagatcaacctttatagataatgttatgggtaattctatgcaaagctttgctttagcttcttcaagtaaatctcaaagcatcgctatgtctgaaaagggtaatttatatgcagatgcaagtgattatataaagagtgatttaaataatggaagctatggttctaataaagaacattctttattcatccttccttatacttcttcacagaatgttgaactttctttaaatgaagaaagtaaaggacacactaaaggaaccattataggttattctactttaaaagacagtggaatatatggtgtgtatgcaggttatgaagatacaaaaatgggttcaacttattttgatattaataatagaacctattatgcaggtttaaaatactttaataccttatttactacagaaaaaggtcaagaagtttatatcaaagctcaaggtaaagctgctttgattaaaaatgatttaactgaaaaaataggaaataatgaagctaaagctgaacctaattcttatgcttatggagtcaatacagccttaggtatgaattttatttctaataaagatatattctctcctgaaataggtcttgcttatgaaggaggttatactgaagctttttctatgaaagacaccataggacaagcaacagttaaaggtggagaaagaacctatgcaaactatttaaatcttttctctactaaaacaagtcttacttggtttagagattggttgcctaatttaaaaacttcagtagaacttggagctaagtttaatatcaatcctaaagtagaagctgaggctagatttggtaatataaaagtaagtgatgagtttgatttaccaagagtacaaaaatttgtaagcacttcttttatcgttcctgttaatgaagctttctattttagtttaaactataatggaatgtttgataaagatggcaatacccatacaggatttgctcagtttaattatctttggtaa

SEQ ID NO: 18464 - DNA, 1269 bp, Campylobacter jejuni
atgtcaaattccgttactataaccgataatagaaatggaaaaagctatgaatttcctatatatgacggtacaactgggccaagcgttgtagatatgtcaagtttttataaacaaacaggaatgttttcttatgatgagggcttgacttctacagctacttgtaaatcaaaaatcacttatattgatggagaaaatggaattttaatgcaccgtggctatcctatagagtggcttgctgaaaacaaactttatttagatgtggttcatcttttactttataaagaattacctgatgctacgcgtcttgaagcgtttcgttatgaaatgaaaaaacgttcttttatccatgaaggtatgcaccgtctttttgattctttccctgataatgctcatcctatggcagttttacaaggtgctgtttcatcgcttagtgctttttatcctgatcatttaaacatgaatgtaaaagaagaatatatggaaatggcagctagaatagtagctaaaatccctactatagtggccaccgcttatagatataaacacggctttcctatggcttatccaaatttagatcgtggttttacagaaaatttcttatatatgttaagaacctatccttacgatcatgtagagcttaaacctatagaagtaaaagcacttgatacagtttttatgcttcatgcagatcatgagcaaaatgcttcaacttcaacagttcgtgctgtgggttcaactcatgctcatccttatgcctgtatagcagcaggtattggtgcgctttggggtcatgcacatggtggagctaatgaaggtgttattagaatgcttgagcaaataggtagtgttgatagggtagatgaattcatcaaaagagctaaggataaaaacgatcctttccgcttgatgggctttgggcatagggtttataaaaattttgatcctagagcaaaagtactgaaaaagcttcgtgatcaacttattgatgagttgggtattgataccaatcttattaaagtagcaacgcgtatagaagagattgctttaagcgatgattattttgttcaaagagggttatatccgaatgttgattttcatagtggacttattttaaaagccttaggtattccaaatgaaatgtttgctactttatttgttatagggcgcaccccaggatggatagctcagtggatagaacaaaaagagcaagaaagtcttaaaatagtccgtccaagacaactttatttgggtgaaactagtaaaatttaa

SEQ ID NO: 18465 - DNA, 837 bp, Campylobacter jejuni
atgcaaatcatgctttgtgctatttcaaatatagcgagtggaaattgttcagaagactgtaaatactgcacccaaagcgctcatgtaaaaacagatattcaaaaatatcgtcgtaaagaactttcacaaatcgttttagaagcaaaaatggcaaagaaaaatgaagccttgggtttttgtttggttacagcaggacttgggcttgatgatgaaaagcttgagtatgtttgcgaagctgctaaggccgtgcaaaaagaagtgcctaacttgcttttaattgcctgtaatggcatggcaagcgtggaacaactcaaagaacttaaaaaagcaggaattttttcttataatcacaatcttgaaagttctaaggaattttttccacaaatttgcaccacgcatacttgggaaagtagatttcaaaccaatttaaacgctaaagaagcagggcttatgctttgttgtggtggaatctatggtatgggtgagagtgaagaagataggctaagttttagaaaatctttgcaagaattacaacctttttcaacgcctattaatttttttatagcaaatgaaaatttaaaactacaagttccaagacttagcgctgatgaagccttaaaaattgttcgtgataccaaagaggctttaccgcaaagcgtggtaatggtagcaggtgggcgtgaagtggtattacgagaaagacaatatgaaatttttcaagcaggtgctggggctattgttataggggattatttaaccactaaaggtgaagaaccaagtcaagatataataaaattaaaagaaatgggatttacttttgcatcagagtgtcattga

SEQ ID NO: 18466 - DNA, 2103 bp, Campylobacter jejuni
atgaagaaaaatttaatcatagtagaatctcctgcaaaagctaaaaccataggaaattttttgggaaaagattatgaagttatcgcttctaaaggacatattagagatttgcctaaatcaagctttgggattaaaatagaagatgatgaatttatccctgagtatagaatcacaagtgatcatagcgccttagttaaagaacttaaaagcaaagccaaagatgccaaagaagtctatcttgcaacggatgaagatagagaaggagaggctatagcctatcatattgcaaaagctataggaaaagatgaaaacaccttaccacgcattgtttttcatgaaatcactaaaagcgctatagaaaatgctttaaaaaatccaagaaaattaaacatgcactctgtaaatgctcagcaaaccagacgtcttttagatcgcattgtagggtataagctcagccctttattaggacaaaaaattcaaagaggacttagtgctgggcgtgttcaaagtgcggctttaaagatcatagtcgatcgtgaaaaagaaattcgtgcctttgtacccctagaatactttagtattgatatgatttttcaaaaagatttagatgcagaactagttgagtttgataaagccaagatagaaaaacttaccattaccaacaaagatcgtgctaaacttatactagaagcttgtaaaaatgaagtttatagtataagtgacattgaaagcaaagaaagaaaaatcgctccgccgcctccttttatgacttcaactttacaacaaagtgccagcaatcgccttggttttaaccctaaaaaaaccatgatgatagctcaaaagctctatgaaggagtaaatacccatgaaggcgtgatgggggttattacttatatgagaaccgatagtttaaatttagccaaagaagcagtagaaaatgcaagaaaattcatacaagcaaattttggcaaggactatcttccaagcaaagcaaatgtatatactacaaagactaaaggcgctcaagaagctcatgaagctatacgccctacaaatttaagttttactccagaaattgcggctaaatttttagacaaagatgagttaaaactttacacacttatttacaatcgctttttagcctgtcagatgagtcctgctatctctcaaactcaaaatgtatttgtaaaaaatgatagagtagtttttaaaataagcggtagaaaaatcctttttgatggatattataaagtttatggtgatatggataaggataaaattttgccaaattttaaaataggccaaaatttaaaagtgcaaaatttagaaatgaactcacattttaccgaaccaccttcaaggtattcagaagcaggacttgtaaaaaaacttgaaagtttaggcataggtcgcccttctacttatgcaccaaccatttctatacttacaagccgtgattatgtaacaatagataaaaaacaactcattcctagcgatgttgcttttaatgtaaccgaagtgcttgagaaaaattttagcgatatagtagatagtaaatttacttcaaaccttgaaaataccctagatgaaatcgcagaagataaggcagattggcaagaaactttaaaagaattttactatccttttatgagaaaaatcgaagaaggaaaaacaaaaatagctagtcaaaaaactgtcacaaaactaggcgaaagttgtcctgattgtggcggagagcttgctattagaaaagggcgttttggagaatttgtagcgtgtttaaatttcccaaaatgcaagtattcaagaaatttaaaaagtgaaagcaaaaacgaaagcgaaaatacagccgcaaaagctaaagctaatggtacaggcattacttgtccaagttgtcaaaaaggtgaaatcgtagaacgcttttcaaaacgtggtaaattttatggctgtagtgcttatccaaaatgcaattttataagcaaatacaaaccaagtgaagaaaaatgcgaagagtgtggcgaaactttagtgataaaagagcttaaaaaaggtacattcttagaatgtttaaaatgtaaaatcaaaaaagaaatgaaggattag

SEQ ID NO: 18467 - DNA, 1266 bp, Campylobacter jejuni
atgaatagagcattgacgaataagattttaatcaccttagcatttttatttgcttatagggttctggcttatgtgccagttcctggcgtcaatgctgatgtgattgcggaattttttaataacaatcaaaacaatgctttgggtttatttaatgtttttagtggtggagcggctgaacgcttttctatcatttctttaggtattatgccttatattactgcttctattattatggagcttcttgcagcaacttttccaaatattggtaagatgaaaaaagagcgtgatagtatgcaaaaatatatgcaaattatccgttatgcgactattgtgattactttggttcaaagtataggcgttgctataggtttgcaaagcttgcacggtcgtggtggtgcaggggctataatggtggaagatttaaatatgtttatcgcactttgtgctatttctatgcttgctggaactatgcttttaatgtggcttggcgaacaaatcacacaaagaggtataggaaatggtatttctttaatcatttttgcaggtattgtttcaggtattccaagagcgatttcaggaactgtaggacaaatcaattcaggcgagatgaatttcttaaccgcttttgcaatttttgctttgattttaatcaccataggggtgattatttatatagaacttggagaaagaagaattcctatttcttattctcgtaaagttgtaatgcaaaatcaaaacaaacgcattatgaattatattcctattaaactcaatcttagtggggttattccaccgatttttgctagtgcgattttgatgtttccaacaacaattttacaaactagtacaaatccttatctacaagccattaatgactttttaaatccaaatggttatttgtttcatgttctaactttcttgtttgtaattttctttgcttatttttatgcttctatcgtatttaacgctaaagacatagcagaaaatttgaaaaaacaaggcggttttatccctggaattcgtccaggtgaaggaacttcaagttatcttaacgaagtggcttctcgtttaactttatcaggttctatttatttagggcttgttgcaaccttaccttgggttttggtgaaatttatgggtgtgccttttcattttggcggcacttctgtacttattgtagttcaagtagcacttgatacgatgagaaaaattgaagctcaaatttatatgagtaaataccaaactttaagtgcggtaggtttgtaa

SEQ ID NO: 18468 - DNA, 393 bp, Campylobacter jejuni
atgaatttaacaaaagcagcgggttcaacgcataaaactaaaagaattggccgtggtcaaggttctggcatgggtaagactgctactaaagggggtaaaggtcaaactgctagaaaaggttataatgaaaaaagaggttttgaagggggtcaacaaccacttcaaagaagactaccaaaagtaggttttacttctaaaattcaaaaaccttatgtgatcaatgttgaaaaaatcacagctgtaaaagagcttagtgaaattacatttgagagcattaaaagtgttcacaaaatttcaaaatctgtgaataaaatcaaattaattggtgcaagtgcaaaagacttagtatcaaaaatcaaagacgagaatattagtgtcaccggatcaaaataa

SEQ ID NO: 18469 - DNA, 444 bp, Campylobacter jejuni
atggaaaaatataatagagaagaatttgaagaagtaatcgtcgatatcggcagagttactaaggttgttaaaggtggtagaagatttagatttactgctttagttatcgttggaaaccgcaaaggtttagtaggtgttggttatggtaaggctaaggaagttccagatgccatccgtaaagctgttgacgatgcgtttaaaaatatcgttgaagttaaaactaaaggctcaactatcgctcacgatgtagaggtgaaatacaacgcaagtagaattttacttaaaccagctagcgaaggtacaggagttatcgcaggtggttctacacgccctatcgtggaacttgcaggtattaaagacatcttaaccaagtctttgggttcaaataattcagctaatgtggttcgtgctacaatcaaagctttaacaatgttaaaaggataa

SEQ ID NO: 18470 - DNA, 357 bp, Campylobacter jejuni
atgagagcaaatgtattaaaaagaaaactaactttaagaatcaaaagaaaaaaaagaattagagcgaaaatttcaggttgtgaaaattttccaagaatttctgtatttaaatcaaacagaactctatatatccaagcgattgatgatgtaaaagctgtaactttagcagcagttgatggacgcaaacttggcgttaaagcaaataaagaaggtgctaaaaaaatcgctgctgaatttgctaaaactttaaaagttaaaaagatagaacaagctgtttttgatagaaatggttatgtatatcatggtgttatcgcagcattggctgaatctttaagagaaaatggcattaggctataa

SEQ ID NO: 18471 - DNA, 537 bp, Campylobacter jejuni
atgtctcgtataggtaaacaaccgattgctattccagcaggagtagaagtaaaattagaaggaaatttgcttaaatttaaaaaaggaaatttggcaaaagaacttgatactaaagcaaatgtaaatgttgagattaaagataataatattcttttttctccaaaaggtgaagacagacaaagtagagcttattggggaacttacagagctttagcttacaatatcgttgtaggtttaactcaaggtttttcaaaaactcttgaaatcaatggagttggttataaggcagctttaaaaggtaaagttttagaactaagccttggtttttctcatcctattaattatgatattccagaaggaattgaaattgtagtggataaaaatactattgcagttaaaggaagtgataaacaagttgtaggtcaagttgctgctcaaattcgtgaatttagaccgccagagccatataaaggaaaaggcgttaagtattctgatgaacgcattatccgcaaagctggtaagacatctaagaagtaa

SEQ ID NO: 18472 - DNA, 396 bp, Campylobacter jejuni
atgataaatgatattatttcagattcactcactcgtatcagaaatgcaggaatgagaaagcttgaaacaaccaagcttttacattctaaagttgtagaagctttagttggaatttttcaagctaaaggctatattgagagttttaatgttattgaagaagataaaaagaaatttatcaatgtagttttaaaatacgatgaaaaaggtaagagtgttatcaatgagcttaaaagaatttctaagcctggtcgtcgtgtttataaaggtaaagatgaaatcaagcgttttaaaaatggttatggtactatcgtagttagcacaagtcatggtgttttagctaatgatgaagcttataaagcaggtgttggcggcgaaattttatgtaccatttggtaa

SEQ ID NO: 18473 - DNA, 186 bp, Campylobacter jejuni
atggctaaaaaatcaatgattgcaaaagcggcacgcaagcctaaatttaaggttagagcttatacaagatgccaaatttgtgggcgtccgcattcggtttatagagattttggaatttgcagagtttgcttaagaaaaatgggcaatgaaggtttgattccaggtcttaagaaagcaagttggtaa

SEQ ID NO: 18474 - DNA, 546 bp, Campylobacter jejuni
atgatgagattaaaagaaaaatataatcaaagcattaaacctgcattggttaaagaatttgatattaaaaatcctatgcttatccctgtgatcgaaaaagtagttatcagcgtaggtgctggtgagttggctaaagatcaaaaagtattgcaaaatgttgcagatactatttctttaattgcaggacaaaaggctgtgattactaaagctaaaaaatcagttgcaggatttaaagttcgcgaaggttttcctgtaggtgtaatggtaactttaagaaaagaaaatatgtatgcttttcttgataaattaatttctattgctttgccaagggtgaaagactttagaggtttaagtagagatggttttgatggacgcggaaactataacttcggtcttgatgagcagttgatgttcccagaagtggagtatgataaaattttaagaactcatggtatgaacatttctatagttacaacagcacaaaatgacaaacaggcacaaaagttattagaacttatcggtgtgccatttacaaaaggaaagtaa

SEQ ID NO: 18475 - DNA, 234 bp, Campylobacter jejuni
atggcggttaaattaaaaatcaaaaaaggtgatagcgttaaggttatcacaggcgatgataaaggtaaaacaggtaaagttttagcggtatatccaaaaacacttaaagtggtagttgaaggatgtaaaatcgctaaaaaagctattaagccgagtgagaaaaacccaaatggtggttttatcaataaagaaatgccaatggatatttccaatgtggcaaaagttcaggagtaa

SEQ ID NO: 18476 - DNA, 369 bp, Campylobacter jejuni
atgattcaaagttttacaagacttgcagttgctgataatagcggtgcaaaagaattaatgtgtatcaaggttttagggggtagcaaaagaagatacgctaccgtaggtgatgtaatcgttgcatctgttaaaaaagctttaccaaatggaaaagttaaaaaaggtcaagtggtaaaagcggttatcgttagaactaaaaaagaaattcatagagataatggttctttgattcgttttgatgaaaatgctgcggttattcttgacaacaaaagagagcctatcggaactcgtatctttgggccagtgggcagagaagttagatatggtggctttatgaaaatcgtttcactagcaccggaggtattataa

SEQ ID NO: 18477 - DNA, 252 bp, Campylobacter jejuni
atggcatttaaaagagaaattcaaggcgttgttgttaaaatcgctggtgaaaaaaccgcaagtgttttggttgaaagaaaagtggttcatccaagatatagaaaaattgttaaacgctttaaaaaatatctaattcatgatgagagaaatgaagttaaagtgggtgatactgttgttgcagtagaatgcagaccactttcaaaaagaaaatcatttcgcttaaaatctgtattagctacaggagttgagtaa

SEQ ID NO: 18478 - DNA, 186 bp, Campylobacter jejuni
atgaaatatactgagattaaagataaaacagcagctgagcttgcaacaatgctaaaagaaaaaaaggtgcttttattcactttaaaacaaaagctaaaaacaatgcaacttactaatccaaaagagattagccaagtaaaaaaagacattgctagaataaatacagcaattaacgctttaagataa

SEQ ID NO: 18479 - DNA, 426 bp, Campylobacter jejuni
atgttaatgccaaaaagaactaaatatcgcaaaatgatgaaagggcgtaacagaggttatgctaatcgtggaacagaatttacttttggtgaatttgcattaaaagcaactgaagcaggacgcattaactcacgccaaatcgaagcagcgcgtatcgctttaactcgttttgttaaaagacaaggaaaaacttggattagagtttttccagataagcctttgacaaaaaaacctttagaaactcgtatgggtaaaggtaaaggtgctgttgaggaatgggtaatgaatatcaagccaggtcgtatcatttatgaaatggcaggagtaagcgaagaaatggcaagagaagcattgactttagctatgcataaacttccatttaaaactaagtttgttacaagagagagccaaaatgaaatatactga

SEQ ID NO: 18480 - DNA, 702 bp, Campylobacter jejuni
atgggacaaaaagttaatccaattggtctaagactaggaatcaatagaaactgggaatcaagatggtttccaactaaagcaaatttagtagaaaatatcggtgaagattacaaaatcagagctttcttaaaaagaaaactttattacgcaggaattagccaaattttagtagaaagaactgctaaaaaacttcgcgttactgtagttgctgcaagaccaggtatcatcatcggtaaaaaaggtagtgatgttgataatttaagaaaagaattgcaagatttaatcggtaaagatgtaaatatcaatatcaaagaagaaagaaaagcaggagcttcagctcaacttgctgctgaaagtgttgcaactcaacttgaaaaaagaattgcttttagaagagcaatgaaaaaagtaatccaaggtgcgcaaaaagcaggtgctaaaggaattaaagtttcagtttccggtcgtttaggcggtgctgaaatggcaagaacagaatggtatcttgaaggacgcgttccacttcatactttaagagcaaaaatcgattatggttttgcagaagctagaactacttatggaaacataggagttaaagtatggatctttaaaggtgaagtattgcacaaaggtatgcaacctgaaaaaactgaagaaagtgctccagctaaaaagccaagacgcacaagaaggggtaaataa

SEQ ID NO: 18481 - DNA, 426 bp, Campylobacter jejuni
atgagtaaagcattaattaaattcataagattatctccaactaaagcaagattgattgctagagaagttcaggggatgaatgcagaattagctatggctagtttaaaatttatgccaaataaaggtgcaaaatacattgcaaacgcaatttcaagcgcagtagcaaatggtggctttgaagcaaacgaagtgattgtaaaaagttgtcgtgttgacgcagctgcggtattaaaaagatttagaccaagagctagaggaagtgcaagtcgtattagaaaaccaacttcacatattttagtagaagtggcaaaagcggaagtgaaatctgaagagaaaaaaacagtagctaaaaaaactactacaacaaaagctccagctaaaaaaacaacaagcactaaaaaagcaacagtgaaaaaggaaagctaa

SEQ ID NO: 18482 - DNA, 282 bp, Campylobacter jejuni
atggctagatcactaaaaaaaggtccttttgttgatgatcatgtaatgaaaaaagtcatcgctgctaaaaaggctaatgataataaaccaattaaaacttggtcaagaagaagcacaattactcctgatatgataggacttacatttaatgttcataatggcaaaagcttcattccggtttatattactgaaaatcacatcggttataaacttggtgaatttgctccaacacgcacatttaaagggcataaaggctctgtgcaaaagaaaattggtaagtaa

SEQ ID NO: 18483 - DNA, 831 bp, Campylobacter jejuni
atggcaattaaaacttataaaccatatactccaagtagaagatatatcacaggtttaagttctgaagatattacagctaaaccaagtgtacgctcactacttgttaaacttccagcacacgcgggtcgtaacagctatggaagaattacaagtcgtcataaagaagcgggtgctaaaaaactttacagaattattgattttaaacgtcgtaaattcggtatagaaggcaaagtagaagcaatcgagtatgatccatacagaaattgtagaattgctttgattgcttataaagatggggaaaaaagatatattcttcaaccacgtggattaagcgttggtgatatcgttgcagctgctgaaagcggacttgatattaaaccaggtaatgcaatgaaacttaaaaacattcctgtgggtactattgttcataatgttgagttaaaaccaggtaaaggcggtcaaatgattcgttctgcgggtgcttatgcacaacttatgggtaaagaagaaaaatatgttattttaagacttgcaagtggcgaaatgagacaagttttagctgaatgtatggcaagtatcggcgaagttggaaatgaagaatgggctaatgtaactatcggtaaagcaggtagaaatcgccatagaggtatccgcccgcaaactcgtggttctgcaatgaacccagtagatcacccgcacggtgggggtgaaggtaagaaaaattcaggccgtcatccagtaactccgtggggtaaaccaaccaaaggtgcgaaaactcgtcgtaaaaaggctagcgataagctaataatttcaagaagaaaaggaaagtaa

SEQ ID NO: 18484 - DNA, 282 bp, Campylobacter jejuni
atggcagatattactgatataaagactatactttacacagaaaaaagtttgaatttgcaagagcaaggtgtcgtagttattcaaacttcgccaaaaatgactaaaacaggcttaaaagcggttttaaaagagtattttggtgtaactccaaaaagcatcaattccttaagaatggatggaaaaattaagcgttttagaggtcgtttaggtcaaagaaacaattacaaaaaattctatgttaagctacctgaaggtgttagcttagaaaatacggaggcttaa

SEQ ID NO: 18485 - DNA, 615 bp, Campylobacter jejuni
atgagtaaagtagttgttttaaatgataaattagaaaaagcaggtgaacttgatttaccttcaaaatatgcggaagtaaatccacacaatctttacttgtatgtaaaatcttaccttgcaagtttaagagcaaatacagctcatactaaaggtagaagtgatgtaagtggtggtggtaaaaaaccttggagacaaaaaggtcgtggcggtgctagagcgggttcaacaagaactaacgtttgggtaggcggtgcggttgcttttggtccaacaaatgaaagaaactacttccaaaaagtaaataaaaaacaaaaaagattggcgcttgaaagagctttagcagataaagcagctaaaggtgtgttatttactgctgattctttggctattgaaagtggtaaaacaaaagatgcaaacgctgtgattaaaaaacttggcgtcaaagatgctttaatcgttaaagatttactagatgaaaaaacacttttagcttacagaaatttagcaaattgctatgtagttgatgtaactgaagtaaatgcttatttagtatctgtatttaatgctgttattatggaaaaatcagtgttagaatctattacaaaagagggataa

SEQ ID NO: 18486 - DNA, 576 bp, Campylobacter jejuni
atggaatatattgtagaaaaaattggaatgagcagaacaattactaatccaagtatcgctgtaactttactaagagttgtaaatgcaaaagtatgtgaagttgaaggcggaaaggctttagtagcatatccaaaaggtaaagcaagtaataaatgtgtcgcaggacaacaaaaaaaatacaatctttctgcagaatacaatagatttgcgactttagaagtagcaaatactgaagcaggagatttagatgaaactccattaaatgaagcaaaaattttaaaagtaagctttaacactaaaggtagaggttatagcggtgttatgaaaagacataacttcgcagggggtccagcaagtcacggttcgagatttcatagacgccatggatctattggtaatagagaatggccaggtcgtgttcaaccaggtatgaaaatggcaggacactatggaaatactaaagtgaccattaaaaacgaagttgtatcttatgatgctgaaaataaaattttagtagttaaaggtgcagtaccaggttataatggtgccatgggtaaaataaggattgcaaaatga

SEQ ID NO: 18487 - DNA, 312 bp, Campylobacter jejuni
atggaaagaattaggcttaagctaaaagcttatgaccatcgagtactagacagaacagttgcagcaatcgtagaagctgttaaaagaacaggtgcggatattagaggtccgataccaatgcctactaaaatcaaacgctatacagttttaaaatctccacacattaacaaagattctcgtgagcagtttgaaataagaattcacgcgcgtatgctagatatagtagcagcgactccagatacagttgattctttaacgaagcttgatttagcgccagaagtaagcgttgaagtaagagctatgggtaagtaa

SEQ ID NO: 18488 - DNA, 762 bp, Campylobacter jejuni
atgagaattaataaatttatatcccataacacccgctattcacgccgtgaagccgatgaacttatcaaacaaggcttagtaaaaataaacaacaaaattgcccttttaagcgatgaagttaaatttgatgataaagtttttgttaaaggtaaaagagtacaaaaaagaacgcaatttagcgtgataatctaccataaacaaaaaggtgaaattgtcagtaaaaaagacgatcgtggaagaaaaactatatatgataccttgccaagacaatttagtacttggcttagcgtaggtaggctggattatgcaagtgaaggcttacttttgcttacagattctcctgtgattgccgatgctttaatgcatagcgatttagaaagagaatactaccttaaagttaaaggcacggtgagcaaacaagtcatcgaagccatgcaaaatggacttgagattaaaaatgaaaaaaaaggcgcacatgcaaaaactaaaattacctctatgagttttgctccttttatagactttgaaatttttggatcaagtggaggctatactaagcttagagtggttataaatgaaggtaaaaatagagagcttagacgcttttttggacattttgatcttgaagtcatggatcttaagcgtgttgcttttggggctttagatcttggtatgttgaaggcgggaaaacatcgttatttagaaaatggcgaatatgaaaaattaagagattttttaaaatttaatgaaataagatattga

SEQ ID NO: 18489 - DNA, 1995 bp, Campylobacter jejuni
atgaatatggacgaaaacaaagagataaataaaaacgaacaaaatccgaactcaaattcaaaaaacaataaacgctataaatataaaaatcgtagaaaaaaattagctgattctttgcaaaatgaaaatgatactccaaaaattgatcaaaattccaacaaggaaaattctgaaaactcagaaaataaaactgagaaaaaaaagaagaaaaatcgcaatcttccttcaaaactcacaggtaatgaagattggcaaatcgctcttgcagaatgcatagaagctaaccgtatttcacatgaaaaccgcttacaccctttaaaatataataattctagcgagcataaaatccgcatcactcctttaggaggtttaggagaaattggtggaaatatcagtgtttttgaaaccaataaagatgcaattatagtagatataggtatgagttttcctgatggaactatgcatggggtagatattatcatccctgattttgactatgtaagaaaaattaaagataaaattcgtggtatagtgatcactcatgcacacgaagatcatatcggtgcagtgccttatttctttaaagaattccaatttcctatctacgctacacctttggctttaggaatgatttcaaacaaatttgaagaacatggcttaaaagcagaacgcaaatggtttcgccctgtagaaaaacgccgtgtttatgagataggcgaatttgatatagagtggatccacatcacgcattctatcattgatgcttcagcgcttgcgatcaaaacaaaagcaggaacgattatccacacaggtgattttaaaattgatcaaactccaatcgatggctatccaacagacttaggacgtttggcacattatggagaagaaggggttttatgtcttttaagcgatagtacaaattcgtacaaagaaggttatacaaaaagtgaaagctccgtagggccaacttttgatcaaatctttgcacgtaccaaaggcagggtgatcatgagtacttttagttctaatatccaccgcgtttatcaagctatcacttatggtttaaaatacggtagaaaagtttgtgtgatcggtcgttctatggaaagaaatctttataccactatggaattaggctacatcaaacttgatagaaaaattttcatcgatgctgatgaagtaagcaaatataaagacaatgaagtgcttatcgtaactacaggaagtcaaggcgaaaccatgagtgcgctttatagaatggcaactgatgagcataaatttataaaaatcaaacctacagatcaagtgattatttcagctaaagccataccaggaaatgaagcaagtgtttctgcggtgcttgactatcttttaaaagcaggagctaaagtagcgtatcaagaatttagtgaaattcatgtaagcggacacgctagtatagaagagcaaaagcttatgctaacccttactaagcctaaatttttcctaccagttcatggagaatacaatcacatcaccaaacacaaagaaacagcgatgaagtgcggtatccctgaaagaaatatttatcttatgagtgatggcgatcaagtagaactttgccaaaaatatgtcaaacgcataaaaaccgtaaaaacaggtaaagtttttgtagataatcaaatcaacaaacaaatcgccgatgatgtagttatagatcgccaaaaacttgcagatagtggtatagtagttattatcgcacaaattgacaaagctacaaaaacactgatcaacaaaccaagagtatttagctatgggctagtagctgacaaacacgatcatgcttttagcaaagatatggctgaagttttaggacaatttttcatcaatgttaaagatgaagtactcaatgatccaagatttttagaaaatcaaatccgccaagttttaagaaaacacatctttagaaagattaaaaaatacccaaccatagttccaactatttttgtaatgtaa

SEQ ID NO: 18490 - DNA, 801 bp, Campylobacter jejuni
atggttaaagcaaaaaaacaatacggacaaaattttttaatcgataaaagcgtattagcaaaaatcatccaagccatacccaaagagatgaacaatatcattgagattgggcctggcttaggtgatttaacgcaagaacttttaaaaatttctcaagtaaaagcttatgaaatcgataatgatctcatacctattttaaaaaagaaatttcaaaaagaacttgaatgtggaaaatttaacttgatccatcaagacgcaagcgaagcttttaatcctagtcttgatgaaaaaccatattttttggttgcaaatttgccttattatgttgcaagtcacattatattaaaagctttagaagataaaaattgtctagggcttattgtaatggcacaaagggaaatggctgaaaaattctgcgctaaagaaggaaatagtgagttttcttccttaggtgttttaagtgcaatgatttgcgaaagaaaaatactttttgatgttgatccacaatgttttaatcctccaccaaaagttatgtcagcggtgatgagtttgattaaaactaaggattttgatgaactttgcgaaatagaaaatttcaaaaattttctaaaagattgttttaaagctcctagaaaacaactcttaggaaatttaaaaacatataaagcaaaagttttagaagttttaagcactcttggcttaaaagaaaacatcagaccacatgaaatttgcgttgatttataccttaaaatttatgacaaattaaaggatgaatatggacgaaaacaaagagataaataa

SEQ ID NO: 18491 - DNA, 531 bp, Campylobacter jejuni
atgcaaaacactatcatacaaaaagccgtcaataaagatttaaattctatacttgaaatcacaaaagatgctttaaatgctatgaaaactatgaattttcaccaatgggatgagaattatccaaatgaaatagtttttcaagaagatatacaagcacaagaactttatgtgtttaaagaaaatgatgaaattttaggctttatctgtatcaatgaaaaatttaaacctgaattttacaaacaagttatttttaacaaaaattatgatgataaagccttttatctacaccgtttagctgtcaaacaaaatgcaaaaggcaaaggcgtggcacaaaaacttttaaatttttgcgaaaattttgccttggaaaatcacaaggcaagtttaagagcagatactcatagtaaaaattttcctatgaattcgctttttaaaaagcttgattttaatttttgtggaaactttgacatacctaattaccaagatccttttttagcttatgaaaaaattctaaaccaaaaagctttttga

SEQ ID NO: 18492 - DNA, 1413 bp, Campylobacter jejuni
atgacaatggctaaaactttatatgaaaaagtctttgatgctcatgtggtttatgaaggcaaaaacgaacttcctatactttatatcgatagacatttaatccatgaagtaacaagccctcaagcattttcagggcttaaaatggctaagcgtagaatggcaagagcggatttaactttggctactatagatcatgatgtttcaactaaaagtatggatttaaatgcttgttctgatatggcaaaagagcaaattacaactttgatgcaaaatactaaggaatttggagtaaggcttttaggacttggagataaaaatcaaggcatagttcatatagtaggtcctgagcttggctttactttacctggggttactttagtttgcggggattctcatacggcaacacatggggcttttggagctttagcctttggtataggcacgagtgaagtagagcatgtcatggcaacgcaaactttaaaacaagccaaacttaaaactatgaaaatcgaatgtaaagggcagtttcaaaaaggcgtttatactaaggatttgattttgtatttgatcgcacaatacggcacagcaaaaggcacaggctatgctatagaattttgcggagaacttataagaaatctaagcatggaagctagaatgactctttgtaatatggctatagaatttggagcgaaagtaggtatgatagctcctgatgagatcacttttgagtatattaagggaaaggaatttgcacctaaaggagaagaatttcaaaagtattgtgagtattggaagagtttaagaagtgatgaaggagcaaaatatgatgcgagtattactctagatgtaagcaagataaaaccacaaattagctatggaacaaatccttcgcaagtgattggcatagatgaaaaaattccaaaaataagtgattttaaaaatcaaagcgagcaaaaatctttgcttgatgctttatattatgtaaatttagagcaagatcaagttatagaaggggtaaaaatcgacattgtatttataggatcttgcacaaatgggcgtttagaagatcttaaaatagctgctgatatcttaaaagggcgcaaaattcataaaaatgttaaagctttaatcgtgcctggttcaatgcaagtaagaaaagaagctgaaaatttaggacttgataagatttttatcgaggcagggtgtgagtggagatatgcagggtgttctatgtgtcttggtatgaatgatgacaaagcaaattcaggtcaaagagttgcttcaacttcaaatcgtaactttgtaggcagacaaggtaaaggttctatcactcatttgatgagtcctgcaagtgcagcagcttgtgccatagaaggtgttatttgtgataatagaaagtatttaggagtttaa

SEQ ID NO: 18493 - DNA, 2526 bp, Chlamydia pneumoniae
atgaagattccactccgctttttattgatatcattagtacctacgctttctatgtcgaatttattaggagctgctactaccgaagagttatcggctagcaatagcttcgatggaactacatcaacaacaagcttttctagtaaaacatcatcggctacagatggcaccaattatgtttttaaagattctgtagttatagaaaatgtacccaaaacaggggaaactcagtctactagttgttttaaaaatgacgctgcagctggagatctaaatttcttaggagggggattttctttcacatttagcaatatcgatgcaaccacggcttctggagctgctattggaagtgaagcagctaataagacagtcacgttatcaggattttcggcactttcttttcttaaatccccagcaagtacagtgactaatggattgggagctatcaatgttaaagggaatttaagcctattggataatgataaggtattgattcaggacaatttctcaacaggagatggcggagcaattaattgtgcaggctccttgaagatcgcaaacaataagtccctttcttttattggaaatagttcttcaacacgtggcggagcgattcataccaaaaacctcacactatcttctggtggggaaactctatttcaggggaatacagcgcctacggctgctggtaaaggaggtgctatcgcgattgcagactctggcaccctatccatttctggagacagtggcgacattatctttgaaggcaatacgataggagctacaggaaccgtctctcatagtgctattgatttaggaactagcgctaagataactgcgttacgtgctgcgcaaggacatacgatatacttttatgatccgattactgtaacaggatcgacatctgttgctgatgctctcaatattaatagccctgatactggagataacaaagagtatacgggaaccatagtcttttctggagagaagctcacggaggcagaagctaaagatgagaagaaccgcacttctaaattacttcaaaatgttgcttttaaaaatgggactgtagttttaaaaggtgatgtcgttttaagtgcgaacggtttctctcaggatgcaaactctaagttgattatggatttagggacgtcgttggttgcaaacaccgaaagtatcgagttaacgaatttggaaattaatatagactctctcaggaacgggaaaaagataaaactcagtgctgccacagctcagaaagatattcgtatagatcgtcctgttgtactggcaattagcgatgagagtttttatcaaaatggctttttgaatgaggaccattcctatgatgggattcttgagttagatgctgggaaagacatcgtgatttctgcagattctcgcagtatagatgctgtacaatctccgtatggctatcagggaaagtggacgatcaattggtctactgatgataagaaagctacggtttcttgggcgaagcagagttttaatcccactgctgagcaggaggctccgttagttcctaatcttctttggggttcttttatagatgttcgttccttccagaattttatagagctaggtactgaaggtgctccttacgaaaagagattttgggttgcaggcatttccaatgttttgcataggagcggtcgtgaaaatcaaaggaaattccgtcatgtgagtggaggtgctgtagtaggtgctagcacgaggatgccgggtggtgataccttgtctctgggttttgctcagctctttgcgcgtgacaaagactactttatgaataccaatttcgcaaagacctacgcaggatctttacgtttgcagcacgatgcttccctatactctgtggtgagtatccttttaggagagggaggactccgcgagatcctgttgccttatgtttccaagactctgccgtgctctttctatgggcagcttagctacggccatacggatcatcgcatgaagaccgagtctctaccccccccccccccgacgctctcgacggatcatacttcttggggaggatatgtctgggctggagagctgggaactcgagttgctgttgaaaataccagcggcagaggatttttccaagagtacactccatttgtaaaagtccaagctgtttacgctcgccaagatagctttgtagaactaggagctatcagtcgtgattttagtgattcgcatctttataaccttgcgattcctcttggaatcaagttagagaaacggtttgcagagcaatattatcatgttgtagcgatgtattctccagatgtttgtcgtagtaaccccaaatgtacgactaccctactttccaaccaagggagttggaagaccaaaggttcgaacttagcaagacaggctggtattgttcaggcctcaggttttcgatctttgggagctgcagcagagcttttcgggaactttggctttgaatggcggggatcttctcgtagctataatgtagatgcgggtagcaaaatcaaattttag

SEQ ID NO: 18494 - DNA, 4224 bp, Chlamydia pneumoniae
atgaaatattctttaccttggctacttacctcttcggctttagttttctccctacatccactaatggctgctaacacggatctctcatcatccgataactatgaaaatggtagtagtggtagcgcagcattcactgccaaggaaacttcggatgcttcaggaactacctacactctcactagcgatgtttctattacgaatgtatctgcaattactcctgcagataaaagctgttttacaaacacaggaggagcattgagttttgttggagctgatcactcattggttctgcaaaccatagcgcttacgcatgatggtgctgcaattaacaataccaacacagctctttctttctcaggattctcgtcactcttaatcgactcagctccagcaacaggaacttcgggcggcaagggtgctatttgtgtgacaaatacagagggaggtactgcgacttttactgacaatgccagtgtcaccctccaaaaaaatacttcagaaaaagatggagctgcagtttctgcctacagcatcgatcttgctaagactacgacagcagctctcttagatcaaaatactagcacaaaaaatggcggggccctctgtagtacagcaaacactacagtccaaggaaactcaggaacggtgaccttctcctcaaatactgctacagataaaggtggggggatctactcaaaagaaaaggatagcacgctagatgccaatacaggagtcgttaccttcaaatctaatactgcaaagacggggggtgcttggagctctgatgacaatcttgctcttaccggcaacactcaagtactttttcaggaaaataaaacaaccggctcagcagcacaggcaaataacccggaaggttgtggtggggcaatctgttgttatcttgctacagcaacagacaaaactggattagccatttctcagaatcaagaaatgagcttcactagtaatacaacaactgcgaatggtggagcgatctacgctactaaatgtactctggatggaaacacaactcttaccttcgatcagaatactgcgacagcaggatgtggcggagctatctatacagaaactgaagatttttctcttaagggaagtacgggaaccgtgaccttcagcacaaatacagcaaagacaggcggcgccttatattctaaaggaaacagctcgctgactggaaataccaacctgctcttttcagggaacaaagctacgggcccgagtaattcttcagcaaatcaagagggttgcggtggggcaatcctagcctttattgattcaggatccgtaagcgataaaacaggactatcgattgcaaacaaccaagaagtcagcctcactagtaatgctgcaacagtaagtggtggtgcgatctatgctaccaaatgtactctaactggaaacggctccctgacctttgacggcaatactgctggaacttcaggaggggcgatctatacagaaactgaagattttactcttacaggaagtacaggaaccgtgaccttcagcacaaatacagcaaagacaggcggcgccttatattctaaaggcaacaactctctgtctggtaataccaacctgctcttttcagggaacaaagctacgggcccgagtaattcttcagcaaatcaagagggttgcggtggggcaatcctatcgtttcttgagtcagcatctgtaagtactaaaaaaggactctggattgaagataacgaaaacgtgagtctctctggtaatactgcaacagtaagtggcggtgcgatctatgcgaccaagtgtgctctgcatggaaacacgactcttacctttgatggcaatactgccgaaactgcaggaggagcgatctatacagaaaccgaagattttactcttacgggaagtacgggaaccgtgaccttcagcacaaatacagcaaagacagcaggggctctacatactaaaggaaatacttcctttaccaaaaataaggctcttgtattttctggaaattcagcaacagcaacagcaacaacaactacagatcaagaaggttgtggtggagcgatcctctgtaatatctcagagtctgacatagctacaaaaagcttaactcttactgaaaatgagagtttaagtttcattaacaatacggcaaaaagaagtggtggtggtatttatgctcctaagtgtgtaatctcaggcagtgaatccataaactttgatggcaatactgctgaaacttcgggaggagcgatttattcgaaaaacctttcgattacagctaacggtcctgtctcctttaccaataattctggaggcaagggaggcgccatttatatagccgatagcggagaactttccttagaggctattgatggggatattactttctcagggaaccgagcgactgagggaacttcaactcccaactcgatccatttaggtgcaggggctaagatcactaagcttgcagcagctcctggtcatacgatttatttttatgatcctattacgatggaagctcctgcatctggaggaacaatagaggagttagtcatcaatcctgttgtcaaagctattgttcctcctccccaaccaaaaaatggtcctatagcttcagtgcctgtagtccctgtagcacctgcaaacccaaacacgggaactatagtattttcttctggaaaactccccagtcaagatgcctcgattcctgcaaatactaccaccatactgaaccagaagatcaacttagcaggaggaaatgtcgttttaaaagaaggagccaccctacaagtatattccttcacacagcagcctgattctacagtattcatggatgcaggaacgaccttagagaccacgacaactaacaatacagatggcagcatcgatctaaagaatctctctgtaaatctggatgctttagatggcaagcgtatgataacgattgccgtaaacagcacaagtgggggattaaaaatctcaggggatctgaaattccataacaatgaaggaagtttctatgacaatcctgggttgaaagcaaacttaaatcttcctttcttagatctttcttctacttcaggaactgtaaatttagacgacttcaatccgattccttctagcatggctgctccggattatgggtatcaagggagttggactctggttcctaaagtaggagctggagggaaggtgactttggtcgcggaatggcaagcgttaggatacactcctaaaccagagcttcgtgcgactttagttcctaatagcctttggaatgcttatgtaaacatccattctatacagcaggagatcgccactgcgatgtcggacgctccctcacatccagggatttggattggaggtattggcaacgccttccatcaagacaagcaaaaggaaaatgcaggattccgtttgatttccagaggttatattgttggtggcagcatgaccacccctcaagaatatacctttgctgttgcattcagccaactctttggcaaatctaaggattacgtagtctcggatattaaatctcaagtctatgcaggatctctctgtgctcagagctcttatgtcattcccctgcatagctcattacgtcgccacgtcctctctaaggtccttccagagctcccaggagaaactccccttgttctccatggtcaagtttcctatggaagaaaccaccataatatgacgacaaagcttgcgaacaacacacaagggaaatcagactgggacagccatagcttcgctgttgaagtcggtggttctcttcctgtagatctaaactacagataccttaccagctactctccctatgtgaaactccaagttgtgagtgtaaatcaaaaaggattccaagaggttgctgctgatccacgtatctttgacgctagccatctggtcaacgtgtctatccctatgggactcaccttcaaacacgaatcagcaaagccccccagtgctttgcttcttactttaggttacgctgtagatgcttaccgggatcaccctcactgcctgacctccttaacaaatggcacctcgtggtctacgtttgctacaaacttatcacgacaagctttctttgctgaggcttctggacatctgaagttacttcatggtcttgactgcttcgcttctggaagttgtgaactgcgcagctcctcaagaagctataatgcaaactgtggaactcgttattctttctaa

SEQ ID NO: 18495 - DNA, 2811 bp, Chlamydia pneumoniae
atgaagtcctctgtctcttggttgttcttttcttcaatcccgctcttttcatcgctctctatagtcgcggcagaggtgaccttagatagcagcaataatagctatgatggatctaacggaactaccttcacggtcttttccactacggacgctgctgcaggaactacctattccttactttccgacgtatcctttcaaaatgcaggggctttaggaattcccttagcctcaggatgcttcctagaagcgggcggcgatcttactttccaaggaaatcaacatgcactgaagtttgcatttatcaatgcgggctctagcgctggaactgtagccagtacctcagcagcagataagaatcttctctttaatgatttttctagactctctattatctcttgtccctctcttcttctctctcctactggacaatgtgctttaaaatctgtggggaatctatctctaactggcaattcccaaattatatttactcagaacttctcgtcagataacggcggtgttatcaatacgaaaaacttcttattatcagggacatctcagtttgcgagcttttcgagaaaccaagccttcacagggaagcaaggcggtgtagtttacgctacaggaactataactatcgagaacagccctgggatagtttccttctctcaaaacctagcgaaaggatctggcggtgctctgtacagcactgacaactgttcgattacagataactttcaagtgatctttgacggcaatagtgcttgggaagccgctcaagctcagggcggggctatttgttgcactacgacagataaaacagtgactcttactgggaacaaaaacctctctttcacaaataatacagcattgacatatggcggagccatctctggactcaaggtcagtatttccgctggaggtcctactctatttcaaagtaatatctcaggaagtagcgccggtcagggaggaggaggagcgatcaatatagcatctgctggggaactcgctctctctgctacttctggagatattaccttcaataacaaccaagtcaccaacggaagcacaagtacaagaaacgcaataaatatcattgataccgctaaagtcacatcgatacgagctgctacggggcaatctatctatttctatgatcccatcacaaatccaggaaccgcagcttctaccgacacattgaacttaaacttagcagatgcgaacagtgagatcgagtatgggggtgcgattgtcttttctggagaaaagctttcccctacagaaaaagcaatcgctgcaaacgtcacctctactatccgacaacctgcagtattagcgcggggagatcttgtacttcgtgatggagtcaccgtaactttcaaggatctgactcaaagtccaggatcccgcatcttaatggatggggggactacacttagtgctaaagaggcaaatctttcgcttaatggcttagcagtaaatctctcctctttagatggaaccaacaaggcagctttaaaaacagaagctgcagataaaaatatcagcctatcgggaacgattgcgcttattgacacggaagggtcattctatgagaatcataacttaaaaagtgctagtacctatcctcttcttgaacttaccaccgcaggagccaacggaacgattactctgggagctctttctaccctgactcttcaagaacctgaaacccactacgggtatcaaggaaactggcagttgtcttgggcaaatgcaacatcctcaaaaataggaagcatcaactggacccgtacaggatacattcctagtcctgagagaaaaagtaatctccctctaaatagcttatggggaaactttatagatatacgctcgatcaatcagcttatagaaaccaagtccagtggggagccttttgagcgtgagctatggctttcaggaattgcgaatttcttctatagagattctatgcccacccgccatggtttccgccatatcagcgggggttatgcactagggatcacagcaacaactcctgccgaggatcagcttacttttgccttctgccagctctttgctagagatcgcaatcatattacaggtaagaaccacggagatacttacggtgcctctttgtatttccaccatacagaagggctcttcgacatcgccaatttcctctggggaaaagcaacccgagctccctgggtgctctctgagatctcccagatcattcctttatcgttcgatgctaaattcagttatctccatacagacaaccacatgaagacatattataccgataactctatcatcaagggttcttggagaaacgatgccttctgtgcagatcttggagctagcctgccttttgttatttccgttccgtatcttctgaaagaagtcgaaccttttgtcaaagtacagtatatctatgcgcatcagcaagacttctacgagcgtcatgctgaaggacgcgctttcaataaaagcgagcttatcaacgtagagattcctataggcgtcaccttcgaaagagactcaaaatcagaaaagggaacttacgatcttactcttatgtatatactcgatgcttaccgacgcaatcctaaatgtcaaacttccctaatagctagcgatgctaactggatggcctatggtaccaacctcgcacgacaaggtttttctgttcgtgctgcgaaccatttccaagtgaacccccacatggaaatcttcggtcaattcgcttttgaagtacgaagttcttcacgaaattataatacaaacctaggctctaagttttgtttctag

SEQ ID NO: 18496 - DNA, 2793 bp, Chlamydia pneumoniae
atgaaaatacccttgcacaaactcctgatctcttcgactcttgtcactcccattctattgagcattgcaacttacggagcagatgcttctttatcccctacagatagctttgatggagcgggcggctctacatttactccaaaatctacagcagatgccaatggaacgaactatgtcttatcaggaaatgtctatataaacgatgctgggaaaggcacagcattaacaggctgctgctttacagaaactacgggtgatctgacatttactggaaagggatactcattttcattcaacacggtagatgcgggttcgaatgcaggagctgcggcaagcacaactgctgataaagccctaacattcacaggattttctaacctttccttcattgcagctcctggaactacagttgcttcaggaaaaagtactttaagttctgcaggagccttaaatcttaccgataatggaacgattctctttagccaaaacgtctccaatgaagctaataacaatggcggagcgatcaccacaaaaactctttctatttctgggaatacctcttctataaccttcactagtaatagcgcaaaaaaattaggtggagcgatctatagctctgcggctgcaagtatttcaggaaacaccggccagttagtctttatgaataataaaggagaaactgggggtggggctctgggctttgaagccagctcctcgattactcaaaatagctcccttttcttctctggaaacactgcaacagatgctgcaggcaagggcggggccatttattgtgaaaaaacaggagagactcctactcttactatctctggaaataaaagtctgaccttcgccgagaactcttcagtaactcaaggcggagcaatctgtgcccatggtctagatctttccgctgctggccctaccctattttcaaataatagatgcgggaacacagctgcaggcaagggcggcgctattgcaattgccgactctggatctttaagtctctctgcaaatcaaggagacatcacgttccttggcaacactctaacctcaacctccgcgccaacatcgacacggaatgctatctacctgggatcgtcagcaaaaattacgaacttaagggcagcccaaggccaatctatctatttctatgatccgattgcatctaacaccacaggagcttcagacgttctgaccatcaaccaaccggatagcaactcgcctttagattattcaggaacgattgtattttctggggaaaagctctctgcagatgaagcgaaagctgctgataacttcacatctatattaaagcaaccattggctctagcctctggaaccttagcactcaaaggaaatgtcgagttagatgtcaatggtttcacacagactgaaggctctacactcctcatgcaaccaggaacaaagctcaaagcagatactgaagctatcagtcttaccaaacttgtcgttgatctttctgccttagagggaaataagagtgtgtccattgaaacagcaggagccaacaaaactataactctaacctctcctcttgttttccaagatagtagcggcaatttttatgaaagccatacgataaaccaagccttcacgcagcctttggtggtattcactgctgctactgctgctagcgatatttatatcgatgcgcttctcacttctccagtacaaactccagaacctcattacgggtatcagggacattgggaagccacttgggcagacacatcaactgcaaaatcaggaactatgacttgggtaactacgggctacaaccctaatcctgagcgtagagcttccgtagttcccgattcattatgggcatcctttactgacattcgcactctacagcagatcatgacatctcaagcgaatagtatctatcagcaacgaggactctgggcatcaggaactgcgaatttcttccataaggataaatcaggaactaaccaagcattccgacataaaagctacggctatattgttggaggaagtgctgaagatttttctgaaaatatcttcagtgtagctttctgccagctcttcggtaaagataaagacctgtttatagttgaaaatacctctcataactatttagcgtcgctatacctgcaacatcgagcattcctaggaggacttcccatgccctcatttggaagtatcaccgacatgctgaaagatattcctctcattttgaatgcccagctaagctacagctacactaaaaatgatatggatactcgctatacttcctatcctgaagctcaaggctcttggaccaataactctggggctctagagctcggaggatctctggctctatatctccctaaagaagcaccgttcttccagggatatttccccttcttaaagttccaggcagtctacagccgccaacaaaactttaaagagagtggcgctgaagcccgtgcttttgatgatggagacctagtgaactgctctatccctgtcggcattcggttagaaaaaatctccgaagatgaaaaaaataatttcgagatttctctagcctacattggtgatgtgtatcgtaaaaatccccgttcgcgtacttctctaatggtcagtggagcctcttggacttcgctatgtaaaaacctcgcacgacaagccttcttagcaagtgctggaagccatctgactctctcccctcatgtagaactctctggggaagctgcttatgagcttcgtggctcagcacacatctacaatgtagattgtgggctaagatactcattctag

SEQ ID NO: 18497 - DNA, 2787 bp, Chlamydia pneumoniae
atgaagacttcgattccttgggttttagtttcctccgtgttagctttctcatgtcacctacagtcactagctaacgaggaacttttatcacctgatgatagctttaatggaaatatcgattcaggaacgtttactccaaaaacttcagccacaacatattctctaacaggagatgtcttcttttacgagcctggaaaaggcactcccttatctgacagttgttttaagcaaaccacggacaatcttaccttcttggggaacggtcatagcttaacgtttggctttatagatgctggcactcatgcaggtgctgctgcatctacaacagcaaataagaatcttaccttctcagggttttccttactgagttttgattcctctcctagcacaacggttactacaggtcagggaacgctttcctcagcaggaggcgtaaatttagaaaatattcgtaaacttgtagttgctgggaatttttctactgcagatggtggagctatcaaaggagcgtctttccttttaactggcacttctggagatgctctttttagtaacaactcttcatcaacaaagggaggagcaattgctactacagcaggcgctcgcatagcaaataacacaggttatgttagattcctatctaacatagcgtctacgtcaggaggcgctatcgatgatgaaggcacgtcgatactatcgaacaacaaatttctatattttgaagggaatgcagcgaaaactactggcggtgcgatctgcaacaccaaggcgagtggatctcctgaactgataatctctaacaataagactctgatctttgcttcaaacgtagcagaaacaagcggtggcgccatccatgctaaaaagctagccctttcctctggaggctttacagagtttctacgaaataatgtctcatcagcaactcctaaggggggtgctatcagcatcgatgcctcaggagagctcagtctttctgcagagacaggaaacattacctttgtaagaaatacccttacaacaaccggaagtaccgatactcctaaacgtaatgcgatcaacataggaagtaacgggaaattcacggaattacgggctgctaaaaatcatacaattttcttctatgatcccatcacttcagaaggaacctcatcagacgtattgaagataaataacggctctgcgggagctctcaatccatatcaaggaacgattctattttctggagaaaccctaacagcagatgaacttaaagttgctgacaatttaaaatcttcattcacgcagccagtctccctatccggaggaaagttattgctacaaaagggagtcactttagagagcacgagcttctctcaagaggccggttctctcctcggcatggattcaggaacgacattatcaactacagctgggagtattacaatcacgaacctaggaatcaatgttgactccttaggtcttaagcagcccgtcagcctaacagcaaaaggtgcttcaaataaagtgatcgtatctgggaagctcaacctgattgatattgaagggaacatttatgaaagtcatatgttcagccatgaccagctcttctctctattaaaaatcacggttgatgctgatgttgatactaacgttgacatcagcagccttatccctgttcctgctgaggatcctaattcagaatacggattccaaggacaatggaatgttaattggactacggatacagctacaaatacaaaagaggccacggcaacttggaccaaaacaggatttgttcccagccccgaaagaaaatctgcgttagtatgcaataccctatggggagtctttactgacattcgctctctgcaacagcttgtagagatcggcgcaactggtatggaacacaaacaaggtttctgggtttcctccatgacgaacttcctgcataagactggagatgaaaatcgcaaaggcttccgtcatacctctggaggctacgtcatcggtggaagtgctcacactcctaaagacgacctatttacctttgcgttctgccatctctttgctagagacaaagattgttttatcgctcacaacaactctagaacctacggtggaactttattcttcaagcactctcataccctacaaccccaaaactatttgagattaggaagagcaaagttttctgaatcagctatagaaaaattccctagggaaattcccctagccttggatgtccaagtttcgttcagccattcagacaaccgtatggaaacgcactatacctcattgccagaatccgaaggttcttggagcaacgagtgtatagctggtggtatcggcctagaccttccttttgttctttccaacccacatcctcttttcaagaccttcattccacagatgaaagtcgaaatggtttatgtatcacaaaatagcttcttcgaaagctctagtgatggccgtggttttagtattggaaggctgcttaacctctcgattcctgtgggtgcgaaattcgtgcagggggatatcggagattcctacacctatgatctctcaggattctttgtttccgatgtctatcgtaacaatccccaatctacagcgactcttgtgatgagcccagactcttggaaaattcgcggtggcaatctttcaagacaggcatttttactgaggggtagcaacaactacgtctacaactccaattgtgagctcttcggacattacgctatggaactccgtggatcttcaaggaactacaatgtagatgttggtaccaaactccgattctag

SEQ ID NO: 18498 - DNA, 1077 bp, Chlamydia pneumoniae
atgacccttcctaatgatttactagagaccttagtaaagagaaaagaaagtccacaggcaaacaaagtgtggcctgtaactacattttctttagctagaaatctctctgtatctaagttccttccctgtttatctaaagaacagaaattagagattctccaatttatcacctctcattttaatcatattgaaggctttggggaatttatagtgcttcctctaaaagacactcccctatggcagaaagagtttctacttgagcattttttactcccttatgatttggtggggaacccagaaggtgaggcattagtagttagcagatctggagacttcttagcagctataaattttcaagatcatcttgttttacatggaattgatttccaaggaaatgttgagaaaactcttgatcaacttgtacaattggatagttatctccatagcaagttatcttttgctttttcttcagaatttggatttttaacaaccaatcctaagaactgtgggacggggttaaaaagccaatgttttctgcatattcctgcgcttctatattctaaagaatttaccaatcttattgatgaagaggtggagataattacttctagtttattactaggggttacaggatttcctggcaatattgtggtattatcgaatcgttgttctttagggctcactgaagaactgcttctttcttctttaaggattactgcttccaagctcagtgttgctgaggttgcagcaaaaaaacggctttctgaggagaattctggcgatttaaagaatcttatccttcgttccttaggtctacttacccattcctgccaacttgagctgaaagagactctagatgccttgagctggatacaactgggtatagatttaggcttgattaaagtaaccgaaaatcatcccctatggaatccattattttggcaaatacgtcgagcacatcttgccttgcaaaaacaagctgaagactcccgggatctgcaaaaagatacgatttcacatttaagagctagcgtattgaaggagttaactaaaggattatctcctgagagtttctga

SEQ ID NO: 18499 - DNA, 1161 bp, Chlamydia pneumoniae
atgttcttcggagctggcaatattgtctttcccttagctctgggataccactacaatgcgcatccctggtctgcctatttcggcatgatgcttactgctgtatgcgttcctcttttaggtctagtcagtatgctattctattctggagactaccagaagttctttttctcgataggaagaattccagggatgatttttattacggctattatacttttgataggccccttcggtggaatccctcgagccattgcagtatctcatgccacattgatttcactatccgagcataagagtgctttcattccctctttgcctatttttagtgcgatttgctgtgtgcttatctatatcttctcatgcaagctcagccgtttaattcaatggctaggatctgtatttttcccgattatgttggttaccttactttgggtcatcatccgcagttttatgattcctacccaccccatggttcaagaatttattccgaacgcacgtcaagcttggttggcaggattcattgaagggttcaatactatggatttacttgcagcgtttttcttctgctccatagttttgatctctctacgtcagctcgtagctgaagagaaacatcctacagaggaagaaatccctcttagttttcaaggtattagcaaaaaaaataagcgttccttagctttaggtttctttcttgctgcgatcttactaggaatgacctatcttggatttgttttatctgctgcacgtcatgcgggcttacttgtgaatgtaagtaaaggtcatattctgggaaggatctctgcgattgcattagggccaaatagcattctcgcaggagtcagcgttttcattgcctgtctaactacggaaattgctttagtaggtattgttgcagattttctagctcgtgtagtttcctttaagaaactgaactatgcttcagcagtaatttgtactcttatccccacctatttaatttctattttgaattttgaaactataagtcacctactcttgcctttgctacaacttagctatccagctttgattgtactggcttgtggaaacattgcctacaagttatggaatttccgatactccccagtcttgttttatttaaccctctctcttacaattgttttaaagttagtgaattaa

SEQ ID NO: 18500 - DNA, 999 bp, Chlamydia pneumoniae
atgagttctttaacactaagtagacgtcctagaagaaaccgaaagacagcagctataagagatttgttggccgaaactcacttaagcccaaaagatctcatagcaccattctttgtgaagtatggaaataacataaaggaagagatcccgagtcttcctggagtgttccgatggagtttggatttgctattaaaggaaatagagcgtttgtgtacctacgggttacgagctgtaatgctgtttcccattattcctgatgatcttaaagatgcttacggttcttactcctcaaatcctaaaaacatcttatgtcatagcattcatgaaataaaaaacgcatttcctcacctatgtctgattagtgatatagctttagatccttatacgacacacggtcatgatgggattttccttaatggagaggtccttaatgatgaaagtgttagaatttttggaaatattgcaactttacatgctgaaatgggagcggatatcgtagctccgagtgatatgatggatggaaggattggctacattcgctctaagttagaccagtctggctactcaaagacctctataatgtcttatagtgtaaagtacgcttcttgtttgtattctccttttcgtgatgcgctgagttctcacgtaacttcaggagataaaaaacagtatcagatgaaccctaaaaacgtattagaggcattgcttgaatcttctttagacgaggaggagggagcagatatcttaatggtgaagcctgcaggactctatcttgatgtgatctatcggattcgacaaaatacctgtttgcctctagctgcgtatcaggtcagtggggaatacgctatgatcttatcagcctttcaacaaggttggttagataaagaaacactatttcatgagtctttgatagcaatcaagagagctggcgcagatatgattattagttactccgctccttttattttggaattactgcatcagggatttgaattttaa

SEQ ID NO: 18501 - DNA, 975 bp, Chlamydia pneumoniae
atggaaaaaaaatattatgcactagcctattattatattactcgtgtggataatccacatgaagaaatcgctttacacaaaaagttcttagaagacctcgatgtctcttgtcgtatttacatttcagagcagggtatcaatggacaattcagtggttatgagccccatgctgagctctatatgcaatggcttaaagagcgtcctaatttttctaagattaagtttaaaatccatcatattaaggaaaatatctttcctaggatcacagtaaagtatcgaaaagaacttgctgccttaggatgtgaggtagatctttccaaacaggcaaagcacatttctcctcaagaatggcacgaaaaactccaagaaaatcgttgccttattctagatgtccgaaataactatgagtggaaaattggtcactttgataatgcgactctacctgatattcaaactttcagagagtttccagagtatgctgagaagcttgctcaagaatgtgatcccgaaaccactcccgttatgatgtactgtacggggggaattcgttgtgagctttactctccagttttattagaaaaaggctttaaagaagtctatcaacttgatggtggtgtcattgcttatggacaacaagtaggcaccggcaagtggttaggaaagctctttgtttttgatgatcgcctagctattcccattgatgagagtgaccctgatgtggcccctatagcagaatgttgtcattgtcaaactcctagtgacgcttattacaattgtgcgaacacagattgcaatgctctatttctttgctgtgatgaatgtattcatcaacatcaaggatgttgtggtgaagagtgctctcaaagccctagagttcgtaaatttgatagttcacgaggaaataagccttttcgacgtgctcatttgtgtgagatcagcgaaaacagtgaatcagcaagttgttgtttgatttaa

SEQ ID NO: 18502 - DNA, 630 bp, Chlamydia pneumoniae
atggctcgatattgtggccctaaaaatagagtggcaaggcgttttggtgcgaacatctttggcagaagccgaaatcctttgttaaagaagcctcatcctccaggtcaacatggtatgcagagaaagaaaaagtctgactatgggctccaactggaagagaaacagaagcttaaagcttgctacggcatgattatggaaaagcagctggttaaggctttcaaagaagttatacataagcagggaaatgttgctcaaatgttccttgaaagatttgagtgtcgtcttgataacatggtataccgtatgggctttgcaaaaacaatttttgctgctcagcagcttgttgctcacggacatatcttagttaatgggcgaagagtcgatagacgctctttctttttacgtcctggaatgcagatttctctaaaagaaaaatctaaacgacttcagtctgtaaaagatgccctagaaagcaaagacgaaagttctctgccttcttacatttctttagataagacaggctttaaaggggaattacttgtatctcctgagcaagatcaaatcgaggctcaattgcctctacctatcaacatttctgttgtttgtgagttcctatctcatagaacataa

SEQ ID NO: 18503 - DNA, 882 bp, Chlamydia pneumoniae
atgaaagtacttcctcctccctccattcccttactaggggctcacacttcaactgctggtggactcaaaaatgcgatttatgaaggccgggatataggggcttctacagttcagatttttacagcaaaccaaaggcagtggcaaagacgggctctaaaagaagaagtgattgaagatttcaaagcagcgctcaaagaaactgacctttcttatattatgagtcatgcaggatatctgattaatccaggagcccctgatccggtaattttagaaaaaagtcggattggcatttatcaagaaattctggactgcatcactttaggcatttcttttgttaattttcaccctggagcagctctcaaaagctctaaagaagactgcatgaataaaattgtcagcagttttagccaatcggcccctttatttgatagttctcctcctcttgttgttttactggaaaccacagcgggtcagggaacgttaattgggagtaactttgaagaattgggttacctcgttcagaatttgaaaaatcaaattcccattggcgtgtgtgtagatacttgtcatatttttgctgcggggtacgacattacctctccacaggggtgggaagatgttcttaatgaatttgacgagtatgtcggtttatcttatctacgagcctttcatctcaatgattctatgtttccattaggagcgaacaaagaccgccatgcgccccttggagagggctatataggtaaggaatcttttaaatttttaatgacagatgaacgaactagaaaaattcctaagtatttagaaacccctggtgggcctgaaaattggcaaaaagaaattggggaacttttgaagttttcaaaaaacagagatagttag

SEQ ID NO: 18504 - DNA, 1644 bp, Chlamydia pneumoniae
atgagcagaaaagacaatgaggtttccttagctcgttcaatttttaatatattatccggaactttctgtagtcgtattacagggatatttcgagaaattgcaatggcaacctattttggagctgatccaattgtagctgctttctggttaggtttccgtactgtttttttcttaagaaaaattttaggagggctcattctagaacaagccttcatccctcattttgaatttctccgtgctcaaagtctcgatcgtgcggcgttttttttccgacgcttttctagattgattaaaggcagcactattatattcactctgcttattgaagcagtattgtgggtagttcttcaatacgttgaagaggggacttacgatatgattctccttactatgatactcttgccctgtggcattttcttaatgatgtacaatgtaaacggcgctttgcttcactgtgaaaataagtttttcggggtgggattagctcccgtagttgtaaatatcatttggattttctttgttatagcggctcgtcattcagatcctagagagcgtattatcggtttatccgtggctctagttatcgggtttttcttcgaatggttaatcacggttcctggagtatggaaatttctattagaagcgaagagcccacctcaagaacacgatagtgttcgagctttattagctcccttatctttgggtattttaacttcaagcatcttccagctgaaccttctttctgatatctgcttggctcgctatgtacatgaaataggccctctatatcttatgtactccttaaagatttatcagctccccatacatctctttggctttggtgtgtttaccgttctcctcccagcaatttctcgttgtgtacagcgagaagatcatgagaggggattgaaacttatgaagttcgttctcaccctaaccatgtccgtaatgatcattatgacagcagggctattgctcttagctttacctggagtccgtgtcctttatgaacacggacttttccctcagagtgctgtctacgctattgttcgtgtattgcgaggttatggtgccagtattatccctatggccttggctcctttagtctctgttcttttttatgcacagcggcagtatgctgttccgctctttataggaatcggtacggctttggccaatattgttttaagcttggttctaggtcgttgggttttaaaagacgtctcgggcatttcctatgctacatccataactgcttgggtgcagttatatttcctctggtattattcttcgaaaagactccctatgtactctaagttactttgggagagcatccggcgttccataaaagttatgggaaccactatgcttgcttgtatgattactctaggcttaaatatccttacgcaaactacatatgtaattttcttaaaccccctcacaccacttgcttggcccttatcctccataacggctcaagcaattgcttttttatctgagagctgcattttcttggcttttttgtttggttttgcaaaactgcttcgagtagaagatcttattaatttggcttcttttgaatactggcgtgggcaacggggtcttttgcaaagacaacacgtgatgcaagacactcaaaattaa

SEQ ID NO: 18505 - DNA, 816 bp, Chlamydia pneumoniae
atggtcatgttcaataacaaaatgatcctaattgctggcccctgtgttattgagggggaagatattacattggaaatcgcagggaaattacagtccatactcgccccttattcggatcggatccaatggttttttaaaagcagttacgacaaagcaaatcgctcttccctaaactcatttcgagggcctggtttgacagagggattgcgcatccttgccaaagtcaaagaaacttttggcgtgggcattcttacagatgtccatacgcctcaagacgcttacgcggctgccgaagtctgcaatatccttcaggtacctgcgttcctctgcagacaaaccgacctcctcgttgcaactgcagaaactggcgctatagtaaatttaaaaaaagggcagtttctctccccttgggatatggaaggcccaataaataaagtactctctacaggaaataacaaaatcttacttacagaaagagggtgtagcttcggttacaataaccttgtttctgatatgcgctcgattcctgttttatcccgttcaggatttcctgtaatttttgatgccacgcactccgtgcagctccctggagctctatctacagaaagtggtggtctgacagaattcgttcctactctttcacgagctgctttagctgcaggagctcatggcctttttatagagacccataccaatccaaaaatcgctaaaagtgatgcagcttctatgttgagcttagaagaattcgcagctctcctccccacctgggatcaattatttacttgcgtcagttcctttgatatggtctcagcatga

SEQ ID NO: 18506 - DNA, 237 bp, Chlamydia pneumoniae
atgaaagaatttttagcctatatcattaagaatctagtggaccgccctgaagaagtccgtattaaagaagttcaggggactcacacgattatttatgaactaagtgtagctaaacctgatatcgggaagatcattggcaaagaaggccgtacgatcaaagcgattcgtactcttctggtttctgtagcaagcaggaacaatgtaagggtcagtttagaaattatggaagaaaagtag

SEQ ID NO: 18507 - DNA, 1020 bp, Chlamydia pneumoniae
atggtgttaggagttgttggaatcagttatcgtgaagccgctttgaaagaaagagagcgtgcgattcaatatctgcaatcttttgaaaaaaatcttttccttgcacagcgttttttaggcaaaggaggagcgtttatcccgttacttacttgtcatcgagccgaactttattattattcagaaagtcctgaaattgctcaagccgccttactttcagaattgacatcccagggaatacgtccttaccgtcatagaggtttgtcttgttttactcatctgtttcaggtcaccagtggtatagatagtttgatctttggggaaacggaaattcaaggacaggtaaaacgagcctatttaaaaggaagcaaagagagagagttgccttttgatcttcattttttatttcaaaaagctctaaaggaagggaaggagtatcgctcacgcatcgggtttcccgatcatcaagtgaccatagaatctgtcgttcaagaaattctactcagctacgacaagtcgatatatacgaattttttattcgtaggatactcggatatcaataggaaagtcgctgcctacttatatcaacatgggtatcataggattaccttttgctctagacaacaagtcacggccccctatagaaccttgtctcgagaaacgctctcatttcgacaaccctatgatgtgattttctttggctcttcagaatcagcttcacaattttccgatctttcctgtgagagtcttgctagcattcccaaacgtattgtctttgattttaacgtgccacgaacctttttatggaaagaaacccctacaggttttgtttatttagatatagatttcatcagtgaatgcgtgcaaaaaagactgcaatgcaccaaagaaggagtaaataaagcaaaacttttgttaacttgtgccgcgaaaaaacaatgggaaatttatgaaaaaaagagctcacatataacccagaggcaaatttcatccccacgtattccttccgttctaagctattga

SEQ ID NO: 18508 - DNA, 2538 bp, Chlamydia pneumoniae
atggcagtacgattaattgttgatgaaggccccttgtctggtgtaatttttgttctggaagatgggataagctggtctataggacgcgactctagtgctaatgacattcctattgaagatcctaaactcggtgcatcgcaagccattatcaataagactgacggaagctactacatcacaaatttagatgatacaattcctattgttgtaaatggcgtagcgatccaagaaactacacagttaaaaaatgaagatactatcttattaggaagcaatcagtattctttcttatcagatgaatttgatcctcaagatcttgtttatgattttgatattcccgaagaaaatttttctaatgattcaggggatttgtccgatagtaatgaacagggaaaagatcttgagcctcggcaaacttcggaaacaaatcattcaccgaagcctaaggaaaagctgaccaaagatcagggaagtagcgatccaattacaagtggggatcaggagcttgctgatgcttttttagcatcagcaaaagcggaaaaaaatcaaccaagagccaaagttgctaagaagggtttaaaagaatcttcaaacgagtctttgaatccaaaggaacaaaatgcaaaggattctccgaaaggagaggaaagaaccaacaaaccccagaacgccattatggaagataacggagcttcgcctaggcaagatccgcaaccaaagtcagcagaaccctctcttaaaaacacagccagggatgagactcccttgaaagaaaataaacctgtagaagagaaggctaataagaaagcaacaccggattctccagaaaaaaaagatcaacctgaggaaggttctaaaaaggaaggctctaaaatagaagcaacacctttggattcacaaaaagaatccgaggataaggaagcagaagaagcctttgtacaagaagaagaagagaaccttacggaagataataaagaagattctgacagtgccgctgatgcaaatgacgacacggcaagtgaccatactgcagaggataacaaagaaactcctaaaaaagtcgagaacgaaaagagcgcagttctatccccatttcatgttcaagacttatttcgattcgatcaaacaatttttccagcagagattgatgatattgcgaaaaaaaatatctctgtagacttgacgcagccttctcgttttttactcaaagttttagccggagctaatattggagcagagttccatttagactcaggaaaaacctatattttaggtacggatcctacaacttgtgacatagtatttaatgacttaagtgtttctcatcaacatgctaaaattactgtcggtaatgacgggggcattcttatcgaggatctcgatagtaaaaacggtgtcattgttgaaggacgaaaaattgataagacctctacattgagctcgaatcaagttgtggctttaggaacgacattatttttacttatagatcatcatgcccccgctgatactatagttgcttctctatccccagacgattacagtttgtttgggagacagcaagacgccgaagccttagaaagacaagaggcccaagaagaagaagaaaaacaaaaacgcgctacactacccgcaggatctttcattcttaccctgtttgttggaggattggctattctctttggtataggaacagcttctcttttccataccaaagaagtggttcctttagaaaatattgattatcaagaagatcttgcccaggttatcaatcagttccctacggtgcgttatacgtttaataaaacgaacagccaacttttcttaatcggacatgtcaaaaatagtacggacaaaagcgagctgctgtataaagtagacgccctttcctttgtgaaatccgtagatgataatgttattgatgatgaagctgtttggcaggagatgaacatcctgttatcaaagcgacccgagtttaaaggcatcagcatgcattccccagaacctgggaaattcatcatcacaggctatgtcaagactgaggagcaagcagcttgcctcgttgattatttaaatatacattttaattacctctcgttactagagaataaagttgttgttgaaacccagatgttaaaagcaattgcaggccatcttcttcaaggaggttttgcaaacatccatgtggcctttgtgaacggtgaagttatccttactggttacgtcaataacgatgatgcagagaagttccgtgctgtagtgcaagagctgtcggggattcctggtgtgaggttggtcaagaattttgctgtcttactcccagctgaagagggaatcatagatttaaacctacgttaccccaatcgctatcgtgttacaggctattctagatacggagaaataagtatcaatgtagttgtcaatggcagaatcctcacaagaggggacgtgattgatggtatgacagtaacaagtatacaacctaacgcgatctttttagagaaggaagggttgaaatataaaatagactacaataaataa

SEQ ID NO: 18509 - DNA, 2760 bp, Chlamydia pneumoniae
gtgaaaactgtgatattgaacattggaagaaaaatcttgcaaggcatcaaaaaaaagaaaaaaaagatcgggattttaagtggtctcttttttttagatttagttttacttggtgtaagttcccagaggcctacagagacctcggcaaatgtaaaacacaatcttagagatgaaaagttagctgcttgtcctaaaaattcagcagcctcactttcagcaaagaaaagtcataccaagaaaaccactccaggttctatccccagtaaagtcttctctaaattcgacgcaacccaagataaaactttccaaaagacttcaggatccgcattcccagcaaaacctaccaccctgaaagaactggaagagagaaaaaaacctcgaccagagcgtagaactactgccgatgtaaaaagatccccacgcttcttaccaacacaagaagtcgaagagcctgtacctgccgcctctaaagaacaattagatagtatacaggtttgggaagaaaaacaaaattatgctcgcagagccgtaaatgctatcaatctgagtataaaaaaacaactcgaagagcaaacctccacagttacagagaaagacgtccaacctaaaacacaagcaacaccacacgcttcgaagaaaaacgttgcaagtccttcgacctctatgccaggaatcgagaaagcagcaacaacagtggctgtacctcaagacaaatctgaagaagaaaaagttaaagagcgattgacaaagcgggaacttacctgtgaagaccttaaagataacggctatactgtcaattttgaagacatttctattttagagttgttgcagttcgtaagtaaaatttctggaacgaactttgtctttgatagcaacgatttgcaattcaatgtcacgatcgtttcccacgatcctacttctgtagatgatttatctacaatcttactacaagtcttaaaaatgcatgacttgaaggttgttgaacaaggcaataacgtccttatctatcgtaatcctcatctttctaagctatccacagtagtcacagacagctccttaaaagaaacgtgtgaagctgttgtggttacccgagtgttccgtctttacagcgtcagcccctctgcagcagtaaatattattcaacctttactttcccatgatgctatcgttagtgcttcagaagctactcgtcatgttatcatctcggatattgctggtaatgtcgataaagtcagtgatttgctagcagctctagattgcccaggcacatctgtggacatgactgaatacgaagttaaatatgccaatcccgcagctcttgttagctactgccaagatgttcttggtactctggccgaagatgatgctttccaaatgttcatccaacctggaacgaacaaaattttcgtcgtctcttcaccacgtcttgcaaataaggcagagcagctcctgaagtccttagatgtcccagaaatggcacataccctagatgatcctgcaagtactgccttggctttgggaggaacaggaaccacgagccctaagagtttgcggttctttatgtacaagctgaagtatcaaaatggagaagtgattgctaatgccctccaagatatcggttacaatctatatgtaaccacagctatggacgaagatttcattaacactctcaatagtatccagtggttagaggtcaataactccatagttattatcggaaaccaagggaatgtcgacagagttattggcctcttaaacggtttagatttacctcctaaacaggtttacatcgaagttttaattctagataccagcttagagaaatcctgggactttggagtgcaatgggtagccctaggtgatgaacaaagtaaagtagcttatgcttctggactattgaataatactggcatagccacacctacaaaagcaactgtccctcccggcacgccaaatcctggttcgatccctcttcctacgccaggacaattgacagggttctcagatatgctgaactcttcgtcagcattcggtctaggaatcatcggaaatgtcctaagtcataaagggaagtctttccttactttgggaggcttattaagtgccttagatcaagatggagatactgtcattgtcttgaatcctagaatcatggctcaggatacgcaacaagcttcgttttttgtagggcaaacggtcccttaccaaactacaaatactattatccaagaaacaggaactgtaacgcaaaatatcgattatgaagatattggagtgaaccttgtcgttacctctacagttgctcccaacaatgtagttacactacaaatcgaacagacgatctcagaattacattccgcgtctggatcactaacacctgtcacagataaaacttatgcagccacacgcttacaaattcccgacggttgtttcttagttatgagtgggcatatcagagataaaactacaaaagtggtttcaggagtgcctttgctaaactccataccattaattcgtggtttatttagccgtaccatcgaccaaaggcaaaaacgcaatatcatgatgtttattaagcctaaggtgattagtagctttgaagaaggcactcgtgttaccaataaggaaggatacagatacaattgggaagctgatgaaggatccatgcaagtggcccctcgccatgctcctgaatgccaaggacctccttctttacaggctgaaagtgactttaaaataatagaaatagaagctcagtag

SEQ ID NO: 18510 - DNA, 516 bp, Chlamydia pneumoniae
atggttcactcacctacccaccaatgttatcattgtcaacagcctgccaccatatgctatacagaaatagataaggataaggttatacgctcttatgtatgcgcaacatgtccttgtcctagccattactataataatgagcacctgagtctatctaaaggggttggggttctcactttagagtgcggcaactgtaaaaccgtatggcattcaaagcaagacgacgaacaactgttaggctgccaccaatgttatacaaatttcaaaaatcagattaccagcaaactcaaaagtgagagagtggtatcttcatcctttactatggagaaaggccaaggctctcttcatataggtcgagcccctggggaagcttccaatacaaatcctcttttaaaacttatagcattaaatgaagctttacaagataccttagaacgagaggactacgagcaagcagcagtaatccgagatcagattaatcatttaaaaaccaaaaatccagatgacccttcctaa

SEQ ID NO: 18511 - DNA, 543 bp, Chlamydia pneumoniae
atgtctgttctccaagacactgagaaaaaaatggctgcggctttagatttttttcataaagaagtaaagtcctttagaacaggaaaagctcatccagcattagtagaaactgttgtagtcgatgtttatggcactacaatgcgtttgtctgatatcgcttcgatttctgttgcagatcttcggcaattggttatttctccctatgacgggaacaatgcttctgccattgcaaaaggaattattgcagcgaatttaaacttacagcctgaagtcgaagggtctattattcgtattaaggtccctgagcctactgctgattaccgacaagagatgattaagcaacttcgccgcaagtgtgaagaagctaagatcaacgttagaaatatccgcagagaagctaatgacaagttgaaaaaagactcggctcttacagaagatgttgtcaaaggtaacgagaaaaaaattcaggagttaactgacaagttttgcaagcagcttgatgagttaacaaagcaaaaagaagctgaaatagcttcaatataa

SEQ ID NO: 18512 - DNA, 747 bp, Chlamydia pneumoniae
atggctaagcaaactagacgagtcttgtttaaaatttctggggaagcattatctaaagattctagcaatagaattgatgaaatgcgtttatcccgactggtatcagagctaagagcagttcgtaataatgatatagaaatcgcccttgtaatcggcggtggcaatattttaagaggactcgctgagcaaaaggaacttcaaattaatcgtgtatcggcagatcaaatgggaatgctggctaccttgatcaatggtatggcagtagcagatgctttaaaagctgaggatatcccttgtcttttgacatctaccctatcgtgcccacagttagctgatctttatactccacaaaaatcaatagaagctttagaccagggaaagattcttatctgcaccactggagctggttctccttatctgactacagatactggagctgctttacgagcttgtgagcttaatgttgacgttttaatcaaagcgactatgcatgtagacggtgtctatgataaagatcctaggctctttccagatgctgtaaaatatgattttgtttcctataaggattttttgagcaatcaactaggggtaatggatgcatcagcaatttccctatgtatggattctcatattccaattcgtgtctttagctttttacagcactctctagaaaaggctctatttgaccctacgattggaacattagttagcgaggatgtaaaccatgtctgttctccaagacactga

SEQ ID NO: 18513 - DNA, 849 bp, Chlamydia pneumoniae
atgagcgacttttctatggagaccctaaaaacattaagacaacaaactggtgtagggttaacaaagtgtaaggaagctttagaagcttgcggtggtaacctagaagaagctgttgtctatttacgtaagttgggattggcatctgctgggaaaaaagaacacagagaaactaaagaaggcatcatagcagctaaaactgacgccaacggcactgcattaattgaagtgaacgtagagacagattttgttgcaaacaacgcagtctttagagaatttgtttccaatctacttaatgacattctcaaatacaaagtagataccgttgaagccctatcgcaagcagcctcgtcccaagatccctctctttctgtagacgaactcagagcagtgactatgcagactgtaggagaaaacatccgtattagtagagtggcatactttcctaaggctacaaattctactgtaggaatttattcccatggcaacggcaagacagtagctctgactatgctttcaggctcctctactgctgacagcttagcaaaagacattgcaatgcatgttgttgctgctcaacctcaattcctcagtaaagaaagcgttcctgctgaagctattgctaaagaaaaagaagtgattgcttctcaaattcaaggaaaacctcaagaagttattgagaagatcgttacaggaaaattaaacacattcttccaagaagcctgtttattagaacaaccatttattaagaacgccgacctttctattcaaagtttaatagatgatttctccaaaacctctggaagctctgttgcaatagaacagttcattttatggaaaataggagcctaa

SEQ ID NO: 18514 - DNA, 834 bp, Chlamydia pneumoniae
ttggaatcccaatcctgcaaacttacaattaaagaccttatgagtgccggtgctcattttggacaccaaactcgaagatggaacccaaagatgaaactttacatctttgaggagaaaaacggtctttacatcatcaatctagcaaaaactttacagcaattacgcaatgctcttccccacattcgcaaagtaattcaagacaataaaactgtcctattcgtaggaacaaaaaaacaagcaaagtgtgtcattcgagaagctgcaatagaagctggcgaattttttattgctgaacgttggctaggcggaatgttaaccaacatgacgactatccgaaattccattaaaacgttagacaaaattgaaaaagatttatctagaaatcaggcctatcttactaagaaagaagcagctcttttagctaaacgtcatcaaaaattattgcgaaaccttgaagggattcgttacatgaagaaggctcctggtcttctagttgttgttgaccctagctatgaaaaaattgctgttgcagaagcaaaaaaactcggaattcctgttcttgctctcgtcgatactaactgcgatcctactcctatcgaccatgtgatcccctgtaatgatgactctcttaaaagcattcgattaatcatcaatgtgattaaagaaaatattatcgaggccaaacataagcttggtatagaaattgtttctccagtgaaatctttagaagtgcccgatctctcagctttcgaatctagccaagatgacgaatctgacgaagagaatcgagaagaagatctattagcaaaaaaatttgatggcgaggcaaactaa

SEQ ID NO: 18515 - DNA, 771 bp, Chlamydia pneumoniae
atgttaaaaataaagcacttacatgctagctgtaatgatgtgaagattctggatgatttcaatttgaatatccaacctggaactatgcatgtcattatgggacctaatggggcaggaaaatcgactcttgctaaaattttagcgggagatgagagtgtcttggtatcttcgggtgagattgcattacaggagcaaaatttgctttctatgttgccagaagagcgttcccgagcagggctatttgttggttttcaaatgcctccagagattcctggagtcaataacaagatgtttttgcgagacgcctataatgcccgccgtcgtgcgaatcaagagggagatatttctattgatgagtttaatactctgctttcgactgtattagagacatatgagtataacgcgactacagatctatttttagataggaatgtcaacgagggtttttctggaggagaaagaaagcgcaatgagatttgccagatgctagttttagaacccgaaatggtcttactagatgaacctgattctggtttggatgtagatgcattacgtttgatttgtagagtcttggagaaataccgagagttacatcctaccagttccttatgcattgtgactcacaaccccaaattaggaaacctcattcgccctgatgttgttcatcttttattagatggtcgagtagcgctttcaggagacgtttctttgatgcatgaattagaagcaaaaagctaccaagaggtgactaagcgtgttgcgtggagataa

SEQ ID NO: 18516 - DNA, 759 bp, Chlamydia pneumoniae
atgctcatagttcttgctttccgacaggtctttttttcccactctcgttcccagttagaccgtctaaaaaattacctacggctcctaaaacaaaactttgctattaccctccccaaagaacgaacctcaaaaggacattcgctaatgctcacttttgacttcgcctcctttgacttctatacaaatatctttcccttccttgaggaacaaaagattcctgctgttgtaggggtagcttcccgatatattccatcaaatgctgctcaagaccttcacccttcacatcgtttaaaaccctctgaaactctagcattccaagacgagatcttctctaactacatgcccttttgttgccaaaatgaactgatagaaatggcaaagtctccctatatccaattagcatcctcaggattcgcaattcggaatctcatgaataatcctccgtatctcactacagaaattttactttcgcgacatcacatagaaacaataacaggagccaagcccttggcattcctcttccccttcgggaagtcagatcctacaagccggaagcttgctgcagatcactacccctattctttcctgttagggaataccattaacagaaaattaaaaactcataacatctaccgcttagacataaaacctatgcagtacgtctgcccgagtttatttcagagctctaggtatttaaaaaactggattaaagagaaaagtaaacagctgtatctcaaaaaacaacttccaaaaagataa

SEQ ID NO: 18517 - DNA, 975 bp, Chlamydia pneumoniae
atgacgactaattttccccaacctttaattcaagcaacctcattaacaaagcactattacaagcgttccttttggtttcagggaaagacaattgccagtcgtcctgttgacgacgtctctttttcactatactccagacgtgctgtcggacttattggagaatctggatcagggaaaagtaccctggcgttagctctcgcaggtctcctacctctcacctctgggttcttaacttttaacggcaccccaatcaagttgcattctaaacacggacgccatcaattacgatctcaagtacggttggtctttcaaaatccacaagcttcattaaacccgcgaaaaactatcctagatagtttaggccactctctgctttaccataaactcgtcccaaaagaaaaagtactagcaacggtaagggaatatttagaattggtagggttatctgaggagtatttttatcgttatcctcaccagctttctggaggacaacaacaacgagtctctatagcgagagccctattaggagtccctcagttaattatttgtgacgaaattgtttctgctctagatttatctattcaagcacaaattctgaatatgcttgccgagctgcaaaaaaaactcagcctcacatatctcttcatttcgcatgatcttgccgttgtacgctcgttctgcacagaggtattcattatgtataaggggcaaattgtagaaaaaggaaatacaaaacgcattttttctgatccacaacatccttatacgcgcatgttgttaaatgcccaacttccagagactcctgatcaaaggcaatctaaacctatattccaagaatatcacaaagattctgaagaatcttgctctacaggatgctacttttacaatcgttgtccacaaaaacaagaagcttgcaagtcagagatcatcccaaatcaaggagacgcgcaccatacataccgttgtatccattga

SEQ ID NO: 18518 - DNA, 1281 bp, Chlamydia pneumoniae
atgcttccattaatcatttttgtccttctatgtggcttttatacttcttggaatataggagctaatgatgtcgctaatgctgtaggccctagtgtaggatctggggtattgacattgcgacaagccgtggtcatcgctgctatctttgagttttttggtgctctccttcttggagatcgtgttgcagggactatagaaagtagtatcgtttctgtgaccaatcctatgattgcctctggggactatatgtacggcatgacggcagccttactagcaacaggcgtgtggttgcagctggcctctttttttggttggcccgtctcaacaacgcattctatagttggagctgtgattggctttggattggtccttggtaagggaacaatcatttactggaattccgtaggcattattttaattagctggattctctccccttttatgggtgggtgtgttgcttacctgatcttttctttcattcggcgccatattttttataagaatgatcctgttcttgctatggttcgtgttgctccgtttttagcagctttggtgatcatgactttaggaaccgtgatgatctctgggggcgtgatccttaaggtttcttcaactccctgggcagttagtggggttctggtttgtggacttctaagttatatcattacgttttactacgtccataccaagcactgttcctacatttcagatacaccaaaaaaaggcagtcttacctatcgtttgaaagaacgaggcggaaattatggaagaaagtatcttgttgtagaaagaatctttgcctacctacagattatcgtagcttgctttatggcgtttgctcacggatctaatgatgttgctaatgccattgctcctgtagctggagtcttgcgtcaggcatatcctgcttcctatacgtcgtatacattaattaggctcatggcatttggaggcataggcttggtcataggccttgcgatttggggatggcgtgttatagaaactgtaggctgtaaaattaccgagttaaccccgtctcgagggttttccgtggggatgggctcagcattaacaattgctttagcttctattttaggacttcctatatctacgacacatgttgttgttggagctgttttaggaataggtttagcacgagggatccgtgccattaacttaaacattatcaaagatattgtactctcctggtttattacgcttcctgcaggagctttattatccatactctttttctttgctttaagagctttgttccattaa

SEQ ID NO: 18519 - DNA, 1209 bp, Chlamydia pneumoniae
atggataagctaacagtacaagatctttctccagaagaaaaaaaagtcctcgtacgtgtagatttcaatgtccccatgcaagatggcaagatactcgatgacattcgtattcgcagtgcgatgcctacaatcaactatctacttaagaaacatgctgcagtgattttaatgagtcatttagggcgacctaaaggacaggggttccaagaggaatattctctgcaacccgttgtggatgttctcgaaggatacttaggacatcatgtgcctctagctccagattgtgtgggtgaggttgcacgtcaagctgtagctcagctttctcctggtcgcgttttgcttcttgagaacttgcgtttccatataggagaagaacatccagaaaaagacccgacgttcgccgcagaactctcttcctacggggatttctatgtcaacgatgctttcggaacttcgcatagaaaacatgcttcagtctatgtagtgccgcaggctttcccaggtagagccgcagcaggcctgcttatggaaaaagaattggaatttttaggaagacatctattgacctcccctaagaggcctttcactgccatccttggaggagctaagatttcttctaaaattggagttatagaggctctactgaatcaagtagactacctcttattagctggaggtatgggatttactttcctacaagccttgggaaaatccctagggaactctcttgtggagaaatctgccttggatcttgctagaaatgtattgaaaattgctaaaagtcgtaatgttaccatagttttgcctagcgatgtgaaagcagccgaaaatctccaatctaaggaatattctgtgatttctatagatcaaggcattcctccgcatcttcaaggctttgatattggacctagaacaaccgaagaatttatccgtattataaaccaatcagcgactgtgttttggaatggtcctgtgggtgtttatgaggtccctccttttgactctggatctattgctatagcgaatgccttaggcaatcacccttcagctgttactgtcgtgggtggaggagatgcggcagctgtggttgctttggcaggctgctctacaaaagtttcccatgtttctactggaggaggggcttctttagagtttctagagcagggcttcctcccaggtacagaagttttatctccatccaaaagctaa

SEQ ID NO: 18520 - DNA, 1095 bp, Chlamydia pneumoniae
atggttccttttcgtcagcatcatgcttatcagctgttaaaacagctacacacgtctgcaatttcagaagcagatagagtttcgtactattttaaacaaaaccgttctttggggtctaaggatcgtcagtggattcaaaatattatttttaatattttgcgtcatcgccgtcttcttgaaactttaattcttgattcgggagaacaagtaactccagaagctctcgttgcgaaagtaaacgaaggggttctagagaacttggacagttacagcgctattccctggcctgtgcgttactctatatctgatgatcttgcgcacttcttagttcaagattatggagaagaacaggccgaggagatcgccaagatttggttaacggaagctccgattacgattcgtgtgaatacagataaaatctccgtcaaagaactccaagagaagttagaatatccaagttctcctggagagcttcctgaggcattgcacttttccaaacgtcatcccttacaatctacagaagcatttcgtcgtgggtttttcgaaatccaagatgaaaactctcagagaatttctcagggcatttccctaacagataaagatatcgtcttggatttttgtgcaggagcaggcgggaaaagccttatctttgcgcagaaagcaaaacatgttgtgatcaatgacagtcgtaaagctattttgcaaactgcaaagcatcgtttattacgtgctggagctaggaatttttctttagcggatcaattacgtttaggatccttttctgtagttatcgtagacgctccttgttctggaacgggagttttccgacgacatcccgaacataagtggcaattttctaagaaattgttgttgaactatgtgcgagtgcaaaagagcatcttaaaacaagcaagtgcttatgtgggacctcggggacgacttgtctacattacctgttctcttttaaaagaagaaaatgaggctcatgttgcctacatgcactctttaggttggaaagaagtccacagaaaaacgcttcccttacaagtaggtaagggcgacgcattttttacttctcattttcaaaaaatctag

SEQ ID NO: 18521 - DNA, 3723 bp, Chlamydia pneumoniae
ttgacctggataccccttcactgtcattctcaatactctgttcttgatgcaatgagctccatcaaagatttcgttgcgaaaggtcaggaatttggaattcccgctctggctctaacagaccatgggaatctttatggagctgttgatttctataaagaatgcactcaaaaagggatccaacccatcattggttgcgagtgttatattgctccaggatcacgtttcgataagaaaaaagagaagcgtagtcgtgcagcacaccatctcattttattatgtaaaaatgaacaagggtaccgcaacctttgtattttaacctccctagcatttactgagggtttctattactttcctcggatagacaaggatcttttgagacagtactctgaaggcttaatctgtttatctggttgtttatctagttctgtttcagatgctgccttaaaatctccggaagctctgcttcttgaattgcaatggtttcaagacctattcaaagatgattatttcacagaagtacaactacacaagatgtccgaagagagcattgcaggctttaaagaggaatggttaaagcaagaatattactctctcattgaaaaacagatcaaagtcaatactgcagtgttagaagcaagtaagcgcttaggcattcctactgtagctacgaatgacatccattacatcaatgcaaacgattggcaagctcatgaaatcctgttgaatgtccaatctggggagactgtgcggattgcgaaacagaatactcatatccccaatcctaaacgaaaggtctatcgcagtcgcgagtactattttaaatcccctgcgcaaatggcagagttatttaaagatattcctgaggtcatttccaacacattagaagttgccaaacggtgtgattttacttttgatttttccaagaaacactaccctatctatgtccctgaatctttaaaaaccttaaacagctacacggaggaagaccgttatcaagcttctgcagtcttcttaaaacagctagctgaagaagctttgcctaagaaatactcttctgaagttcttgctcatattgctaagaaatttccacatcgggaccctatcgatattgtcaaagaaaggatggacatggagatggccatcatcattcctaaaggaatgtgtgactatcttttgattgtttgggacattattcattgggccaaagcaaatggcattcctgtaggccctggaagaggttcaggagctggatccgtattactatttttgttagggatcacagaaatcgagcccatacgatttgatttattctttgagagatttatcaatcctgagcgtttgtcttacccagatattgacatcgatatttgcatggcaggacgtgaacgtgtcattaattatgcaattgagcgtcatggcaaagataatgtagctcaaatcattacttttggaactatgaaagccaaaatggctgtcaaagatgtgggaagaactttagacatggccttatctaaagtgaaccacattgcgaaacatattccagatttaaatactacgttgtctaaagctttagaaacagatcctgacctacatcagctctatattaacgatgccgaatctgcacaagtgattgatatggcgctttgcttagaaggctccatacggaatacaggggttcatgctgctggtgtgattatctgtggagaccagctgaccaatcacattccgatttgtatttctaaagactccacaatgattacaacacaatactctatgaaacccgtggagagtgttggaatgcttaaagtcgacttattagggctcaagactttaaccagtatcaatattgcaatgtctgcaattgaaaagaaaacaggacaatcgctagctatggcgacactgcctttggatgatgccaccacattttctcttttacatcagggaaagactatggggatatttcaaatggaatccaaggggatgcaagaattagcaaaaaacctacgccctgacctctttgaggaaatcattgctatgggtgctttataccgcccaggccctatggatatgattccttcttttattaaccgcaagcatggcaaagaaattatagaatacgaccatccccttatggaatccattcttaaggaaacctatggaattatggtctaccaagagcaagtcatgcagattgctggtgcattagctagttattctcttggagaaggtgatgtattacgacgtgccatggggaagaaagacttccaacagatggagcaggagcgcgaaaagttctgtaaacgcgcctgcaataacggcatagatcctgagttagcgactgtcatctttgataagatggaaaaatttgctgcctacggctttaacaaatctcatgctgctgcctatggcttgattacttatacaacggcgtatctcaaagcaaattatcctaaagagtggcttgcggccttacttacctgtgattctgacgatattgagaagataggaaaactgattcgagaagctcagagtatgggcattccgattcttcctcctcatatcaatgtctctagcaatcactttgtagctactgatgaaggcatacgctttgcgatgggagctattaaagggattgggcgtggtttaattgagagcattgtagaagagagagatcatcatggtccttatgagagcatccgcgactttatccagaggtctgatttaaaaaaagtttcgaaaaaaagtatagaaagtttaatcgatgcgggttgttttgattgctttgattctaaccgagatttgctgttagcctctgtagagcccctctatgaagctattgccaaagacaagaaagaggctgcatctggtgtgatgacgttctttactttaggagctatggatcgaaaaaatgaagtccccatttgtcttcctaaagacattccgactcgctctaagaaagaacttttaaaaaaagaaaaagagctcttagggatttaccttacagagcaccctatggataccgtgcgagatcatctttctcgtctttctgtagttcttgctggagaatttgaaaatctcccgcatggttctgtagtccgcaccgtgtttattattgataaagtaacgactaaaatttcatcaaaagcgcaaaagaagtttgctgtccttcgtgttagtgatggcatcgattcttatgaactgccgatctggccagatatgtatgaagaacaacaagaacttctagaagaagatcgtcttatctatgctattcttgttttagataagcgcagtgattctctacgtatttcttgtcgctggatgaaagatctttctattgttaatgaaaacatcatttatgagtgtgatcaagcttttgatagaataaaaaatcaggtgcaaaaaatgtcatttacaatgtcaacctctggcaaagaaactaaagctaaagggaataagcctaatgagaatgggcatacacaagctttagctcctgtgactctatctttagatctcaatgaactccgtcatagtcatctatgtatcttaaagaagattgtgcaaaagcaccctggctcacggacattagttttagtttttactcaagataacgaaagagttgcctcgatgtctcctgacgacgcgtatttcgtttgtgaagatattgaagaactccgtcaagaacttgtgactgcagaccttcctgtgcgtgtaattactgtttga

SEQ ID NO: 18522 - DNA, 1293 bp, Chlamydia pneumoniae
gtgactgtaactctccccaaaggggtctttgatatatttccttatcttgcagatgctaaacaattgtggcgtcacacttcactttggcatagtgttgagaaggcaattcataccgtttgcatgctttatggattttgtgaaattcgtactcctatttttgaaaaatcagaagtgtttttacatgtaggggaagaaagtgatgttgttaaaaaagaagtctattcgtttttagatagaaaaggtcgttccatgactttgcgtcccgaagggactgccgctgttgtccgttcttttcttgaacacggggcctctcatcgaagtgataataagttctattatattcttcccatgtttcgctacgaacgtcagcaagcgggtagatatcgtcaacaccatcagttcggtgttgaggctattggtgtgcgtcaccctctaagagatgcagaagttctcgctttgctttgggatttctactctcgtgtcggtttgcaacatatgcaaattcaactcaatttcttaggaggaagtgagacaagatttcgatacgataaggttctacgcgcttatttgaaagagtccatgggagaattatcggcattaagccagcagagattttcaacgaatgttttgcgtattttggattcaaaggagcctgaagatcaagaaattatccgtcaagcgcccccgattctagactatgtttctgatgaagatcttaagtattttaatgaaattttagacgctttgagagttttagaaatcccatatgctatcaatcctcgtttagtgcgtggtttggattattattcagacttagtctttgaagcgactaccacattccaagaggtctcttatgccttagggggaggcgggcgctatgacggcttgatttcagcttttggaggagcttctcttcctgcctgtggtttcggtgttggccttgaaagagcgattcaaacgttattagctcaaaagcgtattgagccacagttccctcataaactgcgtttgattccaatggaaccagatgcggatcagttttgtttggaatggtcgcaacatttgcgacggttgggaatccctacggaagtcgattggtctcataaaaaagtaaaaggagctctaaaagcagcgagtacagaacaggtttctttcgtttgcttaatcggtgagcgagagttaatttctcaacagttagttattaaaaatatgtctctgcgtaaagaattctttggaacaaaagaagaagtagagcaaaggttgttatatgaaatacagaacacaccgttgtaa

SEQ ID NO: 18523 - DNA, 1755 bp, Chlamydia pneumoniae
atgaaatacagaacacaccgttgtaatgaactcacaagtaatcatataggtgagaatgttcaattggcaggatgggtgcaccgttatcgtaatcatgggggtgttgtcttcatagatttgcgagatcgttttggtattactcaaattgtgtgccgtgaagatgagcaaccagaactgcaccaacgtttggatgctgtgcgttctgaatgggttctttctgtacgagggaaagtatgtccacgtcttgcaggaatggaaaatcctaacttagcaacaggacatattgaagttgaagttgcaagctttgaagtgctatccaagtcgcaaaatctccctttttccattgccgatgaccacatcaatgtgaatgaggagctgcgtttagagtatcgttatctagatatgcgtcgcggggatattattgagaagttgctttgtcgtcatcaggtcatgcttgcttgccgcaactttatggatgctcaaggattcacagaaatcgtgacccctgtattaggaaaatccactcctgaaggtgctagagattatcttgttccctctagaatctatcctggaaaattttatgctctaccgcaatcaccacaactttttaagcagcttttaatggttggaggcttggatcgttatttccaaatcgccacgtgctttagagacgaagatttgcgagcagatcgtcaacctgaatttgctcaaatagatattgaaatgagctttggggatacccaggacctacttcccattatagaacaattggtcgcaacactgtttgctacgcaaggtatagagattcctttgcctttggctaaaatgacctatcaagaagctaaggattcctatggtacagataaaccagatttaagattcgatcttaaattaaaagattgtcgagactatgcaaaacgttcctcattctctattttcttagatcagttggctcacggaggtacgatcaaaggtttttgtgttccaggtggggctactatgtcccgcaagcaactcgatggttataccgagtttgtaaagcgttatggggctatggggcttgtctggattaaaaatcaagaggggaaagttgcttccaatattgctaaatttatggatgaagaggttttccacgaactctttgcttattttgatgccaaagatcaggatattttgctcttgatagcagctcctgaatcagtagcgaatcagtctctcgatcatctgcgtagattgatcgcaaaagagcgcgaattgtatagcgacaatcaatataactttgtttggattacagatttccctcttttctctttagaagatggaaaaattgtggcggaacaccatccgtttacagcacctttggaggaggatattcctctgttagaaacagatcctctagcagtgcgttcgtcaagctatgacttggttttaaatggatatgaaattgcttcgggatctcaaagaattcataacccagacttgcaaagtcaaatatttactattttaaaaataagtcctgagagcatccaagaaaaatttggattctttatcaaagctttgagttttggaaccccacctcatctagggattgccttagggttagatcgattggttatggttttaacagcagcagagagcattcgcgaggtcatcgcgtttcctaaaacacagaaagcatcggatcttatgatgaatgctccctcagaaattatgtcttcccaattaaaagagctaagtattaaggtagctttttga

SEQ ID NO: 18524 - DNA, 471 bp, Chlamydia pneumoniae
atgagagtagttcttcattgtcctgatattccacagaatactggaaatataggtagaacttgtgtagccctaggcgccgaactcattttggttcggcccttgggcttttctttagccgataaatttgtcaaacgtgcagggatggactactgggacaaactccaattgacagtagtggattctatagaagaagcactacatgatgtccctgaagatcagattttttgtctttctaccaaaggttcagcatcttatactgaattttccttgccatcttcaggcacctacgtctttggatctgaatccaaaggtcttccaaaagagatcttaaaaaaatattataaaaattgcctgcgcattcccatgcaacaagacatccgttctctaaatttagctaccagtgtagggatcgttttatatgaagtggtaaggcagaaaaccgtagcattgcaaaagaatcctacggtttaa

SEQ ID NO: 18525 - DNA, 750 bp, Chlamydia pneumoniae
atgagtttattaaaagatacggtttttacttgcctagattgtgaaatgacaggtctagatgtaaaaaaagatcgtattattgaaattgccgctgttcgctttactttcgatagtgtaattagttcgatagaatttttaatcaatccagaacgcgttgtatctgcggagtcccagagagtccaccatatctccaacgctatgttgagagatcagccgaaaatcgccgaagtttttcctcaaatcaaagcattttttaaagaaggcgactatatcgtaggacatagcgtcggttttgatttgcaggttctcgctcaagagatggaaagaatcggagagaccttcctctcaaagtataccattattgataccctccgattagcaaaagaatatggagatagtcctaataattctctagaatccttagccgtacactttaatgttccctatgatgggaatcatcgtgccatgaaggatgtagaaattaatatcaatatttttaaacatctttgtaaacgtttccgaacgttagaacaactgaaacaggtgttagcaaaacctattaaaatgaaatatatgcccctagggaaacacaagggacgatgtttttcagaaattcctcttgcctatcttcaatgggcatcaaaaatggatttcgattcagaccttcttttttctatccgtcatgaaatcaagcatagacaaaaggggaccggattttcacaagttaacaatccctttatggaattgtaa

SEQ ID NO: 18526 - DNA, 468 bp, Chlamydia pneumoniae
atgcttaagaaaaaacccgtctcgtttagctgtattgacggacatatttataaaattttccctaatgatcttaatgctaataatactgtcttcgggggattattaatgagtttgctcgatcgtttagccttagtggtcgcagaacgacacacagaatccgtctgtgttactgcttttgttgatgccctccgcttctatgctcctgcatatatgggggaaaatctgatttgtaaagctgcagtaaacagaacatggcgtacttccctagaagtcggggttaaagtgtgggcagaaaatatttataagcaggaacgacgtcatattacctccgcatactttacatttgttgctgtcaacgaagacaaccagcccattcctgtccatcagattgttccagaaactccagaagaaaaacgtcggtataatgaagcagatcgacgacgtcaagcaaggcttgaactgaaataa

SEQ ID NO: 18527 - DNA, 1626 bp, Chlamydia pneumoniae
gtgctacgaatcttttgctttgttatttcttggtgccttatagcttttgctcaaccagatttaagtggattcgtttccatattaggagccgcctgtggttatggattcttttggtatagtctagaacccttaaaaaaaccctcattacctctaaggactctttttgtatcctgttttttctggatcttcacaatagaggggattcatttttcttggatgctctcggatcaatatataggcaaactcatctatttggtatggcttacattaatcacgattttgtccgttctattttcaggattttcttgccttctagttgcaatcgtacgtcagaaacgcacagcttttttatggagccttcctggcgtatgggtcgctatcgagatgcttcgattttatgggatcttttctgggatgtccttcgattatcttggttggcctatgacagcctctgcttatggacggcagtttggcggatttttggggtgggcaggtcagagcttcgctgtcatagctgtaaatatgagcttttattgtctactactgaaaaaacctcatgctaaaatgttatgggtgctcactcttcttttgccctatacttttggagcaattcattatgagtatcttaaacacgcgtttcaacaagataagagagcgctgcgtgtcgctgttgttcaacccgcgcatccccccatacgaccgaaacttaagtccccaatagtcgtctgggaacaactcctccaactcgtatccccaatacaacaacccatagatttgctgattttcccagaagtagtcgtgccttttggtaagcataggcaagtctatccctatgaatcctgcgcacatttattgtcttcttttgctccacttcccgaaggtaaggcatttctatcgaatagtgattgtgccacagctctgtcacaacactttcagtgtccagtaattattggcttagaacggtgggtgaaaaaagagaacgttttgtattggtataactctgctgaggtaatatcacacaaaggaatttccgtaggatacgataagcgtatccttgtgcctggtggcgaatatataccaggagggaaattcggatccctaatttgtagacaactatttcctaaatatgctctaggatgcaagagacttccaggtagacgttctggagttgtgcaggtccgaggtttacctcgtatcgggatcaccatttgctacgaagaaactttcggctatcggttgcaatcctacaagagacaaggagccgaactccttgttaacttaacaaatgacggatggtatcctgaatcacgactccctaaagtccatttcctccatgggatgttgagaaatcaagagtttgggatgccttgcgtgcgagcttgccaaactggtgttacagcagctgtggattctctaggtcgaatactcaaaattcttccttatgatactagagaaactaaagccccctcaggggtattggaaacctctttgcctctatttaattataaaacgctttatgggtattgtggagattaccctatgattttgatagctttctgtgcagtcagttatctaggaggaggattcttaggatatcgcttgcttgctaaaaaagaaattcgataa

SEQ ID NO: 18528 - DNA, 864 bp, Chlamydia pneumoniae
ttgtcaggtttttacatgttagaacgaactcaaagaacgttaaagcgagaggttcgctattctggagtgggaattcacttagggaagtcctcaactctccatttgcaacctgcacaaacaaatacaggtattgtttttcaaagacagtctgcctcaggtaactacgaaaatgtccctgctttactagatcatgtctacactacaggaagaagtacaacattatctaggggtagtgctgtaatcgccactgtcgaacatcttatggcagcattgcgatctaacaatatagataatctaattatccaatgtagtggagaggaaatccccataggggatggaagctcaaatgtctttgttgagttaatcgatcaagcaggtatttgtgaacaagaagataaggtttccattgcgagactaacacgtcctgtatattatcaacatcaggacatttttttagcagcctttccctctgatgagctgaagatttcctatacgttgcattatcctcaaagttcaacaatagggactcaatacaaatctttggtgattaatgaagagtcttttcgccaggaaattgctccttgtagaacatttgctctatacaatgagctatgtttcttaatggaaaaggggctaattggagggggatgtttggataatgctgtagtttttaaggacgatggtattattagtagaggacaattaagatttgccgatgaaccagtacgacataaaatactggatctgattggagatctttccttagttggcaggccttttgttgcgcatgtattagctgtcggctccggccactcctccaatattgcttttggtaaaaaaattttggaagcattagaactataa

SEQ ID NO: 18529 - DNA, 462 bp, Chlamydia pneumoniae
atgaatcaaccctctgtcatcaaattacgcgaattattagatttactcccccacagatatccttttttattagtggataaagttttatcttatgacatcgaggctcgcagtatcacggcacaaaaaaatgtcacaataaatgagcctttttttatggggcattttcctaacgcgcctattatgcctggagtcttgatattagaagctttggcccaagctgctggtgtattgataggcttagttctagaaaatgataggaataagcgtatcgcattatttttagggatacagaaagctaagtttcgtcaagctgttcgccctggagatgtacttaccctgcaagcagatttttctttaatatcatcgaaaggaggtaaagcttgggcacaggcgcgtgtagattcacagctagtcactgaagcagagctgagctttgctctggtagataaggaatccatataa

SEQ ID NO: 18530 - DNA, 840 bp, Chlamydia pneumoniae
atggcgagcattcacccaactgcaattatcgagccaggagctaaaattggaaaggatgttgttattgaaccgtacgttgttataaaagctacggtaaccctttgtgacaacgttgttgttaagtcctacgcatatatcgatggcaatacaaccataggcaaggggacaacaatatggccctctgcaatgatcggtaataaaccccaagatttaaagtatcaaggggaaaaaacctatgtgactattggtgaaaattgcgaaattcgagagttcgctatcatcacgtcttcaacattcgaaggtacaacagtctctatcgggaataattgtttgattatgccctgggctcatgttgcccataactgtactattggaaataatgtcgttctaagtaaccatgcacaacttgcaggacatgttcaagtcggtgattacgctattcttggtgggatggttggagtgcaccagtttgttcgcatcggagcgcatgctatggtaggagccctcagtgggattcgtcgtgatgttcctccctataccattggaagtggaaacccttaccaactcgctggtattaataaagtaggactacaacgtaggcaggttccttttgctacgcgattagccctcattaaggcttttaaaaagatttatcgtgctgacggatgtttttttgaatctctagaagaaactctagaagaatatggagacattccagaagtaaaaaacttcattgagttttgtcaaagcccaagtaagcgcggcatcgaacgaagcatagataagcaagcccttgaagaagaaagcgcagacaaagaaggagttttgattgaatcttaa

SEQ ID NO: 18531 - DNA, 660 bp, Chlamydia pneumoniae
atgcggtctcatattagtgtgatgggaaaaaaagaagggatgattcacatctttgataaagatggatccttggttgcttgctcagtaattcgcgttgagcctaacgttgttacccagatcaaaactaaggaaagcgacggatatttctccttgcaaataggagcggaagaaatgaatgcccccgctcatacaattacaaaacgtgttagtaagcctaaactcggacatttgcgtaaagctggtggtcgagtttttcgttttcttaaagaagtccgaggttctgaagaggctcttaatggggtgtctttgggagatgcttttggattggaagtttttgaagatgtttcctcagttgatgttcgtggaatttcaaaaggaaaaggttttcaaggtgtcatgaagaaatttggttttcgtggcggtccaggaagccatggttcagggtttcatcgtcatgcaggttctataggaatgcgatcgactcctggtcgttgtttccctggaagtaagcgtcctagtcatatgggcgcagagaacgttactgtaaaaaatttagaagtaataaaagtagatttagaaaaaaaagtactgttagttaaaggtgccattcctggagcgcgaggctctattgttatagtgaaacattcttctagaacttag

SEQ ID NO: 18532 - DNA, 675 bp, Chlamydia pneumoniae
atggttttattatcaaaatttgatttttcaggaaataaaataggcgaagttgaagtagcagactctttgtttgcagatgagggcgatggccttcaattgatcaaggattatattgttgctattcgcgcgaataaaagacagtggtctgcatgcactagaaatcgttctgaagtgagtcattctacaaaaaaacctttcaaacaaaaaggtacgggtaatgcccgtcagggatgtttagcttctcctcagtttcgtgggggtgggattgtttttgggcctaagcctaaatttaatcaacacgtacgtataaaccgtaaagaaagaaaagccgcaatcaggcttttgttggcgcaaaaaattcaaacaaacaaattgactgtagttgacgatacggtctttgtagatgctttaacagctcctaaaactcagtcagcgttaaggtttttaaaagattgcaatgttgagtgtcgtagcattctctttattgatcacttagatcatgtagagaagaatgaaaatttaagattaagtttgcgtaacctcactgcagttaagggttttgtctatggaatcaatatcaatgggtatgacttagcttctgctcataatattgttatttctaaaaaagctttgcaggaacttgttgagcgtcttgtttctgaaacgaaagattaa

SEQ ID NO: 18533 - DNA, 336 bp, Chlamydia pneumoniae
atgaaagatccttatgatgtaattaagcgtcactacgtaacagagaaagctaaaatgttagagcatttaagcgctggaactggagagggaaagaaaaagggaagcttttgtaaagaccctaaatttgtttttatagtctctcatgatgcaacaaagccattaatcgcccaagctttagaggcaatttacgttgataaaaatgtaaaagtaaagagtgtgaacaccataaatgtaaaacctcaacccgcccgcatgtttcgagggcgccgtaaaggaaaaacctcaggatttaagaaagcaattgtaactttctatcaagggcactctgtcggataa

SEQ ID NO: 18534 - DNA, 855 bp, Chlamydia pneumoniae
atgtttaaaaaatttaaaccagtaactccaggaactagacagctggtccttcccgcttttgatgagttaacaacgcgtggtgagttgcgcggtacgaagtcaaaaagaagtcttcgaccaaataaaaagctctctttctttaagaagagttctggtggaagagataatttaggccatatatcctgccgtcatcgtggcggaggagcaaaacaattgtatagggtcgttgacttcaaacgtaataaagatgggattactgcgaaagtagttactgtagaatacgatcctaatcgttctgcatacattgctctcttaagctacgaagacggagaaaaacgttacattctcgcccctaaaggcatccaaaggggagacgttgttgtttcaggtgaaggaagtccatttaagcctggatgttgtatgactttaaaaagcatacctttaggattgtcagttcataatattgaaatgcgtccttcttcaggtggaaagcttgtaagatctgctggattagctgctcaagttatagctaagtctccaggatacgttactttaaagatgccttctggagagttccgtatgttaaatgagggatgcagagctaccattggtgaagtttccaatgccgatcacaacctacgtgtagatggcaaagctggaagaagacgttggatgggagttcgtcctacagtccgtggtactgcaatgaaccctgtagatcatccccacggtggtggagaaggtcgccataatggttatattccacgtacaccttggggaaaggttacgaagggattaaaaacacgtgacaagaacaaaagtaataaatggattgttaaagatcgtaggaaataa

SEQ ID NO: 18535 - DNA, 267 bp, Chlamydia pneumoniae
atgagtagatcgttaagaaaaggtccgtttgttgatcaccacctcctaaaaaaagtgcgtgcaatgaacatagaggagaaaaaaactcctatcaaaacatggtctcgtcgttcaatgattactcctgagatgatcggccatacgtttgaagttcacaacgggaagaaatttttaaccgtatttgtttcagaaactatggtgggtcataaattaggagaattttctcccacaaggatatttaaaagccatcctgtgaagaaagggtaa

SEQ ID NO: 18536 - DNA, 336 bp, Chlamydia pneumoniae
atgtttaaagcgaccgcccgatatattcgggtacaacctcgtaaagctagattagctgctgggcttatgagaaatctaagtgtgcaagaggctgaggaacagctgggattttctcagttgaaagctggaagatgtttaaaaaaggttttaaatagcgctgtagctaatgctgaattgcatgaaaatataaagcgtgaaaatttaagcgttaccgaagttcgagtagatgccgggcctgtctacaagcgatctaaatcaaaaagtagaggaggacgctctcccattttaaaacgtaccagtcacttgactgttattgttggtgagaaggaacggtaa

SEQ ID NO: 18537 - DNA, 672 bp, Chlamydia pneumoniae
atgggtcagaaaggttgtccaatcggatttcgtacaggggttacaaaaaaatggcgttctctttggtacggaaataaacaagaatttggtaaatttctcatagaagatgtaagaattcgacagtttttaagaaaaaaaccttcatgtcaaggtgccgctggatttgttgtccgtcgtatgagtggtaaaattgaagtgaccatccaaaccgctcgtcctgggttggtaattggaaaaaaaggcgctgaagttgatctgcttaaagaagagctcagagctcttaccggaaaagaagtctggttagaaatcgcggaaattaaacgtcccgaactaaatgcaaaattagtagctgataacattgcaagacaaattgaacgtcgagtctcttttagacgggctatgaaaaaggcaatgcaatcagtaatggatgctggagctgttggtgtaaaaattcaagtttcaggcaggttagcaggagccgagattgctcgttctgaatggtataaaaatggccgtgtgccgcttcatacgctaagagctgacattgattatgctacagcttgtgcggaaactacctacggaattatcggtataaaagtttggattaatcttggagagaactcctcttctacaactcctaacaatccggcagcaccctctgcagctgcttaa

SEQ ID NO: 18538 - DNA, 417 bp, Chlamydia pneumoniae
atgttaatgcctaaacgaacaaaatttcgtaagcaacaaaaaggacagtttgcaggattaagtaagggagctacatttgtagacttcggagaatatgcaatgcaaactcttgagcgtggctgggtcaccagtcgtcaaattgaagcctgcagggttgcgattaatagatatttaaaacgtcgaggaaaagtatggattcgtatttttccagacaaaagtgtaacaaaaaagcctgcagaaactcgtatgggtaaaggtaaaggggccccagatcattgggtagcagtagttcgtccaggacgtatattgtttgaagtagcgaatgtctctaaagaagatgctcaagatgccctccgaagagctgctgccaaactaggaataaaaacacgttttgttaagcgagtggaaagggtataa

SEQ ID NO: 18539 - DNA, 261 bp, Chlamydia pneumoniae
atggctagtgaaccaagaggctctagaaaagttaagattggtgttgttgtctcggcaaaaatggaaaaaactgtcgttgttcgagtagaaaggatattttctcatcctcagtatcttaaagtagtgagaagttcaaagaaatattacgctcacactgaactaaaagtttctgaaggggataaagttaaaattcaagaaacacgacctttgtctaagcttaaaagatggcgcgttatagaacatgttggcgtggtaagttag

SEQ ID NO: 18540 - DNA, 369 bp, Chlamydia pneumoniae
atgattcagcaagaaagtcagttaaaagttgccgataatactggagctaaaaaagtaaaatgcttcaaggttcttggaggttctcgtagacgttatgctactgtcggagatgtcattgtatgctcagttagagatgtcgaacctaatagttctataaaaaagggagacgttatcaaagctgtgatcgtgcgcacacgtcggcatattacaagaaaagatgggtctactttaaaatttgatacaaatagctgtgtaattatcgatgataaaggaaatcctaaaggaacaaggatttttggccccgtagctcgagaaattcgagatagaggttttataaaaattagttctttagctcctgaggtaatttaa

SEQ ID NO: 18541 - DNA, 336 bp, Chlamydia pneumoniae
atgaaaaagcaaaacattcgtgttggtgataaggtatttatattagctggtaatgataaaggaaaagaaggaaaagtcctttctcttactgaagataaagtagttgtcgaaggtgtaaacgttcgcataaaaaatataaaacgtagtcaacaaaatcctaaaggtaaacggattagtatagaggctcctatccatatttctaatgtacgtttaaccatagctggtgaacctgccaaactctctgtcaaagtgactgaacaggggcgggagttgtggcaaagacgccctgacggaacatcccagctgtatcgtctagtgaggggaaagaaaggctaa

SEQ ID NO: 18542 - DNA, 543 bp, Chlamydia pneumoniae
atgagtagattaaaaaaattctatactgaagaaattcgcaaatctttgtttgaaaagtttggctatgcaaataaaatgcagatccctgttcttaaaaaaattgtcttaagtatgggacttgctgaagccgctaaagataaaaatttattccaagcccacttagaagaattgaccatgatctctgggcaaaaaccgttagtaacaaaagctcgaaattctattgccggttttaaattacgagaaggtcaaggaatcggtgcaaaagttacccttcgtggaattcgtatgtacgattttatggatcgtttctgtaatattgtttctccacggattcgcgacttccgcggattttctaataaaggagacggaaggggttgctattctgtaggattagacgatcaacaaattttcccagaaattaatttagatcgtgtgaagcgcacccagggattgaatatcacatgggtaactaccgcgcaaacagatgatgagtgcaccactctattagagttgatgggcttacgatttaagaaagctcaataa

SEQ ID NO: 18543 - DNA, 402 bp, Chlamydia pneumoniae
atgggcatgacaagtgattctatagcagatttgttaacgcgaattcgtaacgctttgatggcagaacatctgtatgtagacgtagagcacagtaaaatgcgagaggctattgtaaaaatcctcaagcataaaggttttgtggctcattatttagtaaaggaagaaaaccgcaaacgcgctatgcgtgtgtttttacaatattccgatgatcgtaaaccagtaatacaccaactgaaacgggtatcaaaaccctctcgaagagtctatgtatcggctgcgaaaatcccttacgtctttggaaatatgggaatttcagtcctctccacttctcagggagttatggaaggttctctagccagatctaagaatattgggggcgaattgctctgtttggtgtggtaa

SEQ ID NO: 18544 - DNA, 552 bp, Chlamydia pneumoniae
atgtctcgtaaggctcgagaacctattctacttcctcaaggagtagaagtttcgattcaagatgataaaattattgtaaaaggtcctaaagggtccttaacacagaaatcggtcaaagaagtagaaatcaccttaaaagataacagtatatttgtacacgcagctccccatgttgtcgatagacctagctgtatgcaggggttatattgggcgctcatttcaaatatggttcaaggtgtccatttaggatttgaaaaacgtttagaaatgattggagtgggtttcagagcctctgttcaaggtgcatttttggatctctccattggggtttctcaccctacaaaaattcctatcccatctactcttcaggtatcagttgaaaaaaatactctgatttcagtgaaagggcttgataagcagttggttggtgaatttgctgcaagtattcgcgccaaacgtcctcctgaaccttataaaggtaagggaattcgttatgaaaatgaatatgtccgtcgtaaagctggtaaagctgcgaaaacaggcaaaaaatag

SEQ ID NO: 18545 - DNA, 372 bp, Chlamydia pneumoniae
atggaaagttcgttatgtaaaaagtcattaatgaaaagacgaagagctttgcgagtgcgtaaagtattaaaaggttcccctacaaagcctcgtttgtccgtagtgaaaacaaataaacatatttatgtacagttgatagacgattctatcggcaagacgttggcttccgtttccactctatcaaaattaaataagagtcaaggtctgactaaaaaaaaccaagaagttgctaaagtattaggaactcaaattgctgaattgggaaaaaaccttcaacttgatcgagttgttttcgatcgcggtcctttcaaatatcacggaattgtttctatggtagctgatggggctagagagggtggtttacagttttaa

SEQ ID NO: 18546 - DNA, 498 bp, Chlamydia pneumoniae
atgtcgctatcaaagaattctcataaagaagatcaattagaagagaaagttcttgttgttaaccgttgctccaaagttgttaagggaggacgaaagttcagtttttctgctttaattttagtaggagatggcaagggtcgtttgggctatggttttgctaaagccaatgaactcacagatgccattcgtaaaggtggtgaagctgcaaaaaagaatttaatgaagatagaagctttagaagatggttctattcctcatgaagttcttgtccatcacgatggagcacagttgctgttaaaaccagcaaaacctggaactggaattgttgccggttctcgtattcgtttgatcctagaaatggctggtattaaagatattgtagctaaaagtttcggatctaataaccctatgaaccaagtgaaagcggcgtttaaagctcttacaggactcagcccacgtaaggatttgttaagaagaggagcggctataaatgattaa

SEQ ID NO: 18547 - DNA, 435 bp, Chlamydia pneumoniae
atgattaagttagaatcattatttgatatttctgaacgtaaacgaagaaaaaaattattaggtcgtggtccttcttccggtcatgggaaaaccagtggtcgtggtcataaaggagacggtagccgttcgggatacaaacgtcgttttggctatgaagggggaggagttcctttatatagaagagttcctacaagagggttttctcataaacgttttgataaatgcgttgaagaaattactacaggacgtttagccgagcttttccaagaaggagaagcaattactttagatgcattaaaagcaaagaaagccattgcgagacaagctgtacgagtcaaagtcattctcaaaggagatttggaaaagacttttgtatggcaagatactgctgtagtcctatcgcaaggagtacaaaatttgctaggcattacttaa

SEQ ID NO: 18548 - DNA, 1389 bp, Chlamydia pneumoniae
ttgtttaggccgtatatgaccacattgagacaattttttctgattaccgaattacgacaaaagttattctatacttttgctttgcttacggcctgtagagtgggtgtatttattcctgttccaggaattaatggtgaattagctgtagcttacttcaagcagttattgggatcaggtcagaatttatttcaactagctgatattttttctggaggcgcttttgcccaaatgaccgtaattgcgctgggtgtggttccttacatttcagcctcaattatcgttcagctgttcctagtctttatgcctgcgctgcaaagagaaatgagggagtcttctgatcaagggaaacgtaggattggtagactcacacgtttgtttaccgttgctttagctgtaatacagtctctcttatttgctaagtttgctcttagaatgaatctaactattccggggattgttctgcccactttattatcttcaaaactatttggagtcccctggattttttatatcactacagttgtagtcatgactacaggaactctcttattgatgtggatcggtgaacagatctccgataaggggattgggaacgggataagtttaattatcgcccttggaattctatcctcatttccttctgtattgggatctattgttaataagttaaatttaggatctcaagactcctctgatttgggtctaatttcaattttaatccttgctcttgtttttgtttttgttctgattactacgattttgattatcgagggagtgagaaaaatccctgtgcaatatgctcgaagggtaattggaagaagagaagtccccggtggagggtcctatcttcctttaaaagttaactatgctggcgtcattcctgtgatttttgcttcctcgctactgatgttcccagcaactataggacagtttattgcgtcagagtcttcttggatgaagcgtatagcagctttacttgctccaggcagtttagtttattctatatgttatgtgttgctcattatattttttacatacttttggacagccacacaatttcatccagaacaaattgcttctgaaatgaaaaaaaataatgcctttattcctggcatacgtcagggcaagcctacgcaacattacttagagtatacaatgaatcgtgtgacccttttaggagcgttgttcttagcggcgatcgcgatattaccttcacttttaggttgtctgcttcgtgtggattctaatgtaagctatttcttaggcggtactgcaatgcttatcgtcgtaggggtcgttttagatacaatgaagcaggttgatgcctttttgttaatgcgtcgctacgatagcgtgctgaaaacagatcggacgaaaggaagacattga

SEQ ID NO: 18549 - DNA, 369 bp, Chlamydia pneumoniae
atgccacgcatcattggaattgatattcctgcaaagaaaaagttaaaaataagtctgacatatatttatggaataggatcagctcgttctgatgaaatcattaaaaagttgaagttagatcctgaggcaagagcctctgaattaactgaagaagaagtaggacgactgaactctctgctacaatcagaatataccgtagaaggggatttgcgacgtcgtgttcaatcggatatcaaaagattgatcgccatccattcttatcgaggtcagagacatagactttctttaccagtaagaggacaacgtacaaaaactaattctcgtactcgaaaaggtaaaagaaaaacagtcgcaggtaagaagaaataa

SEQ ID NO: 18550 - DNA, 402 bp, Chlamydia pneumoniae
ttggttaaaaatcaagcgcaggcaaaaaagagcgtaaaaagaaaacaactaaaaaatattccttcaggtgttgtgcatgttaaagcaacctttaacaatacaatagtatctataacagatcctgctggtaatgtgatttcttgggcatcagcaggtaaagtaggatattctggttcaagaaaatcttcagcctttgctgccactgtagcagctcaagacgctgctaaaactgccatgaactctggtttaaaggaagtagaggtttgtttgaagggtactggagctgggagagagtctgctgttcgtgctttgatatctgctggtttggtagtttctgtaatccgtgatgaaactcctgttcctcataatggttgccggccaagaaaaaggcgcagagtgtag

SEQ ID NO: 18551 - DNA, 1176 bp, Chlamydia pneumoniae
ttgccggccaagaaaaaggcgcagagtgtagttttagggaaggagaaagggatgtcagataacgcacacaatttactttatgataagtttgaactgcctgaagcagttaaaatgttgcctgttgaagggcttccaatagacaaacatgctcgcttcattgctgagcctctagaaagaggaatgggccacactttaggaaatgctctaagacgtgctttgcttattggtttagaagctccagctattatctcgtttgctatgacaggcgtacttcatgaatatatggcaatcgaaggggttattgaggatgtaactaacatcattctgaatttaaaaggtgccctattaaaaaagtaccccatgcaggatagttctttaggaagaaccactcaggtcttaaaagcttcaatttctatagatgcttccgatttagccgcagctaatggacaaaaagaagtgactctacaagatctattgcaagaaggggactttgaagccgttaacccagatcaagtcatttttactgttactcaacccatacagttggaagtcgttctacgaattgcttttggtaggggatatacaccttctgaaaggattgttttggaagataagggtgtttatgaaatcgttttggatgcagccttttctccagtcactttagtcaactactttgtagaagatacacgggtgggtcaggatacagattttgaccgtttagttttaatagttgaaacagatggaagagtgactccgaaagaagctctggctttttcaactcaaattttgactaaacatttttccatttttgaaaatatggatgagaagaaaatcgtatttgaagaagctatttctattgagaaagaaaacaaagatgatattcttcataagttaattttaggaattaatgaaatagaactctcagtcagatcaacaaattgtttgtctaatgcaaatattgagactattggcgaacttgttattatgcctgaacctcgattgctacaattcagaaattttggaaagaaatcactgtgtgagatcaagaataaattgaaagaaatgaagcttgaattaggaatggacctaacgcaatttggcgtaggtttagataacgtaaaagaaaaaatgaagtggtatgccgaaaagattcgggctaaaaatataaagggatag

SEQ ID NO: 18552 - DNA, 429 bp, Chlamydia pneumoniae
atgcaacacgctagaaaaaaatttagagttggtcgtacttcctcgcataatcgctgtatgttagctaacatgttaaagtctctaattcattatgaaagaattgagactactttgcctaaagctaaagaactacgccgacatgctgataaaatgattaccttagctaaaaaaaactccttagcagcacgacgtatagctattggacggcttatggtcagatacaataaattaacaagcaaagaagctcgacaagctaaaggtggagacacctctgtatataatgtcgatcgtttggttgtgaataagttattcgatgagttggggaatcgttttgtagaaagaaaaggtggttacacacgtattctaaaactgcaaaatagaattggtgataatgctcaaaagtgtattatagagtttttagctagctaa

SEQ ID NO: 18553 - DNA, 1008 bp, Chlamydia pneumoniae
atgaaagttgtaattaatggtttcgggcgaattggtcgtttagttttaagacaaatcttaaagagaaactcttcagtagaagtcctcgccattaatgatcttgttcctggggatgcgcttacctatctatttaaattcgactctacacatggacgttttcctgaggatgtacgttgtgaagcggaccacctcatcgttgggaagagaaaaattcaatttttatctgaacgcaatgttcaaaatcttccttggaaagatttaggggttgatctcgttattgaatgtacaggattgttcacaaaaaaagaagatgctgagaagcatattcaagctggagcgaaacgagtcttaatctctgctcctggaaaaggtgatattcctactttcgttatgggagtgaaccataagactttcaatccagaaaaagactttgttatatcgaatgcttcttgcactacgaattgtttagctcctattgctaaagttttactagataatttcggaattacagaaggtttgatgacaacagttcatgctgctactgctactcaactagttgttgacggaccttctaagaaagattggagaggaggtcgtggatgtttacaaaatattattcccgcctcaaccggagctgcaaaagctgtaactctatgtcttcccgagttaaagggaaaattaacaggaatggcttttcgggttcctatcgaagacgtgtctgtagttgacttgaccgtcaggttagataagtctacgacatacgatgacatttgcaaagctatgaaacaggcttcagaaactgatttaaaaggcattttagattatacagatgagcaggtagtttcttcagattttataggatctgagtactcctcgatattcgatgctctagctggtatcgctttgaatgatcggttcttcaagttagttgcgtggtatgataacgaaacaggatatgccacgcgtatagtagacttattagagtatgtagaaaaaaactctaaataa

SEQ ID NO: 18554 - DNA, 963 bp, Chlamydia pneumoniae
gtgcggctcttatctatacttaagctgcatctcttctcgctacgatcttccagttcattatcccctcactattatcattcatgctcccgttccatgcttcatttgctttgtcgctggaaagatgctgatattatggaatggcagcagatttgcaatattctttcaggagtctgtagcagaatgagtggaaagttggtttctttgcagaaggaaacccaagactcttgtcatcaggagcatgaacgtattcacttacagtatcgggaacagctatctgctttggaagaagaatatcgccgtcgtgaagaagctaaaaatcaagatttagaaaagttacaacaagaaaatacctggttgcaaaatcgccttgctgagaaattacaacaaattcgacaccaaagtgatattatcgacgagataaaaaaagaactgcttcaaagtgtacagcgaacagaaattagtgaagggcgtcgtttatgctatgagcataaaattaaacagctggaagaacaactacagcgttatgtttcgcaacacggagccccctctatagagatagaagaagacaaatcttcagccgcatatgcagagatcaaccgtttgaagaaaagtcttatagatttgcaacaagaaaaagatatttatataaaaacatatcattcagagattgctaagttaagagaaaaattacagcgacaagaaggagctcaaactagctctgaggtttgttctattgagaagttaacagaggtgcaaaccgatctagctgaaaaaaagaaagccatagccttactccaagatattgttgaggatcaatattgtcagcttcgagatctacataaagagaaaggtatggctatgccttcaaatacaaagttagatcatttgaaaggacttttaggcaaagaacctgagagtgaagtagacgtagtattctcagaatctaaatctttagggagttaa

SEQ ID NO: 18555 - DNA, 1836 bp, Chlamydia pneumoniae
atgtggactcacccaattgcttatgatgtgattgtagtgggagctggacatgcaggttgtgaggcagcatattgctctgcaaagatgggtgtctccgttcttatgctcacctccaatttggatactattgccaagttgagttgcaatcctgctgtcggtggtatcggcaaagggcacattgttcgagagatcgatgcccttggtggtattatggcggaagtgacagatcaatctggcatacaatttcgcattctgaaccaaaccaagggacctgctgtccgagcaccacgagctcaagtagataagcaactttatcatattcatatgaaacgtcttttggagaatactccgggccttcatattatgcaggccactgtagagtctctattagataaagaaggtgtgatttctggagtcactactaaagaaggctggatgttctcaggaaagactgtagttctttcttcgggaacttttatgcgcggcctaattcatattggggaccgtaatttctctggaggacgtttaggcgacccttcatcacaaggtttatcggaagatcttaaaaaacgtggttttcctataagcagattgaaaactgggacccctccccgtttactagcctcttctataaatttttcctgcatggaagagcaacccggagatttaggtgtgggttttgtacacagaaccgagccttttcagcctcctttaccacaactttcttgtttcattacccacaccatggaaaaaactaaggcaatcatttcagcaaacttacatcgttcggcactttatgggggctgcattgaaggggtaggtcctcgctattgtccttctatagaagataaaattgtaaagttctcggacaaagaacgtcaccacgtctttctagagccagaagggctgcatacccaagagatctatgctaatgggttatctacttctatgccttttgatgtacaatacgatatgatccgttctgtactggggttagaaaatgcaattatcactcgaccagcttatgctatagaatatgattatattcacggcaatgtgatccaccccacactggagagtaaacttattgaagggctcttcttatgtgggcagattaatggcaccacaggttatgaagaagccgcagcccaagggttaattgccggcattaacgctgtgaacaaggttttcaacaggcctccttttattccttcacgccaagaatcttacatcggcgtcatgctagacgatctcaccacacagattttggatgaaccttaccgcatgtttacaggaagagcagaacaccggctcttattaagacaagataatgcgtgtgctcgactatcgcactatggttatgaattagggttactctcagaggaacgttacgaacttgtcaaaaagcaaaaccagctattagaagaagaaaaggttcgcctccaaaagacatttaggcagtacggccagtctgtagtctctttagcaaaagcactatctcgtcctgaagtttcttatgacatgcttagagaagcattcccaaatgatatccgtgatttaggagcggttctcaatgcctccttagaaatggaaatcaaatattctggatatatagatcgccagaaaattctgattcagagtttagaaaaagccgagagtttactaattccagaagacttagattataagcagataacagccttaagcttagaagctcaagagaaattagcgaaatttacacctcgaactcttggttctgcatcgagaatatcgggcatagcttctgctgacattcaagttttgatgatagctttaaaaaaacatgcccaccactaa

SEQ ID NO: 18556 - DNA, 1407 bp, Chlamydia pneumoniae
atggacaaatctactggtgtacctctcccctctcctcctcattcgaaagaatcggaaatgatagttttaggttgcatgctgacaggggtacattatctaaatcttgcagccaaccaactctacgaagaagatttttattaccttgaacataaaattatttttcgagtcctccaagatgccttcaagcaagataaacctatcgatgttcacttagctggagaagaactcaaacggcacaaccagattactgtaattgggggcccttcgtatctaattactttagccgaatttgcaggtaccgcagcctatcttgaagaatacgtagacatcatccgatcgaagtcgattctaaggaagatgatttctacagcaaaagaaatcgaaaaaagagctttagagcagccgaaaaatgttgccgaagccttagatgaagctcagaattctttttttaaaatcagccaatcaacatcggtaagtcagtacactttagttgctgacaaattacgcgggttaacaacaactacagataagccttaccttgtacaattacaagagagacaagaattatttttacagaatgctcaaggagacaataagtctttcttcactggcattcccacacactttattgatttagaccagctgattcacggattttctccttcaaatttgatgatcttagctgcccgccctgccatggggaaaacagcactcgctttgaatattgcagagaatctttgttttcaaaaccgcctccccattggaattttttctttagagatgacagtggatcagctgattcatcgtatgatttgctctcgatccgaagttgactctaaaaaaatctctataggcgacctttccggtcatgactttcaaagaattgtttcggtaatcaatgaaatgcaggaacacactttgctcattgatgatcagccagggttaaaagtttctgatctacgagctcgggctcgtagaatgaaggaaagctatgatattcaatttctcattattgattatttacaattactttccggctcagggactttgcgtgctacagaaagtcgtcaaacagaaatttcagagatttcccgaatgttgaagactcttgcccgtgagttaaacattccgattctttgtctttcacagctttctcgaaaagttgaggatcgggcaaatcatcgtccgatgatgagtgatcttcgggaaagtggaagtattgagcaagattcggatttagtgatgttcttacttcgtagagaatattatgatcccaatgataagcccggcactgcagaacttattatagcaaaaaaccgtcatggttctataggttctgtccctctagtttttgaaaaagaactcgcacgttttcgcaattattcggcttttgaatgtatcagctag

SEQ ID NO: 18557 - DNA, 1623 bp, Chlamydia pneumoniae
atgcagtcatcagaagtgaaacccttttcaaggctgcgggcatatctttgtcctatttataaatcagaattttctaagtttgttccactatttctactagcgtttttcgttggctttaactactgcctgctgaaaaacatgaaagatactctggtcattgtcggttcagatgctggggcagaagtgattcccttccttaaggtttggggaattgtcccgggagctgttattgttactatggtctatgggtggttaggcagtcggtatcctcgggataccgttttttattgcttcatggccgcattccttggttttttcttcctgtttgctgtgatcatttatcctgtaggggatagcctgcatctcaactctctcgctgataaattacaagagctccttcctcaaggacttcgtggttttattgtgatggtccgttactggagttacagtatttattacgtaatgtcagagctgtggagttcggttgttctttcgatgttgttctggggactagccaatcagattactacaattactgaagcgggccgtttttacgctcttatcaatacaggattaaatctctcctcaatatgcgcaggagaaatctcctattggatggggaaacaaacatttgttgcctactcctttgcatgtgattcctggcactctgtaatgctcaacttgaccatgctgatcacttgttctggtttaattatgatctggctatataggcggattcatcatttgactattgatacttcgatccctccatctagacgtgtcttggcagaagagggagcagctactgctaatctaaaggaaaagaaaaaacctaaagccaaagctagaaaccttttcttacacctcattcagtctcgttatttattagggctcgctattattgtcctatcctataatttggtgatccatctattcgaagtcgtttggaaggatcaagttagccagatttacagttctcacgtagaattcaatgggtatatgagtagaatcactaccctcattggcgtcgtttctgtattagcagctgtactccttaccggacagtgtatccgtaaatggggatggactgtcggtgctttagtcactccattggtaatgttagtttcaggactgctctttttcggaactatttttgctgcaaaaagagacatctctatttttgggggagttcttggaatgacacctctggctctagctgcctggactggagggatgcaaaatgtcctatcccgggggacgaaatttacgttctttgatcaaaccaaggaaatggcctttatcccactttctccagaggataaaaatcatgggaaagccgcgattgatggtgtcgtttcaaggataggaaagtctggaggctctttaatttaccaagggctgcttgttattttctcttctgttgcagcaagtttaaacgtcatcgccctagttcttctcattattatggtcgtttggattgcggttgttgcctatatcggtaaagaatactactctagagctgctgatgctgtagcaaccttgaaacaacctaaagaaccttcctcttcaatcgtacgtgaagcccaggaatctgtagaacaagaagaaatggctgttctgtag

SEQ ID NO: 18558 - DNA, 2613 bp, Chlamydia pneumoniae
atgaagaaactgtttgtattagatgcctcaggatttatctttcgtgcctactttgctttgccagaaatgaaaaatcatcaaggacaagcaacacaagcagtttttggatttattcgttctttaaataaacttatcaaagaattctctccagaatacatgatctccgtctttgacggtcctaataataaacaaagccgtcaggcgatttatgctgattacaaaagtaatcgacagaaaaaattcgaagacatccctccacaaatagctctagttaaagagtactgctctttaataggcctagcttacttagaaaaagagtcggtagaagctgacgatgtgattgcaagtattgctaagaaggctagagaagagaattataaagtttacgtatgcaccgcggataaagatctgttgcagcttgtaaacgatcatgttgtagcttggaatccttgggcagatcaaggtgttgtagggatctctgaggtgatagaacgttatgggattcctccagggaatatccctgattatctagcgttagttggagactcttctgataacattccagggctcccaggttgtgggcctaaaaaagctgcagcacttcttaaacaatttggaagtgttgagggacttttagaaaatttagacgccgtgaagggattaagtcaaactatgctgagtgaacggcaggagactttaaagcttagtaaacggcttgccctcttggattctaatatccctatcccagtaccaatagagtcccttacctttccacaacaccctgtggatgaagagaaactcatacacttttatatacaacaaggatttaaaactcttgtgccgtccaagcaaacagaggctgcgacagtcgatgttcagataatcaaagatgcggaaagcctcaccaacattttaaaccttgtgcaagggggggacattgcctttgctgtagcatatacaggaaaccatcttctctctttgaagcttgaaggtttagctttgacacagggatcaggggtattttttattgccttagaagaggaaggcacgaagatactccctatattaaaagatttctttttaagagaagatcttactttctatggttataatctaaaacgcgattgccacgctcttctaaatgcaggaattgtaattcgagaaatttcttatgacctagctttagctgagcacttgacaaatgggggaggaaaaatctcctttcaatctcttttagtaaatcacggatttacagaaactgctcaccggtttgctaaggaatggggaaattcaggattgcctataggtcgtctaccagaacaacctgagcaatattttggtgaatttgttgcctaccttcccataataaaagacgctattttagaagaaatcaaccgtaagaatctcaaccatatcttaagtgatattgaaatgcccttggagaaggttcttttctctatggaaagagctggagtgcctttagatgttgaggagttggctattttagaagccctctttgaaacagaattagccgtactgacagaggaaatctatgatctttctggaaggccattcaatataaaatcaccaaaacagttatcagatattttatataacgaattaggtcttcgccctatagataaggcaaaatctacacgtgcagaggtgttagaggctttacgtagtgagcacccaattatcgaaaaacttttagctttccggacgattgaaaaattattatccacatatgtaaaagcattaccgaaacaagtagattcccatacacagagaatacacccctcttttgatcagacaggagctgtgacaggaagattagcttgtcgagatcctaatttacaaaatattcctataagatcggaacgaggaatcttacttaggaaggcttttcgtttatctgagaaaaatagttattttttatctgccgattattctcaaattgagttaagatttttagcacatttaagccaagataagtcattaaaatttgcttttgagtcaggagaagatattcatgcttttactgcatcacaagtgtttcatgtgcctttagaacaggtttcaaaagaacaaagaatgcaggcaaagacagtaaattttggtatcgtgtatggacaacaggcttttggtttggcaaaagttttaaaaatttctattggcgaagctcaagagttaattcaagcatatttctctcgttatcccgaaattgctcattttgttgaagaaactatacaacaagcagctaaagatttacgggtgaccacgatgttaggtcgagaaagaattatcgatagttggaatgaatttcctggctcaagagcagcttcaggacgttttgctgtaaatactcgcattcagggaagtgctgctgaattgataaaacttgcaatgctagatatttcacaagcaataaagcaacagcaaatgaagagtcgtatgttattacaaatacatgacgaattattatttgaggttcctgaagaagaaatagaagagatgcaaagactagtgagagagaagatggaatcagctatgactttatccgttcctatagttgtgaatatcttaattggaaaaaattgggcagaatgttaa

SEQ ID NO: 18559 - DNA, 1395 bp, Chlamydia pneumoniae
atgaaagaagagcgttcttcagaaatcttgcctagggtgaaggaaacgaaaaaacatgcttacgtttctatgcaggaaaaatcttgtgtaggggagtgtgctgtagttgccagtgagtctgaagaggccgagtctgtcacagttacaaaaattgctaaactgcaaagaatgggaattgaagagctgaatatattagctcgccaatacggtgtgaaaaatataggatctctaacaaagtctcaggtcgtctttgagattgttaaagccaagtcagagcgcccagatgaattgctgataggtgaaggcgtgttagaagtccttccagacggatttggatttctgagatccccaacctataattacctaccttctgctgaagatatttatgtttctccagctcagattcgtagatttgatctcaaaaaaggtgatacgattatcggtacgatacgctcacctaaagagaaagaaaagtactttgctctattgaaagtagataagatcaacggatctactccagataaagctaaagaacgtgtactttttgaaaacctgacccccctctaccctaatcaaagaatcgtgatggaaatggggaaagatcatttggctgagagagtcttagatcttaccgcccccattggaaaaggacagcggggattgattgtagccccaccaagatctgggaaaactgtcattctccaaagcatagcacacgcgattgctgtgaataatcctgatattgttcttattgtcttgttaattgacgaaagacccgaagaagttaccgatatgattcggcaagttcgtggagaagttgttgcctcgacatttgacgaacaaccagaaaggcatattcaggtcgctgagatggttatagagaaagctcgtcgtttagtggaacatggaaatgatgtggtcattctactcgattccataacacgattagcacgtgcctataatacagttcagccgcattctggaaaaattcttaccgggggtgtcgatgctagtgcattgcacaaacctaagcgtttcttcggtgctgcaagaaatattgaaggcgggggatcgctcacaattcttgcaaccgctttaattgatactggttccagaatggacgaagtgatttttgaagaattcaaaggcactggaaatatggaactcgtcttggatcgacgtctgtcagatcgaagaacctaccccgctattgatttaattaagagtggaactagaaaagaagaactcctctatcatcctagtgaattagaaagggtctaccttttccgtcaggccatagcagatcttactactatagacgccatgcatctcttgctaggaaggttgaagaaaaccaatagtaacgcagaattcttgttgtcactcaaagaatag

SEQ ID NO: 18560 - DNA, 633 bp, Chlamydia pneumoniae
atgatgaactacgaagatgcaaaattacgcggtcaagctgtagcaattctataccaaatcggagctataaagttcggaaaacatattctcgctagcggagaagaaactcctctgtatgtagatatgcgtcttgtgatctcctctccagaagttctccagacagtggcaactcttatttggcgcctccgcccctcattcaatagtagcttactctgcggagtcccttatactgctctaaccctagcaacctcgatctctttaaaatataacatccctatggtattgcgaaggaaggaattacagaatgtagacccctcggacgctattaaagtagaagggttatttactccaggacaaacttgtttagtcatcaatgatatggtttcctcaggaaaatctataatagagacagcagtcgcactggaagaaaatggtctggtagttcgtgaagcattggtattcttagatcgtagaaaagaagcgtgtcaaccacttggtccacagggaataaaagtcagttcggtatttactgtacccactctgataaaagctttgatcgcttatgggaagctaagcagtggtgatctaaccctggcaaacaaaatttccgaaattctagaaattgaatcttaa

SEQ ID NO: 18561 - DNA, 522 bp, Chlamydia pneumoniae
atggctgatgacaccctcattcctaaacttatgaagaactcgctttcgcaggcgtgttctgagggtttactgattgctaagtatcctccactccaggttatcgttcactttgataataacctagttgttaaaacacatctttcagtagctcctgtcttctcttgtctttttttaggaccagcagctcacaaagccatgcaggaaattgttttatggtgttctcgctatgccaacaaggaacatcctcctttttcctcgcattttgctaaagacctcatcccctcacaatatctcgaaatcctaaactgcgttgcagagattccctttggagagcagcaaacctacgctgaaatcgcaaaaaaaactgatacgcaccccaggactgtaggagccgcatgcaaacaaaatccgtttctgctgttctttccctgtcatcgcgtcgtaggaagccatggagagcgtaattacgtcctagggcctgtaattcacgagatcttattgaaatttgagaatagctactaa

SEQ ID NO: 18562 - DNA, 2379 bp, Chlamydia pneumoniae
atgcggattccaataactctactgcaaacatacttttcagaacctctttcgacaaaggaaattttagaagcctgtgatcatattggcatagaagccgagattgaaaatactaccctatactctttcgcttctgtgattacagcaaaaattttacatacgattccccatcctaatgcggataaactccgggtagctaccctgaccgacggggaaaaagagcaccaagtggtttgcggagcccccaactgcgaagcaggattgattgtagctcttgctctacctggagccaaattatttgatagcgaaggacaagcctacacaatcaaaaaatctaaacttcgtggtgtagaatctcaagggatgtgctgcggagccgacgagttgggccttgatgaactccaaattcaggagagagctcttttagagctcccagaagccacccctttaggtgaagatctcgcaacagttttagggaatacttctttagagatctctctaacaccgaatttaggccactgcgcctccttcctaggattggcccgagaaatctgccacgtcactcaggcaaacctcgtcatccctaaggaattctcgttcgaaaatctcccgactacagccctagacatgggcaatgatcctgacatttgccccttcttttcttatgtcgtcattacgggaatctctgcgcaaccttcaccaatcaagcttcaggaatctctacaagccctcaaacaaaagcccataaatgctattgtcgatattacaaattacatcatgctttctctagggcaacctctgcacgcttacgatgcgagtcacgtcgctttagactctctgcgagtagaaaagctctccaccccagaatctctcaccctattgaacggagaaaccgtcctcttgccctcaggagtgcctgtagtccgcgatgatcatagtctcttgggtcttggaggtgttatgggagcgaaagcaccctcatttcaagaaaccacaaccactacagtcatcaaagctgcctatttcctccccgaagctctccgtgcctctcaaaaacttctcccgattccatcggaatctgcctatagattcacccgggggatcgatccacaaaatgttgtaccagcactacaagctgcaattcactatattttagagatcttccccgaagctacaatctcccccatctatagttctggagaaatttgtcgtgaattaaaagaggtcgctctacgccctaaaaccctacagagaattctagggaaatctttctcaatagagatcctctctcaaaagttacagagcttagggttctctacgactccacaagaaacttccttacttgtaaaagtcccttcctaccgccatgacatcaatgaagaaatagatctagtagaagagatctgtaggacagaatcttggaatatagaaactcaaaatccagtatcctgctacactccaatctacaaactaaaacgtgaaactgctgggttcctagcaaacgcaggacttcaagaattcttcactcctgacctgctagatcccgaaacagtggctctaacaagaaaagaaaaagaagaaatctctcttcagggctccaaacataccactgtattgagatcctcactgcttccaggattattaaaaagtgctgcgacaaacctaaatcgccaggcaccctctgttcaagcttttgagatcggcactgtctatgcaaaacatggagagcagtgtcaagaaactcaaactctggcgatcctgctcactgaagatggcgaatccaggtcctggctccccaaaccctctctttctttttattctttaaaggggtgggtagagaggctgctctatcaccaccatctttctatagatgctttgaccttagagtccagcgcgctctgcgaatttcacccctaccaacagggagtgttgcgcatccacaaacagagttttgctactttaggtcaggtacatcctgagttagcaaaaaaagcacagataaaacaccctgtgttctttgcagaactcaacttagaccttctatgcaagatgctaaaaaaaacaacgaagctttataaaccttacgccatatatccttcatcttttcgtgatctcaccttgacagtacctgaagacatccctgcaaatttactgagacaaaaacttttacacgaaggttctaaatggcttgaaagtgtaaccattatcagtatatatcaagataaaagcttggaaacacgaaataaaaatgtttctctacgcctcgtattccaagattatgagcgaacattatctaaccaagacattgaagaagaatactgtcgtttggtagctttacttaacgaattgctaacagacactaaagggactatcaattcatga

SEQ ID NO: 18563 - DNA, 1956 bp, Chlamydia pneumoniae
atggcaacacccgctcaaaaatcccctacatttcaagatcctagttttgtaagagagctaggcagtaaccaccctgtcttttccccgctaacgcttgaggaaagaggggagatggcaatagctcgagtccagcagtgtggatggaatcatacaattgttaaggtaagtcttattattcttgctcttcttactattttagggggaggattactcgtaggattgctgccagcagttcctatgtttattggaacaggtctgattgctttgggagccgttatatttgctttggctttgattttatgtctttatgattctcagggccttcctgaggaactccctccggttcctgaaccacaacaaattcagattgaagatttaagaaacgagaccagagaagttcttgaagggactcttttagaggttctcttaaaggatagagacgctaaggaccctgcggtgccccaggtggttgtagactgtgaaaagcgtcttggaatgttggatcgtaagctgcgacgtgaagaggagattctgtatcgctcgacggcccatcttaaagacgaggaaaggtatgagttcttgctggagctcttggaaatgcgtagtctggttgccgatcggctagaatttaaccgtagaagttatgagcgatttgttcaaggaattatgacagttagatcagaggagggggaaaaagagatttctcgtctacaagatctaatcagtttgcagcagcagacggtgcaagatttaaggagtcggatcgatgacgagcagaagagatgctggacggctttacaacgtattaaccaatctcagaaggatatacaacgggctcatgatcgcgaggcttcgcagcgtgcctgtgagggcacagagatggattgtgcagaacgccagcaactggagaaggatttaaggagacagctgaaatctatgcaggagtggattgagatgaggggcacaatccatcaacaagagaaggcttggcgtaagcagaatgccaaattagaaagattacaagaggatctgagacttactgggattgcttttgacgaacaatctctgttctatcgcgaatataaagagaaatatctgagtcagaaactagatatgcaaaagattttacaggaagtcaacgcagagaaaagtgagaaggcttgcttagagagtctggtccatgactatgagaagcagctcgaacaaaaagatgctaatctgaagaaagcagcagctgtttgggaagaagaattagggaagcagcaacaggaagactacgaacaaacccaagaaattagacgtctgagtacattcattcttgagtaccaggacagtctgcgtgaggcagaaaaagttgagaaagatttccaagagctacaacaaaggtatagccgtcttcaagaggagaaacaggtaaaagaaaaaatcttagaagaaagtatgaatcattttgccgatctctttgagaaggctcaaaaggaaaacatggcctacaagaagaagttagcggatttagagggtgccgctgctcctactgagatcggtgaggacgatgactgggtactcacagattctgcttctctcagccagaagaagatccgcgaactcgtggaagagaatcaagaactcctgaaagcacttgcatttaaatctaacgaattgactcaactggttgccgatgctgtagaagctgaaaaagaaatcagcaagcttcgagaacacatagaagagcagaaagaaggattacgagctcttgataagatgcatgcacaagcgatcaaagattgcgaagctgctcagagaaaatgctgtgaccttgagagccttctctctcctgttcgagaagatgctggaatgagatttgagctagaggtcgagcttcaaagattgcaagaagaaaatgcacagcttagagcggaggttgaaagactagagcaagagcaatttcaaggataa

SEQ ID NO: 18564 - DNA, 1125 bp, Chlamydia pneumoniae
atgcacagaaaaaaaaggaatttggtatttatgaacgtccctgattccaagaacctccatcctcctgcatacgaactcctagagatcaaggctcgcatcacacaatcttataaagaagcgagtgctatactgacagcgattcctgatggtatcctattactttctgaaacaggacactttcttatctgcaattcacaagcacgtgaaattctaggaattgatgaaaatctagaaattcttaatagatcctttaccgatgttctccccgatacgtgtcttggattttctattcaagaggctcttgaatctctaaaagtccctaaaactcttagactctctctctgtaaagaatctaaagaaaaagaagtggaactcttcatccgtaaaaacgagatcagtggatacctgtttatccaaatccgcgatcggtccgactataaacaactagaaaacgctatagaaagatataaaaatatcgcagaacttgggaaaatgacggctaccctagctcacgaaatccgcaatccgctaagtggaatcgttggatttgcctctatcctaaagaaagagatttcctctcctcgccaccaacgaatgctctcctcaatcatctccggcacaaggtctctaaataaccttgtctcttctatgttagaatatacaaaatcacaaccgttgaacctaaagattataaatttacaagacttcttctcttctcttatccctctgctctccgtctctttcccgaattgcaagtttgtaagagagggcgcacaacctctattcagatctatagatcctgatcggatgaacagtgtcgtttggaacctagtgaaaaatgctgtagaaacagggaactctccgatcactctgaccctgcatacatcgggagacatctcggtaacgaaccccggaacgattccttccgagatcatggacaagctcttcactccattcttcacaacaaagagagagggaaatggtttgggacttgctgaagctcaaaaaattataagactccatggaggagatatccaattaaaaacaagcgactccgccgttagcttcttcataatcatccccgaacttctagcggccctacccaaagaaagagccgctagctag

SEQ ID NO: 18565 - DNA, 804 bp, Chlamydia pneumoniae
atgactaaagtagctcttcttattgcttatcaaggaactgcctattcaggctggcaacaacaaccgaatgacctatcgattcaggaggttattgaaagttccctaaagaaaattactaaaactcgcactccactaattgcctctgggagaaccgacgcaggcgtccatgcctacgggcaagtggcgcatttccgagctcctgatcaccctctatttgcaaacgcgaaccttacaaaaaaagccctcaatgcgattctccctaaagatattgtaatcagagatgttgctttgtttgatgataatttccatgcacgctatcttaccattgctaaagaatatcgttattccctatcaagacttgccaaacctcttccctggcagcgccatttctgttatacccctcgccaccctttttctacagagctcatgcaggaaggtgcgaacctgcttataggaactcatgactttgcctcttttgcaaatcatggcagggactataactctacagtacgaacgatctataccctggatattgtagataaaggagattctctctccataatatgcagaggaaatggcttcctttataagatggtacggaatcttgtaggagcccttttagatgtggggaaaggagcgtatccacctgaacatctcctagatatcttagaacagaaaaatcgtagagaaggaccttcggcggctcctgcctacggcctttctttacaccacgtatgctattcctctccctacaataacttctgttgtgagcaatgctctgttagcacgtcaaacgaaggataa

SEQ ID NO: 18566 - DNA, 636 bp, Chlamydia pneumoniae
atgattaagtcttctctaatacttcttagtggaggacaaggtacacgttttggatctaaaattcctaagcagtacctccctctaaatggaactcccttagttcttcactcattaaagatactctcttctttgccacaaattgctgaggtgattgttgtttgcgacccctcatatcaagaaacctttcaagaatatcctgtctcttttgccattcctggagagcgtcgccaagattctgtcttttcaggactacagcaagtctcctatccctgggtaatcatccacgatggagcacgtccttttatctatcccgacgaaattcatgatttattagaaacagcagaaaagatcggggcgacagctctagcgtctccgattccctataccataaaacaacgcaatcctgtgcgcactctggaccgagacaatttagcaataattcatacccctcagtgtataaaaacggaaatcctcagagagggtctagctcttgcaaaagaaaaacagctcacactggtagacgacatcgaagctgctgaaatcataggcaaaccctcgcaactcgttttcaataagcatcctcaaatcaaaatttcctaccccgaagatctaacgattgcccaagccctcctatga

SEQ ID NO: 18567 - DNA, 1377 bp, Chlamydia pneumoniae
atgcagattgctcaagtatttggttgtggtagacttaatggtgaggtaaaagtttcaggagcaaaaaatgctgcaactaagctgcttgttgcttctttactttctgatcagaagtgcacactgcggaatgtccccgatataggagatgtttccttaactgtagagttatgcaagtcgctaggagcacatgtttcttgggataaggaaacagaggttttggaaatctatactcccgaaatacaatgcacaagagttcctcccacattttcaaatgtcaataggatccccatccttttattaggagcgctgttagggcgttgccctgaaggtgtctatgttcccactgtggggggagatgctataggagaaaggaccttaaactttcattttgaagggttaaaacaacttggtgtgcagatttcctctgatagttcgggatactacgcaaaggctcctcgaggtcttaaagggaattatattcatctaccctatccttctgtaggggctacagaaaatctcatactcgcagcaattcatgctaaaggaagaacggttataaaaaatgtagctctcgaagctgaaatcttagatttggtgctctttttgcaaaaggcaggggcggatatcactaccgataatgatcgtacgatagatatttttggcactggaggtctcggctctgtagaccacaccatccttccagataagattgaagcagcctcttttggaatggccgcggttgtctctggaggacgtgttttcgtccgaaatgctaaacaagaacttctgattcccttcctcaagatgttgcgctccataggcggaggatttttggtctccgagtcgggaatagaattttttcaagaacgccccttggtgggaggtgttgtcttggaaaccgatgttcatccagggttcctgacggactggcaacaacccttcgcagttctactatcacaggctcagggatcttcagtaatccatgagactgtccatgaaaatcgcctcggctaccttcatggtcttcagcacatgggagctgagtgtcagctttttcatcagtgcttaagtaccaaggcatgtcgttatgctatcgggaattttcctcacagcgctgtgattcatggggcgacgcctttatgggcctcgcatttagtcattccagatttacgagcaggatttgcctatgtcatggcagcactgattgcagaaggaggaggctctattattgagaacactcatcttctagatcgtggatatacaaattgggtaggcaagctcagaagcctcggagctaaaattcagatctttgatatggaacaggaagaacttacaacctctccaaagtctttagccctaagagatgcatccctgtag

SEQ ID NO: 18568 - DNA, 1686 bp, Chlamydia pneumoniae
atgtcgacattactttctatcttatctgtgatatgttctcaggcaatagcaaaggcatttcctaatctagaagattgggctccagaaattaccccgtctacaaaagaacattttggccattatcaatgtaacgatgcgatgaaattggctcgtgttttaaaaaaagctccgagggctattgctgaggccatagtagctgagcttcctcaagagcctttttctttaattgaaattgctggagcaggatttataaactttaccttctctccagtatttctaaatcaacagctagaacatttcaaggacgctctaaaattaggatttcaagtttcccaacctaaaaaaattatcattgatttttcctctccaaatattgctaaagacatgcatgttgggcatttacgctctacaattattggggatagccttgctaggatcttctcctatgtaggtcatgatgtacttagactcaatcatatcggagattggggaactgcatttgggatgttgatcacctatttgcaagaaaatccctgtgactatagtgatcttgaggatcttacgagtctttataagaaggcctatgtctgctttactaatgacgaagagtttaaaaaacgctcccaacagaatgtggtagcattacaggctaaggatccgcaagccattgctatttgggagaagatctgtgagacttcggaaaaagccttccagaaaatctatgatattttggacatcgtggttgaaaaacgcggagaatctttctataaccctttccttcctgaaattatcgaagatctagagaagaaaggccttctcactgtttccaacgatgctaaatgtgtatttcatgaagccttttcgattccttttatggttcaaaaaagtgatgggggctacaactacgccaccacagatcttgctgcgatgcgctatcgcatagaggaagatcatgccgataagatcatcattgttactgacttaggtcagtctctacatttccaactccttgaggctacagcaattgctgcgggctatctacaaccrggaatattttctcatgtaggctttggccttgtcttagatcctcaagggaagaaacttaaaacccgctctggagaaaacgtaaagctccgagagcttctagatactgctattgaaaaagctgaagaagcattgcgagaacatcgacccgaacttacggatgaggcaatccaagaaagagctcccgtcattggaatcaacgctataaaatacagtgatctctcttcccatcgcactagcgactatgtcttttcttttgaaaagatgctccgcttcgaaggaaacaccgccatgtttctactgtatgcctacgtgcgaatccaaggaattaaacgtcgtttaggaatttctcagctgtcattagagggacctccggagattcaagaacctgctgaagagttgcttgcattaactttgctacgcttccccgaagctttagagagcacaattaaagagttgtgtcctcattttcttacagattatctttataatctcacccataaattcaatgggttcttccgtgacagccatatccaagactccccttatgctaagtctagactgtttctatgtgctctagctgaacaagtcttggctacagggatgcatctcttagggctaaagactttggagaggttgtaa

SEQ ID NO: 18569 - DNA, 639 bp, Chlamydia pneumoniae
atgattttccgcatttgtaaatttttcacgtgggtagctttttctcttttctataagctaaaagtttatggagtgaaaaaaaattttattaaaggtcctgctattattgcagtaaaccataattcttttttagaccccatagcattgcacatgtgtgtccatgagtgtatttatcacctagcacgggcctctttatttaatatcccctggttatggaagcaatgggggtgttttcccgtgcgtcaagacgaaggaaactctgcggcatttaaaattgcctctcggctctttaataaacgaaagaagttagtgatctatccagagggggctcgaagccctgacggtcaactccagcctggcaaggtcggtattggtatgatggctgcaaaatctagagttccgatcatccctgtctatattaggggaacttttgaagcttttaaccgtcatcaaaaaattcctcatgtttggaaaacgatcacgtgtgttttcggtactcccatgtattttgatgatattattcaaaatcccgagatcaaaaataaagaaacctatcagatcatcacgaatcaaactatgaacaaaattgccgagctcaaagcatggtatgaatcggggtgcaaaggagacgtcccctaa

SEQ ID NO: 18570 - DNA, 651 bp, Chlamydia pneumoniae
atgattatcactattgatgggccttcaggaacaggaaaaagcacaacagcgaaagctttagccgaccatcttcatttcaattactgtaatacagggaagatgtatcgcactttagcctatgctcgtttacaatctccctgggcgacgcttcctttaactaaatttttagaagagcctcctttttcttttacctttgctacaggccaacctttagagtcgttttttaatggtcatcttcttacctctgaattaacaactcaagaagttgcgaacgcagcatcggagctctctcaacttccagaagttcgtgcattcatgcaagatttgcaacgacgctatgctcagcttggcaactgtgtatttgaaggaagggatatgggatccaaagtctttcccaacgcagatttaaaaatttttctaacttcaagtcctgaagttcgtgcgcaacggcgtttaaaagaccttcctgaagggactctttctcctgagcaattgcaagcagagcttgtcaaacgtgatgctgcagatgcacaacgcgctcacgatcccctagtcatccctgaaaatggaattgtaattgactcttcggatttgacaataagacaagttctggagaaaattttagctttactatttcgaaacgagctatga

SEQ ID NO: 18571 - DNA, 927 bp, Chlamydia pneumoniae
gtgcttaattcaaataagtttaaatcgaagaccggtgcatacggtgatttatttcagcgtgttgttgttcattcgttagtacttacatttttggttcttcttctctatagttccctatttcccttaacttcttttgctctagggtttattaccgcgacttgtggcgctgtaggaacttatgagtactcctcaatggcgaaagccaagatgcactatccattaagcacgtttagtgcgatcggatcttttttatttttagcattaagttttctttccattcgttggggacacagtctcccaggattcttcgatgctcttccttggaccttgcttattgtttgggtcgtgtggagtatctttagagttcgaaaatctacaatcggcgctttacagctatcaggagtcactctcttttctattttgtatgtagggattccgatacgtttattcttacatgtcctttatagctttattcatacccaagaaccctatcttggaatttggtgggcttcttttcttattgccacaactaaaggtgcggatatcttcggttatttcttcggtaaagcctttgggaataagaaaatcgccccacaaattagccctaacaaaactgttgtaggttttgttgcagggtgtttgggagccacgctcattagttttattttctttctacagattcccacgaggtttgcgagttacttcccgatgcctgcgattttaattcctttaggtcttgctttaggaatcacaggattttttggagatattattgaatccatatttaagcgtgatgctcatttgaaaaatagcaacaagctcaaggctgtgggtggtatgctggataccttagactcactgctcctgtccacgccgattgcttacttatttttgctcataacccaatctaaagagtttattggatga

SEQ ID NO: 18572 - DNA, 786 bp, Chlamydia pneumoniae
gtgacttacgccctaataaatgatcctgtagacttgtctttagctaccaacaatgctgaatccaagttcccctctctacagcgccttcccaaccatgttgctatcattatggacggcaatcgccgatggtacaaaaagcatagggaggagtgcggccacacacacacgtcaggtcattattatggcgctaaagtccttccaaatattttaaatgcggttcttgatttaggaattaaagttcttactctctatacgttttcaacagaaaattttgggagaccaaaagaggaaattcaagaaatatttaatattttctatactcagttagacaagcaacttccttatctaatggaaaatgaaatctgcttacgttgtataggagacctttccaagctccctaaaggcatccaaacgaaaatcaaccatgtgagtcgcatgacggcatcgttctcgcgtttagagctcgtattagctgtcaactacggtggcaaagatgagttagtccgtgcatttaaaaaattacatgttgatattctaaataaaaaaatatcttctgacgacctttcagaatctttgattagctcatacttagatacttcaggacttacggaccccgacttacttatccgtacagggggtgaaatgcgtgtcagtaatttcttattgtggcaaatagcatatacagaactatatatcacggataccttgtggccagattttacgcctcaagatttgtttgaagcgattaacgtataccagcaaagatcaagacgaggggggaaatag

SEQ ID NO: 18573 - DNA, 1767 bp, Chlamydia pneumoniae
atgacaaattcagataatgcttctgcagcaggattgctctgggctcatcccaaggaagatcctgcgtttcttggaatgattatcaaagaatttcacttgcctcccacagtggctcagatttttatctcaagaggattccaaacgattcaggaaatccataagttcttatacagccatctgtcgagcctttatgatcctggactcttcctagatatgtcaaaggctgtagaacgcctgctcctggctagagatcgtaaagaacacgtcatgatttatggagatagcgatgtcgatggcatgacaggcgtcgctctcctggtcgaatttttaagagatattgatgtccacgttagctacttctttcttggtgcgatactcaagcaacatggagagacctccacactcattgcaaagttgaaagaggaaggaattacactcctcatcaccgtagattgcggaattactgcaggaaaagaggtgagtgatattacaagacaaggcattgatgtgatcattacagatcaccacatgccgacaggaaaaattccccactgcgtagctacattaaatcctaaattacgggatcatacctacccgaatcgagaactcacaggcgtaggcgttgcttttaagctcgcaagaggagtactgaacgcactgatatccagaaatcttgtccccaagagtcaaggtagcctgaaaaaattactcgatttagtcacattaggaaccatcacggatgtcggtgttttgctaggggaaaaccgtgttatggtgcgctatgggattaaagaaattgccagaggcgcgcgacccggattgaataaactctgcgcattatgtggagtagaaaaaagcgaagtcacttcgacagatattgtcttgaagatcgcaccaaaactcaatagcttgggacggttggacgaccctgcaaaaggtgttgaacttttactcacccaagatgatgaacgtgtagatgctctaattatggagctagataatataaatagagaaaggcaaagaatagaagctgaggtatttcaagatgtccaagagatattaaatagtaatcctgagattttaaagcaggctgctatagttctttcatccacggcatggcatgctcgtgtcatccctattatctcagcgcgtcttgctaagacttataacaaacctgtggtaatcatcgctatccaacgaggaattggaaagggatcagcaagaactatagggtcatttcctctactcggagtcttaaagaaatgctcctcgctccttttatcttacggcggacacgactttgcagcaggcgtgattatgaaggaagataaagtcgaagattttaaaaaaaaattcgttcatctcgtgaactcttctcttaaaaagggtgacacacttcctcatctcgaaattgatgcttatgcggattttgatgctatagattatgatctcctagcttctatggaactattcgagccttttgggaaggggaatctgatgcctatcttctattcaaaagtgcgccaggtacgctatccaaaagtattgcctggaaaccatctcaaactctacttaagccaaaaagaaagaaatcttgagggtgtcgccttcggtctgggaagacacgctgatgcattaaaagcaagttggcattaccctcttgagattgcttacacaccccgcttgtcccaaacttctggatcgggagtcatccacctgctggtccgggatttccgtatttcctcagaacctagattttcagactaa

SEQ ID NO: 18574 - DNA, 1518 bp, Chlamydia pneumoniae
atgaattgggaaaatgtccgtgttagggtagctccttcacctacaggagatcctcatgtaggtaccgcctatatggctctgtttaatgaaatctttgcaaaacgatttaaagggaaaatgatcctccgtatcgaagatacggatagaacacgtagtcgccaagattacgaagaaaatattttctcagctcttcgttggtgcgggatccaatgggatgagggccctgatgtaggcggcccctatggcccctatcgtcagtcagaacgcacgaaaatctatcaagggtatgttgagacacttttaaagacagattgcgcttataagtgctttgcaacccctcaagaactcgcagaaatgcgcgctgtggcaagtaccctcggttatcgtgggggatacgatcgcaggtacaggtacctctctcccgaagaggtagcctcacgagaggcagcaggtcagccctacaccattcgtcttaaagttcccttatcaggggaatgtgttttcgaagattatagcaagggaagagtcgtgtttccttgggcagatgtcgatgatcaggtcctagtaaaatctgacggattccccacgtaccactttgctaatgtaattgacgaccacctcatgggcatcactcacgtcctcagaggggaagagtggctaagttcaactcctaagcatctcctactctacgaagcttttggctgggagcctcccgtctttctccatatgcccctgcttctaaaccccgatggaacaaaactttcaaaaagaaagaaccctacctcgattttttattaccgcgactcaggttatgtcaaagaagcctttgtgaacttcctgactctcatgggttacagtatggaaggggatgaagaagtctattctctagagcgtattatagaaacttttaatcctcgacgtattggaaagtcaggagcagtttttgatattcaaaagctcgactggatgaataagcattacctcaaccacgagggttcgccagagtgcttgttaaaagaactccagggttggctacttaatgacgaatttttcttaaaaatccttcccctctgtcaatctcggattacaactcttgcggagtttatcaacctcacctcgttctttttctcaggattgttagagtaccgtgttgaggaactcctaccacaggccctttctccagagaaagcagctatccttctctatagctatgtcaaatatcttgagaaaaccgatcaatggacgaaagagacgtgttacctcggatctaaatggttagctcaagcattcaatgtccaccataaaaaagccatcatcccactgctttatgtggcaattactgggaaaaagcaggggctccctctctttgactctatagagattttagggaaacctcgagcgagagcacgtcttgtgtatgcagaaaagcttttaggaggcgttcctaagaagctcgctgcaactgtggataagttcatgcaacgagaagacttcgaagaggctactttcgatctctaa

SEQ ID NO: 18575 - DNA, 372 bp, Chlamydia pneumoniae
atgcccaccattaatcaattaatacgtaaaagacgtaagtcaagtctagctagaaagaaatccccagctttgcagaagtgcccacaaaagcggggagtttgccttcaagtaaaaacaaaaactcctaagaagccgaactcggctttaaggaaagttgcttgggtgcgactatctaacgggcaggaagtcattgcctatattggtggtgaaggacacaatcttcaagagcacagcattgtgttgatccaaggcggtagagtcaaagatttgcctggtgttcgttatcatattgttcgtggcaccctagattgtgcagcagtaaaaaatagaaagcaaagtcgttcacggtacggcgcaaagcggcctaagtaa

SEQ ID NO: 18576 - DNA, 474 bp, Chlamydia pneumoniae
atgtcaaggcggcactccgctgaaaagcgcgatatccctggggatcctatctatggcagcgtgatcttagaaaaatttatcaacaaggttatgatgcatgggaagaaaagtgtggcaaggaaaattgtctactctgctctagagcgtttcggtaaaaaattaaatttagagaatgtgcttgaaggttttggagaagctttagaaaatgcaaaacctattttagaagttcgttcccgtcgtgttggaggcgctacttatcaagtgcctgttgaagttgctagcgaacgtaggaattgtttagcgatgcaatggatcatcaaacacgctcgtagtaaacctggaaagtctatggaagttggacttgctaccgaactgattgactgcttcaacaaacagggtgcaacaattaagaaacgtgaagacacccatcgtatggcggaagcaaataaagcattcgcacattataagtggtaa

SEQ ID NO: 18577 - DNA, 2085 bp, Chlamydia pneumoniae
atgagcaatcaagaattcgatttaagtgcaattagaaacatcggcatcatggctcatattgatgctgggaaaacaacgactacagaaagaattcttttctatgctggaagaactcacaaaatcggtgaagttcatgaaggcggagctaccatggactggatggcccaggagcaagaaagaggaattacgattacctctgctgcaactactgtcttctggctaggcgcaaaaatcaacattattgatactcctggacacgtcgactttacgattgaagtagaacgttctcttcgggttcttgatggtgctgtagccgtatttgacgccgtatctggcgtggaacctcaatcagaaactgtttggagacaagcagataaatacggtgttccacggattgctttcgtaaataaaatggaccgtatgggagcagactattttgctgccgtggaatccatgaaagagaaattgggagcgaatgctttccctgtccactgtcctattggatctgaaagccagtttgtcggcatggtcgatctaatctctcaaaaagctctttattttctagatgataccctaggagcaaaatgggaagaaaaagagatttctgaagatctcaaagagcgttgtgcagaattgcgagcgaatcttttggaagaactcgctactatagatgaaagtaatgaagctttcatgatgaaagttcttgaagatcccgatagcattactgaagatgaaatccatcaggttatgcgtaagggagtcattgagaataaaatcaatcctgtactctgcggaaccgcttttaaaaataaaggtgtgcaacaactgctcaatgtgattgtcaagtggttgccttctcctttggatcgaggaaatatccgcggaatcaatcttaaaacagatcaagaaattagtttagagccaagacgtgatggacctctagcagctctagctttcaaaatcatgacagatccctacgtaggtcggattacatttatccgaatctattcaggcactcttaaaaaagggtctgccattttaaattctacaaaagataaaaaagaacggatttctcgccttttagaaatgcacgctaatgagcgtacagatagagatgagtttactgtgggcgatattggagcttgcgtgggtctgaagttttctgtcacaggagataccttgtgtgacgataaccaagaaattgttcttgaacgtatagaatttccagaccccgtcatcgatatggctattgagccaaagtctaaaggggatagagaaaaacttgctcaagcattaagttctttatcagaagaagatcctacattccgtgtctcaacaaatgaagagacaggacagaccatcatttctggaatgggggaacttcatttagatattcttcgagatcgtatgatccgagaatttaaagttgaagctaacgtaggaaaaccgcaagtttcttataaagaaaccattactgtgagcggaaatagtgaaacaaaatacgtgaagcagtctggtggtcgagggcaatatgctcacgtttgcctcgaaatagaacctaacgaacctgggaaaggcaacgaagttgtcagtaagattgtcggaggtgtcattcctaaagaatatatccctgcagtaattaaagggatagaagagggattgaacacaggagtcctggctggctacggtcttgtagacgttaaggtaagtattgttttcggttcgtatcacgaagtcgattctagtgaaatggcatttaagatctgtgggtctatggcagttaaagacgcctgtagaaaagcgaagcctgtaatcttagagccaatcatgaaggtagcagtaattaccccagaagatcatcttggcgatgttattggggacctcaaccgtcgtcgaggcaaaattttaggacaagaatcttctcgaggaatggctcaagtgaatgctgaggtacctctaagcgaaatgtttgggtacacgacatctttaagatcattgacctcaggacgtgcaacatcaaccatggaaccagcattctttgctaaggttcctcaaaaaattcaagaagagattgttaagaagtaa

SEQ ID NO: 18578 - DNA, 318 bp, Chlamydia pneumoniae
atgaagcagcaaaagcaaaaaattcgtattcgtctgaaaggattcgatcaggggcagctagatcgttccacagcagatattgttgaaactgctaaaagaacaggagctcgtgttgtaggaccaattcctctgcctacaaaaagagaagtctatactgtattgcgttcgccacatgtggataaaaaatcaagagagcagtttgaaattcgtactcacaaacgtcttgtagatattttagatcccacaggaaaaactatcgatgctttgaaaatgttagcacttcctgcaggagttgatattaaaatcaaagcggcttaa

SEQ ID NO: 18579 - DNA, 531 bp, Chlamydia pneumoniae
atggatagagacaatgaggttcccctgcccaagcccaaatggatttaccgtacaggtattggtcaagacagccaccgctttctcccagaaagttccacgaagccctgcattttaggtggtatcatttttgatcattgcccaggatttcaggcaaattccgatggagacattatctttcatgccatttgtaatgcgatttcctcagtaactaataaaattattttaggaaaggttgctgatgagcttctccaaacacggggaattacagatagtgggatttatcttgaggaggctttaaaatctctgaagcctaatcaaaagatttctcatgtcgctattacgattgaaggaagtcgacctaaatttctctgtaagctatctgcattacgtcaaaatattgcccaggttatgaacttaacacctacggatattggcattactgcgacttctggagagggtttgagtgactttggctgtggagatggcgttcagtgtttctgcgtcttaactgtgatggaatactgtgactaa

SEQ ID NO: 18580 - DNA, 321 bp, Chlamydia pneumoniae
atggagccctacgcagtaatccaaacaggaagcaagcaatatcaggttcgctcaggcgatgtgattgatgtcgagttactaggggaagttgcttcggataaagaagtcatttttcaagatgtcctctttgtattcgatggaactaaagcctctctaggaagccctacgattgcgaacgcacaagtaaaagccgaatatctttctcatgttaaaggagaaaaagtagtcgcctataagtataaaaaacgcaaaaattatcatcgtaaacacggacatcgtcagaagtaccttcgtgtgaaaatccgtgagatattgatataa

SEQ ID NO: 18581 - DNA, 255 bp, Chlamydia pneumoniae
atggcacataagaaaggacaaggggcaagccgaaacggtagagattcaaaatcgaagcgccttggggttaaagtgggcgctgggcaaaaagtttctacaggaagtattctcgttcgtcagagagggacccgatggaatcctgcacaaaatgtaggtcgtggtcgtgatgataccctattcgctttagtcgatggtattgtagtaatgaaaaagacgaatcgtacttatatctctgttgttcctgagcaactttag

SEQ ID NO: 18582 - DNA, 1032 bp, Chlamydia pneumoniae
ttgaagaaggataaaaacgtaatcatgtttgtagatcaaattaccttagaattgcgtgctggaaagggcggaaacggcgttgttgcttggagaaaggaaaaataccttcctaaaggagggccttacggaggcaatggtggcaatggcggctccgtaatcatagaagccaccacaagtgtatattctttcgaagcttatagaaatatccgctttctcaaggctcccgacggtcagtcaggagctacaaataaccgcacaggacgcagtggtaaagatctaatagtttctgtccctacaggcaccctgcttcgtgatgctgagactggtgaaatccttcatgactttaccgtagatggagagcgtctcctagtgagccaaggaggaaagggaggaaaaggaaataccttctttaagacctcagtaaaccgagcccctacaaaagccaccccaggaaaacccggagaaatccgtcaggtagagttagaacttaagctcattgctgatatcggtttggtagggttcccaaatgcaggaaagtccacactatttaatacactcgcacataccgaagtgaaagtcggagcctatcccttcacaactctggccccctctttgggcctagtcctttgtaaagatcgtttgtatcaaaaaccctggattatcgctgacattccaggaatcattgaaggagctcatcaaaacaaaggcctaggactcgattttcttcgccatattgagcgcactcttttactgctatttgttatcgatgtctccaaaagagagagaaactctcccgaagaagacttagaaacgctcatccacgagctccactctcatcagccagattttgaaaagaaagatatgctggtagctttaaataaaattgatgatcttcttcctgacgaacaggaagaatgcctccaaagcttccaaaagcgcttccctagctatacatttgtattgatttcaggacttacaggagaaggcgtcgacggattgtaccgcttcttcacacaaagactcgctgtataa

SEQ ID NO: 18583 - DNA, 5199 bp, Chlamydia pneumoniae
gtgaatatatctgataggttttcctctatgaagtggctaccagctacagctgtttttgctgccgtactccccgcactaacagccttcggagatcccgcgtctgttgaaataagtaccagccatacaggatccggggatcctacaagcgacgctgccttaacaggatttacacaaagttccacagaaactgacggtactacctataccattgtcggtgatatcaccttctctacttttacgaatattcctgttcccgtagtaactccagacgccaacgatagttccagcaatagctctaaaggaggaagtagcagtagtggagctacatctctaatccgatcctcaaacctacactccgattttgattttacaaaagatagcgtgttagacctctatcaccttttctttccttcagcttcaaatactctcaatcctgcactcctttcttccagtagcagcggtggatcctcgagcagcagtagctcctcatcatctggaagtgcatctgctgttgttgctgcggacccaaaaggaggcgctgccttttatagtaacgaggctaacggaactttaaccttcactacagactctggaaatcccggctccctgactcttcagaatcttaaaatgaccggagatggagccgccatctactcgaagggtcctctagtatttactggtttaaaaaatctaacctttacaggaaatgaatctcagaaatctggaggtgctgcctatactgaaggcgcactcacaacacaagcaatcgttgaagccgtaacttttactggcaacacctcggcagggcaaggaggcgctatctatgttaaagaagctaccctattcaatgctctagacagcctcaaatttgaaaaaaacacttctgggcaagctggtggtggaatctatacagagtctacgctcacaatctcgaacatcacaaaatctattgaatttatctctaataaagcttctgtccctgcccccgctcctgagcccacctctccggctccaagtagcttaataaattctacaacgatcgatacctcgactctccaaacccgagcagcatccgcaactccagcagtggctcctgttgctgccgtaactccaacaccaatctctactcaagagaccgcaggaaatggaggcgctatctatgctaaacaaggtatttcgatatccacgtttaaagatctgaccttcaagtctaactctgcatcggtagatgccacccttactgtcgattctagcactattggagaatctggaggtgctatctttgcagcagactctatacaaatccaacagtgcacgggaaccaccttattcagtggcaatactgccaataagtctggtgggggtatttacgctgtaggacaagtcaccctagaagatatagcgaatctgaagatgaccaacaacacctgtaaaggtgaaggtggagccatctacactaaaaaggctttaactatcaacaacggtgccattctcactacattttctggaaatacatcgacagataatggtggggctatttttgctgtaggtggcatcactctctctgatcttgtagaagtccgctttagtaaaaataagaccggaaattattccgctcctattaccaaagcggctagcaacacagctcctgtagtttctagctctacaactgctgcatctcctgcggtccctgctgccgctgcagcacctgttacaaacgcagcaaaaggaggggctttatatagtacagaaggactgactgtatctggaatcacatcgatattgtcgtttgaaaacaacgaatgccagaatcaaggaggtggggcttacgttactaaaaccttccagtgttccgattctcatcgcctccagtttactagtaataaagcagcagatgaaggcgggggcctgtattgtggtgacgatgtcacgctaacgaacctgacagggaaaacactatttcaagagaatagcagtgagaaacatggaggtgggctctctctcgcctcaggaaaatctctgactatgacatcgttagagagcttctgcttaaatgcaaatacagcaaaggaaaacggaggcggtgcgaatgtccctgaaaatattgtactcaccttcacctatactcccactccaaatgaacctgcgcctgtgcagcagcccgtgtatggagaagctcttgttactggaaatacagccacaaaaagtggtgggggcatttacacgaaaaatgcggccttctcaaatttatcttctgtaacttttgatcaaaatacctcttcagaaaatggtggtgccttacttacccaaaaagctgcagataaaacggactgttctttcacctatattacaaatgtcaatatcaccaacaatacagctacaggaaatggtgggggcattgctgggggaaaagcacattttgatcgcattgataatcttacagtccaaagcaaccaagcaaagaaaggtggtggggtttatcttgaagatgccctcatcctggaaaaggttattacaggttctgtctcacaaaatacagctacagaaagtggtgggggtatctacgctaaggatattcaactacaagctctacctggaagcttcacaattaccgataataaagtcgaaactagtcttactactagcactaatttatatggtgggggcatctattccagtggagctgtcacgctaaccaatatatctggaacctttggcattacaggaaactctgttatcaatacagcgacatcccaggatgcagatatacaaggtgggggcatttatgcaaccacgtctctctcaataaatcaatgtaatacacccattctatttagcaacaactctgctgccactaaaaaaacatcaacaacaaagcaaattgctggtggggctatcttctccgctgcagtaactatcgagaataactctcagcccattattttcttaaataattccgcaaagtcggaagcaactacagcagcaactgcaggaaataaagatagctgtggaggagccattgcagctaactctgttactttaacaaataaccctgaaataacctttaaaggaaattatgcagaaactggaggagcgattggctgtattgatcttactaatggctcacctccccgtaaagtctctattgcagacaacggttctgtcctttttcaagacaactctgcgttaaatcgcggaggcgctatctatggagagactatcgatatctccaggacaggtgcgactttcatcggtaactcttcaaaacatgatggaagtgcaatttgctgttcaacagccctaactcttgcgccaaactcccaacttatctttgaaaacaataaggttacggaaaccacagccactacaaaagcttccataaataatttaggagctgcaatttatggaaataatgagactagtgacatcactatctctttatcagctgagaatggaagtattttctttaaaaacaatctatgcacagcaacaaacaaatactgcagtattgctggaaacgtaaaatttacagcaatagaagcttcagcagggaaagctatatctttctatgatgcagttaacgtttccaccaaagaaacaaatgctcaagagctaaaattaaatgaaaaagcgacaagtacaggaacgattctattttctggggaacttcacgaaaataaatcctatattccacagaaagtcactttcgcacatgggaatctcattctaggtaaaaatgcagaacttagcgtagtttcctttacccaatctccaggcaccacaatcactatgggcccaggatcggttctttccaaccatagcaaagaagcaggaggaatcgctataaacaatgtcatcattgattttagtgaaatcgttcctactaaagataatgcaacagtagctccacccactcttaaattagtatcgagaactaatgcagatagtaaagataagattgatattacaggaactgtgactcttctagatcctaatggcaacttatatcaaaattcttatcttggtgaagaccgcgatatcactcttttcaatatagacaattctgcaagtggggcagttacagccacgaatgtcacccttcaagggaatttaggagctaaaaaaggatatttaggaacctggaatttggatccaaattcctcgggttcaaaaattattctaaaatggacctttgacaaatacctgcgctggccctacatccctagagacaaccacttctacatcaactctatttggggagcacaaaactctttagtgactgtgaaacaagggatcttagggaacatgttgaacaatgcaaggtttgaagatcctgctttcaacaacttctgggcttcggctataggatctttccttaggaaagaagtatctcgaaattctgactcattcacctatcatggcagaggctataccgctgctgtggatgccaaacctcgccaagaatttattttaggagctgccttcagtcaggtttttggtcacgccgagtctgaatatcaccttgacaactataagcataaaggctcaggtcactctacacaagcatctctttatgctggcaatatcttctattttcctgcgatacggtctcggcctattctattccaaggtgtggcgacctatggttatatgcaacatgacaccacaacctactatccttctattgaagaaaaaaatatggcaaactgggatagcattgcttggttatttgatctgcgtttcagtgtggatcttaaagaacctcaacctcactctacagcaaggcttaccttctatacagaagctgagtataccagaattcgccaggagaaattcacagagctagactatgatcctagatctttctctgcatgctcttatggaaacttagcaattcctactggattctctgtagacggagcattagcttggcgtgagattattctatataataaagtatcagctgcgtacctccctgtgattctcaggaataatccaaaagcgacctatgaagttctctctacaaaagaaaagggcaacgtagtcaacgttctccctacaagaaacgcagctcgtgcagaggtgagctctcaaatttatcttggaagttactggacactctacggcacgtatactattgatgcttcaatgaatactttagtgcaaatggccaacggagggatccggtttgtattctag

SEQ ID NO: 18584 - DNA, 603 bp, Chlamydia pneumoniae
atgttttcaggaattattcaagaattaggtgaagtgtgtttttttgaagctcaaggaaatggtctgagtttaggaattaagagcacgccactatttgtcacccctctggttacaggggatagcgtagccgtagatggagtctgtttgactttaacatcatgcaatgaaagtaagatcttttttgatgtgattccagaaactctagcttgtacgactttgggagaaaaaagatgtagcgatcaagtgaacttagaggctgcattaaaaatgggagactcgattggaggtcacttactctctgggcatgtttttggaacagcagagattttcttgataaaagaaaatcgttattatttccgtggttccaaagaattatctcagtacctttttgaaaaagggtttattgcaattgatggtatcagcttaacgctagtgtcagttgatagtgatacgttttctgtgggattgattcctgagactcttcaaaggacgactttaggaaagaaaagggaaggagaaagagtcaatatcgagatcgatatgtcaacaaagatacaggtagacacagtaaaacgtattttagcctcatcagggaaagattag

SEQ ID NO: 18585 - DNA, 828 bp, Chlamydia pneumoniae
atggattataaattgctcgatagtggggacgggaacaaattagagtgttttggtcctgtcactttaattcgtccttcaagtattgctgtttggccaaaaagcagacctgaactatggtctcaggcgcaattgcagtatgttcgtgaaggagaaagaggagcatggaaaaattttaagcgtcttcctgaagaatgggaggtcgcattttctgatgtgcgttgtctattgaagagaaccccctttgggcatctaggcgtatttcctgaacatatggggttctggcccgctttgaaacaagccattgagaagcacaaagaacgtcaggtattgaatctctttgcttatacaggggcgggttctatttttgcagctaagtgtggagctcgtgtgacccatgtagatgcttcgcaggcagcggtacgttgggcgcaaagaaatgtagagaaaaatgcttttcctgagagacgtattttttgggttattgaagatgtgatttcttttttaaaaaaagaaatccgcagaaataagaaatatcaagtgattcttttagatcccccaagctatggtcgcggacctgatggggaagtatttaaaatagataaagatctctttcctttgctttctttgtgttcgaagcttcttgcagatgacgcttcttattttctcttaacctctcatactccaggacataccccagagtttttaagggctatagctaggcgtagcgtgccaacccttgtttctgaagcgtggtcttgtggggaaagtttttgtggagaaggtgtgggagccttgccttctgggagttttgttcaatggattgcatag

SEQ ID NO: 18586 - DNA, 798 bp, Chlamydia pneumoniae
atggattgcatagggaaacataatcctctagttaaagaggctctagctttaaaacggtctcgttgtagaaaaagttcttggtttctagttgaaggagcccgtgagattcagaaagcattacgcacaggctacctgtgtcagcatgttttttgttcgacacatctttcagaaaaagaaaaggaatttttatatgagttaaaaagaaattctacaaagattttatattgcttagactcgactttggctcaactttcttttaaagaacatcacgatagtttcgtcgcggtgatacaaaagagagtgtggaataaagaagattttttgatccaacgtaaaaatgctcagcctttctatcttattattgagcaggtggaaaaacctgggaatgtcggtgctattttaagaatagctgatggtgctggtgttgacggtgtgattttatgcaatcctattgtagatttgtacaatcctaatgtggtgcgctcttctttaggagctgtcttttctcttcccatcctctctatttcaagagaggaagggaaggagttgttcaagcaggaaggctggactgtttttgtcacatctcctcgagctgaaactatgtatttttctaaaaattatcttggtcccacggctttggtttttggttcagagaaagatggtttgactgaggattggttttctgaagatttttctgaaatcgctcttcctatgttaggggaatcagattctttgaatctcgctacatctgtagctgctgtagcttatgaagttgttcgtcaacgttgggttaattag

SEQ ID NO: 18587 - DNA, 1245 bp, Chlamydia pneumoniae
atgaaattatggatgaagatctttattggattgtttgtcggggttaccttaggtttagttttagaagataaagccatcttttttaaacctataggagacatctttttaaatctattgagcatggtagtgtatcctttagtgttctgctcaatggttttaggaatcgcttccattagcgatatgaaaaaattgggacgcattggcattaaaagtgtcggcctctatctagggactacggcactagctattgtgattggcttgtgttttgcttggattttctctccaggaaatgggtgtgattttgcccaggcccaatctatggattcggccgttactgtcattgattcaaacaaaacagcggcgtattttctttctataatagctcaagttttcccatcgaatcctgtacgctcttttgctgaagggaatatattacaaattattatttttgcgattttcttaggaattgcccttcggctttctggagaacgtggccgccctgtcgagcgttttattgatggtttttctgaaatcatgttgcgcatggtaaatatgatcatgagttttgctccctatggtgtgggagctagcatggcatggatttcgggaaatcatggtttaggagtcctttggcagctaggcaaatttatcattgcttactatctggcgtgtttgttccatgctacgcttgtttttgggggacttgtgcgttttggttgcaagatgtccttttcgaagtttctctcttcaatgatggatgcgatttcttgcgcggtatctacagcgagtagttctgcgactttacctgtaacgatgcgttgtgtttctaaaaatttgggagtgtccgctgaggtttctggttttgttttgcctctaggcgccactgtgaatatgaatggaactgcaatttttcagggtatggcagcggttttcattgctcaagcatacaattgtccgctatccttgagcagtctgttattattggtagttaccgcaacattctctgccgtgggtagtgccggtgttcctggaggaggtatgattactctgggttccgtattagcctctgtaggtttacctatccagggtatcgctatacttgctgggattgaccggttaagggatattgtaggtacacccatgaatattcttggggatgctgtagttgctacttatgtagcttctggagaaggagagctttctccttatgaatcaataaaacaggaaagcgttgaaactacatag

SEQ ID NO: 18588 - DNA, 1182 bp, Chlamydia pneumoniae
atgatatttgagttccgattccctaaaataggagagacgagttccggaggatctatagtccgttggttaaaaaatttgggtgatcatgtagctagagatgagcctctgattgaagtatctacggataaaattgctacagaattaccctctcctaaagcaggccgactggtgcgtttctgcgtcaatgagggagacgaggttgcttctggggatgttttaggattgatagagcttgaggagatttccgaagctgatgatgagagcacctcatgtcctctgacttcttgtgaaacaaagtcggaggcgggttccagcagttcttcggtatggttttctcctgccgtgctgagtttagctcaacgtgaaggcattggtcttgataacctccaaaagattgccggcacggggaaagggggacgagtgactcgtcaggatttagaagcgtatatttcagaatcgcaacaagtttctattcccgaaatatttcaaggagaagtgaatcgcattcctatgtctccgctacgtcgggcaatagcttcttctctctccaagtcttcagatgaggttcctcacgcatctttggttgttgatgtcgatgtcacagatcttatgaatctgatttctggtgaacgccaacgcttcttagatacgcatggggtgaagctaacgattacaagtttcattgtacagtgtttagctcagactttaaggcagtttcctttattgaatggttccttagatgggactaccattgttatgaagaaatctgtgaatgtaggcgttgccgtgaacctcaataaggaaggggttgttgttcctgtcatccacaattgtcaagatcgcggtttagtaagtattgcaaaggccttggcggatctatcttcaagggctcggttaaataaattggatcctagtgaagtgcaagatggcagcgttactgtcacgaattttggaatgacgggagctttgattgggatgcccatcatacgttatcctgaagttgctattttaggaattggcacaatacaaaaacgtgttgtcgtccgtgatgacgattctttagccattcgcaaaatggtctatgtgacacttacctttgaccatagagtattggatggtatttacggcagtgagtttttaacctcattgaaaaatcgtttggagtctgttacgatgggctaa

SEQ ID NO: 18589 - DNA, 990 bp, Chlamydia pneumoniae
atgccttccccgatgatttctactgacgtatgccaagacattctaggtaagcaaaaagaagctgtagatttttttttccaagcctttcaacccaaagaggcaatgcaattagcagaaaaaatactcggtcattcgggatgggtatttttttctggtgtagggaaaagtggatgtgtagcacgaaaattagtggctacactccaatctttaagtgaacgtgctctgttcttttctcctgtggatcttctgcacggggatcttggtcttgtgagtcctggagacattgtatgtttattttctaaaagtggtgaaacccaagagttactagatacggttcctcatctaaagagtcgaagggcgattcttgtcgcgattacttccatgccttattctaatttagcggctctctcggacttagtcgttattttaccctctgttgctgaattagatccttttaatttaatccctacaaattctacgacatgccaaatgatctttggagattttttagctatgctcctttttcatagtcgtggtgtttctttatctacgtacggcaaaaaccatcctagtgggcaggttgggatgaaggctaatggtaaggttaaagattttatgttcccaaagacagaggtacctttctgtcatcttggagataaagtgagtttttctttagaggtcttttctgcttacggttgtggttgtgtttgtatagtagatcctcaattccgacttatgggaatttttacagacggagatttacggcgttctttagcttcctatgggggggaggtgctttcgttatctttggagaaggtgatgacggcaaatcctcgatgtattactgaagattcggatattgccattgctttgcaacttatggaatctagtagtcctgtagctgttcttcctgttttagataacgaggagaaccgacatgtgactggcttgttgcatatgcacactttagccaaagctggtctactttga

SEQ ID NO: 18590 - DNA, 1494 bp, Chlamydia pneumoniae
gtggtttcgttgttgcataagtttttagaaaatgcttcggggaaaaagggacaaagtttagcttcgacagcgtatttagcagctcttgaccatctcttaaatgcgtttccttccattggggagagaatcattgatgagttgaagagccagcgttcccatttaaagatgattgcttctgaaaactattcttcactttcagtgcagttggctatggggaacttgctcacagataagtattgtgaaggaagtccctttaagcgtttctattcctgttgtgaaaatgtagatgctattgagtgggagtgtgtagagacagcgaaagaactttttgctgcggattgcgcttgtgttcagcctcattctggggctgatgctaatttactggcagtaatggccattctcacgcacaaagtccaaggcccagctgtcagtaagttaggttataaaactgtaaacgaattaacagaagaagaatacactctacttaaggctgaaatgtcttcttgtgtttgcttaggaccttcattaaattctggaggccatttgacccatgggaacgtacgtttaaatgtgatgtctaagcttatgcgttgcttcccctatgatgtcaatccggatacggagtgttttgattatgcagagatctcccggttagctaaggagtataaacctaaggtactgatcgcaggatattcttcctattctcgaagattaaactttgcagttttaaaacagattgcagaggattgtggatctgtcttgtgggtagatatggcgcattttgcaggcctagttgctgggggagtgtttgttgatgaagaaaatcctattccttatgcagatatagtgacaacaacaacgcataagacattacgcggtcctcgcgggggattagttttggcaactcgagagtatgaaagcactctcaataaggcgtgtcctttgatgatgggaggtcctctacctcacgtgatagctgctaaaacagtggctttgaaggaagctctctctgtggatttcaagaaatacgctcatcaggttgtaaataatgctcgtcgattagcagagagatttttaagtcatgggctacgtcttttgacgggaggaacagacaaccacatgatggtgattgatttaggttctttgggcatttctggaaaaattgctgaagatatcttgagttccgtaggaattgctgtgaatcggaattcattaccttcagatgctattggtaagtgggacacttcaggtatacgtttaggaacccctgcactaacgactttgggtatgggtatcgatgaaatggaagaagttgcagatattattgtgaaagtattgcgaaatattcgtttaagttgccatgttgaagggagttctaagaaaaataaaggggaacttcctgaagccatagcgcaggaagctagagatcgtgttcgcaacttgttgctgcgtttcccgctctaccctgaaattgatttagaagctttagtttag

SEQ ID NO: 18591 - DNA, 714 bp, Chlamydia pneumoniae
ttgaaaaattccgggaatattatggaaccctctaccaacaagcccgactgtaaaaagatcttcgattccatagcgagtaagtatgatcgcacaaatacaatactctctttaggaatgcaccatttctggaatcgctctttgatccagatcctagggtcgggatactctctcctggatctctgcgcaggaacaggaaaagtcgcgaagcgttatattgccgcacaccctcaagcatcagtaactctcgtcgacttttcctcagcaatgctcgacattgcaaaacaacaccttccccagggctcttgctcttttattcatagcgatattaatcaactgcccttggagaatcattcttatcccctagcagcgatggcctatggcctcaggaacctctcggatccacataaagccctacaagaaatctcccgagtgcttatgccttctggaaaactgggcattctagagctcacacctccaaaaaaaacacaccctacctatagtgcccataagctctatttgcgtgctgtcgtcccctggattggaaagtctgtttctaaagatcccgacgcctatagctatctcagcaaaagtatccagcaacttccaaaggaccacgatcttgaagacctattctctaaatcaggattttatattgcgaaaaagaaaaaattgttcctaggagcggctacgatttggctactagagaaacaataa

SEQ ID NO: 18592 - DNA, 1164 bp, Chlamydia pneumoniae
atgctccatattcttttagccatattctgtattcttctattcctagccttcgggcttacgcaaccgtcctgtcacggatcctcaaaattcctaaaaaccctaaaccaacgcttcttcaaagataaaggaagagagtatccccccttccccagtgctcctacaattctcgccacgctgctctgcatcctctatggagctctcgggacaaaactctataccctcctccctccaaaaacagctcacaaagatctcctattctggcccctatactctctaagcgccctgatagcttacggattcctccccccatggatctctacaaaagtccctaaagaaaccaccgcccacctccgttttctagcttcggtattccaactcggtctcttcccactgcaactgctcttttacagacgccgccctaaccaacaagtacgatcttcaacatcatttcaaagccagctctccgaagccctctccgcttttgataacctcattgtccgtgaagtcatgatcccaaaagtagatattttcgcacttcccgaagaaactacactacaagaagctctggttctcgtaagcgaagaaggctacagtcgcgttcccgtttataaaaaaaacttagacaacatcacaggaatccttcttgttaaagatctcttactgctctatacaagcagccacgacctcagccaacccatatcctcagtagcaaaacccccattctatgccccagaaataaaaaaagcctcctctcttctccaagagttccgacaaaaacatcgccatctagccatcatagtcaatgaatacggattcacagaaggcatcgctaccatggaagatattatcgaagaaattataggagagatcgcagacgagcacgacgtacaagaaaatactccttataagaaaatcggaagctcttggattgtagatggaagaatgaatatctccgacgctgaagagtacttcaatttgaaaatcgatcatgaaaatagctacgatacactaggaggacatgtcttccataaagtgggtgctgttccccaaaaaggaatgcgtatccatcacgaaaacttcgatatagaaatcattacctgcacagaacgaaatgtcggaaaactaaaaatcacaccaagaaaacgtaaattcaatatctcctaa

SEQ ID NO: 18593 - DNA, 1983 bp, Chlamydia pneumoniae
atgagtgaacacaaaaaatcaagcaaaattataggtatagacttaggcacaacaaactcctgcgtatctgttatggaaggaggacaagctaaagtaattacatcatccgaaggaacaagaaccacgccatcgatcgttgccttcaaaggtaatgagaaattagtggggattccagcaaaacgtcaagcagtgacaaatccagaaaaaactctcggctctacaaaacgctttattggccgtaagtactctgaagtagcttcggaaatccaaaccgttccttatacagtcacctccggatctaaaggtgatgccgttttcgaagttgatggcaaacaatacactccagaagaaattggcgcacaaatcttaatgaaaatgaaagagacagcagaagcttatctaggcgaaactgtcacagaagcagtgatcaccgtccccgcatacttcaatgattctcaacgagcatccacaaaagatgctggacgcattgcaggtctagatgtaaaacgtatcattccagaacctaccgcagcagctcttgcctacggaatcgataaagtcggtgataaaaaaatcgctgtcttcgaccttggtggaggaacttttgatatctccatcctagaaatcggtgatggcgtcttcgaagttctatctacaaatggagatactctcctcggtggagacgactttgatgaagtcattatcaaatggatgatcgaagaattcaaaaaacaagaaggcattgatcttagcaaagataatatggccttacaaagacttaaagatgctgctgagaaagcaaaaatagaactttcaggagtctcttccacagaaatcaatcagccattcatcacaatggatgcacaaggacctaaacaccttgcattgacactcacacgtgcgcaattcgagaaactcgcagcctctctaatcgaaagaacaaaatctccatgcatcaaagcactcagtgacgcaaaactttccgctaaggatatcgatgatgttctcttagttggaggtatgtcaagaatgcccgcagtgcaagaaactgtaaaagaactcttcggcaaagagcctaataaaggagtcaaccccgacgaagttgttgctattggagccgcaattcaaggtggtgttcttggcggagaagttaaggatgttctacttctagacgttatccccctatctctgggtatcgaaactctaggaggcgtcatgacgactctggtagagagaaatactacaatccctacacagaaaaaacaaatcttctccacagctgctgataaccagcctgcggttaccatcgtagttctccaaggagagcgtcccatggccaaagataacaaggaaatcggaagattcgatcttacagatatccctccggctcctcgaggccatcctcaaatcgaagtctccttcgatatcgatgcaaacggaattttccatgtctcagctaaagatgttgccagcggtaaagaacagaaaattcgtatcgaagcaagctcaggacttcaagaagatgaaatccaaagaatggttcgagatgccgaaattaataaggaagaagataaaaaacgtcgtgaagcttcagatgctaaaaatgaagccgatagcatgatcttcagagccgaaaaagctattaaagattataaggagcaaattcctgaaactttagttaaagaaatcgaagagcgaatcgaaaacgtgcgcaacgcactcaaagatgacgctcctattgaaaaaattaaagaggttactgaagacctaagcaagcatatgcaaaaaattggagagtctatgcaatcgcagtctgcatcagcagcagcatcatcggcagccaatgctaaaggtggacctaacatcaatacagaagatttgaaaaaacatagtttcagtacgaagcctccttcaaataacggttcttcagaagaccatatcgaagaagctgatgtagaaattattgataacgacgataagtaa

SEQ ID NO: 18594 - DNA, 1707 bp, Chlamydia pneumoniae
atgaaaacgtctcaactcttttataagacttcaaaaaatgcaaataaaagcgctgctgtgctctcaaacgagctcctagaaaaggcaggatacctatttaaagtaagtaaaggagtctatacctatacacccctgttatggcgcgtggtctccaagatgatgaacatcattagagaggaacttaatgcgattggaggtcaagaacttctactcccacttctccacaatgctgaactttggcaacatacagggagatgggaggcatttacttcggaaggactgctctacactctcaaagaccgcgaaggaaaatctcattgcctagctcctacacatgaagaggtcatctgctcttttgttgcacaatggctctcctcaaaaagacaacttcctctccacctttaccaaattgctacaaaattccgagacgagattcgccctcgattcggtctcattcgctctcgagagctccttatggaagacagctataccttctcagactctcccgaacaaatgaacgagcaatatgaaaaactccgctctgcgtatagtaagatctttgatcgtctcggtcttgcctatgtcatcgttacagctgatggagggaaaatcggcaaaggaaagtctgaggaatttcaggtcctttgctctctaggcgaggacacgatctgcgtcagcggttcctatggagctaatattgaggctgctgtctccattcctccacagcatgcctacgatcgcgagtttcttcccgtcgaagaagtggccacccctgggattacaacaatagaagctctagcaaacttcttctctatccccttacataaaattttaaaaacccttgtcgtaaaactctcctactcaaatgaagaaaaattcattgccattggaatgagaggagatcggcaagtcaacctagtgaaggtcgcttccaaactgaatgccgatgatattgctctagcttctgatgaagaaatcgaacgcgttctaggcacagaaaaaggattcatcggtcccctaaactgtcccatagactttttcgcagacgaaacaacgtccccaatgacgaactttgtttgtgcgggcaatgctaaagataagcactacgtaaatgtaaactgggatcgcgacctcctccccccccaatacggtgactttctactcgctgaagagggagacacatgtcctgaaaatcctggccatccttaccgcatttatcaaggcatagaagttgctcatattttcaatctcgggacacgctataccgatagttttgaggtaaacttccaagatgaacacgggcaaacccagcagtgctggatggggacctacggcattggagtcggaagaacattagccgcttgtgtagaacagcttgccgacgaccgtggtattgtttggccaaaagcactcgctcccttctctatcactatcgcctttaacggaggagacactgtatctcaagagcttgcggaaactatttatcatgagctacaaagtcaaggctatgagccccttcttgatgatcgagatgaaagactcggatttaaacttaaagacagtgaccttatcggcattccttataagcttattttaggaaagtcctaccaatcttcgggaatattcgaaattgaatcccgatctggagaaaagtatacagtctccccggaggccttccctacttggtgtcagaatcacttagcctag

SEQ ID NO: 18595 - DNA, 1194 bp, Chlamydia pneumoniae
atgcgtagaaatccccacttttctcttctcaagcctcagtatctattttctgaaattagtaaaaagcttgctcagtttcgcaaggagaatccagaaatctctgtcatagatctttctatcggagatacgacacaacctctctgccgctctattactcaggcaatcaaagagttctgcgtttctcaagagaaacaagagacctatcgtgggtacggcccagaaaccggattagaaaaattacgcacaaaaattgcctctgaagtctatgaaaatagaatctcccctgaagagatttttatttcggatggtgccaaacctgatatcttccgtctcttttctttttttggctcagaaaagactctaggtctacaggatcctgtctatccagcttatagagacattgcccacattacaggaatccgcgacattatccccctagcatgcagaaaagaaactgggtttattccagaacttccgaaccaacaatccctagacattctttgtctatgctatcctaacaaccccacaggaacagttctaacctttcaacaactccaagcacttgtgaactacgcgaatcagcacggaaccgttcttatttttgatgcggcctatagcgcctttgtctcagatcctagcctacctaaaagcatcttcgaaatccctgaagcaaaatattgtgctatagaaatcaactctttctctaaatcattaggctttactggcatgcgccttgcctggaacgtgatccctaaagaactcacctatgacaataacgaacctatgatcaacgattggaaacggctctttgcgactacatttaacggagcatctctcctcatgcaagaagcagggtattacggcctagatttatttccgacacctcccgccatctctttatatctaaccaatgctcagaaacttaaaaaaagcttagaaactgcaggattctcagttcatggtggcgatcatgccccttacctttgggtagaactccctgaaggaatctctgatgaagaagcgtttgatttcttcttacatcagtatcatattgcagtgactcccggccacggttttggttcctgtggacaaggatttgttcgtttctccgctctgacacaaccacaaaatatcgctttagcctgtgaccgcctctgtaccgcttcactaaaagaaacgatggttcttgcatga

SEQ ID NO: 18596 - DNA, 1335 bp, Chlamydia pneumoniae
atgaatttttcattatttttatttttcctgatagctattcagggaatctgcttgtacgtgggacgtcgtggtagcaaaaaggtagaagatcgcgagagctattttcttgcaggaaggagtttaaaaatctttcctttgatgatgacattcattgccacccaaatcggtggcggtgtacttcttggggctgctgaagaggccttctgttatggttatggggggattctttatcctttaggagtcgctttagggttgattttcttaggaatggggcccgggaagcggttggcagagggatcgttaacgaccgtagtctctatctttgaagtgttttatggttctaaaaagctccgtaagatcgcatttttattatccgcaggttccttatttttcatcctggtcgctcaggtgattgctttagatcggttgtttagcagcttcccttttggcaagtacgtaaccgtagcattttggattgtcttagcatcctatacctcaacaggagggtttcgcggggtcgtacgtactgatgtgatccaagcaggatttcttcttattgcggtgctcgtctgtggtgtttctgtatggctctctgtccctaaatccttgtctgtgttggatcctttccaatcacttccttgtgcgaagctttccaattggatattcatgcctatgctctttatgcttgttgagcaggatatggtgcaaaggtgtgtggctgcctcctctccaaaacgcttgcaatgggcggctgtaggcgcaggccttgttcttcttctttttaactttatccctttatttttaggttctttaggagctaaagcaggccttaaagcaggatgccctctgattgataccattgcatatttttgcaatccctcactagcagctgtgatggctgctgccatcggcgttgcgattctctctaccgcggactctcttatgaatgctgtaagccagctaatcgctgaagaataccctacgttgaaagccccttattatcgttatttagtattgggtttggcggttgcagctcctcttgttgctattggttttacaaacatcgtagatgtcttgattttaagctatagcctgtcagtgtgttgtctttcagtccctgtgggtttctatcttctagctcctaaaggtcgccgtgtgagcggagctgctgcttgggcaggagtgctcgttggtgctctgggctatggatgggttcagatagtctctttggggatgtttggggagctattggcttgggtaggttctctagtcgccttttcctttgtaggatttattgagatcacttggaaaaacaaagtcaaaacgcaaacttag

SEQ ID NO: 18597 - DNA, 3102 bp, Chlamydia pneumoniae
atgtttccaattcccccaccacattgcccgcccaataacaagaataatttttaccacttaacgactgatactaaagaccctctgttacttagaattctacgtaccataggatacgttctgctccatatcattactcttggtttgcttcttctgattcactactacaagcatcatcgggttgtcagaaaagaaggcttgccaacgcctcccactcttcccaaaggaccagagccaaaaactatagaaattgccaaacaaccgcctaaggatggtgaagacaaaaaacccgatgttcccaagccgggcacgccgcccccagaggacacacccccgcctccccccaaagctccttcaccagcgagcccaaaagtccctaaacaacctgctgataaaaagccgactccaccaccagaggcccctcctcctcccgtacgggtggctacccccatgcctctccgcccatctagtcaaggctattggcaatgcttaaatcgcatggtgagcatggtactaagacgagcgcctctgcctcttcctgccatgcaagttgatccaatacttggcgactttaaccctcatttcgtagcttcctatcccaatcggattgataacgaaccgatgtatttccaaataaaacagttcaagaaaatcgcacaaaatccggatcttcctcaacaacaccggcgacttgcgcaactctctcttgaacaggctctctatctaaatgacaattactaccttgtgaatgtaccgggagatgggaactgcttttatcgtgcctatgctgtaggatggctatctgctctctacgaagagagcagcagaaatgatattgtctttgagcaggaagccacacgtctccttgacctgcctttcgcctcctcttctccggcaaatgcgaatctttgtgcagaaatggctgaactccttcagttatgcagtacttattgctccttcatagacctctatgacggggtgattctttctcagaaacacactgcaactctgatagcctttctaagaaaactctctgcatatgcgattcgccaacaaatcgcagcttcaagtaatgaagaaacagcgagagccttatttatttctgatatgcaggacgatctcctccccagtgttctggaatttcttgctgcaaatcgtccctattcggaattgttccaaaatctcattgatcattccgcacttccttacatgcaatctagagacaaactctttcttctcttggaacatctgcccgctctctttcttactgatgcagagcttcaaaagatgtctccagaagatcaacaacttcgaaagcaatatgaaagagaaatacgagaggcttttgctaagctgagtcgacgcattgctgattcagggtgggatactgagagattcaatgctatagtcaaagattacctccctgaagcaatccgatgtcaatactctcgctttcttgcaactatagaaaacagacgatctggggatctcccttggtctccagctctttctttctttgcttttctatgtacctgcccctctgtaagatttcacaaactctgcgctactttctacaaatcattagaggatatcattatagcgtccgcgcccccccaacgctctatacaagagatcttacaaataagtaacgcctccctcagctaccttaatgaagatttagattcttcttggcaacgagaggtgatttcttctaacatcatgactatccttacgactcatgagagtttgacgttagagagctctatgcctcaactcgaaacactacataaacgcatagcaaacctattaaagaatgtaatatccacatcctttgaaacccctcctttaagcaatcagccggatttactttcaaatcttgtaaacaagctattagtcgcaattcatagtaagcttgaattaaaagagcacttcaatactgtctgctcggcaagaagtttacgtttaacgcgtgatgaaggcagtggtctctcacaagagcaggacctcctctatacacaggcagtacagctcttattctttattttacagcatcctcaagtgaataatcgtccagaaactaaagatgccgttaaagagttaaaaatgcttctacttccttttctacaatatgcctttaaaaaagtagaaaacgaaaagaaactccaaaaacttctacgttccattctagggtctctagtactcaagcctccagcacgctatccttcaaccccttctaataaagataaagagacgttctgcaagttctggtcacgacatcctgaagtgatggttttagatcccatacttgaaaagaactgtatgcagtttctacgagctactttcccaaattatcaactggaaaccgaggccatactcttagaaaaagaaatcgaaagtacctttaggaatgggtggaacgtttttttaacacggttaaatctcttcggatcaaaactgggttcgccttcttctcccacagctttaagtgatcagttttcgaaatcttttttaatcttttgtttccttaacaactaccctaaacttctacaaaaaaagactccgctagctgctcgattagacgctttccaaagagaggcttctcatagatttacacaagtaaaagataagcttttactttcgttaaaatacggtttccctctagctacagcgactataaatcaatactctagagctcgagatcagttgatttgtaatctcttaaaaaacacggtcacagcatctgatggtttctgtcgctctggttttagacaatcactgataggctacctccactccctaagttctaatgaactcggtgatatcttggatgacgtcaaagagcaagctgaggctaacgacgtcgctgctatgactactgtacctttgcagccgtttgctgtttgtctgatcatgtctgatcgagatactgtctcagaagaaaatattgaaaactttgttgcgatgcatggatttttaaatacaatttctccggaaagagacgctcgtatcttcttaatccgcttccccaaccactacggttgtctcttgcctagaaaccctagaactgaagatcagaactcaaaaccggacagctcaaatccctag

SEQ ID NO: 18598 - DNA, 780 bp, Chlamydia pneumoniae
atgataaaacaaataggccgtttttttagagcatttatttttataatgcctttatctttaacaagttgtgagtctaaaatcgatcgaaatcgcatctggattgtaggtacgaatgctacatatcctccttttgagtatgtggatgctcagggggaagttgtaggtttcgatatagatttggcaaaggcaattagtgaaaaacttggcaagcaattggaagttagagaattcgctttcgatgctttaattttaaatttaaaaaaacatcgtatcgatgcaattttagcaggaatgtccattactccttcgcgtcagaaggaaatcgccctgcttccctattatggcgatgaggttcaagagctgatggtggtttctaagcggtctttagagacccctgtgcttcccctaacacagcattcttctgttgctgttcagacaggaacgtttcaggagcattatcttttatctcagcccggaatttgtgtccgttcttttgatagcaccttggaggtgattatggaagttcgttatgggaaatctccggttgccgttctagaaccctcggtaggacgtgtcgttcttaaagacttccctaatcttgttgcaacaagattagagctccctcctgaatgttgggtgttgggctgtggtctcggcgtagctaaagatcgtcctgaagaaatacaaacgattcaacaagcgattacagatttaaagagcgaaggggtgattcaatctttaaccaagaaatggcaactttctgaagttgcttacgaatag

SEQ ID NO: 18599 - DNA, 1086 bp, Chlamydia pneumoniae
atgcaacaaactgtaattgtagcaatgtcaggaggcgtggattcttctgtcgttgcctatttattcaaaaaatttaccaattataaggttattggcctcttcatgaagaattgggaagaggatagcgaaggcggcctttgctcgtctactaaagattatgaagatgtcgagagggtatgtcttcagctcgatatcccttattacaccgtatcttttgctaaagaatatagagaaagagtgttcgctcgtttcctcaaggaatactctttaggctacactcctaaccccgacattctttgtaaccgagaaatcaaatttgaccttctacaaaagaaagtccaggaacttggcggagattacctcgctacagggcactactgccgattaaataccgagctccaagaaacccaactccttagaggttgcgatcctcaaaaagatcagagctattttttatcaggaactcctaaaagtgctcttcacaatgtgctctttcctcttggggaaatgaataagactgaagttcgtgcgattgcagctcaagcagctcttcccacagcagaaaaaaaagatagtacaggcatttgctttatagggaagcgcccttttaaagagttcctagagaagtttcttcccaataaaacaggcaacgttatcgattgggataccaaggaaattgtagggcaacatcagggagctcactattatactatagggcagcggcgaggacttgatcttggaggatccgagaaaccctgttatgttgtgggaaaaaatatagaggaaaatagcatttatattgtgaggggggaagaccatccccagctctacctacgggaattaacagctagagagctcaattggtttacccctcctaaatccggatgtcactgtagcgctaaagtccgctaccgttctcctgatgaagcttgcacgatagattatagctcaggtgacgaggtcaaggtgcgattttcacaacccgtcaaggcggtaactccaggacaaacaatagcgttttatcaaggagatacctgccttggtagtggagttatcgacgttcctatgattccaagtgagggctag

SEQ ID NO: 18600 - DNA, 2538 bp, Chlamydia pneumoniae
atgtttgagaagttcactaatagagcaaaacaagtcattaaactggcgaaaaaggaggctcagcgtttaaatcataactacctgggtactgagcacatcctgcttggtcttctcaaacttggtcaaggggtagctgttaatgtattacgcaacctcggtatagattttgatacggcacggcaagaggtggaacgcctgattggttatggtccagaaattcaagtctacggagaccctgcccttacaggaagagtaaaaaaatcttttgaatcagcaaatgaagaggccagccttttagagcacaattatgtcgggacggagcatttactcttagggatcctacatcaatcagatagtgtcgctcttcaggtattagaaaacttacatatcgatccaagagaggttcgtaaggaaattcttaaagaattagagaccttcaatctacaacttcctccttcgtcgtcgtcttcttcctcatcctctcgaagcaacccttcatcttcaaaatctcctttaggtcatagcttaggttctgacaaaaacgaaaagctttctgctctgaaagcatatggttatgatttaacggagatggtccgagagtctaagctcgatcctgtcattggtcgttcttcagaagtcgaacggttgattttgattctttgccgaagaagaaaaaacaatcctgtacttattggagaagctggagttggtaagactgcaattgttgagggtctggctcaaaaaatcattctgaatgaggttcctgatgccttacggaaaaagcgactgattactctagatctagcattaatgattgctggaacaaaatatcgagggcaatttgaggaacggatcaaagctgtcatggatgaagttcgcaagcatggaaacatcttgctcttcattgacgagctccacacgattgtaggagcaggagcagctgaaggtgctatcgatgcttcaaacattttaaaacctgcgttagcgcgaggtgaaattcagtgtattggagcaactacgatagatgagtatcgcaagcacatagaaaaagacgcagctttagaacgtcgtttccaaaaaatcgtggttcaccctcctagtgtagatgagactattgagattttacgtggcctcaagaaaaagtatgaagaacatcacaatgtcttcattactgaagaagctttaaaagcagctgcgactctttctgatcaatatgttcatggacgtttcctccctgataaagcaatagatcttttagatgaagctggggctcgtgtccgtgtgaatacaatgggtcagcctacagatttaatgaagctagaggctgaaatcgaaaatacaaaattggccaaagagcaggccattggaactcaagaatacgaaaaagctgcaggtttacgtgatgaagagaaaaaacttcgcgaacgtctgcaaagtatgaaacaggaatgggaaaatcataaagaagagcaccaagttcctgtagatgaagaagcagtcgctcaggtagtttctctacaaacaggaattccctcagcaaggctcacagaagctgaaagtgagaagcttctgaagttagaagacacgttaagaagaaaagtcattggtcaaaatgatgccgttaccagcatttgccgtgccatccgacgttctcgaacagggatcaaagatcctaaccgacctacgggctccttcctattccttgggcctaccggtgtagggaaaagcctgctcgcccaacaaattgctatagagatgttcggtggtgaagacgctctgattcaggtagacatgtcagagtacatggagaaatttgctgctaccaagatgatgggatcacctccaggatatgtaggtcatgaagaagggggccaccttacggaacaggtacgtcgccgtccttactgcgttgttctctttgatgagatagaaaaggcacacccagacattatggacctgatgttgcaaattttagagcaaggacgtcttactgattcttttggtcgcaaagtggatttccgtcatgccattattatcatgacctccaatttgggagctgatctcattcgtaaaagcggagaaattggttttggcttgaagtcccatatggactataaggtcatccaagagaaaatcgaacatgctatgaagaaacacttaaagcctgagttcattaaccgtttggatgaaagtgtgattttccgtcccctcgagaaagaatctctatcggagatcatccatttagagatcaacaaactggactcgagactgaaaaactaccaaatggctttgaacatcccagactctgtgatttccttcctagtaacgaaggggcattctccagaaatgggagcacgtcctctacgccgtgtcattgagcagtaccttgaagatcctctagcggagctcttgcttaaagagtcctgccgtcaagaagctcgcaagctacgagcaaccttggttgaaaatcgcgttgcctttgaaagggaagaagaggagcaggaagctgctctccctagccctcacttggaatcatag

SEQ ID NO: 18601 - DNA, 1404 bp, Chlamydia pneumoniae
atgggatgggtcgattgtatttgggaaagctttataaataaagagagcggcatgttaacctgtaacgagtgcactacttgggaacagtttttaaattatgttaagacacgttgctcgaaaacggcttttgaaaattggatttctcctattcaagttcttgaagaaactcaagagaaaattcgcttagaagtccccaacatttttgtacaaaattatcttcttgataactacaaaagagacctctgttcttttgtccccttagatgttcatggagagcctgctttagaatttgtagttgcagaacacaagaaaccttcagcccccgtggcttctcaaaaagaatcaaacgaaggaatttctgaggtctttgaagaaactaaagattttgaattaaagctgaatctctcctatcgctttgataatttcattgaaggtccctcaaatcaatttgtgaagtctgcagctgtaggtattgctgggaaacctggccgctcctacaaccctttattcatccatgggggtgtgggattaggcaaaacgcatttacttcatgccgtaggtcactacgtaagagaacatcataaaaatctacgcatccattgcatcactacagaagcgtttatcaacgatcttgtctaccatctcaaatccaagtctgttgataaaatgaaaaatttttatcgttccctagatttacttcttgttgatgatattcaatttttacagaatcgccaaaattttgaagaagagttttgcaatacctttgagactttgatcaacctgagtaagcaaattgtaattaccagtgataaacctccaagtcagctcaaactttccgagcgtatcattgctagaatggaatggggactggttgctcacgtcggcatccctgatttagaaactcgggttgcgattttacagcacaaggcggagcaaaaaggattgctcattcctaatgaaatggcattttatattgcggatcacatctatggcaatgtccgtcaattggaaggagctatcaacaagctgactgcctattgtcgtcttttcggcaagtctcttacagaaactacagtccgagaaactctaaaagagctcttccgttctccaacaaaacaaaaaatttctgtagaaacgatcttaaaaagtgttgctacagtattccaagtaaagctgaatgatcttaagggaaactcacgctctaaagatcttgtgttagctcggcaaattgctatgtatttagcaaaaactcttattacagattctttagttgcaataggagctgcttttggtaaaactcattcgacagtactttatgcctgtaaaactatagaacataaattacaaaatgacgaaactcttaagcgtcaagtaaatctctgtaaaaatcatattgttggttaa

SEQ ID NO: 18602 - DNA, 894 bp, Chlamydia pneumoniae
atgtccgaacgtgcgcatattcccgtattagttgaagaatgtttagctttatttgctcaacgtcctccacagacttttcgagatgtcaccttaggagctggaggacatgcgtatgcttttcttgaggcgtatccctctctaacttgttatgatggctccgatcgagatcttcaggctttggcaattgcagaaaaacgtttggagacctttcaagatagagtctccttttcccacgcctcttttgaagatcttgcgaaccaacccactccacgtctttatgacggagttcttgcagatttaggagtctcttctatgcagctggatactctatcccgagggtttagctttcaaggggaaaaagaagagttggatatgcgtatggatcaaacgcaagagctttccgctagcgatgtcctgaactccctaaaagaagaagaactagggagaatttttcgtgaatatggagaggaaccacaatggaaatctgcagctaaagctgttgtccattttcgtaagcataaaaaaattctttcgatccaggatgtaaaagaagctcttcttggcgttttccctcactatcgttttcatagaaaaatacatccactcaccttgatttttcaagctctacgtgtttatgtgaatggagaggatagacaattgaaaagtttactaacatctgctatatcttggctggctcctcagggacggcttgtcattatttctttttgtagctctgaggatcgtcctgtgaagtggttttttaaagaggcggaagcttctggcctggggaaggtaatcacaaagaaagtgatccaacctacctaccaagaagtacgaagaaatcctagatcgagatcagcaaaactacggtgttttgaaaaagcttcccaatga

SEQ ID NO: 18603 - DNA, 1962 bp, Chlamydia pneumoniae
atgagctaccgtaaacgttcgactctaattgttctaggagtgtttgctctttatgctcttctagtattgcgttattataaaattcaaatttgtgaaggagaccactgggccgcagaagctctcgggcaacacgaattttgtgtccgtgatccttttcgaaggggcaccttttttgctaacacgacagtacgtaagggagacaaagaccttcagcagcctttcgctgtcgatattacaaaatttcacctttgtgcagatcctttagctattcccgaatgtcatcgtgatgagatcatccaagggattctccaatttattgaggggcagacctacgacgacctctccctaaagttagataagaaatctcggtattgtaagctgtatcctttattagatgtttctgtccatgaccggctatccctttggtggaaaggatatgcaacaaagcatcgcttaccaacaaacgccctattttttattacggactaccaacgctcgtatccttttgggaagctccttggacaagttctccataccttaagagaaattaaggatgagaaaacaggaaaagcctttcccacaggcgggatggaggcgtactttaatcatattctggaaggggacgttggagagagaaagctgttgcgttctcctttgaaccgtttagatacgaatcgtgttatcaaactgcctaaagatggctctgatatctaccttacgatcaatcctgtgatccagaccattgcagaggaagaactcgaacggggcgtgctagaagctaaagcccaggggggtaggctcattctaatgaactcccaaacaggagagattcttgcactggctcaatatccgtttttcgatcccacaaattataaggaatacttcaataacaaagagcgcatcgaacatacgaaggtatcttttgtgagcgatgtttttgaacccgggtcgatcatgaaacctttgactgtggcgattgctttacaagctaacgaagaggctagcttaaaatcgcagaaaaagatttttgatcctgaagaacctatcgatgtgaccaggacactcttccctggacgaaaaggatctccgcttaaggatatttctagaaactctcaattgaatatgtacatggctatccagaaatcttcgaatgtctatgtagctcagctggctgaccgcatcatacaatctttaggagtggcctggtaccaacagaagttgctagctctgggatttggaagaaaaacagggatcgagcttcccagtgaggcctctggtttggtgccttctccccatcgtttccatattaatggttccctggaatggtccttatctactccatattctttggctatgggatataatattttggcaacagggatacaaatggttcaagcctacgctatccttgcaaacggaggttatgccgtccggcccactttagtaaaaaagatcgtctctgcttcaggagaggaatatcatcttcctactaaagagaagacacgactcttttcagaagaaattactagagaagttgttcgtgccatgcgttttacaacgttacccggaggttcgggatttcgagcctctcctaagcatcactctagtgctgggaaaacaggaactacagaaaagatgattcatggaaaatatgataaacgccgtcatattgcttcttttataggttttactcccgtagagagctcggagggaaatttcccacctttagtgatgctcgtctccatagatgatcctgaatatggtttgcgagccgacggcacgaaaaattatatgggggggcgttgtgcggcacccattttttctagggttgctgaccgcacactcctctatttagggattcttccagacaagaagctaagaaattgcgacgaagaagctgctgcattaaagcgtctctatgaagaatggaatcgttctccgaaacaagggggaacgaggtga

SEQ ID NO: 18604 - DNA, 1452 bp, Chlamydia pneumoniae
atggatttaaaagagttactccatggggttcaagctaaaatctacgggaaagttcgccctcttgaagtgcgcaacttgacacgtgattcccgttgtgtgagtgttggcgacatttttatagcccataagggacagcgctacgacggaaatgattttgctgtcgatgctttagctaatggagcaattgccattgcttcttcactatacaatccgtttctttccgttgttcagatcatcactcctaatctcgaagaattagaggctgagctttctgcaaagtattacgaatacccttcaagtaagctccataccattggggtgactggaaccaatgggaaaactacagttacatgtttgattaaagctttattggatagctatcaaaaaccttcagggcttttaggaaccatagagcatatcttaggagagggggtgattaaagatgggtttactacacctacacccgctcttttacagaagtatttagccactatggtacgtcaaaatagagacgctgttgttatggaagtctcttctataggacttgcctctggaagagtagcctataccaattttgatacagcagttctgactaatattaccttagatcatctcgattttcatggcacatttgaaacctatgttgcggcgaaagccaagcttttctctctcgtgcccccttcgggaatggttgttatcaacacagactctccctacgcttctcagtgtattgagagtgcaaaggcaccggtcatcacttatggtatagagagtgctgctgactaccgagccaccgatatccaactttcttcctcgggaacaaagtataccttggtgtacggggaccaaaaaattgcgtgctcttcctcatttattggaaagtacaacgtctataacctacttgctgcgatctctacagtacatgcaagtttgcgttgcgatcttgaagatttgctagaaaagataggcttgtgtcaacctcctccaggtcgtttggatcctgtacttatgggtccctgccctgtatatattgattatgcacacacccccgatgctttagacaatgtcttaacaggattgcatgagttacttcctgaggggggaagactgattgttgtttttggttgcggtggagatagagatcgcagtaaacggaagttgatggcccaggtggtagagcgttatggttttgctgttgtaacttcagataaccctaggagcgagcctcctgaagatattgtgaatgaaatttgtgatgggttttattcaaaaaactatttcatcgaaatcgacagaaaacaagcaattacatatgctctgtctattgcctcagatagagatatagtgttaatagcgggaaaagggcatgaagcttaccaaatatttaaacaccaaacagttgcgttcgatgataagcagactgtttgtgaggtactcgcttcctatgtctaa

SEQ ID NO: 18605 - DNA, 795 bp, Chlamydia pneumoniae
atgaagcttaccaaatatttaaacaccaaacagttgcgttcgatgataagcagactgtttgtgaggtactcgcttcctatgtctaagcaactgtcgttttttgctttatgtgtgttaggaagtcacccgatttttgctcaaacaccgaatcctcctcagcgtgtacgacgcagtgaggttatatttatagatcctggacacgggggaaaagatcaaggcacggcaagtaaggaacttcattatgaagagaagtccctgaccctgtctcttgctttgacggttcaaagttacttaaagcggatgggttataaacctcagctaacccgatcttctgatgtatacgttgacttagggaaacgcgttgctttgtcgaaccgtgggcagggggatgtctttatcagcatccactgtaatcattcttcaaacgcagcagcctttggcaccgaagtatatttttataatggtaaggtcggatctccgactaggaatcgcatgtcagaagtactgggaaaaaacattttagctgctatggaaaaaaatggcattttgaagtctcgaggtttgaaaactgcgaactttgttgtgattagagatacttctatgcctgcagttttggtggaaaccgggtttttatccaatagtcgtgaacgtgcggccctgcaagatgctcgctatcgtatgcatgtagcgaaaggcatcgccgagggagttcataattttctttctggacctagttttcagaaaccaaaacagaatatcgctaaaatacgtaaaccacagatacaagcaaattag

SEQ ID NO: 18606 - DNA, 303 bp, Chlamydia pneumoniae
atggctaccatgacaaagaagaaactaatcagcacgatctcacaagatcacaaaattcatcctaatcacgtacgtaccgtgattcagaattttctagataaaatgaccgacgccttggttaaaggtgacaggcttgagtttagagattttggtgtgttgcaagtagtagaaagaaaaccaaaggtaggacgtaatcctaagaatgcagcagtccccattcatattcctgctagacgcgctgtaaagtttactccagggaaaagaatgaagcgcttgatagaaactccgaataagcattcttaa

SEQ ID NO: 18607 - DNA, 975 bp, Chlamydia pneumoniae
atggaacttcttccacacgaaaaacaagtagttgaatatgaaaaggctatagccgaatttaaagaaaaaaataagaaaaattctctcttatcttcttcagagattcagaaattggaaaagcgtttagataaattaaaagaaaagatctattcggatttgactccttgggagcgtgtacaaatatgtcgccacccttcgcgtccccgtactgtcaactatattgaagggatgtgtgaggagtttgtcgagctttgtggagatcgcaccttccgagatgatcccgcagttgttggtggctttgtaaaaatccagggtcagcgttttgtccttattggccaagaaaagggatgcgatacagcgtcacgccttcataggaacttcggtatgttatgtcccgagggtttcagaaaagcccttcgcttaggaaaactcgctgaaaagtttggcttgcctgtggtctttcttgtcgataccccaggagcatatcctggattgactgctgaagagagaggacaaggatgggcaattgccaaaaatctttttgagctctcaagacttgccactcccgtgattattgtcgttatcggtgagggatgttcaggtggagctttgggcatggctgtaggtgattctgtagctatgttagagcattcctattattctgtaatttccccagaaggatgcgcctccattctttggaaagatcctaagaaaaatagcgaagcagcttccatgttgaaaatgcatggagaaaacttaaaacaatttggcattatcgatactgttatcaaagagcccattgggggagctcaccacgatcctgcattggtatatagcaatgttcgagagtttatcatccaagagtggttacgattaaaagatctagctatagaagagctgttggagaaacggtacgaaaaatttcgctctataggtctttatgaaactacttctgaaagcggtcctgaggcataa

SEQ ID NO: 18608 - DNA, 1980 bp, Chlamydia pneumoniae
atgaaactacttctgaaagcggtcctgaggcataaaaatcatctcgttatattaggctgttctctactcgcaattttaggacttaccttttcatctcagatggagattttttctttagggatgattgctaaaacaggccccgacgcctttttactttttggacgtaaggaatctggaaaacttgtaaaggtttcagaactaagtcagaaagatattttagagaattggcaggcaattagtaaggattcagagacacttaaagtctctgatgccacgacatacatcgccgaacatgggaaaagcacagcctctctgacgagcaagctctctaagtttgtccgtaactacatcgatgtgagccgctttcgaggactggcaatcttcttaatctgcgttgctatttttaaagcagtcaccttatttttccaacgtttccttgggcaagtcgttgctatacgggtaagccgagacttacgtcaggactactttaaggccctacaacaactccccatgaccttcttccatgatcatgatatcggtaatttaagtaatcgtgtcatgacagattctgcaagcattgccttagcagtaaactctttaatgattaactacattcaagccccaattaccttcatattgacattgggagtctgtctgtcgatttcatggaagttttcaattcttatttgtgttgcctttcctatctttatccttcccattgtcgtgatcgctagaaagatcaaaaatttagcaaaacgtattcaaaagagtcaggattcattttcctccgttctttatgattttcttgctggggttatgacagtaaaagtctttcgtacagaaaaatttgccttcacaaaatattgtgagcataacaataagatttctgctttagaggagaaaagtgctgcttacggtttgcttccacgacccctcctgcataccatagcttctttattttttgcttttgtcgtcgttatcggaatttataaatttgctattcctcccgaagaacttatcgtattttgtggtttgctctacctaatctacgaccctattaagaagttcggggatgaaaatacctccatcatgaggggatgtgctgctgcggagagattttatgaagtcttgaatcaccccgatcttcatagtcaaaaagaaagagaaatcgagttccttggactttctaatacaatcacattcgagaatgtttccttcggctatcaggaagataagcacatcctcaaaaatctaagctttaccttacataaaggcgaagctctaggcattgtaggacctacaggatctggaaaaacaacacttgttaaattacttcctaggctctacgaagtctcccaaggaaagattcttatcgactctcttcctattacggaatataacaaagggtccttaaggaatcacatcgcctgtgtattacagaatcctttcttattctatgatactgtatggaataaccttacctgtggtaaggatatggaggaggaggctgttttagaagctctaaaacgtgcctacgctgatgagtttattttaaagctccctaaaggagtccatagcgtgctcgaagaatctgggaagaatctctcaggaggacagcagcaacgtttggcaatagcacgtgctctgttgaaaaacgcctccatcttaattttagatgaggcaacgtcagctctagatgccattagtgaaaattacattaagaatatcattggagagcttaaaggacagtgcacacaaatcattattgcccataagctgaccactcttgaacatgtagatcgcgtgctctacatagaaaatggtcaaaaaattgccgaaggcacaaaagaagaactcttacagacgtgtcctgaatttttaaaaatgtgggagctctcagggactaaagaatataacagggtctttgttcctgatcacaaattagtcgcaaatcctacggacatggcaataacaacttag

SEQ ID NO: 18609 - DNA, 888 bp, Chlamydia pneumoniae
atggaaaagttactagtgactgatattgacggtacaattacccatcaatctcatcatttagataaaaaggtgtatgagcggctctatgcgctgcaccaagctggttggaagttgtttttcttgacgggaaggtattataaatatgctgcacgcttgttttctgattttgatgctccatatttattaggatgccaaaacggcgcttctgtatggtcttcaacatcatcaaatcttctctattctaaaagtttaccctcagatttattatgtattttacaagattgtatggagggggcaacggctcttttttccgtggaatcaggagctccttacggggatcactactatcgcttttcaccgactcctatagctcaagatttacacgaatatgtagatcctaggtactttcctaatgctaaggaaagagagatcctatttgaaacgcgctctttaaaagacgactatgcttttcctagttttgctgcagcaaaagtctttggactgcgagatgaggtcatcagaattcaaaaggagctggaacgccaagaagcactgacttcagtcgcgacgatgacgttaatgcgctggccctttgactttcgctatgccatcttgtttttaacagataaaagcgtctctaaaggcaaagccttagatcgtgttgtcaatatactttatgatggaaagaaaccctttgtcatggcttcaggagatgatgctaatgatctcgatcttattgagagaggagattttaaaattgtgatgagttccgcacctgaagagatgcacgttcatgcggactttctagctcccccagcagataagaatggcattctttcagcttgggaagctggtgtccgctattatgacgaccttatgagtctttag

SEQ ID NO: 18610 - DNA, 900 bp, Chlamydia pneumoniae
atgctaaagattgatctaacaggaaaggtagcatttgttgcgggcattggtgatgaccaaggatatggctggggtattgctaaacttcttgcagaagcaggagctacgattattgtaggaacatgggtaccgatttacaaaattttctctcagtcttgggaattaggaaaattcaatgaatctagaaaattatcgaatggcactctcttagagattgctaagatctatcccatggacgcaagttttgatagccctgaagatgttcctgaagatattgctgaaaataaacgttacaagggcattacgggattcacgatatcagaagtcgcagaacaggtaaaaaaagattttggtcatattgacattcttgtccactcgctggcaaatagtcctgaaatttctaagtctctattagaaacatcaagaaaaggttacttagcggctctcagtgcctctagttattcttttgttagccttctctctcactttggaagtatcatgaaccgtggtggatcgacaatatcgctcacctatttggcttctatgcgcgctgttcctggatacggagggggcatgagttcggcaaaagcagctttggaaagtgacaccaaaactcttgcttgggaagcgggacgccgttggggcatacgtgtcaataccatctctgcaggacctttagcaagccgagctggaaaagcaattggttttattgaaagaatggtagactattaccaagagtgggcgcctattcccgaggctatgaatgccgagcaggtgggtgccgttgcagctttcttagcatcacctctagcttcagcaattactggtgagaccttatacgtagatcacggagccaatgtgatgggaattggtcctgagatgttccctaaagactcataa

SEQ ID NO: 18611 - DNA, 393 bp, Chlamydia pneumoniae
atgcgagatcacgctttttctaaattgatagggactgtccgtgccatggtagttgaaggacgttgtccttggtcacttcagcaatccctagtctctatggtagagcatattcttggagagtgtcaggaatttcacgaggccgtcttacaaggtaagacggtacaagaggttggttccgaagccggggatgtcttaactttagttctaattttatgttttctgttagaacgagagggcgtacttgcttccgaagacgttgccaatgaggctatggaaaaattgcgtcgccgtgctccttatatattcgctgaagattacaagccggtctcgattgaagaggccgatcgcctttgggagcttgctaagcaccgagagaaaaatgaatctacatag

SEQ ID NO: 18612 - DNA, 1995 bp, Chlamydia pneumoniae
atggaaaaagtttcttcttatccctcagttcctttacctcttggggcttctaaaatttccccaaaccgctatcgatttgctttatatgcttcacaagctaccgaagtcatccttgctttaacagacgaaaattcagaagtcatagaagtccctctttaccccgatacacaccgcacgggtgcgatttggcatatagagatcgagggtatttctgatcaatcgtcttatgcatttcgtgttcatgggcctaaaaagcatggaatgcaatactcttttaaagaatatcttgcagatccctatgcgaagaatattcattccccacagagttttggttcgcgaaagaaacagggggattatgcattttgttatttaaaggaagaaccatttccttgggatggtgatcagcctctgcatttgccgaaagaagagatgatcatctatgagatgcatgtacgttccttcacgcaatcttcttcatctagggttcatgctccgggaaccttcctaggaatcattgaaaagatcgaccatctgcataagctgggaatcaacgctgttgaactcttacctatctttgagttcgatgagactgcgcatccttttagaaattcgaaattcccttatctgtgcaattattggggttatgctcccctaaatttcttttctccttgccgacgttatgcttatgcctctgatccttgcgctccaagtagagagtttaaaactttagtaaagaccttgcatcaagaaggtattgaggtcattcttgatgttgtttttaatcatacgggcttgcaagggacgacctgctctttgccttggatagacactccgagctattatattttagatgcacaaggtcactttacaaattattcaggctgtggaaacactctcaatacaaaccgcgcccccacgacccaatggattctcgacatcttacgttattgggtagaagaaatgcatgtcgatgggttccgatttgatcttgcttctgtcttttctcgtggtccttcgggatctcccctacaattcgctcctgttttagaggcgatttcttttgatcctttacttgcgagcacaaagattatagctgagccttgggatgctggcggtttgtatcaggtgggctatttccccacactgtctccaagatggagtgaatggaacggtccgtatcgtgataacgtgaaagcatttcttaatggggatcaaaatctcataggaacctttgcttctagaatttcaggatctcaagacatctatcctcacggctcgcctacaaattcgattaactatgtcagttgccatgatggttttacgttatgtgacactgtgacttataaccacaaacataatgaggctaacggagaggataatcgtgacggcacagatgcgaactacagctacaatttcggaacggaagggaaaacagaagaccctggcattcttgaagttcgtgaaagacagttacgaaattttttccttactttgatggtctcgcaaggcattccgatgattcaatcaggagatgagtatgcccataccgcggaaggcaataacaaccgttgggctttggattcgaatgcgaattacttcctttgggatcagcttaccgcaaagcctacactgatgcactttctctgtgatctcattgcgtttcgaaaaaaatataaaacactttttaatcgaggctttctttccaataaggaaatcagttgggtagatgctatgggaaatcccatgacatggcgccctggaaatttcttagcatttaaaataaaatcgccaaaagcgcatgtatatgttgcttttcacgtgggagctcaagaccaacttgcgaccttacctaaagcctccagcaactttcttccttatcaaatagttgccgagagtcagcaagggtttgtccctcaaaatgtagcaacgccgacagtgtcgctacagccccataccacgctaattgcgatcagccatgcgaaagaggttacctga

SEQ ID NO: 18613 - DNA, 483 bp, Chlamydia pneumoniae
atgatgtttgggcattttgctggttaccttggagcagatcctgaagagcgaatgacttccaaaggaaaacgtgtgatcactctgagactgggagtgaagactcgagttggaatgaaagatgaaactgtttggtgcaaatgcaatatttggcacaatcgctatgataagatgcttccttacttgaagaaaggctcaggagtcattgttgctggcgatatctctgtagagagttacatgagcaaagatggttcaccgcaatcttctttagtgattagtgtagattctttgaaattcagtcctttcggtcgcaatgaaggcagccgttctccatctttagaagacaatcatcagcaagtgggatatgaatctgtatccgtagggtttgaaggtgaagcactggacgcagaagctattaaagataaagatatgtatgctggttatggtcaagaacagcagtatgtctgtgaagatgttcctttttaa

SEQ ID NO: 18614 - DNA, 1500 bp, Chlamydia pneumoniae
gtggttttatttcatgctcaagcctctgggcgtaatcgtgttaaggcagatgctatagtcctgcccttttggcattttaaggatgcaaaaaatgcagcttcttttgaagccgagtttgaaccctcgtatctccccgctttagaaaactttcaaggaaaaaccggggagattgaactcctttatagtagtcctaaagctaaggaaaaacgcattgtcctcttaggcttagggaaaaatgaagagctcacctctgatgttgttttccaaacctatgcgacactaactcgtgtcttacgtaaagcaaagtgttccacagtcaatatcatcttacctacaatttctgaattgcggctttctgccgaagaattcttagtggggttgtcctcaggaattttgtcattaaactatgactacccacgttataataaggtagatcgtaatcttgaaactcctctttctaaagtcacggttatcggtatcgttcccaaaatggcggatgctatctttaggaaagaagcagccattttcgaaggcgtatatctcactcgagatcttgtgaacaggaatgctgatgaaattacccctaagaaattggcagaggttgctctgaatctgggaaaagagttccctagtattgatactaaggtcttgggaaaagatgccatcgccaaagagaaaatgggactcctattggctgtttccaagggttcttgtgtggatccacactttatcgttgtccgttatcaaggacgtcctaagtctaaagatcacaccgtcttgatagggaaaggggtcacttttgactctggaggtttagacctcaagcctggaaaatccatgcttactatgaaagaagacatggcaggtggggctacagtcctcgggattctctcggcgttagcagttttagagcttcctataaatgtcacggggatcattcctgctacagagaatgctatcgatggcgcctcctataaaatgggagatgtctatgtaggaatgtcggggctttctgttgagatttgtagtaccgatgctgagggacgtcttatcctcgctgatgcgattacatatgctttaaaatattgtaaaccgacacgtattatagattttgcaactctaacaggagctatggtagtctctctaggagaagaggttgcaggtttcttttccaataacgatgttttagctgaagatcttttagaggcgtcagccgaaacctccgagccgttatggagacttcctctagttaagaagtatgataaaacattgcattctgatattgctgatatgaaaaatctaggcagtaaccgtgcaggggctattacagcagcattattcttgcagagatttttggaagaatcttcggtagcttgggcacatcttgatattgcaggtactgcatatcatgaaaaagaagaagaccgttatccaaaatatgcttcaggttttggtgttcgttctattctttattacttagaaaatagtctttctaagtag

SEQ ID NO: 18615 - DNA, 717 bp, Chlamydia pneumoniae
gtgactttatatcttcttcccaatactctcggtacccgtgctgtagagactctcccctccgttataggagaattagttcatagactagatgggctgattgtagaaagtgatcgtgggggtagggcatttctaagtttatggaaaattcccgaagttcataaatttcctcttgctattcttagtaaacatgcgcgcctccctaaggcttgggatttttatctagagcctatcgtaaaacacggggagaattggggactgatctctgatgcgggtcttccctgtattgcagatcctggagcgagtttagtgcgtcgtgcacgtgctttggggattcctgtgcaggctttttcaggtccctgttcgataacgttagcgctcatgctttcaggcttgccttcccagagctttacgtttttgggatacctcccgcaaagtcctaaggaacgtgtaaagtcgataaaaaaggcagcgacctccaaagaggtatctacttcagtatgtatagaaactccttatcgtaacgtctatacttttgagtctcttctagatactttaccttcctatgcggagctttgtgttgcctctgacctttcgggcccgagtgaacttgttctcacacgccaagtgcaatcatggagaactactgaggacttaggttctgtgaagcaaagtataaccaaagtcccaacaatatttcttttccacatcccgaattaa

SEQ ID NO: 18616 - DNA, 2727 bp, Chlamydia pneumoniae
atggattccgagtttgtggggcaagtatattcttcggatatggattggatcgagtctatgtatcagagatttatgaatcacgagactttggatccttcttggaagtatttttttgaagggtatcagctcggtcaagcagcatctccatcagaagctagtactaagatttctgggaatgaaactattgctatgcttcaagaacaaaaatctcagtttctatgtacgatttatcgttattatggatatttgcaaagtcaaatttcaacgcttgccccaactacagattctcgattcattcaggaaaagatcgctaagattgatctggatgagcaggtgccttctgcgggtctacttcctaaagctcaggtttcggtacgagagctgatcgaagctttaaaaaaatgctattgcggaagtcttactttagaaaccctaacatgtactcctgagttgcaggagtttgtttggaatcttatggagaagcgacaagtggagcgctttgcagagcagctccttcgctcctataaagacttatgtaaagcaacgttttttgaagagttcttacagataaaatttacaggtcagaaacgtttttctttagagggcggagagaccttggtccccatgttggagcatcttgttcattatggatcggcattaggaatttctaactacgttttaggaatggcccatcgaggtcgtttgaatgtattaacgaatgttttgggaaagccttaccgttatgtctttatggagtttgaagacgatcctgcagcacgtggtttagagagtgttggggatgtaaagtaccataaagggtatgtgctaaagtcccatcagaaagatagggaaactacctttgtgatgttgccaaacgctagtcatctcgaatctgtagatcctattgtcgagggggtcgtggctgccttgcaacaccaaggtcacgcaggtaaagagcaaagcagcttagcaattttagttcatggagatgcagcattttctggtcagggagtggtttatgaaactctccagctgagtcgtgttccagggtattctactgagggtacgcttcacattgttgtgaataattacatagggtttaccgcagtgccacgggagtcaaggtccaccccttattgtacggatattgctaaaatgctagggattcctgtatttcgagtgaatagcgaggacgtcgttgcctgtatagaagctatagagtacgctctgcaagttcgtgagagatttagttgtgatgtgatcatagatctctgctgttatcgcaagtatggacataatgaaagtgacgatccctcagtaacagctcccttactctatgatcagattaagagaaagaagagtattcgcgagctgtttaggcaatatctgttggaagggcagtttgcagatatttctgaagaaactttggcatctattgaaaaagagattcaagagagtctgaatcgtgagtttcaagtattgaaagggacggatccagaaccctttcctaaaaaagaatgtcatcactgcgatcgcttaaataacggcgagcttattttgcatgattgtgatgtttctttggatcgcgagactctttttcatatgagctcgcgtctttgtggtttccctgacaattttcatccccatcctaaaattaagactcttttagaaaaaagaatgaaaatggcagaaggtggggttggttatgattgggcgatggccgaagaattagcctttgcttcgctattaatcgaagggtacaacctgagactctcaggtcaagattctattcgcgggacattcagccaacgacatttggtatggagtgatactgtgactggagatacctactctccattgtaccatctttctgcagagcagggctctgtagaaatgtataattctcctctttccgaatatgcaattttagggtttgagtatggctatgctcaacaggcattaaagactttagtgttatgggaagcgcagtttggggattttgctaatggtgcacaaatcattttcgatcagtatatctcttcgggaattcagaagtgggatttacactctgacattgttctgcttcttccccatgggtatgagggccaaggacccgagcattcttcatctcgtatagaacgttatttgcaattagccgcgaactggaattttcaagtggtcttgccttccactcctgtgcaatattttcggattctcagagagcatgctaagagagatctttctttgcctttggtgatctttactcctaagttgctgctgagatatccacaatgtgtaagtagtatcgaggagttcacagaacctgggggattccgtgctattctcgaagatgccgatcctaattatgatgcttctattttggtattgtgttcgggaaagatctattatgattatgcagaaatgcttcctcaagatcggcgtaaggacttttcttgcttgcgtatagagagcttgtatcctttagctcttgaggatttagtgagccttatcgataagtattctcatttgaaacattttgtttggctacaagaagaatccaagaatatgggggcctatgactatatgtttatggcgttgcaagacattcttcctgagaaactgctatatataggacgtcctcggagtagttccacagcttctggatcagcgaagctcagtcgtcaagagctggtcacgtgtatggaaaccctcttttctttaaggtaa

SEQ ID NO: 18617 - DNA, 1842 bp, Chlamydia pneumoniae
atgacactcattacccctgccatcaattcctcgcgacgcaaaacccatacagtaagaataggcaacttatacataggcagtgaccactcaataaaaacccaatcaatgacaacgacattaaccacagacattgacagtacagtagagcaaatctacgctctagcggaacataattgtgatattgtcagagtgactgtacagggaatcaaggaagcacaagcctgtgaaaaaattaaagaacgtctgattgctctagggttaaatatccctttggttgcagatatccacttcttccctcaagcagctatgttagttgctgattttgctgacaaggttcgcatcaatccaggcaactacatagataagaggaacatgttcaaggggacgaagatctatacagaggcaagctatgcccaaagtctcctgcgtcttgaagaaaagtttgctcctttagtagagaaatgtaagcgactaggcaaggctatgcgcattggagtgaaccacgggtcactttccgaaagaatcatgcaaaaatatggcgacactatcgaaggaatggtagcctcagcaattgaatatatcgctgtatgtgaaaagctgaattatagagatgttgtcttctcaatgaaatctagcaatccgaagatcatggtaactgcataccgccaacttgctaaagacttagatgctagaggctggctctatccccttcaccttggagttactgaagctggaatgggcgtggacgggatcataaaatccgcagtaggaatcggaactcttcttgccgaaggactcggggataccatacgctgctctctcacagggtgtcccactacagaaattcctgtctgtgatagcttgctacgccatacgaaaatctacttagaccttccagaaaagaaaaatcccttttccctacaacactccgaaaactttgtttctgctgcagagaagcctgcgaaaacaacactttggggagacgtctacggagtctttttaaaactctatcctcaccatcttaccgactttactcctgaagaactcttagaacacttgggggtaaatcccgtaacaaaagaaaaagcattcacaactcctgaaggggtcgtcgttccccctgagttaaaagatgctcctattacagatgtacttcgagaacactttttagttttccaccaccatcaagtgccttgcctatatgaacacaatgaggagatttgggatagccctgctgttcatcaagctccatttgtgcattttcatgcttcagaccccttcattcatacctcccgagatttctttgaaaaacaaggacaccaaggaaaaccgaccaagctagtattttcaagggactttgacaataaagaagaagctgctatttccatagcaacagagtttggagctctgcttcttgatggccttggagaagctgtggttcttgacttaccgaaccttcccctacaggacgtgctaaaaattgcctttggcactctacaaaatgcaggggtgcgccttgtaaaaacagagtacatctcctgtcctatgtgtggtcggaccctctttgatcttgaagaagtcaccacacgtatccgcaagagaacgcagcacctaccaggacttaagatcgctatcatgggttgtattgtgaatggccctggagaaatggcagatgcagattttggatttgtaggttccaaaacagggatgatcgatctttatgtaaaacatacttgtgtaaaagctcacatacccatggaagatgctgaagaagaattaattcgacttttacaagaacatggggtatggaaagaccctgaagaaactaagttgacagtatga

SEQ ID NO: 18618 - DNA, 1215 bp, Chlamydia pneumoniae
atgacagattctaatcccctaccctcttatacagacgccagtctctacagaactcctgcgaaacattcctatccgattagactccctctcaaccgtacagatagaatcgagaaaatactgaaaattgtcaccctcacactagccctagcgtgcgctttgggctttagcattgctgctggcattttggctatgcctattttttctgccgtagttgtcataacattagcaattgctgcggtctcactttactcccttttaaagaaacctaaattatacgagattcttcctcaaatcgaacccgaatctgagcaaagttctctgtctccctctccccagcctcctgagcaacaggacctccctttgcagatcgatccacttcccgatcccgaatcactccccgaagtctctcttgctgatctaaccacacccccagaagaacttaccgctatcacggtcactcctggctatgaggctcttcttgaacaaaactgggatcttcttccgagcttagccgctgtagacccatcgtttactacagaaacacctcagcagccctgttttatttggaagcttaaagactcgaagcttatctttatatctacctcaggagatattgcagttccaagaatcaaaactcaaggcagggtgatgattgttaacgcagcaaacgagaacatctcccgagaaggagggggaacgaataaagctctatccctggctacaagtctacagtgttggaacgcatctaggctccctagagcgcactctcgttctggatcccaactacagccaggagaatgccgctcagcaaaatgggaaaatagtgatcacacctcaaacgaccatgtcccaggcaaagcacacttcttagcacaactgcttggtcccgaagctgctaagtgtaacaacgatcctaagcaagcatttgaagtaagcaagaaagcgtttcataacctgttccaagaagctgaaatcataggcgttgatgtgattcaactccccctcattggatgtaatctatttgctccatcaagacttctaaacctcgggaaaacaagagcagaatggatcgaggctataaaattggcactcatcacatctcttcaagattttggatgggaacaagacaaccaggaagagcaaaaaattatcatccttacagacaaggaccagcctcccatcattccaccccgtttcgatctaacgactccctag

SEQ ID NO: 18619 - DNA, 1239 bp, Chlamydia pneumoniae
atgcaatcctggttacaatctttacaagagcgaaatattttagagaattttaccgcaggtttggaatccgtagagggacctatcgccgcttatttaggatttgatcctaccgcacctgctctacatattggtcattggattgggatttgtttcttgaagagactcgctgctctggggattacccccatagctttagtcgggggagccacaggtatggttggagatccctcagggaaacagagcgagagatcgttacttcagacaagtgaagtttttgataacagtcaaaagatcacggcgtgtctccagcgctatcttcccggggtgactcttgtaaataatgcagactggttgcaggagatctccctgattgatttcttaagggatataggaaaacactttcgtttaggccaaatgctagtgaaagatacaataaagcagcgggtgcattctgatgaaggaattagctataccgagtttagctatttaatcctgcaatcctatgatttttatcacttatttaaaaattatggcacgatcttgcagtgcggtggtagcgatcagtgggggaatattacttcaggaatcgattttattcgccgtaaagggttgggtcaggcctacggccttacctatcctttattaacgaatgctcaggggaaaaaaatagggaaaacagagtcgggaactgtatggctcgattcagatttaacctctccttttgagctgtaccaatacttactccgtttgcccgatgataccatccctaaaattgctcgtacgttaactttattgagcaatgaagaaattcaagatattgataggcgtgtacagacggatccagttgcagtgaaggaatttgtagcccaagatatcttaagtgctattcatggagatctagggcttgaagaggctctttctgtaactcgtagcatgcatccagggaatctttcatccttatcggaaaaagattttcatgaattgtttgcaggagggatgggggcctcattggataaatccgaggtgttagggaaacgttggttagacctatttcttgttttgggactatgtaaatctaaaggggaaattcgaaggctaattgaacaaaaaggggtatatattaataatgtgcccatcgctaatgagcatagtgtttgtgaagaacaagacatctgttatggtcactatgtgttgttggctcaaggtaaaaaacgaaagcttgttctatatttaaattag

SEQ ID NO: 18620 - DNA, 1440 bp, Chlamydia pneumoniae
ttgcaaacgaatattggtcttattggcttagctgtcatggggaaaaatcttgtcttaaacatgatagatcatggtttttctgtctctgtctataatcggaccccagagaaaacgcgggacttcttgaaagaataccctaaccaccgagagcttgtagggtttgaatctttagaagattttgtgaattcattggagagaccacgaaagatcatgttgatgattcaagcagggaaacctgtggatcagagcattcatgcgttactgccttttctagaacccggcgatgtgattatcgatggggggaatagctattttaaagattccgaacgacgatgtaaagagttgcaagaaaaggggattctcttcttaggcgtggggatttctggaggagaagaaggtgcacgtcacggcccatcaattatgcctggaggaaatcctgaggcgtggccattagtggctcctatttttcaatcaatagcagcaaaagtacagggccgtccctgctgttcttgggtaggaactggcggtgcaggccactatgtaaaggctgttcacaatggtatagaatacggcgatatccagttgatatgcgaagcttacggtatcttaagagatttcctaaagctctccgcaactgccgttgctacaattttgaaagagtggaatactctagagttggaaagctatctaattcgtattgcttctgaagtcctagcattgaaagatccggaaggaatccctgttattgatacgattttagatgtcgtgggccaaaaaggtacaggaaagtggaccgcaatcgatgctttaaattctggagttcccctttccttaatcataggagctgttcttgctcgtttcctttcttcttggaaagagatacgcgagcaagctgcccgtaattatccaggaacccccttaatatttgaaatgccccatgatccctcggtattcatacaagatgtctttcatgctttatacgcttccaagatcatcagctatgctcagggattcatgcttttaggagaagcttcaaaagaatataattggggattagacctaggagaaattgctttgatgtggcgcgggggatgcattattcaaagtgcatttttagatgttatacataaaggatttgctgccaacccagagaatacctcgctcatcttccaagaatatttccgtggagcattacgccatgcggagatgggatggcgtagaacagtagtgactgcaattggtgcagggctacctattccctgtttagcagcagcaatcacgttttatgatggctatcgtacagcaagctcttcaatgtcgttagctcaaggactgcgagattattttggagctcatacctacgagcgtaacgatcgccctcgaggagagttctatcataccgattgggtgcacacgaaaactacagaaagagtgaagtaa

SEQ ID NO: 18621 - DNA, 780 bp, Chlamydia pneumoniae
ttgaatgtcaaagatgagactttttggtctgtacacaacctttgtgtaaactatgagcatgcagccgttctttatcacatatccttttccttgggaaaggggtcattaactgctattttaggtcctaatggagctggtaaaagcactctcttaaaggcttccttaggcctgatcaaaccctcttcggggactgtttatttttttaatcaaaaatttaagaaggtgcgtcagcgcatagcctatatgcctcagagagctagcgtggattgggattttccaatgactgtcttagatttagcccttatggggtgttacagctataaaggaatgtgggggagaatttcttcggatgatcgaagggaggcctttcatattttagaaagagttggtttggaatccgtagcagatagacaaataggacagctctcaggaggacagcaacaaagagcatttttagcacgtgctttgatgcaaaaagcagatctatatcttatggatgagttgttttcagcgattgatatggcttcgtttaaaacatctgtaggggttttgcaagagctgcgagatcagggaaagactatcgtcgttgttcatcatgacttgagtcatgtgcgtcaactatttgatcatgtggttttattgaataagcgtttgatttgttgtggccctactgatgaatgtctgaatggagacactattttccaaacgtatggttgtgaaattgaacttttggaacaaaccctgaagctctctcgaggaaaacaatttggatcgtgctga

SEQ ID NO: 18622 - DNA, 1101 bp, Chlamydia pneumoniae
atgaaattcgttgtatcccgaaatgagctaggaaaccttatcaaaaaaattcaaagtgtcgtccctcaaaacacacctattccagtactcacccatgttttgattgaaacttataatgatgaattagttttcactgctacggatctgacagtgagcacacgttgcgtcaccaaagctaaagtctatgagaaaggcgctatttccattccctccaagagattttttcaattagtaaaagaattaacagaggcaaatttagaaatttcctattcagcaggggaaatggcacaaatcacctcgggatcttcatgctttcgcctactcagcatggaaaaagaagacttccccatgctccctgatatacaaaatgctttgcgtttttccttgcctgcagagcagctaaaaaccatgctacagagaacttcattcgctgtatctagagaagaaagccgctatgttcttactggagtcctgcttgctatcgccaatggcgtggctaccatcgtagggactgacggaaagcgtttagcaaaaatagatgctgaagttactttagataaaagtttttctggggaatatattattcctatcaaagcagtagaagaaattataaagatgtgctccgatgaaggtgaagctacgatcttcttggatcaagataagattgcggttgaatgtgacaatactctcctgatcacaaaacttctttctggagaatttccagatttctcccccgtcatatctacagaaagcaacgtaaaactcgatctgcatcgcgaagaactaattactctgctcaaacaagtggctttatttacaaatgagtcctctcactccgtgaagttttctttcttacccggagagctcactctaacagccaactgtactaaggtgggtgaaggaaaggtaagcatggctgtaaattattctggcgaactcctagaaattgcctttaatccctttttctttttagatatcctgaagcatagtaaggatgaattagtcagcttagggatctcggattcctataatcctggaatcattaccgattctgcctcaggattatttgtcatcatgcctatgaggctacatgatgattaa

SEQ ID NO: 18623 - DNA, 498 bp, Chlamydia pneumoniae
ttgttatactggtttttgtccccaattatgggggaggatcttatggcacaaaaagaaattgtttctaatcgcaaggctctgcgtaactatgaagttatagagactttagaagcaggcatcgttttgactgggactgagattaagtcgttgcgcgatcatgggggaaacctcggtgatgcttatgtcattgtttctaaaggtgaggggtggttattaaacgcgagtattgctccctatcggtttggaaatatctataaccatgaggagcgtcgtaaacgtaaactccttcttcatagatatgaacttcgtaagttagagggtaagattgctcaaaagggcatgactttgattcctctgggaatgttkctgagtcgcggctatgttaaggtacgtttgggttgttgtcgtgggaaaaaagcttatgataagcgtcgtacgatcatagaaagagaaaaggaacgtgaagttgccgctgctatgaagaggcgccatcattga

SEQ ID NO: 18624 - DNA, 270 bp, Chlamydia pneumoniae
atgtcaagaaagtgcccacttacaggaaagagacctcgccgtggttatagctatacacttcgaggtattgctaaaaagaaaaaaggaattggtttgaaagtgacagggaagactaaaagaagatttttccctaatatgttgaccaagcgtctatggtctacagaagaaaaccgttttcttaagcttaaaatttctgctagcgctcttcgtcacattgataagctcggattagagaaagttctcgaaagagctaaaagtaaaaatttttaa

SEQ ID NO: 18625 - DNA, 1083 bp, Chlamydia pneumoniae
atgggtgaaaaaacagaaaaggccacgccgaagcgacttagagatgctcggaaaaaaggtcaagtagcaaaatctcaggattttccttctgcggttacctttatcgtctctatgtttacggctttctccctatcgaccttttttttcaagcatttaggtggctttctggtttccatgctctcacaagctcccactcgccatgatcctgtaattaccttattttatcttaagaactgtcttatgcttattttaacagcatcacttcccttactgggagctgttgctgttgttggcgtcattgtaggttttcttatcgttggtcctacattttctaccgaagtttttaaaccagatatcaagaagttcaaccctattgagaacatcaaacaaaagtttaaaataaagactctcatagagctaatcaaatcgattttaaaaatttttggagcagccttaattttatacataacgttaaaaagcaaagtctctttaattatagaaactgcaggagtctctcctataattactgctcaaatcttcaaagaaattttttataaagcagtaacctcgataggaattttctttttgattgttgcgattcttgaccttgtctatcagcgccacaatttcgctaaagaattaaagatggagaagtttgaggttaagcaggagtttaaagacacggaaggaaatcctgagattaaaggccgtcgtcgacaaattgctcaagaaattgcctatgaagactcgtcatcacaggtgaaacatgcaagcaccgtagtctctaatcccaaagatattgctgttgctattggctacatgcctgaaaaatataaagcaccttggatcattgccatgggcatcaacttacgagctaaaaggatacttgatgaagctgaaaagtacggaattcccattatgcgaaacgtacctttagcacatcagcttttggatgaagggaaggaattaaaatttattccagaatctacttacgaagctattggagaaattctactctatatcacttcactgaatgcgcaaaatcctaataataaaaatactaaccaacctgatcatttataa

SEQ ID NO: 18626 - DNA, 1095 bp, Chlamydia pneumoniae
atgagtcatactgaatgtggaattgtagggcttcctaatgtaggaaagtctggcttattcaatgctttaacaggagctcaagttgcctcctgtaactatccgttttgtactatcgatcctaatgtgggtattgttcctgttatcgatgaaagactggaagccttagctaaaattagcaatagtcagaagatcatctatgcggatatgaaatttgtagatattgcaggtttagttaagggagcttccgatggcgcgggtctgggaaatcggtttctctctcatattcgagaaactcatgctattgctcatgtagtgcgttgttttgatgatccagacgttacacacgtttcaggaaaagtcaaccctgttgaggatattgaagttatcaacttagagctcattttttctgacttctcctcagcaaaaaatatccatagcaaattagaaaagctagccaaaggaaagcgtgaagtaggagctctcttgcctctatttgatacaattattgctcacttagaaaaggggctgccgctacgtactttagaattaactccagaacaaattgtggcattaaagccctatccgtttttgaccatgaagcctatgttttatatagctaatgttgacgagagttctctaccagatatggataatgattatgttgccgctgttcgggaagttgctgcaaaagaaaattctaaagtggttcctatctgtgttcgtatagaagaagaaatcgtttccttacctattgaagagcgcttagaatttcttatgagcttaggtcttgaaaaatcaggacttcatagattagtgcgtgctgcgtatgacactttaggactgatttcttattttactacaggtcctcaagaatctcgtgcatggacagtggttcgagggtcttctgcttgggaagctgctggagaaatccatacggatattcaaaagggctttattcgtgctgaagtgattacttttgaagatatgatagagtgtcaaggtcgtgcagctgctcgagaattagggaaattacatatagaaggacgtgattatatcgtccaggacggtgatactatgctgttccttcataattaa

SEQ ID NO: 18627 - DNA, 927 bp, Chlamydia pneumoniae
atgcccatggaaatagcctatagtttaacgtcttcgttttctgtagattctgtaactgtaggttttttcgacggatgtcatctagggcatagcaatcttttatctattcttacttcctattctggatccagtggagttattacctttgattctcatcctcaaacggtactttctttaaatcacacgaaactcatcaatacaaaagaagagcgcctccaattattgcaaacgtttcccatagactggttaggtgtccttacttttgatttaaattttgcgaatcaatcggcagaagaatttcttactttgttacatcgtaacttgaaatgcaaacgcctcatcttaggttatgattcttgcatagggaaagaacagcaaagcaataccgaggctctcgatactataggcaagccgttaggtatagaggtcatcaagattcctccttaccgtatggataacatagttgtctccagcaaagcaatccgccagtttctgtccgcagggaatcttgaatgtgctcatcgttttttgggtcatccctatgccatttctggaaaaataaccgagggctccggaataggaggttctctaggattcgccactataaatcttcctagagaagaaagtttaattcccctaggagtttatgcttgtgaaatacgttatgatagcactacctgtcagggtgttatgaatttaggaactgcccctacttttgaaagagagtctttatatgcagaggcgcatatcttttcctttgcggaaaatctatacggcaaagaagtgagcattatcccgagaaaatttcttagagaagaaaaaaagtttcaatcaaaagaaactctaatacgagcaattgaaaaagacattttggatgctcaagattggtttgcaaagggttcctttaattatgaaggaacagcatag

SEQ ID NO: 18628 - DNA, 708 bp, Chlamydia pneumoniae
atggatcttgcagtagaattaaaagagggcattcttcttgtagacaagcctcaagggagaacttcgtttagccttatccgcgctctaaccaagttaataggcgttaaaaagattggtcatgcaggaactttagatcccttcgctactggcgttatggtcatgttgattggccgtaaatttactagactttctgatattttactttttgaagacaaggaatacgaagcaattgcccatttagggacaactaccgattcttatgattgcgacggcaaagttgtaggaagatctaagaagattcctagtctcgaagaagtattatcagctgccgagtatttccaaggagagatccagcaacttcctcccatgttttccgctaaaaaagtccaagggaaaaagctgtatgaatatgctagaaaaggtttatctatagaacgtcaccattctacagttcaagttcacttgcagattacgaaatatgagtaccctttattgcattttgtagtctcttgtagcaaaggaacttatattcgcagcattgctcatgagcttggcacgatgttaggctgtggagcttatcttgagcagctacgccgtttacgcagtggccgtttttctatagatgaatgtattgatgggaatctattagaccaccccgatttcgatatttctccctacctacgagatgcccatggaaatagcctatag

SEQ ID NO: 18629 - DNA, 2673 bp, Chlamydia pneumoniae
atggagaaagtaaagttgacgaaaaacctgaaattgaagattaagaatgctcaattaacgaaagccgcggggctggataagctaaaacaaaaacttgcccaagcaggatcttctgaagctaaatcttcttcagaaaaaccttctgcgaaagaaaagtctgtaaaagtagctcttgccgcaacttctacccctacggcaagtgcggaacaagcttcaccagagtctacttcacgtcgcattcgtgctaaaaatcgttcgtcgttctcatcatccgaagaagagtcttctgctcatattccagtggatacatctgaacctgctccagtctccatagcagatcctgagcctgagttagaagtagtcgatgaggtttgtgacgaaagtcctgaggttcatccagttgctgaagttcttcctgagcaacccgtattgcccgaaaccccacctcaagaaaaagaattagagcctaagcctgtgaagcctgctgaacctaaaagcgtcgtaatgattaaatctaagttcggccctacaggaaagcatatcaatcatctcctagcaaaaacattcaaggctcctgccaaggaagagaaagtcgtagctggctcgaaaagcacaaagcccgttgcttcagataaaacagggaaacctggaacatctgaaggtggtgaacagaataatcgagaaaaacaattcaatcctgctaaccgtagtcctgcttctggtccaaaaagagatgctgggaagaaaaatcttaccgactttcgtgatcgttctaagaaatctgatgaaagcctaaaggcttttacaggaagagatcgttacggattaaatgaaggcggagaagaagacagatggcgaaaaaaacgtgtttataagcctaaaaaacactatgacgaagcctctatccagcgacctacgcatatcaaaatttccttgccaattaccgtcaaagatctggcaacagaaatgaagctcaaggcttcagaagtcattcaaaagttattcattcatggaatgacctatgtagtcaatgatattctagacagcgaaactgcagtacaatttattggcttagagtttggatgtacaattgacatcgactattctgagcaagataagttgtgcctaagcaatgacactgtaagagacgaaattcaatctacagatcccagcaagcttgtgattcgctcccctattgttgcgtttatgggtcacgtcgaccacggaaaaacaacactcattgactccttaaggaaaagtaatgtcgctgcaacagaagctggagcgattacccaacacatgggagccttctgctgctccaccccagtgggagacataacaattttagatactcctggtcacgaagctttctctgcaatgcgagcccgtggagctgaagtttgtgatattgttgtgcttgtagtcgctggagacgaaggaattaaagaacaaactttagaggctattgaacatgcaaaagctgctgatatcgctattgttgtagctatcaacaagtgtgataagcctaattttaattccgaaaccatctatagacaactttctgaaatcaatctattgccagaagcttggggaggctcgactgttacagtaaatacctccgcaaaaacaggagaaggtctttcagaacttttagagatgttagctttacaagctgaagtcttggagctaaaagccgatccttcagcacgtgctcgaggacttgttattgaatcagaactgcacaagggtctcggacctgttgcgactgttttgattcaaaatggaagcttaaaactgggcgaagctctcgtcttcaatgattgttatggcaaagtgaaaactatgcataacgaacataatgaattgatgaaagaagctgggccatctattcctgtgttgatcacaggtctatcggacattcctaaagctggcgatcctttcttcgtcgtgaaaaacgagaaaacggctagagacattattgaagctagatccgcaggacaacagcgttttgctttacagcaaaagaagcggcctaactttgattctatgttacagaataaaaagactcttaagcttatgattaaagctgatgttcaaggttccatagaagctttggtcagttcaatatctaagattaaatcagaaaaagtagatgttgaaattttaacaaacagtgtaggagaaatttcagaatcagacattcgtttagctgccgcctctaaagcagttctcatcggtttccatacaggaatagaaagtcatgcggaacctttaattaagagcttaggagtccgagttgaactatttaccgtcatctatcatgctattgatgcaattaaagaaattatgacttctctattagatcctattgctgaagaaaaagatgaaggttctgctgagattaaagaaatctttaggtcttcacaagtaggatctatttacggttgcatagttactgaaggaattatgactcgcaatcataaagtccgagtattacgtaataaagagatcctttggaaaggtacgttatcttcattaaaacgtgttaaagaagatgtcaaagaagttcgcaaaggtttagagtgtggaattttgttagaaggataccagcaagctcaaataggtgatgtcctacaatgttatgaagttatctatcatccacaaaaactataa

SEQ ID NO: 18630 - DNA, 1305 bp, Chlamydia pneumoniae
atgaataaaaatcttgtagctatttttgactacatggagaaagaaaaagggattcagcgctctactattataggagctatcgaatctgctttaaaaattgctgctaaaaaaaccttaagagatgacgcgaacatatctgtaaacattaattctcgtactggtgacatcgaagtcttttgtgaaaaggaaatagtagaaatttgtcagaatcctagcaaagaaattcctttagataaagccagagaatacgatccggactgtcagattggtcagtacatggatgtcccttttgtttctgataattttggaagaatagctgctcacgcagcacgacaaattatcggtcaaaagctaagacatgctgagagagacgttatttatgaagaatatcgccatcgcgtaaatgaaactttatctggtgttgtcaaacgttttgctaaaggttctaatttaattattgacttaggaaaagttgaagcaattcttcctacccggttttatcctaaaacagaaaaacataagatcggtgataaaatttacgccctactctatgaagttcaagagtctgaaaatggtggagcggaagttatcctcagtcgtagtcacgcagaatttgttaaacaattatttattcaagaagtcccagaactagaagaaggttctgtggagattgttaagatagctcgtgaagctgggtaccgcacgaaactagctgtaagatcgtcagaccctaaaactgatcctgttggagcttttgtaggtatgcgaggttctcgagtaaaaaatatcattcgagaattgaacgatgagaaaattgacattgtcaattactcccccgtctctacagagttattacagaatcttctttatccaatagaaatccaaaagattgctattttagaagacgacaaagtgattgcaattgtcgttaatgatgcagactacgctactgttattggtaaacgaggaattaacgctcgtttaattagccacattctagactacgagctcgaagtacaacgtatgagtgagtacaataagttgctagaaattcaacgccttcaattagcagaattcgatagtccgcacttagatcaacccttagaaatggaagggattagtaagctagtcatccaaaatttagaacatgctggatatgacacaattagaagagtattattagcgagtgctaatgatctggcatctgttcctgggatcagtttagagcttgcttataagatccttgagcaagtcagcaaatatggagaaagtaaagttgacgaaaaacctgaaattgaagattaa

SEQ ID NO: 18631 - DNA, 1743 bp, Chlamydia pneumoniae
atgccaaaacaagctgaatatacttggggatctaaaaaaattctggacaatatagaatgcctcacagaagacgttgccgaatttaaagatttgctttatacggcacacagaattacttcgagcgaagaagaatctgataacgaaatacagcctggcgccatcctaaaaggtaccgtagttgatattaataaagactttgtcgtagttgatgttggtctgaagtctgagggagtgatccctatgtcagagttcatagactcttcagaaggtttagtgcttggagctgaagtagaagtctatctcgaccaagccgaagacgaagagggcaaagttgtcctttctagagaaaaagccacacgacaacgtcaatgggaatacatcttagctcattgtgaagaaggttctattgttaaaggtcaaattacacgtaaagtcaaaggcggccttattgtagatattggaatggaagccttcctacctggatcacaaattgacaacaagaaaatcaaaaatttagatgattatgtcggaaaagtttgtgaattcaaaattttaaaaattaacgttgaacgtcgcaatattgttgtctcaagaagagaactcttagaagctgagagaatctctaagaaagccgaacttattgaacaaatttctatcggagaataccgcaaaggagttgttaaaaacattactgactttggtgtattcttagatctcgatggtattgacggtcttctccacattaccgatatgacctggaagcgcatacgacatccttccgaaatggtcgaattgaatcaagagttggaagtaattattttaagcgtagataaagaaaaaggacgagttgctctaggtctcaaacaaaaagagcataatccttgggaagatattgagaagaaataccctcctggaaaacgagttcttggtaaaattgtgaagcttctcccctacggagctttcattgaaattgaagagggcattgaaggtctaattcacatttctgaaatgtcttgggtgaaaaatattgtagatcctagtgaagtcgtaaataaaggcgatgaagttgaagccattgttctatctattcagaaggacgaaggaaaaatttctctaggattaaagcaaacagaacgtaatccttgggacaatatcgaagaaaaatatcctataggtctccatgtcaatgctgaaatcaagaacttaaccaattacggtgctttcgttgaattagaaccaggaattgagggtctgattcatatttctgacatgagttggattaaaaaagtctctcacccttcagaactattcaaaaaaggaaattctgtagaggctgttattttatcagtagacaaagaaagtaaaaaaattactttaggagttaagcaattaagttctaatccttggaatgaaattgaagctatgttccctgctggcacagtaatttcaggagttgtgactaaaatcactgcatttggagcctttgttgagctacaaaacgggattgaaggattgattcacgtttcagaactttctgacaagccctttgcaaaaattgaagatattatctccattggagaaaatgtttctgcaaaagtaattaagctagatccagatcataaaaaagtttctctttctgtaaaagaatacttagctgacaatgcttatgatcaagactctaggactgaattagatttcaaggattctcaaggccctaaagagagaaagaaaaaaggaaaatag

SEQ ID NO: 18632 - DNA, 369 bp, Chlamydia pneumoniae
atggaaatcattcatataggaaccgatattattgaaattagccgcattcgcgaggcaattgcaactcacggcaatcgactactcaatagaatctttacagaagcagaacagaaatattgcttagaaaagaccgatcccatcccttcatttgcaggtcgctttgctggaaaagaagctgtagcaaaagctttaggaactggcatagggagcgttgttgcctggaaagacatcgaagtctttaaagtatctcacggacccgaagttctcctcccttcgcatgtctatgcaaaaattggaatttctaaagtcattctctctataagccactgcaaagagtatgccacagcaactgcaatcgcattagcctaa

SEQ ID NO: 18633 - DNA, 2388 bp, Chlamydia pneumoniae
atgaataaacgcactttgctttttgtttctttaattgggattgcttttgtaggatgtcaaatattttttggttataatgaatttcgttcctgcaaaaatctagcagagaaacaaagaaagatttcagaacagacgctagctgcagtagaatctgtagggttaagtgtagcttcatgggacaccgatgtaaacggagaagaacataagaataactacgcagttcgtgttggagacaagttatttttattacataatggagaagctgctcagtctgtttattcttctggggaatcttggagctttgtagatcacaagtgtggtttcgataatattcacttggctttatatcgtcagcagggttcctctttcaatcctacgaatacgggaaaagtttttcttcctacgaatcatgaaggtttacctgtactagttgttgagtttcgtaacaataaagagcctttagtatttctaggtgagtacgcacaaggaagaatttccaataaagatagcacgatctttggtacagcgcttgtcttttggagatcaggaagcgactatattcctttaggtctctatgattctcgagaagaaaagttagtttctttggatcttcctattacacgagctgtaatttttggtaatgaccaagattcggcaaagtcgtcagatactgcgaaccactatgttttatttaatgattacatgcagattattgtttctgaagagagtggttctatagaaggtatcaatttaccttttgcttcaacaaataataaaagcattgtgaatgaaattggttttgatagggatttagcttcagagaaatctcctgaagctcttttccctgggctgtcttcaaaacttcctgatggccaacaagccaaaaactcgattggaggttactaccctttattgcgcaggggattattaagtgattctaagaaattacttcctctagagtatcacgcattaaatgtggtttcaggaagagagctagcgactcctgtggctttaagataccgagttctttcctataccccccattccattcaattggaaagcttagatagatcggttcagaaggtatacaaacttccagagaatccggaagaaaagccctatgtttttgaaactgcaattactttaacgaaagaaaccgaagatgtatgggtaacttcaggagttcctgaagtggagatcatgtcaaatgcttcagccccaaccattaaatacagggttatcaaaaaaaataaggggtctttagataaagttaagcttccaaaagtaaaagagcctttagctgtacgtcgtggtgtttatcctcaatggattttaaattcgaatggatatttcggtattattttaactccgttgtctgaaattgcttctggctatggatctctctacatttcgggttctacggctccgacaagattgtctgctatttctcctaaaaatcaactgtatccagtatcaaaatatcctggatatgagaccttgcttcctttgccaaaagatgcagggacacatcgatttttagtgtatgcaggtcccttggcagagcctacacttaaagtattagataagacaattactcaggagaagggagaaaatcctgagtatcttgatagcatttctttccgtggtgtttttgcatttattacagctccttttgcagcactcctatttattattatgaagttcttcaaattggttacgggttcttggggaatttccattattttacttactgtatttttgaaattgcttctctatcctttaaatgcatggtccatacgatctatgaggcgtatgcagattttatctccttatattcagcaaattcagcaaaagtataagaacgaacctaagcgtgctcagatggaaatcatgggcttgtataagacaaacaaagtgaatcctatcacgggttgtttacctttattgatacagcttcctttcctaattgcgatgtttgatttattaaagtcatcattcttattacgaggagcctcgtttattcctgggtggattgataacttaacagctcctgatgtgttgttttcttggcagacatcgatatggtttattggaaatgagttccacttacttcctattctattaggtatagtgatgttcttacaacagaaggtcacgagtttgcataagaaaggacctgttacggatcagcagaaacagcaacaagttatggggaacatgatggcgattttatttaccgctatgttctataacttcccttcaggattaaacatctattggctttcgtctatgattttaggagtcgtccagcagtggatcactaataagatattagatagcaaacatcttaaaaatgaagtggttttaaataataaaaaacatcgataa

SEQ ID NO: 18634 - DNA, 1029 bp, Chlamydia pneumoniae
atggatagttcagcaccttataatatagcttctcagggcacagagaaatccacagtagaaaggatcttagacctttacgggcccgcttcctgtattaaatttttaaaacagatggttctgattcgtgaattcgaagcccgaggagaagaagcctatctagaagggctagtgggtggattttaccactcttacgctggccaagaagctgtagcaactgctgcaatcgcaaacacaggactagatccctgggtgttctcttcataccgctgccacgcacttgcgattcttctcaacattccccttcaagaaattgctgctgaacttttagggaaagaaactggatgcgctttaggtcgtggaggatccatgcatatgtgtgggcctaatttccctggaggatttggtattgtcggaggacaaattcccctcgcagctggagccgcatttaccatcaaatatcaagaacaaaaaaatagagtttctctatgctttatcggagatggtgcggtagctcaaggtgtattccatgaaactctgaactttgtttctcttcaccaactccctctaatgcttattattgaaaataacggctggagtatgggaacgtcattaaatcgtgctgttgcaaaacagcccatagcagagtctcaaggaagttcctacgatatccgtgcagtcacagtcaatggttttgatctatttaactctcttttaggatttagagaggcttatcgctatatggttgataccgaatctccggttttagttgagtgtctctgctcccgatttcgagggcattctatatcagatcctaatttatatagatcgaaagaagaaatgcagtgtttatttaaaaaagatcctattgtcctagctaaagattggctaattcgattagaggttctgactgaagaggaatttcaaaatatacgccaagaatgcaaaactgctgttttagaagcgttctctaacgcaaaactctcatcagatccatccgtcaccacattagaggaaggagtctatgcctaa

SEQ ID NO: 18635 - DNA, 1083 bp, Chlamydia pneumoniae
atgtccgaagcaccagtctacactcttaaacagttagctgagctactacaagtcgaagttcaaggaaatatagaaactcctatttcaggtgttgaagatattagtcaggcgcaacctcaccatattgcttttttagataatgagaaatactctagctttctaaaaaacaccaaagctggtgctattattttatctagatctcaggcaatgcaacatgcccacctaaagaaaaactttcttattaccaatgaatccccttctctaacatttcaaaagtgcatagagttgtttattgaacccgtaacatcagggtttcctggtattcatcctactgcagtgattcatcctactgcacgtattgagaaaaatgtaaccatagaaccttacgttgtcattagtcaacatgcccatatcggctctgacacatacatcggagctggaagtgtcattggagctcacagcgttctaggtgctaactgtctgattcaccctaaggtggtgattcgagaaagagtcctcatgggaaaccgtgtagttgttcaacctggagctgttttaggatcctgtggttttggttatattacaaatgcttttggtcatcacaaacctttaaagcatctaggctatgtgattgtaggtgatgatgtagaaatcggagccaacactacgatagatcgtggtcgattcaagaacaccgtgatccatgaaggaactaaaatagataaccaagtacaagtagctcatcacgtagaaattggaaagcatagtattattgttgcccaagcaggcattgcaggttctacaaaaattggtgaacatgtcatcattggagggcaaaccggaattactgggcatatttctattgcagaccatgtgatcatgattgctcaaactggagtcacaaaatctatcacctctccaggcatttatggaggcgctccagcacgaccttatcaagaaacacatcggttgattgctaaaattcggaaccttcctaaaactgaagaaagactaagtaagttagaaaaacaagtaagagatctatcgactcccagccttgctgagattccttcagagatctaa

SEQ ID NO: 18636 - DNA, 603 bp, Chlamydia pneumoniae
atgacaagatatccagattacttatctaaattaattttctttttacgaaaacttccaggaattggatttaaaacagcagaaaaacttgcttttgaactcatctcttgggacagcgaacaattaaaaatattaggtaacgcttttcataatgttgctagtgagcgtagtcactgtcccctatgttttactctcaaagaatctaaagaggcagactgtcacttttgtagagaagaaagagataaccaaagtctatgtattgtcgcttctccaaaagatgttttctttctagaacgttctaaagtattcaagggacgttatcatgttcttggttcactcttatcgcccattacagggaaacatatagaaaacgagcgtctctccattttaaaatcacgcatagaaacgctatgcccaaaagaaattatcctagccattgatgcaaccttagaaggagatgctactgccctttttctaaaacaagaattacaacatttctctgtaaatatttcccgtctagctttaggtcttcctataggcttatcttttgattatgtagattcagggacactggcaagagctttttctggacgacactcctattag

SEQ ID NO: 18637 - DNA, 1008 bp, Chlamydia pneumoniae
atgtggttctctgtgaataaaaacaaaaaagcagcaatttgggcaacgggttcctatttgcctgagaaagttctttcaaacgcagatttagaaaaaatggtagatacctctgatgagtggatcgtgaccagaacggggatcaaagagcgtcgtattgctggacctcaggagtacacttctcttatgggagccatcgctgcagagaaagctatagcaaatgcgggtttaagcaaggatcagattgactgtatcattttctcgacagcagcaccagattatattttcccatcaagcggagctcttgctcaagcacatttaggcattgaggatgtccctacatttgattgccaggcggcttgtactgggtatttgtatggtttgtctgtagctaaggcttatgtagaatcaggtacatataaccatgtattgttaattgctgctgataagttgtcttcttttgtagattatacagatcggaatacctgtgtgttgtttggagatggaggagctgcttgtgtcataggggagagtcggccaggatctttagagattaataggttgtctttaggcgcagatggtaagctaggagagttattaagccttcctgctggaggtagtcgttgtcctgcttctaaagagactttacaatcaggcaaacattttattgctatggagggaaaagaagtttttaagcatgctgtgagacgtatggaaacggcagctaaacattcgatagccctggcaggcattcaggaagaggatatagattggtttgtacctcatcaagctaatgaaagaataatagatgctttagcgaagcgttttgagattgatgagtctagagtgtttaagagtgtacataagtatggaaatactgcggcctcgtctgtgggcattgctttggatgaattagttcatacagaatccattaagcttgatgattatttacttttagttgcctttgggggcggtttgtcttggggcgcagtagttttaaagcaggtctaa

SEQ ID NO: 18638 - DNA, 927 bp, Chlamydia pneumoniae
atgaaaaaacgttatgcttttttgttcccaggacaagggagccaatatgtaggtatgggacaagacctatatatggagtatcctgaggttagagagctttttgattttgctaatgaaaggttaggattttctctgacttcaattatgtttgaaggtcctgaggatcttttgatggaaacagtacatagtcagctagctatttatcttcatagcatggctgtggtaaaggttctatcccagcgttcttctattcagccttctttagtctctggattaagtttaggggagtatactgctttagttgcttccgatagaatctccgtgctcgacggccttgagcttgttagaaagcgtggtcagttaatgaatgaagcttgtaatcagagcccaggggctatggcggctttattagggcttccctctgaagttatagaggaaaatataacaagtcttggtcaaggaatttggattgctaattataatgcacccaaacagcttgtagtggctggaatagcagaaaaagtagaccaagcgattgagttatttcgtgatttaggatgtaaaaaagcagttcgtttaaaggtgtctggagcatttcatactcctttaatgcaagttgctcaagatggcttagctccagacatttatgctttatgcatgaaagattctagccttcccttagtgtcacacgtggtaggaaaatctttagtaaatactgaagaaatgcgagagtgtttagctcggcaaatgacatcacctacgttatggtatcagagttgttaccatatcgaatcagaggtggatgagtttttagaattaggtccaggaaaagttttggctggtttaaatcgctctatagggatttctaaaccgattacaagtcttggtacttttgctcagattgaaaaattcctatcagaggtatga

SEQ ID NO: 18639 - DNA, 747 bp, Chlamydia pneumoniae
atggatataacattagtaggcaaaaaagttatagtaactggaggatctcgaggaattggactcgggatagttaagctttttcttgagaacggagcagatgtagaaatttggggattgaatgaggagcgaggtcaggctgttatagaaagtttaacaggcttgggtggcgaagtttcttttgctcgtgtggatgtgagtcataatggtggagtgaaagattgcgtgcagaaatttttagataagcacaacaaaatagatattttggtaaataatgcaggcattaccagggataatttgttgatgcgtatgtctgaggacgactggcaatcggtgattagcaccaacttgacttccttgtattatacatgttcctcagtgattcgccatatgattaaggcgcgttcaggatctattataaatgtggcttctattgttgctaagatcggtagtgcgggccagaccaactatgctgctgctaaagctgggattattgctttcacaaaatctttagctaaggaagtagctgcaagaaatattcgtgtcaactgccttgctccaggctttattgaaacagacatgacaagcgtgttgaatgacaatttaaaagctgagtggcttaagtcgatccctttaggtagggctggcactccagaagatgttgctcgtgtggcgttgtttttagcctcgcagttatcgagctatatgaccgcgcagacactggttgttgatgggggattgacttactaa

SEQ ID NO: 18640 - DNA, 240 bp, Chlamydia pneumoniae
atgagtttagaagatgatgtaatagcaattattgttgagcagttaggagtggatccaaaagaagttaatgagaactcttcttttattgaagacttgaatgctgatagtttagatttaacagaattgattatgactttagaagaaaaatttgcttttgaaatttcagaagaagatgctgagaagcttcgtactgtcggggatgtatttacttatattaagaaacgtcaagctgaacaataa

SEQ ID NO: 18641 - DNA, 2778 bp, Chlamydia pneumoniae
atgcagagagttttgcgactgctgtttaacctacatcatggggaagaaaaaagggctttccttttttttctcttgggattggtctgggggataggttgttacggcactctctctctagctgaaggcttattcattgaaaaattaggatcggcagaattaccaaaaatttatttaggttcttctctgatcctttgcgttctttcatccctaattctttacaatctttttaaaaaacacatctcagcaacagctcttttcttaattcctgtttctttatctatcctttgtaatttttatcttattctctcttctatctttgctatcgatcccccccggtctcctctgtttttctatcggattgtaatttggagtttaacgattctctcttacacgagtttttggggatttgtagatcaattttttaatttacaagatggaaaacgacacttctgtatttttaatgctatcatcttcttaggagatgctatcggcagcggaatcatagctagcctggtacacacaataggaatccagggcatcctgattttatttacagcagccctggtcctgacattccctatcgtattctatgtttcaaaatctctaaagtcgctttccgatgaccatgaccttttcatagatacaggccacccaccacccttatcaaaagcattgaaactctgtttttatgataaatatactttttatctgctttgcttttattttctcatgcaattgctagcgattgctacagagtttaactatttaaaaatctttgaaattcaatttgcctctaaggaagaattcgaactcgtcgcacacataggaaagtgttccctgtggatttctttaggaaatatgtgctttgctcttttcgcctacagtagaatagtaaagcgtcttggagtcaataatatcattttatttgctccgctatgtttcttaagcctctttctattttggacctttaaaacaaccctaagcattgctgtccttgctatggtagtacgtgaaggcgttacctacgctcttgatgacaacaacctccaactactcatctatggagtccccaacaaaatccgaaaccaaattcgcatcgtagtggaatcctttatagaacctatcgggatgttggtctggtccttagtctgtttcttgtcttctcaacaatatgtgttctgcctaatcatctcactaatcgccactattctggtttgcctcgtacgctcttattatgcgaaggcgattctcaaaaatctatctgcacaagccctacaacttacccgctctatgcaagattggatcaaatctatgacagttaaacaaaagagacaagtcgaactcttcttacttgctcatcttaaacaccccagtgagcgtcatcaaacctttgcttttcaacatctcttaaatctagcaagccgcagtgtccttccaagcctccttgcccatatgaacaagctcagcctccctaataaactcaagactatagaaatggtaaaatctagcttatgggccaaagattttctaaccttagagctcctgaaacgttggacaagtattttcccccatcctgccatcgcatcagcaatacatctttattttgcagaacacgatctcctacatatcactcatattgctgaagacctctatgatactgttggtgatagacttcttgccgcaattcttacagtaagaagacaggaagcttatgggccctatcgagaccttgcagacaagcgcctgaaagaactactcaactcggatcaacctgaagatatagtcatggggttgaccatactgaaattagaaaagaatccacagaacttcccaattcttttagacttcttgaacaccaaaaacgaagatatcttaattgtcacctgcaaagccctacacacttctgttagagctaatcataaaccttattgccccgaacttctgaaaagactacgacaatgctcgcataatgatgaagcaagtcaatatctattaaaaacaattagcattgctttagatatctcattcgtaaaagacttactgatgacaacatcacaactaaaaaacacctctagaaaatatgctgaggctatgattggagagttggataaagaagtcgccccagcatttctccaagtcctcaccgatgagggaacacacaatcgttgtcgtatccttgccgccaaagccctctgtaaaatcgataattggctgctgaaaaaacacgcgtataaaattgtgaagtctaaagcaagtaaggctctgttctattcctatcacggccattacattcaaaagaaataccccacatacaacctcagcttgctggcaaacacattaaattctaattattatgcagaagtaaacttcatgctctctctcctagggattcttggttccatggagcactctggtgtactgattcgagcattaactagtaaaaaccaaaaaatcaaagcacaagcactagaatctttagaaaaaaactgcgatagccacttattctctttactagaaccctttgttaatcaaccaggcatgtgctatagcgaaaaatactacttcaaatgtggtgtgattcctctaactcttaaagaacttttaaatatgatggaaaactccccatcatctttaaacaaactaacagcacagcaactcaaagaagaactttcctattgcgatccagacttccaatctgtaaatacaatctataaccaagaacatgaagacttcaggacagaggaatcagaaaccctaatatctttcttatctatctaa

SEQ ID NO: 18642 - DNA, 612 bp, Chlamydia pneumoniae
atgacctcaccgatcccctttcagtctagtggcgatgcctctttccttgccgagcagccacagcaactcccgtctacttctgaatctcagctagtaactcaattgctaaccatgatgaagcatactcaagcattatccgaaacggttcttcaacaacaacgcgatcgattaccaaccgcatctattatccttcaagtaggaggagctcctacaggaggagcgggtgcgccttttcaaccaggaccggcagatgatcatcatcatcccataccgccgcctgttgtaccagctcaaatagaaacagaaatcaccactataagatccgagttacagctcatgcgatctactctacaacaaagcacaaaaggagctcgtacaggagttctagtggttactgcaatcttaatgacgatctccttattggctattattatcataatactagctgtgcttggatttacgggcgtcttgcctcaagtagctttattgatgcagggtgaaacaaatctgatttgggctatggtgagcggttctattatttgctttattgcgctaattggaactctaggattaattttaacaaataagaacacgcctctaccggcttcttaa

SEQ ID NO: 18643 - DNA, 1413 bp, Chlamydia pneumoniae
atggattccaggacgagtcatctagatgacgagctgagttttaagttagaaaaagcatttacttgtctttctacagatatacattctcatgatctttctaaaattgtgattgagtataacccgatagaccttgcttatgctgtttcctgtcttccctcggaatcgcgtgctattttatataagaacctctcttgtattaccgctaaagttgcgtttatcatcaatacagattctgcttcgcggtgggcgatttttcgtaggttgtcggattctgaggtctgcgctttaattgaacagatgcctccagatgaagcggtatgggttttagatgatatccccgatcgtaggtatcggagaattcttgagcttatagattctaaaaaagcactaaaaattcgtgatttgcagaaacacggaagaaatactgcaggaaggctgatgaccaatgagttttttgcctttttgatggaaacaacggtgaaagacgtttctgcttgtattcgaagtaatcctgggattgatttaactcgtttggtctttgttttggattttaaaggcgagttgcaaggtgtcgttaccgatagaagtttgatcattaaccctcccgagatgtctttaaagcaaattatgaatcagattgaacataaggtgcttcctgatgctacccgtgaagaggtcgtcgatcttgtagagaggtataaaattgccgctcttccggttgttgatgaggaaaatttcttgattggggctattacttatgaagatgttgttgaagctatcgaggacatcgctgatgagactatagctaggatggcaggtactacggaagatgtgggttatcagacctgtcatgttgtgcaaagatttttactaagagctccctggcttttggtgactctatttgcaggtttgattagcgcctccgtcatggcatatttccaaaaaatttcccccgcccttttagctctgattatcttctttattcctttgattaacggaatgtcaggaaatgtaggtgttcaatgtagcactattttagtgcggagtatggctacagggacgctttctttcggacggcgtcgagagaccatttttaaagaaatgagtatcgggctgcttacaggagtcgttttagggattctatgtggtcttgttgtctatttaatgggctttctaggcttaaatatcttctccggaggaggtattcaactaggcgttacggtggctactggggttctgggagcttctctcacagctacgactctaggggttttatccccatttttctttgctaagctaggagtagacccggctttagcctccgggcccattgtcacagccctaaatgatattatgtcaatgataatcttttttctgatagccggaggtataaactttctcttttttaattag

SEQ ID NO: 18644 - DNA, 1407 bp, Chlamydia pneumoniae
atgcactcccactcaaaaccaacgaaaccgttgggaacattcacggtcggcatgttatcacttgctgtagtgattagtttgcgtaatctcccgttaacagcaaaacatggtctttccactctgtttttttatggactagcagtcatatgttttatgattccgtatgctctgatttctgctgagcttgcttctttcaagcctcagggaatttatatttgggcacgtgacgctctaggcaaatggtggggattctttgctatatggatgcaatggtttcacaacatgacgtggtatcctgccgtgttagcttttatagcgagtaccattgtttataaaatcaatccagaactcgctcacaacaaagtgtacattgcaaccgtgatccttgctggtttttggatacttacattttttaattttttaggaattacttcttccgcattattcagctctatttgtgtaatcataggaacattaattccaggagtcatcttagttagtttggctctcttttggattttttctggcaatcccattgctatttctctttcttggggaaatcttcttcctaatttcagtaacgtatcttcacttgtactactagctggaatgttacttgcgttatgtggtctagaggctaatgcgaaccttgcttctgatatggtaaatcctagaaaaaattatccaaaggcagtcttcattggtgcaatagcaacactcactattttagttctgggttctttatccatagcaatagtgattccgaaagaagaaattagtttagtctctggactagtaaaaacgtttaccttgttctttgataaatataacctctcctggatgactggaatcgttgtagtcatgaccattgcaggatcgctaggcgaacttaatgcttggatgtttgcaggaacaaaggggctttttatttccactcagaatgactgtcttccccgactctttaagaaagtaaatagcaaaaatgttccaacgaacttaatgttattccaaggtattgttgtgacaatattcacacttttatttctatgccttgattcagcagacctggtgtattggattttaactgcactgagcgtgcagatgtatcttgcgatgtacatctgtctgtttcttgcaggaccgatcttacgtatcaaagaaccaagggctcaacgcctctattctgtaccaggaaagtttttgggaatctgtacgatgtctatcttaggaattctctcctgtgcgtttgctctttgggtgagcttcctgcctcctagagaacttgctcagatatctgaaggcagcaaaataggatatactacattcctgcttttagcatttagcttgaattgcttaattcctttcggaatctatttcacgcataaacgcttatctaaaaagagctaa

SEQ ID NO: 18645 - DNA, 1050 bp, Chlamydia pneumoniae
atgttgaatattcatgatattctaggaaatgatgacgaaaacctattgtcatatcaatgtaaacacattacaaaagacaaactaactcttccctctcatgattttgtagacaaggtatttggactctctgataggaataatcgtgttctcagatccctacaaactatgttttctcatggaaggttagcaaattcaggttatctatctatacttcctgtagaccaaggcatagagcactcggcaggagcctcttttgctattaatcctatatattttgatccagaaaacattgtgaagcttgccatagaatctggatgtagtgctgtggcctctacctatggaacactgagcttactttctaggaaatatgctcataagattccctttatgctaaagctaaaccacaacgaactcctctcctatccaacaaaatatcatcaaattttctttactcaagtagaagcagcttattcaatgggcgccgttgccgtaggagctactgtttatttcggttctgagacttctaatgaagaaattgtagcagtttctaatgcatttgctaaagctcgttccctaggtcttgcaacagtactttggtgctatctacgcaatccagcttttgttgctaatggagtagattatcatacggcagcagatctaacaggacaggctgatcatttaggcgctaccctaggagccgatattgtgaaacaaaagctccccacatgccagggaggatttaaggccatcaattttgggaaaacagacgaaagagtgtattctgaactctcttcaaatcatcccattgatctttgccgttatcaagtcttaaatagctactgtggcaaggtaggcctaattaactcgggaggaccttcagggaaaaatgattttacagaagcggctagaacagcagtgatcaacaaaagagcagggggaatgggtctcattcttggaagaaaagctttccaacgtcccctatccgaaggcatccaattattaaacctggttcaagatatctatttagatcctaatattacaatcgcttaa

SEQ ID NO: 18646 - DNA, 666 bp, Chlamydia pneumoniae
atgcaatccgatcttattcagattttattaaaagaaacagtcaatacactttatatggtgtcgactgcttttttcttctcttgtgctattggagggatgctaggtttggggcttttctgcacgtcgcctaagagtcttaatcctaagaaaagcctttacgcaacaatctcaatgattctaagttttcttaccgcgattccatttgcgattcttattgttattctttttccgatcacgcgatggattgtagggacttctttaggccctacggcttctattgttcctctcactatcggagccattccttttgttgttactatagtggttgatgcttttcgtaattcagcccttaactatcttgaatctgccgttgctttgggaattcctaaaaggaatattctttttggtatacttctacctgaaagctatccacagctcatattttctcttaagtctcttgttgttcatctcatttcatgttcgactcttgcaggatttgttggaggcggagggctaggacagttattattgcagtatggttactaccgttttgaatggtctgtcacaacatcagtacttgtcatcactttagttcttatcgagtcagtgcgtattctaggagatttctgggggcgtcgtgtattaaagtatagagggattctatga

SEQ ID NO: 18647 - DNA, 819 bp, Chlamydia pneumoniae
atgaaaaaaaaattatcattacttgtaggtttaatttttgttttgagttcttgccataaggaagatgctcagaataaaatacgtattgtagccagtccgacacctcatgcggaattattggagagtttacaggaagaggctaaagatcttggaatcaagctgaaaatacttccagtagatgattatcgtattcctaatcgtttgcttttggataaacaagtagatgcaaattactttcaacatcaagcttttcttgatgacgaatgcgagcgttatgattgtaagggtgaattagttgttatcgctaaagttcatttggaacctcaagcaatttattctaagaaacattcttctttagagcgcttaaaaagccagaagaaactgactatagcgattcctgtggatcgtacgaatgctcagcgtgctctacacttgttagaagagtgcggactcattgtttgcaaagggcctgctaatttaaatatgacagctaaagatgtctgtgggaaagaaaatagaagtatcaacatattagaggtgtcagctcctcttcttgtcggatctcttcctgacgttgatgctgctgtcattcctggaaattttgctatagcagcaaacctttctccaaagaaagatagtctttgtttagaggatctttcggtatctaagtatacaaaccttgttgtcattcgttctgaagacgtaggttctcctaaaatgataaaattacagaagctgtttcaatctccttctgtacaacatttttttgatacaaaatatcatgggaatattttgacaatgactcaagacaatggttag

SEQ ID NO: 18648 - DNA, 2418 bp, Chlamydia pneumoniae
atggacccaaaagaaaaaaattacgatgcatccgctattactgttttagaagggctacaagctgttcgtgagcgccccgggatgtacattggagatacgggaatcacgggtcttcatcatctagtctatgaggttgtagacaacagcattgacgaagccatggcaggttattgctctaggattgatgttcgcattttagaggacgggggtattgtcatcgtagataatggccgaggaatccctatagaagttcacgaaagagagtctgcaaaacaaggtagagaggtctctgctttagaagtggttttaacagtccttcatgctggaggaaaattcgataaggatagctataaagtatccggaggcttgcacggagttggggtttcttgcgttaatgctctttcggagaaattagttgccacggtctttaaagataagaagtgttatcaaatggagttctctaggggaattcctgtaactccattgcagtatgtaagtgttagtgatcggcagggaacagaaatcgttttctaccctgatcctaaaatattttcgacttgtacttttgatcgctctattttaatgaaacgcttgcgagagcttgctttcttaaatcgtgggatcacaatagtctttgaagatgatcgagatgttagctttgacaaggttaccttcttttatgagggagggattcaatcttttgtaagttacctgaatcaaaataaagaaagccttttctctgaaccgatttatatttgtggaactcgagtaggagatgatggagaaatcgagtttgaagcagccttacaatggaattcagggtattctgaacttgtttattcctatgccaataatattcctacacgccaaggaggaacgcatcttacagggttttctaccgcgcttactagggtaatcaatacgtatattaaagctcataaccttgcgaagaataataagcttgcattaaccggagaagatattcgagaaggtctgacagctgtgatttctgtaaaggtcccaaatccacaatttgaagggcaaacaaaacagaaattaggaaacagtgatgttagctcagtggctcaacaggttgtaggggaagctctgacaatcttttttgaagagaatcctcaaattgctaggatgattgttgataaggtttttgttgcagcgcaagctagagaagctgcaaaaaaagctcgagaattgactttaaggaaaagtgctttagatagcgcacgcttacctggaaaactaattgattgtttagaaaaagatcccgaaaagtgtgagatgtacattgtggagggggattctgctggaggatctgcgaaacaaggtagagatcgaagatttcaagcaattctgcctattcgaggtaaaattctgaacgtagaaaaagctcgtctacagaaaattttccaaaaccaagagataggaaccatcatagcagctttaggctgtggcataggtgctgataattttaatctcagtaaattacgctatagacgtatcattatcatgacagatgctgacgtggacggttctcatattcgtaccctacttctcacattcttctatcgtcatatgacagcgcttattgaaaatgaatgtgtttatattgctcaacctcctttatacaaggtgagtaagaaaaaagacttccgttatattctttcagagaaagaaatggacagctatttgctcatgttaggcacgaatgagagctccattctctttaaatctacggaaagagaattacgtggagaggctttagagagttttatcaacgtcattttagatgtagagagctttataaacactcttgagaaaaaagcgattcccttctctgaatttttagagatgtataaagaggggataggctatcctttgtactatcttgctccggcaactggaatgcagggagggcgctatctttattctgatgaggaaaaagaagaagctttagctcaagaagaaactcataagtttaaaatcatagagctttataaagttgctgtgttcgtagatattcaaaatcaactcaaagaatatggtttagatatttctagctatcttatccctcagaaaaacgagattgtgattggaaatgaagattccccaagctgtaactatagctgctataccttggaagaagtcattaactatcttaaaaatcttggaagaaaaggcatagaaattcagaggtataaaggtcttggagagatgaatgccgaccagctttgggatactactatgaatcctgagcagagaacactcattcatgtgtcattgaaggatgccgtagaagcagaccatattttcactatgttgatgggggaagaagtccctccaagaagagaattcatagaaagtcatgctttgtccattaggataaataatttagatatttag

SEQ ID NO: 18649 - DNA, 2505 bp, Chlamydia pneumoniae
atgttcaataaagatgaaattatagtccctaaaaatcttgaagaagagatgaaggaaagttaccttcgttattcgatgtctgtgattatatctcgggctcttccagatatccgggatggactcaagccttcacaaagaagagttctttatgccatgaagcagctaagtctttctccaggagctaagcatcgtaaatgtgcaaaaatttgtggggatacctctggagactaccatccacatggtgagagcgtcatttatcctacgcttgtccgtatggctcagaactgggcgatgcgttatcctttggtggacggacaaggaaacttcggctccatagacggagatccacctgctgctatgcgatacacagaagctcgtcttacccatagtgctatgtatcttatggaagacttggacaaagatactgtggatattgttccaaactatgatgaaacaaaacacgagcctgtagtttttccttctaaatttccgaatcttctttgcaatggttcttcaggaattgctgttgggatggcaacgaatatccccccacacaatttaggggaacttatagaagctacacttcttctgcttgcaaatccacaggcttctgtggatgagattttacaagtcatgccaggccctgatttccctacaggaggaattatctgcggttctgaaggaattcgctccacgtatactacaggacgaggaaagattaaagttcgagctcgtctgcatgtagaagagaatgaagataaacatcgtgagagcatcatcatcacagagatgccttataatgtgaataaatcacgtttgattgagcaaattgcaaatcttgtgaatgaaaagactctcgcaggcatttcagatgttcgcgatgagtctgataaagatggaatccgtgttgtccttgaaatcaaaaaaggagaatcttcggaaatcattatcaataggctctacaagttcaccgatgttcaggtaacttttggggcaaatatgcttgccctggataagaacttacctagaacgatgagtattcataggatgatttccgcttggatacgccatcgtaaagaagtcatccgtcgtaggactcgttatgaattaaataaagcagaaacacgagctcatgttttagaaggataccttaaggctttatcttgcttagatgcattagtaaaaacgatccgcgagagtgggaataaagagcatgctaaagaacggattattgaatcttttggttttaccgaacctcaagctcttgcgattttagaactgcgtttatatcaacttactggtttagaagctgaaaagattcaaaaagagtacgaagagttattaaataagatagcttattataaacaagttttatcggatgaaggtttagtaaaagatatcatcagaaatgagttacaagatcttttgaagcatcataaggtagctcgacgcactactatagaattcgatgctgatgatattcgtgatattgaagacatcattaccaatgagtctgttattatcacgatatccggagatgattacgtaaagagaatgcctgtaaaagtgttcaaagaacaacgtcgtggcgggcatggagttacgggatttgatatgaagaagggagcagggttccttaaagctgtatactctgcctttactaaagactatctcttaatcttcaccaattttggccaatgttattggttgaaggtatggcagctcccagaaggggagcggagggcgaaaggtaagcccatcatcaacttcctagagggaattcgtcctggtgaggagctcgcagctatattgaatattaagaattttgataatgccggcttcttatttttagccaccaaacgtggtgttgtgaaaaaagtttccttagacgcctttagcaaccctaggaaaaagggaatacgtgctttagagatagatgagggagacgaactcatagcagcttgtcacattgttagtgatgaagagaaggtaatgttatttactcatcttggtatggcagttcgcttcccccatgaaaaagttcgtcctatgggtagaactgcacgtggggttcgcggtgtctctttgaaaaatgaagaagataaagttgtcagttgtcaaattgtgactgagaaccagtcggttttaattgtatgtgatcaaggttttggtaagagatctttagttgaagatttccgcgaaaccaatcgtggaggcgtgggcgtacgttctatccttatcaatgaaagaaacggcaatgtcctaggagctattcctgttacggatcacgacagtattttattaatgtcgagtcagggacaggcaattcgcattaacatgcaagatgttagagtgatgggaagatcgactcaaggggtgcgtttagttcacttgaaagaaggggatgctcttgtttctatggaaaaactctcttctaatgaaaatgatgatgaagtactatcagggtccgaagaagaatgttctgatacagtaagcctaaggtag

SEQ ID NO: 18650 - DNA, 621 bp, Chlamydia pneumoniae
gtgtttatcgtgattgaggggggcgaagggtctggcaaaagttctttagcaaaggctttaggagatcagctagtagctcaagatcggaaggttttgttaacaagggaacctggagggtgccttataggcgaaagactccgagatttaattttggaacctcctcacttagaactctctcgctgttgtgaactctttttgtttcttggatcacgtgctcaacatattcaggaagtgatcattcccgcattgcgtgatggctatattgtcatttgtgagagattccacgattccacgattgtgtatcagggaatagccgaaggtttgggtgctgattttgttgccgacctttgttctaaggttgtaggacctacacctttccttcctaattttgttttactcttggatattcctgcagacattggcttacaaaggaagcaccgacaaaaggtttttgacaagtttgaaaaaaagcctttgagctatcataacaggatccgagaaggatttttatctcttgctagtgccgatcctagtcgttacttggttcttgatgctcgtgaatcactagctagtttaatagacaaagtgatgctacatacgcaacttgggttatgcacctag

SEQ ID NO: 18651 - DNA, 978 bp, Chlamydia pneumoniae
atgactatcgatatgcattgtgacttactttcgcatccgcatttttgtcggaaagatcctgcggtgaggtgttctccagaacaactcctatctggaggcgtacgtcagcaggtgtgtgctatttttgtcccccacagtcggggggaacctaattgtgataaacaaaactctctgtttttttctcttcctaaccaatatccggatattgggttattatcttatgaagaagaagagaacggatcctcttctcaaaaaaaatcactaagtcttattcgtagtatagaaaatgcctcagctttgggagatgataccgccccccttgggactctattagcaaagcttatacatttaactaaacaggggcctcttgcctatctaggaatcgtatggaaaggggataaccgttttggaggcggcacagaagctcctaagagactttctaatgatggtaaggttcttttagatatcatgtacgaacttggagttccaatagatcttagccattgtagtgataagttagctgaagatattttagattatactgccgataaattgcccaatctcgcagtgattgccagtcattctaattttcgatctgttcttgatcatcgaaggaaccttgtagatgcccatgccaaggagattgtgagaagaaaaggtgttattggtttgaatctagtgaggtcttatgtaggagattccttgggtgatttggagaagcatgtcctccatgcggagaatctcggaattttatcaagtattgttcttgggtcggatttcttttatgcaaatgaagacgaaaatttcttttttaatgagtgtagttctgcggaagcccatcccgttctaaatcagttgattcatcgtattttttctaaagggaaagcagagtccatactttcttctcgggctgagaaatttttaaagcaagtcattgtagaacaagtgaatccaaagataacagacgtgaaattatag

SEQ ID NO: 18652 - DNA, 1512 bp, Chlamydia pneumoniae
ttgccatggatgagtccttttaagaaaatagtaaatcgcttactatgctatatttcttttcaaaaagaatcaagaactctcccaatcattattagagaacctaggatgacaacaaaaagtttaggatctttcaattcagttatttccaaaaataaaattcattttattagtttgggatgctctcggaaccttgtagatagcgaagtcatgctaggcattcttcttaaggcaggttacgagtctactaatgaaattgaagatgctgactatttaattttaaatacctgtgcgtttttaaaaagtgctagagatgaagctaaagattatctagaccatctaattgatgtaaaaaaagagaacgctaaaattattgtaactggatgcatgacttccaaccacaaagatgagcttaaaccctggatgtcacacatccattacctactaggttctggggatgttgagaatattctttctgctattgagtctcgtgaatctggagaaaaaatctctgcaaagagttacattgagatgggagaagttccaagacagctttccacaccaaaacactatgcctatttaaaagttgctgagggctgtagaaaacgttgtgctttttgtattattccttccattaaaggaaagctccgcagcaaacctctggatcaaattcttaaagaattccgcatccttgtaaacaagagtgtgaaagagattatattgatagctcaagacctaggagattatggaaaggatctctctacagaccgcagttcgcagctagaatcactattacatgagttactgaaagagcctggtgattattggctgcggatgttgtatttatatcctgatgaagtgagtgatggcattatagatcttatgcaatctaatcccaaacttcttccctatgtagatattcccttacagcacattaacgaccgtattttaaagcaaatgcgaagaacgacttctagggagcaaatcctaggattcctagaaaaattacgtgccaaggttcctcaggtctatatccgttcttctgttattgtgggtttccctggtgaaactcaggaagaattccaggagttagctgattttattggtgagggttggattgataatctcggaattttcttgtactctcaagaagcgaataccccggcagcagaactccctgaccagataccagaaaaagttaaagaatcgaggttgaaaattctatctcaaattcagaaacgcaatgtggataaacataatcagaagctcattggggaaaaaatagaagcagttattgataactatcatcctgaaacgaatcttttactcactgcaaggttctatggacaagctcctgaagtggacccttgtattattgtaaatgaggcgaagcttgtttctcattttggagaaagatgctttatagaaatcacagggactgctggttacgaccttgtagggcgtgttgtaaaaaaatctcagaaccaagctttgctaaaaactagcaaagcttag

SEQ ID NO: 18653 - DNA, 159 bp, Chlamydia pneumoniae
atggcaagcaagaatcgggagattattaaattaaaaagctcggaaagttctgatatgtactggactgtaaaaaacaaaagaaaaacaacaggtcgactagaactcaaaaaatatgatagaaaactgcgtaggcacgtaattttcaaagaagctaggtaa

SEQ ID NO: 18654 - DNA, 450 bp, Chlamydia pneumoniae
atggaaaaaagaaaagacacaaaaacaactatagtaaagtccagtgaaactacgaagtcatggtatgttgttgatgctgctgggaaaaccttaggaaggctttcttcagaagtggcaaaaattttaagaggcaagcataaagtcacctatactcctcatgtggctatgggagacggtgttattgttattaatgcagagaaggttcgcctaactggagctaagaaaggccaaaaaatctatcgctactacacaggatatatctctggaatgcgagaaattccttttgaaaatatgatggcgagaaaacctaattacattattgagcatgcgatcaagggaatgatgcccagaactcgcttaggaaagaaacaattgaagtccttaaggattgtaaaaggggattcatacgaaacttttgaatctcaaaagccaattttattagatatttaa

SEQ ID NO: 18655 - DNA, 405 bp, Chlamydia pneumoniae
gtggcaaaaagtacaatacaagaatctgtagctacaggtagaagaaaacaggctgtctctagcgtccgtttacgacctggaagtggtaaaattgatgtaaacggtaagtcttttgaagattattttcctttggaaattcaaagaactacaattctttctcctttgaaaaaaattacagaagaccaaagtcaatacgatttaattattcgtgtgagcggtggagggattcaagggcaggtaattgctacaagattaggccttgcacgagctctcttaaaagaaaatgaagagaatagacaagacctaaagagttgcgggtttcttactagagatcctagaaagaaagaacgtaaaaaatacggacataaaaaagctcgtaaaagcttccaattctctaagcgttaa

SEQ ID NO: 18656 - DNA, 642 bp, Chlamydia pneumoniae
gtgactaagggctctgtttttattattatggggcctccaggctcaggcaaaggaacccaatctcaatatcttgccaatagaataggcttaccccacatcagtactggggatttattaagagcgattattcgagaaggaactcctaatggattgaaggctaaagcctacctagataagggtgcttttgttcctagtgattttgtatgggaaatactgaaagaaaaactgcaaagccaagcctgctctaaaggatgcattatcgatgggttcccgagaaccttagatcaggcgcatcttctggatagttttcttatggacgtccattctaactacacggtgattttcctagagatttctgaagacgagatcttaaaaagagtgtgttcaagatttctttgcccctcctgttcgcgtatctacaacacaagtcagggacataccgaatgtccagactgtcatgtgcctttgatacggcgttctgacgataccccggaaatcattaaagaaagattaacaaaatatcaagaacgcacagctcctgttattgcctattatgacagcttagggaagctatgtagggtttcttctgaaaacaaagaggatcttgtttttgaagacattttgaaatgcatttataaatag

SEQ ID NO: 18657 - DNA, 1539 bp, Chlamydia pneumoniae
atgacgaatgttgttcaggaaactataggtggattgaattccccacgaacgtgccctccttgtattttagttatctttggagcgactggagatctgacggcaaggaaacttttacccgctctatatcacctcactaaagaaggacgcctttcagaccagtttgtttgcgtaggatttgcacgtcgagagaaatcgaatgaactgttccgccaagagatgaaacaagctgtcatacaattttctccttccgaattagatattaaggtatgggaagatttccaacagcgcctcttttatcatcgctcagaattcgataacaatatgggatatacatctctcaaggactccttagaagatttagataaaacgtacggaacacgtggaaatcgtcttttttatctttctactcccccccaatatttttctagaatcattgaaaatttaaataaacataagcttttctataaaaatcaagaccaagggaaaccctggtcccgtgtcattatagaaaaaccttttggaagagacttagatagtgctaagcaacttcagcaatgtatcaatgagaatcttaatgaaaattcggtctatcatatagatcactatttagggaaggaaacggttcaaaacatcttaacaacacgtttcgccaatacgattttcgaatcgtgttggaattcacaatatatcgatcatgtccaaatcagtttgagtgaaacgattggcataggatctcgcggcaatttctttgagaaatctgggatgcttcgggatatggtacagaaccatatgatgcagctactctgtttactcactatggagcctcctacaacttttgatgctgatgaaatcagaaaagaaaaaatcaaaattcttcaacgtatctcaccattttcagaaggttcttcgattgtccgaggacaatatggtccaggaacggttcaaggagtctcggtccttggctatcgtgaagaagagaatgttgacaaagattcccgagtagagacctacgtagctttaaaaacagtcattaataatccccgttggcttggagttcctttctatttacgtgcaggaaaacgactcgccaaaaaatctacagacatttctattatttttaaaaaatcaccctacaatttatttgcagccgaagaatgttcacgttgtccgatagaaaatgatttgctaatcatcagaattcaaccggacgaaggtgtcgctttgaaattcaactgtaaggttccaggaactaataatattgtccgtcctgttaagatggacttccgttacgacagctatttccaaactacaactccagaagcatacgagcgtttattatgtgattgcattataggggatcgtacgttatttactggtggagatgaagttatggcttcttggaagctttttactcctgtattagaggagtgggaccaagattcctcaccctcgtttccaaactatcctgcaggatcttcaggtcctaaagaagctgatgctctcattgaaagagacggaagaagctggagacctttatag

SEQ ID NO: 18658 - DNA, 465 bp, Chlamydia pneumoniae
atgcaagccatgtctaagccatctagttgcaaagcataccttggcatagactacgggaaaaaacggatcggccttgcctatgcagccgaacccctcctattgacactaccgattggaaatatagaagcaggtaaaaatcttaagttgtcagcagaagctcttcataagattattttaagtagaaatataacttgtgtagttctagggaatccccttcctatgcaaaaaggtctttactcatctctgcaagaggaagtttccttacttgctgaggagcttaagaagctttctacggtagaaatcatcctatgggatgaacggctttcttcagtacaagcggaacgtatgttaaagcaagattgtggactaagcagaaaagatcggaaaggaaaaacagattccctggctgcaacattaatcttaacaagttttctagatagcttacctaaaaaactaaccttgtaa

SEQ ID NO: 18659 - DNA, 1614 bp, Chlamydia pneumoniae
atgcctttcaaatgcatatttttaacaggaggagttgtctcctctttaggaaaagggttaacagcagcatccctagccctaattttagaacgtcaacggcttaacgttgctatgttaaaattggatccatatctaaatgtagatccaggaactatgaatccctttgagcatggagaaatctatgttacagatgatggggttgagacagatcttgatctcggtcactatcatagattctcttctgctgcactttctagacattcaagtgccacttcaggtcaaatttatgctcgtgtcattaaaagagagcgtgagggtgattatctaggaagcacggtacaagtcatcccacacattaccaatgaaatcattcaagtcattttagacgcagctaaagagcactctccagatgttcttattgtcgagattggagggaccataggagatattgaatctcttcccttcctagaagcaattcgacaatttcggtatgaccattccgaagattgtctaaatattcatatgacttatgtcccctatttacaggctgctgacgaagttaaaagtaagccaacgcaacactccgtacaaactctacgtggtattggcatcattcccgacgcgattctatgtcgttctgaaaaacctttaactcaagaagttaaatctaaaatcagtctcttttgcaatgttcccaaccgggcagtgtttaacgttatagatgtaaaacataccatttatgaaatgcctttgatgcttgctcaagagaaaattgccaatttcataggggaaaagttaaagttagctacggttccagaaaatcttgatgactggagggtactggtaaatcagctatctcaagatcttccgaaggtaaaaattggagtcgttgggaagtatgttcaacaccgagatgcctataagtccatattcgaagcactcactcatgcagctttaagattaggtcatgctgctgaaattatccctattgatgctgaagatgaaaatcttactatggaactctctcaatgcgacgcatgtttagttcctggaggcttcggcgttcgtggttgggaaggaaaaatcgctgcagctaaattctgtcgagaacaaggcattccttattttggtatttgcctaggaatgcaagtgcttgttgtagagtatgctcgcaatgtcttaaatctggatcaggcaaattccctagaaatggaccccaacacccctcatcctattgtatatgtcatggaggggcaagatcccttagtagctacgggaggcaccatgcgcttaggagcgtatccttgtctattaaagccagggagcaaagcccataaagcatataacgaatcttctctgattcaggagcgccaccgccatcgctatgaagtaaatccggattacatacagagtttagaagaccacggcttacggatcgttgggacttgtcctccacaagggctttgtgaaattattgaagtttcggatcatccttggatgattggtgtgcaattccatccagaatttgtatctaaactcatctctccccatcctctatttatcgcatttatagaagcagctctagtctattctaaggatgcaagccatgtctaa

SEQ ID NO: 18660 - DNA, 894 bp, Chlamydia pneumoniae
atgcgtcgttttctgtttcttattcttagctctcttcctttggtcgcattctctgctgataatttcactattctagaagaaaaacagagtcctttaagtcgtgtaagtattatttttgctttacctggggttactcccgtttcttttgatggtaattgttctattccttggttttctcatagtaaaaagactctagagggacagagaatttattactctggcgactcctttgggaaatactttgtagtttctgctctttggcctaataaagtttcttcagctgttgtggcttgtaatatgattcttaaacatcgagtggatcttattctaattataggctcgtgttactctaggtctcaagatagccgttttggcagcgtcttagtttctaaaggctacattaattatgatgcagatgtgaggcctttctttgaaagatttgagattccagacattaaaaagagtgtttttgcaaccagtgaggttcatcgggaggcaattcttcgtggaggcgaagagtttatttctacccataaacaagaaatcgaagagcttttgaagactcatgggtatttgaaatcaacaaccaaaacggagcacaccttaatggaaggtttggttgctacaggcgagtctttcgcgatgtcgcgaaactattttctttccttacaaaaattgtatccagagattcatggttttgatagtgtcagcggcgctgtttctcaggtatgctatgaatatagcattccttgtttaggtgtgaatatccttctccctcatcctttagaatcacggagtaacgaggattggaagcatcttcaaagtgaggcaagtaaaatttatatggataccttgctcaagagtgtattaaaagaactctgttcttctcattaa

SEQ ID NO: 18661 - DNA, 1119 bp, Chlamydia pneumoniae
ttggcactcaaattccatctcatccatcaatctaagaaatcccaagctagggtcggacaaatagagaccagccatggagtgatcgatacacccgcatttgtccccgtagcaactcacggagctttaaaaggagtgattgatcacagcgatattcctctgctcttctgtaatacctaccaccttcttcttcatccaggcccagaagcagtagctaaacttggggggctgcaccagtttatgggacgtcaagcaccaatcattacagattccgggggatttcaaatttttagcctagcctatggttctgtagctgaagaaatcaaaagttgtggcaaaaaaaaaggcatgtcctctctagttaaaattactgatgaaggcgcatggttcaaatcctatagagacgggagaaagctattcctctctccagaactctcagtacaagcccaaaaagatctcggagctgatattattatccctctagacgagcttctccccttccatacagaccaagaatacttcttaacttcgtgttcccgtacgtatgtctgggaaaaacgttctttagaatatcatcgaaaggatcctagacaccaatccatgtatggggtaatccacggaggcctcgatccagaacaacgtcgtattggcgttcgttttgttgaggatgagccattcgatggctctgctatcggaggcagcctaggaagaaaccttcaagaaatgtctgaagtggttaaaatcaccacttcatttctatcaaaagaacgtcccgtacacctattaggaatcggcgatcttccctccatatacgctatggtcggctttggcatagactctttcgacagttcttacccgactaaagctgcccgtcatggtcttatcttatcaaaagcaggacccatcaaaatcggtcagcaaaaatatagtcaggactcttccactatagacccctcgtgctcttgtttgacctgcttgtcaggaatctctagggcatacctgagacarctttttaaagtaagagaacctaacgctgctatctgggcttctatacataatctacatcacatgcaacaagtgatgaaagagattcgtgaagccatcttaaaagatgaaatctaa

SEQ ID NO: 18662 - DNA, 1035 bp, Chlamydia pneumoniae
atgctcaccctaggcttggaaagttcttgcgatgagactgcctgcgctatagttaatgaggataagcagatattagcaaatattattgcctctcaagatatccatgcatcctatggcggagtcgttcctgaacttgcttcaagagcacatctccatatcttcccacaagtgataaataaagctctacaacaggccaacttattgatcgaagatatggatctgattgcagtaacgcaaactccagggttgataggttctctatcagtaggagtgcattttggtaaaggcattgccataggagcaaaaaaatccttgattggagtcaatcacgtcgaagctcatctctatgctgcctatatggcagcgcaaaacgtgcaattccctgctttaggtcttgtggtctctggagctcataccgcagcgttttttatagaaaatcctacatcctataaactcataggaaaaactcgagatgatgctataggagaaacttttgataaagtaggacgctttctaggattaccataccctgcaggcccattaattgaaaaactcgctttagaaggctctgaggacagttatccttttagtccagctaaagtcccaaactatgacttttcattcagcggtcttaaaacagctgttctctacgcaatcaaaggaaataatagtagcccccgctctcctgctccagagatatctttagaaaaacaaagagatatcgctgcttcatttcaaaaagcggcctgcactactattgcacaaaaacttcccactattataaaagaattttcgtgccgatctatacttattggaggtggcgtagccattaatgaatactttagatccgcaatacaaactgcgtgtaatctacctgtatacttcccccctgctaaactatgctcagataatgctgctatgattgcaggtctagggggagaaaattttcaaaaaaactctagtattccggaaattcgtatatgcgcaagatatcagtgggaatctgtatcaccattctccttagcctctccgtag

SEQ ID NO: 18663 - DNA, 1173 bp, Chlamydia pneumoniae
atgtcatctcctgtaaataacacaccctcagcaccaaacattccaataccagcgcccacgactccaggtattcctacaacaaaacctcgttctagtttcattgaaaaggttatcattgtagctaagtacatactatttgcaattgcagccacatcaggagcactcggaacaattctaggtctatctggagcgctaaccccaggaataggtattgcccttcttgttatcttctttgtttctatggtgcttttaggtttaatccttaaagattctataagtggaggagaagaacgcaggctcagagaagaggtctctcgatttacaagtgagaatcaacggttgacagtcataaccacaacacttgagactgaagtaaaggatttaaaagcagctaaagatcaacttacacttgaaatcgaagcatttagaaatgaaaacggtaatttaaaaacaactgctgaggacttagaagagcaggtttctaaacttagcgaacaattagaagcactagagcgaattaatcaacttatccaagcaaacgctggagatgctcaagaaatttcgtctgaactaaagaaattaataagcggttgggattccaaagttgttgaacagataaatacttctattcaagcattgaaagtgttattgggtcaagagtgggtgcaagaggctcaaacacacgttaaagcaatgcaagagcaaattcaagcattgcaagctgaaattctaggaatgcacaatcaatctacagcattgcaaaagtcagttgagaatctattagtacaagatcaagctctaacaagagtagtaggtgagttgttagagtctgagaacaagctaagccaagcttgttctgcgctacgtcaagaaatagaaaagttggcccaacatgaaacatctttgcaacaacgtattgatgcgatgctagcccaagagcaaaatttggcagagcaggtcacagcccttgaaaaaatgaaacaagaagctcagaaggctgagtccgagttcattgcttgtgtacgtgatcgaactttcggacgtcgtgaaacacctccaccaacaacacctgtagttgaaggtgatgaaagtcaagaagaagacgaaggaggtactcccccagtatcacaaccatcttcacccgtagatagagcaacaggagatggtcagtaa

SEQ ID NO: 18664 - DNA, 504 bp, Chlamydia pneumoniae
atggacttaaaacaaatagaaaagctcatgattgctatgggacgcaatggtatgaagcgttttgctataaaacgtgaagggcttgaattggagttggaaagagatactagggaggggaatagacaagagcctgtgttttatgacagcaggttatttagtggattttctcaagaacgacctatcccaacggaccctaaaaaagatacaattaaagagactactacagaaaattcagaaacttctactacaacaagttccggagactttataagttctcctttagtgggaactttctatggttctccagccccagattctccttcttttgtaaaacctggcgatattgtttcggaagatactattgtttgtatcgttgaggctatgaaagtaatgaatgaagtgaaagcaggaatgagtgggcgtgttcttgaagtattgattaccaatggggatcctgtccaatttgggtctaagttgtttcgtatagctaaagatgcatcatga

SEQ ID NO: 18665 - DNA, 1365 bp, Chlamydia pneumoniae
atgaaaaaagtcttaatcgctaatagaggggaaattgctgttagaattatacgtgcctgtcatgatttaggattgtcgacagtggctgtatattctttagcagatcaagaggctctccacgtacttcttgctgacgaggctatttgtattggagagcctcaagcagcaaagtcttatttaaagatatccaatatcttggctgcctgtgagatcacaggagctgatgctgtgcatcctggatatgggtttttaagtgaaaacgcaaactttgcttcaatatgcgagagctgtggcttaacctttatagggccgagttcagagtctattgctatgatgggggataagattgctgcgaagtccctggcaaagaaaatcaaatgtcctgttattccaggttctgaaggcattattgaagacgagagcgaaggtttaaaaatagctgaaaaaataggtttccctattgttattaaagccgttgctggaggtgggggaagaggaattcgtattgttaaagaaaaggacgaattctatagagcgttttctgccgcacgtgcagaagccgaagccggttttaataaccccaatgtttatattgaaaagtttatagaaaatccaaggcatttagaaatccaagtcattggggatacccatggaaattatgtgcatttaggagaaagagactgcaccattcaacggcgacgtcaaaagttgattgaagagactcctagtcccattctcaatgcggaaatccgagtcaaagtaggaaaaattgctgtagatctagcaagaagcgccggatatttttctgttggaacagtcgaattcttattagataaagacaaaaaattctactttatggaaatgaatacccgaattcaggtagagcataccattactgaagaagtcacaggtatagatcttgtaaaagaacagattcatgtagccatgggaaataagctgccttggaaacaaaagaacattgagttctcgggtcatatcatccaatgtcgcattaacgctgaggatcctaccaataatttctcaccatctccaggtcgtttagattattatcttcctcctgcaggtccttcaattcgtgtagatggagcttgttatagcggctatgcaatccctccttattatgattctatgatagcaaaggtaattgctaagggcaaaaaccgagaagaagctatagctatcatgaaacgagctttgaaagagtttcatatcggtggtgtgcagtctacaatacctttccaccagtttatgttggataatccgaagtttctagaatctaattacgatattaactatatcgataacctacttgctcaaggaaattctttttttaaagaattctaa

SEQ ID NO: 18666 - DNA, 1290 bp, Chlamydia pneumoniae
ttgcagagtgcaaggagacatttgaacaccatatttattctagattttggatctcaatatacttatgtattagcaaagcaagtgcggaagttatttgtatattgcgaagttcttccctggaatatctctgtgcaatgtttaaaagaaagagcgcctttggggatcattctctcaggaggtcctcactctgtctatgaaaacaaggctccacatttagatcctgaaatctataaacttggcattccaattctagctatttgctatggcatgcagcttatggctagagattttggagggactgtaagccctggtgtaggagaatttggatatacgcccatccatctgtatccttgtgagctcttcaaacacatcgtcgactgcgaatctctagacacagagattcggatgagccatcgggatcatgttacgacaattcctgaaggatttaatgtaatcgcatccacctcacaatgctcgatctcaggaatagaaaataccaaacaacggttgtacgggctgcaatttcatcccgaggtttctgactccactccaacgggaaataagattctagaaacttttgttcaagagatctgttctgctcccacactatggaatcccttgtatattcagcaagaccttgtaagtaaaattcaagataccgttattgaagtatttgatgaagtcgctcagtcattagacgtacaatggttagctcaaggaaccatctactcagatgttattgagtcctcacgctctggacatgcctccgaagtaataaaatcacatcataatgtaggggggcttccaaaaaatcttaagctgaagttagtcgagcccttacgttatttatttaaagatgaagttcgaattttaggagaagccctaggactttctagctatctcttggacaggcatccttttcctggacctggcttgacaattcgtgtgattggagagatccttcctgaatatctagccattttacgacgggcggacctcatctttatagaagagcttaggaaagcaaaactctacgataaaataagccaagcctttgctctatttcttcctataaaatcagtatctgtaaaaggagattgtagaagctatggttataccatagcattacgtgctgtagaatctacagatttcatgacaggacgatgggcctaccttccatgcgatgttctcagttcttgctcatcgcgaattattaatgaaatacccgaggtaagccgagtggtctatgatatttctgacaagccaccagcaactatagaatgggaatag

SEQ ID NO: 18667 - DNA, 1635 bp, Chlamydia pneumoniae
gtggaacttctctcgttaaataaaagttattttgaaatccaacgccttcgctaccgccctgagattcttactttattagaaacgatacgttcgaaacatatccaagaaacttcgtctcccccttctccccctccagagttgcaaaaacacattcccaatctatgtcggatccctgaagtttctatttatactgaacaggaaacgtcatcaaaaccattaaagattggggttttactatcaggaggacaagctcctggggggcataatgtcgttattggtctttttgatgctttacgagtattcaatcccaagactcgcttatttggattcatcaaaggacctttagggcttactcgtgggctctataaagatctggatatctccgtaatctatgattattacaacatgggagggttcgacatgctctcctcaagccgagaaaaaattaaaactgaagagcagaaaaaaaacatcctcaacacagtcaagcaactaaagttagacggactactcattataggaggaaataattccaatacggacactgcgatgcttgcagaatatttccttgctcacaactgcaaaacatccgtgattggagtccctaaaactatagatggtgatcttaagaactgttggattgaaacctcgttaggttttcatacttcttgtcgcacgtactcagaaatgattgggaatcttgctaaagatgctctttctgcaaaaaaataccaccatttcatccgccttatggggcagcaggcctcttatactactttagaatgcggattgcagaccctccctaatatagctttaattagcgaacttattgccactaggaaaatctctttaaagcaactgagtgaacagcttgctttaggtttggtacgccgctataaatctggaaaaaactatagtactgtgttaatcccagagggactgattgagcatattttcgatacacgcaagcttatagatgaactcaatgttttactcgccaatggagattcttctattgaaaaaattctttccaagctctctccagagacattaaaaacatttcacttgtttcctaaggatattgcgaaccaacttcttctagctcgagattctcatggaaatgttagagtttcaaaaattgctacagaagagctgcttgcagtaatggtaaagaaggaaatcgaaaagataaaaccccatatggaattccattctgtatcgcatttttttggttatgaagcacgagcaggattcccttccaactttgattgtaattatggaatcgctttagggatcatttctgcgttatttctggtccgacaaaagactggttatatgattacaatcaataatcttgctcaatcttatactgaatggcaagggggagccactccattatataagatgatgcacttagaaaatcgttgtgggacagagactcctgttattaaaacagattctgtagacccaaaatcccctgctgttcaacatttacttcaacaaagtgattcttgtttggttgaagatttataccgttttccaggccctttacagtacttcgggaaagaggagcttatagatcaacgacctttgaccctgctttgggaaaatcaaacgcattcgcctctactctga

SEQ ID NO: 18668 - DNA, 2463 bp, Chlamydia pneumoniae
atgcgatatgaccccaacttaatagaaaaaaaatggcaacaattttggaaagaacatcgaagctttcaagcaaatgaagacgaggataaagtaaaatattatgttttagacatgttcccttatccttcaggagcaggtctacatgtaggccaccttattggctatacagcgacagatattgttgcgagatataaaagagcacggggattctcagttcttcatcctatgggctgggatagctttggtttgcccgcagaacaatatgcgattcggacaggaacccatcctaaagtcacgacccagaagaatatcgctaattttaaaaaacagctctccgctatgggattttcgtatgatgaaggacgagaatttgctacgagtgatcccgactattatcattggactcagaaacttttcctttttctttatgatcaaggactcgcctatatggccgacatggcagtgaactactgtccagaacttggtaccgtattatcgaatgaagaagttgaaaatggattctcaatagaagggggatatcctgtagagcggaaaatgcttcgtcagtggattctcaaaatcacagcatatgccgataagttattagaaggtctcgatgccctagattggcccgaaaatgtaaagcagttacagaaaaattggatagggaaatctgaaggggctctcgtaacatttcatttgacgcaagagggcagtctagaagccttcactacccgcctagacactttattaggggtgagtttcttagtgattgctcctgagcacccagatttagattctatagtgagtgaagagcaaagagacgaagtcacagcctatgtacaagagagtctcaggaaaagtgaacgagatcgcattagctctgttaagacaaaaacaggggtctttacaggaaactatgccaagcaccccattacagggaaccttttacctgtttggatttcagattatgtcgtcttaggctatggcacaggcgtagttatgggagtcccagcgcatgacgagagagatcgagagtttgctgaaatgttttctcttccgattcatgaggtgattgatgataacggggtttgtattcatagcaattacaacgacttttgtcttaatggcttgtctgggcaagaagctaaagattatgtaatcaactacctggagatgcgttctctcggaagagctaagactatgtacaggctgcgagactggctcttctctagacagagatattggggagagcctatccccatcattcattttgaagatggaacgcaccgtcctttagaagatgatgagctgcctcttctccctccgaatattgatgactatcgtcccgaaggattcggtcagggtcctttagcgaaggctcaagattgggtgcatatctacgacgagaagacaggtagaccaggatgtagagagacttatactatgccacagtgggcaggctcttgctggtattatcttcgtttctgtgatgcacacaactctcagttgccttggagtaaagaaaaagaaagctattggatgcctgtagatctttacattggaggtgcagaacacgctgttcttcatcttctttactcgagattttggcatcgagtcttctatgacgcgggtcttgtctcaacaccagaaccttttaagaaactgatcaaccagggacttgtgttagcctcttcataccgaattcctggtaagggatacgtaagcatagaagacgttagggaagaaaatggaacgtggatctcaacttgtggagagattgtggaagttagacaagagaaaatgtctaaatcgaaactcaatggtgtggatcctcaggttttgattgaagagtatggtgcagatgccttacgtatgtacgctatgttttcgggacccttggataaaaataaaacctggtccaatgaaggtgttggggggtgccgtcgtttcctaaatcgtttttatgatttggtgacttcgtcagaggttcaagatatagaagaccgtgacgggctggttctcgctcacaaattggtgtttaggattacagaacatattgaaaaaatgtctttgaataccataccgtcttcatttatggaatttctgaacgatttttcaaagcttccagtctattctaaacgtgccttgtctatggctgttcgtgtattggagcctatagctccgcatatcagcgaagagttatgggttatattgggaaacccaccagggattgatcaagcagcatggcctcaaatagacgagagttacctagttgctcaaactgtgacttttgttgttcaggttaatgggaagttacgaggacgtctcgaggtagccaaagaagctcctaaagaagaagttttatctttgtctcgaagtgtagttgcaaagtatctagagaacgctcaaatacgaaaagaaatttatgttcctaataaactagtgaattttgtcctatga

SEQ ID NO: 18669 - DNA, 1989 bp, Chlamydia pneumoniae
atgaaggaagagaattcacaagcacactacttagctttatgtcgtgaattagaagaccatgattattcttattatgtgttgcatcgtcctagaatctctgattatgaatatgacatgaaattacggaagcttcttgaaatagagagaagtcatcccgaatggaaagtcttatggtctccctcaacacgtctcggagatcgtccctctggaactttttctgtggtttcccataaggaaccgatgctttccattgccaatagctattctaaagaagaactaagtgagtttttttctagggtagaaaaatccctaggtacaagtccacgttatacagtagaacttaaaatcgatgggattgcagtagcaatacgttatgaagatcgtgtgttggttcaagcactcagccgaggaaatggaaagcagggagaggatatcacatcgaatattcgaacaatacgctccttgcctttaagacttccagaagatgctccagagtttattgaagtacgtggcgaggtcttcttctcttattctacgtttcaaattatcaatgagaagcagcaacaattagagaaaactatttttgccaacccgagaaatgctgcaggaggtaccttaaagttactttctcctcaagaagtcgcaaaacgtaaattagaaatttctatctataatctcattgctccaggagataacgattctcattatgaaaatcttcagcgctgccttgaatggggatttcctgtatctggtaaaccaagattgtgctctaccccagaggaagtgatctcagttttaaagactatagaaactgagagagcttccttgcctatggaaatcgatggtgctgtcatcaaggtagacagtttggcaagtcagagagttcttggagccacagggaaacactatagatgggccttagcttataaatatgccccagaggaagcagagacccttcttgaggatattctagttcaagtaggaagaacgggagttctgactcctgtagctaaactcactcctgtactgttgtcagggtctttagtatctagagcgtctctatacaatgaagatgagattcatagaaaagacatccgtattggtgataccgtttgtgttgctaaaggtggagaggtgattccaaaagtagttcgggtatgcagagaaaaacgtcctgaaggttctgaagtttggaatatgcctgaattctgccctgtctgccatagtcacgtagttcgggaagaagatagagtttctgtgcgttgtgtcaatcctgagtgtgttgcaggagctattgaaaaaattcgtttttttgttggtcggggagctttaaatatcgatcatttaggggtgaaggtaatcacaaagctgtttgaattagggttagtgcacacgtgtgcggacctatttcagctgactactgaagatttaatgcaaattcccgggatacgggaacgctctgcaagaaatattctagagagtatcgagcaagctaaacatgtggatctagatcgttttcttgttgctctggggattcctctcattggaattggtgttgctactgtactagctggccacttcgagactttagatcgggtaatttccgcgacttttgaagaacttctttcactagagggtattggagagaaggtggctcatgctattgctgagtatttttcagactctacgcatcttaacgaaatcaagaaaatgcaggatttaggagtgtgtatatctccttatcataaatcaggatctacgtgttttggcaaggcttttgtgatcacagggacgttagagggaatgtctcggttagatgcagaaactgctatccggaattgtgggggtaaggtaggctcctctgtctcgaaacagaccgattacgtagttatggggaataacccaggatctaaattagagaaggctaggaaattgggagtctctatcttagatcaagaagcctttacaaatctaattcatttagaataa

SEQ ID NO: 18670 - DNA, 2619 bp, Chlamydia pneumoniae
gtgcttggggtgaattttatggagaaattttccgatgctgtctctgaagctttagagaaggctttcgaacttgctaaatcttcgaaacatacctatgtcacagaaaatcacctattactggctttattagaaaatacagagtctctcttttatttggtaattaaggacattcatgggaaccctggtttgctcaatacggcagttaaagatgcgctctcacgagagccgactgtagttgaaggagaggtggatcctaaaccttctccgggtttacaaacccttcttagggatgccaaacaagaggcaaagacattaggagatgaatacatttctggagatcatctgctgcttgctttttggagttcaaacaaagagccttttaattcttggaagcaaacaacaaaagttagttttaaagatcttaagaatctgattactaaaatacgacgaggaaatcgtatggattcgccaagcgctgaaagtaattttcagggtttagaaaagtattgtaaaaatttaacagcattagctcgtgaaggtaaactggatcctgtgatcggtagagatgaagaaattcgtagaaccatccaagtgctttcccgtagaactaaaaataaccctatgcttattggtgagccgggtgtagggaaaactgctatagcagaaggattagctcttaggcttatccagggtgatgttcctgaatctctcaaaggtaaacagctttatgtcttagatatgggagctttgattgcaggagctaagtatcgaggtgagtttgaagaaagactaaagagtgttttaaaagatgtagaatctggagatggcgagcacattatctttattgatgaggtgcatactcttgttggagcaggagctactgatggagctatggatgctgcgaatcttttaaagcctgcattagcaagagggacgctacactgtattggcgcgacgactttgaatgagtatcagaagtatattgaaaaagatgctgctttggaacgtcgatttcagcctatttttgtgacagagccttctttggaggatgctgtctttattcttcgtggactaagagaaaaatatgaaattttccatggagtcaggattacagagggggctttgaatgccgcagtcctactttcctatcgttatatcccagatcgctttcttccagataaggctatcgatttgatagatgaagcggcaagtttaattcgcatgcaaattggtagtcttcctcttcctattgatgaaaaggagagagagcttgctgctttgatcgttaagcaagaggctataaaacgcgagcaatctccttcctatcaagaagaggcggatgctatgcagaagtctatagatgctttgagagaggaattagcatctctacgtttgggttgggatgaagagaagaagttgatttcggggctcaaggaaaaaaagaattccttggaaagtatgaaattttctgaagaggaggcggagcgtgttgcagactataatcgtgtagctgagcttcggtatagtttaattccccaacttgaagaagaaatcaaacaggatgaagcctctttaaatcaaagagataaccgtctccttcaagaagaagttgacgagcgattgattgcgcaagtggtagctaattggacagggattcctgtgcaaaaaatgctagaaggggaagctgagaaactgttaattcttgaagaatccttagaagaacgtgtggtaggacagccttttgcagtctctgcggttagtgattctattcgtgctgcacgtgtaggtttaaatgatcctcaacgtcccttaggagtctttttatttttagggccaacaggggtaggaaaaaccgagcttgcaaaagctcttgcagatcttcttttcaataaagaggaagctatggtccgcttcgatatgtcagagtatatggaaaagcattccatttccaagcttataggatcttctccagggtatgtgggttatgaggaaggtgggagtctttctgaggctcttcgacgacgtccctattcagtagttctctttgatgagatagagaaagcagataaggaagttctaaatatccttttacaggtttttgatgatgggattcttacggatgggaaaaaacgcaaagtaaattgtaaaaatgccttgtttatcatgacatcaaatataggttctccagaacttgcagattattgttcaaaaaaaggaagtgagcttacgaaagaagcgattctttctgtagtctctccagtattgaaaagatacttgagccctgaatttatgaaccgaattgatgagatacttccttttgttccattaacgaaagaagatatcgtgaaaatagttggcattcaaatgcgaaggattgcccagagattaaaggcacggcggatcaatttatcttgggatgattctgtaatattatttcttagtgaacagggttatgacagtgctttcggagcccgccctttaaaacgtttgatccaacaaaaagttgtgatcttgctttctaaggctttgcttaaaggagatattaaacctgatacatcgattgagttgacgatggcaaaagaggtgctcgtatttaaaaaagtggaaactccttcttag

SEQ ID NO: 18671 - DNA, 1635 bp, Chlamydia pneumoniae
atggcagcgaaaaatattaaatataatgaagaagccagaaaaaaaatacataaaggggtaaaaactcttgcagaagcagtaaaagttactctaggtcctaaaggacgtcacgtagttatagataagagctttggctctccccaagtgactaaagatggtgttactgtagctaaagaaatcgagctcgaagacaaacatgaaaacatgggcgctcagatggtaaaagaagtcgccagcaaaactgctgacaaagcaggcgacggaactacaacagcaactgttcttgcagaagcaatctatagcgaaggtctaagaaatgtcactgccggtgccaatcctatggacctaaaaagaggtatcgacaaagccgtaaaagttgttgttgatgaactcaaaaaaattagtaaacctgtacaacatcacaaagaaatcgctcaagtagctactatctcagcaaataatgattccgaaatcggaaatcttattgcagaagctatggaaaaagttggtaaaaacggatccattactgttgaagaagctaaaggcttcgaaactgttctcgacgttgtagaaggaatgaacttcaaccgtggatacctctccagctacttctccacaaatccagaaactcaagaatgcgttttagaagacgctctgattctaatctacgataaaaaaatctctggaattaaagacttccttccagttttacaacaagtagcagaatctggacgccctcttttaatcattgcagaagaaattgaaggagaagctttagcaactctagtagtcaatagactccgtgcaggattcagagtctgtgcagtgaaagctcctggtttcggtgacagaagaaaagctatgttagaagacatcgctatccttactggtggccaactagttagcgaagaacttggcatgaaactagagaatacaactctagcaatgttaggaaaagctaagaaagttatcgtaactaaagaagataccacaatcgtcgaaggcttaggaaacaaacctgatatccaagctcgatgcgacaatattaaaaaacaaatcgaagatagcacttcagattacgacaaagaaaaactccaagagcgtttagctaaactctccggtggtgtcgccgtaatccgcgtaggagctgctaccgaaatagagatgaaagagaaaaaagacagagtagatgatgcacaacacgcaaccattgcagctgtcgaagaaggaatcctccctggtggtggaactgccttagttcgctgtatccctacactagaagctttccttcctatgctagcaaacgaagacgaagctattggtactcgtattattctaaaagcattaacagctccattaaagcaaattgcaagtaacgcaggtaaagaaggcgctatcatttgtcagcaagttctagcaagatctgcaaatgaaggctatgatgctttacgtgacgcttatacagatatgattgacgcaggaattttagatccaactaaagtgactcgctcagctctagaaagcgcagcttctatcgcaggattactcctcacaacagaagccttaatcgctgatatcccagaagagaaatcttcttcagctccagcgatgccaagcgcaggaatggactactag

SEQ ID NO: 18672 - DNA, 2199 bp, Chlamydia pneumoniae
atggagaaaatctgcggatacttagagcaaatacttgttgaaaacaaagactctggggacattactgcttatatcaaaatacccaataaaacgactcctatcctaattaaaggcaaacttccccaacctttggaactaggatccccgatccaaatctatggtgtctggagccattccccttcaaatactaagtatttccaaatccatagttacgactctcctcttctttatgaatatcgtggcgtattccattacctcacctcaaaactcatcaaaggaatcggccctaaaatcgcagaaaagatcatcgagaaatttcaagagaaaacatgttatgtcctcgatatcactccagaacgcttaagtgaggtttctggaattagcgaaacacgatgtgtctctatttgcaaacaactctgcgagcaaaaaatcttaaggaaaactcttctctttctccaagaatacaatatcccgattcattatggagtgagaatttttaaaaaataccaagagaaatccatagaaaaaatttgcgaagatcccttccttctagccagagaaatggagggcatcggattcaaaactgctgatttcatagctatgaaactaggcgtccccagaaattctgaaagtcgcctatgtgctggtatccagcactccttagaagaacttcaagaagaaggtcatacttgctatccgatagagctcctgatagatgtcgtcgccaaactattaaatcaagatgtctttgatactcctattactctcgaagaaatcgatacgcaaatcctcaatatgcaaaagcgtaagcttttacatattcaagacatttctgggacactccatgtctggacacgttatctccatctcgcagagaaaactattgtttctgatctcaagcgcattttattttcttcgaggagaatccgttctatagacggagaaaaagcaattgcttgggtagaggaaaacctaagtatagatctcgcagaacaacaacgagaagcaattaaagcctgtttttctgaaaaacttctcatcattactgggggccctggaactggaaaaagtaccattacccaagcaatactgaaaatttttgaacaggtgactcataaaatcatcctcgcagctcctacaggaaaagccgctaaacggatgaccgaaattacacaaaaacactccgtcaccattcatgctctgctacagtatgattttaaaacgaaatctttccgcaagaaccatgacaatcctatagactgtgatctgatcattgttgacgaatccggaatgatggacacgcacttgctgcaccacttcctgaaagcacttcctgactacacaactcttgtctttattggagacattcaccagctacccagcgtgggcccaggaaatatccttaaagacttgattacttcgaataaaatgacagtcatcagattaaataagatcttccgccaagttcatgattcgggaatcgttacgaatgcccatagggtaaatgaaggggaactccccatattatattcagaaacagggcgtcgtgatttcttatttttccaaaaggatgatcaagaagaggctctcaatcatatcattcatcttgtgacaaaattcgtcccacaaaaataccatatctatcctcaagatatccaagtactagctcccatgaaaaaaggaaccctaggaatctataatctaaataaagcactcaaacatgcattaaaccctaaaaaagcaaatcttcacggtagatttcaatcctatgccgttggcgataaggtaatgcaaatccgcaacaactataataaagaagtctttaacggcgatataggctatgtctctacaatcaacttcgaagataaagctgttgttgtccgtatggaaggaaagcatgtcggctattctttctcagagcttgacgatctagtcttagcctatgctacctcagtacataagtaccagggaagtgaaagcccctgcattatcattcctattcatacctcgcactttatgatgctctatagaaatcttctctatactgctattacgcgggggaaaaaattggtgattctagttgggacaaaaaaagccattgctattgcaacaagaaataatcgagtgcaacaccgatgtacaggactagcagaagttcttaaagagctcgatactaagaaaaattatgcagatctgtaa

SEQ ID NO: 18673 - DNA, 1656 bp, Chlamydia pneumoniae
atgccacaaaaagtcctgattacttcagctttaccctatgctaatggtccgctacattttggacatattgcaggagtctatcttcctgcagatgtgtatgcaagattccgtagattgttaggagacgatgtcctttatatttgtggttccgatgaatttggcatagcgatcaccttaaatgcggatcgtgaggggttggggtatcaagagtacgtggatatgtaccataagttacataaagatacttttgagaagttagggtttgctttggatttcttttctaggacgacgaacccttttcatgctgagcttgtccaagatttttattcccaacttaaagcgtctggattgattgaaaatcgcatatctgaacaactgtattcagaacaagaacaacgttttcttgcggatcgttatgtagaagggacgtgtcctcggtgcggttttgatcatgctcgaggagacgagtgtcagagctgtggtgcggattatgaggctatagatttaatcgaccctaagtctaagatttctggggttgagttagtaaaaaaagagactgagcactcatattttcttttggaccgtatgaaagacgctctactttcttttattcagggatgctatttacctgatcatgtccgtaaatttgttgttgattacatagaacatgtcaggtctcgagccattactcgagatttatcttgggggattcctgttccagactttcctggaaaggtgttttatgtatggtttgacgctcctataggatatatcagtggaactatggaatgggcagcttctcaaggaaaccctgacgaatggaagcgtttctggcttgaagacggtgtagagtatgtccagtttataggtaaagataatcttcctttccattctgtagttttcccagctatggaattgggtcagaaacttgactataaaaaagttgatgccctcgtagtttcagagttttatcttttagaaggacggcaattcagtaaatccgagggcaattatgtggatatggacaagtttttgagttcctattccttagacaaattgcgctatgtattggcggctacagctcctgaaacttcggatagtgagtttactttccttgattttaagactcgttgtaattctgagttggtaggaaagtttgggaattttataaaccgagttcttgcttttgcagaaaagaatcactatgacaagctttcttatcattctgtggttttagaagatagtgacagggcatttcttgaagaagtgcgtcaacttgttcgagatgctgagaagtgctacagagagtatagtttacgtaaggctacgagtgtgattatgtcactggcagctttagggaatgtctattttaaccaacaagcaccttggaagctattgaaagaagggactcgtgagcgtgttgaggccattttattctgcgcatgttattgtcagaagttgttagctttaatttcttatcctattattcccgaaagcgctgtagctatttgggagatgatctcaccaaaatctttagaaaattgcaatttggatacgatgtatgctagggatctatggaaagaagaaattcttgatgttataaacgaagaatttcatttgaagtcccccaggttattatttactactgtagagtag

SEQ ID NO: 18674 - DNA, 645 bp, Chlamydia pneumoniae
atgaatacttctatttctgaaattcagcgttttctttctatgattgcttttgagaaagagctcgtctcagaagattttagtgtcgtcgctggaatagatgaagctggaagagggccactggcaggtcccgtagttgctagtgcctgtattttacctaagggaaaggtatttcctggagtaaatgatagtaagaagctatctcctaaacaacgagcccaagttcgggatgctttgatgcaagatcctgaggtctgttttggtataggcgtaatttctgtagagaggatagatcaagttaacattttagaagccactaaagaggctatgcttcaagcaatatcttctttaccgatatctccagatattcttcttgtggatggtctttatttaccccatgacattccttgtaagaaaatcattcaaggagatgctaaatctgcatccatagcggcggcttctattttagcaaaagaacatcgtgatgatttgatgttacaactacacaggctctatcctgaatatggatttgatagacataagggatacggaacttccttgcatgtagaagcaatacgacgttatggtcccagtccctgccataggaagagcttttctccaataaagcaaatgtgtgctattgtatga

SEQ ID NO: 18675 - DNA, 366 bp, Chlamydia pneumoniae
atggtgaatttactcaaagaattagaacaagaacagtgtaggaatgatcttcccgagtttcatgttggcgatacaattcggttagctacaaagatttcagaaggrggtaaagaacgagttcaggtatttcaaggtactgtgatggctcgtcgaggcggcggctctggagagactgtatccttgcatcgtgttgcttatggtgaaggcatggaaaagagtttcttgcttaatagtcctaggattgtaagtattgaaattgttaagcgcggtaaagttgctcgagctcgtctgtattatctgagaggaaaaactggtaaggctgctaaagttaaagagtttgtaggacctagatcttcaaagaaatag

SEQ ID NO: 18676 - DNA, 1086 bp, Chlamydia pneumoniae
atgaagatcgatatactttctttattcccaggttattttgatggtccattgcaaacgagtattcttggtagggccataaagcagagactcttagatgtccagcttacaaatcttcgtgactttggactcggaaagtggaaacaagttgatgatactccgtttagtggtggtgggatgcttttaatggcagagcctgtcacttcagctattaggagtgtaagaaaggagaattctaaggtaatttacctctctcctcaaggagctttgttgacagctgaaaagagtcgagaattggctgctgcttcgcatttgatattactttgcggtcactacgaaggtattgatgagcgtgctatagagagcgaagtggatgaagagattagtataggggactatgtcctgactaatggtggaattgctgctctggtccttatcgatgcagtttctcgttttattcccggtgtattggggaatcaagagagtgctgagagagattctttagaaaatggtttgctagaaggacctcagtatacacgccctagagagtttgaagggaaagaagttccagaagtattgttgcaaggggatcacaaagccatttctcagtggagattggagcaaagtgagcgtagaacttatgagagacgtcctgatttgtatctgaactatctctataaacgctcgattgatcacaaatttgatgaggagactacaacaaatagggatcatttcaagtgtgacaagatttctgtagtactagaggtaaataagttaaagcgcgcaaaaaatttttactgtaaggtattcggtctggatgccatgagctgcgagaataaattttgtcttcctcatgaaggcaaaaccatattctggttacgagaagttcaagctgagaaaaaaaacatagtgactctctccctttccttagattgtgcatgcgaagaggacttttgttatcttcttagaagatgggagttatttggtggaaagttgttagaaaagcaagctgatgagcatgctgtatgggccctagcacaagatttagatgggcatgcatggatattctcgtggcataggatgaaatag

SEQ ID NO: 18677 - DNA, 360 bp, Chlamydia pneumoniae
gtggcgttaaaaattcgtttaagacagcaagggcgtagaaatcatgttgtttatagattagtgctcgcagatgtcgagtctcctcgtgatggtaaatacatagaattattaggttggtacgatccacatagctctataaattatcagctgaaaagtgaacgaattttttattggttagagaggggagcccaactttcttcgaaagctgaagctttagtaaagcagggagctccaggagtgtatagtgcgctattgtctaaacaagaagctcgtaagttagttgttcgtaagaagcgacgtgcttatagacagcgtcggtctacacaaagagaagaggctgcaaaagatgcaactaagtag

SEQ ID NO: 18678 - DNA, 1347 bp, Chlamydia pneumoniae
atgattaattctttatcgcaaaagctatcttctattttttcttttttggtttcttctcgtagaattaatgaagaaaatatttccgaatctattagagaagttcgtctggctctcttggatgccgatgtaaattatcatgtagttaaggattttatttctaaagttaaagaaaaaatccttggagaagagatctggaagcatgtttccccagggcaacagtttatacgttgtttgcatgaggaattagtagcatttttaagcgatggaagagaagagtttactattcagaagacgccttcgatcatccttctttgcggactccagggggcaggaaaaacaacaacagctgctaagcttgctgattatgtaattaagaataagaaagcaaaaaaagtccttgtggttccttgtgatctcaaaagattcgctgctgtagatcaattaaaaattttggttgctcaaacgaaagctgaattttaccaaagtcaagagaacaagcctattgatgttgttgttaaagcgcttgcatatgctaaagaaaatggtcatgattttgtgattctggatactgcagggcgtctcaatatagataacgagcttatggaagagctgacggcgatacaaaaagtttctcaagctaatgagcgtctttttgtgatgaatgtagctatggggcaagatgttttagcaacagtgcaagcttttgatcagtctttagatcttacaggcgtgattctttccatgactgatggagatgctcgagcaggcgctgttttctcaattaagcacgtccttggtaagcccattaaatttgaaggatgcggagaacgcattcaagatcttcgttcattcgatcctcaatctatggcggaacgcattcttggaatgggggataccataaattttgttaaagaaatgcgcgagtatatttctgaggaagaagacgctgagctaggtaaaaaactagttactgcggcttttacttatgaagactattataaacagatgaaagcatttcgtcgcatgggacctctaagaaaacttttgggaatgatgcctggttttaataatgcgaaacctagccaaaaggaaatcgaggattctgaacaacagatgaaaagaacggaggcgattatcctgtccatgactcctgaagagagaaaggagttggtggaattggatatgagccgtatgaagaggattgcttctggttgtggtttaactttaggcgacgtgaaccagtttcgaaaacagatgtcgcaatcgaaaaaattttttaaaggaatgtctaaaggcaagatggaacaagttaggaaaaaaatgtcaggaggaaatcagtggcgttaa

SEQ ID NO: 18679 - DNA, 1074 bp, Chlamydia pneumoniae
atgaagaaaaaagttgccgagtatttaaaccgtttagcagaagtcgaaataaaaatttcaaatcctgaaattttttctaattctaaagaatatagcgctcttagcaaggaacattcttatcttctagaattgaaaaacgcctacgataaaatcttaaatttagaaaaagtccttgctgatgataagcaagctttagctattgagaaagatccagagatggtcgttatgcttgaagaggggattaacgaaaataaagtagagctagagaaattaaataaaatattagaaagcttattagtccccccagatcctgatgatgatctaaatgtcattatggaactacgagccggtacaggaggcgaggaagccgctctctttgttggagattgtgtccgcatgtatcacctgtacgcctcctctaagggatggaaatacgaggtactctctgcgtcagaatccgatcttaagggatataaggaatacgtcatggggatctcaggaactggggtgaagcgtttacttcagtatgaggctggtacacatcgagttcagagagttcctgaaacagaaactcaaggacgtgtacatacatctgcaattacaatcgctgtccttccagaaccttcagaagaagatacagagcttcttattaatgagaaggatttaaaaattgatacattcagagcctctggtgctggaggacagcacgtaaacgttactgattctgcggtgagaatcacacacctgcctacaggtgttgtagttacatgccaggatgagcgcagtcaacataaaaataaagataaggccatgcggattcttaaagcccggattcgtgatgcagaaatgcaaaaacgccataacgaggcgtctgctatgcgttctgctcaggtaggaagtggggatcgttccgagagaattcgcacctataatttttctcaaaatcgcgtgactgatcatagaatcggattaactttatataacttagataaagttatggaaggagacctagatccaattacgactgcaatggtgagtcatgcctaccaccagttactcgaacatggaaattaa

SEQ ID NO: 18680 - DNA, 330 bp, Chlamydia pneumoniae
atgaaaaaaaatacccaccctgaatatagacaggttttatttgtagattcttcaacagggtataaatttgtttgtggatctacctatcaaagtgaaaaaactgaagtttttgaaggtaaagagtatcctgtatgttatgtcagcgtatcctcttcttctcatccttttttcactggaagtaagaagtttgttgatgctgaaggtagggtagataagttcttaaaacgttatagtaatgtaagacagcctgcacagcaacctcagcctgaagaagacgcactacctgctgctaaaggaaagaaaaaagttgtaactaagaaaaagaaataa

SEQ ID NO: 18681 - DNA, 1911 bp, Chlamydia pneumoniae
atgaaacaacactattctctaaataaaagtcgtcatatcctccgcagtacttataagcttttaaaaagtaaaaaactcgcccattcccctgcagataaaaagcaactgcaagaactactagaacaactagaagaggctatctttgaacatgatcaagaaactgcaagcgacttagctcagcaagcattagcattttccaaccgttatcctaattccttcggacgcaaaacctatgagcttatcaaggcccttctttttgctggtgttgtagccttcttagttcggcaattttggtttgaactttatgaagtgcctacaggatccatgaggcctacaattttagaacaggatcggattcttgtatccaaaacaacatttggtctccattgcccttttgctaagaaaccacttgccttcaatcctgaatccgtaactcgcgggggtcttgttgttttcactgtaggcgacctccctatcccagatgctgatacaaagtacttcggattgattccaggaaaaaagcgttacattaaacgttgcatgggaagacctggggacttcttatatttctatggaggaaaaatttatggtcttgatgatgcaggtaaacgcatagagtttccttctgtccatggtttagaaaacttatatcacgtcccctatatatcctttgatggcactaccagcagccatacagaagggcagaaaacaattatagattttaagcagttcaatcaaagttatggtcggctgattttccctcaaacctccatgtatggacaattctttgaccataaagaatggcatcaagacgagcctaataaattaaaagatcctcatctttcgccagtcagctatgccgatctttttggtatgggtaactatgctatggtgcgcatcttaacagaacatcaggcacgaacatcccatctacttccgaatccaggaagtccaactaaagtctacttagaaatttgccatacagcgaacctttcctacccaaagcctctgttgcgtcactatgagcatcagctctcgcctgcgattcaacctatgaagactttacttcctttgcgtaaggaacatttgcacttaattcggaacaatcttactacctctcgttttattgttgctcaaggatgtgcgtataaataccatcaattcaagattaacacttcaggaattgccaaagcctatgcaattctcctgcccaaggtccctgatggttgttatgaatattctaaaggcgaagcgtatcaaattggctttggagagattcgttataagctaaaatcttctcacccccttactcagctcaatgataagcaagtgattgaactttttaactgcgggatcaactttagttctatttataatcctgtgaatccgctgcaagcacctttacctaaccgttatgcattctttaaccaagggaatctttatatcatggattctcctgtatttataaagaatgatccaactctgcaaaaatttgtgacttctgaaacggaaaagcaagaggggtcttcagagacacaaccctatatagcttttgttgacaagggactccctccagaagattttaaagaattcgtggagtttatacataattttggtattcaagttcctaaaggtcatgttctcgtcttgggagataactaccctatgagtgcggatagtcgagaatttggctttgttcctatggaaaatctcttaggatctcctctatgtacattctggcctattggacgcatgggacggttaactggagtttctgctccaacaacactctcaggttatcttgttagtgggatagcattagcgacgggtctctctctcattggatatgtctactatcaaaaacgacgcagactctttcctaagaaagaggagaaaaaccacaagaaataa

SEQ ID NO: 18682 - DNA, 3132 bp, Chlamydia pneumoniae
atgacagcagatgaggtagggaaaaatagctttgcaaaaaaagaagaacaggttttgaagttttggaaagacaatcaaatttttgaaaagtctttgcaaaatcgtcagggaaaaaccctatattctttctatgacggccctccttttgctacaggtcttccacattacggtcacttattagcaagtaccattaaggatgttgttggacgctatgctaccatggacgggtactatgtgccgcgacgttttggctgggattgccatggggttcctgtggaatatgaggtggaaaagtctctgagtttaacagcacccggagccatcgaagattttggtatagcatcctttaacgaagagtgtcgtaaaatcgtatttagatacgttcacgagtgggaatactatatcaatcgtataggacgttgggtagatttttcttctacttggaaaactatggacgcttcttttatggaaagtgtctggtgggttttccaatctctatataaccaaggattagtgtacgaaggtacaaaagttgtccctttttcaacagcattaggaacacctctctctaattttgaagcaagccaaaattataaagaagtcgatgacccgtctcttgttgtaagaatgcctcttcagaatgattccgcatccttgcttgtatggacaacgactccatggacattgccttctaatatggctatagctgtaggggaaactctggtttatgtccgtattcaagataaaaaaagtggagagcagtggatcctaagtcagggatgtgtttctcgttggttttcaaatccagaagaatttgtaattttagagagtttttctgggaaagatcttgttggtaggacttatgagcccccttttacttttttccaatctaagcgagaggaaggagcttttcgtgtcattgcagcttcgtttgttgaggaaagtgaaggaacaggagtcgtacatatggctccagcgtttggtgaaggagactttttagtttgtaaggagaaccatgttcctttagtctgtcctgtagatgctcacggaagttttacagaagaaatacctcaatatcaagggcaatacattaaacatgctgacaaggaaatcatcaagttcttgaagaaagaaggaaggattttttactacggaacagtaaaacaccggtatcctttctgttggagaacggatactcctttgatttataaagccgtgaattcttggttcgtcgctgtagaaaagattaaagataagatgcttcgtgctaacagctcgatccattgggttcctgaacatatccaagaagggcgttttggaaaatggttggaaggcgctcgtgattgggctatcagtagaaatcgttattggggaacgccaattccgatttggaaaagtgctgatggcgagattcttgttgtaggatctatccgagagctagaagaacttacaggaactcagatcacagatattcataggcattttattgatgatttgaacattgtcaaagatggcaagccctttcatcgaattccctacgtttttgattgctggttcgactctggagcgatgccttatgcccaaaatcattatccttttgaaaatcaaaaggaaaccgaagaggcatttcctgcagactttattgctgaagggttggatcagacgcgaggatggttttatactctcacagtgatttctgcaattttatttgatcgtcctgcatttcgtaatgccattgtgaatgggattattcttgcagaagacggcaataaaatgtcaaaacgtctaaataattaccctagtcctaaatacgttttagatacttatggagctgacgcgcttcgtctatatttgcttcatagtgttgtcgtaaaggctgaagatcttcgcttttctgataaaggaatcgagggtgttttgaagcaaatccttcttcctctaacgaacgtactttccttttttaatacctatgccgagctgtatggttttgatccgaaatcacaagatatagaaccagcttatacagagattgatcaatggattttatccaatttgtatagtgttgtaggtaaagttcgtgagagcatgagtcagtatcatttaaactttgctgtagaaccctttgtgacctttattgatgatctgactaactggtatatacgtcgctgtcgtagacgtttttgggaagctgaagatactcctgaccgtagagctgcattttctactttatatgaagttctcacagttttttgtaaggtaattgctcccttcgttccttttcttgccgaagatatctatcagaagttgaagttagaaaaggaacctgaatctgttcatctctgtgattttcctcaagtcgagatggataaaattctccctgatctagaaaagcytatgcacgatattcgggaaatcgtaggtttaggccattctttaagaaaagaacacaagttaaaagttcgtcagcctttagcaaacttttatgttgtcgggtctaaagatagattgtcgcttctaaaaacatttgaagggttgattgctgaagagctgaatgtgaaaaatgtgattttctatgaagaagctccgagtttcatttatactaccgtcaaacctaattttcgtatgcttgggaaaaaagttggatctaagatgaaagaggtccaaaaagctctcagtgaactgccaaacaatgctatagataagctgattcaggaagaaacatgggttttaaccattgatgatagagaaatagctttggatggtgatgacgtcgtgatttgtcgtcacacagatcctggatatattgcccgtagttccgctctatttagtgtgattttagattgccagttaagagaacctcttatagtcgaaggtatagcaagagagctagtcaataagattaatactatgcgtcgaaatcaacaacttcatgtttctgaccgcatcgcattaagaataaaaaccacagaggctgttcatcgcgctttcttggattatgaaaactatatttgcgaagaaacgttaattatagcctatgattttactcaggattctgatttccaaggggaaaactgggatattaatggacatgcaacgcaaattgaaattacagttagttctatagattcttag

SEQ ID NO: 18683 - DNA, 1347 bp, Chlamydia pneumoniae
atggatgcgcttatcttatctagaatacaatttggattgtttataacttttcattacctttttgtgcctctgagtatgggtttgagcatgatgcttgtgatcatggaaggcctctacttggttacaaaaaagcaaatttataagcaaatgacatggttttgggttgggatttttgccctaacatttgttcttggagtcgttactggaatcatgcagatattttctttcggttctaactgggcaaatttctcagaatatacaggaaatattttcggcaccttattaggtagtgaaggtgtttttgcttttttcttggaatcaggatttttaggaattttgttatttggtcgccacaaggtctctaagaaaatgcatttcttttctacgtgcatggtagctttaggagctcatatgagtgccttttggattatttgtgcgaattcttggatgcagactccttcaggttacgagatggtgatgcataaaggaaaactcatccctgctttaacctccttctggggagtggtcttctctccaacaactatagatcgctttattcatgcagtcttaggaacttggctgtcaggagtttttcttgttataagtgtatcagcatattatttatggaaaaaacgtcatcatgagtttgctaaacaaggaatgaagatagggacgatttgtgcagttatagtcttagttttacaattgtggtctgcagatgtaacggctaggggagttgctaaaaatcagcctgcgaagttagcagcttttgaaggtatcttcaaaaccgaagaatatactcctatatgggcttttggttatgtagacatggaaaaagaacgggttatagggctgcctattccaggagcactttcttttcttgttcatagaaatataaaaaccccagtcactggtttagatcaaattcctagagatgaatggcctaatgtacaggctgtctttcagctgtatcacctgatgatcatgttgtggggggttatggtcgctttaactttgatttcctggtctgcatataagggatggcgatgggcgttaaaaccctttttcttagtcattttaactttttctgtcttattaccagaaatttgtaacgagtgtggttggtgcgctgctgaaatgggaagacaaccttgggtagttcaaggattattaaaaaccaaagatgcggtgtctcctatagtgcaggcgaatcaaattgtacaatctttggtaatatttagcttagtattcattgctcttctgactctctttattactgtactttgtaaaaaaataaagcatggtcctgaagaggaaaatgatcttacagaatttgaagtgaaatag

SEQ ID NO: 18684 - DNA, 1455 bp, Chlamydia pneumoniae
atgatcacacgcactaaaattatttgcactatagggccagcaacgaatagtccagagatgttagcaaaacttctagatgctgggatgaacgtagcaagattaaatttcagtcatgggagtcacgaaactcatggacaggctattggatttctcaaggagttaagggagcagaagcgggttcctttagcaattatgctagatactaaggggcctgaaattcgtttagggaatattcctcagccaatttcggtttctcagggacaaaagcttcgtctggtaagtagtgatatcgatgggagtgctgaagggggagtgtctctctatcctaaggggatatttccctttgttcctgagggtgctgatgttttaatagatgatggctacattcatgctgttgttgtctcttcagaggctgattctttagaattagagtttatgaacagtggccttctcaagtctcataaatctttgagtatccgaggtgttgatgttgctcttccctttatgacagagaaagatattgcggatcttaagtttggggtagagcagaatatggatgtggttgctgcatcttttgtgcgctacggtgaagatattgaaactatgcgcaagtgtttagcagacttaggcaatcctaagatgcccatcattgcaaaaatagaaaatcgtttaggggtagaaaatttctctaagattgccaagcttgcggatggaattatgattgctagaggagatttaggaatcgagctttctgtcgttgaagtcccaaatttgcaaaagatgatggctaaggtttctagagaaacaggtcacttctgtgtgactgcaacgcagatgctagaatctatgattcgcaatgtcttacctacacgagctgaagtctctgatattgccaatgcaatttatgatggttcttcagcagtgatgttgtcaggggaaactgcatctggagcccatcccgtggctgccgtgaaaatcatgcgttctgtgattttagaaacagaaaagaatctctcccatgattcattcttaaaattagacgatagcaatagcgctcttcaggtgtccccctatctctcagccattggattggcaggcattcagattgcagaaagggcagacgccaaagctcttattgtttatacagaatcaggaagttctccgatgtttctctctaaatatcgtccgaaattccctatcattgccgtgactccaagcacttctgtttactatcgcctagctttggaatggggggtctatcctatgcttacccaggaaagtgatcgcgctgtatggagacatcaggcctgtatttatggcatagaacagggcattctctctaattatgatcggattcttgtgcttagcagaggagcctgtatggaagaaacaaataatcttaccctgacaatagtgaatgatattttgactgggtcggaatttcctgaaacctag

SEQ ID NO: 18685 - DNA, 5481 bp, Chlamydia pneumoniae
atgaaatcacttcctgtatatgtttctgggatcaaagttagaaatctaaaaaacgtttctatccattttaactccgaggaaatcgttctactcacaggagtttcgggatcaggaaaatcctcgatagcctttgataccctatatgctgctggaagaaaacgctatatttcaacacttccgacattcttcgctactacgataacgacgctgcccaatcctaaagtagaagaaattcatggtctctcaccaacaatagcaataaaacagaaccacttttcacactatagtcatgcgactgtcgggagcactactgaacttttttcgcaccttgctcttctcttcacgctagaaggacaggctcgagatcctaagactaaagaagtcttagatctctacagcaaggagaaagttcttagtaccattatggagctctctgaaggtgtacagatctctattttagctcctctgctacgtaaagatattgctgcaatccatgagtatgcacaacagggatttacaaaagtacgttgtaacggcacgatccaccccatttactccttcctaacttcagggattcctgaagactgctctgttgatattgttattgatactctaatcaaaagtgaaaataatattgcaaggctcaaagttagcctattcacagctttggaattcggagagggtcattgctcagttcttagtgacgaagagctcatgacattctccacaaagcaacagatcgatgacgtcacctatacccctctaactcaacaattattttctcctcatgccctggagagccgttgctctctttgtcaaggatccgggatctttatttccatagataatccccttcttatcgatgaaaatctttcgattaaagagaattgctgtagctttgctggaaattgttcttcctatctctatcatactatataccaagctcttgctgatgccttaaatttcaatctagaaactccatggaaagatctttccccagaaatccaaaatatttttcttaggggaaaaaataacttggttcttcctgtacgactcttcgatcaaactttaggaaaaaagaatctcacctataaagtatggagaggtgtacttaacgatataggagataaagttcgttataccacgaagccctcacgttatctctccaaaggcatgtcagcacattcctgttccctatgtaaaggtacaggcctaggagactacgcttccgtagctacttgggaaggaaaaacattcactgaattccaacagatgtctctaaataactggcacgtatttttttctaaggtaaaatctccttctctctctattcaagaaatcctgcagggactaaagcaaaggctctcttttcttattgacttagggctaggctacctcactccaaatcgcgcattagctaccctttctggaggagaacaagaacgtacagcaatagcaaaacacctaggaggagaactttttggaattacctatatcctagatgagccctccataggcttgcatccacaagacactgaaaagctcatcggtgtcattaaaaagctacgagatcaaggcaatacggtgattcttgttgagcatgaagaacggatgatttctcttgcggataggattattgacatcggccctggagcaggaattttcggaggcgaggtcctctttaatggaaagcctgaggacttcctcatgaactcctcatctctgacagcaaaatacttgcgtcaagagcttaccattcccattccagaatcccgggaagctcccacatcttggctcttgctaacagaagcaacgatccacaaccttaaaaatctttctattcgtctgccgttagctcggctaatcggagttacaggagtctctggatcggggaaatcctctttaattaataatacgttagtgcctgctatagaaagcttcttgaaacaagagaaccctaaaaatctgcattttgagtggggatgcataggccgcttgattcacattacccgagatcttccaggacgctcacagcgttcgatacctttgacctatattaaagcctttgatgatatccgggaactcttcgcctctcaacctcgcagcctacgtcaaggactgacaaaagctcattttagcttcaaccaacctcaaggagcttgtattcagtgtcaggggttaggaacgatgaccatctccgatgatgatacacccatcccctgttctgaatgccaagggaagcgttatcactcagaagtattggaaatcctctatgaagggaagaacatcgctgatattttagatatgacagcgtacgaagcagaaaaatttttcatttcacatcctaaaattcatgaaaaaatccatgctctatgttccctacgcctagattacctgcccttaggaagacctctttccacattatccggaggggaaattcaaaggctaaaactcgctcacgagcttctctttgcttctcctaagcaaacactctatgtcctagatgaacctacgacaggccttcatactcatgatatccaagcactgatcgaggtccttctatccctcacatatctagggcacacagtccttgttatcgaacataacatgcacgttgtcaaagtttgtgattatgttttggaattaggtcctgaaggaggagatctcggaggatacctcctggcatcctgcacccctaaggatcttatccaactaaatactccaacagcaaaagcgttggccccctatattgaaggttctctagacataccggtagtaaaatctgaaccgccatcctctcctaaatcttgtgatatccttatcaaggatgcctatcaaaataatctcaaacacatagatcttgctcttccgagaaactccctaatagcaattgcgggtcctggagcctcagggaaacattctttagtctttgatatactctatgcatcaggaaatatcgcttatgccgagctcttccctccctacattagacagggtctgcttaaggagactcctctaccctctgtaggagaggtaaaaggactctctccagtcatttcggtaagaaaatgtagctcctccaatcgctcgtaccatacaatagcctcggctctcggattaagcaatggtctggaaaagctctttgccatcttaggagaacctttttctccccttacagaagaaaaactctctaaaactacacctcagaccatcatcgatagcctactcaaaagctataaagacgattacgtcactataacctctccgattcctcttggttctgatctggaaatcttccttcaagaaaaacaaaaagagggattcataaagttatattctgaggggaacctctatgatttagatgagaggctgcctctaaatctcatagaacctgctatagtcatacaacatacaaaagtatccccgaaaaatagttcctctttattatccgcaatctcggtagctttttctctatcctcagaaatctggatctatatctctcagaaaaagcaacgaaaactctcgtattccttagggtggaaagataagaaagggagactctatcccgagattacacatcaactactttcttctgaccatcccgagggtcgttgccttacatgtggaggtcgtggcgaaatcctaaaaatctccctagaagagcataaagaaaaaattgctcactacactcctttagagttttttagtttattctttccaaagagctatatgaagcctgtacaaaagctgcttaaagatgagaatgcctctcaaccactaaagttgctaactacgaaagagttcctaaatttttgccgaggttcctcagagtttccaggaatgaacgcactacttatggagcagctagatactgaatctgactctcccctgataaaacctctgcttgctcttacctcctgtcctgcctgcaaaggctcaggactaaacgattatgccaactatgtgcgaatcaacaatacctcgcttttggatatttatcaggaagatgccacattcttagaatctttcctaaacactataggaaccgatgatacaagaagcataatccaagatttgatgaatcgccttaccttcattagtaaagtaggcctgagctatattacccttgggcaaaggcaagacactctcagtgatggtgagaactaccgtttacaccttgccaaaaagatctctataaatcttaccaacatcgtctacttattcgaagagcctctttctggactgcacccccaggatcttcctaccatagttcagctacttaaagagctcgtagcaaataacaacacagtaattgctaccgatcggtcctgttctttaatcccccatgccgatcacgcgatcttcttgggtccaggatctggacctcaaggaggatttctcatggattctgatactgaggtttgcccatctgtagacctacacgctaacgttccccaaactgaggtttgtcccaaggctccactttctataagtaaggcaaaccatacccgaggatccgatcgtacattaaaggtaaatctatcgatacaccatattcagaatttgaaagtatcggctcctctccatgctttggttgccattggaggagtttcaggatctgggaaaacctctctacttttagaaggatttaaaaaacaagctgagctcctgatagcaaaaggaactacaacattttccgaccttgtagtgatcgactctcatccaatagcttcatcgcaacgctctgatatcagcacctatttcgatattgctccttccttgagagctttttatgcttcgctaacacaagccaaagccctgaatatttcatctacgatgttcagtacaaatacaaaacaaggacaatgctcggattgccaaggactygggtaccaatggatagatcgggctttttacgctttagaaaagcgtccctgccctacctgctcaggatttcgtatccaacctcttgctcaggaagtcctttatgaaggcaagcatttcggagaacttttgcatactccgattgaaactgtagccctccgatttccctttattaaaaagatacaaaaacctctaaaagcacttcttgacataggactcggctatcttcctatcggccaaaaactctcttccttatctgtaagtgaaaaaacagcactgaaaactgcttattttctctatcaaactccagagactcccaccctatttctcattgatgagctcttttcttctctagatccaatcaaaaaacaacatcttccagaaaaacttcgctccctcataaatagcggccactcggtaatctacatagatcacgatgtgaagttgttaaaatctgcggactacctcatagagataggcccgggatctgggaaacaaggaggaaagcttcttttttcaggatctcccaaagatatctatgcaagtaaggactcgttgctgaaaaagtatatctgcaatgaagaactcgattcttaa

SEQ ID NO: 18686 - DNA, 2799 bp, Chlamydia pneumoniae
ttggagcgctatgatattgttagaattattggaaagggaggcatgggtgaagtctatcttgcctacgatcctgtatgttctcgtaaagtagctcttaaaaaaattcgtgaagatcttgcagaaaatcctcttttgaaaaggaggtttttacgagaggcaagaattgccgctgaccttattcatcctggtgttgttcctgtctatactatttacagcgagaaagatcctgtatactacacgatgccctacatagagggatatacactaaaaaccttactgaagagtgtatggcaaaaggaatccctgtctaaggaattagcagagaaaacttctgtaggggcatttctttctatctttcataagatctgctgcactatagaatatgtccattctcggggcattcttcatcgcgaccttaaacccgataacatcttattaggtctttttagtgaggctgtaatcttagattggggagcagcagttgcctgtggagaagaagaggatcttcttgatatagatgtcagcaaagaggaggtgctctcttcaagaatgacaattccaggaagaatagtagggactccagattatatggctcctgagaggctcctgggccatccagcttctaaaagtacagacatttatgctttaggagtggttctttatcagatgctcactctctcttttccttatagaagaaaaaaaggaaagaaaatagttcttgacggtcagagaattccaagtcctcaagaggtagctccttatcgagaaatccctccgtttctttccgctgtagtgatgagaatgttggctgtagatcctcaagagcgctattcttcggtaacagagcttaaggaagatatcgagagtcatctgaaagggagtcctaaatggactttaaccacagccctgccacctaaaaaatcttctagttggaagctaaacgaacctattttactttctaagtattttccaatgttggaggtctctccagcgtcatggtacagtttagcaatctctaatattgagagtttttctgagatgcgcttggagtatactctttctaaaaaaggcttgaacgaaggctttggtattttacttcccacgtcagaaaatgctttagggggagatttttaccaggggtatggcttttggctgcatattaaggagagaaccttatccgtgtctctggtgaaaaatagcctagaaatccagaggtgctctcaagatttggaatctgataaagagaccttcttgatagctttagagcagcataatcatagtttatctttgtttgtcgatggtacgacttggcttatccatatgaattatctgccaagtcgtagtgggcgagtcgctatcatagttcgcgatatggaagatatcctggaagatataggcatttttgaaagtagtggctctttgagggtcagttgtcttgctgttcctgacgcttttcttgctgagaagttatatgatcgcgctttagtgctttaccgaaggatcgcagaatctttcccaggacgtaaagaaggttatgaagcaaggttcagagcaggaattacagttttagagaaggcctctacagataataatgaacaggaatttgctctagccattgaagaattctcaaaattacatgacggggttgctgctcccttagaataccttggtaaggctttagtatatcagagactccaagagtataatgaagaaattaagagtttgctattagcattgaaacgttattcgcagcatcctgaaatctttaggcttaaagaccatgtggtttaccgactccatgagagcttttataaacgggatcgccttgctctggtgttcatgattttagtattggaaatagctccccaggcaatcactccagggcaggaagaaaaaatcctggtttggttaaaggacaaatctcgggctaccttattttgcctcctggatcccacggtcttagagctgcgctcttctaaaatggaattatttttaagttattggtctgggtttattccccatctcaatagtctatttcatagagcttgggatcaaagcgatgtgcgagctttgatcgagattttctatgttgcttgtgatcttcataaatggcagtttctctcttcttgtatcgacatatttaaagagtctcttgaggatcagaaagccacagaagagattgttgagttctctttcgaggatttaggggcatttctttttgctattcagagcatctttaacaaggaagatgcagagaagatctttgtttctaatgatcaattatcgccaatccttcttgtttatatattcgatctttttgcaaatcgtgctcttctggaatctcaaggagaggctatttttcaggctttggatctcatccgaagtaaagttcctgaaaatttttatcatgattacttgcggaatcatgaaatccgagcgcatctttggtgccgcaatgagaaggctctaagcacgatttttgaaaactatacagagaaacagctaaaggatgagcaacatgaactgttcgttctctatggatgttaccttgctcttatacaaggtgctgaggcggcaaagcagcattttgatgtatgtcgtgaagatcgcattttccctgcttcattattagctagaaattacaatcgtttaggtcttcccaaagatgctcttagctatcaagagcggcgtttgttattgcgacaaaagtttctctatttccattgtcttggtaaccacgacgagcgtgacttatgccagactatgtatcacctcttaaccgaagaatttcagctttaa

SEQ ID NO: 18687 - DNA, 2823 bp, Chlamydia pneumoniae
atgacaacagaagattttccaaaagcatataactttcaggatacagaacccgagttgtatgtgttttgggaaaagaatgggatgtttaaggctgaagcttcgagtgataagcctccatattctgtaatcatgccgcccccaaatgttactggggttttgcatatgggccatgctttggtcaatacccttcaagatgttcttgttcgttacaaacgcatgtcaggatttgaagtttgttggattccaggaactgaccatgcaggaattgctacccaggctgtagtggaaaggcatctccaagcttctgaaggcaagcgtcgtacggactatagccgagaagactttttgaagcatatttgggcatggaaagaaaagagcgaaaaagtcgttctctcccaactgcgacagctggggtgttcctgtgattgggataggaaacgctttactatggagccgcttgcgaatcgtgcggtcaaaaaagctttcaaaaccctatttgaaaatgggtatatttatcgtgggtactaccttgtaaactgggatcctgttctccaaaccgccctggcggatgatgaggtggaatacgaagagaaagatggatggctctattatattcgctatcgtatggtaggttctcaagagtctattgttgtagcaacaacaagacccgaaacttcattaggagacactgggatcgcagtgtctcctaacgacgagcgctatgcatcatggattggtgcgagcgttgaagtgccttttgtaaatcgtcagattcctatcattggagatgcttctgtagatcctactttcggaacaggagctgtaaaagtgactcctgctcatgataaggacgattatcttatggggaccaaccatcatcttcctatgattaacattctcaccccctcaggaggaatcaatgagaatggtggaccttttgctgggatggctaaagagaaagcacgcgaggagatcctcattgcactagaagaacaggggttatttgtaaggaaagagccttataagcttcgtgtcggtgtttcttatcgatctggagctgtaattgagccttatctttctaaacagtggtttgtctctgtgtcagagttccgtggagctttgcgagagtttgtagaaagtcaagatattaagattttccctaaagactttgtcaaaaattacttgtcctgggtcaaccaccttagagattggtgtattagtaggcagctgtggtggggacatcgtattcctgtttggtatcataaaaatgatgacgaacgggtcctttgttatgatggagagggcattcctgaagaagtcgctcaagatcctgattcttggtaccaggatcccgatgttctagatacctggttctcttcaggcttatggccactgacctgcttggggtggcctgatgaaaattctccagatttgaagaaattttaccccaccgctctattagttacagggcacgacatcttgtttttctgggtaactcggatggtgttactatgttcttcaatgtcaggggaaaagcctttttcagaagttttccttcatggattgatatttgggaagtcttataagcgttataacgactttggtgaatggtcctatatttctgggaaagagaagctagcttatgatatgggagaagcgcttcccgatggtgttgttgccaaatgggaaaagctctctaaatccaaagggaacgttatcgatcctttagagatgatcgctacttatggtaccgatgcggtacgcttgactttgtgttcttgtgcaaatcgcggagagcagatagatcttgattacaggctatttgaagaatacaagcactttgcaaataaggtttggaacggagctaggtttatctttggtcatatctcagatcttcagggcaaggatttgcttgcaggtattgatgaagactctttagggcttgaagatttttatattttagatggttttaaccaactgattcatcagcttgaggaggcttatgctacctatgcttttgataaagtggcaactttagcttatgaatttttccgtaatgatctctgttccacgtatattgagattattaaacccacactctttggtaagcagggaaacgaggcttcgcaatctacgaagcggaccttacttgctgttcttcttattaatgtattaggagttcttcatcctgtagctcctttcattacagaatctttatttttaagaattcaggataccttaggagcccttcctgaaggagatggggatgcatttacaggtcatgctttacgtatgctacgttctcgtgcttgtatggaagctccctatccaaaagcttttgatgttaagataccccaagatcttagagaatcttttactttagctcaaaggctcgtttatactattaggaatatccgtggggagatgcaactggatccgcgtttacatctgaaagcttttgttgtttgttctgatactaccgagattcagagctgtatccccatacttcaggcattaggagggttagaatctatacagctcctagataaagagcctgaaaagggcctctatagctttggtgttgttgatactatacgcctggggatttttgtccctgaagagcatcttcttaaagagaaagggcgtttagaaaaagaaagagttaggttagaacgagctgtggagaacttagagcgcttattaggagatgagagtttttgccaaaaggcaaacccgaatcttgtagttgcgaagcaagaagctttaaagaataatcgtatagaattacaaggcattcttgataagcttgcatcgtttgcttag

SEQ ID NO: 18688 - DNA, 627 bp, Chlamydia pneumoniae
atggcgaatcttaatgccgatggtaagcttaagcaaatctgcgatgctttgcgtttagacactctaaagcctgcagaagacgaggctgcggcgttattgcataatgctaaagaacaagcgaaaagaattattcaagaagctcaagaagaagccagaaaaatcttagagacggcagaagagagagctcatcaaaagataaaacaaggcgaagttgctctaagccaagcagggaagcgcgctttggaagccttaaaacaggctgtagaaaacaaaatatttagagagtctttagtagagtggctggagcatgtaaccaccgatcctgaggtttctacaaagttaattcaagctttagtgcaggctttggaagctcaaggggtttcaggaaatctgaccgcctatataggaaaacatgtgagtcctagagctgttaatgagctcctaggaaaggctgtaacaacaaaactacgaaagaaaagtgtagttgttggaagttttgttggtggtgttcaattaaaagttgaagaaaagaactgggttctggatcttagttcctcagctcttcttgagattttcacacgttatttgcagaaagattttcgtgaaatgatttttcaaggatcttga

SEQ ID NO: 18689 - DNA, 990 bp, Chlamydia pneumoniae
gtgcctatgtctaaccaatttgatcaattaaagaagttgagcactatcgtttgtgatagcggagacccagagctagttaaagcctcgggatctcaagacgctacaacaaacccttctttgatcttaaaagtggcccaagaacccaaatttcaagagctattaaacgaagctgtagtttggggaatccgacagaacggtgatgatcttcagactctttcttttattttagacaaaattcaggttaactttgctctagaaattatcaaaaatatccctggtagaatttctcttgaaattgacgctaggctttctttcaacgttgaagctatggtacagcgtgccgtattcctttcgcagcttttcgaagctatgggaggagataaaaagcgcctgttagtaaagattcctggaacttgggaaggtattcgagctgttgaatttttagaagcaaagggcatagcatgtaatgtcactttgatttttaatttagttcaagcgattgcagctgctaaagctaaagcaactttaatttctccttttgttggccgtatttatgattggtggatcgcggcttatggtgatgaaggttactctatagatgcagatccaggtgtcgcttcagtatcaaatatttacgcgtattacaaaaaattcggtattcctacgcaaattatggcagcatcttttcgtacaaaagagcaggtactagcattagctggttgcgatcttttaacgatatctccaaagctgctggatgagctaaagaaatctcaacacccagtaaaaaaagaattagatcctgcagaagctaaaaagttagatgtgcagccaatagaactcacagaaagcttttttcgctttttaatgaatgaggatgctatggctacagaaaaacttgctgaaggaattcggatatttgcaggagatactcaaattcttgagactgcaattacagagtttataaagcaaattgctgcagaaggtgcgtaa

SEQ ID NO: 18690 - DNA, 4194 bp, Chlamydia pneumoniae
ttggagaaaataatgttcggagaaaattctcgagacattggagttctttctaaagaaggactatttgataaattagagataggcatagcttcagatattacaattcgtgataaatggtcttgtggagaaatcaaaaagccagaaactataaattaccgtacgtttaaacctgaaaagggcggtctattttgtgaaaaaatctttggtcctactaaagattgggaatgttgctgcggaaaatataaaaaaataaaacataaaggaattgtctgcgatcgatgcggagttgaagttactctttcaaaagtccgtcgtgaacgtatggctcatatcgagttagcagttcctattgtccatatttggtttttcaaaacaactccatcacgcattggtaatgttcttggaatgacagcttcggatctggaacgtgtcatttattatgaagaatatgtagttattgacccaggtaagacagacctaactaaaaaacaacttcttaatgatgcgcaatatcgtgaagttgttgagaagtggggtaaggacgctttcgttgctaaaatgggtggcgaagctatctatgatttgcttaaatccgaagatctccaaagcttgcttaaagatcttaaagagcgtttacgcaaaacaaaatctcagcaagcgagaatgaagttagccaaacgtcttaaaatcattgagggatttgtttcttcatccaaccacccggagtggatggtattaaaaaatatcccagtagttccacctgatctccgtcctcttgttcctttagatggcggtcgttttgcgacttctgatttaaacgatctctaccgccgtgtaattaatcgtaacaatcgtcttaaagcgatcttacgtttaaaaacaccagaggttattgttcgtaatgaaaagcgtatgcttcaagaagctgttgatgctctttttgataacggtcgacatggtcatccggtcatgggagctggaaaccgaccattgaaatccttgtcagaaatgttaaagggaaaaaatggacgcttccgtcaaaatcttttaggaaaacgtgttgactactctggacgttctgtaattattgttggtcctgaattgaagtttaatcaatgcggattgcctaaggaaatggctttagagctattcgaaccctttattattaaaagactaaaagatcaaggcagcgtttataccattcgttctgctaagaaaatgattcaacgaggagccccagaagtttgggacgttctcgaagagatcattaagggacatccagtacttcttaaccgagcacctacattgcaccgtttaggaattcaagctttcgaacctgtattgatagaaggtaaagcgattcgtatacaccccctagtttgcgcagcgtttaacgctgacttcgacggagaccaaatggccgtgcacgttcctctatctgtagaggcacaactggaagctaaagttttaatgatggctccagacaacatcttccttccttcctcaggaaagcctgtggctattccttcgaaagatatgactttaggattatattatctgatggcagatcctacctattttcctgaagaacatggaggaaaaactaagatatttaaagatgaaatcgaagtattgcgtgctttaaataacggtggattcattgatgatgttttcggagatcgtcgtgatgaaacaggacgcggtatccatattcatgaaaagattaaagtgcgtattgatggacaaattattgagacaaccccaggaagggtattgttcaacagaattgttcctaaagaactcggcttccaaaattacagcatgccaagtaagcgtataagtgagcttattttacagtgctataagaaagtcggtttagaagctactgtacgtttcttagatgaccttaaagatcttggatttattcaagctacaaaagccgcaatctctatgggattgaaggatgttcgtattcctgatatcaagagtcatatcctcaaagatgcctacgataaggttgctatcgtcaaaaaacaatatgatgatgggatcattactgaaggggagcgtcattccaaaactattagtatttggactgaagtttccgaacagctttcagatgccctctatgttgaaattagcaaacaaacacgtagcaagcataaccccttgttcctgatgattgattctggagcccgaggtaataaatcccagttgaaacagttgggagcgttacgaggattaatggcgaagccaaacggagcaattattgaatctccaattacttcgaactttagagaaggattgacagttttagagtactccatctcctcacacggtgcgagaaaaggtttagccgatacagctctaaaaactgccgactccggatacttaacacgtagacttgtagacgtagcccaagacgtgatcattaccgaaaaagattgcggtacgttaaatcacattgagatttctgcaataggtcaaggttctgaagaactcttgcctcttaaagatcgtatctatggacgtactgtagctgaagatgtctatcaaccaggtgataaaagtcgactacttgctcaatcgggtgatgtactcaactccgtacaagcagaagcaattgatgatgccggtattgagacaattaagattcgttctacattaacgtgcgaaagtcctcgcggagtttgtgcaaagtgttacggcctcaatttagctaatggtagactcattggcatgggtgaagctgttggtattattgctgctcagtcgattggggaacctggaactcagttaacaatgagaacgttccacctagggggtattgctgctacgtcttcaactcctgagattattacgaatagtgatggtatcttagtctacatggatctccgtgttgttctggggcaagaaggtcacaatcttgtcttgaataagaagggagctttacatgttgtaggtgatgaaggtcgtactctcaatgagtataaaaagctgctttcaaccaagtctatagaaagcctagaggtatttcctgtagaactaggagtgaaaattcttgttgctgacggaactcctgtttctcaaggacaaagaatcgcagaagttgaactacacaatattcctatcatttgcgataagcctggctttattaaatatgaagatttggttgagggaatctctacagagaaagttgtgaacaagaacacaggacttgttgaacttattgtgaaacagcaccgaggggagttacatcctcagattgctatctatgatgatgctgacttgtcagaacttgtcggaacctatgcgattccttcaggagcgattatctctgtagaagaaggacaacgggttgatccaggtatgttgttagctagacttcctcgcggagctatcaaaacaaaagatattactggcggtttgcctcgtgttgctgaattagtagaagctcgtaaacctgaagatgctgctgacatcgccaaaattgatggtgttgttgacttcaaaggaattcaaaagaacaaacgtattcttgttgtctgtgatgaaatgacaggtatggaagaagaacatctgattccattaaccaaacatttgattgtacaacgtggagatagtgtgattaaagggcagcagcttaccgatggtttagttgttcctcatgaaatcctagaaatttgcggagttcgtgaacttcagaagtacctggtaaatgaggtgcaggaagtttaccgtctgcagggcgttgacattaacgataagcatattgaaattattgttcgtcagatgttacaaaaagtacgaattactgacccaggtgatacgactctgctctttggcgaagacgtgaataagaaagagttttatgaagaaaatcgtcgtaccgaagaagacggtggtaagccagctcaagctgttcccgtcttattgggaattacgaaagcttctttgggtacggaatcgtttatatcagcagcttctttccaagacacaactcgagtcttaacagatgcagcttgttgtagcaaaaccgactaccttcttggatttaaggaaaatgtgatcatgggtcatatgattcctggtggtacaggctttgaaacgcataagcgtattaagcagtatctagaaaaagaacaagaagatctcgtttttgattttgttagtgaaacagagtgtgtttgttaa

SEQ ID NO: 18691 - DNA, 3789 bp, Chlamydia pneumoniae
ttgtcgcatcaaaatagcaggagaactcgcatgttgaagtgccctgaacgggtcagtgttaaaaaaaaggaagatatcccagaccttccaaatcttatcgaaatccaaattaagtcttataagcagtttcttcaaattggaaaattagcagaagaaagagaaaatatcggtttagaagaggttttcagggaaatttttcccattaaatcctataacgaagctaccgttcttgagtacctttcatataatttgggtgtgccaaaatattctccagaagaatgtatccgtagaggaattacctatagcgtcactttgaaagtccgttttcgtttaaccgatgaaacgggaatcaaagaagaagaagtctatatgggaacgatccctctaatgactgataaagggacatttatcattaatggagctgaaagagtcgttgtttcccaagttcatcgttctccaggaattaactttgaacaagaaaaacattccaaaggtaatattttattctccttcagaatcattccttatcgtggaagttggctcgaagctattttcgatattaatgacttaatttatatccatattgatagaaaaaaacgtagaagaaaaattctagcaatcacctttatccgagctcttggatactcttcagatgcagatatcatcgaagaattcttcacaataggagaaagttctcttagaagtgagaaagactttgctcttcttgttggaaggattttagcagacaatattattgatgaagcctcctctctagtttatggaaaagccggagaaaagttaagtacagcaatgttaaaacggatgctcgatgctggaatcgcttctgttaagattgctgtagatgctgatgaaaatcatcctattatcaaaatgctcgctaaggatcctacagattcatacgaagccgctttaaaagatttttatcgtagactacgtccaggagaacctgcaactctagctaatgcacgttctactatcatgaggctcttctttgaccccaaacgttataatctaggacgtgtagggcgttataagctcaatcgcaaactaggcttctctatagatgatgaagctctgtctcaagttactttgagaaaagaagatgtgatcggagccttaaagtatctgattcgtttgaaaatgggagatgaaaaagcttgtgtagacgatattgatcatcttgctaatcgacgtgtccgctctgtcggagaactcattcaaaatcaatgtcgttcaggacttgctagaatggagaaaattgttagagagagaatgaatttattcgatttctcctcagatacgttgactccaggaaaagttgtctctgctaaaggtctcgctagcgtgttaaaagatttctttggccgctcccagctttcgcagtttatggaccaaaccaaccctgtagctgagttaactcacaaacgacgtctttctgcattaggtccaggaggactaaatagagaacgcgcaggatttgaagttcgtgacgtgcacgcaagtcattatggacgtatttgtcctattgaaactcctgaaggtccaaatattggtctgatcacctctctttcctcttttgctaaaattaacgaatttggattcattgaaactccttatagaattgtaagagatggaatcgtaacagatgaaatcgaatacatgacagccgatgttgaagaagaatgtgtgattgcacaggcttcagcaagcctagatgagtacaatatgtttacggaacccgtctgttgggtacgttatgctggagaagctttcgaagcagatacaagcaccgtaacccatatggatgtttctccgaaacagctcgtttctattgttacaggattgattcctttcttagagcacgacgatgcgaaccgcgccttgatgggctccaatatgcaacgtcaagcggttcccttacttaaaaccgaagctcctgttgttggcactggattagaatgtcgtgctgctaaagattctggagctattgttgttgcagaagaagatggtgttgttgattttgttgatggttacaaagtagttgttgctgcaaaacataatcctacaattaaacgtacctatcatctgaaaaagttccttagatctaattcaggaacttgcattaaccaacagcccttgtgtgcagtcggtgatgtcataactaagggtgatgtgattgctgatggacccgcaactgatcgtggagaacttgctttaggtaaaaatgtactcgttgcctttatgccttggtatggatacaactttgaggatgcgatcattatctctgaaaaattgatcagagaagatgcctatacctctatttatattgaggaattcgaactaacagcccgagatacaaaattaggaaaagaagagatcactcgtgacattcctaacgtatctgatgaagtattggccaatctcggtgaggatgggatcattcgtatcggtgctgaggttaaacctggggatattcttgttggtaagatcacaccaaaatcagaaacagaattagctccagaagagcgtctgctccgtgctatttttggtgaaaaagctgctgacgttaaagatgcatctttaacagtgcctccaggaactgaaggcgtcgttatggatgttaaagtcttcagtagaaaggatagattgtcaaagagtgatgacgaacttgtagaagaagctgttcatcttaaagatttgcaaaaaggatataaaaaccaagttgcaactttaaaaacagaatatcgtgagaaattaggagctctcttattaaatgagaaagcacctgcagccattattcaccgtcgtacagcagaaatcgttgttcatgaaggcctactctttgatcaagagacaatagaacggatagaacaagaagatttagtggatcttttaatgcctaactgtgaaatgtatgaagtgttgaaaggacttctatcagattacgaaacggcattacaacggctagaaatcaattataagactgaagttgagcatattcgtgagggagatgcagatttagatcatggtgtcattcgccaagttaaagtctacgttgcctctaagagaaaacttcaagttggagataaaatggctggacgacacggaaataaaggtgttgtttccaaaatcgttcccgaagcggatatgccatatctctctaacggagaaactgtacaaatgatcctgaaccccctcggggtgccttcaaggatgaaccttggacaggtattagaaacacacctaggttatgcagcaaaaactgcaggcatttacgtgaaaacccctgtttttgaaggattccctgaacaacgtatctgggatatgatgatagaacagggattaccagaagatgggaagtccttcttatatgatgggaagacaggtgaacgctttgataacaaggtagtgataggctatatctatatgctaaagctcagtcacttgatcgctgataagattcacgcaagatctatagggccatattctttagtcacgcaacaacctctcggtggtaaagctcagatgggaggacaaagattcggggaaatggaagtttgggctctagaagcatatggggttgctcatatgctccaagaaattctaaccgtgaaatctgatgatgtctcaggaagaacaaggatttacgaatctatcgttaagggggaaaacctcttgcgatcaggaacgcctgagtcgttcaatgtgctaattaaagagatgcagggtctaggacttgatgttcgtcctatggtcgtagacgcttaa

SEQ ID NO: 18692 - DNA, 390 bp, Chlamydia pneumoniae
gtgacaacagaaagtttggaaactttagtagagaagttaagtaatttaactgtactagaactctctcaattgaaaaaattattagaagagaagtgggatgttactgcttctgctcccgtagttgctgttgctgctggtggtggcggagaagctcctgttgctgccgaacctacagaatttgcagtaaccctcgaagatgttcctgcagataaaaaaatcggcgtcttaaaagtcgttagggaagtaactggattagctttaaaagaagctaaagaaatgacagaaggtttacctaaaactgttaaagaaaaaacttctaaaagtgatgctgaagatactgttaagaagttacaagatgctggcgcaaaagcctcatttaagggactgtaa

SEQ ID NO: 18693 - DNA, 513 bp, Chlamydia pneumoniae
atgaaacaagaaaaaacattacttcttcaagaggtagaagacaaaatttccgcagcacagggattcattttattaagataccttagatttaccgccgcgtattctagagaattcagaaactcactttctggagtttctgcagaatttgaagttttaaagaagagaatcttctttaaagctatagaagctgcaggtttagaggtagattgtagtgatacagatgggcatctcggtgtagtcttttcctgtggagatcctgtttctgccgcaaagcaggtactggactttaataaacaacataaagactctttagttttcctcgctggaaggatggacaatgcgtctctgtctggtgcagaggtagaagctgtcgccaaattgccatctcttaaagaacttagacagcaggttgttggtttattcgctgctccaatgtcccaagttgtaggaattatgaattctgtcctttctggagtgatctcctgtgtggatcaaaaggcaggaaagaactaa

SEQ ID NO: 18694 - DNA, 699 bp, Chlamydia pneumoniae
atgacaaaacatggaaaacgtatacgaggcatcttaaagaactatgatttctcaaaatcatattctttgcgggaggctatagatattttaaaacaatgtcctccagtacgcttcgatcaaactgtagatgtatctatcaagttagggatagatcctaaaaagagcgaccaacaaattcgtggagccgtttttttacctaatggtacaggaaaaactttaagaattttggtttttgcttcagggaacaaagtcaaagaagctgttgaagcgggcgcagactttatgggaagcgacgatcttgttgaaaaaattaaatccgggtggctggaattcgatgttgctgtcgctaccccagatatgatgcgtgaagtaggaaaattaggaaaagtcttaggacctagaaatctaatgcctacacctaaaacaggaacggtaaccacagacgttgctaaagcaatctccgaattgcgtaaaggaaaaattgaatttaaagcagaccgcgcaggcgtatgtaatgtaggcgtaggtaagttgtcttttgaaagcagtcaaatcaaagaaaatattgaagctctaagttctgctttaattaaggccaaacctcctgcagctaaaggtcaatatttagtctcattcactatttcttccactatggggcctggtatttctatagatactagagaattaatggcatcttaa

SEQ ID NO: 18695 - DNA, 426 bp, Chlamydia pneumoniae
atgtcggtaaaaaaggtaatcaaaataattaagttgcaaatccctgggggtaaagcaaatcctgcgccacccataggaccagctttaggtgctgctggagtcaatattatgggcttctgtaaggagtttaatgctgcaactcaagataagcctggagacttacttccagtagtcatcactgtttatgctgataaaacttttacttttataaccaaacagcctccagtctcctctttaataaagaaaactttgaatctggaatcaggatctaaaattcctaatcgtaataaagtaggaaaacttactcaggctcaagttgaagcaattgctgaacaaaaaatgaaagatatggatattgtccttctagaatctgcgaaacgtatggtggaaggaactgcccgtagtatgggtatagacgtagaataa

SEQ ID NO: 18696 - DNA, 549 bp, Chlamydia pneumoniae
atgtataaatggtatgtcgttcaagtttttacagctcaagaaaagaaagtaaaaaaggctttagaagattttaaagagtcttcaggaatgactgattttatacaggaaattatcttgcctattgaaaatgtcatggaagtgaaaaaaggagaacataaggtcgttgaaaaatacatctggcctggatacctcttagttaaaatgcatctgactgacgagtcttggctctatgttaaaagtacagcaggtatagtcgagtttcttggaggcggagtccctgtagctctttctgaagatgaagtaagaagtatcttaacagatatagaagagaagaaatcgggagtggtgcaaaaacatcagttcgaggttggttctagagtgaaaattaatgacggagtctttgtcaattttatcggcacggtttccgaagttttccatgataaaggacgcctgagtgttatggtttctatctttggaagagaaactagggtagatgatttagaattttggcaagtggaagaggtagccccagggcaagaaagtgagtag

SEQ ID NO: 18697 - DNA, 252 bp, Chlamydia pneumoniae
atgaaacaacaacacaatcgtaaggctttatctcgcaagattggcacagtgaaaaaacaagccaaatttgcaggaagctttttagatgagattaaaaaaattgaatgggtaagcaagcacgatcttaagaaatacataaaagtagttcttatcagtatttttggttttggatttgctatttatttcgtagatcttgtgttgcgtaagtcaatcacatgtttagatggtataacaacctttttgttcggttaa

SEQ ID NO: 18698 - DNA, 1185 bp, Chlamydia pneumoniae
atgtcaaaagaaacttttcaacgtaataagccccatatcaatattgggacgatcgggcacgttgaccatggtaaaactacgctaacagcggcaattacacgcgcgctatcaggggatggattggcgtctttccgtgactatagttcaattgacaatactccagaagaaaaggctcgtggaattactatcaacgcttctcacgttgaatacgaaaccccaaatcgtcactacgctcacgtagactgccctggtcacgctgactatgttaaaaatatgattacaggcgccgctcaaatggacggagctatcctagtcgtttcagctacagacggagctatgccacaaactaaagaacatatcttgctagctcgccaggttggagttccttatatcgttgttttcttgaataaagtagatatgatctctcaagaagatgctgaacttattgaccttgttgagatggaacttagtgagcttcttgaagaaaaaggctacaaaggatgccctattatccgtggttctgctttgaaagctcttgaaggtgatgcaaattatatcgaaaaagttcgagaacttatgcaagctgtggatgacaacatccctacaccagaaagagaaattgataagcctttcttaatgcctatcgaagacgtattctcaatctctggtcgtggtactgtggttacaggaagaatcgagcgtggaatcgttaaagtttctgataaagttcagctcgtgggattaggagagactaaagaaacaatcgttactggagtcgaaatgttcaggaaagaacttcctgaaggtcgtgcaggagaaaacgttggtttactcctcagaggtattggaaagaacgatgttgaaagaggtatggtggtttgtcagcctaacagcgtgaagcctcatacgaaatttaagtcagctgtttacgttcttcagaaagaagaaggcggacgtcataagcctttcttcagcggatacagacctcagttcttcttccgtactacagacgtgacaggagtcgtaactcttcctgaaggaactgaaatggtaatgcctggagataacgttgagcttgatgttgagctcattggaacagttgctcttgaagaaggaatgagatttgcaattcgtgaaggtggtcgtactatcggcgctggaacgatttcaaagatcaatgcttaa

SEQ ID NO: 18699 - DNA, 222 bp, Chlamydia pneumoniae
atggcgaaaaaagaagatactcttgtactcgaaggtaaggtagaagagctccttccaggaatgcattttcgtgtaatactagaaaacggtatgccagttaccgcccatttgtgcggaaaaatgcgtatgagtaatattcgattgcttgttggagaccgcgttactgtcgagatgtccgcctatgacttaacaaaagctagggttgtctacagacatcgttaa

SEQ ID NO: 18700 - DNA, 477 bp, Chlamydia pneumoniae
atgccatcctattgtcaaaatcaacaagatttttctttattctctcttttgtctcctagacttgtaatgtttttaggcaaacactcccgagatgaaatcctccaagatcttacagatcttgtggatgctgcaggcctacttgaagacaaacaagccttttttgatgctcttgtccgtcgtgaaaacatcatgtccacaggaatcggaatgggcgtggctattcctcacggaaaactcgaaagctgctctaatttttttattgctataggcatccatacgcaaggcattttatgggacgctattgacggagccctcgtacgcctcgtcttcttgatcggaggtccagaaaatgctcaagccgaatatctcaagttattatctactttgactttatctttgagagaagagtctcgtcgtcaacagttgttacaggtgaatacgattgaagaagtcatgaatgtatttgtggggatgtaa

SEQ ID NO: 18701 - DNA, 927 bp, Chlamydia pneumoniae
gtgcgtctattttcttacgacaaacccaagattaaagtgcaaaaaatcaaggcagatggttttagtggttggctcaagtgtaatcattgtcacgagatgattcacgcaaatgagctaggacaaaattataattgttgtcctaagtgctcctatcattaccgtattactgcgatcgaaagagtcaagctgcttgcagacaaagattcttggcgtcctctttatacggatctgaaatcccaagatcccttggaatttatagataccgatacctacgcaaatcgcctagaaaaagctcgaaagaatactacagaaagcgaaggcgtcattgtaggtatatgtactataggcctccaccccgtagccctcgccgttatggatttcaattttatggcaggatctatgggtgctgttgtaggggagaaactgaccagacttatagaggaagccattgaaaccaggctccctgtaattattgtcagcgcttctggaggcgcacgtatgcaggaatctgtattttctttaatgcagatggtgaagacctcagcagctcttgctaagcttcatgaagcaggtctaccctatatttcagtcctcaccaacccaacttcaggtggagtgacagcctctttcgctgccctcggtgatattataatagcagaacctaaagcactgatttgtttcgcaggacctcgagtcgtcgctcaggtgataggagaagatctccccgaaggggctcaaaaatctgaattcctactagaacatggcatgattgataaaatcgttgagcgtaaagaattgaaaaccacccttcagactttacttgattactttttagcccaagaatacactggcgggaaaagtaaagctcctagagatctttcgaaaaggcttaaagagatttttttgttgacagatgacagtgaataa

SEQ ID NO: 18702 - DNA, 1797 bp, Chlamydia pneumoniae
atgaaagaagtagaacaacgtatccggtcattatacgatgcagtaacagctgaaaatatttgtagatggttgtccaatgattgtacccaacaagatgcaaagactatcctaggatggttagatacagatcctgcacagcttgaagatctattcggagcgactcttacctttggtaccggaggactccgtagtcttatgggtatcggaacaaataggatcaacctgtttactatacgtcgaacgacgcaagggctggttcaggtgctccgcgctcatcttccccatcccggagatcctatgcgtgtagttgtcggttgtgatacccgccataactctatagaatttgctcaagaaactgcaaaagtcctcgcaggtaatggctgcgaagttttcttgtttcagtatcccgaacctttggctttagtctcctttacggtgagatacgaaagggccatcggcggagtgatgatcaccgcctctcataatcctcccaattacaatgggtataaagtttatatggcttcgggaggccaagttctccctcccttagatcaagagattgttgccgcctgtagtgcagtgaacgaaattttatcagtgccctcgatagatcatcccaatattcacctcattggaaaagaatacgaagccctttacagagacactttgaagcaactgcaactctatcccgaagcaaaccggatttcaggaaggtctttatctatttcctattcgccattgcatggaacaggaatttctctcgttcctcatgttctcaaagactggggatttttatccgtacatcttgtggaaaaacaggccataggtgacggcgatttcccaaccgtgcagctgccaaatcctgaggatccagaggctctgactctgggcactgagcaaatgctcgctaatgacgatgatctttttatagctaccgacccagatgccgatcgcgtgggcgtggtttgtctagaagacggccaaccctaccgatttaacggaaatcaaatggcgagccttttagcagaccacatcttaggagcttggagcaaaacaagacacttaggagaacatgataaattggtcaagagcttggtgactacagaaatgctctctgctatcgcaaagcactatcatgtggatcttattaatgtcggaacaggatttaaatacatcggagagaaaattgaatcctggcgcaattccacaaacaaattcgtatttggagccgaggaatcttacggttgtctctacggcactcacgtagaagataaagacgctattattgcgtcagcattgattgcagaagccgcactacaacaaaaattacaaggaaaaactctatgcgacgcactcctttctctttacgaaacatacggatactttgctaacaaaacggagtctgtggttttttccgcaaaaactgacgaacaagaaataagaaaaaaactttcacaccttgaggaaatcagttctgcgaattttttctcagggaaataccaagtagagaaatttgaaaactataagcaagggataggtttcaatcttctatcgaaggattcctacgccctcaccctgcctaaaacatctatgctctgttattattttagtgggggaggtcgggtaatcatacgaccctcaggaacagaacctaaaatcaagttctacttcgaaatgtcaactcattatccagagcgcgttaccgataaagaaatacaaaaacaacgtgaagcagagagttttcaacatttagacgattttatttttgattttaaagagaaattttccaatttgtga

SEQ ID NO: 18703 - DNA, 1362 bp, Chlamydia pneumoniae
atggcaacaaaaaccaaaacacaatggacgtgtaatcaatgtggagctactgctcctaaatggttagggcaatgtccaggctgccacaactggaactctttggttgaagaatatgtcccccaggctcgatctgggacttcgtcgcgatcttctacgagtgcgattgcattaagctctatcgaattagagaatgaatctcggatatttattgatcatgcggggtgggatcgcatccttggaggaggggttgttcgtggaagcctcactcttcttggtggggatcccggcattggaaagtcgacactccttcttcaaactgcggagagattggcatcgcaaaagtataaagttctttatgtttgtggtgaagaatctgtaacgcagacgtctttgagagcgaagcgtctcaatatctcatcacctttgatttatttatttcctgaaacaaacttggacaatatcaagcagcaaatagcgactttggaacctgatattttaattattgattccattcagattatatttaaccccacgctaaactctgcaccaggatcggtagctcaggtccgagaagttacttatgaactaatgcagattgctaaaagtgcgcagatcacgacatttattatcggccacgtgacaaaatctggagagatcgcaggtcctagggtattggaacatcttgtagatactgtactttactttgaggggaattcccatgcgaattaccgtatgattcgctctgtgaaaaatcgctttggccctacaaatgaactattgattctctcgatgcatgcagatggtctcaaagaggttagcaacccttcaggacttttccttcaggaaaagacggggccaacgacagggtctatgatcattcctattatagaaggctctggggctcttcttatcgagctgcaggctttggtctcttcgtctccctttgctaatccagtaaggaagactgcgggattcgatccgaatcgcttttctttacttttagctgtattagaaaaaagggctcaagtcaaactatttaccatggatgtcttcctatccattacggggggtttaaagattatagagcctgctgcggacttgggggctctacttgccgttgcttcctcgctatacaaccgcctgttacctaacaattccattgtaattggagaggtaggtcttggaggagaaatccgtcatgtggctcatttagagagacgcattaaagagggaaaactcatgggatttgaaggtgcaattcttcctgagggtcaaatttcatctcttcccaaggaaattcgagaaaactttcgtttacaaggagtgaaaacaataaaagatgctatccgtctgttactctga

SEQ ID NO: 18704 - DNA, 705 bp, Chlamydia pneumoniae
atgctatccgtctgttactctgacccctgtttaagtgatttctgtcagggcaagcgcccccttcgtattgcttctagaaattcaaatttagcgaaagctcaagtacatgagtgtatttctttgctgcgctcgtggtatcccaaactttggttccagttaagcactacagagactactggggatcgtgagaagaaaatccccttacatcttgtagaaaactcttattttttcactgatggcgtcgatgccttagtccataaaggagtctgcgatctggcgatacactctgctaaggatcttcctgagactccctctcttcctgtagttgccataacacgatgtctacatcctgcagacctgttagtgtatgctgaccactatgttcatgagcccctacccttgagtccccggctagggagttcttctctacgtcgaagtgcagtactaaaacaactgtttcctcaaggacagatcttggatattcgaggcactattgaagagaggctggatcagctccaccgtggtcattatgatgctattgttcttgcgaaagctgcgagtttaagacttcacctgcatcatgcttatagtatagaacttcctcctccataccatgccctacaaggatccttagcaattacagccaaggatcacgcaggtaaatggaaacagttatttacccctatacactgccactcctcataa

SEQ ID NO: 18705 - DNA, 1350 bp, Chlamydia pneumoniae
gtgcttttactgatttcaggagctctctttttgacgttggggataccaggactcactgcaggggtctcttttggattaggtataggtctctctgcgttaggaggagtgcttgttgtctcaggactactatgccttctagtaaaacgagaggtttcgaaagtatgtcccgaggagattccggcagtacaaccagaagagactcctgaaggggttcctgtgactccatttgagaagccagctctagatgaagcccagaaggagcagaagactcagaaaattttagatcagctgcctcaagaattggatcagttagataggtatattcaggaagtgttcgcatgtttaggaccgctgaaagatcttaagtacgaagatcaaggttttttacaagacgtcaaggaggagtttcaagtttttgactttgttcaaaaagatatgattgcggagtttgtagagctacagcagattctatgtcaagaagggaggttgctagagttcgtaatcaatcagacacgatatataggaagagatctttttaaaagagaggatagtttatataaattatgggaatggcttgggtatttaccttctggggatgttcgaggggagcggttaaagaaatctgctcgtgaggttgtggatcgctttatgagaacgacttgtaacatacggaagatagccatgacttttgataggcatgtttatagtgtggcgaagacggcctttgaaaaggcatttggagccttggagacgtgtgtgtatgagagtatgagagagagttatagagaggcattttgtgagtatgagaaggcgaagctgcttggggatgaggagaagagtgcacatgccgagcaaaggtttcaggatataaagaaccgttgggaggatgtaaaggatgcattcttttgggtaaaagaagatgggaagattgaaattgatgatgcaattggaaacagttgtaaatggagtgagcgttatgaagagcacaggattactcgagcaagatggtataaggtcgcggagcatcagttgtttaatgcgactatgagagtgaaagattcgttacgagagcataatgaagcaagagtcgcttttgagaaggagagatctaaggagaatcagaggcaagtccaaaaaaagaaagaaaagaggttgcgagatttaaaggaattgcatgatcaggagcttccgagagcacaggagaggttgagagagctgcaagctttgtatcctgaaattgcagtctctgttgtagaggccaggagagaggtagcctctgatttagagaaagctcatgagagtattgacaagcactatcaaagctgtgttcgagagcaagagctctactga

SEQ ID NO: 18706 - DNA, 1329 bp, Chlamydia pneumoniae
atgactctacaaccctaccaagcatcctctagaaagtaccgtccacaaatctttcgagaaattctaggtcagagctctgttgtcgctgtattaaaaaatgccttggtcttcaaccgagccgcccacgcctatctattttctggaattcgtggtacagggaaaaccacactagctcgcattttagcaaaagctctgaactgcgtgcatcttagcgaggatggcgagccctgcaaccagtgtttttcttgtaaagagattgcttcaggatcctctttagacgttttagaaattgacggagcctcccaccgtggtatcgaagatatccgtcaaattaatgaaactgtattattcactcctgtaaaagcaaagtttaaaatttatatcatagatgaagttcatatgctcactaaggaagccttcaatgctttattgaagactttagaagagcctccacaacatgtaaaatttttctttgcaactacagaaatccataaaattcccggaactattttaagtcgttgtcaaaaaatgcatcttcaaaggattcctgaaaaaacgatcctggagaagctatcgcttatggctcaagatgaccatattgaggcgtcgcaagaagcattggcgccgatcgcccgtgcagcacaaggaagcttgcgtgatgcagaatctctttatgactacgtaatatctttatttcctaaatctctctctcccgacacggttgcccaagctttaggctttgcttcccaagattctctccggactttagacaatgcgattcttcaaagggactatgcgacagccttagggatcgtaacggacttcttaaattctggggtagcacctgtcacatttctccatgaccttacattattttatcgtaatcttcttcttacgaattctacaacaagcaagttcagctctcagtataagacggagcagcttctagaaatcatagatttccttggagaatctgctaagcacctacaaaataccatcttcgaacagacatttttagaaaccgtcatcattcatatcattcgcatttatcaaaggcctgttttatcagagttgatctcttctattaagagtcggcagtttgaagggcttcgcaatattaaggagcccaccttgacgcagcaagtatcagctcctcaacctcagcccacctacaaagaacagagttttttagagaaaaaaaatcaacctgctgcggaaggtaaaattatatctgtagaagttaaaagctcagcttcaataaaatctgcagctgtagacacattattacagtttgctgttgtagaattttcaggaattttaagacaataa

SEQ ID NO: 18707 - DNA, 291 bp, Chlamydia pneumoniae
atgggcagcggatacgctaagaaaaaaaaagaagctaaaattatggaacagcaattcctagaaatggaggcctcactattagaaaagcgttacgaagggcaagctggcaacggtcttgtctctgttgtcatcaacggaaagtgtgacttaatttcagtaaaagtacaacctacgtgcttagaccctgaagatccagaagtcattgaagacttgttccgtgctgcattcaaacttgcaaaagagcagatggatcaagaaatgtctcttatgcgttccacaatgcctttctag

SEQ ID NO: 18708 - DNA, 1716 bp, Chlamydia pneumoniae
atggatacacagtcctctataggtaacgaagaatggcgtattgcaggaacctctgtagtttctgggatggccttaggtaaagtattttttttgggaacatcccccttgcatgttcgtgagctgactctacctcaagaagaagtcgaacatgaaatacatcgttattataaagctttgaatcgctcgaagtctgatatcgtagctttagaacaggaagttacgggacagcaaggccttcaagaggtttcctctatcctacaagcacacttggagattatgaaagaccctctccttacggaggaggtggtcaatactatccgtaaggatcgtaaaaatgcagaatatgtcttttcttcagtcatgggtaaaatagaagagtcgttaacagcagtccgcgggatgccttctgttgtagatcgtgttcaagatatccatgatatctccaatagagttatcggccatctgtgttgccaacataagagttctttaggagaatctgatcagaatttgatcatattctctgaggaattgaccccctcagaagtcgccagtgctaactctgcctatatccgagggtttgtctcattagtgggagcagccacatcacatacagctatcgtctcgcgagcaaagagcattccctatcttgctaatatctccgaggagctttggaacatcgcaaagcgatataatggcaagttagtcttaatcgacggttatcgtggagagctaatctttaatcctaaaccagcgactctacaaagctgctataaaaaagagctttccgtggttgcccatacctctcagagattagtaagaaagtccctacacccgattgtttcttcgcatgcaggcagtgataaggacgtagaagatctattagagaacttccctcaaacctccataggcctctttcgttctgagtttttagctgtaattttaggacgcctacctacactaagagagcaagtagatctttacgagaagctcgcacgttttcctggagattcgccctcagtactgcgcctctttgattttggtgaagacaaaccttgtcctggaataaaaaataagaaagaacgttctatacgatggttgctagactatagtgtgattcttgaggatcagctccaagcaattgctaaagcctctttgcaaggctccataaaggttctcattccaggagtgtctgacgtttctgagattatagaagtcaaaaagaaatgggagaccatccagacgaggttccctaaaggccataaggtttcttgggggactatgatagaatttccttctgcagtttggatgattgaagagatccttcctgaatgtgattttctctctatagggacgaatgaccttgtccaatatactttgggaatttccagggaatccgctcttcctaaacatctaaatgtaactttgcccccagcagtgatccgcatgattcaccatgtacttcaagctgcgaagcaaaatcaggttcctgttagcatttgtggagaggccgcagggcagctcagtctgactcctttatttataggcctaggagttcaagagctctcagtagctatgcctgtaatcaatagacttcgcaatcatatcgccctgctagagttgaactcctgccttgaaattacagaagcccttttacaagctaaaacatgctctgaagttgaagaacttttaaatagaaacaacaaaatcacatcataa

SEQ ID NO: 18709 - DNA, 327 bp, Chlamydia pneumoniae
atgaatgagcctactcgcacttatctagaaagtgagaaagatacacaagatcagatcgaagagctccaggcaacttgtatagttaagaatgcagcaggaatccatgtgcgtcctgcaggtgttattgttcgactctttgatggagagccttgtgatgtgcatttcacctacgcaggtaaaacgataaatgcaaagagtatcatgagtattcttatgttgggagctccacaaggaggagagattcttgtgactattagaagcaaagaagctcatcgtatcttacaaaagatacaagatgcgtttagttccggttttggagaactataa

SEQ ID NO: 18710 - DNA, 2037 bp, Chlamydia pneumoniae
atgggagtagtacaaaatcaagttatttcttctataagagatgttttaaagctagtctgggaattgcggttcgcagagcataagatgcttctcctctctaggcagagcggctcgggcggcacatttcagttgtcttgtgcaggtcatgagcttgccggcgttcttgctggtaaaagtctcattcctggtaaagactggtccttcccttattatagagatcaagggttccctataggcttgggttgtgatctctctgagatctttgcttcgtttctagctcgtacaactccaaatcattcctctgcgaggatgatgccttatcactattctcataaaaaattgcgtatttgctgtcagtccagtgttgtaggaacacagtttttacaagccgcaggtcgtgcttgggctgtcaagcactcgtcagctgatgaagttgtctatgtttctggaggcgatggagctacatctcagggtgaattccatgaaatgttgaactttgtagcactacaccaactgcctttaatcactgtaatccaaaataatcattgggcaatttctgttccttttgaagaccaatgtggagccgaccttgccagcttgggtcgttgccatcaaggattagctgtctatgaggtagatggaggcaactatacttctcttacagaaactttttctcatgccgtagatcaagcgcgtcaacattcggtgcctgcattgattttaatcgatgtggttcgcttgagctctcatagcaattccgataatcaggaaaaataccgctccgctttagacctgaaactatccatggataaggatcccttaatccttctagagaaagaggctatcaatgtttttggtctgtctccctttgaaatcgaggagatcaaggctgaagctcaagaagaagttcgaaaatcttgtgagattgctgaagctcttccttttccctctaagggatctacaagccatgaagtcttctctccttataccgagactctcattgattatgagaattctgaaagcgctcagaatttgcgtaactctgaacctaaagtgatgcgtgatgctatctccgaagcccttgtagaagagatgactcgagattctggagtcattgtctttggtgaggatgtcgctggagataaaggaggagtcttcggtgtcaccaggaatttgacagaaaaattcggaccacaacggtgtttcaattctcccttagctgaagcaaccattataggaaccgccataggcatggccttagacgggattcataagcctgtcgttgagattcagttcgcagattatatttggccggggatcaatcagctattttctgaggcctctagcatctactatcgttcagctggcgaatgggaagttcctctggtaatacgagccccttcaggaggctatatccagggaggaccgtaccattcgcaaagtatagaagggttcctagcacactgtcctggaattaaagttgcctatccttctaatgctgctgatgctaaagctttgctaaaggcagcgattcgagacccgaatccagtagtgtttttggagcataaggccctctatcaaaggcgtatttttagtgcctgcccagttttttctcatgactatgttctgcctttcggcaaggccgctattgttcatcccgggaaagatctcacgatagtttcttggggaatgcctctggtattgagtttagaggttgctcaggaattagcctctcgggggatttccatagaagttatagatttgcgtactatggtgccttgtgacttcgctacggttctaaaatccttagagaaaaccggaaggttgttggtgattcacgaggcttcagagttttgtggctttggcagtgagcttgtcgctactatgtcggaacaaggatacgcttatttagatgctcctatccgtcgtcttggtgggcttcatgctcccgttccctactctaaggttcttgaaaacgaagtgcttcctcataaggagtctattttacaagccgcgaaaagtctcgcagaattctag

SEQ ID NO: 18711 - DNA, 177 bp, Chlamydia pneumoniae
atgcccagtgttaaagttcgagttggagagcctgtagatcgtgctctgcgcatcttaaaaaagaaaatagataaagaagggattttaaaagctgctaaatcccatcgcttttatgacaagccttctgtcaagaaacgagctaaatctaaggctgcggctaagtatcgtagtcgttaa

SEQ ID NO: 18712 - DNA, 2460 bp, Chlamydia pneumoniae
gtggactctacaaccaatagcgactcccccatcttagatccaaatccagaagatgttgaaaagcttttagatgaatctgaagaggaatccgaagatcagtctacggagcgtttgctgccttctgagttatttatcctgccattaaataaacgaccttttttccccggaatggcggctcccattcttattgagtcgggtccttattatgaagtattaaaggttttagcgaagtcgtctcaaaaatatattggtcttgtcttaaccaaaaaagagaacgccgatattttaaaagtgagcttcaaccagctgcataaaactggagttgccgcaagaatcctccgtatcatgccaatcgagggtggcagtgctcaagttcttttaagcattgaagagcgtattcggattatagaacccattaaagacaaatatcttaaagctcgagtttcctatcatgcggacaataaagagcttacagaagagctaaaagcgtactctattagtattgtctctgtcatcaaagaccttttaaaactaaatcctctctttaaagaagaactacaaatttttcttggtcattcggattttactgaaccaggcaagcttgcggatttctctgttgctttaacaacagcaactcgggaagagctccaagaggtcttagagaccaccaacatgcatgatcgcattgataaggcactgatcttactaaaaaaggaattagacttaagccgcctccagagcagcattaatcaaaaaattgaagctacgattacaaaaagccaaaaggaattcttcttaaaagagcagttaaaaacgattaaaaaagaactggggttagagaaagaagaccgcgctattgatatagagaagttttcggaaaggctaagaaaacgccatgttcctgattatgctatggaagtgattcaagatgaaattgaaaaacttcagactttagaaacttcttcggcggaatataccgtatgccgcaattacctggattggctgacaatcattccttggggcatacaaagtaaagaataccatgacttaaagaaagcagaaatcgtcctgaacaaggatcactatggccttgatgagattaaacaacgcattctcgagttaatcagtgtaggtaagctttccaaaggattaaaaggaagtatcatctgtcttgtaggccctccaggagttgggaaaacaagcatagggcgcagcattgctaaagtcctgcatagaaagttcttccgtttctcagtaggaggcatgcgtgatgaggccgagatcaaggggcatcgccgcacctatattggggcaatgccaggaaaaatggtccaggcgctcaagcaaagccaagctatgaatcctgtgattatgattgatgaggtagataaaattggtgcgagttatcatggagatcctgcctctgccttattagaggttttagatcctgagcaaaacaaagattttcttgatcattatttagacgtacgtgttgatctatccaatgtactattcattttaactgccaatgttctagataccattccggatcctcttttagatcgcatggagattctccgactttctggctacattttagaagagaaacttcaaattgctaaaaagtatctagttcccaaagctcgcaaagaaatcggtttaacagcaagcgaagtgaatttccaacctgaagctttaaagtacatgatcaataactatgcacgagaagctggggtacgtactcttaatgggaatatcaaaaaagtattgaggaaagttgctttaaagattgttcaaaatcaagaaaaacccaaatctaagaagattacttttaaaatctcttcgaaaaatctgcagacctacttagggaaaccgatattttctagcgatcgcttctatgaatccactcctgtaggagtggccacaggacttgcctggacctctttaggtggagcaacgttatatatagaaagtgtacaggtgtcctcactcaaaacagacatgcaccttacaggtcaggctggggaagtaatgaaggagtcttctcagattgcttggacctaccttcacagtgctctccatcggtatgccccaggctatacgttctttccaaagtctcaagtacatatccacattcctgagggagccacccctaaagacggtccttctgcaggaattactatggtgacctctctcctttcgttgctgttggaaactccggtagtgaataatttgggaatgactggagaaattactcttacaggtcgtgttttaggtgtaggaggcattcgagagaaactgattgcagctcgaagatcacgattgaacatcttgattttccctgaagacaaccgtagagactatgaagagcttcctgcatatctgaaaacagggttgaaaatacattttgtttcacactatgatgatgttctcaaagttgcttttcccaagctaaaatag

SEQ ID NO: 18713 - DNA, 1593 bp, Chlamydia pneumoniae
atgagcatagtattagataaaattggcaaatctttaggcactcgaattttattcgatgatgtttccgtcgttttcaaccccgggaactgctacggtcttactggtcctaacggcgcaggaaagtccacccttttaaaaatcattatgggaatgatagaacctacaagaggttcgatttccttacctaaaaaagtggggatcctgcgtcaaaatatcgatagctttcacgacacaacagtcttagattgtgtcattatgggaaatactcgtctttgggaagctttacaacgccgtgataatctctatctacaagaatttactgacgccattggaatggagcttggtgaaattgaagagatcatcggcgaggaaaatgggtaccgagcagattcagaagccgaagaactcctcacaggcattggcatccccaatgagatgtttgataagaaaatggctatgattcccatagacctacaatttcgagttcttctttgccaggctctctttggtcaccccgaagcacttcttcttgatgagccaacaaaccacttggacctctattccattaattggctgggaaactttttaaaagattatgaaggcactgtcattgtagtcagtcacgaccgtcatttcttaaatacaattacgactcacattgctgacattgattacgacacgatcattatctaccctggaaactatgacgatatggtagagatgaaaaccgcgtctcgcgagcaagaaaaggccgacatcaaatctaaggaaaagaaaatttctcagcttaaggaatttgttgctaaatttggtgcgggatcacgagcgagtcaagtgcagtctcgattaagagagattaagaagcttcagccacaagaattaaaaaaatccaatatccaacgtccttacattcgtttccccctatctgacaaatcctcagggaaagtcgttttgtctttagaagcgattacaaaggattatggggatcatcaggtaatccatcctttttctttagagatttatcaaggagacaagcttggtattatcgggaacaatggattgggtaaaactacattaatgaagttacttgcaggtgttgaggctccttcttcaggaagtatcaagttaggccatcaagctatctgttcatattttcctcaaaaccacagcgatgttctagctgattgtggtcaagaaacgctatttgagtggctacgcaatcgcaaaaccggaattaacgatcaagaaatccgcagtgtgttagggaaaatgctttttggaggcgatgatgctttcaagcaaatccaagcattatctggaggagaaacagctcgtcttctcatggcggggatgatgctagaaaaccataatgtccttatccttgatgaagcgaacaaccacttagacttagagtctgtgtctgctctttcttgggctatcaatgactataagggcacagcgatttttgtctctcacgacagaggactgattcaagattgtgctacgaagttattgatctttgataaagataagattacattcttcgatggaactatggtagactatactgcaggtcataagcaattgttgtaa

SEQ ID NO: 18714 - DNA, 1572 bp, Chlamydia pneumoniae
atgtaccaggagaatctaagattgttggaaaggcttctttataatagtgttcaaaagagctatgcggatcggctgttttcctatgaaaagacaaagatggtgcacgatactccgctgattccttgggaagaggataaggaaaaatgtgctgaagctgagaaagctttcttagagcaacagaagattctcctagattatggaaaatctatcttttggctgaatgagaacgatgagatcaatttaaacgatccttggagttggggtcttaatacggtgaggactaggaaagtattccaagaggttgacgacagtgaacgttggaatcataaggtactcattcaaaaactcgaggacgattatgagaaacttctagaggaaagttcaaaagagtctactgaagcaaataagaagcttttatctgacttagtagatcgtcttgaagatgctaagacaaaatttttcctgaagaaacaggaggaggtggagactcgcgttaaggatcttagagctcgatatggaggcacagtagatcctaagcaggatacggaagctaagaagaaagtcgaattggaggctagcttagaaacctttttagattccatcgaatcagagctagtacagtgtttagaagatcaagatatatattggaaagaacaggatgtcaaagatctagcacgtacgcaagagctcgaggaacaagatattgaagcgaagagggaagaagctgccgaagacctaagaagtcttaatgagcgtttaaagaagtcaaaaactatgttagatagggctaaatggcatattgaaaatgctgaggacagtattacctggtggactagtcagatagaaatgaaggatatgaaagcaagactgaagatcttaaaagaagatataacaagtgttctacctgaaatagatgagattgaaacgtgtttaagcttagaggagcttcctttgcttacgaccagggaactcttaactaagtcctacctaaagtttaagatttgttcggaaacactattaaaaatgacttctgtgtttgagaacaatatctatgttcaggagtacgaggttcagctgcaaaatctagggtttaagttacaaggtatatctcagagattcggaaagaaacaagacgattttgcgaatctagaggaacaggttgctttgcaaaagaaacgactcagagagctcactcagaattttgaaatacaaggattcaatttcatgaaagaagattttaaggcagccgctaaagatctttatataagaagtacagctgaacaaaagatgaactttgatgtgccttgcatggagctcttccgtaggtatcatgaggaggtcaacaagccgcttcttgagttgatgtacaattgtgcagacagttatagagatgctaagaaaaagctttgctctctacgtcttgatgaaaaagagttattacaaaaagaaatcaagaaagaggaattttatcaaaagaaacaacaaaggcatgcagatagatcacgtcatactacgtatcaaaagctacgaattgctgaagagcttgctcttgagctgaagaagaaaatctaa

SEQ ID NO: 18715 - DNA, 1467 bp, Chlamydia pneumoniae
atgagtgctgtttatgcagattgggaatcagtcataggacttgaagttcacgtagaattgaacacagcatccaagttatttagctctgctttaaatcgctttggagatgaaccaaacactaatatttctacagtatgtacaggattgccaggatcattgcctgtattgaatcagagtgccgtggagaaagctgtgctttttggctgcgctgtcgaaggtgaaatctctctattgagtcgtttcgataggaagtcttacttctatcccgatagtcccaggaattttcaaattacacaattcgaacatcctattatccgaggaggacgcattaaggcgattgtccaaggggaagagcgttattttgaattagcccaaacccatatagaagatgatgccggaatgctgaagcacttcggagagtttgccggtgtagactacaatcgtgccggagtccccctaatcgaaattgtttcaaaaccctgtatgttttgtcctgaagatgctgttgcttacgcaacttctttggtttccttgttagactatattggaatttccgattgcaatatggaagaaggctccatccgttttgatgtcaatgtctccgtacgccctaagggatccccagaacttcgcaataaggtagaaatcaagaatatgaactccttcgcttttatggcacaagctttagaagctgaaaaacaacgtcagatcgatgagtatcttaatcagccaaataaagatcccaagctggtgattccagccgctacctaccgctgggatcccgaaaagaaaaaaactgtgctgatgcgtctcaaagagagtgccgaagattataaatattttcccgagcctgatctgccgacactacaattgacagagtcctatatagaaaggattcgcaagaccttgccagaacttccttatgacaagtaccatcgctatattcaggagtacggtctatccgaagatatcgcaagtattctgatcagcgataagaatatcgcaacgttttttgaagtcgcttgtaaagattgtaaaaactttaggtctttatctaactgggtaaccgttgaatttggaggccgctgcaaaaccctaggagtgaagttgccatcttcaggaattttccccgagggagtcgctcagctggtcaacgcaatcgaccaaggtgtgatcacagggaaaattgctaaggaaatcgcagatcttatgatggaatccccaggaaagaatcctgaggagattttaaaagagaagccagagctgcttcccatgtcagatgaaggggaattgcagaaaattatcgcagaggtggttcttgcaaatcctgaatctatcgtagactataaaaatggaaagactaaggctctaggattcctagtcgggcagattatgaagcgtacagcaggaaaagctcctcccaagcgagtgaacgaacttttacttttagaattagataagggctag

SEQ ID NO: 18716 - DNA, 1479 bp, Chlamydia pneumoniae
atgtatcgatatagtgctttagaattagcaaaagctgtgactttaggggaactgacagccacaggggtgactcaacatttttttcatagaatagaagaagctgaggggcaggtaggtgcctttatttccttgtgtaaggaacaagctttagaacaggcagagctcatagataaaaagcgttcgcgtggagaacctttaggaaaactcgcaggtgttcctgtaggaattaaagataatattcacgttacaggcctgaagacaacatgcgcctctcgtgtgctcgagaattatcaaccaccgtttgatgctactgttgtagaaagaatcaaaaaagaagatgggattatcttaggcaaactcaatatggatgagtttgctatgggatcaacaacgctatattctgcttttcatcctacccacaacccctgggatttatctcgtgttcctggaggttcttcagggggatctgcggccgcagtttctgctagattttgtcccgtagccctaggatcagataccggaggatccatccgtcagcccgcagcattttgtggtgttgtaggttttaagccttcctacggagccgtttcgcgttacgggcttgtagcctttgcctcttcgctagatcaaatcggtcctttagccaatactgtagaagacgtcgccctaatgatggatgtgttttctggtagagatcctaaagatgcaacctcaagagagtttttccgtgattcttttatgagcaagttgtctacggaggttcctaaagtgattggggtgcctagaacatttttagagggactccgtgatgatattagggagaatttcttctcttcattagccatttttgaaggagaaggaacccatcttgtggatgtggagttggatattctcagccacgctgtatctatatattacattttagcatctgctgaagctgccacgaatttagcaaggttcgatggggtgcgttatggatatcgttctcctcaagcgcataccatcagccaactctacgatctctcacgtggagaaggatttggcaaagaggtcatgcgcagaatcctcttagggaactatgtcttgtctgcggagagacagaatgtttattataagaaagctacggcagtgcgtgctaagattgtaaaagcatttagaactgcatttgaaaagtgtgaaatcttagccatgcccgtctgttctagccccgcgtttgaaataggagaaattctagatcctgtgactttatatctacaggatatctatactgtagctatgaatttagcgtatcttcctgccattgccgtaccctctggattttctaaggagggcctgcccttaggcctacagattatcggacagcaaggacaagaccaacaagtgtgccaagtgggttacagtttccaagagcatgcgcaaattaagcaattgttttctaagagatatgccaaaagtgttgttctaggaggtcaatcatga

SEQ ID NO: 18717 - DNA, 306 bp, Chlamydia pneumoniae
atggagcaatttcatttggatagggaagaaattttacttttggcaaaggcctcagcactacaactttctgaagagcttatccaggagtatcaaacttctttaagcgctgtgattacttctatgaaagaagctcttgccatagagattgatgatgcggattcatgcgaatctctttttatgcatgtagtaaatgttgaagatttgagagaagattcggtgacctctgatttcaatcgagaggaatttttgcgtaatgttccagagtctttagggggattagtgaaagttcctgcggtaatcaagtaa

SEQ ID NO: 18718 - DNA, 432 bp, Chlamydia pneumoniae
atgcaagaacacatacataaagaattgctacatctaggtgaaatctttcgctcatcacgagagtctcaatccctatcgttaaaggatgtagaggctgcaacctcgatacgatatagttgtttagaagctattgaacaggggtgtttaggaaaattgatttctccagtttatgctcagggatttattaagaaatacgctacgtatcttgggttggatggagatagtatcttacaagaacatccttatgtcatgaaaatttttaaagagttttcagatcataatatggagatgcttttagaccttgaatcgatgggaggaaggaattctccggaaagagcaattcattcttggtcgaatctttggtgggcagggctgatcattataggtggcatcatggtgtggtggctcggatcgttgttttctattttttaa

SEQ ID NO: 18719 - DNA, 1665 bp, Chlamydia pneumoniae
atgtcatcgcctccacaggctgttgcatccctaactgaacgcattaagactcttcttgagtccaatttttgtcagatcatagtgaagggcgagcttagcaacgtctccctacaaccaagtggtcatctctattttgggattaaggatagccaagcgtttcttaatggtgccttttttcattttaaaagtaagtactatgaccgcaaacccaaagatggggatgcagttattattcatgggaagcttgcggtctatgctcctagaggacagtaccaaattgtagcccatgctttggtttacgctggagagggcgatctcctacaaaaatttgaagaaacaaaaagacgtctgactgctgaagggtatttcgcaactgaaaaaaagaagcccctcccctttgctcctcaatgcattggcgtcattactagcccaacaggagctgtgatccaagatatcttacgtgtactctcccggcgtgctcgcaactataaaattttagtttatcccgtcactgtccaagggaactctgcagctcatgaaatctccaaggctattgaagtgatgaacgctgagaacctcgctgacgttcttattattgctcggggaggaggaagtattgaagatctctgggcctttaacgaagaaatcttagttaaagccattcatgcaagcacaatccctattgtctctgctgtcggccatgaaactgattacactttatgtgactttgcttctgatgtgcgtgctcccactccttctgcagccgcagagatcgtctgtaaaagtagcgaagagcaagttcaggtgttcgagggatacctccgccatctactctcacactctcgccaactcctcacatcaaaaaaacagcaattgcttccctggagacgctttttagatcgcgcagaattctatactacagcacaacagcaactcgactctattgagatcgctattcaaaaaggtgtccaagggaaaattcacgaaagcaaacaacgctatgacaacatctcgcggtggctccaaggagatcttgtttcccgcatgacctgccgactgcaaagtttgaaaaaaatgctttcacaagccctatcccataaagcactttctctccaagtacgttgccaccaactaaagaaaagccttacctatcctcgccaaatccaacaggcatcacagaaattatccccttggcgtcaacagctagacaccctaatttcacgacgcctccactaccaaaaagaagaatattttcataaacacacacgactcaagcatgctcacaatgtcttagagcaacagctccgtagccatgtgcagaaactggaactattaggcagacgtctatcgagaggatgcgagctaaatctacaaaaccaaaaaatcgcctatgcaaatgtcaaggaaactttagcaacaattctagaacgtcgttacgaaaattctgttgcccgctactctgcgctaaaagaacaacttcactctttaaatccgaaaaatgttttaaaacgcgggtatgcaatgctctttgactttaatgaaaattccgctatgatttccgtagacagcttacaagaaaatgctcgtgtaaggattcagttgcaagatggcgaggccattttaactgtcacaaatattgaaatttgtaaacttataaaaggctaa

SEQ ID NO: 18720 - DNA, 834 bp, Chlamydia pneumoniae
gtgacaagaagttctcctgcacaactctcccggtttctttctgaaattcaaaataagccgaagaaaagcctctctcaaaatttcttagtggatcagaatattgtcaaaaaaattgtggcaacctctgaggtgattcctcaagattgggtgttggagatcggcccaggatttggagcccttacagaagaactcatagctgcaggagctcaggtcattgctattgaaaaagacccgatgtttgcgccatctttagaagagctccctatccgcttagaaattatcgatgcctgtaaatacccgttagatcagcttcaggaatataagactttgggaaaaggtcgagtagtagcaaatcttccctaccatattaccactccattgcttaccaagttgtttctggaagccccagatttctggaaaacagtgacggttatggtccaagatgaagtggcccggcgtattgtagcccagccagggggtagggattatgggtctctaacgatctttttgcagttttttgctgatatacactatgcttttaaagtttctgcttcatgcttctatccaaaaccgcaagtgcaatctgcagtcattcatatgaaagtcaaagaaacacttcctctatcagacgaggagattcctgtattttttactttaacaagaactgcatttcaacagcgtcgaaaagtactcgctaatactctaaaaggcctctatcctaaagagcaagtggaacaagctttgaaggaattaggattacttctaaatgtgcgtcctgaagtattgagtcttaatgattatcttgctctcttccataagatgcaagcgggttaa

SEQ ID NO: 18721 - DNA, 1002 bp, Chlamydia pneumoniae
atgcgaatcgctgttttaggcgttactggacttgttggccagaaattcgtagctttgcttcataagtggtatcgtgattgggtcattgctgaagtcgtagcttcaaatagtaaatatgggcaatcgtatggagatgcctgtatttggcaggagccaatcggccctatgcctgagatggtacgtgatttgcctatacgtaagatcgaggaagtgcagtccgacatcgttgtttcttttttgccttctagtgctgagtccatggaggcgtattgcctctctcaaggaaaagttgtcttttctaatgcctcaacatatcgcatgcattcttcagttcctattatcatccctgaagtcaactcagatcattttcaacttttagaagagcaaccttatcctgggaaaataatcacaagtcccaattgttgtgtctctggaattactttggctctagcacccttaagaaagttctccttagatcacgtacacattgtcaccttacaatcagcaagtggtgcaggctatccaggagtcccgtcgctagatcttcttgccaatacagttcctcatatcgttggagaagaagaaaaaattcttagagagactgtgaagattttaggaagttctaagcaacctttaccttgtaagctctctgtgacagtccatcgagttcccgtagcctacggtcatacgctctctctgcatgttaccttttctaaagatgtagatcttgacgagattctgtactcttaccaagaaaaaaataaagaattccccaatacctaccaactctatgataacccttggtctcctcaggctcgaaagcatctttctcacgacgatatgcgcgtacacctaggacccattacctacggaggagattttcgcaccataaagatgaatgttttaatacataatttggtgcgaggtgctgcagggactttactcgcaagtatggagaattattttttcgactatcttaagagggaaatgtgtctaagatag

SEQ ID NO: 18722 - DNA, 795 bp, Chlamydia pneumoniae
atggggtcgagtatgcacgttggagtgattggctgttctggaagaacagggaaagtgattgtctcagctttagagcaatcttcagaatatactttgggtccagggttctctcgcagtagtgcactcactctttttcaagtgattgcacataacgatgttcttgttgatttttcccaccccttactaactaaagaagtcgttgcccatctcttaatctctcctaaacccctcattatcggaactacagggttccctgggaagtgtaaagaagctcatgacagtctcgaagagctgactcacatcgttcctgtagtggtttgtccaaatgcaagtctaggagcttatatacacaagcggcttgtaatgttgctatcgcaattatgtaacccacagtttgatattcgcattcgcgagactcatcatagatataagaaggactctctctcaggaacagctcaagatttacttgatactatacagcaagtaaaacaagaggattggggagaggagtatgaggtaggccagcgagattcttctaagaagacgatagaagtgcaatcttcacgagttggagatatccctggagaacatgaggtcgcttttatcagttctggagagcaaattttggttcgccacacagtattttctcgcaatgtttttggtcggggaatcctttctattttagattggctaaaaacattgaatccccaacctggtttgtatagtcttggggatactttggagctagtcttacgaaatgaacattgcttgcttaaaaagacaacggatcattaa

SEQ ID NO: 18723 - DNA, 699 bp, Chlamydia pneumoniae
ttgccaatgaatacatcccacagaaaaacattagtattttcctacttgtcttcaacctttactttgcttcttgttctctccaatcttgtcctctcttcgaagctcattccaacgactttttttaacttcattattcctgggggactcattctttatcccctgacgtttctcatctcagacgttgttaacgaaatctttggccctaaaaaagctcgtgtcatgatattttcagcttttatcgccaacctcttagcttcttcaattgtacaaatttttatgttcttcccagtagcctctcctgagatgcaaactgcctggcactgcttgtttgatttaagtcctctccgttttctagcttcactacttgctttcattgtctctcagcaattagacatcgtcctttacactttttttaaaaatcgaactcccaattcatctctatggctacgtagcaatgggtctacatggatctcacaaattccagatactttcattgtcgacacctgtattttatatttcggcatggggctttctttcccccaaaccctaaatattatgttctactcttacatttataaaattactttttgtgttctcacgacaccgctcttttatctcgctgtgaatacaatccgcaagtttttagggatgccttctactaaaattgcaaatacagttcctctgataaatcaaccttag

SEQ ID NO: 18724 - DNA, 996 bp, Chlamydia pneumoniae
atgcgtgaagaaactgtatcctggtcattagaagacatccgcgaaatttatcacactcccgtatttgagctgattcacaaagccaatgccatattgcgtagtaatttcctccattcagaactgcagacttgctatctgatttcgattaaaactggtggatgcgttgaagattgcgcctactgtgcccaatcttcccgctatcatacccacgtcacaccagaacctatgatgaaaattgtagacgttgtggaaagggcaaaacgtgctgtagagctaggcgccactcgtgtgtgtcttggggctgcctggcgcaatgctaaggacgatcgatactttgatagagtcctcgctatggtgaaaagtatcacagatctcggagccgaggtttgttgtgctttaggcatgctctccgaagagcaagctaaaaaactgtatgatgcaggactttatgcctacaatcataatttagactcttctccggaattctatgaaactataatcacaacacgttcttatgaagatcgcctcaacactcttgatgtagtaaataaatctggcattagtacatgctgcggtggtattgtaggtatgggagaatctgaagaagaccgtataaagcttcttcatgttcttgcaacaagagatcatatcccagaatccgtacctgtaaatttactttggccgattgacggcacgcctttgcaagaccagcctccgatttctttctgggaagtcttgcgaaccatagcaacggcacgggttgttttccccagatccatggtacgacttgctgcaggacgcgctttcctcacagtagaacaacaaaccttatgttttctagccggtgccaactccatattctatggagataaactgttgactgtagaaaacaatgatatagatgaagatgctgaaatgatcaaacttttaggcttaatccctcgcccttcatttggaatagaaagaggtaacccatgttatgccaacaattcctaa

SEQ ID NO: 18725 - DNA, 1149 bp, Chlamydia pneumoniae
atgttatgccaacaattcctaattgaggctttggcaagacgtaagtccaaacatacctaccgctcgctaagcttaaactctcatctcattgattttacctctaatgattatcttggatttgcctcttctccagaattaaggaaagaatacattaccaagctccatgcgatagaatcgcttggagctacagggtctcggcttctcacagggcactcgcaactctgtcagcgtatagaagaacaactagccgcttatcataattttgaaagctgtttgatcttcaatacaggttacacagcaaacttaggcttgctctatgctcttgccaccgaccaggatcgtattcttcacgacctttatatccatgcttctatttatgatggcatccgattaagcaaagctcaaagctttccctttaatcacaatgatctgaatcacttagaaaaacgtttagcaagctcccatctaggaagaacctttgtttgcgtggaatccgtatactcgcttcatggctccgtggctcctttacaagctatcagtgaactctgtgaaagatattccgcttacctgatcgttgacgaagcccatgcagtcggagtttttggagatcagggcgaaggccttgtctctgcattaggtcttcaagataaagtcctagccaccgtctatacttttggaaaagctctaggcactcatggcgctgctattgcaggaagttctatactcaaagactacctaattaatttttgtagacctttcatatacaccacagcccaacctccccatgcgctcacagctatagagctcgcttatgagcataaccaacgtgcttttaatcaacgtgaacatctttctgctctcattcatcattttcgcgaaaaagctcaaaacttgggacttcagctaatgaaagacaatactactacacctatacaatctatttgtgtttcagggagccatcgtgctcggcaagccgcattgcaaatacaaaactcagggtacgatgttcgccctatcgtgagcccaacagtaaaacaaagagaagaactgttacgtatttgccttcatgccttcaatacaaaaaatgaaatagatcaccttttacatactttagagcaaatttttttatgcaacgtatcatcattgtag

SEQ ID NO: 18726 - DNA, 1272 bp, Chlamydia pneumoniae
atggacaagcaatcatcagggaattcagggtgtatctggcaccccttcactcaatctgcattagattctacacccataaagattgtaaggggagaaggtgcttacctctatgcggaatcaggaacaagatatcttgatgcgatatcttcatggtggtgcaacctccacggtcatgggcatccctacattacaaaaaaattatgtgagcaagcacagaagttagaacatgtgatcttcgcaaatttcacccatgaaccggctctagagctcgtatcgaaactcgctcccctccttcctgaaggtctagaacgtttctttttctctgacaacggatcaacgtctatcgaaatagcaatgaaaattgctgtgcaatattactacaatcaaaacaaggctaagagccattttgttggactcagcaatgcctatcacggagatacatttggagctatgtcgatagctggcacgagccctactacagttccctttcatgatctttttcttccttccagtacaattgctgctccctattatggcaaggaagagcttgccattgcccaagcaaaaacagtcttttctgaaagcaatatcgcagcgtttatctatgagccgctattgcaaggtgctggagggatgttaatgtataatcccgaaggcctaaaggagattctcaagcttgccaagcattacggggttctctgtattgctgatgaaattcttactggctttggccgtacgggtccactgtttgcttctgaatttacagacattcctcctgacattatctgtctttctaaaggtcttacaggaggctatctccctctagccttgacagtaaccactaaagaaattcatgatgcctttgtctcccaagatcggatgaaggcactgcttcatggccataccttcacaggaaatcctttaggctgtagtgctgccctcgcttctttggatctcaccctatctccagaatgcctacaacaaaggcaaatgatagaacggtgtcatcaagagtttcaagaagctcatggttccctatggcaacggtgtgaggttctgggcacggtactcgctctagattaccctgcagaagctacaggatatttttcacaatatagagaccatctcaatcgctttttcttagaacgtggagtccttcttcgtcctttagggaacacactgtatgtgctgcccccctactgtatccaagaagaagatctccggattatttattctcacctacaggatgccctatgtctacaaccacagtaa

SEQ ID NO: 18727 - DNA, 1080 bp, Chlamydia pneumoniae
atgaaaaatagctttggctctttgttttcttttacaacatggggagaatcccacggtccctcaatcggagttgtaatcgatggttgtcccgcaggactcgagctccatgaatcagattttgttcctgccatgaagcgccgtcgtccaggaaatccaggaacctcatcgcgcaaagaaaacgatatcgtgcaaatcctctctggagtttataaaggaaagaccacaggcactcccctatccctgcaaatcctcaatactgacgtagatagctccccttatgaaaacagtgaaaggctctaccgtcctggccactcccaatatacctatgaaaagaaattcggaattgtagatcctaacggaggaggtcgctcctcagctcgagagacggcatgtcgcgtcgctgctggcgtagttgcagagaaattcctcgcgaatcaaaacatttttactttagcctacctctcctcgttaggatctctaaccctccctcactacctgaagatctcccccgagctcatccacaagattcacacctcgccattctattcaccgttacctaatgagaaaatccaagagatccttacttctctacacgacgactctgattctctaggtggggtgatttctttcataacgtctccaatccacgactttctaggggaacccctctttgggaaagtgcacgccctcttagcaagtgctttaatgagcatccccgccgctaaaggattcgaaataggaaaagggtttgcctctgctcaaatgagaggttcacaatatactgatcccttcgtcatggaaggagaaaacattaccttgaagtctaacaactgtggaggcacactaggaggcataactataggagttcctatagaagggcgcatagcatttaaacctacctcttcgataaagcgaccctgtgctacagtgacaaagacaaaaaaagaaactacctataggacacctcaaacaggacgtcatgatccttgtgtcgccatacgcgctgtccctgttgttgaggctatgataaaccttgttcttgcagatcttgtattataccaacgatgctccaaactatga

SEQ ID NO: 18728 - DNA, 1434 bp, Chlamydia pneumoniae
atgttatgcgccactgttagcggtccctcattttgtgaagcaaaacaacaaattctaaagtctctacaccttgtagatattatagaactacgactcgatctcataaacgaacttgatgatcaagaactgcataccctcattaccacagcccaaaaccccatcctcacctttagacaacacaaagagatgtcgacagcgctatggattcaaaaactatattccctagcaaaacttgaacccaagtggatggatatcgatgtgagtcttcctaagaccgcccttcaaaccatccgcaagagccatcctaaaataaagctcatcctttcctatcatacagacaaaaatgaagacctcgatgcaatctataatgagatgcttgcaactcccgctgagatctacaaaatcgtactctccccagagaactccagtgaagctctgaattatataaaaaaagctcgcctgttaccaaaaccatctacagtcctttgtatgggaacccatgggctcccctctagagttctctccccactgatcagcaacgctatgaattacgctgctggaatcagtgcgcctcaagtagccccgggacaacctaaacttgaggagctgctctcctataactactcgaagctatctgaaaaatcacacatttacggactcatcggagatcctgtagaccgtagcatcagtcacctctcccacaacttcttactctctaagctttctctcaatgcaacatatatcaaattccctgttactataggggaagtcgtcacctttttctctgcgatccgagatcttcctttttcaggacttagtgtcactatgccactaaaaaccgcaatcttcgaccatgtcgatgctcttgatgcatcggcgcaactctgcgagtctataaacaccctggtcttccgaaatcagaaaattctaggttacaatacagacggtgagggagtagccaaactcctaaaacaaaagaatatctctgttaacaacaaacacattgccattgtaggtgctggaggtgctgctaaagcaatcgctgcaacactggcgatgcaaggtgctaatctccacatcttcaatagaactctttcttcagcagctgctttagctacttgctgtaaaggcaaagcctatcccttaggctccttagagaattttaaaactatagacataatcatcaactgtctccctccggaagtgaccttcccttggagattccctcctatagtcatggacatcaataccaaaccgcatccctctccctaccttgaacgtgctcaaaaacatggctctctcattatccatggctacgaaatgttcatagaacaagccctgctacaatttgctctttggttcccagatttcctaactccagagtcttgtgactctttccgaaactatgtaaaaaacttcatggcaaaagtataa

SEQ ID NO: 18729 - DNA, 1458 bp, Chlamydia pneumoniae
atgacctcaaggactaaatcctcaaaaaatttagggaccatagcccttgcgggtatggtagtcagttccataattgggggagggattttcagcctcccccaaaacatggcagcgacagcaggagctggtgccgtaatcctatcttggatactcactggcttcggcatgttctttatcgcaaatacgtttaggatcctctctacaatacgtcccgaccttaaggaagggatctacatgtacagtagagaaggtttcggcccctacataggattcaccatcggctggggatattggctttgtcaaatcttcggtaatgtgggatatgccgtaattactatggatgctctaaactacttcttccctccctacttccaaggaggaaataccctacctgctattttaggaggctccattcttatctgggtgttcaacttcatagttctgaaaggaatccgtcaagcatcgataatcaacgtcatcggaactatatttaaaatcatccctctaatcatcttcattatcctgactgcgttcttcttcaagctcgctgttttcaaaacagatttttggggacatgccgtaacaaaagcccaaccgagtttaggatccgtaagttcacaacttaaagggactatgttggtcaccctatgggcatttataggaatcgaaggtgccgtggtgatgtctggacgagcaaaaaatcctctctctgtagggcaagctacagtcttaggatttttaggttgcctaacaatctacatcttattttctttattaccttttggctcgctcttccaacatcaactagcgaacatccccaatccctctacagctggtgtcctcgacatcctcgtagggaaatggggagaagtgctcatgaatgtcggcctgattattgctgttttatctagctggttatcctggacgatcatcgttgcagaaatccccttctcagcagctaaaaatggcaccttccctgagatcttcactatagaaaataaagagaaatctcccagcgtctccctatacattacgagctctgtgatgcagctcgccatgctccttgtttacttttcttcgaatgcttggaatactatgctcagcatcacgggggtcatggttctccctgcgtatctagcgagtgctgcctttctctttaaacttagcaaaagcaaaacatatcctaaaaaagggtctattaaagcccctttggcaatgataactggtatcctgggagtggtttactctctatggcttatctatgcaggaggtctaaaatacctctttatggccttagttcttttagctcttggcatccccttctatatagacgcagggaaaaagaagaaaaatgctaagacattctttgctaaaaaagaaattgtaggaatgactttcataggccttcttgcactgacagcgatcttcctattctcaacaggaagaatcaaaatttaa

SEQ ID NO: 18730 - DNA, 1581 bp, Chlamydia pneumoniae
atggaaagaaaaagatttatagattgcgattcaacaaagatactccaagagcttgctttaaatcccctagacctaacagctcccggggttttatctgcagagaggatcaagaagttttcttggctaggagggggatttacctttagctttgctaccgagcgtttggacgatgctattttagctgcattgatctcattagcagaagaaaggggattgcatgagtctatgttagcgatgcagcaggggcaggtcgtgaactatattgaagggtttccaagtgaaatgcgacctgctctgcacactgcaactcgggcatgggtaaccgacagttcatttacaggagaagctgaagatatcgccgtaagatctcgggtggaggcgcaacggcttaaggattttttaaccaaagtgcgcagccagttcacgaccatagtgcagataggaatcggagggtcggagctaggccctaaggcactctatcgggcccttcgtgcgtactgccctacagataagcacgtacatttcatatccaatatagatcctgacaatggcgccgaggtgttagataccatagattgtgctaaggctttggtagttgtagtatcgaagtcagggactacaatagagactgcagtgaatgaggccttttttgcagattatttcgcgaagaagggcttgtcatttaaggatcattttatagcagtcacttgtgaaggcagtcctatggatgatacgggtaagtatctagaggtctttcacctttgggagagcatcggaggaagattttcctctacctctatggttggaggtgttgttttaggttttgcttatggctttgaggtttttttgcaattacttcaaggagcctcagctatggatcaaattgctttgcaaccgaacgctagggagaatctccctatgctttcagctttgattagcatttggaatcgaaatttcttaggctatcccacagaagctgtcattccttattcttcaggtttggagtttttcccagcgcatttgcagcagtgttgcatggaatctaacgggaaaagcattgtccaagatggtagaagggtaggattttctacgagccctgtcatttggggtgagccgggaaccaacggacagcattcttttttccaatgccttcatcagggtacagacattattcctgtagagtttataggttttgaaaagagccaaaagggtgaggatatctcatttcaaggaactacatcttcacaaaagctttttgccaatatgattgctcaggcgattgccttagcatgtggctctgaaaatacaaatccgaataagaattttgatggaaaccgtccttcttcggttttagtgtctagccagctgaatccgtattctcttggggaattactttcttactatgagaataaaatcgtatttcaagggttctgttgggggattaattcttttgatcaggaaggggtctccttgggtaaggcattggcaaaccgtgttttagagttgcttgagggggcggatgcttccaatttccctgaagctgcatcgttgttaacgctttttaacatcaagtttaggtaa

SEQ ID NO: 18731 - DNA, 906 bp, Chlamydia pneumoniae
atgactatgccctcgactcagtttcacacaacgattctagaacaattctcattgtttttatctgtagatcgcggcctttgccaacaatctatagcggcttaccgccaagacatctcttccttccttaccataagtgccattagctccccccaagatatttcacaaaacagcgtatatatctttgctgaagaactatatagacgtaaagaagcagagactacgttagcgcgtaggctcattgctttaaaagtattttttctcttcttaaaagatcagcaacttcttccctatcccccaataatagagcacccaaaaatatggaaacgccttccttcagtactgactcctcaagaagtcgatgctctacttgcggttcctctccaaatggagaaaaacccccgacacctagcctttcgtgatacagccattctccacacactatattcaactggtgtccgggtttctgaactttgtgacctacgtttaggccatgtctctgatgattgcatccgcgtcaccgggaaaggttctaaaacccgactggtgcctctgggatctcgagcaagagaagctatcgatgcgtacctttgtcctttccgagaccaataccagaaaaagaatcctcacgaagatcatcttttcctctctacccggggacacaagctcgaacgctcttgtgtgtggcgccgtattcacaattacgcaaagcaagtgacctcaaagcccgtatctccccactccttacgacacgcctttgctacacatctattagacaataaggcagacctacgcgtcattcaagagatgttaggtcacgcacgcatcgcctctacagaagtgtatactcacgtagccgcggattctctaatcgagaagtttcttgcccatcaccccaggaatctctaa

SEQ ID NO: 18732 - DNA, 1698 bp, Chlamydia pneumoniae
gtgaaagtcccttgggcatttaaaaacttcatccctaaactctacacaagtatcaaagaaggctattcgtttaatacttttaaaaaggatttccaagcaggaattactgtaggaatcctagcctttccttttgctattgccatagccattggtgtcggagtctccccaattcagggactgttagcttctattatcggaggccttctcgcttcggctatgggaggaagtaacgttctgatttcagggccatccagtgcctttatttctattttatactgcttatctgcaaaatacggggctgaggcgctttttaccgtcacattgctggccggcgtctttcttatcgccttcggactcactggcttaggcacgttcattaaatacatgccctatcccgttgtcacaggactcaccacaggacttgcgatcattatattctcctcgcaaattaaagatttcctgggtctgcaaatgggagctaatattcctgcagatttcctccctaaatggatagcttactgggatcatttatggacttgggacagtaagtccttcgcggtgggtctctttaccctattgatcatgatctacttccgaaactacaagcctcgctatcctggagtcatgattgcaattgtaacggcgaccaccctcgtttggttacttaaaatcgatattcctaccatcggcagtcgttacggaactctacctaccgcgattcctttacctaaaatcccacaactgagcatcaccaaaattcttcaactgatgccagacgctctgaccattgcagtcttatcgggattggagactttactatctgccgtggtcgcggacggaatgacaggatggcgtcaccaatccaactgtcagcttgtcgcccaaggggtagcaaacatcggaacctcattattttcaggaatccccgtcacagggtcgctatctcgcacagcagccagcatcaagtctgaagcaacaactcccatagcaggaatcgttcactccatctttatttgctttattttacttcttctggccccactcactgtcaaaattcctctcacctgcctcgctgccgttttgattttgattgcatggaatatgagcgaaatccaccactttatccatctctttaccgctcctaaaaaagatattgtggttctcctcactgtcttcatcctcacggtaatgacaacgattacagcagctgtacaagtgggaatgatgctagcggcattcttatttatgaaacaaatgagtgatctttccgatgtgatctccacagccaaatacttcgataaggattcagactttttaagcaaagctgaagttcctcaaaacacagagatctacgaaattaatggtcctttcttcttcggaattgcagatagattaaagaatcttcttaatgatatagaaaaaccccctaaaatctttattctatgcatgacgcgagtccccacaatagatgcctcagctatgcatgctctcgaagaatttttcttggaatgtgatcgtcaagggaccctacttctcctcgctggagttaagaaaactccccttgctgacctgaaacgttatcatctagatgaactgattggggtggaccatatcttctcaaatattaaaagtgctctcctatttgcccaagctctaacaaatctagagagcaaaacttcaactcgtcatttagtctaa

SEQ ID NO: 18733 - DNA, 609 bp, Chlamydia pneumoniae
atgctcatcttactcaatcttagcctactattttatgtcctgttcgattctccaggctccattcctgtctttgttgctttgctcaaaaacttttctagaaagaaacaacaacgggtgatcctaagagaatgcctttttgctctcggagccctcatcctcttcgttacttttggaagaagcttcttccaattcttggatatttctctctacgcttttcagatcataggcggctttctcctctttacagtctctataaaaatgatgctggcacccatgccagaaaaagctaaagatgatacttccaaaacagaacctatatttttccccttagctttcccagtaatcacaggccctgctgtgattacagcactccttagctacatggaagagggaatctactctagggaaattatttttactgctatgattatcgcctgggcattttctttatttactctgctatgctctagcttctttgaccgcctttctggaaatttcggactcctcgcactcgagagactcttcggtattgctttactacttatgtcggtaaaccttatgttgaaagggatctcaatagcgtttaatataggcttttacatcgggtga

SEQ ID NO: 18734 - DNA, 270 bp, Chlamydia pneumoniae
atgtctttggataaaggaactaaggaagaaatcacaaagaagtttcaacttcatgaaaaggatacaggatcggcagatgtacaaattgctattctcacggaacatatcgcagaattgaaagaacatcttaaaagatcccctaaagaccaaaactcccgcttagcattgcttaagcttgttggtcaaaggagaaagctcttggagtatcttaattctacagataccgaaaggtacaaaaatttaattacaagattgaatctacgtaagtag

SEQ ID NO: 18735 - DNA, 2085 bp, Chlamydia pneumoniae
atgaattttcaaactatttctattaatctgaccgaaggtaaaatattggtgtttgaaacagggaaaattgctcgtcaagctaacggagctgttcttgtccgttcaggggaaacctgtgtttttgcaagtgcatgcgctgtagatcttgatgacaaagtagactttcttcctttacgagtggactaccaagaaaaattctcttccacagggaaaactcttggtggatttataaaaagagaaggacgcccctctgaaaaagaaattttagtttctcgattgattgatcggtctctacgtccttccttcccctaccgactcatgcaagatgtgcaagttttatcttatgtatggtcgtatgacggtcaagttttacctgatcctcttgctatctgcgcagcatctgctgctttagcaatttcagatattccacagagcaacattgttgctggagtacggattggatgtattgataaccaatgggtcatcaatcctacaaaaactgagttagcatcctctactttagatcttgtattagctggaacagaaaacgctattctaatgatagaaggtcattgcgatttctttaccgaagagcaagtacttgatgccatagaatttggtcacaagcatattgttaccatctgtaaaagattacagttgtggcaagaagaagttggaaaatctaaaaatctaagtgctgtatatcctcttcctgcagaagttttaacagctgtgaaagagtgtgcgcaagacaagtttactgaactctttaatattaaagataaaaaagtacatgcagctactgcgcatgagattgaagaaaatattttagaaaaattacagcgcgaagatgatgatcttttctcttcttttaacatcaaagcggcatgtaaaactttaaaatctgacacgatgcgtgctctcataagagatagagagatccgtgcagatggacgttctttaactacagtccgtcctattactattgaaacttcttaccttcctcgtactcacggaagctgcctcttcactcgtggagagactcagacacttgcggtatgtactttaggcagtgaggcaatggctcaacgctatgaggatttgaatggtgaaggactttcaaaattttacttacaatacttcttccctcccttctctgttggagaggtaggaagaatcggctctccaggaaggagagaaattggccatggcaaattggcagagaaggctttaagtcatgctcttcctgatagcgctacatttccctataccatccgtatagaatctaatattacagaatctaatggttcttcatccatggcttctgtatgtggcggttgcctcgctcttatggacgctggcgtccctatttcttctcctattgcaggaattgctatgggattgatccttgatgatcaaggagcgattatcctttctgatatttccggtcttgaagatcaccttggagacatggactttaaaatagcagggagtggtaaaggaattacagccttccaaatggatatcaaagttgaaggaatcactccagctatcatgaagaaagctctttcccaagcgaagcaagggtgtaatgatattttaaatattatgaacgaagccctttcagctcccaaagcagacctatctcaatacgcgcctcgtattgaaacaatgcaaattaaaccaacaaaaattgcttcagtaattgggccgggaggcaagcaaatccgtcagatcattgaagagactggcgtccaaattgatgttaacgacttaggagttgttagcatctctgcgtcctcagcatcagctatcaataaagctaaagaaatcattgaaggtttagttggagaagttgaagttggaaaaacctacagaggtcgcgtaacttccgtagttgcgtttggagcctttgttgaagttctccccggaaaagaaggactctgccacatctctgagtgttctagacagcgaatagaaaatataagtgatgttgttaaggaaggcgatatcattgatgtaaaactcttaagcatcaatgaaaaaggtcaacttaagttgagccataaagcaactctagaataa

SEQ ID NO: 18736 - DNA, 2733 bp, Chlamydia pneumoniae
atgtcgaaagataagaaaatgaaacctgaaccgaaaaaaaatttccctacagtctttttttttcttttgtttggcgtggtttttggtgtagtcgcatttcaaaattttctagctggaaagaaggctagagtcggtttcagtcatcaaatcgagcaccttgttaacttacgtctgattgttccagaagatagccataagatagctcttaatgacaacttagtttcttttggcggacgttttcgtgatgtccaaactcaagaaggacaactacgttatcattatctagagcttattgatcagggccatcggttagaccttgatcttcaagagacgagcaagagtcttacgaccttagggaaagaggtcacgaattccatactttggttttctgcaatttctggatccccgattcctgaacaagggtatgccatttcttatccgagtgaagtcagcggctctgtattgacagaacctctcgttgttacaggacctgcaactccacagctaatcaatctccactctctgcaggagcgttatcctacactatcacgatctccagaagctttacgcacctatggatccgatctttatgagttaataggaaaatatctatctcctgttttaggaataggatctgagacgctaaaaagagaacttaaagatctctaccagcaagtggaagtctccttaactcaggagacggatacggaagcagcctacaccctttatgggcaggttcttagtactttgaacaggatctcttcttctttagtcgtgtctgagggaggagaacgtttttctcaactccgttctgtacgtctctatcgggaggagtggaataagtatcataaattggtggaagcgcgcgatctgaatcaagcgcaactagagaagctccgtggtgaattaagccagacagtttggtattttaataaccaagagctctcctcccgtagtttagagaaacaagatcctgaagtttttggccattggtttgccggggctaaggaagagtggactgcctttaaatttaaccactccctatcatttaaagctccagaccaaccaagaaatctcgttttagagaaaacatttaagagccaagagccttcgccacattatttaggatatcttttcacattcttacctatcatcttagttctactctttgtctacttggtgttctctcgtcagatgagaggcatgagtggttctgcaatgtctttcgggaaatccccagcgcggatgctccttaagggacagaataaggttacctttgctgatgttgctggtatcgaggaagctaaagaagagctcatcgagattgttgacttcttgaaaaatcctaataagtttaccagtttaggggggcgtattcctaaaggagtcctcttgataggacctccaggaacaggaaagactttgatagctaaggctgtatctggagaggcggaccgtccctttttctccattgctggttctgattttgttgagatgttcgttggagtcggtgctagccgtatccgtgatatgtttgagcaagcaaaacgtaatgctccctgcattatctttattgatgaaattgatgctgtaggacgtcatcgtggtgccggtattggtggtggtcatgatgaaagagaacagacattaaaccagcttcttgtagaaatggatgggtttggcaccaatgaaggtgtcattcttatggctgcaacaaaccgtcctgatgtcctagataaggctctattgcgcccaggacgtttcgatcgacgtgttgtaatgaaccttcctgatattaagggacgttttgagattcttatggtacatgccaagagaatcaagttagatcctactgtagatcttatggccgtggctagaagtaccccaggagcttctggagcagatttagagaatttattaaatgaggctgccttattagcagcacgtaaggatcgaactgcagtgactgctgttgatgtcgctgaagctcgtgataaagttctctatggtaaagagcgtagaagcttagagatggatgccgaagagagaaaaactacagcgtatcatgagtctggtcatgccgttgtagggctttgtgtacagcatggagatcctgtagataaagttacaatcattccaagagggctctctttaggagctactcatttcctaccagagaaaaacaagctcagctattggaaaaaagaactttacgaccagctcgcagtgttgatgggaggtcgtgctgctgaggagattttcctcggagacatttctagcggtgctcagcaagatatatctcaggctacaaagttagtgcgtagtatggtttgtgaatggggaatgagtcctcagctaggaaatgtgacttatgatgagcgttccgatggcttgacaggctacggtggttatcatgaaaagagctattcagaagaaacagcaaaaactatcgatacagaattgagaatgcttctagatgcggcataccaacgtgcgttagatattattaatgagcataaggcagaaatagagcttatgactcagatgctcattgaattcgaaactcttgattctaaagatgtgaaagaaattatggaccatacttgggatcctgagaagaagagagcacgtctaaaagaagaagggatgctatttaaaaagtcttccgacgatcttcctcctcctcctcccaaggaagacactctacctggtttggggtttaatgctacgtag

SEQ ID NO: 18737 - DNA, 960 bp, Chlamydia pneumoniae
atggtactaagctcagatttactccgtgatgataagcaattagatcttttttttgcttctttagatgtaaaaaaaagatatttgcttgctctttctggaggaagcgactctctttttcttttttatctacttaaagagcgaggggtttcctttactgcggtacatatagatcatggttggaggtctacctctgctcaagaagctaaagagttagaggaactttgcgctcgtgaaggtgttcccttcgttctatatactttgactgctgaagagcaaggagataaagatttagagaatcaggcaagaaagaaacggtatgcttttctttatgaatcctatcgacaattagatgcgggaggaattttcctcgctcatcatgccaatgatcaagcagaaacggtcttaaaacgtttgttagaaagcgcccatttgactaatctcaaagctatggcggaaagatcatacgttgaagatgtgttacttttacgacctttgttacatattcctaaaagctcgttgaaagaagctctagacgctcgcggtatttcttatttgcaagatccttcaaatgaagatgaaaggtatttaagagcgaggatgcggaaaaaacttttcccttggcttgaagaggtctttggaaaaaatattacctttcctttactaactttaggtgaagaatcagcagaactatccgagtatcttgagaagcaggcacaaccatttttttctgccgctacccatcaagattctcaaggagagcttccctgtccagactgcctcattcaacaagcgtttttatgcaaatgggttatgaagaaattttttaataatgctggaattgctgtttcaaggcattttttgcaaatggtttatgatcatttatctcggagttcttgcgcaactttgcgcatgaggaataagatagtaatcataaaacctggagtagtagtgatagattag

SEQ ID NO: 18738 - DNA, 1020 bp, Chlamydia pneumoniae
atggaaatgaaagaagagattgaagctgtaaagcagcaatttcactctgagttagatcaggtgaactcttctcaggcacttgcagatcttaaggtccgctacttaggaaaaaaaggaatttttcggagtttctcagaaaaattaaagcaatgtacagataaggcaaaactaggttcccttatcaacgactttaaaacttatgtagaggatcttttacaagaaaaaagccttgtgcttcttgcttcagaacaagccgaagccttttctaaagaaaaaatagatagctctctccctggagattctcaaccttctgggggaagacacattttaaaaagtatcctcgatgatgttgtcgatatttttgttcacctaggattttgtgttcgagaagcccctaacatcgaaagtgaagccaataattttaccttactcaacttcactgaagatcatcctgctagacagatgcatgatactttctatctaaatgctacaacagtactgcgaacacacacatcaaacgtacaggctcgtgaactaaagaaacaacaacctccaatcaaagttgttgcccccggcctatgttttcgtaacgaagatatttctgcacgttctcatgtgctcttccatcaagtggaagctttttatgtagatcacaatgtaacgttttcggacttgactgcaatcctcagtgcattctaccattccttcttccaaaggaaaacagagttacgttttagacatagctactttccttttgttgagccaggtatagaagtagatgtctcttgtgaatgttgtggcaaaggatgtgccctttgcaaacatacaggttggctggaagttgcgggagcgggaatgattcatccccaagtactacgtaacggaaatgttgatcctgaaatctattctgggtatgctgttggcatgggaatcgaaagattggcaatgttaaaatatggcgtctccgatatccgactttttagtgaaaacgatttaaggtttttacaacaattctcttaa

SEQ ID NO: 18739 - DNA, 366 bp, Chlamydia pneumoniae
atggtaagagcaacaggttcggtagcttctagacgtcgtcgtaaacgtatattaaaacaagctaaaggtttctggggtgatagaaaagggcatattcgtcagagtcgctctagtgtcatgcgcgctatggcattcaattacatgcacaggaaagaccgtaaaggggatttccgtagcctttggattgctcgtcttaatgtcgcttcaagaattcatagcctctcttatagccgtttaatcaacggcttgaaatgcgcgaatatttctttaaacagaaagatgctttcagaaatagctatccacaatcctgaaggttttgcagaaattgcaaaccaggctaaaaaagctttggaagccacagtttag

SEQ ID NO: 18740 - DNA, 195 bp, Chlamydia pneumoniae
atgcccaagatgaaaaccaataagtctgtttcagcacgttttaaattaacagcctcaggccaattaaaaagaactcgtccagggaagagacataagttgtctaaaaagtcttcgcaagaaaaacgcaacctatctaagcagcctcttgtagataaaggtcaggtaggtatgtataagcgaatgatgcttgtttaa

SEQ ID NO: 18741 - DNA, 561 bp, Chlamydia pneumoniae
gtggcattaaattttaagattaacaggcaaataagagctcctaaagttcgtctcattggttcagccggagaacagttaggaatacttgctatcaaagatgctttggatttagcccgagaggcaggtcttgatttagttgaagttgcttcaaatagcgagcctcctgtatgtaagatcatggactacggtaaataccgttatggtctgacaaaaaaggaaaaagatagtaaaaaagctcaacatcaggtgcgcataaaagaagttaagcttaagcctaacatagacgaaaatgatttttcgactaagttaaagcaagcgcgtacgttcgttgaaaaaggaaataaagtcaaaattacatgcatgttccgtggtagagaattagcttatccagaacatggttttaaagttgttcaaaaaatgagtcagggtttagaggatattggtttcgttgaagctgaacccaaactagcaggtcgttccttgatttgtgttgtggctccaggaacagtaaaaacaaagaaaaaacaggaaaagtctcatgcccaagatgaaaaccaataa

SEQ ID NO: 18742 - DNA, 492 bp, Chlamydia pneumoniae
ttgcttgtcatggccacattgagtcctgaaaaattctcggggtcccctatttcgatctcgaaggaattccctcagcaaaagatgagagaaatcatcttgcagatgttgtatgccctagatatggctccttcagcagaggacagtttagttcctttgcttatgtcacaaactgcggtgtctcaaaaacacgtactcgtagctttaaaccagactaaaagcattttagaaaaatcacaagaattggatctaattattgggaatgctcttaaaaataagtcttttgatagtttagatcttgtagaaaaaaatgtcctacgcctgactctctttgagcatttttacagcccacccattaacaaggccattcttattgcagaagcaattcgtctagttaaaaagtttagttattcagaagcctgtcctttcattcaggcgattttgaatgacattttcacagattcatctctaaatgaaaattctttatcaatctga

SEQ ID NO: 18743 - DNA, 915 bp, Chlamydia pneumoniae
atgaaagaagctgcgcctatgcattttccttttcctgttcgtcgtagtgtgtggctgaataggtattccactttccgcattggaggacctgcaaattactttaaagccatccatactattgaggaggctcgtgaagttatccgtttcctacattcaatcaactatcccttcctcatcatagggaaaggctctaattgtttatttgatgaccgtggttttgatggctttgtactctacaatgcaatctatggtaaacagttcctagaggatgctcgtattaaagcgtattcgggtctttcctttgcagctttaggtaaagcgactgcctataatggatattcgggacttgagtttgctgcgggcatccctgggtcggttggcggggccatttttatgaatgcaggtacaaatgaaagcgacatatcttccgtggtgagaaatgttgagacaatcaactctgaaggagagctttgttcctattctgtagaagaattagagctgagctatcgctcctcgcgcttccatagacaacaagagtttattttatcagcgaccctccagctttcaaaaaagcaagtttctgccgaccactcgaaatccattctgcaacatcggctcatgacgcagccctatacgcagccttctgctggctgtattttccgtaatcctgaaggaacttctgctggcaagcttattgacgcagctgggttgaagggattagcaatcggaggggcacaaatttctccgttgcatgcaaacttcattatcaatactggcaaggccacttctgatgaggtcaagcaactcatagctatcatccaatcaacgttaaaaacgcaaggcattgatctggaacacgagattcgcattatcccttatcaaccgaagattcactcccctgtctctgaaaaataa

SEQ ID NO: 18744 - DNA, 1041 bp, Chlamydia pneumoniae
atggaagcagatattttagatggaaagctcaaacgggttgaggtaagtaaaaaaggattggtgaattgtaatcaagtagatgtcaatcagctagtccctatcaagtataaatgggcttgggaacattacctcaatggatgtgcaaacaactggcttcctactgaagttcctatggcaagagatatcgagttgtggaaatcagatgaactgtctgaagacgaacgcagggtcattttgttaaacctaggatttttcagtaccgcggaaagcctagtcggaaataacatcgttcttgctatcttcaaacatatcacaaaccctgaagcaagacagtatttactgcgtcaagcttttgaggaagccgtacatacacatacatttctctatatttgcgaatctttaggacttgatgaaggcgaagtattcaatgcctataatgaaagagcctcaattagggctaaagatgattttcaaatgacattaacagtcgatgtccttgatcctaatttttctgtacagtcttcagaaggccttgggcagttcattaaaaacttagtaggatactatatcattatggaaggaatcttcttctatagtggttttgtaatgattctctctttccatagacaaaataaaatgacaggaattggagaacagtaccaatacatcctcagagatgaaaccatacatttaaattttggaatcgatcttatcaatggaattaaagaagaaaaccccgaagtttggactacggaactacaagaagaaatcgtcgctcttattgaaaaagctgtagagcttgaaattgagtacgctaaagattgcttacctcgaggaatcttgggattaagatcttcgatgtttatagattacgttcgtcatattgcagatcgtcgtttagagagaattgggttgaagcctatctatcactccagaaatcctttcccttggatgagcgaaaccatggatctgaataaagaaaagaatttctttgaaacccgggttaccgaataccaaaccgctggtaatttaagttggtaa

SEQ ID NO: 18745 - DNA, 3135 bp, Chlamydia pneumoniae
atggtcgaagttgaagaaaagcattacaccatcgtcaaacgtaatggaatgtttgtcccatttaatcaagatcggattttccaggctttggaggcagcttttcgagatacgcgtagcttagaaactagttctccactacctaaagacttagaagaatctattgcgcaaattactcataaagtcgtgaaggaagtcctcgctaaaatttcagaaggtcaggtagtcactgtagagagaatccaggatcttgtagaaagtcagctctatattagcgggttgcaggatgtggctcgcgattatattgtttacagggaccaacgcaaggcagagcgcggtaactcttcgtccataattgccatcatacgtagagacgggggaagcgctaaatttaatcctatgaagatctctgcagctctcgaaaaagcattcagagcgacgctccaaattaatgggatgactcctcctgcaacactatccgaaattaatgaccttacccttaggatcgttgaagatgtcctaagccttcatggtgaagaagctattaatctggaagagatccaagatattgttgaaaagcaacttatggttgccggctattatgatgtggccaagaattatattttatatagagaagctcgtgcacgagcccgtgctaataaagatcaagatggacaagaagagtttgtcccccaagaggaaacgtacgttgttcaaaaagaagacggcaccacctaccttctgagaaaaacagatttagaaaagaggttttcttgggcatgcaaacgctttcctaaaactacagattctcaactgcttgcagatatggcatttatgaatttgtattcaggaatcaaagaagacgaggtcaccacagcatgcatcatggcggcacgtgccaatatcgagagagaacctgattacgcttttatcgcagcagaactcctcacgagttccttgtatgaagagaccttaggatgcagctctcaagaccccaatttatcagaaatacataaaaaacattttaaagaatacatcctcaatggagaagagtatcgcttgaatcctcaattaaaggattatgatctcgatgctcttagtgaagtcctagacctctctagagaccaacagttttcctatatgggagtccaaaatctctacgatcgctattttaatctgcatgaaggacgacgtttagagactgcgcagatcttttggatgcgggtttctatgggcttagccttaaatgaaggagaacaaaagaatttttgggcaatcactttctataatctgttatccacattccgctataccccagcaactcctacattgtttaactccggaatgcgtcattcccaactcagttcatgctatctttccacagtaaaagatgacctaagtcacatttataaggtgatttctgataatgctttgctttctaaatgggcagggggaattggaaatgattggacagatgtccgtgctacaggagctgtaattaagggaaccaatggaaagagtcaaggcgtcattcccttcattaaggttgccaatgatactgcaattgcagtgaatcaggggggcaaacgtaaaggtgctatgtgcgtatatttagaaaactggcacttggattacgaagactttttagaattgcggaagaatacaggagatgagcgtcgtagaactcacgatatcaatacagcaagctggattcctgatctcttctttaagagactagaaaaaaaaggcatgtggacactctttagccccgatgatgtcccaggtttacacgaagcctatgggttagagtttgaaaagctttatgaagaatatgaacgtaaggttgaatctggggaaatccgtctttataaaaaagtagaagccgaagtgctgtggcgtaaaatgttaagcatgctttacgaaacagggcatccttggattacatttaaagatccttcgaatattcgctcaaaccaagatcatgttggcgtcgtacgctgttctaatctatgtacagagattttattgaactgttcggaatcagagactgcagtttgtaatttaggttccataaacttggtagaacatatccgtaatgacaagttagatgaagaaaaattaaaagaaactatctcaatagccatccgtattttggataacgttattgacctgaacttctaccctacaccagaggctaaacaagccaacctaactcacagagctgtggggttgggggttatgggattccaggatgttctttacgagttgaacattagctatgcctcacaagaagctgtcgaattttctgacgagtgctcggagatcatcgcatactacgctattctagcctcgagcttactcgcgaaagaacgaggtacatatgcttcttattcaggatctaagtgggatcgtgggtatctacccttagatactatcgagcttctcaaagaaactcgcggagagcataatgttcttgtagacacatcaagtaaaaaagattggactccagttcgtgatactatccagaaatacggaatgagaaatagccaggtcatggcaattgctcctacagcaacgatctcgaatatcataggggtcacccaatctatagagcccatgtataaacatctctttgtaaagtccaacctttccggagagtttacgatccccaacacctacctgattaaaaaacttaaggaattaggactttgggatgcagaaatgttagatgatctaaaatattttgacggatctctattggaaattgaaaggatccctaatcacttgaaaaagcttttccttacggcatttgaaatcgaacccgagtggattatagagtgtacctctagaagacagaaatggattgatatgggagtttctctaaatctgtatcttgctgagccagatggtaaaaaactctccaatatgtatctcacggcttggaaaaaaggattaaagactacctattatttaagatctcaagctgcaacatcagtagagaaatcatttatagatatcaataaacgcggcattcagcctcgttggatgaaaaataaatcagcgtccacaagtattgtggtcgaaagaaaaacaacccccgtttgttcaatggaagaaggttgcgaatcttgtcaataa

SEQ ID NO: 18746 - DNA, 1467 bp, Chlamydia pneumoniae
atgataactaagcaattgcgttcgtggctagctgtacttgttggttcaygtctgctagctcttcctttatcagggcaagctgtcgggaaaaaagaatctcgagtttccgagctgcctcaagacgttcttcttaaagagatctcgggagggttttctaaggtcgctaccaaggcgactcccgctgttgtgtacatagaaagtttcccaaagagccaggctgtaacacatccttctcctggacgccgtgggccttatgaaaatccttttgattattttaatgatgagtttttcaatcgtttttttggtctaccttcacagagggaaaaacctcaaagtaaagaggcggttcgaggaacaggtttcctagtatctccagatggctatattgtgactaataaccatgttgtcgaagatacaggtaagattcacgtaactcttcatgatgggcaaaagtacccagcaactgtaatcggactcgatcctaaaacagaccttgcagtcattaaaattaaatcccaaaacctcccgtatctttcttttggaaactccgaccacttaaaagtcggagattgggcaattgcaattggaaatcccttcggtcttcaagctacggtcaccgtaggtgtcatcagtgctaaaggaagaaatcaactccacattgcagattttgaagattttattcagacagatgctgcgattaatccaggcaactctggaggccctcttctaaatattgatggacaggtcatcggtgttaatactgccattgtcagtggtagtggtggctatattggaatcgggtttgcgattcctagccttatggcaaatagaatcatagatcagctgattcgtgatggtcaagttacccgaggattcttaggagtgactttacaacctatagatgcggaactcgctgcttgctacaaactcgaaaaggtttatggcgctttagtcacagatgttgttaaaggatctccagcagataaagcagggctaaaacaagaagatgtgatcattgcttataatgggaaagaagtcgattcactgagtatgttccgtaatgctgtttctttaatgaatccagatacacgtattgttctaaaggtagttcgtgaaggaaaggttatcgaaatacccgtgacagtttctcaagctccaaaagaagatggaatgtcggctttacagcgtgtgggaatccgtgtgcaaaacctaactcctgaaactgctaagaagctgggaattgctccagagactaaaggcattttgattataagtgttgaaccagggtctgtagcagcttcttcaggaattgctcctggtcagctgatccttgctgtgaatagacaaaaagtatcttcgattgaagatctgaatagaacgttaaaagattctaacaatgagaatattcttcttatggtttctcaaggagatgttattcgcttcattgccctgaaacctgaagaataa

SEQ ID NO: 18747 - DNA, 882 bp, Chlamydia pneumoniae
atgttccactcactaagtaaaaatactcccatcatcacacagggaattacagggaaagcaggttcatttcatactgagcagtgcctcgcctacggtacgaatttcgtagggggtgtgactccaggcaaagggggaaccctttggctagacctgccagtctatgattctgtacttgaggcgaagcaagctacagggtgtcgcgcgaccatgatttttgttccaccaccttatgccgccgaggccatcctagaagccgaagaggccggaatcgaacttattgtttgtattaccgaagggatccctgttcgagatatgcttgaagtggctagagttatggacaacagtacttcacagcttatcggcccgaattgtccaggaattatcaagcctggagaatgtaaaattggaattatgccaggatatatccacctgccgggaaatattggagtggtctctagatcaggaactctgacatacgaggctgtttggcagctcactcagctcaaaatcggccagagtatttgtgtaggtattgggggagaccccctcaatggaacctcatttattgatgtcttgcaggcgctggaggaggatccctatacagaactgattttaatgatcggggaaatcggcggtagtgccgaagaagaggccgcggcctggatccaagcacactgcacaaaacccgtggttgcttttattgctggtgttacagctccaaaagggaaacgcatggggcatgctggggccatcatctctggaaattctggggatgccaaaagtaaaatacaagttctacgtgaatctggagttactgtagttgagtctccggcccatatcggaaaaactgtagacgctgtattacgggcaaaagaactctaa

SEQ ID NO: 18748 - DNA, 873 bp, Chlamydia pneumoniae
atgttcaaattctttagaaacaagcttcaatctttatttaaaaaaaatatatctttagatcttatagaagatgctgaaagtttgttttatgaagcagattttggtactgagcttactgaagaattgtgtgcacgattacgtcggactaaaaaagctgacgcatctactatcaaagatctgattacagttttacttcgcgagtctctagaaggtcttccttctcaagcttcacaaagttcccagaccagaccgattgtttctttacttcttgggaccaacggctcaggaaaaacgacaacagcggccaaacttgctcattactacaaagagcgatctgaaagcgtcatgcttgtagccacggatacctttcgagctgctggcatggaccaggcacgactctgggccaacgaacttggctgtggctttgtctctggacaacccgggggggacgctgctgctattgcctttgatgggattcaatctgcaatcgcccgggggtactctagagtcattattgatacctcaggtcgcctgcatgtacatggcaatcttatgaaagagctttccaaaatagtctcggtttgcggcaaagctctagagggagctcctcatgaaatttttatgactgtggactctaccttagggaataatgctatagagcaggtgcgggtatttcatgatgttgttcccctttctggtcttatcttcacaaaagtagacggctctgccaagggtggcaccctatttcaaatagctaaacgactgaaaatccccacaaagtttattggttatggggaatctttaaaggatcttaatgaattcgacttagatctttttctaaacaaattatttcctgaagtagaaaagatctaa

SEQ ID NO: 18749 - DNA, 1830 bp, Chlamydia pneumoniae
atgtgcgggatatttggatatttgggaaaccaagatggtgtgtctattgttctagaaggcttggcaaagttagaatatcgtggttatgattccgcaggtcttgctgctgtagttgaacaagagctttttattagaaaaactgtaggtcgtgttcaagagctttcaaacttgtttcaagaaagagaaatccctacggcatcagttattggccatacccgttgggcaactcatggagtgcctaccgagattaatgctcatccacatgtggatgagggaaggtcgtgtgctgtagtccataatggaattatagaaaatttcaaagagttgcgacgcgagctgactgcgcaaggcatttcatttgcttcagataccgattcagaaattattgttcagctgttttctctatattatcaagagtcccaagatcttgtgttcagcttttgtcagactctagctcaactccgaggtagcgtagcctgcgctttgattcataaagatcatcctcatacgattctttgcgcttctcaagagagccctttaattcttggtttagggaaagaagagacgtttattgcttcagattcgcgagctttcttcaaatatactcgacattctcaagccttggcctccggagaatttgctatagtttctcaagggaaagaacctgaggtttataatttggagcttaagaaaatccataaggatgtacgacaaatcacctgtagtgaagatgcttcggataaaagtggctacggctattatatgctgaaggaaatctatgatcagccagaagttttagaaggtctgattcaaaaacatatggatgaagaaggacatattttatctgaatttttatcagatgttcctatcaagagttttaaagaaatcacgattgttgcttgcgggtcttcctatcatgctggttatctcgctaaatatattatagagtccttagtttcaattcctgtacatattgaagtggcttccgaatttcgctatcgacgtccctacataggtaaagatactttggggattttgatcagtcaatcaggagaaacagctgataccctagctgctttgaaggaattacgtcgcagaaacattgcttatctcctaggcatttgcaatgtcccggaatcagcaattgctcttggtgtggatcactgtctgtttttagaagcgggggtggaaatcggtgtagctacgacaaaggcttttacctcgcaactcttgttgcttgtgtttttgggtttgaaattagcaaatgtacatggtgccttgactcacgcagaacaatgttcctttggccagggattacaaagcttaccagatctctgtcaaaaacttcttgccaacgagtctctccattcttgggcgcagccttactcctatgaagataagtttctttttctaggccgtaggttgatgtatccggtggttatggaggctgccctcaaactcaaagaaattgcttatattgaagcgaatgcgtatcctggtggagaaatgaaacatgggcccatagctttaattagcaaaggtacccctgttattgcattttgcggtgatgatattgtctatgaaaagatgataggcaacatgatggaggttaaagctcgtcatgctcatgtgattgctattgctcctgaatctcgtgaagatatcgctgcagtttctgatcaacagatctttgtcccagattgtcattttctcgctgctcctgtgttatatactatagttggtcaagtgatggcatatgctatggcgttagcaaaaggaatggagattgactgtcccagaaatcttgccaagtctgttactgtagagtaa

SEQ ID NO: 18750 - DNA, 1377 bp, Chlamydia pneumoniae
atgcaacaaagtgtcagaaaactttttggtacagatggtgtgcgaggacgagcaaattttgaacctatgacagtggaaacgactgttttattagggaaagctgtagctagagtacttcgtgagggtagatcgggcaaacatcgtgttgtagtaggcaaagatactaggctatcgggatatatgtttgagaacgcattgattgctgggctcaattctatggggatagaaactttggttcttggtcctatccctacgccaggagttgcgtttattacacgggcctatcgagcggacgcagggattatgatttctgcttcacataatccttacagggataatggaattaagattttctctttagaaggatttaaaatttctgatgttcttgagcagcgtattgaaaccatggtgagtgaagctgactttggtccattacccgaagatcacgcagttgggaagaacaaacgtgtgatagatgctatgggacgctatgtagagtttgtgaaagcaacatttcctaagggacgcactttaaaggggttaaagattgttctagactgcgctcacggagcttcttataaggtagcaccttctgtatttgaagagctggatgcagaggtcatttgttatggttgcgaacctacaggaatcaacatcaatgaacactgcggagctcttttccctcaagtcattcaaaaagctgtaatcgaacatcaagcacatcttgggattgcgctagatggggatggagatcggattatcatggtggatgagaaggggcatattgtcgatggagatatgatcctcagtatatgtgctggtgatcttaaaaaaagatccgcattacctcataaccgtgttgttgccacgattatgacaaatttcggagtcttgaaatatttggaaggattaggcctacaggtattcacctctccagtaggggaccgtcatgttttgcacgccatgttagaacatgaagtgaccttgggaggtgaacagagcggacatatgattttcttggactacaataccactggagatggaattgtctcagcgctacaagttttgcgcattatgatagaaagtgaatctatgctctcagatttgacagccccaattgtaaaaagtccccaaacattgatcaacgttgctgtaagagagaaaattcctcttgaaaccatccctttaattgaaagaaccttgagagatgttcaagatgccttaggcccctctggacgcatattattaagatattctggaaccgaaaatatatgcagagttatggttgaaggtcataaaaaacatcaagtagactgccttgccaaggctcttgcggatgttattgatgcagaattaggtacaggtagtagagagtag

SEQ ID NO: 18751 - DNA, 1815 bp, Chlamydia pneumoniae
atgatcccttctggcctagtttatctgctttatcccctaggatttcttgctagtcttttttttgggagtgccttctcaatacagtggtggctgagtaaaaagcgcaaagaggtctatgctcctcgaagcttttggattctctcttcaataggagccactttgatgattgtccacgggacaattcaaagccaatttcctgtgactgtacttcatgtcattaacttaattatctacctcagaaacctaaatattacttcctctcgaccgatttcctttcgagcgaccttagttctgatggctctgagcgtggtgttcgtgactctgcctttcctctatgtgaacatggaatggatggcctctcctaatatcttccatcttcctcttcctcctgcacaactttcttggcatcttataggctgtttagggcttgctattttttcgggtcgttttttaatccaatggttctacatagaatcgaataatactaaagatttccccttactattttggaaaattggacttcttgggggattgctggcgctggtgtacttcattcgcatcggagatcctataaacatcctgtgctatggctgtggattattcccgtccatcgcaaatttacgtctcttttataaagaacaacgttcgactccttatttggatacacactgctttctctctgctggagaagctagcggtgacattttggggggtaagttaatccaatccataaagtctctctatccaaacatacggttctggggtgttggaggtcctgcaatgcgacaagaaggtctccagcccattctaaacatggaggagtttcaagtttcaggatttgctgaagttctggggtcattatttagattatatcgaaattaccgcaaaatcctaaaaacgatactcaaacacaagccagcgactcttatcttcattgatttccccgattttcaccttctcttaattaaaaagctgagaaaacatgggtatcgaggaaaaatcatccattacgtttgcccgagtatttgggcatggcgccccaaaagaaaacgcatactagagcaacatcttgatatgctcctactgatccttccttttgaagaaggccttttcaaaaacacatctcttgagactgtgtatttaggacaccccctagttgaggagatctctgactacaaagaacaggcctcttggaaagagaaattccttaattctgaccgtcctattgttgctgcgtttcctggaagtcgtcgtggtgacatcagccgaaatttacggatccaggtacaagcttttctaaattcatcgctatctcaaacacatcaatttgtggtttcctcatcaagcgctaagtacgacgaaatcattgaagatactctaaaagcagaaggatgtcagcatagtcaaatcatccccatgaatttccgctatgagctcatgagaagctgtgattgtgcactagcaaaatgtggcactatagtcttagaaactgccttaaatcaaacacccacaatagtcatgtgtcgacttcgaccttttgacacattcttagcaaaatatatttttaaaattcttttgcccgcgtattccttaccaaatatcattatgaactccgtgatttttccagagttcattggagggaaaaaagattttcatccagaagaaatcgctaccgctttagatttgctaaatcaacatggctctaaagaaaaacaaaaggaggactgccgcaaattatgtaaagtgatgacgacagggcaaatagcttctgaagagtttttaaaaagaatttttgacacacttcccgctgtatga

SEQ ID NO: 18752 - DNA, 2829 bp, Chlamydia pneumoniae
atgttttggaaacttttatgtcctattttaatttgcacttccctatccataacatcgtgtgaacagcagttcaaagtcgtccccaatcagtgccctttacaagtttccactcctgccgctgcggaccagaaaattgaaaagattatttgtagtaacgggctccctcttcttattatttccgaccctaatcttcctacttcgggagcagcactccttgtgaaaacaggaaataatgccgatcctgaagagtatcctgggatggcgcacttcacagaacactgtgtctttcttggaaatgaaaagtatcctgaggtctctggtttccctggatttttaagcgaaaataatggggtgcataatgctttcacttacccaaataaaacagtctttgtattttcagtagaacattctgcgttttctgatgctttagaccaatttgttcatctatttattaatccgaagtttcgtcaagaagatcttgatagagaaaagtacgcagtacatcaagaattcgctgctcatcctctttctgatgggagacgtgtgcatcgcattcagcagcttgttgctcctcagggccatccctgcgcacgttttggttgtgggaatgcttccaccctcaccccagtgactacagagaaaatggcagaatggtttaagctacattattctcctgagaatatgtgtgctattgcttacacatcagctccgctctctaaagcaaagaaacagttctcaaagattttttctcagattcctagatcaaaaaattatgaaagacaggaaccttttcttccttctggtgacacctcgtcattaaagaatctctatattaaccaagcgattcagcctacctctaatctagaaatttactggcatatttatgaatcttcccatccgattcctttaggctgttacaaggctcttgctgaagttttaagaaatgagagtaagaacagtttagtctctttattgaaaaacgagcagctaattacggatttagacgtggaattctttagaagttctttaaatactggagaattctatattagctatgagcttacggagaaaggcgataaacactattctcaggttattgatagtaccttccaatatcttcgatatattcaggaacacgggattcccaactatacgttagaagaaatttctacaattaatgctttaaactactgttacagttccaaaagtccattgtttgatctgctttgtaagcagattgtatccttgggcaatgaggatctatctacgtatccttatcatagccttgtgtatcctaaatactcttctgaagacgagtctgctcttcttaatttagtctctgatcctgaacaagcacgttttgtcttatctagtaagaactctgagcattgggaagaagcgactcagctccacgatcctatttttgacatgacctactatgtaaaagctctggacggtgttcaggattatggaaaggtgcagtcactaaagcccatagctcttccaaagccgaatctgtttattcctaaagaggtgactcttcctggtgtacacctactgaaaaaacaagaatttccttttgctcctgcactcagttaccaagatgataaattaactctgtaccattgcgaggaccactactatacagcaccgaaactctccagtcagattcgcatccgctctcctcagatttcgaggtcctcccctcaatttctagttgctacggagctctattgcttagctgtgaatgatcagcttttgagggagtattatcccgcaacgcaagctggtctttcttttacttctgctttaggtggtgatggtattgatttaagagtttcagggtacacaacaacagtccctgcattgttaaactcaattttaacctcattacctaatttagagattagctatgagacattcttagtatataaaaagcagttgttagagctttatcaaggagctttgctcaactgtccggttcgttctgggcttgatgagcttgcctcacaagttatgaaggagacgtattctaatactactaagctatcagctcttgagaagttaagtttttctgaattccaagcgtttgcctcgaaccttttcaacagtgtacatcttgaagttatggtcttagggaacctttctgagcagcagaagaaagattatcttgagatgctacaagttttcactgcgtcacgatcttcgcatgctacaaagcccttttattacgagctacagtctcaggaaatttctgagatccatcatgactatccgttaactgcaaacgggatgctcttattacttcaagataagagttccccgtctatacaagggaaggtttgtgcggagatgctctttgaatggttgcatcacattacttttgaggagcttagaacgcaacagcaattgggttatatggtgggtgcgcgctatcgagagtttgcttccaggccgtttggatttctctatatccgttcggatgcgtattctcctgaagagcttcttgctaaaacttctctgttccttaacaaggtctcagcttctcctgagaaatttggaatatcgcaagagaaattcgcaaacatacgcaaagcgtatatcaataaaatcttggagcctgagcattccttagacatgatgaactcggcgttattttctctagcatttgagcggccttttgtggagttttcgactcccgacttgaagattgctattgcggaaacgttaacatacgaagagttcttaaaatactgtcagtgtttccttagcaatgaactagggacgcaaactagcgtctatatacgtggcactcagaagacctcttaa

SEQ ID NO: 18753 - DNA, 510 bp, Chlamydia pneumoniae
atgaaacaacagctacttttacttgaagatgttgatggattaggacgtagtggtgatttaattaccgctcgccctggatatgtccgtaactatcttatccctaagaaaaaagcagtgattgctggtgcaggaactctgcgtttacaagctaaacttaaggagcaacgcttaatacaagcagctgctgataaagcagattccgaaaggattgctcaggctctcaaagatatcgttttggaattccaagtacgtgttgaccctgataacaatatgtacggatctgtaaccattgcagatattattgcagaagctgctaaaaagaatattttcttggttcgtaaaaactttcctcatgcccactacgctattaagaatttgggcaagaaaaacattcctttaaagctaaaagaagaagtaaccgcaaccttattggtcgaagttacctctgacaatgaatacgtcactgttttggctcaaggaaaacaaactgaggaaaatcaagaaggctaa

SEQ ID NO: 18754 - DNA, 249 bp, Chlamydia pneumoniae
atgaataagcctgttcataataatgaacacagaaggaagcgttttaataaaaaatgcccttttgtttccgcaggttggaaaacaatagattataaggatgttgaaaccttaaaaaaattcattaccgaaagaggtaaagtattacctagaagaattacaggtgtttcttcccgtttccaaggcgtgctatcccaagcaatcaaaagagctcgccatttagggttgttgccttttgttggagaagattaa

SEQ ID NO: 18755 - DNA, 339 bp, Chlamydia pneumoniae
atgggaaaaaaagaaaatcaactttacgaaggcgcctatgtgtttagcgtcactcttagtgaagaagctaggcgcaaagctttggataaggttatttcaggcataactaattacggcggtgaaattcataaaattcacgatcaaggacgtaaaaaactagcgtataccattcgtggagctagagaaggttactactattttatttatttttctgtctctcctggagccattacagagctttggaaagagtatcacttaaatgaagatctacttcgtttcatgactcttagagcagattctgtaaaagaagttttagaattcgcctctctacccgaataa

SEQ ID NO: 18756 - DNA, 558 bp, Chlamydia pneumoniae
atggagcttgtagttacaagtcgagagactggtaagaaatcttttcttaagaaaattcgtcagcaaggtggaatccctgctgtagtatattctgcaggcaagagccttgcgaatatcactgtggatgcacttgtgtttaaaaagtttttatcgaatttagaaagcggagccctatcttctacggtcttttctttgtcttatgaagggcgtataattaaagctctagttaaagatatccaatatcaaatcaccacctacgatgtaattcacctcgattttgaagaactcgtagaagatcgtcctgtaaagttaaatattcctatccgttgtatcaatgctgtagactgtattggagtgaaactcggtggatctttacgacaagtgattcgtgccgttcgcgtagtatgcaaacctaaagatattgtaccttttctagaacttgatgtgcggtctgttggactttctcaaacgagaaaactatccgatataaagatccctgctggaatagaaacaattacacctttgaaagaagtcgctataaccgtctctagaagataa

SEQ ID NO: 18757 - DNA, 1431 bp, Chlamydia pneumoniae
atgagaatcgtacaagtcgctgtagaattcactccaatcgttaaagtaggcggtctaggcgatgctgtagctagtctatctaaggagttagcgaaacaaaatgatgtggaagtacttctccctcattatcctttaatttccaaattctcttcgtctcaagttctttccgagcgttctttctattatgaatttttaggcaagcagcaagcctctgcaatttcttattcttacgagggtcttacgcttactataattacgttggattcacaaatagagcttttctcaaccacgtccgtgtactctgagaataatgttgtacgtttctctgcttttgcagctgcagctgcagcttatcttcaagaagcggatcctgctgacattgtgcacttgcatgactggcatgtaggtttacttgcgggtttattaaaaaaccctttaaaccctgtgcattcgaagattgtctttactatccataattttggttatcgagggtattgtagtacgcagctattagcagcgtcgcaaattgatgattttcatttgagtcactaccaactatttcgcgatccgcaaacttctgttctaatgaagggagctctctattgttcggattacattacgacagtgtctcttacttatgtgcaggaaattataaacgactattctgattacgaacttcatgatgcgattctagcaagaaattctgtattttctgggatcatcaatggcattgatgaagacgtttggaacccgaagacagatcctgctttagctgtacagtacgatgcaagcctattaagcgaacctgacgttctctttactaaaaaagaagagaacagagcggtattatatgagaagttggggatcagttcagactattttcctttgatttgtgtgatctcacgcattgttgaggaaaagggtcctgaatttatgaaagagattattctccatgctatggagcacagttatgcctttatcttgattgggacaagtcaaaatgaggttcttcttaatgagttccgtaacttacaagattgtttagcgagctcccccaacattcgtttgatcttggactttaatgatcctttagccaggctaacttatgctgctgccgatatgatctgcatcccttcacatagggaggcttgtggacttacccagctgatagcgatgcgttatggcacagttcctttagttcgtaaaactggagggcttgctgatacagtgattcctggggtaaatggtttcactttctttgatacaaacaattttaatgaatttcgggctatgcttagcaacgctgtaacgacgtatcgtcaggagcctgacgtttggttgaatttgattgagtcgggaatgcttcgggcctctggcttagatgccatggctaagcattacgtaaatctttatcaatctttactctcatga

SEQ ID NO: 18758 - DNA, 621 bp, Chlamydia pneumoniae
gtggggctacctaattacatcactttttccagactctttattacaccgattttcatgatcctgtatttaaaaggaaaatggtttggaatcactccagtagtgttgccttacgtgctgttagctctcctggcaatctctgagttaacagacgctatcgatggttatgtcgcaagaaaattttcacaggttaccgatttaggaaaactcctggatcctatggcagatagtatctacagaatttctatctacctaacttttacacagcctccagtcaatttacctttgcttctggtattcatcttcctagcacgggattctgtaattagtactttgcgtactgtatgtgctttccgtgggcgtgttgtcgctgcaagggctagtgggaaactaaaagctatactacaaggagtcagcttcttcttaattcttttggttatgattcctcactccctaggacttctttctcagaatggattggaaatctttgcctcagttacggtttcaatcatagctgtgtattctatagcctcaggaatcgaatacttctggatgaacaaaaactttttatcccaaagagctaaaacaaaagattcagaaaagaatcatgagagtaaagattga

SEQ ID NO: 18759 - DNA, 3033 bp, Chlamydia pneumoniae
gtgtcagaacatcccctcaccttacagtctatgattgcgactatcttacgattttggagcgagcaagggtgcgtcatccatcaaggatacgatttagaagttggtgctggaacattcaatcctgcaacgttcttacgagccttaggacctgagccctataaggctgcttatgtagaaccttcaaggcgtccgcaagatggtcggtatggcgtgcatccgaaccggctacaaaactatcatcaactccaggtcattttaaagcccgtgcctgaaaattttctctcactctatacggaatcgctacgggccattggtttagaccttcgtgatcacgatatccgttttattcatgacgattgggaaaaccctaccattggagcttggggcttaggttgggaagtgtggctcaatgggatggaaattacccagttgacctatttccaagccattgggagtaaacctttggatactatcagtggggagatcacctatggcattgaaagaattgcgatgtatttgcaaaagaaaacctctatttatgatgtcttatggaatgacactttaacgtatggacaaattacacaagcttctgaaaaagcttggagtgaatataattttgactatgcaaacaccgagatgtggtttaagcatttcgaagatttcgctgaggaagctttaagaactcttaaaaatggtctttctgttcctgcttatgacttcgtgatcaaagcgtcgcatgcttttaatatccttgatgctcggggaacgatttctgttactgagcgtacacgttatattgctcgtatccgtcaattaactcgtttagttgcggatagctatgtagagtggcgtgcttctttaaattatcctttacttagtctttcttcaacatctgagcctaaggaaacatcagaatctgtagttcctatgatttcatctacagaggatctcttactagaaattggttctgaggaacttcctgcgacttttgttcctattggaatacaacaactagaatcgttagctcgccaggttcttactgatcataatattgtttatgaggggttagaggtccttggctctccacgacggttggctttgcttgttaaaaacgtagctcctgaggtcgtgcagaaggcttttgagaaaaaaggtcctatgctgacgtctttattttctcctgatggagatgtgtctcctcaaggccagcagttttttgcttctcagggtgtggatatttctcattatcaagatctttcccgtcacgcttccttagctatccgtacagtcaacggttctgaatatttattcctattacatcctgagataaggttacgaactgctgatatcttaatgcaggaacttcctttattaattcagaggatgaaattccctaaaaagatggtttgggataacagcggagtcgagtatgcccgccctatacgttggctagttgctctttatggagaacacatcttaccaatcactctcggtactataatagcttcaagaaattcttttggtcatcgtcaattagatccgagaaaaatttcgatttcctctcctcaagattatgtagaaaccttaaggcaagcgtgtgttgtagtttcacaaaaagagcgtcgcatgattatagaacaagggctacgagctcatagttctgatacaatttctgcgattcctcttccccgtttaattgaagaagctaccttcctgtcggagcacccttttgtctcttgtgggcaattttccgagcaattttgtgctttaccgaaagagttacttatagctgagatggtaaatcaccagaagtatttccctacccacgaaacctcttctggagctatttctaacttttttattgtagtttgtgataattctccgaatgatacaatcattgaaggaaatgaaaaggcactcactcctcgtctcactgacggagaatttcttttcaaacaagacttacagactcctttaacaacctttattgaaaagctcaagtctgtgacatactttgaagctttgggttctttatatgacaaggtagagcgtttaaaagcacaccaaagagtgttctctactttttcctctttagcggcttccgaggacctagacattgccatccaatactgcaaagctgacttagtgtcggctgtcgtcaatgaattccctgaacttcaggggatcatgggagagtattatctgaagcatgcgaatcttcccacagcgtctgcggttgctgtaggagagcacctacgacacattactatgggtcaaaagctctcaaccataggaactcttctttctcttttagatcgtttggataacttgcttgcttgctttattttaggacttaagcctacgtcatcgcatgatccttatgcactacgtcgtcaatccttagaagtgttaacactagtatccgcctctcggctccctatagatcttgcttctcttttagatcgtctagcggaccattttcctagcaccattgaagaaaaggtctgggataagtccaagactatacacgaaatccttgaattcatttggggtcggttaaaaacatttatgggatccctagagtttcgtaaggatgagattgctgctgttcttatagattctgcaacgaaaaatcctattgagattttagatactgctgaagcccttcagctattaaaggaagagcatacagaaaaattagcagtgattacgaccactcacaatcgtttaaagaagattctttcctctttaaaactctccatgacttcgtcccctattgaagttcttggggatcgtgaatctaattttaagcaagttcttgatgctttccctggatttcctaaggaaacttcagcacatgcctttttagaatatttcttatcccttgctgatctttccaatgatattcaggattttctgaatactgtgcatattgctaatgatgatggtgcaatccgcaacttacggatttcgctattacttactgctatggataagttttccttgtgtcattgggaatctgtagctgtataa

SEQ ID NO: 18760 - DNA, 1785 bp, Chlamydia pneumoniae
ttgcgtaccgctatgtatacggaagagagcttagataacctgagacacagtatagatattgtggatgtcctttcggaacacatccatttgaagcgctccggtgcaacatacaaggcatgttgtccttttcatacagagaaaacaccttcgttcatagtcaatcctgcgggtgcacactaccactgctttggatgtggtgcacatggagatgccattggcttcctcatgcagcacttgggatactcttttactgaagccattttggtattatctaaaaaatttcaagtagacctagttctccaacccaaggattccggatacacccctcctcaaggactgaaagaagaattacgtcacatcaacagtgaagctgaaacttttttccgttattgcttgtatcaccttccagaagcgagacacgctttgcagtatttataccatcggggattttctccagatacaatcgatcgattccatttgggttatggaccagaacaatctctttttctacaagccatggaagaaaggaaaatctcacaagaacaactgcatactgcagggttttttgggaataaatggtttttgtttgcacgaagaatcatctttcctgtccacgatgcgctaggacataccattggattttccgctaggaaatttttagaaaactcccaagggggtaagtatgtcaacactccagaaactcctatattcaaaaagtccaggatcctctttgggttaaatttttcacgtaggagaatagccaaagaaaaaaaagtcatcctagtggaaggacaggccgattgcctgcaaatgatagattcaggatttaattgtacagtggcagctcaaggtacagcatttacagaagaacatgtgaaagagttaagtaaattaggagttttaaaagtcttcctactcttcgacagtgatgaagcaggaaataaagcagcattacgtgttggggatctttgtcaaactgctcagatgtccgtatttgtctgtaagctaccacaaggccatgatcccgattcttttcttatgcaacgaggaagctcaggactcattgctttattagagcaaagccaagactatcttacgtttttgatcagtgaaaaaatgagttcttacccgaagtttggccctagagaaaaggctcttctagttgaagaagcgattcgtcagatcaagcattgggggagtcctattcttgtatatgagcatttaaaacaactagcctccttaatgatggttccagaagacatggtattgtctttagcaaaccctcaggtaacagccgaaccacaaaatattcccataaaacaaaaagttcccaagatacatcctcatattgtgatggaaacagatatcttgcgttgtatgcttttttgtggatccaatactaaaattctctacacagcgcaattctactttgtcccggaggatttcaaacatcccgaatgtaggaaattgtttgcgtttatgatttcctattacgaaaaatatcggaaaaatgttccctttgatgaagcctgtcaggtactttctgattctcagattcttcaactgttaaccaagcggcgcctaaacacagaagctctcgatactatcttcgtacaatctcttcaaaaaatggcagataggagatggcgagagcaatgcaaacctctctctcttaaccaaaatattcaggataaaaagcttgagattttggaagactatgttcaattgcgtaaagatagaacaataatcacacttctagatccagaaagtgagctcattccttaa

SEQ ID NO: 18761 - DNA, 2487 bp, Chlamydia pneumoniae
atgacggaaaaaaaacctaccccgatgatggaacaatggcatcagtgtaaagaaaaagctggagattctgtgcttttatttcggatgggagacttttacgaagctttttatgacgatgcggttcttttatcccaacatttggaacttactttaacacaacgacagggaattcctatgagtgggattcctgtatctactgttgatacctatgtggatcgcctcatcggcaagggattcaaagttgctgttgcagaacaatttggcgagcctgcaaaagaaaaagagagtaaaaaaatcggtcccatggcccgggatattcagagatttgtcactcctggcactttgctatcctccaccctgctccaggaaaaattcaataattatattgttgctatcaatcgtatcgggtctctgtttggttttgcttgtttagatctttctacgggatctttctttattgaagaatgtgagaataccaaagagcttgttgacgagatctgtcgtcttgctccttctgaagtgctctcgtgtaacaaattttataataaagaaactgctattgtcatgcagttgcaacaacacctcaagctgaccttatctacgtatgcggactgggcctttgaacataagttcgcctctcaaaaacttacaacgcattttcaagtggcctccctagatggatttggcctgaaagggctcgtcccagcgatcaacgctgctggaggccttctctcttatatccaagataaacttttattacctacgaaacatattgcgattccccaaacgcgtggaaaacagcaaaagttattaatagatacggcatctcaagtgaaccttgagctcctcgctcccttgaatgatcctcaggggaaaaattctctcttacgtatcatggatcatacaagcacacctatggggggaagacttttacgtcaaattttgatcagtcctttctataaccctaaggagatccttgtacgtcaagatgctgtagaatttttccttcggcaagtgactttaagaaaaaatatcaaaacgtacctttgtcaagtacgtgatatcgaacgactgatgaccaaagtgaccacaggattggcagggcctagagatatcgggacactcagagattctttttctgcaggagctcaaatctacgaacaactggcttctgcgactcttccagaattctttatagataaatgctcgttagatacaaagctagcctccttaattgcactgctttcaaagtccttgaacggcgacctccctctccgagtttctgatggaaatatttttgtggatgagttccacaatgatttaaagcgcttacgccacaatcaagagcattctcaagaatggatttgggaataccaagaacgcattcgtaaagaaacagggatcaaaaaactcaaaatctgctttgctcaggctttaggatattatattgaagtgagcagcgagtttgctcctcaacttcctaaagatttcatccgtcggcaatcacgattgcatgcagaaaggtttactactattgagctgcagcaattccaagatgatatgtctaatatctctgaaaaacttcaaactttagaaacgcaattcttcaaggatctttgctcacacatcctacagttacgcactgagattttggctctatctcaaagtcttgctgatctagactacatcatttctcttgcggatcttgcacatgctcagggctattgtcgtcctcgtgtagatatgagtgacaccttatgtatttatcgtggttgtcatcctgtagcaaaaactcttgtagacacagggaaatttattcccaatgacactgaaatgcgtggctctcaaactcgaatgatcttacttactgggcctaatatggcaggaaaatctacctatatccgtcagatagctcttcttgtgattatggctcaaatggggtcgtatatccctgcaaaatcagctcacatcggagtgattgataaaatttttaccaggataggcgctggagacaacctctcaaaaggaatgtctacttttatggtagaaatggccgaaactgcgaatatccttcacaatgccacggaccgctctttagtgatcctagatgaggtaggaagaggaaccagtacttatgatggccttgccattgctcaagctgttgtagagtacctccttttcactgacaaaaagaaagctaagacgctttttgcaactcattataaagaattgacgactttagaagaccattgtccgcacgttgaaaattttcatgccggagttaaagataaagcagggcagcctgttttcttatatgagattctcaagggacattcacaaaaaagtttcggcattcatgtcgccaggcttgctggctttcccctttgtgtggtatcgagagctcagcagatcctaagacaattagaaggcccggaatccattacacgccctgctcaagataagatgcaacaactgacattattctag

SEQ ID NO: 18762 - DNA, 306 bp, Chlamydia pneumoniae
atggcgaaaaaatcatcagtagcaagagaagctaagcgtcgacgattggtagaggctaattttaaaaaacgatccgaccttcgtaaaatcgtgaaaagcttgtctgttagcgaagaagaaaaagaaaatgcccgtatctctttaaataaaatgaagagagatacttctcctacacgtttgcataatcgatgcttattgacaggccgtcctagaggctacttaagaaagtttgctatctctagaatctgttttagacaaatggcttctatgggagaaatccccggcgttattaaggctagttggtag

SEQ ID NO: 18763 - DNA, 138 bp, Chlamydia pneumoniae
atgaaagttagttcatctgttaaggctgatccatctaagggggacaaattagtccgccgtaaaggacgtctttatgtaattaataagaaagatccaaatcgaaagcagcgccaagcaggacctgcacgtaaaaaataa

SEQ ID NO: 18764 - DNA, 138 bp, Chlamydia pneumoniae
gtgaaacggacttatcaacctagcaaaaggaaacgccgaaattctgtgggtttccgtactcgtatggccacaagaaatggaagaaaacttttgaatcgtcgccgccgccacggtaggcattccctagtcgatttataa

SEQ ID NO: 18765 - DNA, 420 bp, Chlamydia pneumoniae
gtgcacccactcaccttaccaaaacaatcccgcgttttgaaaagaaagcaatttctttacattacgcgttcaggtttttgttgtcgtggtagtcaggcgactttctacgtggtcccttctaggcatcccgggacttgtaggatgggtattactgtatctaaaaaatttggcaaagctcacgaaagaaactcttttaaacgtgtcgttcgtgaagtatttcggcatgtccgccaccaacttcccaattgtcaaattgttgttttccccaagggacataaacagcgccctgtcttttcaaaacttctccaggattttataaatcaaatcccagaggggttacatcgtcttggaaaaacgaaagctacgactggtggcgaatgtactccaaagagcgagaaatgtgtgaccgcacctcgttag

SEQ ID NO: 18766 - DNA, 1425 bp, Chlamydia pneumoniae
atggcattttctcatatcgagggtctctatttctacaatacagcatctcaaaaaaaagaactttttttccccaatcacacccctgtaagactatatacttgtggtcctaccgtgtatgactacgctcacatagggaacttccgaacttatgtctttgaagatattctcaaacgcactctagtattctttggctactctgtaacccatgtgatgaatattactgatgtagaagacaaaaccatagcaggagcctcgaaaaaaaatattccgctgcaagaatacacgcagccatataccgaagccttttttgaagatctcgatactttaaatattgctagagcagatttctatccacacgcaacacactacatccctcaaatgatccaagcgattacaaagctcttagagcaaggaatcgcctatataggtcaggatgcttccgtatatttttctctaaaccgttttccaaattatgggaagctctctcatctggatctaagtagcttacgctgctgctccagaatttctgctgatgagtatgacaaagaaaacccaagtgattttgtactgtggaaagcatacaatccagaacgtgatggcgtcatttattgggaaagtcctttcgggaaaggaagacctggatggcatttagaatgttcgattatggcgatggaacttcttggagattctttggatatccatgcgggaggtgtagataatatatttcctcatcacgaaaatgaaatcgcccaatctgaggctctttcagggaaaccctttgcacgctattggctgcattcggaacatctgcttattgatgggaagaaaatgtcaaagagcttagggaatttcctcactctacgagaccttctccaccaggaatttactggtcaagaagtacgctatatgctactgcaaagccattatcgtacgcaactcaactttacagaagaagctctccttgcctgtaggcatgccttacgccgcttaaaagattttgtttctcgacttgaaggcgtagatctccctggggaatctccccttcccagaaccttggactctagcagtcaattcatagaagctttctcaagagctcttgctaatgacttaaatgtttctacaggatttgcatctctgttcgattttgttcacgaaatcaacaccttgatcgaccaagggcacttttctaaagccgactctctctatatcttagacactcttaaaaaagtcgatactgtacttggtgtgcttcctctaaccacaagcgtgtgcatcccagaaaccgtaatgcaacttgttgcagaacgtgaggaagctagaaaaactaaaaattgggcgatggcagacaccttacgtgatgagatacttgccgcaggcttccttgtcgaagactctaagtcagggcctaaagttaagcccctttaa

SEQ ID NO: 18767 - DNA, 1584 bp, Chlamydia pneumoniae
atgacggcgagagcagaatatttagaccatgaggattttttatataggagtcacaaacttcaggaactttctgagttgggtgtagtcctttatccttacgagtttcctggagttttttcatgcgaagatattaaaaaaacgtttgctagtcaagagttagggaatagtgaagctgctatgagtaggtccactcctagagtgcgttttgctgggcgtttggttcttttccgtgcgatggggaaaaatgcttttgggcaaattttagaccataatcaaaccatccaagtgatgttcaaccgtgagtttacctccgtacacggactttctgaagatgctgagattactccgattaagtttatagaaaaaaagttagatttaggagatatccttgggatcgatggctatttatttttcacccattccggagagcttaccgttcttgtagagactgtaaccctactttgtaaatccttactttcgttgcctgataagcacgcaggtttgagtgacaaagaagtccgctaccgcaagcgttggttagatctaatttcctcaagagaggttagcgatacctttgtgaaaagaagctatattattaagcttatccgtaattatatggatgctcatggatttttagaggtagagactcctatattacaaaatatctacgggggagcagaagctaagcctttcacaacaacaatggaagctttacattcggagatgtttttaagaatctccctggaaatcgctttgaagaaaatcctagtaggaggagctcctcgtatttatgaactcggtaaagtcttcagaaacgaaggaatcgatagaacacataatcctgaatttaccatgatagaagcgtatgctgcttacatggactataaagaggtcatggtctttgtagaaaatcttgttgagcatcttgtccgtgctgtaaatcacgacaatacctctctagtctattcttattggaaacatggcccccaagaggtagattttaaagctccttggattcgtatgacaatgaaagaaagtatcgcgacctatgcaggtattgatgttgacgttcacagtgatcagaagcttaaggaaatcttaaagaagaaaactacctttcctgagactgcatttgcgacagcttcccgggggatgttgatagcagccttatttgatgaacttgtctctgataatttaatagctcctcaccacattacagatcaccctgtagagacaaccccgttatgtaaaactctgcgttccggagataccgcatttgtagagcgcttcgaaagtttttgcttagggaaagagttgtgtaatgcctattcggaactcaatgatcctatccgtcaaagagaactcttggagcaacagcatactaaaaaagaactccttccggatagtgagtgtcatcctatcgatgaagagtttttagaagctctgtgtcagggaatgccccctgcaggaggatttggtataggtgtcgatagacttgttatgattcttacaaatgctgcatctatacgcgatgtgctgtatttccctgtaatgcggcgcttcgatgcagagaagacgaattaa

SEQ ID NO: 18768 - DNA, 1056 bp, Chlamydia pneumoniae
atgaaatactcactgaactttaaagagatcaaaatagatgattatgagcgtgttattgaagtcacatgttcaaaagttcgtcttcatgcaattattgctattcatcaaacggcagtaggacccgccttaggtggagtgcgagcctctctatattcttcttttgaggatgcgtgcacagacgctcttcgcttggctcgggggatgacctacaaggcaatcattagtaatacaggaacaggcggggggaaaagtgttattattcttccccaggatgctccttccctcactgaagacatgctgagggcttttggccaggctgtgaatgctttagaggggacctacatctgtgctgaagatcttggtgtatctataaatgatatttctatcgttgctgaagaaactccttatgtgtgtgggatcgctgatgttagtggagatccttctatatacaccgcacatggcggatttttatgcataaaagaaaccgctaagtatctttggggatcttcctctcttagagggaaaaaaattgcgattcagggaataggctctgtaggacgacgtctattacaatcgttgttttttgaaggcgccgaactttatgttgctgatgttttagaaagagccgttcaggatgctgcaaggctctatggggctacgattgttcctacagaagagattcatgcattggaatgtgatattttctctccttgtgctcgtgggaacgtgattcgtaaagataatcttgcagatttaaattgtaaggcgattgtaggtgtcgcaaataaccaacttgaagatagctcagctggaatgatgctccacgaacggggaattctttatggtcccgactatttagtgaatgctgggggattgcttaatgtggccgcagcaatagaaggaagagtctatgctcctaaagaagtgcttcttaaagtagaagagcttcctatagttctaagtaagctatacaatcaaagtaaaactacaggaaaagaccttgtagctttatcagattccttcgtggaagacaagctcttggcctatacgtcatag

SEQ ID NO: 18769 - DNA, 1251 bp, Chlamydia pneumoniae
atgagtaaaaaacgcgtagttgttacaggattcggtgttgtatcttgcctcggtaatgaagtagataccttttacgataatcttcttgccggtgtcagcggcgtacggccaattacatcctttccttgtgaggattatgccactcgttttgccggctggatcccagaattcaatcccgagccttatgtagataaaaagcaagcacgtcgtgtcgacccctttattacctatgccatggtagctgctaagaaagcgatcgctatgtcacgttgggataaagaccatctgccttccgatcccgtgcgttgtggagtgattgtcggctctggaatgggtgggctctctaccctagaccaagggatggaaagactcttagttattcataaaaaattatctcccttctttattccttatatcattacaaatatggccccagcacttattgctatggactttggtttgatgggccccaattattctatatcaactgcatgtgctacaggaaattattgtattgatgccgcctaccaacatttagtatctgggcgcgctgatatgatcatctgtggtggtacggaagctgcagtgaaccgtattggtttagagggttttattgctaatcgtgctctctctgagagaaacgatgctccagatcaagcttcacgtccttgggatagagatcgtgatggctttgtcttaggagaaggagcaggaattcttgttttagaaaccctagagagtgctctacgtcgcgatgctcctatttttgctgagatgttaggaagctatgttacatgcgatgccttccatattaccgctcctagagatgacggtgaggggattactgcatgcgtgcttggtgctttaaattccgcaggaattcctaaagaacgtgtcaactatgtgaatgctcacggaacgtcgactccattaggggatctttctgaagttctagctgttaaaaaggcttttggctcccatgtacgaaatctccgcatgaactccactaaatcattgatagggcattgtcttggagctgctggaggtgttgaagccgtcgttgcaattcaagctatccttacgggaaagcttcatcctacgattaatttggataaccctatcgcagaaattgaagactttgatgtagttgcaaataaagctcaagactgggatattgatgtagcgatgtccaactcatttggttttggtggacataattcaacgatattattctcgaggtatgtaccctag

SEQ ID NO: 18770 - DNA, 1062 bp, Chlamydia pneumoniae
atgaatttatgtaaaagaatttcatttgaagaaggattagagctatttgtttcgtcccctatcgagagattacaagagcgtgcggacgcgattcgtaaagaacgatatccttcaaatgaagttacttatgttttggatgccaatccaaactatactaatatttgtaaaatagattgtacgttttgtgcgttctacagaaagcctaaatctcccgacgcttatctattatcttttgatgaagttcgcagcctattacaacgttatgtaagttcaggagtcaaaactgttttactgcaaggtggtgtgcacccggggttaggcatcgattatcttgaagaactcgtacgcattactgttcaagaatttccttccatccatcctcatttcttttctgcagtagaaatcgaacatgcttgccgggtctctggcatcagtattgagcaaggtctccaaaggttatgggatgcggggcaacgtaccatccctgggggcggggctgagattctttcagagagagttagaaaaatcatctctccaaaaaaaatgcagcctgggggctggatcaatctacataagttagcccatctcatgggctttcgcacaacagcaacaatgatgtttgggcatgtggagaacccagaagatatccttatacatcttcaaacactccgtgatgctcaagatagctgccctggcttttatagttttatcccctggagttataaacctgggaatacggccctaagacgtaacgttcctcaacaagcttctattgaaacctattaccgcattttagctttgggcagaatctttctggataattttgatcacgtagcagcctcatggtttggcgagggtaaaagcttaggagcgaaagctctccattacggagctgatgattttggaggggttattttagacgaaagcgtgcataaagctacaggatggtcgatacagagctctgaagaagaaatctgtaatatcattcgatctgaaggtttcattcctgtggagagaaataccttttatcaacacatcagctgtacagtaagtagtctttag

SEQ ID NO: 18771 - DNA, 2430 bp, Chlamydia pneumoniae
atgaagggaactcctcagtatcattttatcggtatcggtggtataggaatgagcgctttagctcatattttgcttgatcgtggctatgaggtctctggaagcgacttatatgaaagctatacgatcgaaagcctgaaagctaaaggtgcgaggtgtttctcaggccatgattcctcccatgttcctcatgatgccgtcgttgtttatagctcaagtatagcccctgataatgtagagtatcttaccgctattcaaagatcatcacgtcttcttcatagagcagagctcttgagtcagcttatggagggttatgaaagcattctggtttcaggaagccatgggaagacagggacctcatctctaattcgagcgattttccaggaagctcagaaagatccctcctatgctattggaggactcgctgcaaactgcctgaatgggtattctggatcatcgaaaatcttcgttgccgaagccgatgaaagtgatgggtctttaaagcactacactccccgtgcagtagtcattacaaatatagataatgaacatttgaataattacgctgggaatcttgataacctggttcaggtaatccaggacttctctagaaaagtaacagatctcaataaggtattctataacggggattgtcctattttgaaaggaaatgtccaagggatttcttatggatattcaccagaatgtcaattgcatatcgtttcctataatcaaaaggcatggcaatctcacttttcctttacctttttaggccaggagtatcaagacattgagctcaatctccctggacaacataacgctgcaaatgcagcagcagcctgtggagttgctcttacctttggcatagacataaacatcattcgaaaagctctcaaaaaattctcgggagttcatcgacgtctagaaagaaaaaatatatccgaaagctttcttttcttagaagattatgctcatcatcctgtagaggttgcacataccctgcgctctgtgcgtgatgctgtgggtttgcgaagagtcatcgcaatttttcaaccacatcgattctctcgtttagaagagtgcttacaaaccttccccaaagctttccaagaagctgatgaagtcatacttacagatgtctatagtgccggagaaagtcctagagagtctatcattctttccgaccttgcggaacagattcgtaagtcttcttatgtccattgttgttatgttccccatggagacatcgtagattatctacgaaactacattcgcattcatgatgtctgtgtttctctaggagctggaaatatctatactattggagaggctttaaaagactttaaccctaaaaaattatccataggactcgtctgtggagggaaatcttgcgaacacgatatttctctactttctgctcaacatgtctctaaatatatttctcctgaattctatgatgtgagttacttcatcataaatcgtcagggcttatggagaacaggaaaggattttcctcatcttattgaagagactcaaggggattcgccactttcttctgaaatcgcttcagctttagcaaaagtcgactgtttgtttcccgtgctccatggcccatttggagaggatggtacgatccagggattttttgaaatcttaggaaaaccttatgccggaccctcactatctttagcagcaactgcaatggataagctgttaacaaaacgaattgcatcagcagtgggtgttcctgtagtcccttaccaacctttaaatctctgtttctggaaacgcaatccagaactatgtattcagaatcttatagagacattttctttccctatgattgtaaaaactgcacatttgggatctagtattgggatatttttagtccgtgataaagaggaattacaagaaaagatctcagaagcatttctatatgacacggatgtgtttgtggaggaaagtcgcttagggtctcgtgaaatcgaagtgtcctgtatcggccattcttctagctggtattgtatggcagggcctaatgaacgctgtggtgctagtgggtttattgattatcaagagaaatatggatttgatggcatagattgcgcaaagatctcttttgatttacagctctcacaagaatctttagattgtgttagagaacttgcagagcgtgtctaccgagcaatgcaaggaaaaggttcagctcgaatagattttttcttggatgaagaggggaattattggttgtcagaggtcaatcctattccaggaatgacagcagctagcccatttttacaagcttttgttcacgcaggatggacgcaagaacaaattgtagatcactttattatagatgctctacataagtttgataagcagcagactatcgaacaggcattcactaaagaacaagatttagttaaaagataa

SEQ ID NO: 18772 - DNA, 1074 bp, Chlamydia pneumoniae
atgatgaagaaaattcgaaaagtagccttggctgtaggaggttcaggaggccacattgtcccagctctctcggtaaaggaagctttttctcgtgaaggaatagacgtattactactagggaaaggtctcaagaaccatccttctttgcaacagggaatcagctatcgggaaatcccctcaggacttcctacagtccttaatcccataaagatcatgagcaggaccctttctctatgttcaggatacctgaaagcaagaaaggaacttaaaatttttgaccctgacctggtcataggatttgggagctaccactctcttcccgtgttgctcgcaggactgtcccataaaattcccttatttctacacgaacaaaatctagttcctggaaaagtaaatcaattgttttcccgctatgctcgaggtattggagtgaatttctcccccgttactaaacacttccgctgccccgcagaagaggtcttccttcctaaacgaagcttctccttaggaagccctatgatgaagcgatgtacaaatcatacccctacaatctgtgttgttggaggttctcagggagcacagatattaaatacttgtgttccccaagctcttgtcaagctagtcaataagtacccaaatatgtacgtccatcatattgtaggacctaaaagtgatgttatgaaggtgcaacatgtttacaatcgtggagaggtcctctgctgtgtgaagccgttcgaagagcaactcctagatgtcttgcttgccgcagatttggtcatcagtagggcaggagccacaattttagaagaaattctttgggcaaaagttcccggaattttaattccctatccaggagcttatggacatcaggaagttaatgctaaattctttgtagacgtcttagaagggggaactatgatcctagaaaaagaattaacagagaagctattagtagaaaaagtaacgtttgctttagactcccataacagagaaaaacaacgcaattccctagcggcgtatagtcagcaaaggtcaacaaaaacattccatgcattcatttgtgaatgcttatag

SEQ ID NO: 18773 - DNA, 1158 bp, Chlamydia pneumoniae
atgaaatggtttgttatttcctgtttattaggaatcttttctctagggctgattatggtttttgatacttcttcagcagaagtattagaccgctctttagaatgtagtacacataaagctctcatccgccaggtgacctatcttatccttggcttgggagtcgcatcgcttctctacatgatggaatggagagatttcttaaaaatcagtcctgtgttgctttcaggagctgccctagccttaatctgtgtgtttattccaggattagggatatgccgtaatggggcaagacgttggttggggttcggtcagctaacgattcaaccttcggaatttgtcaagtacctcgtccctatagtcgctctatatttccttacattctcttccctctatcagaaacaactgaaaatgtttcttaaacttacagcaattttatttattccgattcttttgattgctatagaacccgataacggatctgctgctgtaatttcagcatccctgattcctgtgtttatcatgacctcagtgcgcctccgctactggcttctaccacttctgtgcgtcctcatagctggaggagcccttgcttatagaatgccctatgttcgctaccgcttaaacgtctaccttcatcctgaactcgacatcaaaggaagaggacatcagccgtatcaagccaaaattgccgcaggatctggaaagctactaggaaaaggtcctggagctagccttcagaagcttacctacctcccagaagcccaaaatgactatattgccgcaatctacgctgaggagttcggatttttaggtatgctcgtcctcatacttttgtatatgtgctttgtttacggagggtatgcaatcgctataaaagcatcatcactagaaggtgctgctttggcaatggtcattactttgattattagcatgcaagcatttatgaatttaggagtcgtttcaggcctgcttcctagtaaaggagtcaaccttcctttttttagccaaggagggtcctctcttatcgcaaatatgtgtggagtcacgttgttattgaaggtatatgatgaagaaaattcgaaaagtagccttggctgtaggaggttcaggaggccacattgtcccagctctctcggtaaaggaagctttttctcgtga

SEQ ID NO: 18774 - DNA, 1254 bp, Chlamydia pneumoniae
atgtgtcagcgcattcttattttagggactggaatcacaggaaagtcggtagcaaggtttttatatcagcaaggacactatctcataggagcagacaattctttagaatctctgatatcggtagaccatttgcatgataggctactcatgggagctagcgagtttcctgagaatatcgaccttgtgatccgctctccgggaatcaaaccgtatcatccgtgggtagaacaagcagtatctcttaagattcctgtcgttactgatatccaagttgctttgaaaacaccagaatttcaaagatatccctcctttggcatcacagggtctaatggcaagacaacaacgacattatttcttacccatctcttaaatactttagggatccctgctatagctatgggcaatatcggcttgcctatactagaccacatgggacaaccaggagttcgtgttgtagaaatcagctcatttcagctagcaacccaagaggaacatatcccagcactttctggatctgtgtttttgaacttttctcgtaaccacctggactatcatcgcaacttagatgcctattttgatgctaaacttcgcatccaaaaatgcttgcgtcaggacaaaacattttgggtgtgggaggagtgttccttggggaattcttatcaaatttactctgaagaaattgaggagattttagataaaggggatgcattaaaaccaatatacttgcatgatagggataactattgcgcagcttatgctttggctaatgaagttggttgggtctctccagaaggttttctgaaggcaattcggacatttgaaaaacctgcccatagactagagtaccttgggaaaaaagatggcgtgcactatattaatgatagcaaagccacaaccgtgacagcagtagaaaaggctcttatggctgtagggaaagatgttattgttattttgggtggcaaagataaaggtggagatttccctgccttagcttctgtattgtcccagacaaccaaacatgtcattgctatgggtgagtgtcgacagacaatagcagatgccttatcagaaaagattcctttgacgctctctaaagatttacaagaagcggtgtccatagctcaaactatagcacaagagggagatactgtgttattgtctccaggatgcgcaagctttgatcagtttcaaagttttaaagaacgcggagcttactttaagctgttgatcagagaaatgcaggcagtgaggtaa

SEQ ID NO: 18775 - DNA, 1050 bp, Chlamydia pneumoniae
atgatccccttaattccaatgtttctaaaacagtctctatttttttctttggctttgacagggatgaccacccttgtgcttacagtatctctgggtgttcctgtaatgaaatggctgaaaagaaaaaattatcgtgattacatccacaaagaatactgtgagaaacttgaaatgcttcacaaagataaagccgaggttcctacgggaggaggagtcttactttttatctcgttaattgcttctttacttgtttggttgccttggggaaaattttcaacatggttctttattatactcctgacatgttatgcaggtctgggttggtatgatgatagaataaaaattaaacggaaacagggacatggactgaaggcaaagcataagttcatggtccaaattgccattgcagcttttacactcattgctcttccttacatttacggaagtaccgaacccttatggactctcaagatcccttttatggaagggatgctttctcttcccttttggctaggaaaagtcttttgcttaggactcgctcttgtcgctattatagggacaagcaatgcagtaaatcttaccgatggtttggatggacttgctgcaggaaccatgtcctttgctgctctgggctttattttcgtagctctaagaagttctacaattcctatagctcaagatgtggcttatgttttagctgctcttgtaggggcttgtatcggattcttatggtataatggtttcccggcccagctcttcatgggagataccgggtcactacttctagggggcctgctagggagctgcgctgttatgctgcgcgcagaatgcatcctagtcgtgatcggaggagtttttgttgctgaagcgggatctgtcattctacaagtacttagttgtagattaaggaaaaaacgccttttcttatgctctccattgcatcaccattatgaatatcagggcctcccagagactaaaatcgtcatgcgcttttggatctttagttttgtatgcgcaggtctaggtatagcggctgtcttatggagatag

SEQ ID NO: 18776 - DNA, 1344 bp, Chlamydia pneumoniae
atgcgagctatgttgcttgaagattgggtctctctgatgctatcagatgtctcttgtccgaagtgtgataaaaaaattacaggatttgctatagatagccagaaagtgcagcctggggatctattttttgcccttcctggaaatgcaacagacggtcatcaatttttaaaacatgccgcaaccgcaggagctgttgccgccgtggtttcccatgactaccaaggagatagctttggtctagaattgatccgtgttgatgatacgaaatctgctttgcaagaagcaggatccaatcaatgcaatttattccaaggcacccttgttggaatcacaggatctgtagggaaaacaacaaccaaagaattctcaaaaacaatcctaagctccatctataaaactcacgcaagccctaaaagttataattcacagttgacggtacctttaagcctcttgatggcggaaggggacgaagatgtgatgattttagagatgggggtctctgaaccaggaaatatgcaagatctccttcggatcgtccagccagagatcgcagtgatcacgcatattaatgaccaacatgcgatgcatttcccccaaggcatccaagagatcctaaaagaaaaaagctatattctacaaaaaagtaaactacaactgctccccaaagattctccatattacctagatttaaggtcctgttctcctactgccgaaaaattttctttttcttttaacgatccccttgcagatttctgctacaaggcaattagtggagactctgtagtcatccaaactcctgaagaaaattattgtcttccgatagctttttcttacaagcctgcatataccaacttattaattgctgtagcactctcttggatcttagaagttccagaagagggagtgatacgctctctacctgaactgaagttgcctcctatgcgctttgaacatagcatgagaaatggaatgcaggtcatcaacgatgcatacaatgcatgtccagaagctatgatcgctgctctcgatgctctacctttaccaagtgatggagggaaaatcatcttaattttaggccatatggctgaattaggcaggtattcagaagaaggacatgctttagtagctgaaaaagcagcttctcgaggagatatgatattttttattggggaaaagtggatcccagttcaaagtgttttaaaaagctattcttgtgaagtgagctttttctcctcagctcaagatgttaaagacattttgaagcaagtggcacgctatggggacgtgattctactgaaaggttctcgtgccctcgctctcgaatccttattagcttgtttttaa

SEQ ID NO: 18777 - DNA, 888 bp, Chlamydia pneumoniae
atgcaagaaaagccccgacatgtgcatcgtattattcacatttccgatgtacattttcatgttctccctgtcaatcccgtgcactgctttaataaaaggctcaaaggacttctgcgcaaggtatttgggttagtccattttcaagctacaactatagggcagcgtttccctaaggtagtccgatctcttggagcggatagcgtgtgcatcacgggagatttctccctcacggctatggatggagagttcttactcgctaagcatttcgttgaaactctcgctaagcattcctcggtttaccttttgcctggcaaccacgatgtctacaccctgaaatctcttgcacaacaaacgttttacacccacttcccaaatgaccagctccaacagaataaggtgtcctttcacaagatcactgatcattggtggttaattttattagattgttcttgtttgaatggatggttttcagcaaatggagtggtgcatttagcacagatttcggctattgaaacctttttgctctctctttccccygaagagaatgtcatcattgcaaaccattatcctctgctctcttcacaaaatcccagtcatgatcttatcaacaatacacatcttcaaaacgttttgaagaaatatcccaaagtacgcctttatctacacggtcacgaacaccaagctgctgtttacaattgtgcggacacttcgccctcttatattctcaatagcgggtcgatctctctaccaacgaattcacgtttccatgttatagacttgtatcctgaaaaatatcaggtgcacactatgattttgaaaaatctcttagactttgatgcacctttagaaattgctaatgaagcaacttgggactgtcagaagttatag

SEQ ID NO: 18778 - DNA, 882 bp, Chlamydia pneumoniae
gtgtccaaacatacttctgaatccaggattgctcaagatatgttagaacgttattctggctctagcgtaaagcaattttgtccttatctcttactcacgaacttctcttactatatccaaacctttgcaaaacttcatggggtgcccgtctttgagggttctatgttttctgctgcccatgctcctcatcttaaaacttcaattttagattttaaactagggtctccaggagctgcattaactatagacttatgttcatttcttcctgatctcaaagcagcgcttatgttaggaatgtgtgggggcttacgctctcattatcaggttggagattactttgtccccgtagctagcatacgtggagagggtacttcagacgcctatttccctcctgaagttccggctcttgcaaattttgttgtacagaaagcaacaactgaagttttagaagataagaaggcaaactaccatattggcattacccacacgaccaacattcgcttttgggaatttaacaaaaaatttagaaaaaaactgtacgaaaccaaagctcaatccgctgaaatggagtgtgcgacactttttgctgccggataccgtagaaacctgcccattggagcgttattattgatttcagatcttcccttaaggaaggagggaatcaaaacgaagtccagtgggaacttcatctttaatacttatacggaagaccacatcttaacaggacaagaagtcatagagaaccttgaaaaagtcatgctaaaacgagcagcttctgaccataagaaggatcaacagtatcgaggattacctcatatggaagttggagaagccgatgacactatggctagcggctctgaaacttccgacagtgactattga

SEQ ID NO: 18779 - DNA, 1998 bp, Chlamydia pneumoniae
atgatcaataaagaattagatattggtattttaggaaaaattgctggggctattaaacaaattagtattgaatccatccaaaaggcctcttctggtcatccaggacttcccctaggatgcgcagaacttgctgcctatttatatggttatgtcctgcggcaaaatccacgtgatccccattggattaatagggatcggtttgtcttgtcagcaggtcatggatctgrtcttctctattcttgtttgcatcttgccggatttgatgtttccttagaggatcttcaggaatttcgccagcttcactcccgaactcccgggcatcccgagtacggcgaaactgtgggagtcgaagcaacgacaggtcctctgggacagggattaggcaatgctgtcggcatggcgctctctatgaagatgttggaatcccgattcaatcgcccaggacatgagatttttaacggaaaaatctattgtttggcaggggatggctgttttatggagggagtcagccacgaagtttgtagctttgcaggctctttaaatttaaataatcttgtggtcatctatgactacaataatgttgttctcgatggatatcttaatgaaattagtgttgaggatacaaaaaaacgttttgaagcctatggctgggatgtatatgaaattgatgggtatgattttacccatattcatgagacattctcgagcatcaaacgggggcaggaacgtcctgtattagtgattgcacatacaattattggtcatggttcgcctaaggaagggacaaataaggctcatggttctcctttaggagtcgaagggactcatgaaacaaaacagttttggcatctccctgaagaaaagttttttgtccctcctgcagtaaagaacttctttgctcataaaatacaagaagatcgaaaagcacaggagcaatggctggatgaagttcgtgtttggtcaaaacagttcccagaattacacgaagaattcgttgcgttgacctctcataagttacctaaaaacttagaatccttggtgcagagtgtagaaatgccagactctatagctggccgggctgcttcaaataaactgatccaagtattagtacagcacattccttatttgattggagggtccgcagatctttcaagctcagatggaacttggattgcgaatgagaaagtcatccatacgtatgacttctctggaaggaacattaaatacggcgttcgtgagtttggtatggccacaatcatgaatggtttagcttatagccaggtatttcgtccttttggtggaacatttttagttttttctgactatatgcgtaatgcaattcgcttggccgcattatctaaattaccagtcatctatcaatttacccatgattctatatttgttggagaagatggacctacgcatcagcctgtggaacaattgatgtctttgcgcgcgatccctggattgtatgtaatacgtcctgccgatgctaatgaagttagaggagcgtggattgcaggattaaagcacacaggtcctacagtcattgtcttgtcgcgacaagcattgcccacactgcctgctgcgcatcggccttttaaagatggtgtaggtcgtggtgcttatattgtcttaaaagagtcaggagaaaaaccagactatactctcttcgctacagggtcagaagtttctttagctctttctgtagctaaagaactcgaacacttggataagcaagtgcgtgtagtttctttcccttgttgggagctttttgaagctcaagatgtggactacaaacagagtattgtaggcggagatcttggaattcgtgtctctatagaagcaggatctgctttggggtggtataagtatatcggatctgaaggtttagctatcgctatggatagattcggatactcaggagcttctgatgatgtatcagaagaatgtggctttactacagagcaaatccttcagaggattctctctcaatag

SEQ ID NO: 18780 - DNA, 2619 bp, Chlamydia pneumoniae
atgttaagcaatactattcgctccaattttttaaaattctatgctaaccgccaccataccattcttccctcttctccagtatttcctcacaatgatccctcgatcctttttacgaatgcaggaatgaatcagtttaaggatattttcctaaataaagagaaggtgagctactctcgagccacaacatcgcagaaatgtattcgagctggagggaaacacaacgacctagataatgtgggtcatacttcaaggcacctcaccttcttcgagatgttagggaatttttctttcggagactactttaaagcagaggcgattgcctttgcttgggaagtctctttatctgtttttaattttaatcccgaagggatttacgctaccgtacatgaaaaagacgatgaagcatttgctctttgggaagcatatcttcctacagatcgtattttccgtcttacagacaaagacaacttctggagcatggcaaacacaggcccctgtggctattgttccgagctcctctttgatcgtggccccagttttggaaacgcctcttctccccttgacgatactgatggagagcgtttcttagaatattggaatttagtcttcatggaattcaatcgtaccagcgaaggctctttacttgctttacctaataaacatgtggatacaggagctggtctagagagacttgtctctttaattgctgggacgcacactgtttttgaagcggatgtgttgcgcgagctgattgcaaagactgagcagctctctgggaaagtctatcatcccgatgatagtggtgcagctttccgggtaattgcggatcatgtacgttctttatcttttgctatcgctgatggtctccttccaggaaacactgagcgaggctatgttctaagaaaaattttgagacgatccgtaaactatggacggcgtttagggtttcgcaatcccttcttagcagaaattgttccctcattagcagatgctatgggagaggcctaccctgaattaaagaattcgctatcccaaattcaaaaagtactcactttagaagaagaaagtttctttaaaactcttgaccgtggaggaaaccttctacagcaagttttgaaaagttcttcttcctcctcttgcatttcaggtgaagatgctttcaagctcaaagatacctatggcatgcccattgatgagatttctttgttagctaaagattacgactatagtgtcgacatggataccttccataagttagagcaagaagctaaagaacgttctagaaaaaacgtagttcaatcccaagggacttcggaatctatctacaatgaactacatttaacttcagaatttatagggtatgatcatctctcttgtgatacgttcatcgaagctatcatttctaaagatcacatagtttcttcgcttcaagagaagcaagagggtgctattgtattaaaagtttctcctttttatgcagaaaaagggggacaagttggagattctggggagatcttttgtagtgaggggacctttattgttacccatacgacatctccaaaagccgggttaatcgtacatcatggaagaatttcccaaggaagtctgactgtagaagctgcagtgactgctcaggtaaatcgttatcgtagaaagaggattgccaacaatcacactgcctgccacctattacacaaagctttagaaatcactttgggtgatcacatccgtcaagcaggctcctatgttgacgatacaaaaattcgtttagactttactcacccccaggcaatttcacctgaagatcttctttgtattgagactctagtcaatgaaagtatccgggagaatgagcctgtagatattcgtgaagctctctattctgatgtgatgaactcatcagaaatcaagcaattcttcggggataagtatagcgatgtggttcgtgtagtttctgcagggcactctcatgaactttgtggaggcacgcatgcggaagctactggggatatcggattcttccggattaccaaagaacatgctgtggccatgggcatccgccgtattgaggcggtcactggagaaaaagccgaagctacagtacaccaacaaagcgaagtattagaagagattgctacgctattacaagtccctagggatcagattgtctccaggctaactgcaactttagatgagcgcaaacaacaagacaaacggttaaatgagttagaaaacagtctgattcagacaaaattagacaagttaatccacaattgtcatcaacgtcaaggaatcacttgcctcgtgcatcatctcgcagaacatgagaaccaccgtttgcagcagtacgcacaatgtttgcatcaaaggattccagaaaaactaatttctctgtggacaacagagaaaaatgggaaatatattgtactatctcgagtctctgacgaccttatcacacaaggcgtccatgctcaggatttattgaaagctgttcttactccttgcggtggtcgctggggaggaaaagatcaatcggcccaaggtagtgctcccgctctcccagcaacagaagtattaaatgaaactttatggcaatggatttcaacccagttaatttag

SEQ ID NO: 18781 - DNA, 3258 bp, Chlamydia pneumoniae
atggcaatggatttcaacccagttaatttagatttttctatttccaaagaattcaaagaggaaacacttcctttactattagaaaatattcatccaggagccacggcattccttgcagcaaagatgtttcatgactgtcgtgcttctgtaattatgattacgacacccgcacgtcttgatgatctctttgaaaatttaaggacctttttagaccaagctcctgtagaatttccctcttctgaaattgatctctctccaaaattagtgaacatagatgctgtggggaagcgagatcatcttctttacagcttgaatcagcacagggctcctatattctgtgtcactacattaaaagctcttttagaaaaaacccgttctccacaagctacaagtcaacaacatcttgatctcgcagttggagatgtcttagatccagaagcaactacggaactctgtaaaagtttaggatattctcaggtcatgctaactagcgaaaagggagaattttcttgtcgcggaggaattgttgatattttcccgttatcctcgccagagccttttaggatagaattttggggagagaagatcatttctatcagatcttacaatccttcggatcagctatcgacaggaaaagtctctaaaatttctatctctccagcgtacacagaagaggcctctggaggaaactattctcattcactattagactatttcagcacccctcctctctatctctttgataacttagaaattctagaagatgactttgcggatatttctggaacactttcgtcccttccagatagatttttctctattggcactctctacgatcgcatttcaacgtctaatcaagtttatttctcggagactccgtttcctaacgtcaagaatctcaaggaaaaccgcgtcatcatcgaagcatttcaccgaaacatggaagcgagtcgccaagcgattcctatactgtatcctgagcaaattattcagaacgatgagaatcccctacttgctttcctacagcatcttcaagaatatatgcctcctcatggaaagcccttaaaattagccatctacagcacaaaaacgaaatctttaaaagaggcccgtgctctagcagagactgtagctcgtggggatgtggaaatctatgaaaaaacagggaatctaacttccagctttgcattagtaaacgaagcctttgcagcgatttccctatccgagtttgcttctacaaaagtattgcgtaggcaaaaacaacgcactcacttttcagtgactactgaagaagtttttgttccgattccaggagagactgttgtccatattcataatggaattggaaaattcctaggaatagaaaaaaaaccgaaccatctgaatattgaaacggattatcttgttttagaatatgcagataaagctcggctttatgttccttcgaaccaagcctatctgatctctcggtatgttgggacttctgataaagctgccgatctccatcatttaaatagttcgaaatggaagcgctctagagatcttactgaaaaatctttgattgtctacgcagagaagctcttacagttagaagcacaacgttcgacaactcctgcttttgtgtaccctcctcacggagagtccgtaatcaagtttgcggaaacgtttccctatgaagaaacccccgatcagttaaagactattgatcagatttacaatgacatgatgtctccaaaactcatggatagattaatttgcggagatgctggctttgggaaaactgaagtcatcatgcgggctgctgtcaaggctgtttgcgatggccatcgacaagtcattgttatggttcccacaacgattttagcaactcagcactatgaaacttttaaagaaagaatggcgggattgccgatcgaaattgctgtgctttcacgtttctcccaagccaaagtgcaaaaactcatctgtgagcaagtagcttcaggacaaattgacattatcattggaactcacaaactcattaacaaaagcctagagtttaagaaccctggtttattaattattgatgaagaacaacgctttggagttaaagttaaggacaatctgaaggagcgctatcccatgattgactgtcttacagtatctgcgactcccatcccaaggacattgcacatgtctctatcaggagctcgtgatctatctgtgattgccatgcctcccttggataggttgcctgtaagtacttttgtcatggagcataatacagaaacattgacagcggctttaaggcacgagctccttcgaggaggacaagcctatgtcattcataatcggattgagagcatctatactcttgctgagaccattcgcaatctgattcctgaggctcgtattggcgtagctcatggtcaaatgggagctgaggacctctctaatatctttacgaaattcaaaaatcagaaaaccgacatcctcgttgctactgcactgatagaaaacgggattgatattccaaacgccaataccattttgatagatcatgccgataagtttggaatggcggatttatatcaaatgaagggacgtgtcgggcgatggaataaaaaggcctattgttattttctagttcctcacttagacaggttgtctgggccagcagcgaagcgactcgctgctttaaataagcaggaatatggagggggaatgaagattgccctccatgatttagaaatccgcggtgcagggaatattctaggaaccgatcagtcgggacatatcggaactatagggtttaatttgtattgcaaattactaaaaaaagctgtttcagctttaaaaaaacacacgtcccccctacttttcaacgacgatgtgaaaatagaatttccttacaattcgcgtattcctgatacttacatcgaaactggatcgatgcgcattgagttttaccaaaagattggtaatgctgaaagctctgaagagcttaccgcaatacaagaagaaatgcgagatcgctttggcccattacctcaagagatctgctggctttttgcccttgctgaaatacgcctatttgctttgcagcatggcatttctagcattaagggaactgcgaatgctttatatgtgcaaaaatgccttagcaaatctgaacagacaaagaaaaccttgccctatgctctatctccaactcctgaacttctagtcaaagaagtcattgagtccatagaaaggggcttcttaatcaacgcttcataa

SEQ ID NO: 18782 - DNA, 1296 bp, Chlamydia pneumoniae
atgacttggctttcaggcctctatttcatttgtattgctagtcttatcttttgcgccattggcgtgattcttgcaggtgtgatccttctatctcgcaagcttttcattaaggtacacccttgtaaattaaagattaacgacaatgaagaactgacaaaaactgtcgaaagtggtcagactctcttagtttcattattaagttcaggaattcctattccctccccttgtggaggaaaagccacctgtaagcaatgtaaagttcgcgttgttaaaaatgctgatgagcctttagaaacggaccgttctacattttcaaaaagacaactcgaggaaggctggcgcctttcctgccagtgcaaagttcagcacgacatgagtttagaaattgaagagagatatttaaatgcttcttcttgggagggcactgttatctctaatgacaatgtggctacctttattaaagaacttgttgttgctgtagacccaaataaacctattccctttaagcctgggggctacttacaaattacagtaccgagctataaaacgaactcttccgattggaagcaaactatggctcctgagtattacagcgactgggaacactttcatctatttgatcaagttatagacaacagtcaacttcctgcggattctgccaacaaagcgtattctttagcttcctatcctgccgagcttcctacaattaagtttaatatacgtattgctacgcctcctttcattaatggaaagcctaattcagagatcccttggggagtctgttcctcctatgtgttctccttaaaacctggagacaaaattacagtttctgggccttatggagaatcttttatgaaagatgacgaccgccctttaatcttcctaattggaggagcaggttcatcttttggtaggagccacatcctagatttacttttaaacaagcattccaagagagaaattgatctttggtatggggcgcgctcattaaaagagaacatttaccaagaagaatatgaaaatttagaacgacagtttcccaatttccattatcacctagtcctttctgagcctcttcctgaagatattgctgcaggttgggataaagatgaccctacaaagacaaacttcctatttcgggcatttaatctaggtcaattgagtaggttagataatcctgaagactatctttactacgtatgtggtccaccgctacacaatagcagtattcttaaacttcttggtgactatggggtcgagcgcagttcgattattcttgatgattttggaagctag

SEQ ID NO: 18783 - DNA, 2421 bp, Chlamydia pneumoniae
atgataagagaaagaaaaaagagcaggcaccctcgtcttccgactttgcctttagcagctaaagccagtttatatttatttttcgcgtgtttttctggtctcagtctatggagttttcatagagatcagccgtgcacacagaattggataggtctattaggttggtcatttagttcttttctactttatttctttggtgccgcggcattttttatccctttatattttctttggttatcttttttgtacttcagaaggactcctcgaccgcttttcttctataaagctgcggcatttctttctctccccttttgttctgcgattctcttatccatgttatctccagtaggaacgcttcctgctttattagatacacgtcttccaaagtttattttagggaataatcctcctgtctcttatgtgggtggaatccctttctatctgttttacgaaggccaatctttttgtctaaaacatttaattgggtctgtaggaactgctctaatttttggattcgtgatgctattctccgtcctttatctttgcggaggcattgctttattaaaaaaaaaaacctttcaagacggggtcaaaaaggctttttgctcttttttccaaacttgtttcaaaaatttaaaaaaattaataaataggcgaaactatcttcctaagccttcggttccttttgtttccaagaatcctttttcttgtacgaaatcgcaaccttcgccacgtcgagtttctgagactatcattttagatgggtctatttctcccttacctcaggaagagatccccggttctaagaaagagtcctttttcctaactcctcatccttgcaagcgtttcctgacaaaatttgttgagcctcaagagaataaagcgaaagaagggaaaacaattgcgctatcttcgactcccactgtagtgagggaatccaaaggcaaggaaagagcggctcttcctaaattaaaaagtttagcagtccctgaaaatgatcttccgcaatatcatttacttagtaaaaacagagaagctcgtcccgagtccttacaagctgagctagagagaaaagctctgattttaaaacagactcttacgagttttggaattgatgcggaccttggcaacatctgttcaggaccgacattagcagcttttgaagtgttacctcattctggagttaaggttcagaaaatcaaatctttagaaaatgatatagctttaaaactccaagcttcgagcatacggattattgctccgattccggggaaagctgctgtgggtattgaaattcccacaccttttcctcaagctgtgaattttcgtgatttattagaagactatcagaagacaaatcgtaaattgcagattcccttgttgttagggaagaaagcaaatggtgacaatctttgggctgatttagctacgatgcctcatctcattattgctggtactacaggatctgggaaatctgtatgtattaacacgattgtcatgtctatgattatgacgaccttaccttctgaaattaaactcgtcattattgatcctaaaaaagtagagctcactgggtattcgcaattacctcatatgttatctcctgtgattaccgaatcaagagaagtgtacaatgctttagtttggttagttaaggaaatggaatctcgttatgagattttgagatatttgggtttgcgcaatatacaagcgtttaactcccgcactcgcaataaaacgattgaggcttcttacgacagggagattcgtgaaactatgccctttatggtagggatcattgatgagttatctgatttgcttctctcgtcatcccaagatattgaaactcctatcattcgcttagctcagatggctagagctgtagggattcatctgattttagcaacgcaacgcccttcaagagaggtaattacaggtttaattaaagcaaatttcccctctcgaatttcttttaaggtctccaataaagtgaatagtcagattatcattgatgaacctggtgcagagaatctgatgggaaatggtgatatgcttgtacttcttccttctgtttttggaactatacgagctcagggtgcctacatttgtgatgaggacataaacaaagtcattcaagatctatgttctagattccctacacaatatgtgattccttctttccatgcttttgatgattctgattctgataactctggagaaaaagatcctttatttgctcaggcgaaaaccttaattttacagacggggaatgcttcaaccaccttccttcaaagaaaattaaaaattggttatgcccgagcagctagtttaattgatcaacttgaagaagctagaattattgggccttcggaaggagctaagcctcgtcaaatcctgatacagaatcctctggaaggttag

SEQ ID NO: 18784 - DNA, 465 bp, Chlamydia pneumoniae
atgaaaacattgaaaggacatttgtctgcaaagaatctacgtattgctattgtcggctcctgctttaatcaagctatggctgatgccctagtttctggtactcaggaaacttttttgaagtttggagggagcgaggacggcttgatgactatccgtgttcccggagcttttgagattccctgtacgatcaaaaaacttttatcttctgaaagaaagttcgatgctattgttgcatgcggcgtcctaattcaaggagaaacagaccattataaccaaattgtaaatcaagtagcggcaggtattggtgctctctctttggaattttgtcttcccataaccttgtccatagttgcagctccttctgcagaaatcgcttggcaaagatcaggtattaaaggacgtcatttgggagtttctgggatgacgacagctatagaaatggcaacgttattcactcaaatctag

SEQ ID NO: 18785 - DNA, 1257 bp, Chlamydia pneumoniae
atgatagaaactcgagaagaggtaggctctgcaaattttgtttctttagaacgagctattgaggatttaagagcaggaaaatttgttattgttgttgatgaagcttcgagagaagatgaaggcgacctgattatcgcgggagaaaaaattacagttgaaaagatgacgtttcttctccagcacaccacaggagtggtttgcgctgctttaagccaagaacgtctcttaagcttggatcttcctcccatggttaaggataaccgttgccgttttaaaactcccttcactgtatccgtagatgctgctcacggggtgactacaggagtttctgccgcagatagaaccaaagtcgttcagttattagcagatcctaagagcaaacccgaagattttattagcccaggacactttttccccctagcaagttctccaggaggagtgttaaaacgagcaggtcatacagaatctactgttgacctaatggagttggcaggactgcagccttgtggtgtactcgcagaattagtgaacgaagactactctatgatgcgattgcctcaaattttagagttcgcaaggaaacataatattgcagtgattcccgtgacatcgatcattgctcatcgcatgctctccgatcgtttggtttctaaaatctcttcagcacgcctccctacaatttacggagactttacgattcatgtctatgaatccttattggaaggaatgcaacatcttgctttggtaaaaggcaatgttgctggaaaaagtaatgtcctcgtacgtgtccactcagagtgtgtcacaggagatattttaggatctaagcgctgtgattgtggagaacaattgagttcagcaatgtcctacattgctgagaagggaactggtgttcttgtttacttgcgagggcaggaaggccgagggatcggtttgggccataaagtacgtgcttatgctttgcaagataacggttatgatactgtagatgcaaacttagctatgggatttcccgtagactcaagggaatatggcataggagcacaaattcttgttgatctcaagttgacaaccataaaattaatcactcataatcctcaaaaatattttgggcttcaaggtttcggacttagcatcacagaaagagttcctcttcctgttcgcatttctgaagacaatgagcagtatttaagaacaaaacaggaacgtatgggacattggctagatctcccatgctgtaacaatcgggtacaataa

SEQ ID NO: 18786 - DNA, 1131 bp, Chlamydia pneumoniae
atggaagatttctctgagcaacaactcttttttatgcggcgtgctatagaaatcggagaaaagggtagaatcacagcccccccaaatccttgggtagggtgtgtggtcgttcaagaaaatcgcatcataggggagggatttcatgcgtatgctggaggaccccacgctgaagagctcgccatacaaaacgcctctatgcctatatcaggatccgatgtctatgtttctctagagccttgctctcattttgggtcatgccccccatgtgcgaacttactaatcaaacataaggtctctagagtttttgttgctcttgttgatcctgatcccaaagtcgcaggtcaaggaatcgccatgctacgtcaggcagggattcaggtctatgtcggtattggagagagcgaagcacaggcgtctctacagccgtatctataccaaaggacccacaacttcccttggacaatattgaaaagtgccgcaagtgttgatggtcaagttgccgattctcaagggaagtctcaatggattacttgtccagaggctcgtcatgatgtgggaaaattgcgagcagagtcccaagccattcttgtcggttctcgtacggttcttagtgacgatccgtggctcacagcaagacaacctcagggaatgctctatcccaaacagcctctacgtgtcgtcttagacagtcgtgggagcgtccctcctacatcaaaagtctttgataagaccagtccgactctgtatgtaaccacagaacgatgtcctgaaaattatataaaagttttagattccttagacgtccccgttttactcacagaatctaccccatcaggagtggatcttcacaaggtctatgagtatcttgctcaaaaaaagatactacaggttcttgtagaaggaggcaccacactacatacgtctttgctaaaagaaagatttgttaattctttggttctttactctgggcctatgattcttggggaccaaaagagacctctagtcggagtattaggaaatttgttggaatctgcctctcctctaactctgaaaagttcccaaattttaggaaattctttgaaggtcgtatgggagatttcccctcaggttttcgagcccataaggaattga

SEQ ID NO: 18787 - DNA, 1284 bp, Chlamydia pneumoniae
atgttggatataaaaattatacgcaagactcccgaagaatgtgaaactcgacttcgtaaaaaagatccaaaaatttctttagaacctgtactctccttggataaagaggtccgtcaactcaagacggattcagaaactttacaagcacaaagacgcctcttatctcaagatatacataaagctaaaacgcaaggggtagacgcgacaaacttaattcaagaggtagagactcttgctgcggatcttgaaaaaattgagcagcacctcgatcaaaaaaacgctcaactacatgaattgctgagccatcttcctaattaccctgctgacgacattcctgtatccgaggacaaagcgggaaatcaagtcattaaaagtgttggggaccttcctatattttcctttcctccgaagcatcacttagagctaaatcaggagttagacatcttagatttccaagcagcagcaaaaacgacaggatcaggatggcctgcttataaaaatcgtggtgttcttctggaatgggctcttcttacgtatatgttacagaagcaagcagctcatggatttcagctctggcttccccccttattagtgaagaaagaaattttatttggctctgggcagattccgaaatttgatggacaatactatcgtgttgaggacggagagcagtatctctatctgatccccactgcggaagtcgttcttaatgggtttcgttcccaagacattttaacagaaaaagaacttcctctttactatgctgcgtgcactccgtgcttccgaagagaagcaggtgctgcaggagctcaagagagaggacttgtgcgggtgcatcaattccataaggtagaaatgtttgcctttacaacacccaatcaagatgatattgcttatgaaaaaatgcttagtattgttgaagaaatgctgacagagctcaagttgccttatcgtctttctttgctttctacgggggatatgtcttttacagcatccaagactatagatgctgaggtctggttgccaggacaaaaagctttttatgaagtgtcttctatttctcagtgtacggatttccaatcgcggcgctctgggacacgctataaagatagccaagggaaactacagtttgttcatactcttaacggttcaggtctggcaacaccacgtctcttggtagctattttagaaaataaccaacaagctgatggctctgtggttattcctgaagtccttcgtccttatttaggagggttggagattcttcttcccaaagaccagtga

SEQ ID NO: 18788 - DNA, 2052 bp, Chlamydia pneumoniae
ttgggtgttagggatcttcatcacttccgcgagtattatctcatcattaatgaaattattataacaggtcgctacgtgttctcccgtttgtttttcacttcattttctgcagaagtagtgaatacattttttgaatcagggatgtctgaagatacgagtccccttctatctaaacaaaatcgcaaattgagtcacaatcttcctttaaaatcggcgtatttatctttagggacctacttgattgctcttctaagtttctggctccatgcaaaaaatctctctaacttatttgtagtatttacattttttcttgctggcactcctgctctgattaagtcgttagataacatatgtcaaaaggtagtgaacattgatattttgatgacatcagcagccttcggctctatttttattggaggagctttagaaggagccttgcttcttgtcttgtttgcgatttcagaagcgttgggacagatggtatcggggaaagcaaagagcactttagtctctttgaagcagctcgctcctactacgggttggcttgtcttagaagatggcaacttacaaaaagtcgcaatcaacaagattgaggttggaaatatcctacgcattaaaagtggcgaggttgtgcctttggacggagaaatccttcatggttcttcttctatcaacctcatgcatcttactggagaaaaagttcctaaatcctgtcatccagggtcgattgttcctgcgggagcccataatatggaagggagtttcgatcttcgtgtcttacgtacgggatcggattctaccatcgctcatattatcaatttagtcattcaggcacagaactctaaacctaggttacagcaacgcttagataaatattcttcagtatatgctctctctatttttgcaattgcctgtggaattgcccttttggttcctttatttacttccattccattgttaggacctcagagtgcattttaccgtgccctagcgtttcttattgcagcgtctccgtgtgctttgatcattgcgattcctattgcctatttaagtgctatcaatgcctgtgcgaaacatggggttctcctgaaaggcggtgtgattttagatcgtttagtttcttgtaattctgtagtgatggataaaacgggaacgttaacgactggcgagcttacctgtataggttgcgactacttcggttctaaaaatgagacctttttcccttcagtattagctttagagcagtcttcatctcatccgattgctgaggctattgtttcttaccttatggagcagaaggtatcctcgcttcctgcagatcggtatcttacagttcctggagagggggttcgtggctatttcaatgaacaagaagcttttgtaggtcgggtagaaacaggactagggaaggtgccttctgagtatcttgaagatatagaacaaaaaatttatcaggcgaagcaacatggggagatttgttctctagcgtatgttgggaatagttttgctctattttattttcgagatattcctcgtcctcaagctaaagaaatcattcaagatctcaaagatctcggctatcccgtgagcatgctcacgggagatcataaagtcagtgctgaaaatacagcggaaattttaggaatttctgaggtatttttcgatctcacccctgaggataagttagcgaaaatacgcgagcttgcaacacaacgtcaaattatgatggtcggcgatggaattaatgatgctcctgctttagcacaagctactgtaggcattgctatgggagaagctggaagcgctacagcaatagaagctgctgatattgttctcctgcacgactccttgtcgtccctcccttggatcattcaaaaagcaaaacaaacgaaaaaagttgtttcgcagaaccttgcactagcgcttgctattattcttttagtctcctggcctgcatcgttagggatcattcctctatggctcgcggtaattcttcatgagggaagtacggtgattgtggggttaaatgctctccgtttgctgaaaagttag

SEQ ID NO: 18789 - DNA, 708 bp, Chlamydia pneumoniae
gtgacaaaagttcgtcttaataaatttttagcttctgcgggagttgcttctcgaaggaagtgtgatgaaattattttttctggatccgtgactgtgaatggtcgtgttgctgagggtccctttgttcttgtagatccagaagataaagtacaggtgggaggaacctctgttcatctcactaagaaagtatatttcatggtgcataaagctatcgggtatctgtgttcttctgagaagaagtttcctggaactaagttggtgatcgatcttttcgcacatcttccctaccgtgtgtttactgtgggacgtttggataaagagacctccggattaatcttagtgactaatgatggggaatttgcaaataaaatcattcacccctcctcaggaattaccaaagagtatcttctaaaagttagccgcgatgtctctgcaaaagatttgggaaaattaatggaggggactttcatagacggcaaacatgtgcgtcctgtctctgtgactaaaattcgtcgtggtacagtaaagatcgtcgtgagtgaagggaaaaaacacgagatccggttgtttgcagatgctgcaggacttcctattttagagctaaagcgtatccgtatagggagtttggttttaggaggcttgcgttatggcgaatatcgcgagcttacagatgcggaactcgggacctacatgaaattgtctgactaa

SEQ ID NO: 18790 - DNA, 1386 bp, Chlamydia pneumoniae
atgactgaatcggtatattcgccctctgctatgcatgtaaactctctagcagataagctcaaagccataaatcaagaacatatattagatatctggccctccctttctccaaaacaacaacaaagactttttcagcagctcacctctgtagatattgatttttttcgtaagcaacagcaactgctttcctcaccaacagcaattcttaaagattttcatccgataacgtcatttgcctcttcaggagaagatccagaacgagctcatgcaggaactacgctacttaaagagaaaaaagttgcctgtgtagtcctggcagggggacaaggctcaagattgaagtgcgatggccctaaagggttattccctgtttctcctattaaaaagaagccgctgtttcagttggtagcagaaaaggtacgtgctgcaagtaaacttgcaggtcaacctcttcctctagcattcatgacctctcctttgaatacccgacaaacacgttctttttttgaatccaacgactacttccacctagatccaaatcaggtggattttttctgccaaccactttggcccctcctcaccctatctggagacctatttcttgaagatatggacactctagctcttggtccgaatggcaacggttgtatagctacccttctctatacttcaggagtatgggagaaatggaaaaatgctggcatagaaatggtaagtgtgatccccattgacaatcctttagcgcttccttttgacgtagaactctgtggattccatgcgatgtctaacaacgaggtaaccataaaagcggctctacgtcaaactgctattgaagatgtgggtattcttgtaaaatctcatgattctggaaaaacttctgttatcgaatactctgaaattccccaaaacgagagattcgctcttaatgaagatggaaaattaaaatactgccttgcaaatatcggtctttactgtctctccatggactttatccgccacgccgcctaccaacagctgcccctgtataaagtccacaagcatgccaagcaactaggccatacctccttaaatgagaaaaatgcttggaaatttgaagagtttatctttgatctattttgttatagcgaccattgtcaaactcttgtgtatcctagacaagagtgctttgctcccctaaaaaatctggagggcaatcatagccccgatacagtaagacaagctctctctgaccgagagcgccaactcttccacaaagtcacaggaaaaaagctctctcctaacacaacatttgaattagaagctgatttttattatccttcaacatcaacttccctacattgggaaaacaaagcatttttcgaggaaccattttttgaggcctcatga

SEQ ID NO: 18791 - DNA, 1005 bp, Chlamydia pneumoniae
atgaaacaacacatcggctacttaggtatgggaatttgggggttttgtctagcctccctacttgcgaataagggatatcctgttgtggcatggtcccggaaccctgacctaatcaagcaattacaagaagaacgacgtcatcctttagctcccaatgttgtcatctctccaaacctttcattcactacagacatgaaagaagcgatccacaatgctttcatgattgtagaaggagtgacctccgcaggaatccgtcccgtagcagagcaattaaaacaaatcactgacctctcggtcccctttgtaattacctctaagggaatcgagcaaaatacaggactcctcctcagtgaaatcatgctcgaagtgcttggagattccgtgactccatatttagggtatctcagtggtccttccatcgctaaagaggtcctaaacggttctccctgttctgtcgtagtcagcgcttacgattcacaaactctcaaacaaatccacgaagctttttccctccccaccttccgagtctaccctaataccgatattaaaggtgctgctctcggaggagctttgaaaaatgtgattgctattgcctgtgggattgctgagggattatcgtttggaaacaatgcaaaagcaggccttgtgacccggggattgcatgaaatgcgtaaactcgccgctatcatggattgtaaaccagaaactctaaatggccttgcaggtcttggagatctttgtgttacctgcttctcagagtcgagtcggaatttacggttcgggcaccttcttgctcaaggtcttactttcgaacaagcaaaagcaaaaattgggatggtagtcgaaggagcctacacagcactttctgcataccaagtcgccaaacatcataaaatcgatatgcccatcactacgggaatctatcgcgttctctatgaaaatcttgatctcaaagagggcattgctctcctcttacagagaaatacaaaagaagagttcctataa

SEQ ID NO: 18792 - DNA, 1101 bp, Chlamydia pneumoniae
atgagtccacatcgcaatctgtttaaacttaagaatttttccaatcgcctttacaacagggctttgggtcgtttcgacaaggtctttaattttttttctggtaatgttggcattgatttaggcactgcaaacactttggtttatgtccgaggtcggggtattgttcttagtgaaccttctgtagttgctgtggatgcacagacgcatgcagtgcttgctgtagggcataaggcgaaagcgatgttgggtaagacgcccagaaagattatggcagtgcgtcctatgaaggatggggtaattgctgattttgagattgctgagggcatgttaaaggctttaattaaacgtgtaactccttctcgtagtgtttttcgcccaagaattttaattgctgttccttctgggattactggagtagaaaaacgtgctgttgaagattctgcattacatgctggggctcaggaagtaatcttaattgaagaacctatggctgctgcgataggtgtggatctgcctgttcatgagcctgcagcgagtatgattattgatattggaggaggcactaccgagattgctattatttctttgggaggaattgttgaatctcgttcrttgcgtattgctggggacgaatttgatgagtgtatcattaactacatgcgtcgtacgtacaatttaatgataggtcctcgtactgctgaagaaatcaagattaccattggctcggcctatcctttaggggatcaggagttggagatggaagttcgaggtcgtgatcaggtggcgggcttgccgattaccaagcgtattaattctgtggagattagagagtgtttggctgaacctattcagcagatcatagaatgtgtacgtttgacattagagaagtgtccaccagaactttctgctgatttagtagaacgtggtatggttttagctggagggggcgctttaattaagggattagataaggctttgagtaagaacacaggactttctgtgattacagcaccgcatcctttgctggcagtttgtttaggaaccgggaaagctttggaacatttagatcagtttaagaagcgtaaagggaatttggtatag

SEQ ID NO: 18793 - DNA, 1266 bp, Chlamydia pneumoniae
atgaataaaaaaaatctaactatttgttcattttgcggtcggtctgaaaaagatgtagagaaactgattgctgggccttcggtatacatttgtgactactgcatcaaattatgctctggaattttagataagaaaccctcctctacaatatcctcagctccagtttctgaaacaccttcacagccttctgatctcagggtgcttacccctaaggaaatcaaaaagcatattgatgaatatgtcattggtcaggaaagagctaaaaagacaatcgctgttgctgtttataatcactataaacgtatacgtgctctactacataacaaacaggtaagctacgggaaatctaacgtgcttctcctaggccctacaggatctggaaaaacattaattgcaaaaacattggcaaaaattttagatgttcccttcaccatagccgacgcaacgaccctaacggaagcaggttatgtcggtgaagatgtagagaacattgtcttacgtttattacaagctgctgattacgatgtcgcccgtgcagaacgaggcattatctatatcgatgaaatcgataaaattggaaggacaacagcaaacgtctccattactagagatgtttctggcgaaggggttcaacaagcattgttaaaaatcgttgaaggaaccacagcaaacgttcctcctaaaggaggacgtaagcatcctaaccaagagtatatccgagtcaatacggaaaatatcttatttatcgtaggcggagccttcgtcaacctagataagattatcgcaaagcgattggggaaaactaccatagggttttctgatgatcaagcagacctctctcaaaaaaccagagaccatctacttgctaaagttgaaaccgaagacctgattgccttcggaatgatccctgaatttgtcggaagattcaactgcattgtaaactgtgaagagctttctttggatgagcttgtagccatccttacagaacctacaaatgcgattgtgaaacaatatatggagctattcgcagaagaaaacgtcaagttagtcttcaaaaaagaagccctatatgctatagcaaaaaaagccaagcaagcaaaaactggagctcgtgctctagggatgatcctagaaaatctccttagagaccttatgtttgaaattccttcagatcctacagtagaagctattcatatccaagaagacactatcgcagaaaataaagcgccaataattatcagaaggaccccagaagctatcgcttag

SEQ ID NO: 18794 - DNA, 1233 bp, Chlamydia pneumoniae
atgacaacaattgccatagaagctgcaaaaaaagttcttatcaaactacgtaatgcaggatatcaggcatattttgtcggtggttgtgttcgagatatgttaatgaatcgccctctcgaggatattgacatagctaccaatgcatccccaacgattgtatctacgatcttcccagacgtcatcagtattggtgttgcctttggtatcatcgtagtaaaacaggacggacgcctatttgaagttgcaactttccgctctgacggtgaatacaaagatggaaggcatcccgatcgtatcatcttttcttctatgcgagaagatgccctccgaagagacttcacagtaaacgggatgtactacgatccttttgaagacaaagttttcgactttgtcgaaggaactcgtgatattgaaaagaaagtcattcgagctataggccatccacgtttaagattctcagaagataaactgcgtatcctacgtgccatacgtttttcttcctccctcggcttcaccctagacccaactacagaacgcgccattattaaagaagccccggcattagtaaattccgtatccccggagagaatctggcaagagctaaaaaaaatgcttaaaagacagccttatggagccctctctcttctgctcaagcttaaagtcttaatttttattttccctgaactacgtgatattccctacagtctcttaagaacaaccatagaatttgcccgtaagtttaatccaacacatttccctgaaattctttttttactgcctctattccaaggggtcagtgaggaagccgcaacagtagcgtttggaagattacgaatttctaataaagaattgaaattaatagaatcttggtacgaggcactccctcatttccaaaaccaatccggcaatcgtgtattttgggcgcatttcctagcgtctccgacagcacctctatttttggagctcttctcggctctacaaaaagatccgagcagacagcagcactttatctctcgagtgcaagaactcgaatcacgcttagagcaattcatattaagaataaaaacatcctcccccgttgtttcggctcctgatctgatagctaagggcatctctcccggaagacttcttggcgatctactcagagaagctgagattctctctatagaaaatgaatgtctcgacaaagaaaaaattttattgcttttacaagaaaaaggcttttggaagtag

SEQ ID NO: 18795 - DNA, 1464 bp, Chlamydia pneumoniae
atgctaaaaatagccatcttaggaagacccaatgtaggaaagtcatcacttttcaatcgtctatgtaaacgctctttagcaattgtaaattctcaagaggggacaactcgagatcgcctctacggcgagctccatgcgtttggtgttcctgctcaggtcatcgatactggaggtgttgatcacaattctgaagattacttccaaaagcatatctataaccaagccctcaccggcgctaaggaagctgatgtcctattgctagtcattgatatccgctgtggtattaccgaagaagatgctcacctagccaaactcctccttcccttaaagaaacctctcatccttgtcgccaataaagcagacagtcgccaagaggaattacaaattcatgagacctataaattaggaattcgagatattgtagtgacctcaacagctcacgataagcacattgatacccttcttcaaagaattaagttggtagccaacctaccagaacctcgcgaagaagaagaagaaggccttgaggagctttctgtagatgaacacgaagaatctgaggcggctctcccttcaaatacattccctgatttttcagaagtattcacggaaggcttctcccctgaagaaccctgcactatcccagagtctcctcagcaagctcccaagacattaaaaatagcgctcatcggacgtcctaacgtagggaaatcttctattattaacggtcttctcaatgaagagcgttgtattattgataatactcctgggacaacacgtgataatatcgatattctgtattcccataaggaccgccagtatcttttcattgatactgcgggtcttagaaaaatgaaaagcgttaagaattccatagaatggatttcttcatctcgaactgaaaaagctatttctcgtgctgatatctgtcttcttgtgattgatgctacacaaaaactctcttcttatgagaagcgcatcctctctttaatttctaaacgaaaaaagcctcacatcatattaattaacaaatgggatttacttgaagaagtccgcatggagcattactgcaaagatctacgcgctactgatccttatttaggacaagctaaaatgctttgtatctctgctactacgaaacgcaatcttaaaaagatcttctctgcaattgatgaactacatcacgtagtatcgaataaagttccaacaccgatagtaaataaaactcttgcttctgctctacatagaaaccatcctcaggtgattcaaggacgcaggttgaggatctattatgcaatccaaaagacaacgacacctctgcagtttttattatttataaatgcaaagtctctattaacaaaacattatgaatattatttaaaaaacacattaaaatcgtcgtttaatttatatggaatacctttcgatttagaatttaaagaaaaaccaaaaagacataattaa

SEQ ID NO: 18796 - DNA, 2913 bp, Chlamydia pneumoniae
atgttaggttttcttaaacgcttctttggttcctctcaagagcgtattctaaaaaaatttcaaaaacttgtagataaagtgaacatttatgatgaaatgctcacgcctttatctgatgatgaattgcggaataagactgcggaattaaagcagagatatcagaacggagagtctcttgatagcatgcttcctgaagcttatggtgtcgtgaaaaacgtttgtcgacgtttagcaggcaccccagtcgaagtctccggataccatcaaagatgggatatggttccttatgatgtgcagattctaggggccattgctatgcacaagggatttattacagagatgcagaccggggaggggaaaacactcactgcagtgatgcctctgtatttaaatgctttaacaggcaagccagtgcatttggttactgttaacgactatcttgcacaacgagattgtgaatgggtaggatcggtactgcgctggttaggacttacaacgggagttttggtttcaggaactcttttagaaaagcgtaagaaaatttatcaatgtgatgttgtctatggtacagcatctgagtttggttttgattatttgagagataattctatagctactcgccttgaagagcaggtaggtagaggatattactttgctatcattgatgaagtcgactcgatcttaatagatgaagctagaacacccttaattatctcaggtcctggagaaaaacataatccagtctattttgagcttaaagaaaaagtcgcaagtctagtgtatttgcaaaaagagctctgcagccgtatcgcattagaagcacgtcgcggcttagatagctttttagatgttgatattcttcctaaagataaaaaagttcttgaaggcatctctgaattttgccgcagcctttggttggtaagcaaaggaatgcctttgaatcgtgtgttacgtcgtgtacgtgagcacccagatcttcgtgctatgatcgataaatgggatgtttattatcatgctgagcagaataaagaagagagcctagagcgtctttcagagctctacattattgttgatgagcacaataatgattttgagcttacagataaaggaatgcagcagtgggttgagtatgctggaggctctaccgaagagttcgtgatgatggatatggggcatgagtatgctcttatagaaaatgatgagaccctatcacctgcagataagatcaataaaaaaattgcaatttctgaagaagacaccttaagaaaggctcgtgctcacggattacgacagttattacgagcccaacttctcatggagcgtgatgtagattatattgtccgcgacgatcagattgtgattatcgatgaacatacaggacgtcctcaacctggacgacgtttttctgaaggcctccatcaagctatcgaagctaaagaacacgtcactatccgtaaggaatctcagacgcttgctacagtcacgttgcaaaatttcttccgtctatatgaaaagcttgcagggatgaccggaacagcaattacggagtctcgagagtttaaagaaatttataatctttatgtcctccaagtacccacgttcaagccttgcttacgcatagatcataatgatgaattttatatgacagagcgtgagaagtaccacgctattgttaatgagattgcgactattcatggcaaggggaaccctattcttgttggtacagaatctgtagaggtctctgagaagctgtctcggattttgagacagaatcggatagagcatactgtattgaatgctaagaatcatgctcaagaagcagaaattatagcaggagcagggaaattaggtgctgtgactgtagctacaaatatggctggtcgaggcacagacatcaaactagataatgaagctgtgatcgtaggcggtctccatgtgatcggtactacacggcatcaatcccgtcgaattgatagacagttgcgtgggcgttgtgctcgtttaggagaccctggcgctgcgaaattctttttatcttttgaagatcggctgatgcgactattcgcctcccctaaattgaatacccttatccgtcattttcgtcctccagaaggagaggcgatgtcggaccctatgtttaatagactcatagaaacagcacagaaacgtgtcgaagggagaaactatactatccgtaagcataccttagagtatgatgatgtcatgaataagcagagacaagcgatatacgctttccgccatgatgtcttacatgcggaatctgttttcgatcttgcaaaagaaattctatgccatgtgtctctgatggtagcatccttagtgatgagtgatcgtcagttcaaagggtggacattgccaaatcttgaagaatggataacctcatctttcccaatagccttaaatatagaagaactcagacagcttaaagatacagattctattgctgaaaagatcgctgctgaattgattcaagagtttcaagtacgctttgatcatatggtagaagggctctccaaagctggaggggaagaattggatgcatctgctatttgtagagatgtcgttcggtctgtcatggtcatgcatattgatgagcagtggcggattcatcttgtagatatggacttactacggagtgaagttggcctacgtactgtagggcaaaaagatcctttgttagaatttaaacacgagtctttcttactgtttgagagcttgattcgtgatattcgtattacgattgcgcggcatcttttccgtcttgagctgaccgtagagcctaatcctcgtgtcaacaacgtgattcctactgtagctacgtcttttcataataatgtgaattacggtccgttagagttgactgtagttacagattctgaagatcaagattaa

SEQ ID NO: 18797 - DNA, 1329 bp, Chlamydia pneumoniae
atgctaaagcacgataccattgctgccattgccactcctccaggggaaggaagtattgctgttgtacgactctctggcccacaagcgattgtcattgccgatcgtattttttctggatctgtggctagctttgcctcccatacgatacatcttggacaagtcatttttgaagagacattaattgaccaagctcttcttcttctaatgcgctctcctcgctccttcactggagaagatgtagtcgaatttcagtgtcatggaggatttttcgcttgctcccaaattttagacgctttgattgctttaggcgcccgtcctgcactccctggagagttttctcaacgagcgtttctaaatggaaaaattgacctggttcaagcagaggcaatccaaaatctcattgttgcggaaaatatagacgcctttcggattgctcaaacgcattttcaaggaaatttttctaagaaaattcaagaaatacatactctgattatcgaagcattggcgtttttggaagtcctagccgacttccctgaagaagaacaaccagacctcctcgtccctcaagaaaaaattcaaaatgctctgcatatcgtggaagattttatttccagttttgatgaggggcagaggcttgctcagggaacaagtttgatccttgcagggaaacctaacgtagggaaatcctccctactcaatgcgcttcttcagaaaaatcgggcgattgtaacacatattcctggaaccactcgtgatatcttagaggagcagtggctcttgcaaggcaaacgcatccgactgctagacacagcaggacaaagaacaacagacaatgacattgaaaaagagggcattgaacgagctctttctgctatggaagaagcggatgggatcctctgggtaatagatgcgacgcaacctctagaagatcttcctaaaattctttttacaaaaccttcattcctcctatggaataaagctgacctcacccctcctccattccttgacacttcgctccctcaatttgcgatctcagcaaaaactggtgagggacttactcaagtgaaacaagctttaatccaatggatgcaaaaacaagaggctggaaaaacctctaaagtgtttttagtttcttctcgccatcacatgatcttacaagaggtggctcgctgtctgaaagaagcgcagcaaaacctctatctgcaacctccagaaatcattgctttggagttaagagaggcacttcactcgattgggatgctttctggcaaagaagttactgaaagtattttaggggaaatttttagtaaattttgcattggaaaatag

SEQ ID NO: 18798 - DNA, 1239 bp, Chlamydia pneumoniae
atgaaaaaaaacgcatctcataaaacaaatgataaaaaaagtttgtccatttggtctattggaggatctatttttgctatgttcttcggagctggcaatattgtctttcccttagctctgggataccactacaatgcgcatccctggtctgcctatttcggcatgatgcttactgctgtatgcgttcctcttttaggtctagtcagtatgctattctattctggagactaccagaagttctttttctcgataggaagaattccagggatgatttttattacggctattatacttttgataggccccttcggtggaatccctcgagccattgcagtatctcatgccacattgatttcactatccgagcataagagtgctttcattccctctttgcctatttttagtgcgatttgctgtgtgcttatctatatcttctcatgcaagctcagccgtttaattcaatggctaggatctgtatttttcccgattatgttggttaccttactttgggtcatcatccgcagttttatgattcctacccaccccatggttcaagaatttattccgaacgcacgtcaagcttggttggcaggattcattgaagggttcaatactatggatttacttgcagcgtttttcttctgctccatagttttgatctctctacgtcagctcgtagctgaagagaaacatcctacagaggaagaaatccctcttagttttcaaggtattagcaaaaaaaataagcgttccttagctttaggtttctttcttgctgcgatcttactaggaatgacctatcttggatttgttttatctgctgcacgtcatgcgggcttacttgtgaatgtaagtaaaggtcatattctgggaaggatctctgcgattgcattagggccaaatagcattctcgcaggagtcagcgttttcattgcctgtctaactacggaaattgctttagtaggtattgttgcagattttctagctcgtgtagtttcctttaagaaactgaactatgcttcagcagtaatttgtactcttatccccacctatttaatttctattttgaattttgaaactataagtcacctactcttgcctttgctacaacttagctatccagctttgattgtactggcttgtggaaacattgcctacaagttatggaatttccgatactccccagtcttgttttatttaaccctctctcttacaattgttttaaagttagtgaattaa

SEQ ID NO: 18799 - DNA, 1386 bp, Chlamydia pneumoniae
atgacccaagaatttgattgtgttgttattggtgcgggacctagtggctatgttgccgcaatcactgctgcgcaatcaaaattacggaccgctcttattgaagaagaccaggctggggggacctgcttaaaccgcggatgcatcccttcaaaagccctcattgctggagccaatgttgtatctcacattaagcatgcggagcagttcggcatccatgttgatggttatacaatcgattaccctgcgatggcaaaaagaaaaaatacagtcgtccaggggatccgtcaaggattagaaggattgatccgcagcaacaagattactgtcttaaaaggaaccggatctctagtatcttctacagaagttaaagttattggccaagacacgactataatcaaagccaatcatattatcctagctacaggatccgagcctcgtcctttcccaggggttcccttctcctctagaattttgagttccacagggatcttagaacttgaagtcctccctaaaaagctcgctattattggtggcggcgttattggctgtgaatttgcgtctctatttcacactttaggcgttgagattaccgttatagaagctttggatcatattcttgcggttaacaataaagaagtttctcaaaccgtaacgaataaatttacgaaacaaggaattcgaattcttaccaaagcctcgatctctgcaatcgaagaatcccaaaaccaagttcgcattactgtgaacgatcaagtggaagagtttgattatgtcttggtggctattggtcgccaatttaatacagcaagtatagggctagataatgctggagtgatccgggacgatcgtggcgtgattcctgttgacgaaaccatgcgcactaatgttccaaatatctatgcgattggagacatcactggaaagtggctacttgctcatgtggcttcgcaccaaggcgttattgccgcgaaaaatatttcgggacatcacgaagttatggattattctgccataccttctgtgatctttacccacccagaaattgctatggtaggtctatctctacaagaagcagaacaacaaaatcttcctgcaaagctcaccaaatttccttttaaagcgattggaaaagctgttgctttgggagcatctgatggttttgctgctattgtgagtcatgaaattacccagcaaatactcggagcttatgtcataggacctcacgcctcatcattaattggagagatgaccttagcgatccgcaatgagctgaccctaccttgcatatatgaaaccgtgcatgctcatcccacactctctgaagtttgggctgaaggtgctttacttgctacaaatcaccctttacacttccctcctaagtcatga

SEQ ID NO: 18800 - DNA, 924 bp, Chlamydia pneumoniae
atgaaatgtagaccaactttaaatacagaccaacctagagtgcggaaaaagcttcccgagcgtttccccaagtggttacagaggcccttaccacaaggttctgcatttcatgctacggacgctacaataaaacgctcaggaatgccaacggtatgcgaagaagctctctgccccaatcgagcagaatgttggtctcgtaaaactgccacctaccttgctctcggcgatgtctgtacaagaagttgcggtttttgcaatattgggcattctaaaaccccacccgcgctagatcctacagaacccgagcgcattgctttgtcagcgaaagaactggggttgaagcatgtggtaatcaccatggtggctcgcgatgaccttgaggatggtggtgcacaaggtttagtcgatatcattcaaaagttacgtgaagaactccctcaagcgactacagaagttttagcttctgatttccaagggaatgtttctgctctccacaccctgttagattctggcattactatttataatcataatgtcgaaactgtagcgaggctctcgcctctagtacggcacaaagcaacctatgcccgatctatgttcatgttagaacaagctgccaactacctccccgatcttaaaatcaaatccgggatcatggtaggattaggtgagatggaaggagaagtcaaacaaactctccaagatctggcttccataggagttcgtattgtcactataggtcaatacttacgtccttctcgtaagcatctccaagtcaaaagttatgtgactcccgagacttttgattactatcgtcgagtcggagaagctatgggtctttttgtttacgcaggaccttttgtacgctcgagttttaatgccgatatgatcctagcttctgtacaagacaaagcgtcagcttaa

SEQ ID NO: 18801 - DNA, 1743 bp, Chlamydia pneumoniae
atgtctacaagaaggcctattcagttacttgarcccctgaccatcaatcaaattgctgctggtgaggtcattgaaaactccgtttctgttgttaaagaactgattgagaattccttagatgctggcgccgatgaaatagaaatcgaaactttaggagggggacaaggcgcaatcattatcagagataatggttgtggcttcagagccgaagacatccccattgccctccaacgtcacgccacttcaaaaataagagaattctctgatattttttctttaaatagctttggctttcgaggcgaggctctaccctccattgcctcgatttctaaaatggaaatacaatcttccattgagggggacgagggtgtacgtaccgtaattcatgggggagacatcgtttcttgtgagccctgtgctcggcaactaggaaccacagtgattgtgaactccctgttttataatgttcctgtgcgtcgtggattccaaaagagcatgcaatcggatcgcttagggattcgcaagctgatagaaaatcggattttatccacagcaaacatagggtggtcctggattagcgagggacatcatgaaattcagattgctaagcagcaaggatttcaagaaagagtcgcctatgtgatgggagaccacttcatgcaggatgccctcaccatagataaagaggcaaatggtgtccgtattgtaggggtgttagggtctcccagcttccaccgtcccacacgtcaaggacagaaaatctttattaacgatcgccctatagagtctttatttatttctaagaaggttggggacgcctatgccttgcttctgcctctacacaggtatcctgtttttgtgctgaagctctatcttccttcgtcatggtgtgattttaatgtccacccacaaaaaatagaggctcgaattcttaaggaagaacttgttggagattgtatcaaagaagctatcgtagagactctagcatgtcctcctggcatcttatgtcgtacgcatcaagaaatagaagaatctgattcggtgcccttacccatgtttcgtatgttggaaacaagcgatgtgcaagaagaagagagtgtagagtttgatcaaaatctttttgcatatagttcagaagatgtttccttagagaaacaagaatatacatctagaggacctaagtcccaaatggattggatatattctagcgacgttcgttttttaacttctttaggtcgtgtggtcctggctgaggatcttgagggtgtgcacattatttttacagctgcagcgcgaaagcacctgttttttctgtctttgatgcaagagaattctcgcatgtatcaatcacaagcattactgattcctctacgccttcaggtgactcctgaggaggcttttttcttctctcatcacggaagaacgttatgcgacttaggaatagaaatatcacaggtaggaccttgtgttttctctattgaaagtacccccactgtcattggtgaagaagagctaaaagaatggttattgctattggcagcaaggggctctactgatataaactcagaggctttaacagcattgatgaaagaaactttgacgcaggcaacgttttctaaacatcagcatgtttttgatgtttcctggctcaaattgctttggagtgtagggaaacctgaaaaaggatttgacggtgcacgaattcgtcggttaattttagactctgattttatggaaggataa

SEQ ID NO: 18802 - DNA, 696 bp, Chlamydia pneumoniae
atgagcaagccctctcctcgtaatgccaatcaacctcaaaaaccttcagcctctttcaataaaaaaacgcgaagccgtctagcagagctggctgctcaaaagaaagcaaaggctgatgacttagaacaagtccatcccgtacctacggaagaagaaattaaaaaagctttaggcaatatcttcgaaggtcttagcaatggactagacctacaacagattctaggtctctcggactatctcttagaggagatctatactgtagcttatacattctattctcaagggaagtacaacgaagctgtaggactcttccagttattggcagcagcacaacctcagaactacaagtatatgttagggttaagctcctgctaccaccaattgcatttatataatgaagcggcttttggatttttccttgctttcgatgctcaacctgacaacccaattcctccttactacattgctgatagcttattgaagctacagcaacccgaagaatctaacaatttcttagacgtcaccatggatatctgtgggaataacccagaattcaaaatcttaaaagaacgttgccaaattatgaaacagtctattgagaagcagatggctggagaaactaagaaagcaccgacaaaaaaacctgcgggaaaaagcaaaacaactacaaataagaaaagcggaaagaaacgttag

SEQ ID NO: 18803 - DNA, 1335 bp, Chlamydia pneumoniae
atgacatcaggagttagtggaagttcaagtcaggatcccacattggctgcgcaattggcacaatcctctcaaaaagcaggaaatgctcagagcggtcacgatactaagaatgtaacaaagcaaggggctcaagcagaagtcgctgctggaggctttgaggatctcattcaagacgcttcagcgcaaagtacaggaaaaaaagaagctacatcttcaactactaaaagtagtaagggagaaaaaagcgaaaaatctgggaaatctaaatcctcaacttcggtagcaagcgcaagtgaaactgcaacggcacaagccgtacaaggtcctaagggattaagacaaaataattatgactcacccagccttcctactcctgaggcacagaccatcaatggtattgtacttaaaaaaggcatgggtacgttagcactcctcggtttagttatgaccttgatggccaatgctgccggagagtcttggaaagcttcattccaatcacaaaaccaagcgatccggtcacaagtcgaatccgctcctgctattggagaagctattaaaaggcaagcgaaccatcaagcatcagctacagaagcacaggcaaaacagtccttgattagtggtattgtaaacattgtaggatttacagtttctgtaggagcgggtattttctctgctgcaaaaggagctacctcggctttaaaatctgcttcctttgccaaagaaacaggtgcctcagctgctggaggtgctgcttccaaagctttaacttctgcaagttcttctgttcaacagactatggcttcgactgccaaggcggcaacaacagcagcgagttctgcgggatcagcagccaccaaagctgcagcgaacctaaccgatgatatggccgcagcagcttcaaaaatggcctctgatggagcttcgaaagcttcaggaggactctttggcgaagtcttaaataaacctaactggtctgaaaaagtctccagaggtatgaacgtagtgaaaactcagggagcgcgtgttgcatcatttgcaggaaatgctctttcttcctctatgcaaatgagtcaattaatgcatggactcacagcggctgttgaaggtctttctgcggggcagacaggaatagaagtcgcccatcatcagcggttagcaggacaagcagaggctcaagcagaagtcttgaaacaaatgtcttcggtttatggtcagcaagcaggacaagcaggacaattacaagagcaagctatgcaatcatttaatactgccttacaaacactacaaaatattgcggactctcaaacacaaacaacatctgctatctttaattaa

SEQ ID NO: 18804 - DNA, 918 bp, Chlamydia pneumoniae
ttgcatatgtcgctttttctagtttttcttacggcatttatttggtcttcttccttcgctcttagcaaactagttatgaatgcttcagctccgatatttgctacaggagctcgcatggtaatcgctggtgcgatcttggctcttgctgcatggtttcgaggcggttttgttggtatatcgaagaaaatattcttatatatcgtcctgttagctttaacaggtttctatcttaccaatatttttgagttcataggattacaaagtctaagttcatctaagacatgctttatttatggactctctcctctaatgtcagcacttttttcctatattcagctgaaagagaaagtgactctcaaaaaggttttaggattatccctaggcttggtgagctatatttgttacttaacctttggtgggggaggagacgattctcagccttggacctggcaaataggtcttcctgagcttctaatcttaggggcagcaagtttagcttcttttggctggactcttcttagacaaatcgaaaagcagtctacgttatcggtcacagcaattaatgcatacgcgatgttaatagccggaatgctatcaatcatgcactctgcagtcgtggaaccctggcgtcctttaccagtgcaagatatatcgcagtttctatacgcgactttggctctagtggtaatttctaatttgatttgctacaacctgtacgccaaattattaagaaagtattcttccactttcctttcattttgtaaccttgtcatgccactttattcaggcttttatggttggatattgcttggggagaagggagtctccttgggcttggtgttagctgtagccttcatggtggcgggctgtcgtctcatctaccatgaagagttccgacagggctacattgtttcttaa

SEQ ID NO: 18805 - DNA, 1908 bp, Chlamydia pneumoniae
atgattcaagtaacttgtgatcaaaaaaattatgaagtactcgaaggtactacagcagcggaactcgctaaacaattaaaaaattctcatcaattcattggtgttctcattaacgaacgccctagagatctttccacccacctaaacgaaggcgacaccttagtatttctgacttccgaagatcccgaaggacgagaaatttttcttcatacttctgcccatcttctagcccaagccgtattgcgtttatggcctgatgcaattcctacaatcggccctgtcatcgaccatggcttttactatgattttgccaatctttccattagcgaaagtgatttcccgttaattgaagatacagtaaaacaaattgttgatgaaaagcttgcgatttctcgctttacttatggcgataagcaacaagctttagcacaattcccacagaatccatttaagacagagttgattcgtgagcttcctgaaaatgaagaaatttctgcctatagccaaggggagttttttgatctttgccgaggtcctcaccttccctctacagctcatgtaaaagcgtttaaagtcttacgcacatctgcagcttattggcgaggggatccttctcgagaatctttagtacgtatttacggaacttcgtttcctacatctaaggaacttcgagcacatttagagcaaattgaggaagcaaaaaaacgggaccaccgtgttttgggggccaagttagatctattttctcagcaagaaagttctcctggaatgcccttcttccatcctcgcggtatgattgtttgggatgcattgattcgttattggaagcagctgcacacagctgcgggttataaggaaatcctaacgccacagttgatgaatcgtcagttatgggaagtttcaggccactgggacaattataaagcaaacatgtacacactgcaaatcgacgatgaagattatgccattaagcccatgaactgcccaggatgcatgctctattataaaacccgcttgcatagttataaggagttccctctacgtgtagcagaagttggtcatgtccatcgtcaagaagcttcgggagccctttcagggttaatgcgtgtccgtgcgttccaccaagatgatgctcatgtatttcttactccagagcaagtcgaagaggaaactttgaatattcttcagttagtttctacactgtacggtacatttggattagagtatcacctggaactctccacacgtccagaaaaagatacgattggggatgattctctatgggagctagcaacagatgccttaaatcgagcattagttcagtccgggacacccttcattgttcgtccaggagaaggtgctttttacggtcctaaaattgatatccatgttaaagatgcgattcaaagaacatggcaatgtggaaccatccagttagacatgttccttccagagcgtttcgaattagaatacaccacagctcaaggaactaagagtgttcctgtgatgttacatcgggctctttttggttctatagaacgctttttaggaattctgattgagaacttcaaaggaagattccccttatggttaagtcctgagcaagtgcgtatcatcacagttgctgatcgccatattcctagagcgaaagagctcgaggaagcgtggaaacgtttaggcttagtcgtcaccttagacgattctagtgagtctgtaagtaaaaagattcgcaatgcccaaaacatgcaggtcaattacatgatcactcttggagatcatgaaattaatgaaaatgtactcgcagtacgcacccgagataaccgagtgattaatgatgtctctgtagagagattcttaaacactatacttgaagaaaagaactctttaagtttaactgcattattgtag

SEQ ID NO: 18806 - DNA, 768 bp, Chlamydia pneumoniae
atgaagaccatcgctgtaaacagctttaaaggtggaacagcaaaaacatcaacaacccttcatcttggtgcggctcttgcccagtaccatcaagccagggtattgcttattgattttgacgctcaagcaaatctcacctctggattaggcttagatcctgattgctatgacagccttgctgttgtgttacaaggcgaaaaagaaattcaagaagtcatccgacccatccaagacactcagctggatttaattcctgctgacacctggttagagcgtattgaagtgtcaggaaatcttgctgcggatcgctattctcatgaaagactgaaatatgtacttggttctgtccaagacaagtacgactatgtgattattgatactcctccttcactttgttggcttacagaatctgccctaattgctgctgattatgcgcttatttgcgctaccccagaattttatagtgtcaaaggtctagaacgtctggctggtttcatccaaggaatttcagcacgacatcccctaacgattttaggagttgccttatccttttggaattgcagagggaaaaacaattccgcatttgctgagctgattcacaaaactttccccgggaagttattgaatacgaaaatacgtagagacatcactgtttcagaagctgcgattcatggcaaacctgtctttgctacatctcccagtgcacgtgcctctgaagattatttcaacctcactaaagaattgctaattttattaagagatatttag

SEQ ID NO: 18807 - DNA, 1035 bp, Chlamydia pneumoniae
atgaataaaaaaaagcgcgtacttaccggggatcgtcccacagggaaactccatttagggcattgggttggttctataaaaaaccgattagaacttcaaaatagccctgagtacgattgcttttttattattgccgatctccacaccctaactacaaaaatccgcaaggaagaggttttagatgtagataaccacatctatgaagttcttgctgattggctaagtgtagggattgatccaacgaaatctataatttacctacaatctgcgatccctgagatctacgagttacatctcctattttcgatgctcatctcaatcaatagagtgatgggcattcccagcctcaaagatatggcccgaaatgcctcaatcgaggagggaagtctttcttatggtcttattgggtaccctattttacaaagtgcggatattcttctagcgaaagcacagtttgtccctgtagggaaagacaatgaagcgcatgtggagctcacccgggatatcgctagaaatttcaaccgtctgtatgggcaggtatttccagagcccgaggtactacaaggcgagcttacctctcttgtaggaattgacgggcaagggaaaatgagtaagtccgcgaacaacgcgatctatctttccgatagcgacgctacaattactgagaaagtccgtaagatgtacacggatcccaaccggattcgagcaaccacaccaggtcgagttgaaggaaatcccctctttatttatcatgacatcttcaatccccataaagatgaggttgaagagtttaaagcacgctatcgtcaaggttgcattaaagacatcgaagtaaaagcacgccttgctgaagagctgattcactttttaaaacccataaaagaaagacgctcagaatttctatccaagcctctggcattacaaaacgtcttagaggatggcacgcataaaatgcgtgaagtagccaaagtcactatggaagaagttcatgacaaatttgggtttagccataaatggcgctcattgcttaaataa

SEQ ID NO: 18808 - DNA, 1287 bp, Chlamydia pneumoniae
atgtttgaagctgtcattgccgatatccaggctagggaaatcttggattctcgcgggtatcccactttacatgttaaagtaaccactagcacaggttctgttggagaagctcgggttccttcaggagcatccacagggaaaaaagaagccttagagtttcgtgatacagattctcctcgttatcaaggcaaaggggttttgcaagctgtaaaaaacgtaaaagaaattctttttcccctcgtcaagggatgtagtgtttatgagcaatccttaattgattctctgatgatggattctgacggctctccgaacaaagaaactctaggggccaatgctattttaggagtctctctagctacagcacatgcagcagcagcaacactacgcagacctctgtatcgttatttaggagggtgttttgcctgcagtcttccctgtcctatgatgaatctgatcaatggaggcatgcatgccgataacggcttggggttccaagaatttatgatccgtcctattggagcctcttccatcaaagaagctgtcaacatgggtgctgacgtttttcatactttgaaaaaattactccatgaaagaggcttatctactggagtgggtgacgaaggaggcttcgccccgaatcttgcttctaatgaagaagctctagagctcctattgctggctattgaaaaagcaggctttactccaggaaaagatatatcgctagccttagactgcgcagcatcctcattctataacgtaaaaacaggcacgtatgatgggaggcactatgaagagcaaatcgcaatcctttctaatttatgtgatcgctatcctatagactccatagaagatggtcttgctgaagaagactatgacgggtgggccttgttaactgaagttcttggagaaaaagtacagattgtgggtgatgacctatttgttacaaatccggaattaatattagagggtattagcaatggattagcgaactctgtgttgattaaaccaaatcagatagggacgcttactgaaacagtgtatgctatcaagcttgcgcaaatggctggctatactacaattatttctcatcgctcaggagaaactacggacactacgattgcagatcttgctgttgccttcaacgctggtcaaatcaaaacaggctctttatcacgttctgagcgtgttgcaaaatacaatagactcatggaaattgaagaagagcttggatccgaagcaattttcacagattctaatgtattttcttacgaggattctgaggaatag

SEQ ID NO: 18809 - DNA, 777 bp, Chlamydia pneumoniae
atgatggagaatctagagacttttattttaaaaatttacagaggcgttccagggaagcaatactgggaaagctttgaacttcctttacatcctggggaaaatgttatcagcgctcttatggaaatcgaaaagcgaccggtaaatatcttaggggaaaaggtcaatcctgtagtttgggagcagggttgcttagaagaggtctgcggatcctgttctattcttgtgaatggagttcctcgtcaggcatgtactgctctgatccaagaatatatcgatgcaacgcaatcccgagagattgtccttgctcctcttactaagttcccgttaatccgagatttaattgtagatagatcgattatgtttgataatctcgaaaggattcagggttgggttgctgcggatattgaaggagagacgtttggtcctcaagtcactcaggaacagcaagagcttctctatgcattgtcgcagtgtatgacgtgtggctgctgtacagaagcatgtccccaaattgataataaaagcgatttcataggtcctgcagcaatttcccaagcgcgttattttaatacgtatcctggagataagcagtctaagaaaagatggcgggctcttatgggtaaaggagggattgagggttgtggtcaagcgcataactgtgtccgtgtctgccctaagaaacttccccttacggagagcatctcggccgtgggacgtgaaatttcaaagttctctttaagaagtttattttcagctctttttaaaaagaaaaaataa

SEQ ID NO: 18810 - DNA, 786 bp, Chlamydia pneumoniae
gtggatttggctgatgctcatgttcatctttctgatgatgcttttgaagaagatattaacagcgtattacagcgcgctcaagattctggagtgtcactagttgttaatgtaaccacaacagaaaaggaattaaatcgctcgtttgcgtatgccgaacgttttcctaaaattcgattttgccatgttggagggactccccctcaagatgtagatcaggatatcgaagaagactacaggaattttcatgctgcagcacatagtaagaaactcgccgcaatcggagaggtcggtttagattattgctttgccacggaagagggaatagcaaggcagaaagaggttctccaacgctatttggctttatctttagaatgcgaactcccacttgtagtgcattgtcgaggtgcttttaacgattttttccgtatgctagaccaatactaccataacgatccacgttcacgtccagggatgctgcattgctttacaggaaccttggaagaagctcaggaactgatctctcggggatggtttatttctataagtgggatcgtgacttttaaaaatgctcaagatttgcgagatctggttgtagaacttcctcttgagcatcttttaatagagacggatgcgccttttctggctcctgtaccttatcggggaaagaaaaatgagcctgcacatgtgctccatacgatcaacgccgttgccaatgtaaaagggatgttcccacaagagcttgcagctcttgcttacaagaacgtcttacgctttctgcacggttaa

SEQ ID NO: 18811 - DNA, 789 bp, Chlamydia pneumoniae
atgatgaagtatcttccctatatagcaatcacggcatgtattcatggggggattcttctccttgtctttgcttctcctcttcctaaaaaacgtttacaacccaaagcctttcaagaaaaactcgtcactatccaaccgaaacctcctgtccctactccctcagtagttgtagatccagctaaaacgatacgcccctctgtagctacgcagccacaaaaacaagctaaatgcagccctcctcaagagaacgtccagaaggctctacaaaaacccattccaaaagttataaaaacagaacctcctaaaccatcaccagcccctactgtagcaaaaaaaacgaccgcaactgagaaacctcctccctctacaactaaaaaaaatacacagttatcaaaaacccaactacaaacactctccgaagttgcccaagccctttccctacatgtagataaaattgagaaaagtgaaacttctctcaaaaatatctcctggccatctacagcccaattgaccatgcactcagaacttaaagcaactcaagaagacgagctatgtgagttatttcgcactcacatagctctcccctctaaagggtatgtgcgtattaaattagtcctttctccgaatggagagattcaagaatgcagttttctctctgaggtgagtgctgctgacaaacagctgctcactcagaggattcatgcactcccatttcaaaaatttctcgaaaaatacaaagtctcgaaaaatatatcttttcatattaaactggtcagtaatgaatcctaa

SEQ ID NO: 18812 - DNA, 627 bp, Chlamydia pneumoniae
gtgcggaacaataaaagagttgaagaagaggtttttatgacactctccctagttggaaaggaagcccctgattttgttgcgcaagctgttgttaatggcgaaacgtgtaccgtatctttaaaagattatttaggaaagtatgttgtgcttttcttctatcctaaagattttacttacgtgtgtcctacggaattgcacgcatttcaagatgctttaggagaattccacacccgaggagctgaagtcataggctgttccgtggatgacattgccacccatcaacagtggttagctactaagaaaaagcaaggtggtatcgaaggtattacctatcctcttctctcagacgaagataaagtcatttcaagaagttatcatgtgttaaaacccgaagaagaattatctttcagaggagttttcctgattgataaaggtggaatcatccgtcatcttgtagtgaatgatcttcctctaggccgttctatagaagaagaacttagaaccctagatgctttaatcttctttgaaactaatggcttagtctgtcctgcaaattggcatgaaggagagcgagcgatggctccaaatgaagaaggactgcaaaattatttcgggactatagactag

SEQ ID NO: 18813 - DNA, 621 bp, Chlamydia pneumoniae
atgaaaattgtgattgctagttctcatggttataaaatacgagaaaccaagacttttttaaagcgtttaggtgatttcgatattttttctctttctgattttcctgactataaacttccccaagaacaggaagattctataacggcgaacgcccttactaaagggattcacgctgccaatcatttgggttgctgggtcattgcggatgatacgatgttacgcgtccccgctttaaatggtcttccgggtcctttatctgcgaactttgctggtgtaggtgcgtatgataaagatcatcgaaaaaagctgcttgatcttatgtcgtctttggaaagcctcgtagaccgttctgcgtacttcgagtgttgtgtagttttagtctcccctaatcaggagatttttaaaacgtatgggatatgcgagggctacatcagccatcaagaaaaaggttcttcagggttcggctacgaccctatctttgtaaaatatgattacaaacaaacatttgccgagcttagtgaagatgtgaaaaatcaagtttctcacagagcaaaggcattgcaaaaactcgcccctcacctgcaaagcttatttgaaaaacacctactcactagggactag

SEQ ID NO: 18814 - DNA, 1920 bp, Chlamydia pneumoniae
atgacatgtatctcagaacttaacgaagcacaacgcaaagctgtaacagctcctctcaatcctgtactcgttctagcaggagcaggagcaggtaaaactcgtgtggttacctatagaatcttacacctaattaaccaaggcatcgcgcctcgagaaattctggctgtaacttttacgaataaagcagcgcgagaacttaaagaacgtattgtcaatcagtgtgcttccactaatgaatttgatgttccgatggtgtgtacatttcatagtttaggagtttttattctccgacgttctataaatctgctaaatcgtgaaaataattttactatttatgatcaaagtgacgcggaaaagctcatcaagcatgccttgcaacaacacaacctcaaacctaatcttgcgagcaaaatacaagctcacgtctcacaagcaaagaaccgtttactctttcccgaagacttggatcccaatgactatatcgatcctgtagtctcgatataccaagaataccaaaagaaacttatcgaagcgaatgctctggatttcgatgatcttctctttttaaccgtaagacttcttagagaaagtcccgaagcacaggaattatataaccaattatggaaagcattgctcatcgatgagtatcaagataccaaccatgcacaatatactttaatgcagctcctctcaaagcaacatcgcaatgtctttgctgttggggatcctgatcagtctatctactcctggcgaggagcaaatattcacaatatcttaaattttgaaaacgattaccctaatgctaaagtcttatgcctcgaagaaaactaccgcagttatggcaatattctaaatgccgctaatgctctgattaaaaataacgcatcaaggttagaaaaagaattgcgtagcgtcaaaggacctggagaaaagattcgtcttttcctaggaagcacagatcgcgaagaagcagactttgtcgctgcagaaattcttcaattacatagagtcgggaatataaaactacgtgacatctgtattttctatagaacgaactcccaatctcggacatttgaagacgctctacttcgcaggcgcattccctatgaaattatcgggggtctctccttctacaagcgtaaggaaatccaagatatcctagcctttctccgtatctttatttccaaaagcgacatcgttgcttttgatagaactgtaaatctacccaaacgagggatcggttcaacaacgatatttgcactcacgcaatatgcaattgctcaaggtctccctatcctcaaagcatgccaacaagccttggatactaaagacgtcaaattatctaaaaaacaacaagaaggccttcaagagtatcttgcacttttccctcaaattgaacatgcctacaatactctttcccttagagattttatagagtctgtagttaggatcacgggttaccttgagatcttaaaagaagatgcggataccttcaaagatcggaaaagcaatttagaggaactctatcataaagctttggaatccgaacaacaaaatccaaagacacatttggaacttttccttgatgatcttgccttaaaaggctctgatgatgatctaaatttaactgcggatcgcgtgaatttgatgacccttcataatggaaaagggttggagttccgtgtatcatttcttgtaggtctagaagaacaattgcttccacatgcgaactctctgggcggcacttatgaaaatattgaagaagaacgacggttatgctacgtaggaattactcgagctcaagatctcctctatcttactgccgcacaagttcgcagcctctggggaaccgtacggatgatgaagcccagtagatttttaaaggaaattccaaaagattatatgattcaagtgcgttag

SEQ ID NO: 18815 - DNA, 2616 bp, Chlamydia pneumoniae
atgaaaaagtccttaattatagtagaatcacctgcaaaaattaaaacgctacaaaaattattagggagtgaatttgtttttgcctcatctataggacatattgtagatctccctgctaaggaatttggcattgatgtggatcatgatttcgaaccacaataccaagtgcttcccgataaacaagaggtcatcaatcacatccgcaagctagccgcgaagtgtgaaaaagtctatctttcccctgaccctgatagagaaggagaggcaattgcctggcacatcgcgaatcagcttcctgactctcctctgatccagagggtatcgtttaatgccattaccaaaaatgcggttacagaggccttaaaacaccctcgaaccatcgatatggctttagtcaacgcacaacaagcgcggagacttcttgaccgcattgtgggatataaaatttctcctatcctaagtcgaaagttacaacaacgctcagggatatctgcagggcgtgtgcaatctgtagctttgaagcttgtcgtagatcgagaaaaggctattgatgcttttgttcctgttgaatactggaatttacgcgttttaatgcaagatcccaaaacgacaaaaacgttttgggcgcatttatacgctgtgcaaggaaaaaagtgggagaaagaaatccctgaagggaaaaccgaaaatgatgtccttcttattaactctgaagagaaagcccgtcactatgccgagctgttagagaaatcctcgtatacaatcactcgtgtagaagctaaggcaaaacgacgttttgctcctcctcctttcattacatccactctccagcaggaagcaagccggcattttcgtttttctgcttctagaaccatgtctatagcgcaaaccctctatgagggcgtcgatttagatagtgaagattctacaggtttgattacctacatgcgtacggattccgtacgtgtagatcccgaagcattaactacagttagagagtacatccaacagactttcggtaaagaatatctccctgagaaagcaaacgtatatactacaaaaaagatgacgcaagatgctcacgaagccatacgtcccactgatattaatctgactcctgacaaattaaagaataagctttctgatgatcaatttaaagtatacaacttaatctggaaacgcttcgtagcctcacagattacccctgcaatttatgatactttagctgttcaaattactacggatacagaaatagacctccgagcttcaggatccttactaaaatttaaagggtttctcgctgtctatgaagagaagcaagatgatgaaaatgatcaagaagaagaccatcctctcccccccctacatgcccaagatgccttaatcaaagaggaagtatcccaagaacaggcatttacaaaaccccttcctagattcacagaagcttctctagtcaaagagttagaaaaatctgggatcggccgtccttcaacgtatgccacgataatgaacaaaattcaaagtcgtgaatatacgactaaagaaaatcaacggttacgtcctacagaattaggaaagattatctcacagttcttagaaacaaactttccaagaattatggatatcgggttcacagctctcatggaagacgagcttgaactcattgcagataataaaaaaccttggaaactcttacttcaagaattctggactacattccttcctgtagtgattacagcagaaaaagaagctgtcattcctagaattctcacaaatatagaatgttctaagtgccataaaggaaaactagtaaaaatctggtctaaaaacagttatttctatggctgctcagaatatcctgaatgcgattaccgcacttctgaagaagagctcgctttcaacaaagaagactatgctgaagacaccccctgggacagtccttgtcctctttgtggaggcgttatgaaagtacgtcacggccgctatggaacatttttagggtgtgagaagtatcctgaatgccgtggcactatatcaatccataaaaagggagaggaaatcgaacaggaagagcctatcccctgccctgcaataggctgtaatgggaaaattttcaaaaaacgctcccgttacaacaagattttctattcctgttcagagtatcctgaatgtagtgtgattggaaattctatagatgctgtaatcacaaagtactcaggaacagaaaaaattccctataagaaaaaaactccgaccaagaaaaaatcttcagcaaaaacaacaaaagcagccaaaacaccttctaaaaagggaaaagcaaaaagctcggttaaaaaatcttcagaaaagaaaacaggtcctttattccttccctctccagatctagcaaaaatgatcggaaacgaacccgtatctcggggagaagcaaccaaaaaaatctgggattacatcaaggaacatcaattacaggcaccagaaaataaaaaacttttagttcctgataacaatttagctacgatcattggtccgaatcctatcgatatgttccaactttcgaaacacctaagtcagcatttaacaaaggtctctaatgacgagtcgtcggcttcttcgtaa

SEQ ID NO: 18816 - DNA, 1008 bp, Chlamydia pneumoniae
atggctgctccaatatttataaaaaatattttacttcgttcctctatagtctatgctcctctagcgggattttcagattatccctaccgttgcatgtccgcattgtatcaaccagggttgatgttttgtgaaatggtgaaagtagaagggatactctacgctcctgagcgtacttcgaagcttctagattataatgagaacatgcgtcccataggagcgcagttgtgcggtagtaatccagaaactagtggggaggccgctaaaattttagaaggccttggtttcgaccttatagacctaaattgtggatgtcctacagataaaatcaccaaagatggcagtgggtcaggtcttttgaagacgccagagcttattgggaggattttagataaaatcatcaatagcgtttccattcctgtaacagtaaaaattcgctcgggttgggatatggaacatatcaacgtagaggatacggtacgtattatacgtgatgctggagctagcgcagtttttgttcacgggagaactcgtgctcagggataccacggtcctagcaagcaagagtatatttctagagccaaggctgctgcaggaaaagaattcccagtttttggtaacggagatattttttctccagaagctgcgcaagcaatgctaactacaggatgtgatggtgttctggtagctcgaggaaccttgggagccccttggattggaaaacaaatccaagactatctcactacaggaagctatgagaaaattccctttatcaaaaggaaagctgcgtttctggagcatatgcgcctagtagaagactattatcaaagcgaaacgaagttcctttcagaaacacgtaaattatgtggccactacctaatttccgcggctaaggtgcgttttcttcgttcgtctctagcaaaagcgacatcctaccaagaagtctaccagcttgtgaatgattacgaagaagccgacgactcgtcattagagacctttgttaaatgctga

SEQ ID NO: 18817 - DNA, 543 bp, Chlamydia pneumoniae
atgactgatcctaaaatagagaaatccgcactacgtaaactatttatctctatacgcagggatctctctgaagaacgcaagcatgaggcctcttctgcagtggcctctttcgttcgcagcttttctaaagagagcgtcgttctctcttttgtctctttcaatcacgaaatagacatgcaagaagcaaatcgcatacttatccagaaatgtaccctagctcttcccaagattgatcaggaaaacctctatcctgttcttatcccctcgatagacgatcttatttccgttgtgcatcccaaagatcccttctcgaaacaaacaccgatctcgagtgataagattacccacgtgctcgttccgggccttgcctttgatcagcagggctatcggcttggttatggtcacggtttctacgatcgctggttagcacaacatccctatccctctatacgaaccatcggcatcggctactgcgaacaaaaaatcgatagacttccccaagaaagtcatgacatccccctttcccaaatctatttatgttag

SEQ ID NO: 18818 - DNA, 1062 bp, Chlamydia pneumoniae
atgaatttacctgatagaaaaaaggctctagaagctgctgttgcttatattgaaaagcaattcggcgctgggtccatcatgagtttaggaagacactctgccacacatgaaatctccaccatcaaaacaggagctttatctttagacttagctcttggaattcatggggtccccaaaggacgggtgatcgaaatctttggtcctgaatcctcagggaaaacgacactagctacccatattgtcgcgaatgctcaaaaaatgggcggtgttgctgcctatatagatgctgaacatgctttagatcctagttatgcatctcttattggcgtcaatatcgatgatcttatgatttctcaacccgactgtggtgaagatgcattaagcatagcagaattgctcgcgcgttcaggagctgtcgatgttatcgttattgactctgtagccgctttagttcctaaaagcgaactcgaaggagacatcggtgatgtacacgtaggcctacaagctcgtatgatgtctcaagcattacgcaagctcaccgctaccctatcacgtagccaaacctgtgcagtgttcattaaccaaatccgagagaaaatcggtgttagcttcggaaacccagaaactactacgggaggacgtgccttaaaattctactcttcaatacgattagatattcgccgtataggttcaataaaaggcagtgataactctgacatcggaaatcgaattaaagtgaaggtagctaaaaataaacttgctcctccattcagaatcgcagaatttgacatcctattcaatgaagggatttcttctgcaggttgtatcctagatcttgctgtcgaatataatattattgagaaaaaaggttcttggttcaactatcaagagaagaagttaggacagggaagagaatttgttcgtgaagaacttaaacgtaatagaaagctttttgaggaaattgagaagcgcatctacgatgtaattgcagcgaataaaactccctctgttcatgctaatgaaacacctcaggaagttcctgctcaaacagtagaagcttaa

SEQ ID NO: 18819 - DNA, 513 bp, Chlamydia pneumoniae
atgtgtaaaaatagaggggtccgcgggatcgtggcttgtgatcctagaggggtgataggtttagaaggaaagcttccttggcattaccctgaagatctccaatttttttctgaaaccatacaaaaatttcctattgttatgggaagaaagacttgggaaacacttcctaggaagtattttgttgatagagcagtcgtcgtgttttctcatgaaaaacgacagggagtgcacggggagatctgggtaacttctttagaagaattcctgctcttagatctttcttcgccgacatttttaatcggtggtggtgagctttattctcttttcttagaaaatcaaattgttcgagatttttttatttctcatatcaaaaaagaatatgctggtgatacatttttccctttgtccttgctagagacatggaccaaaactgtgcttagagatacccaaaagatcacaacgtgttactatgaaaatcaccacagtcaaaacaccaaaaatatatccttatga

SEQ ID NO: 18820 - DNA, 1353 bp, Chlamydia pneumoniae
atgtccgagccccgttttgtctgcttaagtttaggatcaaatttaggaaatcgttttaaaaatctacagattgctcgtactttattaggcgaacaagctgttttaggtctacgtagttcggtaattctagaaacagaagccttgttattaccgggatctcctccagagtgggaccttccttattttaattcggtacttgtaggggaaaccaccctatctttgcgagaactactggttactatcaaacagatagagaaggtggtaggtagagcagaggagtcgcccccatggtctcctcgaaccatagatgtagatattttgctttatggtgacgagtctttttgttgtgatcacaccgagataacgattcctttgtccaatttgttatcacgtccttttttgattgctttaatagcatctctttgtccttatcgtcgattttgcactcaaggttctccttatcacaactttacatttggagagttggcgcatcaccttccctcacctccagggatgattcgtaggagtttatctccagatacgatgttgatgggggtggtaaatgtgactaacgactctatgtctgatgggggcatgtttttagatccagaaaaagcagtggctcaagctgagaagttatttacagagggcgctgcagttatagattttggagctcaagcaacaaaccctaaagtaaagcagtttttatctgtagatcaagaatgggagcgtctggagcctgttttaaggttgttaaaagagacttggtccaatagaaaacaatatccaatcatctctttagatacgttttatcctgaaattattcttagggctatggatatttatccgatccagtggattaatgatgtctctgggggatcacagtctatggctgaggtcgctagggattgtgagctatccttggttatgaatcactcgtcttcgcttcctgtggatcctaaaaatatcttgtcgttttctgtccctattggagagcaactgttgagctggggtgagaagcaacttaagatgttttctgatgttggtctgaacgcaaatcaggtgatttttgatcccggtataggttttgggaagggggctgcgcaatctttggctactttgtatgagattgcgaaatttaagcgtttgggatgccctatccttattggacattctcgaaaatcgttcttatctttatttggtaatcatgatcccaaggatcgtgattgggaaaccgtaggtctatctatactcttacaacaacaaggtgtggactacttgcgagtgcataatgttgctgctcatcaaaaagctttatcagtagctgcttgtgaagcctgtgcacccatctaa

SEQ ID NO: 18821 - DNA, 1776 bp, Chlamydia pneumoniae
ttgactaaactgtcctctaaggctagaaatccccttgttttattccaagtaagaaagttgttcatgaatacacagaatagccaagctacagaagtttcatcagaagaagaatctcaaaagaagttagaagagcttgttgctcttgctaaggaacagggtttcatcacatacgaagaaatcaatgaaattcttcctatgtccttcgacactccggagcaaattgaccaagtgttgattttcttaactggaatggacattcaagttttgaatcaaattgatgttgaaaggcagaaagagaagaaaaaagaagctaaagagcttgagggtttagctaggaggactgaagggactcctgacgatcctgttcggatgtatttgaaagaaatgggtacagtacctctccttactagggaagaagaggtagaaatttctaagagaatagaaaaagctcaagtacagattgaaagaatcattttacgcttccgttattctgctaaagaagcgatttctatagcccactatttgattagcggcaaggaacgttttgataagattatttccgagaaagaagtagaggataagactcactttcttaagttacttcccaagctaattaccttgcttaaggaagaagatacgtatttagaaaacttattattgtctttaaaacagcctgatttatccaagcaagaagcagctaaattaaatgacagtttagagaagtgtcgtattcggacgcaagcctacttgcgttgtttccattgtcgtcataatgtcactgaagattttggcgaagttgttttcaaggcttatgattctttcttacacttagaacagcaaattaatgatttgaaagttcgtgcagaaagaaataagtttgctgctgcaaagttggcagcagctaagcgtaagttgtataaaagagaagttgctgctggaaggactttagaagagttcaagaaagatgtacgtatgttacagcggtggatggataagagccaagaagccaaaaaagaaatggtggagtccaatttacgtctagtgatttctatagccaaaaagtataccaaccgtgggctttccttcttagatttaattcaagaagggaatatgggcttgatgaaggctgtcgagaagtttgagtatcgccgtggttataagttctcgacgtatgccacctggtggattcgtcaagctgtgactcgtgctattgcggatcaggcaagaacgatccgtattccagtccatatgattgaaaccatcaataaagttcttcgtggagcgaagaaattaatgatggaaacaggaaaagagcccactcctgaagagttagcagaagagttaggattaactcctgaccgtgttcgggaaatttataagattgctcagcaccccatctctctacaagccgaggttggagagggtagtgaaagttcctttggggatttcttggaggatactgccgtagagtctcccgcagaggctacggggtattctatgcttaaagacaagatgaaagaggtcttaaagacgcttacggatcgtgagcgatttgttttgatccatcgttttggccttcttgatggcaaacctaagactttagaagaagtgggttctgcctttaatgttactcgtgagcgtattcgtcagattgaagccaaagctttaaggaagatgcgtcatcctattcgatcgaaacaattgagagcattcttagacttattagaggaagaaaaaaccggaactagcaaagttaagagtttgaaatccaaatag

SEQ ID NO: 18822 - DNA, 300 bp, Chlamydia pneumoniae
atggcacctaaaaaaccgaataaaaaaaacgttatacaaagaagaccttctgctgaaaaacgcattctaactgctcaaaaaagagagttaatcaatcacagcttcaaatctaaagtgaaaacaatagtcaaaaagtttgaagcatctttaaaactcgacgacactcaagccactcttagcaacttacaatccgtctacagtgttgtagataaggctgtaaagcgaggtatcttcaaagataataaggcagcacgcattaaatctaaagcaaccttaaaagttaacgcgagagcatcgtga

SEQ ID NO: 18823 - DNA, 531 bp, Chlamydia pneumoniae
atggatcagatgctggaaaaccacgtgttttctgggattcatggtactgtagagtctggtgtaactttaaaaaatatagaaaagattgagattgctgaagatgcctacgtagagtctggggcttacattgtaggaccatgcattcttggctcacaaacagaagttcgtcatggggcctatctgcgaggcaatgtcatcacaggcagtcgctgtgttgtgggtcactgtactgaaatcaagaatagctatttaggtcatcatacgaaagccgctcactttgcttacctcggagattctgtgttaagttcagaagtcaatctaggtgctggagtacgttgtgctaatttccgtctagatggaaggaacatctatgttcgttctacctcagataaatcaaaaaaaatcgatacagggcgtcgtaaacttggtgcctttttaggaaaaggggttgctataggatgcaatgttgtcatcaatccaggccaacatattctccctcatactagaattcgtcctggtcaagtcatttaa

SEQ ID NO: 18824 - DNA, 870 bp, Chlamydia pneumoniae
gtgttacatgctttagatacgtatcgaccttctatagaaagtgctatagaaaaggctttggaaggatttggtcctataggtcacccgattcgctctcctgtagaatacgctttacagggcggtggaaagcgtttaagacctggtttagtctgcatgatggctcaaggtttgggcttaaatcatgacgttatggactcagctttagctgtagagtttgtccacacttccaccctaattgcggacgatcttccttgcatggacaacgacgatgagcgtaggggacgcccgacggtacataaagctttcgatgaagcaaccgccttactcgcatcttacgccctaattcctgctgcttactcccaccttcgcttaaacgcaaagaagttaaaagaacagggctgtgatcctagagaaatagatatcgcttacaacattatcggagatattacagacaaaaatattggatgttctggggtattaggagggcagtatgatgatatgttcttttctaaccgaggtcaagaacacgtacaatctattatgatcaaaaaaacgggttctctatttgagattgcatgtatttctggttggttatttggtggcggagacccacaatttgcacctataattacaagtttctcaaataattttggcttactttttcaaataaaagatgatttttcagatttacaaaaagactcccaacaaattgggctaaattatgctttactatttggagaaaaggccgctctagagctattagcaagatctcaaaacaattgcttagagctcttggatcgtctcagtgctggtggattaaagaatagttctgaattcgaaacgattatctcgagtttaggatctttttaa

SEQ ID NO: 18825 - DNA, 510 bp, Chlamydia pneumoniae
atgtcgagttcgatacccacaacacaaaaaataacaatatcgattcctacttttgttcgatttaacatcgaatcaatcaaccttactgatgagcaaaagaaaacagcacttactattggtcagaatattgctacagagaatactcaagttttaggaaattttgttgatgcagatggaggactgatatgccagaacgatctttccgttggaggaaatatcaatatcactccacaaaccttcaatactatggttttcaacggtcgggtgaatctatcgaattctcctttttcttatcaagactccttggggaataagcgtcaagactatgcaaatattaatactgagcaacctcaacagtatgtgccttatggatactacaaacttaccagagtcatgatgatgcagcgagctgctctttcaggagggcatgtaggttcgggagatattggttggggggagtcaatgtaccttggaataagttcaatcaaacgtcaacacaaagtacagtga

SEQ ID NO: 18826 - DNA, 1236 bp, Chlamydia pneumoniae
atgattcctaccatgttaatgttcttcattatctgttttactttatgctcgggattcatttcgttatctcaaattgctttgttttctttgcctacgagtttgatctcgcactataagcgctctaaatctaagaaacagcagcgagtagctacccttcttctacatccccaccacctgctcatcaccttaattttttgtgatatcggactgaatattgctattcaaaactgccttgccattctatttggagatgcagcttcgtggtggtttactgtaggtcttcctttagcaattactttgatcttaggtgagattctccctaaagcagtagctcttccttttaatacacagattgctagttccgtagcccctcttattctttgtgttactaaaatcttcaaacccctactccactggggtatcgtaggaattaattatgtggtccaatggattttatcgaagcaacagattgatatcatccaaccccaagagctgaaggaagtattgcaaagttgtaaggatttcggcgtagtcaatcaagaagaaagccgtttactctatggttatctttctcttagtgattgtagtgttaaagagcgtatgcagccacgccaggatattttattttatgatatccaaacccctttagagaacctctatcttttattttctaaacagcattgctcacgagttcctatatgtaacgataacctccaaaaccttctgggcatttgcacagcgcgctctcttcttttacatgacaagccactgcaatcttcggatgatctcctccccttgctgaaaaaaccgtattatatgccagaaaccatctctgcaaaaatggctttatgtcagatggcagctgaagacgaaaccctagggatgatcattgatgaatacggatctattgaaggattgatcactcaagaagacctctttgaaattgttgctggagaaattgtagaccagagagataataaaatactctataccacctcaggagctgatgttattattgcctcaggaactttagaactccgtgagtttagtgagatcttcgatatcaacctaccgacgaacaataatattgcgactataggaggctggttaatagagcaaatcggaacgattccgacaacaggaatgaaactctcttggaataacttgcttttccaggtattagacgctgctccgaatcgcattcgccgtgtgtatataaggaaattgtatgactaa

SEQ ID NO: 18827 - DNA, 1053 bp, Chlamydia pneumoniae
ctgcgaggtctctttgacctcgataaaaaacaaaaagaacttcaagttttagaagaagaaagttccgaagaaaatttttggcaagacagtgttcatgctggaaaaatttctgaacagattgtaagtctgagacgacaaatccaagagtatcaggaattaaaaagcaaaatagatgctatagagtttttcctcgaggatgccgatgctcttgaagaccctgcgatttgtgaagacttagagaaagaatttctcttttgtgagaagaaacttgctgtttgggagacgcaacggttgctttccggagaggcagacaagaactcttgtttccttacgatcaatgctggggcaggtgggacggagtcgtgtgattgggtagagatgctgtttcgtatgtattcccgatgggcgacgaaacatcaatgggccttagaggttgtcgatcgcttagatggtgaagttgttggaattaagcatgttactgtaaagttttcaggaatgtatgcttatgggtatgccaaggcagagcgaggagtacatcgtttggtgcgtatctcacctttcgatagtaatgggaaacgtcacactagctttgcttctgtagacgtcttccctgagattgatgatcagattaagattgagatacgacctaatgatttacgtatagatacgtttcgttcttcgggagcaggaggacaacacgtcaacgttacggaatccgcagtcaggatcacgcacctaccttctggagtcgttgtttcatgtcaaaatgaacgtagtcagatacagaatcgtgagagctgtatgaaaatgctacaagcaaagttgtatcagcaggttttacaagaacgtttagagaagcaatctcttgatcgcaaagataaaaaggaaattgcttggggatctcaaattcgcaactacgtatttcagccctatactcttgttaaagatgtacgtacgggacatgaaacaggaaatgtccaagcgatgctcgacggcgagctattggatgaatttattaaagcatatttggcagagtttggagaagtttcatga

SEQ ID NO: 18828 - DNA, 1716 bp, Chlamydia trachomatis
atgaatcagcgttgtcgagtcattatcattggaggaggacttgctgggctatctgccgctatgcaactcgcagatcgtggtattttagtagagctgttctctttaactaaggtcaagcgatcgcattctgtatgtgcacagggaggaattaatgcagccttgaatctcaaaggagaaaatgattccccatacattcatgcttacgatacgataaaaggaggggattttttagcagatcagcctcctgtattggaaatgtgtttaaccgctccacgcattattcatatgctggataggttcgggtgtccatttaaccgtgatgcagatggaaacctcgatgtgcggcgtttcggagggactctctatcatcgcacagtcttttgtggagcgtccacagggcagcagttaatgtacaccatggatgagcaggtacgtcgtcgtgaatgtcaagggaagatcattaaaagagaaaatcatgaatttgttcgattgattaccaatacggaaggaagagcttgtggcgttgtcgtcatgaatttattcaatcaccgtttagaggttatacaaggtgatgcggtgattattgcaacgggtggtttgggtgtcatttttaaaatgtctaccaactcgactatctgtacaggagctgcaaatggtcgattattcatgcaaggcatgcactatgcgaatcctgaatttattcaaattcatccgacagcaatttctggactagataagttgcgtttgatttctgaatcggttcgtggtgaaggaggaagagtttgggtgcctgggtgttcatccaaaacgattattttccctgatggttcgcgacgcccttgcggagagacaggcaagccttggtattttctagaagagatgtatcctgcttacggcaatttagtgagtcgagatgtcggagcgcgagctattttacaggtatgtgaggcaggtctgggtattgatggtcgtcacgaagtgtttttagatgtaacccatctacctgtagagactctgaataagctagaggctgttttagatatctatcataaatttacaggtgaagatcctaaaaaagtccctatgcgcatttttcctgcggtgcactattctatgggaggcgcctgggtagattggcctgccagtgacgatagggatcgcgatagtcgctatcgacatatgacgaatatcccaggttgttttaattgtggcgagtcagattttcaatatcatggagccaatcgtttaggagctaattctttgttagcgtgtttatacgctgggttagtcgcaggagatgaagcggcacgatttgtggaatcgttcggaagttgtatctattcccaacaagatcttaatcaagctttgcaacaagagctagagatctctcgagagattctctctcgtcaaggaggagaaaatgcatttgctttgcatgaagagatcgcgcgagtcatggtcagtaatgtgaccgtgaaaagggagaacaaggctcttgaagaaactctacacaagttaaaggagtttagagaaagaataaaaaaagtttcggtacacgattcttctcgatttgcgaataaaacgtttcattttgttcgacaaatggaacctatgttagagcttgcactagctatcacgacaggagctttattaagaaacgaatttcgagggtctcattacaaaccagaattttcgaaacgagatgatgtgaatggt

SEQ ID NO: 18829 - DNA, 2076 bp, Chlamydia trachomatis
atgattcggcaatggtatggattttttctttgcttgctgttcagctatacgtcttgttttggtgtagaagaaaatagtggaagagctacgcctacagtagaacttgttagtgaaagcgaacaagctgttgaaggagaagtgcttcgtatcggagtattgattgctattccagaaggagagcatatctactggaaaaatccagggaagcttggaatgcctttgcgcatttcttgggatttgccatcaggatgtaggttgctggaggaacattggccgactccagagattttcgaagaggatggggttgtttattttggttataaacattctacaatggtggttgcggatattcgcgtttctaaagagatagaaacgcgtccattggagataaaagcgcaagttgaatggttgtcttgcggtgcatcttgtctcccaggttcttcgtcaagggttcttgtgattcctatagatcaggggccgttaattcctaatagtaaagagacattcactttttcccgtgcgttagcggctcaacctcgacctttggatgctgccataaagatttcttatcagcctgatggcttagatgtttttgtgccagcagggaaagcggatcgggcaacccaggcatggttcattgctgaaaacacgcgagattttgcttatgctcaagaggttcctcttgagcaagcgactacgtacatatggaagttgaaacatcctgaaggaaatatgcctaagggtattgggttgtcggggattcttatattcaaggatgatgcagggaaagtagtcgcttcgtatcaagtagaagagaatcaagtcgaacagctttcggcattgagctggaggtttctctctattcttcttatggctttcattggtggaatcttattaaacatcatgccctgtgtattgcctctgattactttgaaagtatttagtttaattaaatcggcggcagatcaccattcttcctctgtgattggagggattgggtttactttaggggctattgtaagcttttggggactcgctttttgtgcgtttttgttaaaggttttagggcaaaatattggatggggattccagcttcaagaacccatgtttgttgccgttttaattattgtcttcttcttatttgctctgagttcgttaggcgtttttgagatgggaataatttgtctgagcctagggaaaaaattgcaagaagagggaggggcatcggtaaggaagaatcagatctggggagcttttttcaatgggatgttgactaccctggttacaactccttgcactgggccttttcttggctctgtatttggattagttatggcagtgtcttttgttaagcagctggcaatttttactgctataggattaggaatggcaagtccctatctattatttgcttcttttccgaagatgctagccattttacctaaacctggtccttggatgagtacgtttaaacagttgactgggtttatgttgcttgctactgcaacttggcttatctggatttttggggtagagacgagtgcaaccgctgtaactattcttcttgtaggattgtggttggctgctgtaggtgcatggattctagggagatggggaacccttgtatctccgcgtaatcagcggcttcttgcttccgttgtattcattttctgtattttaagttccttagtgattacctctataggtgtccgttattttgatgagaacgtccctcctgcacatagctctgattggcaatctttttctcccgaaaagctagctgatttacgcgaaaaagggattccagtttttgtaaatttcactgcaaagtggtgtttaacgtgtcaactcaataagcctcttcttcatgccaatatgcaagcttttgctgctaagggcgtagttactttagaagcagattggacgaaaaaagatccaaaaattacagaagaactcgctcgtttaggccgagccagtgtaccttcttatgtgtattaccctgcggggaacaaagctccgcttattcttccagaaagattatcgcaatctgctttggaagagatggttttttctcag

SEQ ID NO: 18830 - DNA, 1725 bp, Chlamydia trachomatis
atggtttctagggttcccggaagtagtgatcctgttgatgtaaatgctcttagcaacctttctcctgtacaaaatcagaactcaggagtttctgtatcagcgatttctctccctaatgaaacagtttctaaatcagggaaaacgctaaaatattcgacagagctcattgcaggtattgttgtattaggggttgcattagcaattgtggctatcgccctaacgatactagctcctggagttccgcaatcgattgttttagcgattgctttttcaggaatttctgtcggtggagttaccacgttaagaagtcttattaatggaattaagaccgtagttgctccgagaatgacattcagacagagggcaaagagcgcagctctccttggtgcaggattaacgggagccggtcttgtgctgaaacttggatcttcttatattcctgggggatatggtagcgctctcgggaaatttggggatatttcttataatagagggagtggagctctttttgcagggttcgctcactatctctatgtgcgctttttccagtcaaaaaaagctgcatcgggtgaagctcttactccagaagagatgctcatagaaggagcaaagatacggaagctagcgaatggattagttctattaggagttggttttgcgtgtttagggattgctttagctgttgttggaactcttgctgtaactggaggggccgcaacagctcttatagtgttggctcctcctttaatcagtttagggatttctttagtgatctcgaatatgctgcacacaactctagggcaatggagagcttttgctagagctcaacaagatcaagatttacttgttgatactaaactaaaaaacatttctcaagcagacttcagttatcgggtagataacaatatagaggtggtagtcgatcctagagagtctaatcttccttctattgaacgtttgtctcaaggagaaatagatgcagcattatctttaacgaagaaacaacagcggatcctgattttatcaggattattattgctagcaggggttacttgtactttattggctggatttgggggattgcctgctgtacaagtgttgcttctattttctataggaggagctgtatcatcgtcagctgttccaatggttgtttctggaatggttcatgtcgctcatcaactaaaagctagattacagattagtttagctcgtagaagagaagctcgtttaaaagcgcgcatgataagggaaatggataatagacgatggggtgaaagccgtgtaggcttgctttccaagaaggagcaagaggaaacttggaagttagttgggaaaccggtgatttttcaaacagagcaagctattcgtgagtatgtgaatggagcaactaaggaagaaagattccaatctattttagttgctaccataatccttctagctggtttgggagttctctctttaactctaattcctggattagctcctatatctggaggtattttagctataggaggagcccttttaggaattagtattaccatgtatcttcagcgatttattcagtggctgtatgaacagctgattaaacttcgtgactatattcagaaccgacaaagtgtgatcgttcagggagcttctgcatgtgattttgatgcagaagacatcatagttgatcttgttgcagagtcttttgaggtcgatggggattcttttgtagaatcg

SEQ ID NO: 18831 - DNA, 1108 bp, Chlamydia trachomatis
atgcatgagaattttgacaaacgattggaacttttgcttgaaggtttggctttaactcggaggtctctttgacccggaaggaaaagaaaatgagttaaaggaattggaacagcaggcggtgcaagatggtttttgggacgatgttgttcgtgcagggaaaatttccgaaaggatcgctcgattaaaacaacagttatcagaatttaatgaattaaaaaacaaagtttccgcgatacaattctttttagaagatgaagagtcttctaaagatttagaaatgcaaaaagaattagaaaaagaatttgttttttgtgaaaagaaaataacagaatgggaaacactcagacttctttctggtgagttagatcgaaattcctgttttctatccattaatgcaggagcaggggggaccgaatcttgtgactgggtagagatgctgctgcgcatgtatatgcgatgggctagtagtcatagctggaggatagaagtgatcgatcgattggatggggaagtcgctgggattaagcatatcaccctgaagctcgtcggtgaatatgcctacggctatgctaaagcagagagcggagtgcatcgtctggtacgcatatctcctttcgatagcaatgcgaaacggcatactagttttgcatcagtagaagtgtttccagagattgatgataaaatagaagttgagatccgtcccggagatattcgtattgatacgtatcgttcttctggagctggaggacaacatgtaaacgtaacagattcagcggtacggattacacacttccctacgggaattgtagtgtcatgtcagaatgagcgtagtcaaattcaaaaccgagaagcttgtatgaatatgctgcgcgctaggatttaccagaagttgttacaagaacgtttagagaaacagaatatagatagaaaaaataaaaaagaaatcagctggggatctcagattcgtaattatgtatttcagccttatacgctggtgaaagatgtaaggactggatatgaagtgggcaacatccaagcaatgatggatggggagctcctagatgcttttatcaaagcctacctggttgattatggagaaattacatga

SEQ ID NO: 18832 - DNA, 2496 bp, Chlamydia trachomatis
atgaaccgtattcatcgtacacaaggatctttaacggattataatagcactcttgaggctattgcaaagaagattgccaaaccagattctgcaacaatagtatctcaggttgctcaatatgagcagttcaaaatggaacaagaagctttaaaagcacttcttgtttccttcgatcaaaaagcagaccagcgatatcgaaatttgattcaacgactggaacagttggatgtagatagacaaacaggacgctctacagagagccaacacatccaagaaaaaccgatggcttctctgcaatctgaaaaccaggttgttgcacaagctgtagttcagtctgattctagcatgcccatttttacaggtattaaacaaagttgggcagtacgattagtacagggtatacgtgaaattttggatcaagtcttagtggacacatccttgtttacggaagaagaacggggagatttacttgctatccgtatggatgccgcttccctacaggacaagcaagagcgtttgtctacggaagatattcgttctcttctttctctttcgaatgatgttatgcgagttttgcagaaagcttctgtatctagcacgcggcagctagaattgatccaatctttgatagatatttttggtacggaagagaatttagagcagtccttcgcccaggtacgattggagaacttccaagcgattttatctgtgattaaagagcgtttgacagaagaagagtttcgggtattccaagaagtctcggaagaaatttcctctatccaacgcacgagtgaatctcatctcagtccagaacatatagaggcgattgctcgagtcggtgggcatctttctgctaagatcgtggagtctgagctgaaggcaagtcagaaggtggatctctgtcaacgaatagcagctatgtaccaagaacaagtggatgcggtacaagcgtatcatagtctcgaacaagatgctctatttgtgaattctaggcaacatagtcacttcgtgcaggtgatttctttagtatcctctcttatgcactcattgtctcctactagtgaagaggagcgtattttactgaaccctgccatgatggtaagtgttcttcccactgtgcgtgcaataggtttacgttttgactttttaacagctgagcagcagcaaatggtgaatgctgcggtatcatcgttgcaacaacagcagttagacgaatttttaggagttctctgtgcgcatttggttgttgttaattgccagaataaagaaacaggtctcttagaaggtttagaagaaagcttttcagaaacgttaagtggtttgagtaataactttgttttgacggccaaaatgcaagacattttgcaggtttgttctttacaaggctttgtcacattagcaaacggggatcgatacgagttattttcctataatgattcaggagaagcggtatgtgatgagatcgctctaggcgatggatttcataaagtgctaggaacgatgttagcagtagcgctttctcaagcagaggtatttaagcaagagtgcgatcgattcattctgcaagctgattcagagaagaatatgattcacaaacgtatggttcaaggggaacagaagagtctattcttgaccaagatgcagacagagttgaatgctgggaaaactattgcacaaactaaggaagtagaggcttctccgctcccttctgccgttgcttctgtattgattgaccactacatgccaaaggaagtggagtttttagaaaagatctcgtctcgtctgtattacggaaataaaggttcggatataggcaacaccattttagatgcgattagtttgtatgtaaactccgcaacctactttggttttgctaactatattgggcaacctcctgttgtaggtaaaacaagggagaatatttttgcagggtctgcagataatgctaaagccaagttagacgaagaaaagaaacaagtagatgtgtttctagaaattacggaagcagctaagactaccgtcactaatcaacaaagtgcggttactaatgatgacaagttatctacagagcagaaagcaaaaattaaggcagagttgacacagtataccgatatgcttaacgcaatcagcaattctttaacatcattgaaaactcaattggcccctttatcagtgagtactgttgaaggtgtggatggtgtttttgaggttaaaaatggtataccaggagaaaacggaaagaactggagattagttttacagactttagaggatactgtggtatccggagaagtcggtagcccaactaatattggaatgttccaaatgcaagctctggtacacttgaatcagcaggcctatgctgatatgggacagaattttcagttagagttgcaaatgcatctcacttctatgcaacaggagtggatggtggtagcaacatctcttcagctattaaatcaaatttatttgggattagcgcgtaatctcttaaga

SEQ ID NO: 18833 - DNA, 1422 bp, Chlamydia trachomatis
atgaaaattattcacacagctatcgaatttgctccggtaatcaaagccggaggcctgggagacgcgctatacggactagcaaaagctttagccgctaatcacacaacggaagtggtaatccctttataccctaaattatttactttgcccaaagaacaagatctttgctcgatccaaaaattatcttatttttttgctggagagcaagaagcaactgctttctcctacttttatgaaggaattaaagtaactctattcaaactcgacacacagccagagttattcgagaatgcggaaacaatctacacaagcgatgatgccttccgtttttgcgctttttctgctgctgcggcctcctacatccaaaaagaaggagccaatatcgttcatttacacgattggcatacaggattagttgctggactactcaaacaacagccctgctctcaattacaaaagattgttcttaccctacataattttggttatcgaggctatacaacacgagaaatattagaagcctcctctttgaatgaattttatatcagccagtaccaactatttcgcgatccacaaacttgtgtgttgctaaaaggagctttatactgttcagatttcgtgactacggtttctcctacatacgccaaagaaattcttgaagattattccgattacgaaattcacgatgccattactgctagacaacatcatctccgcgggattttaaatggaatcgacacgacaatttgggggcctgaaacggatcccaatttagcgaaaaactacactaaagagcttttcgagaccccttcaattttttttgaagctaaagccgagaataaaaaagccttgtacgaaagattaggcctctctttagaacactctccttgcgtgtgcattatttctagaattgctgagcagaaaggtcctcactttatgaaacaggccattctccatgcactagaaaacgcttacacgctcattattataggtacctgctacgggaatcaattgcatgaagaatttgcaaatcttcaagaatcattagcgaattcccctgatgtaaggattcttttgacttatagtgatgtgctggcacgacaaattttcgccgctgcagatatgatctgcattccttctatgtttgaaccatgtggactcacacaaatgattggaatgcgttacgggactgtaccgttagtaagagctacaggaggactagcagatactgtagcaaatggaatcaatggattttccttctttaatccgcatgacttctatgaattccgaaacatgctttcggaagcagtgacaacctaccgtaccaaccacgacaagtggcaacatattgtacgtgcttgtctagatttttcttcagacctagaaactgccgccaataaatatttagaaatttataaacaa

SEQ ID NO: 18834 - DNA, 1461 bp, Chlamydia trachomatis
atgtccctttcatcttcttcgtcttccgatagtagcaaccttaagaatgtcttgtcgcaagtcatagcttcgactcctcaaggcgttcctaatgcagataaattaaccgacaatcaggttaagcaagttcaacagacgagacaaaatcgcgatgacctaagcatggaaagcgatgtcgctgttgccggaactgctggaaaagatcgcgcagcttctgcttctcaaatagaaggacaagaacttatagagcagcaaggattagctgcagggaaagaaactgcatctgccgatgcgacatccctaacccaaagcgcatctaaaggagctagctcgcaacaatgcatagaagatactagcaaatctttagagctatcttctttaagttcgttgtcatctgtagatgccacgcatctacaagaaattcaaagcatcgtatcctctgctatgggtgctactaacgagctttccttgacgaacttagaaactccaggactacccaaaccttcaacgacacctcgtcaagaagtaatggaaattagccttgcattagcaaaagcaattaccgctcttggagagtcaacgcaagcagcattggagaacttccaaagtacgcagtcgcaatctgcgaacatgaacaaaatgtctctagaatctcaaggccttaaaattgataaagagcgtgaagagttcaaaaaaatgcaagagatccagcaaaagtctggaaccaactctaccatggataccgttaacaaagtgatgattggggttaccgtggctattactgtgatctctgtagtatccgcattattcacttgcggtcttggcttgatcggaactgctgctgcaggagccacagcagccgcggctggagctacagcagcagcaacgacagcaacttctgtagctacaacagtcgctacacaagtgactatgcaagcagtcgtgcaagtggttaaacaagctattattcaagctgttaaacaggctatcgtccaagctattaaacaagggattaaacaagggatcaaacaagccattaagcaagctgttaaggcggctgtgaaaacccttgctaaaaacgtgggtaaaattttcagcgcagggaaaaatgctgttagcaaatcgttccctaaactctccaaagttatcaacactttgggaagtaaatgggtaaccttaggagtaggagctcttacagcagttcctcaactcgtatccgggattactagtctgcagctgtcagacatgcagaaagaactggcccaaattcaaaaagaagtcggagctctcacagctcaatctgaaatgatgaaagctttcacattgttctggcaacaagcaagtaaaattgcagctaaacaaacagaaagccctagtgaaacgcaacagcaggcggccaaaaccggagctcagatagcgaaagctttgtccgcaataagtggcgccttagccgccgcagct

SEQ ID NO: 18835 - DNA, 870 bp, Chlamydia trachomatis
atgccaaacaagccttcacacgcctttagactgatccattgctccgacattcacttctgtgtactccctaaaaatccttttcaatgcttcaataaacgctttaagggacttctaagacaacttataggaggcgtttcctttcaagcttttgcaatctctcagagattccctcaactcgttaagcagcttgaagcagatagtgtctgtgtgactggagatatgaccatcaccgctctcgatacagaattccgtttcgctaaagaatttctttctcgcgttgaatctgtagctcctgtgtatatagttccaggaaaccatgatgtatacacccatcgggctttgaaaaaacaaacgttttattcctattttcctaataaagaacttcaaactcaccgtatcgcctttaaaaaactcactcccacatggtggttagttcttctcgattgttcttgcttcaatggttggtatacagcgaatggagaagtgactgattctcaactccttgctttagaacaatttctttcttctcttcccgcttctgaacacgtgattgtggctaaccattatcctctatctcccacaacaagacccgctcatgatttactcaattatgcccctctaaaatccctactgatgaattctccttctgtgcgcttgtatctacatggacatgatcattatgtagaactcgatcatctccctcctctggtagtgaatagcggctcactaacacttccctcaaatgcacgctttcatattatagacttacatccagaagggggatatcaaatcgcaacagcagcattaacaaaccttaaggaaacctctactccgttaaccatttctatcgaagaaactaccatctcttta

SEQ ID NO: 18836 - DNA, 2409 bp, Chlamydia trachomatis
atgatgaaaagcttgttttaccactttattggtattggtgggattggaatgagtgctttagcacatgttctgctcgatcgaggatatagcgtatcgggaagtgatctttccgaggggaaagtggtagagaagctgaagaataaaggagcggaattctttttagggaatcaagaagaacatatccctgaaggcgctgtagttgtatacagttcaagtatttctaaaaaaaatcctgaatttttatcagctaaaagtagagggaaccgcgtagttcatcgagccgaattattagccgagcttgctcaagatcagatttctatttttgttacaggaagtcatggaaagacaacagtctcttctttaattacagccattttgcaggaagcgaagaaaaatccgtcctttgctataggaggtttgaatcaagaaggcatcaatggtggttcgggatcggaatattttgttgctgaagcagatgagagcgatgggtctattcggtgttatactccagagttttctgttattacgaatatagatgatgagcatctgtctaattttgaaggagatcgagagcttcttctggcttctttgaaagactttgcactcaagactcagcagatctgttggtataatggagattgtcctcgcttgcgttcatgcttgcaagggcatacttttggattggactcttcttgtgatctacatattctatcttattatcaagaaggatggagactgtactttacagcaaagtatcaagatgtagtgtatgcagatatagaagtgcaattggtcggcatgcataacgttttgaatgctgcagcagctatgggaatagctctgtcattgggtatagatgaaggtgctataagaaatgctttcagagggttttcaggagttcaaagacgattacaaagaaagaattcttctgagacctttctctttttagaagattatgcacaccatccttcagagatttcttgtacattacgtgctgttcgtactgctgttggacagagacgtattttagctatttaccagcctcatcgtttttctcgattaagagagtgtatagacagcttcccgtcagcatttaaagatgctgatgaagtcttgttaacagaagtgtacagtgcaggagaggaggcggaagatatttcgtatcagaagcttgctgaagctattagtcaagagtcgatagtaaagtgtacgcatattccgtttcatgagttgcagagacatttagagcagtccatccgtgtacacgatgtgtgtgtatctttaggtgctggtaatattgtgaatttgggagaaaagttaagagattttgagcctcaaaaactgcacttaggaattatttgtggagggaaatcatgcgaacacgagatttccgttctatctgcaaaaaatatagctaaacatctttcaaaatccttttatgatgtgagttattttttaattactcgagaaggattatgggagagcgtctcttcattagagactgctgaagactcagggaaatccgtttttgatccagaaatagctcagagactagaaaaagtagacgtagtgttgccgatactacatggtccctatggtgaagatggagctatgcaaggatttctagagactattggcaagccttatacaggtcctgctatcgctttttctgcgatagcaatgaataaagtgtttactaagcgttttatgagtgatttagggattcctgtcgttccttatctccctttaacattagcaggatggaagcaagaacaagataagtggttagcacatattgtagaggctttttcatttcctatatttgtgaaatcttcgcatttaggatctagtatcggcgtcttcgaagttcataatgttatagaattacgagatgccattaatgaagcttttatgcgagataacgacgtgtttgtagaagaaaatcgcttaggttgcaaagaaatagaagtttctgtcttaggagatggatctggtgcgtttgtcgttgctggtctgcatgagcgtcgtgggagtggaggttttatagactatcaagagaagtatgggttaagtggtaagtctagtgcgcagatcgtatttgatacagatctctctaaagaaatacaggaacaaatactagaagctgcggataaaatttaccgtttattgctagggaaagggtcgtgtcgtattgacttttttgtagatgaagaaggaaatttctggttatctgagatgaaccccattcctggaatgacagaaacgagcccatttcttacatctttcattcgtaaagggtggagttatgaacagatagtccatcaacttgttattgatgggctgcaacgatttaaccaacgccaacgcttgatatcgacgtcttttgtagatcaagcgttcgctattcag

SEQ ID NO: 18837 - DNA, 1698 bp, Chlamydia trachomatis
gtgaaagtttccctatccttcaaacatcttgtccctaaattagttacctgcttaaaagaagggtattcttttaatacgctcaaaaaagactttaccgcagggatcactgcagggattctagccttccctttagctattgctattgcgatcgggattggagtgtctcctttacaaggactattggcctcaattattggaggctttttagcctctgccttaggaggcagtcgtgtattaatctctggccctaccagttcctttatctccatcctttactgtatcggtgtcaaatatggcgaagacggactgtttactatcacattgatggctgggatcttcctcattatctttggtcttgccggactaggcacttttattaaatatatgccgtatcctgtggtgaccggactaactacgggaattgcggtcatcattttttcttcccaaatccgagattttcttgggcttcaaatgggagatggagttcctttagacttcatcggcaaatgggcagcctattgggattacctatggacctgggatagcaagacctttgctgtgggtttatttaccctgcttctaatgatctactttcgcaattacaaacctcgttatcccggcgtaatgatttctattatcattgcatcgactctagtatggattcttaaaatagacatccctaccatcggtagccgttatggtaccttaccaagctctttacctggtccagttttcccacacataagcattactaaaatgcttcaacttatgccagatgctttaactatttccgttctttctggaatagaaaccttattagcagctgtcgttgcagatggaatgactgggtggagacatcaatccaactgccaattaattggccaaggaattgctaacattggaacctctttatttgctggcatgcctgttacaggctcgctttcaagaacaacggctagcatcaagtgcggcgctagtactcctatagcaggaataatccatgccatctgtctttcctttatcctactactcctagctcccttaactattaaaatccctctaacatgtctagcagctgttttaattttaattgcttggaatatgagtgaaattcaccatttcattcatctattcacagctcctaaaaaagacgttgttgtcctgctaaccgtgttcattcttacagtaatgactacgattacttctgcagtacaagtaggaatgatgcttgcagcctttctattcatgaaacaaatgagcgatctatctgatgttatctccacagcaaaatattttgatgaatccgaacaacctcaaaatgacttgctatttagcaaaaatgaagtaccaccttttacggaaatttatgaaatcaacggaccgtttttctttggcatcgcagatcgtttgaaaaacttattaaatgaaatagaaaagccgcctaaaatatttatcctttgcatgactcgagtgcctacaatagatgcatctgccatgcacgctctagaagagttcttcttggaatgcgaccgacaaggaacattgcttctcttagctggcgtgaaaaaaactcctctcagtgatttgagaaggtaccatgtagatgaattgatcggagtagaccatatcttcccaaacattaaaggtgcgttattgtttgcaaaagcccttattaagttagagagtaagtcttctcaa

SEQ ID NO: 18838 - DNA, 1338 bp, Chlamydia trachomatis
atgagtgctgagatattggcgagagtacagtttgcgttgtttatcggatttcattatctgtttgtccccattagtttgggattaagtatgatgattgttcttatggaggggctctacttattcacaaaaaaaagtatttataagcagttgacctggttttggattaggattttcaccttaacttttgttgttggcgttgtcacaggattgatgcagattttttccttcggagcaaattggtctcgattcgcagaatatactggaaacgtatttggaatgttccttggtagcgagggaatgtttgctttcttcttagaatctggatttctaggagttttgttatttggtcgctataaagtatcaaaaaaaatgcactttttttcagcctgtatggttgcgctcggcgctcacatgagtgctttttggattgtttgtgcgaactcttggatgcaaacgccttccggttatgaaatggtcatgcgtaatggtatgttagttccccaaatgacttctttttgggcagcggtgttgtctccttctgctttgcagcgttttacacatgttgttcttggcgcttggttatctgggatatttcttgttctttccgttagtgctcactatctacgtaaagagcggcataaagattttgcaaatcaggggttaaaaatcagcatgttttgtgctttccttgttttggctttgcagctttggtcagcagatgtcactgcaagaggggtcgctaaacaccaacctgccaagcttgctgcgtttgaaggtgtttttaagactcaaggacacaccccaatttatttactcggcattgtagatatgaaaaaagagcgagtcattgggatccccattccttctggtttatcgcttcttgttcaccgaaatgcaaaaactcctgttacaggactggatcagttccctaaagacgaatggccaaatgtcgctttcgtttttcaaacgtatcacttaatggtcatgttatggggagtaatggtacttttagctctgatagcctttgctgtgtataagaaaaaatcttggagctgcaagaaggggatcttatggatactttccttctctgtgctatgtcctgagttatgtaatgaaatcggctggatttctacagaggtagggcgtcaaccttgggttgtttatggcttattaaaaactaaagatgcgacctctcctatcgtgaacgcagggcaaatttggcagtctttgatcctgttttcgattatttttatttgtttattaagtgtctttgtctcgcttcttttgaaaaagataggtgagggaccagatgagcaagaccttatagaagtagatttg

SEQ ID NO: 18839 - DNA, 819 bp, Chlamydia trachomatis
atgacaacgcctactctaatcgtgacccctccatctccccctgcaccttcctactcagccaatcgcgtacctcaaccttctttgatggacaaaattaagaaaatagcagccattgcctccctaattcttataggcacaataggctttttagctcttttgggacatcttgttggctttctgatcgctccacaaatcactattgttcttcttgccctattcattatctcattagcagggaatgctctttatctacagaaaaccgctaatctacatctataccaggatctgcaaagagaagttgggtctctaaaagaaattaatttcatgctgagcgttctacagaaagaatttcttcatttatctaaagaatttgcaacgacatctaaagacctctctgctgtatctcaagatttttattcttgtttgcaaggatttagagataactataaaggttttgaatctcttttggatgagtataaaaactctacagaagaaatgcgcaaacttttttcgcaagaaatcatagcagatcttaaaggctctgttgcctcattaagagaggaaatccgattcctaaccccattagcagaagaagttcgccgattagcgcataaccagcaatcattaacagtggttattgaagaattaaaaacaattcgtgatagcttacgagatgaaattggacaactttcacaactttctaaaactcttaccagtcaaattgcattacaacgaaaagagagctcagatctgtgttcccagataagagagacgctctcctcccccagaaagtctgcatcaccctctacaaaaagctcc

SEQ ID NO: 18840 - DNA, 756 bp, Chlamydia trachomatis
gtgctccctaaagctttagatcagcttttagggagatatatgagctattctttttttcgtcgaaagcttgctgggatagaatttatagagtgtcctggagatcctgaagctcctgtgatcattttttgtcacgggtatggcgcaagtgccgatcatcttacttttttcccaaccatgtgcgtgtgcgccaatttgcgtcccacatgggtcttccctcatggtatagaacagcttccctaccagttgggagggggacgagcttggtttccattggataccgttctttttgaaaaattgatttcttctcaggaaatcactccagatacggatcgtttatatcagcagctattggatgtagactttgaaaagcctaaacaggctttagagggtcttattcacgagttggaaagagatcgatcggaagtgattattggaggttttagtcagggagctatgatgacgacgcatctgatgctttcttcgcggcttccttatcgaggtgctttgatttgctctggagcagccgttccgaatcaatcttgggaagaaaatgcgtctttatgtgggaaaactccttatatacaaagtcatgggtacgatgatcctattttgccctatttcttaggggagcggttatataaggttttaacagcttctttaaaaggcgagatggtttcttttcatggaggacatgaaattcctgttgttatgatgcaaaagatacaggaaagcatcgcgctatggagtcagttgaca

SEQ ID NO: 18841 - DNA, 894 bp, Chlamydia trachomatis
atggctcataccatacgtttcacaaaatttagtttccctctatatttttctaagactcttagttggtttatcataggtggatttttagccgcttgcggtgttcatatgattctcgctcccaacgatttaatcgatggtgggatcgttgggttatctatgatagcagctcattctttcgggcatcagttccttccagtgtttttagtgttgtttaacttgccattcatcattttggcttataagcgcatagggaagtacttcgttgtacagatgataactgcggttattatcttttcttgctggttatggcttatagaagttttgcctgagtggctgggaatacaaccctttatttttgacggttcagaaatagaaactattgtccttggtggagttgtgttgggagccggaggcggattgattattcgtcacggaggagcaactgacggaacggaaatcttagggatcatcgtaaataagaagagaggatatactgtcgggcaagtcatcttgttcgtaaacttcttcatcttttccttgggcggcattgtttaccgcaattggcatacagcttttatgtctttgctaacgtatgctgtggctattaaagttatggatatggtgattttaggattcgaagacactaagtctgtaactatcattacctcttctcctagaaaattaggaaacattcttatggagactttaggggtagggttaacttatttgcatgcagaaggtggtttttctggggagcctcgaagtcttctttatatcgttgtcgaacggttgcagctttcccagcttaaagagattgtgcacagagaagaccctagcgccttcattgctattgaaaatttacatgaagtaatcaacgaaaagagaacctcccat

SEQ ID NO: 18842 - DNA, 1263 bp, Chlamydia trachomatis
atgactgcatcaggaggagctggagggctaggcagcacccaaacagtagacgttgcgcgagcacaagctgctgcagctactcaagatgcacaagaggttatcggctctcaggaagcttctgaggcaagtatgctcaaaggatgtgaggatctcataaatcctgcagctgcaacccgaatcaaaaaaaaaggagagaagtttgaatcattagaagctcgtcgcaaaccaacagcggataaagcagaaaagaaatccgagagcacagaggaaaaaggcgatactcctcttgaagatcgtttcacagaagatctttccgaagtctccggagaagattttcgaggattgaaaaattcgttcgatgatgattcttctcctgacgaaattctcgatgcgctcacaagtaaattttctgatcccacaataaaggatctagctcttgattatctaattcaaacagctccctctgatgggaaacttaagtccactctcattcaggcaaagcatcaactgatgagccagaatcctcaggcgattgttggaggacgcaatgttctgttagcttcagaaacctttgcttccagagcaaatacatctccttcatcgcttcgctccttatatttccaagtaacctcatccccctctaattgcgctaatttacatcaaatgcttgcttcttacttgccatcagagaaaaccgctgttatggagtttctagtaaatggcatggtagcagatttaaaatcggagggcccttccattcctcctgcaaaattgcaagtatatatgacggaactaagcaatctccaagccttacactctgtaaatagcttttttgatagaaatattgggaacttggaaaatagcttaaagcatgaaggacatgcccctattccatccttaacgacaggaaatttaactaaaaccttcttacaattagtagaagataaattcccttcctcttccaaagctcaaaaggcattaaatgaactggtaggcccagatactggtcctcaaactgaagttttaaacttattcttccgcgctcttaatggctgttcgcctagaatattctctggagctgaaaaaaaacagcagctggcatcggttatcacaaatacgctagatgcgataaatgcggataatgaggattatcctaaaccaggtgacttcccacgatcttccttctctagtacgcctcctcatgctccagtacctcaatctgagattccaacgtcacctacctcaacacagcctccatcaccc

SEQ ID NO: 18843 - DNA, 1176 bp, Chlamydia trachomatis
atgttcaaacataaacatccttttgggggagcgttccttcccgaagaactattagcccctatacagaatctaaaagcggaatgggagattctcaaaactcagcaaagttttttatctgaactagattgtattttgaaaaactatgcggggagacaaactcctctgactgaagttaagaattttgctcgagctattgatggccctagagtatttcttaaacgcgaagatcttttgcatacaggagcacataaactgaataatgctcttggtcagtgtttgcttgctaaatatcttgggaaaacacgtgttgtagctgaaacaggtgcgggacaacatggagtagcaacagcaacagcgtgtgcttatctaggattagattgtgtagtatacatgggagcaaaagatgtggaacgacagaaaccaaatgtagagaaaatgcgctttttaggtgctgaagtcgtttctgtaacaaaaggatcttgtggactcaaagatgcagttaatcaagctctacaagattgggcaacaacacactcatttactcactattgcttaggatcggccttaggacctttaccttatcccgatatcgttcgattttttcagtctgttataagcgctgaagtgaaagagcaaatccatgcagttgcaggaagagatcctgatattctgattgcatgtatcggaggtggctccaacgctattggatttttccatcattttatcccgaatccaaaagtccaattaattggagtggaagggggaggactgggcatttcttcaggaaaacatgcagcacgttttgcaacagggcgacctggagtattccacggattttattcgtatcttcttcaagatgacgatggacaagtattacaaactcactccatttccgctggattagattatccttcagttgggccagatcatgccgaaatgcatgagtcaggacgagccttttatacattagccaccgatgaagaggcgttacgagcttttttcctgcttactagaaacgaggggattattcctgcattggagtcttcacatgctctcgcacatttagtttcgattgctccttctctaccaaaggaacaaatcgtcatcgttaacttatctggaagaggtgataaggatcttccacaaatcatccgcagaaacagaggaatttatgag

SEQ ID NO: 18844 - DNA, 1428 bp, Chlamydia trachomatis
ttgaaagtctgggggattgtccctggggccgttatcgtcaccatgatctatggatggatgagtcgacgttattcaagaggtaccgtgtttatctctttagtcggcggttttttaggcttttttgcgttgttcgccacagtgatttatcccataggagatgcgctgcatctaaataaattggcggcaaaactacagtccatcttacctccggggggaagaggttttgtagtgatggttcaatactggagctatagcctgtattatgtgatgtctgagttatggagttccatagttttgtctactctgttttggggggtagccaaccatattacgagtgttcgcgaagcagggcggttttacgctcttattaatactggattaaacctctcttctgtttttgctggagaggtttctttgtggctcggtagaaatcctgtaattgccttccctatggccgtagatccttggcatgaggtgttgctcaatatcactctacttatcgtgctggccggcggagtaatcctctatctatatcagaagttagatcgcttgatggatgagacgtcaatgttaaaagaggggttggcagcagaaatgtcggtcgctcagcttaagaaagagaaaaagcggtcgaaggcaaaagcaaaaagtctcttcgctcttctcctccgctcccgctatctattaggcatcgccgtcgtcgtactctcttacaatttagtcattcacctttttgaagtcgtttggaaagaccaagtctgtcggatttatgcttctcgagtagaatttaattcttatatgagtaggattacgacgctcacaggaatcgtctcagctttgacagggattttcgctgctggacaaactattcgccgttggggatggactattggcgccttggtaccccctttaaccatgttgattacaggagccttgttctttggcgctatctatgctgtaaaaggggatgctatgatttttggcgggatcttagggatctctccgctagttcttactgcttggttaggaggtgttcagaacgtcttctcgagagcaattaagttcacctatttcgatcaaaccaaggagatggcatttattcctttggaagatgatgagaagaattacggtaaggcggctattgatggggtgatctccagagtagggaagtcagggggctctttagtttaccaaggactgctgatcatcttctcgtccgttgcagctagcttaaatgcgattacgattgtgttgttgctggctttagggagttggatctttgtgatcgcttggttaggtagagagtacacagccaagaccgaggctctttttagagtcaatgtttctgaagaagatgttttacaggaagagcgagaggcttcttctttagtagatgctgagtctcgagaagaacctgtaacaacttta

SEQ ID NO: 18845 - DNA, 465 bp, Chlamydia trachomatis
gtgattgccaaccacgatgaaataagctttgggctcctccgttactttttaggaggataccgccccagtaaaactgcccgtctggcaatgtccatcttccagattcatggaataatgttagattcccagcttgttaagaccagtatttcaacgttgactcccactctcctgaagaagagtgttcttagtctcctggctatcctacacataacaaaccaaaaatcaataccaaagtacagtaaaggttcacggggtcttttcgtcctttcgcgggtaaacagcatcttcactgctactacaatttcaccgagtctttcgttgagacagtgcccagatcgttacaccattcgtgcaggtcggaacttacccgacaaggaatttcgctaccttagcaccgttatagttacggcggccattcaccagggcttaggttcaatgcttcgctttgcagctgacatatccctt

SEQ ID NO: 18846 - DNA, 141 bp, Chlamydia trachomatis
atgacgtcaagtcagcatggcccttatgcccagggcgacacacgtgctacaatggccagtacagaaggtggcaagatcgcgagatggagcaaatcctcaaagctggccccagttcggattgtagtctgcaactcgactaca

SEQ ID NO: 18847 - DNA, 465 bp, Chlamydia trachomatis; identical to SEQ ID NO: 18845

SEQ ID NO: 18848 - DNA, 141 bp, Chlamydia trachomatis; identical to SEQ ID NO: 18846

SEQ ID NO: 18849 - DNA, 180 bp, Chlamydia trachomatis
atgccatggatcttcactagtatccgctccagcgctccttccggtacaccttctctgctgaatactacgctctcctaccgcgtgtcttatcgacacacccgcgatgtcggttttatgcttagtcccgtttattatcggcgcaatgattctcgattggtgagctgttacgcactctttaaa

SEQ ID NO: 18850 - DNA, 180 bp, Chlamydia trachomatis; identical to SEQ ID NO: 18849

SEQ ID NO: 18851 - DNA, 1002 bp, Chlamydia trachomatis
atgacaagacttcctctactcaaacgacctcgaagaaatcggaaaagtgctgctattcgatctatgattcgagaaactaatatggtttcaagtgatctaatttggcctatttttcttaaagaaggttcaggaattcgagaagaaatacccagtatgcctggagtatacagatggagtttagataccatatctagagaattagaaagactctgtcttatagggctaaaagcggttatccttttccctgttatagaggatcagaaaaaagatcaattcggagcatatgcatcgcatccgtataacattgtttgtagaggaattcaggaaatcaaaaaatcttttccccaactgtgtgtgattagtgatatagctttagatccttttacgactagtggtcacgatggcattttttacaacaatgaagtgttaaatgacgaaagcgttcgcgtatatggagatatcgcaacattgcatgcagaaatgggagcggatattgttgctccaagcgatatgatggatgggagagttcggcatattcgagaaaaaatggatcagatgggctttgttaatacaggaattctctcttatagcgcaaagtatgcatcttacttgtatggtccgtttagagatgctctttcttcgcatcctcaatctggggataaacggcaatatcaaatggatcctgccaatgttcgagaagctttgcttgaatgccggctagatgaagaggagggagcagatatggtaatgataaagcctgctgggttttatttagatgttatcatgaaagctcaagaatgtacgcatcttccagtagttgcctatcaagtcagtggagaatattctatgattatggccgccagtctgcatggatggttaagtaaagaaggagctatctcggagtctttgttagcaattaaacgagctggggctacggctataattagctatgcaactccatgggttttagaatggctagctagagacgctcttcctttttaa

SEQ ID NO: 18852 - DNA, 3081 bp, Chlamydia trachomatis
atgagctctttcgatattttttctccgacaacttctgtttccggaaaatttttcctagaagcatccgcaggaacgggaaaaacatttaccatagaacaagttatcctccgttctctattagaaggaaacgttgaacaaactaagaatattctcgtagttacatttacgaacgcagctacaaatgaattaaaattacgtattcaagaaagccttaaacaagctttaacgctcttctctcaagctctttctcatcccgaaacacctttacccccctatgtttcttctcaagaaaccaaagtaaagcagctttacaytaaaawtcgtaatagcctagccactttagatgaaatgaatattttcactattcatggaktttgccgttttacattagaacaacacttcccttgggtgcaacccattcacccttcttccatgttctcagagccccaaaccattcagcaatatattctggattacttaagacaaaatagctgggaaaacgttctttctcctaaacaatacgccttcttatcctatcatcatcgagccactacccaacaaactcgtcatttagcagacagactgcttcaagactatgcttctacacccaaccttgctctcccccctctatctataactcttcaaaaagtgaagaactggtcttctcaatataaacacctttcccctctttctcttgaagagttacaagatttttcgctccgatttaaacaaagcgatctaccaatcgatcgggaattacccgattttgtgaaacaattcgaaacagaccccaattctttagacatcctatttttcccgggaatggttcagaaatttcaggaagaaaatcgaaataaaaagaaattgggaccccctttttcccctttagatccttttctcaaagactggttactaatagcccagcccttctgtcaaaaagaacctattttccatacactgcttaaaagcgtacaacaacacttaaaaacgtattgtgcacaatcctactcgcatgatgaaagcatagccactttagagtctttgctagcacagaatgaccacgttgtttctcagctacgaaaacaatttcaattagttttgattgatgaatttcaagatacagacaaacgtcagtggaaaattttttctaaactctttgcttctcctgattattcaggatcactatttcttattggagatcctaaacagtctatttatgaatggagaaacgcagaccttccaacctacctccaagcaaaaaactcctttcctaaggagtctcagctaatattggatacgaattaccgatccactccacaactcatgcaagctctaaaccatcttttttcgctcccctctccttttttagaaaccccacaaactattctttaccacccactccaatctaaaggaagcgcctccacttcgtattcagagtttcgtcctatccatttctttactacacaagattcccaagaagaagctctctggatttcaaaaaccgcttcttatctacgttctacattcgctattccctttgggaatatggcagtcttagtccaagactatccgcaagcactcaaattgatcactcatagcacgattcctatggcgtattgcaaagaaaaacgcatttttgatcgcacagaatcgccctatctcctcattcttcttttagaagctcttctatacccagaaaatcaacaaaagattcaggccattttactgagtcgtttttttcatctttctgctacagatattcatcagcatttaaaaattttctcctctctgttttttatgctgaatacgtatctccaccaatactctttactagctacgttttataaattgatgggagaaaccgttttctcccaaaccataggagaaacgttattacaaacaccccttggtgacattattttccaagaattagaagagctttgtttgtatcttgataaaactacggaaaatcctcatcacaagctatttcatcttataaacattctagatactggaaaatatgatgaagagctttccttttcctctcagtctaatgacgataatgtgcttaaaattaccacagtccactcttcaaaaggcttagaatacgatgtcgttttttgttctagtcttaacaaagttaaagagaaatctccttctgttcacatgagagaaatgtatgttgcttgtactcgtgctaagaaattcttattcatccctttctcctctatagagaaacgtttacaaagcaataaaaaagtttctgctcttgctaactatgccaatattacacaacacgataacatccctcatttagtagaaactctgaccgcatcccatccagaatttttctcttcaggtacgcaacctccggaaagcaatatctctattttctcagaacctctccccgaacaagagtttttttctcttccaatactatcttcccaacccatctattctttttcttccacaacagaatcacagtattttactgagccttttcaagagatttcttcctcttctttatttcctgggggatctctaacaggaactcttattcacaagcttttagagtcgttatcagggaattttaacgcctctcttgaggagattactcataaagcccaaactttattgaaaaacacaattttggaaggcttcgagtctattatttcagagaaaatctacacagctttctcaacaaaactcccttttgtttcaggaagctttgctcttaaggacgttcatccttacaatattcgtgtggaagagacttttctccttcaagagaatggggagttgtggcaaggaattgtcgatcttttttttgaacacaacaatagatttttcattatcgactggaaaacatcttttctaggggatgaaccctctctttactctccagataaactccttctttatatccagcgccaaggattggataaacaaggggtgttatataaaagagcggctaaaaagttcctgcatcaattcaattcttctcttcaaattgagatggctttcgtattcattcgaggaattgatgacaaaggaaatggattcttacaacctagcccttaa

SEQ ID NO: 18853 - DNA, 2598 bp, Chlamydia trachomatis
atgaaaaaatccttaatcatcgttgagtccccagctaagatcaaaaccttacgaaaattgttaggagaagggtttattttcgactcttctttgggtcatattgtagatcttccagcaaaagggtttggtattgatatcgaaaaaggatttattccggactaccaaattctagaggggaaggaagaggttattcggaaaatttgtgctgaagccaagaaatgcgacgttgtttatcttgctcccgatccagaccgagagggggaggctatagcatggcatattgccaatcagttgcctaagaataccaaaattcagagaatttcttttaatgcgatcactaaaggggctgttacagaagcgttgaagcatccccgagaaattgatatggcgttggttaatgctcagcaggcgagacgttttttagatcgcatagtggggtataaaatttctccaatcttgggtcgcaagttgcagcgatggtcgggagtatctgcaggaagagtgcagtctgtagctttgaaattagttgtagatcgagaatacgccatagaacaatttgttcctgtagagttttggaatattcgcgttaatctccaagatcctaaaagtcagaaaacgttttgggcgcatttacattctgtaaatggaaaaaaatgggaaaaagaaattccagaggggaagtcttctgaagacgtagtcttaattgattctaaagaaaaagcggatgatttagtttccctattagaatcagcaacttattgcgtagatcgcgttgaatctaaagagaaaaagcgcaacgcatatcctccatttattacttctacgttacagcaggaagccagtcgacattatcgtttttcttcctctagaacgatgaatatcgctcaaactttatacgaaggggtggatttagatagtcaaggcgctgtgggattaattacttacatgagaaccgattccgttcggacagatcctgaagctatcaaacaggtgcgtaagtatatagagaaccattttggaaaagaatatgtgccttcttctccaaatatgtatgccacgaagaaaatggctcaggatgctcatgaggctatacgtcctacagatgtttctctttctcccgaatccatacgtacaaagttaacagaagatcagtacaaactttactctttgatatggaagcgttttgtagcttcacaaatgattgcggccatctatgatactcttgccattcaaatagcgacaaataaaggcatagatctccgggctacaggttcttgcttaaagtttaaggggtttttagctgtctatgaagagaaaagagatgaagaaggagatgaggatgagaatattcagcttcctaagctccatgagcgtgatgagctaaaaaaagaggaaatagaagctgaacaatcgcatactaaacctctaccgcgtttcacagaggcctctttagttaaggaattagaaaaatctggcataggaagaccttctacttatgctacgattatgaataaaattcagagtcgggaatatacattaaaagaaggccaacgattacgtcctaccgagcttggaaaggtagtttgtcaatttttagagacgaatttccctcggattatggacattggttttacggctaaaatggaagatgagctagagcttatcgctgataataaaaagccttggaaacagctgttacaagaattttgtgaattattccttccttttgtagtgacggctgaaaaagaagcttttattcctcgtattgtcacagaaatggactgtccaagatgtcataaagggaaactagtaaaaatttggtctaaaaatcgatacttctttggttgttcggaataccctacctgtgattacaaaacttcggaagaagagctcactttcgataaaagcgagtatgcagacgatactccttgggatgctccttgcgctctttgtggggggcaaatgaaagtgcgacatgggaagtttggaagctttctcgggtgcgagaattacccacaatgtcattatattgtgaatctttttaaaaaaggagaagctggctcagagcctgaagagatcgtatcatgtcctgcagaaggctgtactggtcatctcgttaaaagaagatcgcggtttaataaaatgttttattcctgttcagagtatcctgcgtgcagcgttattgggaactctgtagatgcagtcattgaaaaatatacaggaactcctaaaactccttatgagaagaagataaaagctaaaaaagcaacagcttctaaaaagggaaaagcaacaaaaggaaaggcttctactacgaaaacaaagaaaaaatctactgtaacgacgaaaaacagaaagactgcaacctatacaccttcttctgctttagctgctgttattggtcctgacccaatagatggtttccccgaagctacgaaaaaaatctgggcgtatatcaaagagcagggattgcaatcgccgaataacaaaagagtcattgtccctgatagcaaaatgaagcatgtaatcggtgatgatccgattgatatgttcgcactatctaaaaaaatacaagcgcatttaacgaagcaagagtaa

SEQ ID NO: 18854 - DNA, 1005 bp, Chlamydia trachomatis
atggcttctccagtatttataaaaaaccttccccttaggtcccagatagtttacgcccctcttgcaggattttctgattacccctatcgccgtatgtcggccctatatcaccctgcattgatgttctgcgaaatgatcaaaatggaaggtctgcactactgtcctaaacgtacgttgcgcttgttagatttctcagaatctatgcgccctatcggaggccagctctgcggtagccgacctgatcttgcaggagaatctgcaaaaattttagagggattaggcttcgatctcatcgatttgaattgtggatgtcctacagatcgcatcaccaaagatggaagtggctctgggatgctcaaaacccctcaattaatcgggaaagtagttgagagtattgtagaagctgtttctgttcctgtaacagtaaaaatccgttctggatgggatttcgaacacatcaatgtcgaagaaaccgttcatattattaaagaaagcggcgcaagcgctgtctttgtacatggaagaactcgctctcaaggatatcaaggccccagcaatttggagtttattgcacgagcaaagcgagctgctggagagcactttccagtatttggaaatggagatgtcttttctcctgaagcagctaaaacaatgttagaaactactcactgtgatggagtccttgtcgctcgcggtacaatgggagctccttggattggaaaacaaatagaagattacttaaccacagggacctattcttccccatccttctccatgagaaagcaagcgtttgtacagcacctacagtggatagaagaatactaccaaagcgaagaaaagctcttaacagatacccgcaaactgtgtggtcactacttaattctttccccaagagttcgttctttacgcgctagcctagctaaagcttcctcatcacaagaagtttatcagcttataaacgattttgaagaatctgcagaaggagaagaatcctctcctgaatag

SEQ ID NO: 18855 - DNA, 537 bp, Chlamydia trachomatis
atggatgaaattctaaagcagaaaagttgtttgcgtcacgaagggttagctaagcggaaacaactttcttctaaaagaagggaagaggcgtctctttcattgatggatttcgttcagcaaacgattccgcagggattcgtattatcctacattccttttcgctcggagttggatgttcgagcgattaatctgtggttagctcaagagaatcgtctgcttctcccgaaaatgcaagggaacacgatcgttccgatcgagccttcctttgcaaaaatttttcatctttcttctcctaaagatgtgaatcaaatggcaggaaacgaggtaggtgcgcatctggttacaactgccttggttcctgctgtggtttttgatcaggagcagtttcgtttgggatatggcggggggtattatgatcgctttctcgctagatacccgcgtatttggaccgtaggggtggggttcaaagagcagctaatcgcaagtcttcctagagaatctcacgatattcctttaaacacattgtatctaacgtag

SEQ ID NO: 18856 - DNA, 1065 bp, Chlamydia trachomatis
atgagcgttcccgacagaaaaagggctttggaagctgccattgcttacatcgagaagcaatttggcgcaggatctatcatgagtttagggaagcattcttctgctcatgagatatcaactattaaaactggcgcattgtcgttagatttagctctgggaataggaggagttcctaaaggaagaattatagagatttttggcccagagtcttcagggaaaacgactctagcaacgcatatcgtggctaatgcccaaaaaatggggggtgtggcagcttatattgatgctgagcacgccttagatcctaattatgctgcgctaattggtgctaatattaatgatttaatgatctcccagcccgattgtggagaggatgctttgagtattgcagagcttctggctcgatcgggagctgttgatgtcatcgttatcgattcggtggcagccttggttccaaagagcgaattggaaggagaaattggagatgtgcatgtgggtttacaagcacgcatgatgtctcaggctttacgaaaattaacggcgacgttggcacgaacgaacacttgtgcgatttttattaaccaaattcgagagaagataggtgttagcttcgggaatcctgagaccacaacaggggggcgggcacttaaattttactcttctattcgtatggatattcgtcgtatcggtgctatcaaaggaggcgaaaacttcgatataggaaaccgaattaaggtgaaggtcgcaaaaaataaattagctcctccatttcgaactgctgaatttgatattttgttcaatgaagggatttcttctgcgggatgcattattgaccttgctgtagaaaaaaacattattgataagaaaggatcttggttcaattaccaagatcgtaagttgggtcaaggccgagaggctgtgcgcgaagagctgaaaaggaataaagagttattccaagagttagagcgccgtatttatgagtctgtacaagcttcctcatcacaggcgctagcatctgcttgcttggaccaggaggctcgagaagtagcagaagcagcgaaataa

SEQ ID NO: 18857 - DNA, 810 bp, Chlamydia trachomatis
atgttcccaaacaacaaaatgctcttgatagctggaccttgtgtgattgaggacaattctgtttttgaaaccgcacgaagattaaaagaaattgttgctccctattcttcttctgttcattggatctttaaaagcagttatgacaaagcgaaccgctcgtctttgcaaaattatcgcggtcctgggttgaaattagggttacaaacattagctaaaattaaagaaactttcgatgtggagattttaacagatgtgcattctcctgacgaggctcgagaggctgctaaagtctgtgatattattcaagttccggcttttttgtgccgccaaacagatctccttgttaccgcaggagaaactcaagctatcgtgaatattaaaaagggacaatttctttctccttgggaaatgcaaggacctattgataaagtcctctctaccgggaataacaaaattatcttaaccgaaagagggtgctctttcggttacaataatcttgtgtccgatatgcgctctatcgaagttctccggcgctttggttttcctgttatttttgacggcacacattccatacaactaccaggggctttacaaagtcaaagtggtggacaaaccgagtttattcctgtcctaacgcgttctgctatagccgcaggcgtacatggattgtttatagaaacacatcctaatcctgcttccgctctaagtgatgccgcttctatgctctctttgaaagatctagaacgattattaccatcttgggtacaactgttcacatacattcaagagatggacaccgtttctatatga

SEQ ID NO: 18858 - DNA, 237 bp, Chlamydia trachomatis
atgaaagagtttttagcgtacattgtaaaaaatcttgttgataggccggaggaagtgcatctaaaagaggtgcagggaacgaacacgattatctacgaattgactgttgctaagggagatatcggtaaaatcatcgggaaggaaggacgaacgatcaaagcaattcgtaccttgcttgtctccgtagcaagccgagataatgtgaaggtcagtctagaaattatggaagagcgataa

SEQ ID NO: 18859 - DNA, 1002 bp, Chlamydia trachomatis
atggttagggaaggggaagagcacatagacgaggagttttcgttgggtgttatcggcgtaagttatcgcgagactgcgttgcagcagcgagaacaagtcctccaattcttacaacaagctcagctttctttttatccaaaatttccccaggaagaagggcgtagcgttttgttatctacttgtcatcgtgtggagctatacggcatggctaccgaggcgatcttttctactttggagaaagaaattcgggaaatgggagctatcccctacttttatcggaatcaggattgtttttcacatttgttttgtgtagtaggaggtatggatagcttagtccttggagagactgaaattcaagggcaggtgaagcgagcctatttacaagctattgaagagcaaaagcttgcatttgctcttcattttctctttcaaaaagcactgaaagaggggaaagttttccgaacaaaaagaagctcgccttctacagaaattaccattccagcttttgtacagcacgagttgcagaaacaaaagatggcaaggagcgcatctttgctgtttatgggatattctgaaatcaatcgttctgtagcctattatctacaaaagcaagggttctctcgcattacattttgttctcgtcagccactttcgcttcgatctatggatcaagtattgcgagaagaggtgtgttttcaagatccttatcatgtgatatttttgggttcttctgaactgcggcatgcttttcctagatcgctctgggaaggtgtgtgggattttcctggacggctggtttttgattttgcagttcctcgtgctctccctgtacagccagcttgccgtgatcgttatatcgatatggaacagattagcgattggttgagacagcatcaaaaagaagtcttcccattgcaactcgatagtttgagagaggtgggttatcgttattgggaatctttgaatagaaggcttgcacggcgtcgttatgcaagcgtgtga

SEQ ID NO: 18860 - DNA, 2475 bp, Chlamydia trachomatis
atgggtatacgcttagttgttgataaagggcccttgtctggaaccgtccttattttggaaaacgggacgagttggtctcttggaagtgacggcaaagcaagcgatattttattgcaagatgaaaagcttgctcctgctcaagttcgcgttactttaaaagatggcgaatattacctagaaaatttagatgtttctcggccagtcctggttaatggagtcgctattacagctccgaccctattaaaagagggaattcccttcgtaatgggaagctgcgagtggtcattttttaaaggagaagaagtagaaggagatatcgagttatcgttccagacagaagaaaacggcggagaagcggaacagcaagcgcaaggatcttctcaagttgaatcaaaaacgaacacaggacctcgaggccattcttcaggagcttcgtctgcagacggagtttcagcttctgcagcagaaaaagaacaaaagttagcggaatcctttttagcttctgttgagaaggggacaggagctgtacaagaagactctaatagagaagtctctttgcaggaaaatcaacaagctgctcccgcaaaagagaaaatgaatctcgagcttccttcagtaaatcaagaacaaccaaaacaagctactccatcaggcagtggtgaactaactcaatctcaaaacgtgagtatggaagaaaacagaccatcacccgatcaaaatcagcagcctcagctttcttctgattcggaaccagatgctaaaggtgctgagaatcaagagcaactttcacaatcttcttctccatctcaggaaaatccgaaacaatcagaagattccagtagcgctacaaaagaaagtgttgcaactccggaagagaaactcccagaggcggaaggagacaattctgcatcgagcgaggaagaaaagattgaagaagaatcttccgaaggagaatctaatgaggagcaaacggtagaagctcctgcagaagaagagaaaaaagaagaaaaaggagaggttctagcgcctttcaatgtgcaggatcttttccgatttgatcaaggtattttccctgcagagatagaagatcttgcacaaaaacaagttgctgtagatctcactcagccttctcggtttttattaaaagtacttgctggggctaatattggtgctgagtttcatttggatagcgggagaagctatatagtcggaagtgatcctcaggttgctgatattgttctaagtgatatgagcatttctcgccaacatgcgaaaattattattggcaatgatagctctgttctcattgaagatttaggcagtaagaatggcgtgattgttgaaggccggaagatagagcatcagtctactctttccgccaaccaagttgttgctctaggaacaacattgttcttacttgttgattacgcagctccttctgacacagtaatggctaccatttcttctgaagattacgggttgtttggtcgtccgcaatctccagaagaaattgctgcaagaaaagaggaagaggaagaagagaaaagaaagcgggcaacattaccaacaggcgcttttattttgaccctatttgtaggaggtctagcactcctttttggaataggaacagcttctctattccatacgaaagaagtagtttctatcgatcaagtagatttaattcatgatattgagcatgtgattcaacagtttccaactgtacggtttacctttaataagaataacgggcagttattcttaattggtcacgtaaaaaatagcatcgataagagtgaattgctttataaggtagatgccttgccttttgtcaaatctgttgatgataacgtgattgatgatgaggctgtatggcaagaaatgaatattttgctctccaagaagcctgagtttaaagggatcagcatgctgtctccagagccaggagtttttgttatcagtgggtacttgaagacagaagagcaagcggcatgtctgtcagattacttaaacttacactttaattatctttcgctattggacaataaggttgttatagaaacgcaggtaatcaaagcgcttgcagggcatttgatacagtctggtttcgcaaacgtccatgttgcttttaccaatggtgaagctgttttgactgggtacattaacaataaagatgcggataagttccgagcagttgtgcaagagcttcaagacattgctgggattcgcgtggtaaagaattttgttgttttgttgcctgcagaagagggtgttattgatctgaatatgcggtatccagggcgttatcgggtaacaggtttttctaaatgcggagatattagcatcaatgttgtagtgaatgggcgtattttgacccgaggcgatgttttagatggaatgacagtaacaagcattcaaccacacagtatctttttagaacgcgaagggttgaaatataaaattgagtacaataaatag

SEQ ID NO: 18861 - DNA, 2019 bp, Chlamydia trachomatis
ttgaacaagaattctcttacttgtcaggatttgaaagaagttggctataccgtcaattttgaagacatttctattttggaattgctgcagtttgtaagtaagatttccggaacaaatttcgtttttgatagcaatgacttgcaattcaatgtaacgatagtttctcacgatcctacttcggtggatgatttagcaacgattctattgcaagttttgaagatgcatgacttgaaagtcatggagcaggggaataacgtattaatttatcgcaatccgaagctttcacaactgtcaacagtagtgactgatggctctgccaaagatactagtgaagcagtagtggttacacgagtatttcgtttgtatagcgtaagtccttctgctgcggtagaaattattcagccgttactttcccatgatgcgattattagtgcttccgagtccactagacatattatcgtttcggatatagcaggaaatatcgaaaaagttcgagagttgatacaggcattagatagccctggagcgtctattgatatgtctgagtatgaagtgcagtttgctaatcctgctgcattagttagctattgtcaggatgtccttggagcaatgacggaagaagagggcttccaaatttttattcagccagggacgaataaaatttttgttatttcatctccaagattaacaacgaaagcgatccaattattacaatctttagatatcccagaaatggcgcatacattggatgatgtgacgagccctgcgtctgctttgggtagctctggatccgctaatcctaagagcatgcgctttttcatgtataaattgaaatatcaggatggatcagctattgctcaagcgatccaggatattgggtataacctttatgtgacaacggcgatggatgaagatttcatcaacacgttgaacacgattcaatggttgcctattaacaattctatcgttgtgatcggaaatcaggctaatgtggataaggttgttagtctgttgaacggattagatcttcctccaaaacaagtgtatattgaagttctcattttagagacgagtttagaaaaatcttgggactttggggtgcaatgggcagctcttggagatgaacaaggaaaagtagcttatgcttctggtttgttgagtaacacaggagtggtggatcctttgcgtaatcagactcctcccgttgctccaaacccagggaatatctcgttgccaactccaggtcaattagctggcatcagtgatatgatgtatggatcttctgcatttggattaggaattattgggaatgttctcagtcataatgggaagtcttatctaacgttaggaggattactaagtgccctagaccaagatggtgatacaacagtggtgcttaatccaagaattatggcgcaagatacgcagcaagcgtccttctttgtaggccagacaattcctttccaaacaacgagtacggttatccaggaaactggctctgttacacaaaatattgaatacgaagatatcggagtgaatctggtcgtaacatcaactattgctcctaataatgtcgttactttgcagatcgagcaaacgatttctgaattgcattcagcgcaaggagttctcactcctgtaacggataaaacgtttgctgctacaagattacaagttcctgacggatgtttccttgttatgagtgggcatattcgagataaactcacaaaaattgtttctggggtgccattactcagttctcttcctctaatcaaaggactctttagccgaacaatcgatcagcgccaaaagcgcaatattatgattttcattaagccaaaagtcattagtagctttgaggaaggaacagtcttatccaactcggaaggatatcgttataattgggaaagtgaaagaggatctttagaagttgctcctcgtcatgctcccgaatgtcagaatgctcctaaggttcagacagaaagtgattttaaaatgctagaaatagaagcagaataa

SEQ ID NO: 18862 - DNA, 1071 bp, Chlamydia trachomatis
atgctccctaaccaaattctcacagatatcacaacagtcaaacactcttttaaagcagaaacgtttcgtcctatttccacactctctttatcaagaaatctctctgtttccaaatttgtgccctgtctttccaaagaaaacaaacgcgatgttttagaaaccattgccaaagagttttcgaatattgagggagaagaattttttgttctgccactcaaagatttacccatctggcaacgagaatgcttattagagcattatctttgtccttatgatttaagtggctctttagaaggcgaagcgcttattgtcaatcgagcagggaccttattagcaggcattaatcttcgtgatcatttggtgctacacggaatagattttgtctggcagccagaaatgttactacaaaaattaatagatctggatatacgcttgcaacaatcgctttcttttgcattttctccagattttggctttctaactacagatcctttacgttgcggaactgcgcttgtagctcgggcttttatccatgttcctgcgcttagatatagaaacaaactatctgaactcttagtcccccatcaacgcgagttcgcttgttcttctttgcttcctttatcacaagaatctttaggtgatattctttgtttatcaaatatttgttcattaggagtatctgaagaacaaatcctctcttccttaaggcttgtggtatcaaaaattttatctgcagaaacagaagcgcgcaacctactactaaaagaaaattccacagaaattaaaaatcgaatcttgcgttctataggaatgctcacacattcttgttacttagatttacaagaggctctggatgccacaagctggatacagctagggatgagcatgcaatggattgaagatagtgaaaaacatcctctatggagtcccatgttctgggatctacgacggggtcacctcgccctgtataatcaggaccctgcaaataaaacgatcgagaaagaaataatcgcccagatacgagctcagacaacaaaaccccaggcagagcgactgatccttcgagtctga

SEQ ID NO: 18863 - DNA, 534 bp, Chlamydia trachomatis
atggctttcggtatgaacccctcagaagagtcttctgctctttgttataactgccagcaaccagcaacaatttgttttacagaaatttctgaaaacatcacttcgcgatgttatgtatgcaataactgcccatacccttctcgatattatgatcgagaaacggtcctcgcttctcctacaaatgaaaccctaattttagaatgtggcaattgtaaaactaaatggtgtatccgcgacacggatgagattttattaggatgcgctctatgctatagaactttcaaatctcttattttatccaggctcttacgctatcaagccatttcatcctatactgcagacaaaaccaataacttccatatcgggcgttctttaggaaatatagaaaaacctactgttaatcctgctatgcgtctgatcgctttacatgaggccttacaagagactctacgacgagaagattatgagcaagctgcagaaattcgtgatcaaattaatcagctaaaaaatcagaatacaaccgatgctccctaa

SEQ ID NO: 18864 - DNA, 540 bp, Chlamydia trachomatis
atgacacttacttctgcggaaaaagagatgtctggcgttttaacgtttttccaaaaagaaattcgtggtttcagaactgggaaagcacatccggcattggtagagactgttactgttgaagtatacggaacaaccatgcggttgtcagatattgcatcaatcagtgtttctgatacgcgacagcttctaatctccccttatgatgcagggaacgtttctgctatttctaaagggattttggcagccaatttaaaccttcagcctatagttgaaggagctacggttcgaattaatgtacctgagcctacagaagaatacagacgcgaagtaatcaagcaattgaaacgtaagagcgaggaagctaaggtttccattcgtaatattcgacgtacttgtaatgataggttgaaaaaagacgatagtctaacagaagatgctgtgaaaggcttggagaaaaaaattcaagagctcacagataagttttgcaagcagatagaagagctcgcaaaacaaaaagaagctgaattgtcttcgatatag

SEQ ID NO: 18865 - DNA, 738 bp, Chlamydia trachomatis
atgatgaaaaaacgagtgaaacgagttttattcaagatctctggagaggctctttctgacgctagttctagcgacaaaatcagtgaagaacgcctctctcgattgattgcagaacttaaggttgttcgcaatgcggatgttgaagttgcggtggtaatcggtggagggaatatccttcgagggctatcacagagccaaaacctgcagatcaatcgggtttcagctgatcaaatgggaatgttagcgacgttgattaatgggatggcattagcggatgctttaaagaccgaggatgtgcctaatctattaacatcgactttatcttgcccacagttggcagagttgtataacccgcaaaaggcatctgacgctctcagtcaaggcaaggttgttatatgtactatgggagcaggagctccgtacttgacaactgacactggtgcagctttgcgtgcttgtgaattgaaagttgatgttttgcttaaagctaccatgcatgtggatggtgtttacgatcgagatcctcgagagtttgctgatgcggtaaggtatgaccacatctcttatagagattttctctcccaagggttgggcgcgattgatccttctgcagtgtctttatgtatggaagcaggaatcccaattagaatgtttagcttcaccaaacattccttggaagaagccatttttaataccgttggtacagtgatatcttctacagagggaggacaactatga

SEQ ID NO: 18866 - DNA, 849 bp, Chlamydia trachomatis
atgagcgacttctccatggaaacattaaagagtttgagacagcgaacaggtgtaggcctgacaaaatgtaaagaagcccttgaacatgcaaagggcaacttagaagatgctgttgtttacttacgaaaacttggacttgcctctgctggtaagaaagagcaccgagaaacgaaagaaggtgtcattgctgcgtcggttgatgagcatggggcagctatcgtcgaagtgaatgttgagacggactttgttgctaacaatagcgttttccgaacgtttgttacaggtttattatccgacatcctcaacaacaaactgagtgatgtggatgctttagctcaagtaacgtcctctcaagagccttctttatctgtagaagagctcaaagctgtaacgatgcaaacagtcggagagaatattcgtataagccgcgcgctatatacacctgttaactctaatcagagtgtaggaatctattctcatggaaatgggaaagccgttgccctggtctttctttccggatctgacaaacaagaagcgttagcaaaagatattgctatgcatattgttgcaagtcagccacagttcttaagtaaagaaagcgttcctcaagaagttttagagagagaaagagaagtattttcttcccaactatcaggaaaaccccaggaagtaattgagaaaattactacagggaaatttaaggcctttttccaagagacttgtttattagaacaagcgttcattaaggatcctgacgttactattcaggaattggttgatagagctgcaaaagctagtggagagccgctaaaagttgagcactttgtcttttggaagataggcgcataa

SEQ ID NO: 18867 - DNA, 846 bp, Chlamydia trachomatis
ttggtgctttcttgcgaactaactttaaaagaacttttagaatccggagcacattttggacaccagacaagtcgctggaatccaaaaatgaagccttttatttttgaagaaaagaatggcctttacatcattgatttagccaaaactttggctcaattgaagaaagctgtttcttgcattcaaaaaactgtcgagcagggaaaatctattttgtttgttggaacaaaaaaacaagcaaaacagattatcaaagaagctgctatcgaatgtggagaattctttgcatcagaaagatggttgggtggcatgttaacaaacatggcaaccattagaaattctgtaaaaacattgaacaacattgaaatagacctggcgtcttctaattctgttcttacgaaaaaagaaaccgctttgttagccaaaagacatcgcaaactgcttaataatctagaaggtgttcgtcatatgaattcccttccaggacttttggttgttattgatccaggatacgagcgcattgctgtagcagaagctggcaaactcggcattcctgtaatggctttagttgatacaaattgtgatccgacaccaattaaccatgtgattccatgtaatgatgactcaataaagagcattcgcttaattgttaacgcgctcaaggatgctattattgatacgaaaaaacgttcaggtttcgaaattttatcccctgtacgtcctatagaaagacctgcggaagaaattgttgaagggcttcctcttcctaacgaagctcagaatgatgctaattctaaagaaggtttcttagtttggacagatactgataatagcgaggcattgagatga

SEQ ID NO: 18868 - DNA, 1008 bp, Chlamydia trachomatis
atggaagaagcggaaaagcatttagcgaaagagtttttgtgttcaggaattaatttatttttgagtggtgaatacgaacaagctgaagaaaggttgaaagagtctttagaattagatccagaagctgggttagcctattgttatttgggaattattgctttagaaacaggacggactgctgaagctttggtttggtgtaagaagggattggatgaggagccaggagacagctatttacgttattgttatggtgttgccttagataaagcagatcgtgtagaggaagccattggccattatcaggcatatgcagagcttcatcctgaggacatagaatgcctttttagtttaggaagcgcctatcatcgtgtgttacgttatgaagatgccattgcttgctttgatcgtattgcacaactcgatccttggaatcctcaaagtttatataataaggctgtgattttatcagatatggaagatgaagagggggcgattgatttattggaatcaactgtgaagagaaaccctctttattggaaagcttgggtaaaattggggtacttactttccagaaataagatgtgggatcgagcaacggaagcttatgagcgagttgttcaattacgacccgatctatctgatgggcattataacctgggactatgctatttaacgcttgataaaacaagattggcgttaaaagcttttcaagagtctttgcaattgaattctgaagatgcagatgcacatttttatatagggttggcgcatatggatcttaagcagaatgagctggcttatgatgcattttatcgggcattgggaattaatttagatcacgaacgatcgcactatttattgggctatttgcaccatatacaaggagaatctgacaaagcagagaaggagctttctttcttaatgtctaaggaatcggtgttcgctccattgttgcaaaaaactgtgagtagttcaggatttattcgtgagaaagagacgctattttga

SEQ ID NO: 18869 - DNA, 768 bp, Chlamydia trachomatis
atgcttcatctatacgatttacacgtgtgttgtgaagaaaaaaagattttggaagggttgtctttgtctattcgcccaggagaactccatatcattatggggcctaatggagcagggaaatccacgttagctaaagttctgtctggggatgacagtgtagaggtagcttcagggaggatgactttatcgggaagcgacttaattgagatgtctccggagaaaagggctcatgcagggatgttcattagttttcaacatcctccagaaattcccggagtcaataatcgtctttttttaaaagaggcttgtaatgcttgtagaaaagctcgtaatcaagaggtgttggaagattctgctttcaatgagttgcttgcgagtttagaagaaacttatggattcccaggatttcattttttccctgatagaaatgtcaatgaagggttttcagggggagagaaaaaaaagaacgaactttggcaaatgttgatcttggaacccaaaatggttgtgctagatgaacccgactcagggcttgatgtagatgccctgaagggcatttgctctgttgtacaaacctatcgacgtaaacatcctgaaactgccttttgcattgtgactcataatccgagactcggggatcttcttcaccctgatcatgtacacatccttttgaatgggagagttgttttttccggggatatgcatctcatggaggagctagaaagaaagagttatcaagaattgttggatgttgttacccgggagtaa

SEQ ID NO: 18870 - DNA, 873 bp, Chlamydia trachomatis
atgagtaatcctcccttgatccaagcaagccgattaacgaagcattactacaaaaggtctttctggtttcagcaaaaaaagatcgctacaacacctttgaataatgtttctttcaccattccaaaacataagattgttggtcttataggagaatctggttcagggaaaaccactttagctttagggttagcagggcttatcccattgacctctggacatcttactctcaatgataaagcagttccactacatagtaagcaaggccgtcaatacttgagctcacaagtacgtatggtgtttcaaaatccccgttcgtctttaaatccacgcaaaacaatttttgacaccctaagccattctctactctatcatcgtttagtcgctaaaaccgatttgggagctacagtggaaagagccttgtctttggttggtatttctacagactatctctatgcttaccctcatcaactgtctggaggacagttacaacgaatctcgatcgctagagctttattaggcgcccctcagcttatcatttgtgatgaagttgtctccgctttagatctctccatgcaagctcagattcttaatacgctaacctcgctacaacaacaagcgcaacttacttatttgttcatttcgcacgaccttgccgtcgtccgatcattttgctcagaactgattatcatgtataaagggcaactcgtagaaagcggtcctacagaacaaatattttgccatccacagcatccgtacacacgaatgctgcttcactcacagttaccagaattccccgagcatcgccgagatctacgcactcccctaataactgaagagcttttccagaatcctaaagatcatcctacactgtaa

SEQ ID NO: 18871 - DNA, 966 bp, Chlamydia trachomatis
atgagtgctcaacctcttctccaagtcaagaatctttctgtgtctcttaatagaaataccgtgtcgtttcctgttgtagaggatctttctttcaatgttttccctgggcaaacgttagcaatcattggagaatctggttcaggaaagtctattacggcgcaatcccttatgcagcttcttccagaagagtatttttctatttccggagaagcttttctccataaagaaaacttacttgatcgtaaaaatctcttatcaaagacgttatttggatcaaagatggctatgatttttcaaaatccacttgcatcttttgaccctgtattcacaattgagcaacagtttcacgaagtcatccgcacccatttagatttaacaaaaaaagttgcgcatgaacaaattgtaaccgtattgcgagaaactggcttccaagatcctgagcgctgcattaaactctatccccatgagctatctggaggaatgcttcagcgcatggccattgccatgaccttgctcacttcaccagatttgttgatagcagatgagcccacgacagctttagatgtctcagtacaatatcaaattttacaactcctaaaaactttacagaaaaagacagggatgagcttactggtcattactcatgacatgggagttgttgcagaaatggctgatgatgttttcgtcttgtacgcaggccgcatggcagagtactcttctgtacaagatatcttccattcacctgctcacccttatacaaaagatttattagcttcccgcccttcacaatataaaaagcagacctttgttcctatttcagggcatccacctcattatacgaaccttccaaaaggctgttgttattctcctcgttgccaaaaggccttacctatctgctacaagcaatcaccacatgccatatctttaaacgatcatcatcacgtgaggtgttggttatatgagtaa

SEQ ID NO: 18872 - DNA, 1281 bp, Chlamydia trachomatis
atgtggtggctgctggtttgtgtggttataggcggattctacactgcttggaacataggcgctaatgatgtagcgaatgctgtggggccaagtgtaggggctggcgtgttgactttgcgacaggctgttctcattgctgcggtttttgaattccttggagctgtggtattaggggatcgagttatcggtaccattgaaagtggtttagtggcgccggccgatcatgttctgtcttcccaagattatgtctttggaatgacagcagctctttttgctactggtgtttggttacagatagcatctttttttgggtggccagtatcaacaacccatgctattgtgggaggcgttttaggctttggaatcatccttaaagaggatgctgttatctattgggattcctgtgctcgaatatttgtcagctggttagcctctcctattattgggggatatttcgcttttcttattttctcttttattcgaaaagccattctttataaaagagatccagtttctgccatggtgcgtatagctccgtttctatctgctattattatttttgctttaggtttgatccttatccttagtggagcagtggctcgtgtagtggcttttcctgtagctttccgcgttgtttgtggattagttgttttcgcttttgcctttacgatttggggagtgcacttttttaaactggccgttctccctcaaaaagtggggccaggaacattgttagatcgactgttatccaaaagtacagattatggacgacagtaccttgttgttgagcgtatttttgcttacttacaaatagtcattgcgtgctttatgtcttttgcccacgggtctaatgatgttgccaatgctatagctcctgttgctggtatttatcgggctctatatccgcaaagttactctccgaaagttctctttatattcatgtctctagggggcttaggtttagtctttggattggcaacatggggttggcgtgtaattgatactattgggaaaaaaatcacagagcttacgccatcgagagggttctctgtaggaatgagctcggctatcactattgcagcagcatctgcttttggattccctatatcaactacacatgttgttgtgggtgccgtattgggggtagggttagcaagagggctgcaagctatcaatctacggattattaaagacattgtactctcgtggtttgttacagtgcccgcaggagcagctctttccatcatgttttttttgttattacgcgcagtattttgttaa

SEQ ID NO: 18873 - DNA, 1212 bp, Chlamydia trachomatis
atggataaactatcaataaaagacctttccccagaagggaaaaaggtactagttcgtgtagattttaatgttcctattaaggacggaaaaattttagatgatgtccgtattcgtagtgctatgcctacgatcaattacctattgaagagagatgctgcgatcattttagtcagtcatttagggcgtcctaagggagatatgttcgaagaagcgtattcgttagctcctattgtgcctgtattagaaggatatttggggcatcatgtgcctctatctccagattgtgttggagaagttgcacggcaggctgttgcgcagttgtctcctggaagagtgcttcttcttgaaaatgtacgttttcatagaggggaagagcatcctgaggaggatcctagttttgctgttgagcttgctgcttacgccgatttttatgtaaatgatgccttcggaacctctcatcggaagcatgcttctgtgtatcgagttcctcaaatgttccccgatcgtgctgctgcgggatttctaatggaaaaagagcttgaatttttgggacagcatttattagtggagcctaagcgtccctttacggccatcctaggtggtgctaaggtatcttcaaaaataggggtaatcgaagctttactctcgagagttgataatttagtgttagctggaggtatggggtatacttttctaaaagctatgaatcagcaagttgggaattcattggtggaagagacaggcattcctttagcgaaaagggttttggaaaaagctcggacacaaggggttaagatttatcttccggtagatgccaaagttgcaagacgttgcgaaactggggaagattggcaagagttgtcaatacaggaggggattcctgagggtttctctggtttcgatattgggtctaagacgatagctctattttctgaggtgatccaagattccgcaacggtattttggaatggccctgttggggtttatgaagttcctcctttcgatcaaggatcaaaagccatcgctcagtgtcttgcaagtcattcttctgcagtgacggttgttggtgggggtgatgccgctgccgtagttgctttagcaggatgtacctcgcagatttcccatgtatccacaggaggaggagcttctttggaattcttagagaagggctatcttccagggacagaaattctctcccctgctcgcagttaa

SEQ ID NO: 18874 - DNA, 1335 bp, Chlamydia trachomatis
atgcttcaaaatgatacaatcgctgccattgcaactcctccgggagaagggagtgtcgccattgtgcgcgtctctggccctgacgctatttctatttctaatcgtattttttctggcaatattgcaggctatgcctcgcatacagcccaccttggcactgtagttcataatgaagtttgtattgatcaagctttagtgttgattatgcgaaccccccgttcttttacaggtgaagacattgtagaattccaatgccatggaggatacttcgcttgctctcaaattttgaatgccttgttggcggaaggggctcgcgcagcacttcccggagaattttcacaacgagcttttttgaatgggaaaatcgacctaattcaagcagaggctatacaacagctcatttcagctgaaaatattgatgcttttcatattgcccaaaatcaatttcaagggcatacctcacaagccatttcctcgatttcctccttaatcatagaagctttagcctacatagaagttttagcagacttccctgaagaagatatagaaacggaacgttcccttcctgtgcaaaaaatcacagaagctctcactatcacacaagagcttctttctagctttgatgagggacaacgtcttgctcaagggacaagcattgttttagcagggcttcccaatgcagggaaatcttctatactcaatgctcttactcaaaaaaatcgagcaattgttaccgacataccaggaacaactcgcgatattttagaagaaaactgggttttgcaagggaagaatcttcgtctgattgattctgcaggtattcgagaaaccgaaaacattgttgaaaaagaaggaatagaacgcgctcggcaggccatgagtcaagcagagggcatcctctgggttatggatgcctctcaacctgttccagaatttcctgccatcctataccaaaagccgactattttactttggaataaatgcgatgttgcatctccccctcaactagaggtcccttttcagcaaatttttgtatctgctaaaactggaaaagggttttcggaattgcgacaagcattaaacaaatggctccacaccacacaattaggaaaatcttctaaagtctttttagtttctgcaaggcatcacagcttgctgcatgctgttcatacatgcttaacagatgcgttaacaggattccaagaacatctccctaatgaatgccttgcattagatctcagacaagctttacattctatagggaatctatctggatctgaagtcactgaaaatgttttaggagaaattttcagtaaattttgtatagggaaatag

SEQ ID NO: 18875 - DNA, 2907 bp, Chlamydia trachomatis
atgatggatttccttaagcgttttttcggatcttcccaagagagaatattaaaacgattccagaagttggttgaagaggttaatgcttgcgatgagaaattttcgtctttatctgacgatgagctccgcgaaaaaactcctcaattgaagagaaggtatcaagaaggggagtctttggataaactccttcccgaagcatatggtattgtaaagaatgtgtgtcgtcgcttggcaggaaccccagtggaggtttctggataccaccagcagtgggatatggttccctatgacgtgcaaattcttggtggtattgccatgcataaaggctttattaccgagatgcaaacaggagaaggaaaaaccttaactgcggttatgccgctttatttaaacgcgttaacagggaaaccggttcatctcgtcacggtaaatgattatttagctcagcgggattgtgaatgggtaggttcggttttgcgttggctgggcttaacaacaggcgttttagtctcggggattcctccagaaagacgtaaagcgatctatcagtgtgacgtagtttatggaactgcttcggaatttggatttgattatctccgggataattcgatcgcgacaagaaaagaagagcaggttggtcgtgggttctatttcgctatcattgacgaagtagattctgtactaattgacgaggcaagaacaccgctgattatttctggtccgggagaaaaacataatcctgtttattttgaattaaaagacaaggttgctgagttagtacatttccaaagagagatgtgtaaccatattgctgctgaagcaagaaaaaccttagatccatttttagggatggatgtgcttcctaaagatagaaaaattatggaaggcatctcggaggcttgtcgggctttatggttggtaagtaaggggatgcctcttaacagagttttacggcgtgtgcgggagcaccctgaccttcgtgctatggttgataaatgggatgttttttatcatgcagaacaaaacaaagaggaatgtttagagagactttcctccctatatatcgttgttgatgaacataataatgatttcgagttaacagacaaaggaatgcagcagtggatcgagaagatcggtggagctgcagaagactttgttatgatggatatggggcatgaatatgccttgatcgaagaggatactactctttcccctgaagataagttgaatcgcaaaatcgctgtttctgaaaaagatacgcaaagaaaagcaagagctcatggattgcgtcagctgttgcgcgcccatttattaatggaaagggatattgattatatcgttcgtgatgatcagattgtgatcattgatgagcatacaggccgtcctcaagcaggccgtcgtttttcagaaggtttacatcaggctattgaagcaaaagaacatgtaacgattcgtaaggaatcgcaaacttttgctacagtgacattgcaaaacttcttcagattgtatgagaaactcgcaggaatgactgggactgctattacagagtctcgggaatttaaagaaatctataatctgtatgttttacaagtcccgacatttaagccttgcttgcgtatcgaccataacgatgccttttatatgacggaacgagagaaataccaggctattgttgctgaaatcatttccgcacatcgttcaggaaaaccgattctgatcgggacggagtcagtagaagtttcagagaagctttcgcgtattttgcgacaaaatcgtattcatcacactgtactcaatgccaaaaatcatgctcaagaagctgaaattattgctggagctggaaaggtaggagctgtaacggttgctacaaacatggctggtcgaggaacagatattaagctggataaagaagctgttgctgctggggggctttacgtcataggcacatcgcggcatcagtctcggcgtattgatagacagctacgtggtcgttgtgcacggcttggagatccaggtgcggctaagttcttcctttcttttgaagatcgacttatgcggctttttgcatctcctaagctcaatacattgattcgacattttcgccctcctgagggagaggccatgtcggatcctatgtttgaccgattgattgaaactgcacaaaaaagggtagaaggccgcaactatacgatacgtaaacatactttagagtatgacgatgtgatgaataaacagcggcaaacgatttatgcgtttcggaatgatgttctgcatgcagatgatttgttcattgttgcacgagaacaaatcgagcatgtatcgctggctttggcgtttctaattttaaaagatgctcgtgcggaccactgctctttacccaaggttgaagagtggctgagttattcattccctgtaaagctcgatgatcaggaaattcgtcgtctaggaaatgtggatgccgttgctgattatatagggggcttattgatagaggcttttgatgctaaattctcctctatgctcactgagtttacggaaattattggatcagcgtctggtgctcagggggtttgcaatgatattcttcgttcagtgatcatttcgcatattgatgaagagtggaaagtgcatctcatggatatggatttgctgcgttccgaagtagggttgcgttctgttggacaaaaagatcctttgatcgagtttaagaacgagtccttccttttatttgaagggttaattcgggatattcgtattgcgatagtgaaacatttattcgctctggagttatccttaacacgaagcgacagacctgataatgctattccaactgttgcgacggcttttcataatcacgataattttcgccctatggagctaacaattatcggagaagaggaaaattag

SEQ ID NO: 18876 - DNA, 1473 bp, Chlamydia trachomatis
atgcgtattgctattttaggaagaccaaatgtagggaagtcttctatttttaaccgcttatgcaaacgttctttagcgattgtcaatgctcaagaaggaactacgcgagatcgtttgtatggagaaattcgagcttgggattctattgtccatgttatcgacacaggaggggtagaccaagagtctacagaccgattccagaagcagattcataaacaagcgttagctgccgcagaagaggcttctgttcttttgcttgttgtagatatccgatgtgggatcactaaacaagatgaagagcttgcaaaacgtcttcttcctctaaaaaaaccattaattctcgtcatgaataaagcggattctcaacaggacctccagcgcattcatgaattctatggattgggcatctctaatatgattgctacatccgctagccacgacaagcatattgatgtgctgttagaacgcattcgtcaggtagcggaaattcctcttccatctgcagaagaacaagaaaatacacaagaagaagagttctcctctaaggaatcttctgtagccctacatactttcgcagatgaaactctttttgaaaatgaatctttatctcaagaagaagcttctttcttggaagaacttgttgcacaaacaacaacaccatctatctcaaatcgtccactgaaagtggctctcattggacatcccaatgttggaaaatcctccattgttaatgcgcttcttaaagaagagcgctgtataacagataactctcctggaactacacgagacaatgtagatgtctcctatacgtataacgataaagaatacgtcttcatagatactgcgggactacgaaaagccaagagcattaaaaattctgtagaatggatgtcctcctcacgaacagagaaggcgatttcccgagcagatatttgcctattagtgatagatgctacgcagcaactctcttatcaagataaacgcattttatccctgattgcgagatataaaaaacctcatgttattctcgttaataaatgggacctaatgtttggggttcggatggaacactacgtccaggatttgcgaaaaatggatccctatataggccaagctcgaatactttgtatttcagcaaaacagcgccgtaacctttcacaaatcttctctgctgtagatgatgtctacaccattgcaacgacaaaactatcgacttccctagttaataaggtgctagcgggtgctatgcaaagacatcaccctcaagtgattaatggtaaacgtctacgcatttactatgcgattcacaaaacggtaacgccattctccttcttgctctttattaattccaatacgctgctcaccaagccttacgaactgtatttaaaaaatactctaaaagcagcttttaatttatatggaataccttttgatttagaatacaaagcaaaacctgcgagaaaatcaaattaa

SEQ ID NO: 18877 - DNA, 1233 bp, Chlamydia trachomatis
atgacccagtccactttggaaactgcgaaaaaaattgttcaaaaattacgcaatgctgggtatcaggcgtattttgttggtgggagtgtccgagatatgctcttggaccgccccattgaagaggtggatatagcaactaacgcctccccgacaatcgtgactactatcttccccgatactctttccattggagctgctttcggtattattgctgtaaaagaaaatggacaactgttcgaagtggcaacctttcgcagtgatgaagattacgcagatggtcgtcaccccaatcgcgtgatttttgcttctatgaaggacgatgccattcgaagggatttcacaatcaatggcatgtactatgacccctttgaagaaaaactttttgatttagtagagggaagggctgacctagaaagaaaagttgttcgagcaattggacatcctaaacaaagatttttagaagataagctccgtatccttagagctattcgctttgccgcgacattgggcttttctttagacccgaaaacagagatcgctattatcaaagaggctccatctttaccgacctcggtctccccagaaagaatctggcaagagctcaaaaaaatgcttcgcaaagcaccttatgagtctcttcaattacttattaagcttaaggttctcccaatcatcttcccagagttaaaggcctcccctagtggatttttacgttctactattgcttttgctcaaagaattcgggatccgcacattccagagatcgcttttttactccctctcttccaggaagtaaaacaggaagaggctatagcagccttctctcgcttaaaagtctccaacaaagagcttgggttactagaagattggtatgaagctttgcctcagtttcgagctaagcagaataataaaatcttttgggcacatttttttgcttcacaaacctcccccctactcctttcgctcttcttgtcactacagcgtacacctcatgagcaggagttgtttatttctcgagtacaccacttgaaaactcgtcttgcctcattcatagaaaggattcaaaccggctctcctctagtttctgcaccagacttaatggcaagaggaattgctcctggtcggttactaggagagctcctcaaagaggctgaagccttatccatagaacatgagtgctctgacaaagaaaaaattttatctctgttaaaagataaaggtttttggaaataa

SEQ ID NO: 18878 - DNA, 1260 bp, Chlamydia trachomatis
atgacaaaaaaaaatcttgcgatctgttctttttgtgggcgatctgagaaggatgttgagaaactcatcgctggtccatcggtctacatttgtgactattgtattaaactgtgctccgggattttggataaaactccaactcccgcagcacaagaggtctcaacatctcaaacagcacctcagacaagtctgaaagtgttaactcctaaagagatcaaacgccacatagactcctatgttgttgggcaagaacgtgccaaaaaaacgatttcggtcgctgtctataatcactataagcggatccgagccctcatgcaggataagcaggtcagttatgggaaatccaatgtattgttgctaggcccaacgggatcagggaagactctgattgccaaaacgttagcaaaaattttggatgtcccatttacgatcgcggatgcaacaaccttaacagaagctggttatgtaggagaagacgtagaaaatattgtcttacgcctcctgcaagcagcggattatgatgtagcccgcgcagagcgtggaattatttacatcgatgagatcgataaaattggtcgcacaacagctaatgtttctatcactcgagatgtttctggagaaggagtccaacaggctcttttgaaaatcatagaaggcaccgttgctaacatcccgcctaaagggggaagaaagcaccctaaccaggaatatattcgtgtaaatacggaaaatattcttttcattgtgggaggagctttcgttaatttggataaaattattgctaaaagactaggcagaacgaccataggattttccgaagaaacagatcttgctgtcactgatcgcgatcgtcttctcgcaaaagtagaaacagaagatttaatcgcatttggaatgatcccagaatttattggccgatttaactgtattgtcaattgcgaggagcttaccctagatgagctcgttgaaattcttactgagccagctaacgctattgttaagcaatatacagagttattcgcagaagaaaacgtaaagttaattttcgaaaaagaagctctttatgctatagcgcaaaaagcgaagcaagcaaagacaggagcccgtgctttaggaatgattctagagaatcttcttcgagatcttatgttcgaaataccatctgatcctacggtggaatctattcgcatagaggaagacactattacgcaaaacaaatctcctgtaattattcaaagatctccagaggctattgcttaa

SEQ ID NO: 18879 - DNA, 1101 bp, Chlamydia trachomatis
atgagcccacaccgcagcttatacaaatttaaaaacttttctaatcgcctatataacaaggctttaggtcgttttgatcgtgtatttaattttttttccgggaatgttggcattgatctaggtactgcaaataccttggtttatgtacgtggacgagggattgttcttagtgagccttcggtggtagcggttgatgctcagactcatgcggtgttggctgtaggtcataaagcaaaggctatgttagggaaaactccccggaaaattgttgctgttcgtcccatgaaggacggagtcatagctgatttcgaaatagcagaagggatgctcaaagcgttaattaaacgggttacccctgctcgtagtatgtttcgtccaaaaattctgatcgcagtgccatcaggtattaccggtgttgaaaaacgagctgttgaggattctgcgttacacgcaggggcgcaggaagtaattttgattgaagagcctatggcagctgctatcggagtcgatcttccggtgcatgaacctgctgccagtatgattattgatattggtggaggaacaacagaaattgccatcatttctctaggaggaattgttgaatctcgttctttgcgtatagctggggatgagttcgatgagtgcattattaattatatgcggcgcacatataatttgatgataggtcctcgaactgcggaagaaattaaaattaccataggttctgcgtatccattgggtgatcaagagttggaaatggaagtgcgtggtcgagatcaggtggctgggcttcccattacgaagagaatcaattctgtagagatcagagagtgcttagcagaacccattcagcaaattatagagtgtgtacgattaactctagaaaaatgtcctccagaactttctgcagatttagtagagcggggaatggtgctggctggaggtggagctcttattaaagggctggacaaagctttaagtaaaaatacagggctttctgttattactgctccgcatccgcttctagcggtttgcttaggcacagggaaagctttggaacatctagatcaattgaagaaacgtaaagagagtttggtatga

SEQ ID NO: 18880 - DNA, 1005 bp, Chlamydia trachomatis
atgaaagagactatagcctaccttggaatgggcatgtggggattttctttagccaaccttttggctaacaatggacatcgcgtagtgggatgggcaaggaatccttctttgattgaacagctatctactcaacgccagcaccccgcagctcctcatgttactatcccttcaaacctttctttcacatccagtatggaagaagctttagatggggcgaccatgatcgttgaaggagtcacttctgcaggaatgagaccagttctcaatcagctcaaatctatcacagatttgcagattcctttagtcattacatcaaaaggcattgagcaaaatacaggattgcttctaagcgaaattgctttagaaatttttgggaaaccagccgcgaaatatttgggatatctcagcggtccatctattgctagcgaagttcttcgtggttgtccatgctctgttgtcattagtgcgtatgatcctgctaccctaaaacaaatccaccaagcttttcttactcctacgttccgggtctatcccaatagtgaccttaaaggggttgctttaggcggagcattaaaaaatgtcattgctattgcctgtggaatttctgatggattccggttcggagacaatgctaaatctggactcgtgactcgcgggctacatgagatccgcaaatttgccacgattatgggatgtcgtccagataccttgaatggacttgcaggtctaggagatctctgtaccacttgcttttccgctttcagcagaaacaccctttttggaaaaatgcttgctgaaggcttaacccctgaacaggcaaaaacaaaaattggcatggtggttgaaggagtttacacagctctatccgctcatcaaattgccacacatcacaagatagacatgcccatcactactggtgtctatcgtgttctttatgaaaatctagatattcaaaagggaattgcccagcttcttcaacggaatacaaaagaagaatatttataa

SEQ ID NO: 18881 - DNA, 1368 bp, Chlamydia trachomatis
atgaccgattcttcctatgtagacttatcatgtttattggataagcttcttccgattcgacaagagcatttactagactactggccctctctctcccttcaacaaaagcgatgcttagggagacaaatatctcaaatcaatattccctttttctttcgccagcaggaattattacaagcatcgccctattcccatccctcatacacccccctatcgcctacatactatgcgggggagactccggattatgctcaactaggattacaactttctcaagcagggaaagtaggctgtatcgtattagctggaggacaaggatctcgcttaaaatttgatggaccaaaaggtctctatcccgtctcttccgtaaagaaaaaacctttgtaccaacttgttgcagagaaagtagtggcagctagtaaactagtaggaaggcctttacctgtagcattcatgacttccccactcaaccatcaacaaaccctgtcctactttactgctaatcgctattttaatttggatccctctcaagtggatttcttttgccaacccctttggcctcttttatccctatccggagaccttttcctagaatcagtagatagcttagcactgggtcctaccggtaatggttgtgtagcttctctactcaaatcttcaggcatttgggataaatggcatcaagcgggaattgatatggttagcgtgatccctatagataatcctttagccttaccatttgatagagaattatttgggtttcatgcagcagaacataatgatgtaacaattaaaaccaccttacgccaaaatgcaaaagaagatgttggcgttcttgttgagttagcagaaaaaaaaatctcagtcgttgagtattcagctcttccagataaagaacgctttgccgtcacttcgactggagacctcacttataaactcgctaacattggtctgtactgtttatccatggactttttagcccagacggcacagaaacctctacctatctataaagcgaataagcatgccaagcaattatacccctctctaattgaaaaaaatgcttggaagtttgaagaatttatttttgatctatttcgttacagtaatcgaagtcaagccattgtgtacccccggtacgagtgctttgccccccttaaaaactatgaagggaaccacagccccgcgaccgttcgtgaagcaatgcgcaaacgagagcaagctctatttactgcagttacagaaagaaagctttccccaaatacaatatttgaattagaagcggacttttattacccttcctcccatacttccttagagtgggaaaacaaaatatttttccaggaaccaattattgaggcctcatga

SEQ ID NO: 18882 - DNA, 726 bp, Chlamydia trachomatis
atggcaaaggttcgcctcaataagtttttagcgtcagcaggagtcgcttcgcgaagaaaatgcgatgaaatcatttttgccggctccgttactattaatggtaaggtggctgcaggaccttttgtgactgttgatgaagagtttgattatatagaagttggtgggcagcgcataggggctgaaaagaaggtctacttcatggttcataaaccccttggctatctttgttcttctgagcgtaaatttccacaatctaagttagtgatcgatttgttgtcccactgcccttatcgtttgttcactgtggggcgtttggataaagaaacgtcgggcttgattttagtaactaatgacggagaatttgctaatcgggtgattcacccctcttttgggatcacgaaggagtatttattaaaggtaagtcgtgatgttaccgcaaaagatcttgaaagcttgatgtctgggactatgattgatgggcggattgtgcggccagtttctgtcaaaaaagtgcgtcgtggaaccattaaaatcattgtaaatgaaggaaagaaacacgaaattcgtctttttgcagaggctgcagggttgcagttgctagaactgaaaaggattcgtataggaagcttagtgttgggtgggcttccttatggaaaatatcgagaactgaccgatgcggagttagatagctgtttatcagggaaatcaacagctttagttgcctaa

SEQ ID NO: 18883 - DNA, 1980 bp, Chlamydia trachomatis
atgctcccacaacttttctcttctccattttcacgggaattactcaacgatttttttgaatcagggatggcagaggaaaacagtcctttactttcccgaaagaatcgtcttttaagccaaaacttaaccctaaaatctgcctacatatcccttgctctttatatagggtcgcttctttctcattggaccggatatcagcctctctcttctttgctacttattcttactttcttcctagctggaacgcctgccctcgtaaaatcttttgaggatattcttaataaaacggtgaatatcgatattctcatgacatctgcagctttcggctctattttcattggaggagccttagaaggcgcattgcttttagtacttttcgctatttcagaatctctaggatcgatggtctcagggaaagccaaaagtactctcgcttctttaaaacatttggcacctactgtagcttgggttgttcaacaagatggctcattacaaaagattttagtacaaaatgtaaaagtcggagaggttatccgagttaagagtggagaggttgtccctttagatggagaaattatccaaggagcctcctctattaatctgatgcatctaacaggagaaaagattcccaaatcttgtaatattggggatacggttcccgcaggagctcataacttagaaggaagttttgacctcaaagttcttagaattggagcagagtccaccattgcccacatcatcaatcttgttatccaagcacaaagcgctaaacctaaactccagcaacgtttagatcgttactcatcaacgtatgccttaacaatcttcgcgatctcagcctctatagcaataggcggttcattatttacgacactgcctttcctagggccagacagtgctttttaccgagccttagccttcttaattgcagcttctccttgtgcccttatcatagctatccctattgcctatctcagcaccattaatgcctgtgccaaacatggagttttactaaagggaggcgtagtcttagatcgcttagtctcttgcaactccgtagtgatggataagactgggacactgactaccggagacttaacctgctgtggatgtgaagattttggccctgaatcccctcttttttactcctatgtgctagcaatggaacaatcttcgtcccaccccattgctcaggcaattgttaattatctaacagagaaacaagtgcttcccctaccggcaacacaatgtactaccattccaggcgagggtgtacaaggagaatttaatggagatcaggcctttgttggacgagtctcaacagccctacgctatgtccctgaagaatatcgagaacaacttcgcgaacgtgctcaacaagcacaagcgcgaggagagacctgttccattgcttgctctgggcaacgcgtgtctcttttttactttcgagatgccccgcgccatgatgctgcagatattgtcgcctatttgaaaaaaaatggttatccagtatgcatgctcacaggagatcatcgtattagcgcagaaaacacagctcaactgcttggaattgatgaagtgttctacgatctaaccccagataataaactttctaaaatccaagaactcgcaaagactcgacaaatcatgatggtgggagatggaattaatgatgccccggctctagcgcaagctactgtagggatcgctatgggggaagctggcagcgcaacagccatagaagctgctgatgtagttctcttaaaccaagggctctcttctcttccctggctgataaaaaaagcaaaaaagactcgccgaattgtgtcgcaaaatcttgctttggctttatctattattttatttatttcaggaccagcatctatgggaatcattcctttatggcttgccgtaattttacatgaaggaagtaccgtgattgtgggccttaatgctcttcgccttttaaaaaacacgtga

SEQ ID NO: 18884 - DNA, 1287 bp, Chlamydia trachomatis
atgttggatatacgattaatacgcaaggaaccaaaagaatgtgaagcccgtcttcaaaaaaaagatccctctatttcgttagaacgccttctagacttagataaaaatgtgcgtcaactgaaagcagattcagagtccttacttgcaagacgtaaagctctttctggccaaattcataaagctaaagttgctaacgaggatgccactccccttattcaaggggttaatgctattgcagaccaacttgttgcttttgaaaaaacgttacaagaacaagaagctcttctactagatctcatggcaagactgcctaattatccagatgaggacgttcctgtctcccctgataaatcggggaacaaaattattaaaagccacggagaaattccaacttttacctttcctcctaaacaccatgtacaactcaatgaaaagctgcaaattttagattttaaacttccagccaaaacctcaggttccggctggccagcttataaaaatgaaggcgttcttttagaatgggctctgttgacttaccttcttaataagcagcaagcgcatggatttcaactatggcttcctccactacttgtcaaacgcgatattctttttggctcaggccaaattccaaaatttgatgggcagtactatcgtgttgaagacggagagcagtctcttttccttattccaacagcagaagttgttcttaatggattccattctcaagagatcttaaacgagcaagatctccctctctattacgcagcttttaccccttgtttccgcagggaagctggtgctggaggatctcatgaacgaggattagtaagagtccaccaattccataaagtagagatgtttgcttttacaaccccagaacaagaagagattgcttatcaaaaaatgattggcattgttgaagaaattctttctgaacttcaactcccttaccagctctctctactttctacaggggacatgtctttcacagccaaaaaaacgatcgatgcagaggtttggcttccagggcaacaagctttttatgaggtctcttctatttccaagtgtggagattttcaatctcgtcgctctgagactcgctatcgcgatgctcaaggcaaattacatttcgtgaacactctaaatggctcaggattagcaactcctagattgttggtagctattttagaaaattatcaacaagaggatggatccgttgtgattcctcatgcgctgcgcccttatatgaataaccaagaaattctcctacccaaaacagatagataa

SEQ ID NO: 18885 - DNA, 1191 bp, Chlamydia trachomatis
ttggttccttgcgtattaatcgtatatccaacatccttgcatctctttcgctatctgatttttcaggttgagtatatggaagtttcgtctgagcaacaactgttttttatgcgcgaggccgttgcattaggtgaaagggggaggatttttgctccccctaatccttgggtggggtgtgtgattgtaaaaaatggatgtataataggaagagggtggcacaaaggaattgggtccccgcatgcggaagtttgtgctttccaagatcaaactagctcattggtaggagcagatgtgtatgtcaccttagagccttgctgccattttggtaggactcccccctgcgtagatcttttgatcaaaagtaaggtgtcgtcagtttatattgctctgctagatcctgaccctcgtgtttgtaaaaggggggttgctcgtctgaaggaggcgggaatttctgtttatgtggggataggtcacgaagaagcaaaggcttccttgcaaccgtacttgcatcaaagagaaacggggttgccatgggttgttatgaaaacggccgcgtctctcgatggtcaaacctcggatcgtagagggatatcgcaatggatttcaggagagcaggctcggttagatgtaggaagacttcgtgctgagtcccaagctgtaattgtcggttcgcgtacggtgtgtttagataatcctcgtttatctgctcggatgccttcaggggatttgtacgagagacaaccgttacgagtagtggtggatagcagagggagtgttcctttagatgctcgggtatggaatccagattctggaaatgttttgcttgctacaacggaacagtgctctaaggagcatattcaaaaattagaagatcggggagtggaggtatggaaatcttctccccagcaggtggatctcaaaagacttttacaatatctggcagagaaaggatgtctacaagtgcttgttgaagggggggctcggttgcactccgctttctggcgtgagcatcttgtgaacgcaggtgtgatctattggggccccaaatttttgggggatcaaggtagtcctatgttacgagatcttcagttatgtttggataatgcagaacatgtgaaaatcacaaaaacttttttagttggagattctgtaaagacatgttttgaatgcgtggggagagaggatggatag

SEQ ID NO: 18886 - DNA, 1275 bp, Chlamydia trachomatis
atggttacatgtgaagccgggatagcttcggtacagcaagcgataaaagatatcgctgacgggaattttgtcatagttattgatagggaatctcgagagaacgagggagacttaattttagcaggagaaaaggtctcggcagaaaaaatggcctttcttttgtctcacacaacgggcattgtctgcgcttcggtcactcgtgagcaagcaagagttttggacctgcccgcaatggttcaagagaaccaatgtgcctttaaaacagcttttactgtttctgtagatgcttcgtcaggaattactacgggagtttctgcagcggatagaacgagaacagttcaattattatccgacccaacgtcaatttctcaatcttttgttcgtccaggacatgttttccctttagttagtcagcctggtggagtagtcaaacgtccaggacatactgaagcatccatggatctcatgcggcttgctgggatgtatccttgtggtatttttgctgagcttgtcaatgcagatcattctatgatgcggcaacaacagatactagattttgctgagcaacatggttttacggttattaccgtagatgatctgattacttatcgatggacctttgattctttagttgagcatgtttcttcagcacggattcctaccaaatatggggagttcttcatacatgtttataaatcgattattgatggaacagagcattttgctttagtgaagggagatattcgggaacaagaatccgtgcctgtgcgtgtgcactcagaatgcttaaccggagatgttttggggtcttgtcgttgtgattgcggagctcagttggatatggctatgcggtatattgcagaacagggcttaggcgttattgtgtatcttcgagggcaagaagggcgcggtataggttttgggcataaaattcaagcttatgctttacaagatcttggatatgatacggtagaggccaatctccaactaagttttcctatagatgctcgagagtatggagtagctgcacaaattcttaaggatctccggttgacaagcgtgagattgatcacccataatccaaaaaagttttttgagctacagcggttaggaatacacattctcgaccggattgttttgcccgtcatcgtctcttctgaaaatgagaggtatttacgaacaaaaaaagaccgaatggggcattggttgaatttccctgttcttaatgagtcggaggatgagtatgaaactgttgaaaggacttcctgttgctaa

SEQ ID NO: 18887 - DNA, 474 bp, Chlamydia trachomatis
atgaaactgttgaaaggacttcctgttgctaaggatgtgcgtgtagctatagtcggggcgtgctttaacgctcctattgctgatcgcttggtttccggagctcgagagacattttttgagtccggaggtagtcccgattctttgactgttgttcgagttcccggtgcttttgaaattccctgtgccattaaaaaaatgctctctaaaggaaatctttttcaagcaattgttgcctgtggagtcttaattcagggggaaacttcgcattatgagcatattgcggataatgttgccgcaggtatcgctcgattgtctgtagaattctgtctcccaatcactttttctgtgattactgctcctaatgtagaagctgcttgggaaagagcagggataaaaggcccaaatttgggagcttcaggaatgagaacggcgttagaaatggcgtcgctgttttcattaatagagaaagaataa

SEQ ID NO: 18888 - DNA, 2385 bp, Chlamydia trachomatis
atgagaaaagaacgaaagaaagccagcgtttctctttctccacaaacagtctttgctatcaaaacctgcatctatctagccttggcctgtttctcaggacttagtttatggagctttcagcataaccaaccttacacgcaaaattggataggtttgctcggatggtctcttagttctttcctattatataactttggagtagccgcctttctaatccctctttacttcggctttctttctttcttgaatatgaaaaaaactcccgccccactagcctttagaaaggcggtagctttcggcactgttcctgtttgttgcgccatactgttatccatggtttctcctgcacaaaatcttccccagtttttggctacaagagttcctatggttgttatggaccttcaacctccaaaagcttatttagggggcattcctttttacctgctatatgatgggaactctttttccttaaaactattaattggcgcagtgggaactggattaatttttctcgctatattgctttgcgcaatctgctaccttattcccaagtcttttgtgttaaaaaaaaaagcacttctagacgctctcctcaaatttctcaaaaacaaatcttacgcatgttggagcgcctgcaaaaagcttttaaaaaatcttgttaataataagtcctattgtcccgagccttcacttcgagtacccgctccatcttctttcgccaaaaaagaagttttaaaacttccaacccccgtgatttccctccctctggaaaataaagacctccatgatggcgactcctctaatcgcactatttttctctctccaccacatcctgcgaaaagaactctggctcctcaaaagaaaccggatcttccagaccttttacaaaaaagaacttcttcaacgcctataccatcttcatcgccatctccctttatagtggcaggagaggctcccgatttaccgcaataccatctgttaagtaaacggaacatacgacggccggaatcgcttttagaagaattaaaaaagaaagccgctattttacaacaaactttggcaagttttggcatagatgcttccattgggaacatttgctccggccccacccttgcagcatttgaagttctccctaatacaggagttaaagtacagaaaatcaaggctctagaaaatgatatcgcgttaaatttacaagcttccagcattcgcattattgctccaatcccagggaaggccgctgttggaattgaaatccctaacccagatccccaacctgtaaacttccgtgatttactagaagactaccaaaaaggtacccagagacttcaagttcctttgctccttggaaaaaaagctaatggagataatttttggactgacctagcaaccatgcctcacttaattattgccgggaccactggatctggaaaatctgtctgtatcaacacaattgtcatgtctctcatcatgacttctccccctacagatgttaaacttgtgattgtagaccctaaaaaagtagaattgactggttactcacagctccctcatatgttaacgcccgttattacggagtccaaagaagctcatagcgccttaatttggcttgttcgagagatggagcttcgctatgaaatcctacgatttttagggctacggaatatccaatcattcaactctcgaactcgcaatgtagatattgaagcttcttacgacaaagaaatcccagaaaaaatgcctttcattgtcggtattattgatgagctctcagatttacttctttcttcctctcatgacatcgaaacgcctatagtgcgtttagctcaaatggctagagccgtggggattcacctcattttagcaacacaacgtccttctcgagacgtcatcacaggattaatcaaagcaaacttcccgtctcgaattgctttcaaagtcgcgaacaaagtgaatagtcaaattattatcgacgaaccgggagcagaaaatttgatggggaacggagacatgctagtggtttctccaggatcctttgcacctttgcgcgtacagggagcctatatttgcgatgacgatattaacaaagtcattaaagatttatgttcaagattcccttgtaagtatgtaattccttcatttgatacgtacgacgactcctcttctatggatccagagagtctagatcctttatttaatcaggcaaaaactcttgtattgcaaacagggaatgcctcaacaactttcctccaaagaaaactcaaaattggctacgctagagcagcaagtattattgaccagctggaggaagcgagaattgtaggcccttcagaaggagccaaaccacgtcaaatactggtccaactatcaaatcaggaagattaa

SEQ ID NO: 18889 - DNA, 369 bp, Chlamydia trachomatis
atgctttcaatgcttatcctttccgaacttagctactcggctatgctcttggcaaaacaaccgacacaccattggttcgtccattccggtcctctcgtactaggaacagctcctctcaagtatcctgcgcccacgaaggatagagaccaaactgtctcacgacgttttgaacccagctcgcgtaccgctttaattggcgaacagccaaacccttgggaccttctccagccccaggatgcgatgagccgacatcgaggtgccaaaccgccacgtcgatatgaactcttggtggcgatcagcctgttatccccggagtaccttttatccgttaagcgacggcgattccactttccacggccggatcactaa

SEQ ID NO: 18890 - DNA, 1296 bp, Chlamydia trachomatis
atgtcttggctttcaagcctgtaccctatttttattgcttctaccgcattttgtgctttaggccttcttcttgtagccatcatccttctttccaggaaatttcttatcaaagtgcatccctgtaaactgagaatcaataatgatgactctcttactaaaactgtagatagcggaaaaacgctcctttcctctttgcttgattctgggattgctatcccttctccttgcggaggaaaagccgcatgcaagcaatgtaaaattcgcattacaaaaaatgtcgatgagccattagaaacggatcgctctaccttctcaaagcaacagttggaacaaggctggcgactttcctgccaaacgaaagtacaacatgatatgaacttagaaattgaagaacgttatttcaatgcttcatcctgggaaggcacagttgtatcaaacgagaatgttgcgaccttcattaaagaacttgttctgtctgtagatcccgcacgtcctattcctttcaaacctgggggatatctgcaaattaccgttccctcctataaaactaatacctctgactggaaacagactatggatccccaatattatagtgattgggaaaccttccacctctttgataaagtgattgatcaccaatctttggatgccaactctgcaaataaagcatattctctagcttcttatccagcagagctccctcttatcaaatttaatatccgtatcgcaacgcctccatttataaataaatcccctgatccaacgattccatggggagtctgttcctcctatatattctccctcaagccaggtgataaggtaactgtatctggtccttatggcgaatcattcatgaaagaagataaccgtcctgttatcttcctaattggaggagctggctcctcttttggaagaagccatattcttgatttattattaagcaaacatacaaaccgagagcttacgttatggtatggtgcccgctctcttaaggaaaatatttatcaagaagagtatgagaaattagaaaaggaatttcctaactttcactaccatcttgttctatctcaacctttgcaggaagacttagataaaggatgggacagtaaagacccaatcaaaacgaactttttgtttaaagcttttgagctcggacaactgagcaagcttcccaatccagaagactatctatactatgtttgtggtccagcacttcacaacagcagtattcttactttacttgataactacggagttgagcggtcttctattatcctggatgattttggaagctaa

SEQ ID NO: 18891 - DNA, 3243 bp, Chlamydia trachomatis
atggatttcgacccgactagcataaatttttcacatttttctttattaaaagactccaagctcccttctttagttgaaaatcttcactcgggagctaaggcttttattgtagcgaaactattcaaagaactgcgacgctctattgttattataacaacacctgcaagagttgatgatttatttgaggatctcacaactctcctcaaagagtctcctcttgaattccctacttcggagatagatttatctccgaaactggtcaatattgacgctgtagggaaaagagatcatatcttgtattctcttcaaaaacagtgcgcccctgttgtctgcatcaccacactaaaagctttgctagaaaggactccttctccagaatccttgcttagcgatcatctcgaacttaaagtaggagaagagctcgatcctgataccttagtagatctttgcaaaaatctaggataccgccatgaagctcttgctagagaaaaaggtgattttgcttttcgaggagggattgttgatattttccccttatcctcttcggaacccttccgaattgaattttggggagaccgcatttcttctattcggtcttataacccttccgatcaactttctactgggaaaatttctcaaatcacaatctcttctgctacagcaatcattccaacagacaagttatctcattctcttttagattatttcgaaacgttccccctctgtatctttgatgaggtttcttcacttgaagataatttctcagatattgctgggattctatcctccttaccgaaacgctttattcctattcaagatctgtgtcgacgaatactaagagaatctgttccgctattctttgaagaaaatctatttccaaatcttcttacacataaagataccgggtgtgctctagaagtttttcatgaaaaaatctctgttcaaagagtttctttgccatttatttatccccatgcgctaatagaaacaagccatgaacagaaccctctgcttgcatttttaaaaactttccaagacttttgctctgatcgtacactctctttagctctatatagctccaatactaagtccttaaaagaagcccatgatctaacagcgagctttatcaaaaagcctcaaatttatgattgccctaaagcactttcttctagttttgctttagtagaatctgggttcgcagctatttccctttctgaattcgctgctaataaggttctccgcagacaaaaacagcgaaactatttttcttccacaacagaagaagtatacgttcctgtcccaggagagaccgttgtccatttgcacaatggaattgggaaatttatcggcatagaaaaaaaacctaatcatctcaatattgaaacagattatttggtcttagaatatgctgataaagctcggctgtatgtcccatcagatcaagcttacctaatttcccgctatgttggagcttcagaaaaggcgcctgatctacatcacctaaacggagcaaaatggagacgctcccgagagctttctgaaaaatctgtaatcctttatgcagaaaaactcattcaaatggaggctcaacgctcaacggcaaattctttcatttatcccactcatggcgaagaagttatcaaatttgccgaaagttttccctatgaagaaacccctgatcagcttaaggctattgatcagatctacgcagatatgatgtctgataaattaatggaccgccttatctgcggggatgctggatttggaaaaacagagatcatcatgcgcgcagcagtaaaagcagtgtgtgacggccaaaagcaagtgatcgttatggttcctacaacaatcttagctaaccaacattttgaaacattttcccaacggatggccggccttcctattacaatcggattactttcccgattttctcaagggaaggcaatgaaaaaaactttggaggatgttgctcaaggaaggattgatatcttaattggcactcataaagtcattaataaatctatagaatttcacaatcccggacttcttatcattgatgaggagcaacgttttggagtaaaagctaaagatgctttgaaagagcggtatcccaccatagactgccttactgtttctgcaactcccatcccaaggactttatatctgtctttgtcgggagccagggatttgtctctcattacgatgccgccgctagataggctccctgttagcactttcgtcatggagcacactgaagaaaccttgtctgcagcgatacgacatgaacttcttcgaggaggccaagtttacgttattcataatcgaatagagggtattttccgtttaggagaaaccattcgaactttgattccagaagctcgtattggggttgcccacggacaaatgcattcagacgaacttgctaacattttttacaaatttaaaactcaacaaaccaatgttctcgtcgccacagctttaattgaaaatggtatcgacattcctaatgcaaataccattttaatcgatcatgcagataaattcggaatggcggatttatatcaaatgaaaggtcgtgttggtcgttggaataaaaaagcctactgttactttctcgtcccccatttagatcgcctctcaggtccagcttctaagcgcctagaggcattaaataaacaggaatatggaggaggaatgaaaatagctcttcatgatttagaaattcgaggggctgggaatattttaggaacggatcaatctggacatattagcgctgttggctttaacctgtattgcaaattactgaaaaaagctgtggccgctctgaaacataagaaaaaacccatgcttttccatgatgatgtgagaattgaattcccttatcattcgcgtattcctgaagactatatcgacttagcgtctatgcgcatagagttctaccaaaaaattggaaatgcagaatctaaagaagagttagaagctatagaagaagaacttagagatagatttggacctttgccagaagaagtttattggttgtttgctttagcacaaattcgcttaattgcactggaataccatctttctagtattaaaggaacagggaacgctttatacatccagcaatatcatgataaagagaagcaggttcaaaaaacgttaccttattctttgtccccaacaccaacacttttggtgaaagaggtccaagaatctatagaaaaagctttccccaaaaaataa

SEQ ID NO: 18892 - DNA, 2628 bp, Chlamydia trachomatis
atgctgagcaacactcttcgatccaacttcctaaaattctatactaacaggaatcacactcctgtcgcatcttctcccgttttcccatataatgatccctcgattctttttacaaacgctgggatgaaccaattcaagaatatctttttagggaaagaacaaactagttacacaagggcaacgacttcacaaaaatgtattcgtgctgggggaaaacataatgatttagagaatgttgggcacacatcccgacatctcactttttttgaaatgctaggaaatttttccttcggggattactttaaacaggatgctatttcttttgcttgggaagtctctctttctgtttttaactttgatcctgattttatttatgccactgtgcatgaaaaagatgatgaagccttcgctctttgggaaaaatatcttccaaccaatagaattttccgcctaacagataaagataatttttggagcatggcagataccggtccttgcggattctgctctgaacttttatttgatcggggagagaaatttggaaaagcaacctctcctcttgaggatgctgatggggagcgatttttagaatactggaatctagtattcatggaatttaacaggacttctgatggaacacttctagctttacagaaaaagtgtgtcgataccggagctggattagagcgcttggtttctttattatctgaaacagatactgtattcgaagcggatgttttgagacacctcattgctaaagtagaaaatttatctgaaataacctactcaccaacggaatcaaaaggctctgctttccgagttatagcagatcatgtacgttccctttctttcgcaataactgacggacttttaccaggcaacactgagcgtgggtatgttttaagaaaaattcttcgtcgtgctgtaaattacgggaaacgccttggatttcatcgaccgtttctggcggagattgtgccttcactaatagagacgatgggcgaagcttatcccgaactccaagcagccgagacacaaattcaagaagtactcaccactgaagaagaacatttcttcaaaacattacaacgtggggggaatcttcttcatcaagtactaaaatcttcggcgtctttatcgaaaatttctggagaagatgccttcaaactcaaagatacttatgggctacccatcgatgaaattgcgctactagcgaaagaccataactacaccgtagatatggacactttcagaaaactagaaatggaagcaaaagaacgctctcgcaaaaacactgttaaaaacaaaaatgacagcgattccatttttcaagatgtagatccaactaacacgtccgaattcgtgggatacgatatgctttcctgcgatactttcattgaaggaattgtcaaatataatgagattgcttcaactttggaagaaggcgaggaaggagcaatcattctacgtaccacaccattttatgcagagaaaggtggtcaagtcggagattctggggaaatcttctgcgaatctggaaccttcttagtttctcatacaacaactcccaaagccggactgattgcgcatcatgggaaactttctcaaggaagcttacagacaacaatggctgtcacagcacaagtaaaccaaaatcttcgaaaaaaaatagctaacaatcataccgggtgccatctgttacacaaagctcttgaggtatctcttggggaacatattcgccaagccggttcctatgtagactcccaaaaaattcgtttagatttttcccataataaagcgctttctccagaggagcttttaaccatagaaacccttgttaacgagaaaatccgagaaaacgttcccgtaacaattcgtgaagctttgtactctgatgtaatgaattcttctgaaatcaaacaattctttggagataaatacggagacattgtccgtgtggtttctgctggattctctcatgaattatgcggaggaacgcacgctcgagcgactggagacattggttatttcagaatcactaaagaacatgctgtttcaacggggatacgccgtatagaagcaacgacaggggaagacgcagaaaatattgctcgtggacaagataccgatttgaatgaaatagcaaccattattcaatctcccaaggatcaactccttgtcaaactccgtaatgttatggaagaaaagaaagatttagccaaacaactggctaacctggagaatcaacttgtccaacagcaggtaaaaagcttattaacctcctgcgacaaagtcaacgaaacctcttacttagtttaccatctaacagaagaggaaggacaaagaatccagcattatgccaatactctgcataaagaagtcccagcaaaattcatttctttatgggtaacagagaagaatgaccgctatattgtcttagtcagagtttctgatgatttggtaaaacaaggaattgacgctcaagccttacttgaagaattgctagctccgtacggaggccgttgcggaggtaaagctgtttccgctcaaggaagttccaaagaactccctcaaatagaagttcttaacacaattttaagacaatggatttcgacccgactagcataa

SEQ ID NO: 18893 - DNA, 2001 bp, Chlamydia trachomatis
atggctggcaatagtgaattggatatagatatcttggaaaagattgcagggactattaaacagttgagtatagagagtattcaaaaggcttcttcaggccacccaggaatgccattaggatgcgctgagatcgcagcatatttgtatggttgcgtattgcgatataattctaaggattctcaatggatgaatagagatcgatttgttctatctgcagggcatggttctgctcttctttattcttgtctacatttagcaggctttaatgtgaggttagaggatcttcagcagtttcgacaacttcactcccaaactcctgggcatccagaatttcgggaaacggatggtgttgaagcgacaactggacctttagggcaaggaatagggaatgctgtaggaatggctctttcattgaagatgttgggatctagattcaatcagtcttccacgtccatttttgatgctaaggtctattgcttggcaggagatggatgcttcatggaaggagtaagtcatgaagcttgtagctttgcaggttccttgggattggataatcttattttaatctatgattataatgagattattttagatgggactcttcaagatgttagtgttgaggatacgaaacaacgattcttagcctatggctgggatgtttttgaagccaatggtcatgattttgaggatttacatcgggtattttctcaaatcaaaaaagggcaacaaaaacctactttgattattgcacatactattattggtcatggatctcctaaagaaggaacgaacaaagctcatggatcccctttgggagaagatggagtcgcgcaaactaaaagtttttggcacctgccagaagaaaagttttttgtcccttcatctgtgaagatgttctttgcagcaaaacaacaagaaggacaaaaattacaggaagaatggcaggagcgcttccgggtgtggtcaaaacgattcccagaacaacaccaggaatatcttaagttaactcaagaaatttccattcaagatcttgaagtattattgaatcttattgatatgccagagtctatagctggacgggctgcttcaaacaaagtaatccaggttttggcagagaatattccatctctaatagggggatcggcggatctttccagctcagatggtacctggatagctaaggagactgctgtcaacgcttctcattttcaaggtcggaatattcgctatggtgtacgagaattcggcatgggcacgattatgaacggactcgcgtacagccaggtatttcgtccttttggtggaacatttttagtattttcagattatttacgtgcagcgattcgactagcagcattgtctaagcttccggttatttatcaatttacacatgattctatttttgttggggaagatggccctactcatcaacctatagagcaaattatgtcattacgtgcaataccaggattaagggtagtgcgtcctgcggatgcgcatgaagtaaaaggagcctggttatctgcattagaaaactcagggcctacagctttgattctatctagacaaaatctcccaactcttaaagagactaaacggtcgtttagagatggagtaggaagaggagcttatattttagttaaagaagaagggggaagcccggactatacattatgcgcttctgggtcagaggtacatttggcaatggaagttgcgcaaagcctcatggctttggataagcgagttcgcgtaatttcattcccttgttgggagttatttgagcgacaagaccccgagtatcgtgaatctgtgattggtggggacttaggattgcgtgtctctatagaggccggatctgctttggggtggtacaaatatataggcagtaatggcttgtctattgctatggatgtgtttggtatgtctggagctccccacgaagttgctgaaacttgtggttttactgtggatagtattgttcagagaattctttctgtttaa

SEQ ID NO: 18894 - DNA, 870 bp, Chlamydia trachomatis
atgactgaacctcataaaaaaattagcgagggaacgattgctcgcgacatgttggagcgctatacaggctctaccattcaagaatttcaaccttaccttcttcttacgaattttgcttattacgttgatgtttttgccgaaatctatcaggtccctgtttctcgaggatctatgttttctgcagctcatgctccccaaacctgtacctccattattgattttaaattaggatcccctggagcagctcttattgtagatctttgttctttccttcctaatgcactagctgctgtcatgttaggtatgtgtggaggtctacgttcccattatcaagtaggagattattttgttcccgttgctagcattcgaaaagatggaacatcggatgcttactttcctcctgaagttccagcattagctaatttcgttgtacaaaaaacgatcacaaacattcttgaagagaaaaatcttccctaccatataggtatcacccacacaactaacattcgattttgggaatttaataaggaatttcgtcgtaaactttatgaaaataaagcacaaaccgttgagatggaatgcgcaactttattttctgcaggataccgacgaaatcttccattaggagcactcttgcttatctcagaccttcctttacgaagagacggtattaaaacgaaacaaagcagctcagaagtcttagctacatacactaaaaaacatatattaacaggcattgaagtttttgcttccttgcaagaaacagtcgggcctggcattaagaaaacaaaaggcttgccacatatggagtttgggcaagccgatgattctctgtctgagcaaactggaatttctgacggagacttttaa

SEQ ID NO: 18895 - DNA, 873 bp, Chlamydia trachomatis
atgcaagaaaaaccctcgactgtctttagactgatccattgctccgatatccatttttgtgtactccctaaaaatccttttcaatgcttcaataaacgtttcaaaggattactaaggcagcttgtaggaggggtgtcctttcgagcccccgcaatctcccagcggttcccccaacttgtcgctcaactcgaagcaaatggagtctgcgtaactggagatgttaccattaccgctcttgattcagaattccgcttagctaaagaatttctctctcgcattgaatccattgcccctgtgtatatagttccaggaaaccatgacgtatacacttatcgagcattaaagaaacaaaccttctattcttatttccctaataaagaactccaaacgcatcgcatagcctttcagaaactcacccctaactggtggttagttctattagactgttcttgctttaacggttggtgtgcagcaaatggagaagtaactgattctcaaatcgttgctttagagcaatttcttgcttctcttccctctttggaacacgtgatcgtagcaaatcactatcccttatctcccacaacaaggcctgctcacgatttactaaattacgctcctctaaaatctttattaatgaattccccttctgtacggatgtacctacatggacacgatcatcatgtagaaattgatcatcttccgcctttggttgtaaatagcggatcattaacgctgccttcgaatgcacgctttcatattatagatctgtatccagagggggaataccgaatttctactgcatcgctaaccaacctaacagaaacagactccccattaaaaatttctattgaagaaacctcaatctctttataa

SEQ ID NO: 18896 - DNA, 1359 bp, Chlamydia trachomatis
ttggttatgcgccctattttattaaaagagtggtcttctttgttattagatattgacattccttgctcagggaagaaagtaacgggagtcgctattgacagccggcttgtattgccaggggatgtattttttgctcttccagggaatcgaactactgggcacctatttttaaagcaggctgcgcaatccggagctgttgctgctgtagtagcgagtgattatcgtggaccagattatgggttacagttgttacatgtggcagatcctagagaagctttaagagcggctggacgaactcagggagctcttttccatggagaagtgatagggataactggctctgtagggaaaacgacaacaaaaagttttacccaacaattactttctcctttttacaaagtctttgcaagtccgaaaagttataattctcagctcactctacccctaagtatattaacggccgatggagatgaggattttcttgttttagagatgggagtttctgaacccaataatatgaaggatcttttagatgtaattgagccttctattggagtgattactcacatcgacgttcagcatgcaatgaattttgtggataaaggggctcaaggtattgctgaagagaagagtttgttgttagagagatgcgggattcatctattgcccagagattcttcatggtttaactttttcatgaaaaagaatgctgcagctgatcagttttctttttctatgaataatgaaacagcagatttttactatcgagccattcattccgaaggggtcctcattagtgctcccgatggggatattgagctgcctgtagtgttcccttatactcccgcttatatgaattttattattgctgtagctttagcttggcttactaacgttccaatggatcgtttagaacaggcaagtcaatctttatttttgccatctatgcgctttgaacaacaggaacacaatggtattcgaattattaatgatgcatacaatgcaagcccagatgcaatgctagctgctttagatgctgtccctatcccctctgagggaggtaagacagtatttatcttgggccatatggcggagttaggaagatattcggacgaatgtcatattgctgtagcaagaaaagctgtgacaaaagcacacgtagtttttttcgttggagaaaagtggtcccctgttagagaggttgtttctgatgcaaattgtcagatagagttttacggttctgttagcgagattatgcatgttgttaaatctttagtgcgacggggagatgttgttctgctcaaaggatcgcgtagtttggaattggagactttgttgccatgtttttccatctcgtga

SEQ ID NO: 18897 - DNA, 1008 bp, Chlamydia trachomatis
atgccccccctattttgtgttttgaaagcttttttcatcggtttggttgttagccttatactggtgaaacctcttatttggttaaaaaaacaaggcttgcaagatcggattcacaaagatcattgcgaaaaattggaaaagctacacaaaaacaaagcacatatccccacagcggggggaatcatttttgttctttctgtcgttctctcaattcttttattattgccttgcaatctttggtcgacatggtttcttgtcggggcaacgctgctgtggggggctttgggatggcgtgatgatcagataaaaaataagcgtaaagtaggtcatggcttgtcggctaagcgtaagttttttatccaaaattgtttagcgatcggaaccgttcttcctatcatgatcgcttatggagaaagctttttatgtatgcatcttccctttgtggggatagtatctttaccacattgttggttgggctatctgtttagtttttctattgcagtactagcaattgttggaaccagcaattctgttaacctgacagatggattagatggtcttgctgcaggatctatggtgatagcttgtttgggcatgcttatcgtgacttttgcttatggagccccttgggctttcatttctggggtgcttttagcaactttagcaggaagttgtttaggatttttatactataataggtctccggctcgcatatttatgggggatacggggtctctatttttaggtgggatgctcgggatttgtgcggtattattacgagccgagtttatgctcctctttatgggagggatttttgttcttgaatccttgtctgtcattttgcaggtggggagttgtaaattaagaaaaaaaagagtttttctttgctctcctctacatcaccattatgaatataaagggtatccagaaaaggttgtggtgagaaatttttggattattgagttcctttgtgttgccattggtattttcgctgtattttggggttag

SEQ ID NO: 18898 - DNA, 1302 bp, Chlamydia trachomatis
ttgtgttgccattggtattttcgctgtattttggggttagaggataagcgaatgggattaaaacgtgttgtagttattggcttaggactatctggtaagtctattgcgcgtttcttagctcgaaaaggcgtgtatgtgttgggagtagatagttctattcaggcgttgcaacattgtccgtatattcatgaaaaattgttagaaacagatgagtttcctacacaggtagattatgttgtacgttctccggggatttctaaggatcatccttgggtcaaggctgcaagagctgctcaaatctctgtagtgacagatattcaactagcttttcagactaaggagtttatagaacagaagtcttttggaattacagggactgtagggaaaacgaccacaatattatttttagaatatttgctaagaaaagcgggaatcccagcttttgccatggggaatgtgggagtccctattttggatggtatgcagaattcgggagtccggcttgttgaaatgagttctttccagctcgctgatcaagaaacctcttatccggtcttatcagggggaatgattcttaatatctcggataatcatttggattatcacgggagttttttagagtattgtcaatccaaacagaatctctctttatgtatgaggaatccagaagatctttgggttggggatcagcgtttttgcgggcgtagttactgggaagaagtgcaaaagtacatgcgtttactagataaagaaagtgcattaaaaccattgtacttgcatgataagtacaactactgttgtgcatatctgcttgctcaagcagaatttccgatagctaaatccctttttatagaggccgtagctacttttaagaaaccttcgcataggatggaatatttaggggaaaagtgtggtgtgcattatatcaatgatagtaaggcaactacagtacgcgctacggaaaaggctcttttgagcataggaagtcgggcaattgtgattcttgggggtagaaataaaggatactcgttcgtttccttgctgccttctttgcgaaggtttgcgaagagtgtggttgctatgggagagtgtgctcaggagatagctcaggatttggacggcttcccagtaacagtagtgagaaatttacatgaagctttgctatgcgctgaagagcaagcgattcccggagatgttgttttattgtctccagcttgcgctagctttgatcaatttcgtagctatgaagagcggggagcgatatttaagcagttggttgggatggaagaggttcttttatga

SEQ ID NO: 18899 - DNA, 1224 bp, Chlamydia trachomatis
atgagcagaaagctcgtaagttgcgtcctggagatagattacgaattcgatagatctcaggcaattgttatgaaatggttcctgatttcctgtttattaggaattttttctcttgggctgatcatggtattcgatacctcgtcggcagaagtgttggatcgggctttgtcgtgtagcacgcataaagctttgatccggcagataacctatctggtgctagggctctctgttgcgtcgttcatttatattttaggatggaaagattttcttaagatgagccctgtactcctcatcatggtggggatggctttgattttagtgcttattccaggtgtcggtgtttgtagaaatggagctagacgttggttaggagtaggacagctaacattgcaaccgtccgagtttgttaaatatttaattccttgtgttgctatcgaatgtttgaccacaagagtcgctattcgtagtagttttaagcgattcgttgcttttgtttccttgctatttattcctatttttttgattgcgattgagccggataatggatctgcagcggtaattgctttttctttaattcctgtgtttattgttacagcggtacgattgcgttattggctcgttcctttgctctgtatcctttgtatcggaggcatttttgcttatcggcttccttatgttcgaaatcgtttacaggtttatttgcatccagaattagatattaaagggagagggcatcaaccatatcaagcaaagatcgcagcaggatctgggaagttattcggtaaaggtcccggaaagggattgcagaaattaacctatcttccagaagctcagaatgattatattgcagctatctatgcggaagagtttggttttgttgggatgctcctattgattcttctctatatgggatttatttatagtggatatgtcattgctatgagggcttcccttttatctggagcagctcttgctatttcaattactgtgattattgggatgcaggcatttatcaatttaggagttgtttctgggttattgcctagtaagggagtgaatcttcctttttttagtcagggaggatcttctctaattgctaatatgtgtggcattggattgctattaaggatatgtgatgaagaagatcagcaaggttgtattggcagtagggggaacagggggacacattatccccgctttagcagccagagagactttcattaa

SEQ ID NO: 18900 - DNA, 1062 bp, Chlamydia trachomatis
gtgatgaagaagatcagcaaggttgtattggcagtagggggaacagggggacacattatccccgctttagcagccagagagactttcattaaggagaaagtagaagttctacttttaggaaaggggttaacgcgtttcttggaaggagaaccagatgtattgtactacgatattccttctggatctcccttttctcttcgtccaaatcaaatgttttctggagcacggcagttgtatcaaggatatacggctgcgcttcggatgataaaatctttcgctccagatgtagcagtaggatttgggagctatcattcccttcctgctattctcgcttctatcagaaagagaattcctctatttcttcatgaacaaaatgttgttccagggaaagtcaacaagctgttttctcattttgctaaaggggtagggatgtctttttcggcagctggagagcattttcgttgtcgagcagaagaggtatttcttcctatcagagagccatcagagcagatcgtttttccagaagcttctcctgtaatttgtgtagtaggaggatctcagggagcaaaaattttaaacgattgtgtccctaaagctttggcttatgttcgtgaaaaacatgcgaatttatatgttcatcatattgtaggccctaaaggagacctggaaggggtttctcgagtttatcaagatgctggaattcagcataaagtaacgttttttgaaaaaaatatacttggagtattgcaagcgagtgatttagtaattggaagggcaggtgctacgattcttaatgagttgctttgggttcaggtgccagctattttgattccttatccaggagctcatggacatcaagaagcaaatgcaaaatttttcacacaaactcttggtggtgggaccatgattttgcaaaagcatttgacagaagaaagtttacgtaagcaggttttgcttgctttagatccagcaactagtgaaaataggcgcaaagctatgctggatgctcaaaagaacaaatccttcaaatcattatatcagtttatctgcgaatctctatag

SEQ ID NO: 18901 - DNA, 2502 bp, Chlamydia trachomatis
gtgaaaataggcgcaaagctatgctggatgctcaaaagaacaaatccttcaaatcattatatcagtttatctgcgaatctctataggctaacgatgaaaagcttgtgttaccacttcattggtattggtgggatcggaatgagtgctttagctcatattctgcttgaccgaggatatagcgtatcagggagtgacctttctgaagggaaaatagtggaaacgttaaaaaataaaggcgtgaagttcttcttaggaaatcaagaagagcatgtcccggaagaatcggtagttgtatatggttctggaatttctaaaaacaatcctgaatttttagctgctctgaataaaggaaaccgtcttattcatagggctgaattattagcagagcttacaaaagagcaaatttctatctttgtcacaggaagtcatggaaagacaacggtttcttctttaattacagtcatcttgcaagaagctgggaaaaccccttcttttgcgataggagggttaaatggagaagggatcaatgggagttcaggatctgagtattttgttgcagaagccgatgaaagcgacggatctattcggaattattcaccagaattttctgtaattaccaatatagacgacgagcatctgtctaattttggtggagatcgggagcgtttgcttgcatctttacaagatttttctaccaaaactcgtcagatttgttggtacaatggagattgctctcgattgcggtcttgcttggtaggacatacatttggatttacctcttcttgtgatttacatattttaacttatcgacaagaggggtggagatcgttctttacagtaaggtatcagaacgttttatacgaggatgtggaagtacggttggtcggtgagcataatgtgatgaatgctgcggcagctatgggagtagctttgtcattaggaatagacgaagatacgattagggatgctttgcagagattcccaggggttcaacgacgattacagaggaagaattcttcagaggtctttcttttcttagaagattatgcgcaccatccttctgagattgcctgtacattgcaagctgttcgctctgccgtgggatcacgacgcgttttagccatttgtcagcctcaccgattttctcgtttaaaagagtgtatgggatgtttcccttcggcattcaaaggtgctgatgaggtgttattaacagatgtgtacagtgcaggagaggcagaggaagatgtctcttataaagagttagctcagtctattagtcgggagtctttggtaacatgtgcctatgttccttttagtgagttacagggctttttagaaaagcatattcgtgtgcatgatgtttgcgtggcattaggtgctggtgatatcgaggttttaggtgagagcttacgagattttgaaccgaagaaactctctctaggacttatttgtggtggaagatcttgtgaacatgatatttctattctatctgcacaaaatatcgcaaagtatctttcgcattcgttttatgaggtacagtatttcttaattacccgtgaggggttatggaagactggttcttcactagaattgtcagaggagacaggaaaaaccatttttgatccagagatagcaggaaaattaagtaaggtagatgtcattttaccgatattgcatggcccttatggtgaagatggggctatgcaggggtttttagagactattgggaagccctatacggggccttctttagtttttgctgcaataggaatgaataaagtgttaaccaagcgttttatgagcgatttaggtattcctgttgtgccttatctccctctgacattaaagggatggaagcaagatcaagagaaatgtttagctcagataaaggcggctttttcattcccaatgtttgtgaagtctgtgcatttgggatctagtattggcgtttttgaagttcatgatactaatgagttgcgagatgcaattaatgaagcctttgttcgagatgatgacgtttttatagaagaaagtcgtttgggatgtagggaaatagaggtttcttttttgggcgatggatctggagtcttttttgttgcaggaatgcatgaaagacgaggcagaggcgggtttattgattatcaagaaaagtatgggctaagtggtagggctagtgctcagatcgtatttgatgtagatctttctaaagaaacgagagaacaattgcttggagttgcagagaaaatttatcgtctattacaaggaaaggggtcttgtcgtattgacttttttgtcgataatgaagggagcttttggttatcagaaatcaatcctattcctggtatgacaacagcaagccccttccttgctgcttttgttcgtaagggctggaatcgcgaacaaattgtgcatcaacttgttatagatggattacaacgattcgaccaacgccaacgcttgatatcgacacctttaatagatcaagcgttggctgctcggtaa

SEQ ID NO: 18902 - DNA, 1257 bp, Chlamydia trachomatis
atgaacaaaaaacgtgtagtcgttacgggaatggggatagtctcctgccttgggaatgaagtagaatctttctatgatagcctgttggctggaattagtggggtgcggacaatcacatctttcccctgcgatgattatgctacgcgttttgcaggttggatagaggaatttaactcggagccttatttagataaaaaacaagctcgacgagtagacccttttattacatatgctgttgtggctgcaaagaaagcaatagctatgtctcgttgggatcaagagactcttcctgcgaatcctcatcgttgcggagtgatcattggatctgggatgggggggcttcggacccttgatgaggggatcgaaaaattatcagcagggaatagaaaactgtctccattctttattccttatatcattactaatatggctcctgccttgatcgctatggattatggtttaatggggccaaactattctatttcaacagcctgtgcaacggccaactattgtattgatgctgcttatcaacatctcgttgaagggcgtgcggatgtcatcgtttgtggagggactgaggctgccattaatcgtgttggcttggctggatttattgctaatcgcgcattgtcggaaagaaatgatgctcctgaacaggcatcgcgtccctgggaccgggatcgggatggttttgtgctaggagaaggggctggcgtcctggtcttagaaaccctggataatgctttaaaaagaggggctccaatttttgctgaagtgcttggaacctatacaacgtgcgacgcttttcatattactgctcctagagatgatggtgaaggaatcactgcctgtatactaggagctttgaataaagctggtattcctaaagaacgggtgaattacattaatgcgcacggaacttccactccattaggagatctgtcagaggtattggctttgaaaaaggcttttggaagtcatatcaaaaacttgcgcatgaattcgaccaagtctttgatagggcactgcttaggagctgcaggtggggtagaagctgttgcgactattcaagccattcagacagggaagttgcacccaacaatcaatatagaaaatcctatagcagaaatagaagagtttgatgtagttgcgaataaatcccaggattgggatgtggatgttgctatgtcgaattcctttggtttcggcggacataattcaacgatattattttcgaggtatgaaccttcattatga

SEQ ID NO: 18903 - DNA, 1575 bp, Chlamydia trachomatis
atgtctgcagaagttgaatatttgcaacacgaagattatttgtatagaaccattaagttaaaagaaatcagagaattaggaataaatccatacccctaccagtacgctgattgtgttgaggtacaggaaattcgtaatcgggttgtagataatgaattgggggatagcgaagctgcttttcggaaagagactcctaaagtgcggtttgctggaaggctggttcttttccgttctatgggtaaaaatgcttttgggcaaatccttgatagggatgctaaaattcaagttatgtttaatcgagatttttctcaggtagcagggttacctgctgattctgaaatttcttccattaaatttattgagaagaagctggacttaggggatatcttaggtatagatggatatcttttcttcacacattcaggagaactaacagtccttgttgagactgtaacgttgttatgtaaatctttaatttctctgcctgataagcattcaggattagctgataaggaaattcgttatcgtaagcgctgggctgatcttatttcatcagaggaagttcgtaaaacatttttagcaagaagtcggattcttaagttgattcgtgaatacatggatcaacaggattttttagaagtggaaacccctgtactgcaaaccatctatgggggagcagaggcaactccttttgttaccacattaaaagctctgcatacagaaatgttccttagaatttctttagagatcgcattgaagaaaatccttgttggggggatgtcccgtgtttatgaaatcgggaaagtgttccgtaatgaggggatcgataggacgcataatccagagttcacgatgatcgaggcatatgctgcttattgggattacaatgatgtgatgaaatgtgtggaaaaccttgttgaatatgtcgtacgagcattgaataatggagagacaaaagtacagtattctcatttgaaatccggccctcagattgtcgatttcaaagctccttggattcgtatgaccatgaaagaaagtatttctgtttacggaggtgttgatgttgatcaatactcagagcatgagttgcgagacattctaaaaacacgaacagctcttcctgagaaagcttatgtttctgctactcgaggggaaatgattgctttgctatttgatgagctggtgtgtgataagcttattgcgccacatcacattacggatcatccattagaaacaactcctctttgcaaaacattgcgttctggggatgaaactttggtggaaagatttgaaagcttctgtttagggaaggagctatgcaatgcttactcagagctcaacgatcctttgcaacagcgaaaactattagaagagcaaatgcggaaaaaggctttgaatcctgatagcgaataccatcctatagacgaagaatttttagaagctctctgccaaggaatgccaccagcagggggattcggaataggaatagatcggttagttatgatgttgacagatgccgcatccattcgagacgttctgtactttcctgttatgcggcgtatagagtcaaaatag

SEQ ID NO: 18904 - DNA, 1428 bp, Chlamydia trachomatis
atggatttatttctatataacaccctatcgagagaaaaagaacgttttctcccctctaatgatcctgttaaactctatacttgtgggccaactgtttacgattacgctcatataggaaatttccgcacgtacgtttttgaagatttgctaaaaagagtccttctttttttaggctactctgttcatcacgtaatgaacattactgatgtggatgacaagactttagccggagctcgcaaaaagggttgttccctcgaaaaatattgccagccttatattaacgctttttttgctgatttagaaacccttcatattttgaaagcagatgcctaccctcatgctacccactatattccccaaatgatcgaggccattcaacagcttattgatcaaggtattgcctatgtaggacaagaccaatctgtctatttttctattagccggttccctaattatggatctctttcgcacctgaatctagaggagctgcgacagagctctcgtatagacgcagatgagtatgataaagacaacttatgcgacttcgttttatggaaagcttatgaccctaatcgagatggagagatcttctgggaaagcccttttggaaaaggacgtccaggatggcatctagagtgttccatcatgtctatggctcttcttggccaatctcttgatattcatgctggaggtgtagataacatcttccctcaccatgaaaatgagattgcacaatccgagtcattatcgcgcaaacccttcgtacgctactggctacactctcatcaccttcttgttgatggaaaaaaaatgtctaaaagcttggggaatttcttcacattaagagatctacttcaacaaggattttctggagaagaagttcggtatctcttactacaaggacattacagaacccaattaaattttacccaagagggattacaagctgcccgtcagtctctcaaacgcttaagggattttattagcagattagaagatcctttctatcccgatgatattatccatccagaagtaggctctgcttgtcagaattttttagaagcctttgtgacttctattacaaatgatctaaatatctcctcagctttagcctctctatttgattttatccgaaaaatcaatggtatgatcgaccgccaatctattcaggaagaaacctcttctgaattttctaaacaagacgcgcaacatattctctctttattgcgccagatagaccaagttcttggtgttttaccattttcccaggctgacattcctgaagatgtgttattgcttgtaaaagagagagaagccgctaggaaagttaagaattggaaagaagcagatcgccttcgagatgagatcatatccagaggttttgccatcgaagacggcaaaaccgggatgaaagtgaaaaagatttag

SEQ ID NO: 18905 - DNA, 360 bp, Chlamydia trachomatis
gtgcatcggttaactctacctaaaagtgcccgcctattgaaacgtaaacaatttgtttacgtgcagcgttgtgggcaatattgtcgtactgatcaggcaactttacgaatagttccttctcgtcattcgaacatccgtaaagtaggggttactgtttctaaaaaatttgggaaagcccatcagcgcaatcgctttaaaagaattgtgcgagaggcttttaggcatgtgcgaccaaatcttcccgcatgtcaagtggtagtgtctcctaaagggggcactctaccaaattttggtaaactatccgcggatcttcttaagcatattccagaggctttgcctctcgttacttcttctaagtag

SEQ ID NO: 18906 - DNA, 138 bp, Chlamydia trachomatis
gtgaaacgcacctatcaacctagtaaaagaaaacgtacaaattctgtgggatttagagctcgcatggctacaaaaagtggaagaaatcttttaaatcgtcgtcgccgtcacggcagacattccttaattgatctctaa

SEQ ID NO: 18907 - DNA, 138 bp, Chlamydia trachomatis
atgagagtaagttcatccattaaagcagacccctcaaaaggtgataagcttgttcgtcgtaagggacgtctttatgttatcaataaaaaagaccctaaccgtaagcagcgtcaagcaggtcctgctcgtaagaagtaa

SEQ ID NO: 18908 - DNA, 306 bp, Chlamydia trachomatis
atggcgaagaagtcagcagtagctagggaagttaaacgtcgaaaattagtagaagctaattttcagaagagagcagagctccgcaagcttgcaaagagcttgtctgttagcgaggaagaaagagaaagagctcgtgaagctctaaataaaatgaagagagatacatctccttctcgtttacacaatagatgcctgttaacgggccgtcctcgtggataccttagaaagtttgctatttcaagaatttgtttcagacaaatggcctctatgggagatattcctggcgttattaaagcaagctggtag

SEQ ID NO: 18909 - DNA, 2463 bp, Chlamydia trachomatis
atgacacaaaaactaacccccatgatgcagcaatggcatcagtgcaaagagcaagctggtgattgtctattgttatttcgccttggagagttttatgaggctttctttgatgacgccttagtcttagctcaaaatctagatattactttaacgcagagacaaaatattcctatgagcggcattccggcagcctatctagatggttatgtagaccgtttagtaagccggggatttaagatagccattgcagaacaggctgataattctgaaggaggtaaggggcttgtacctagaacgattaaccgtttgatcactccaggagccctattatcctcttctttactccctgaaaaagccaataactatattattgctatcagccaggtaggctctctatacggactctcttgcttagacctttcaacaggaactttcctagttgctgaatacgataatacaaaagatctcattgaggcagtctaccgccttgctcctacagagttattaagccacgcgaaattttatcaaaaaaacgaacctgttgttaaacaacttcaacagcatttacgcatcacattatcagaacacgtttcttgggcttttgaatatcagtcggcaacaaaaaaattatatacctgctttcaagtttcttctttagacgggtttgggttgcaaggattagtccctgccattaatgctgcaggcgctcttctctcctacattcaagataaactccttctcccaatctcccacctctctattccaaaaatttatggacaacataagcacctgctcatcgataaagcttctcaaactaatttagaattgttgtctgccattcatggagaacatggcaaaggatctttgcttcaggttatggaacgaacctccactcccatgggaggccggttgttacgaaatacgttagtcaatcccttctatgacttaaaagaaattactctaagacaggatagcgtagagtttttcttaaaacaagagccccttcgaaaaacactaaaacgtcatttatcttgtgtacgggacctagagcgtctggctacaaaaatttctactaccctagccagtccaaaagatatcggcatgcttcgtgattccctgctctcttgtatgcacattgctcatgatttacagagttatactcttcctgaatttttaactaataaatgtctgatttcctcatctttaaaatctctaatagaggctttatcaacagacttactccaagagcttcctttaaaagtttcagaagggaatatttttgctgatcactatcatcaagatcttctgcggcttagaaatattaaaacaaactcaaaatcttggattcttgaataccaagaacgtattcggcaagaaacgggcattaaaaaactgaaagtttgttatgcccaagcattaggatactacattgaagtcgctagtagttttgctcctcaacttccgaaagagttcattcgtagacaatctcgcctacatgcagagcgttttactactcaggagcttcaacaattccaagatgaagtgttcagcgttgaagataagctacaaactttagaaaccaagctcttcaaagaactctgttgttatatccttcaacacagagatcttattctcgagctgtcaacaaccattgcagatctagactacgtaatatctttggcagaactagctgcagaatatgattatcgtcgtcctcttgttgatcatagcgatgctttatctatcaccaagggaatgcaccctgtggccttaactttactagatcggggcacttttattcctaatgatacaatcatgcacagcgctcaaacacgcatgatcctccttacaggcccaaatatggctgggaaatccacctatatccgccaaattgcactactagtcattatggctcaaatgggatctttcattcctgctcgatctgctcacattggtattatcgataaaatttttacacgcattggagccggagacaatctttccaaaggaatgtctacctttatggtagaaatggctgaaacggcaaatattttgcacaatgcaacagatagatcattggttatcctcgatgaagttggtcgaggaacgagcacatatgatggacttgctattgctcaggctgtagtagagtttcttttattcacagaagggaaaaaagcaaaaactctatttgctacgcattataaagaacttacagagctggaattgcactgtcagcacgtagaaaattttcatgctgttgtgaaagaaaatggtgggcagcccgtattcatgtatgaaatcgcaaaagggcactcgaaaaaaagtttcgggatccatgttgctaaacttgcaggtttccccctttccgttgtatcaagagcgcagcagatcttgcatcaattcgaagggcctgatctacgtccagaacctgagaaggctcaacagctggtcatgttttaa

SEQ ID NO: 18910 - DNA, 1803 bp, Chlamydia trachomatis
atgtattacacagaagagagtttggagactctaaagcatagcattgatattgtcagtgttcttggagaatacgtgcatttaaagcgtagcggggcagattacaaagcttgctgtcctttccatgatgagaagactccttcgtttatcgtatatccaacaagagggcattaccattgttatggatgtggggaacatggggatgcgatcaactttcttatgaagcagcagggatattcgttttcggaagccgtgcttttcttagctaaaaaatttcatgttgatcttgttattaaaacaaaaactaaagagtcttcaggtcaagattctaaagaatgtttacgtcgcattaacaaagaagcggaacgattttttcaatattgtttattgtgtttgccggagggaggagaggccttgtcttatttatacaagagagggttttctctagataccatagaccgtttccagataggttatgctccagaacagagagtgtttgtccgagcaatggaggagcggggtatttctgtgaaacagttagagtgggcaggatatctttctaaagattggtttttgttcgctcagaggatcatgtttcctattcaagattctttaggctataccattggcttttcttctcgaagatttaaagaaggaggaaaaggagggaagtacattaactctccagagacccttttatttaagaaatctcgagtattgtatgggttacaattttctcgaaaacgaatagctaaagaaaaaagggtgattttagttgaaggtcaggccgactgtttgcaaatgatcgattttggcttcaattgtactttggctgctcaagggacttctttcaccgagacccatgtaaaggagctggttaaattaggggtatctaaagcctatttattgtttgatggggatgctgcaggagagaaggcttctttacgtgttggcgatctttgtcaggttgcaggaattgcagtaatcgtttgtcgtcttccttctgggcaggatcctgattcctttttaatgcaaagagggccagaagagttacgtgagttactggatagaggggaagattatctttcttttcttgtctggcacaaaattcgctcctacgagcagtttactcctagggaaaaggccagggtagtggaggaggttattcagcaggttcagcattggggaagccccattatgattcatgaatatctgagacaattagcttctttggttaaagtccccgaggccgcagttttgagttatctgtcttccattaagtctgctacggaggacaaaggcaaaaaggctgatgcgaaagaagtttgcccggaccctgaggctactgcagtagcttataaaggggggaaagcttcaaaaaaaatttctcctaggatgattttagaagctgatgtcatacgttgtttattatttgctaagcctgaagaggagttcgtcccagccacagtgagacattatctttctcctgaggagtttcattgtatagagtaccggtctatatttgtgatggcaatgaatcattacaacgaaaagcatatgttgccttctatggacgatatgatggcgctggtttggggaacggaagccatgacgcttttagtagataggaggataaatactgaattaatgcgggacattgttgttcaagcaatccaaaaattattagacaagcattggcgagatcgaaaacgaaatttctgtcatcagatggggaaagagttagattctttacaagagtatgttcgtctttctgaggagagaattaaggtttctttagtttcttga

SEQ ID NO: 18911 - DNA, 3012 bp, Chlamydia trachomatis
atgtcctcacaacctttaactcttcaagacatgatggcggctattttacgtttttggagcgaacaaggctgcatcattcatcaaggatatgatttggaagttggggcggggacatttaacccagcgacctttcttcaggcattaggaccagagccttttaaaacagcttatattgaaccttctcgacgtccacaagatggccgttatgggcagcatcctaatcgcttgcagaaataccaccaattacaagtgatcctcaagcccgttcccgaaaatttcctttctctttatttggaatcgctcaaagtcatcggattaaatttagttgaccatgacattcgttttgtccacgacgactgggaaaatccaactattggagcttggggactaggatgggaagtatggttaaatggcatggaaattacacagctcacctatttccaagcagtaggaagcaagcctctagaggcaattagcggggaaattacgtatggcgttgagcgtatcgcaatgtatctccagaaaaaaaactctgtctatgatgtcatgtggaatgattccttaacctatggagatattacacaacatgcagagcaggcctggagtcaatacaattttgaaaccgcaaatacttctatgtggttaaaacattttgaagacttcgcggcggaagctttagctacgctagacaaaggactccctctccctgcttatgattttgtcattaaagcctctcatgcatttaatatgctcgattcccgaggggtgatttctgtaaccgaacgcacccgatatatcactaaaatccgtcaattagcccgtgctgttgcagataaatacgtaatatggagagagtcgctaggatttcctcttcttaaaacaattccttctactccaacagtaacggctaaacaaatccctcatatttgccaagacgaagacttcttacttgaaattggaagtgaagaactcccagcagcctttgttcctactggaattcagcaattagaatcactagctaaaaaacttcttgctgaccataacatctcctataacaatctagaagtactcggaactcctcgacgactagcattacgtatacaaggcctgagccacctaacgattcgcccagaagcagagaaaaaaggacctcctctttcccttttgtttgaggaagatggctccgtatcctctcaaggagagcagttttttgcctctcatggattatccatttcccatcgaagtgccttagatcagtcttccacgatctgccgagttcgttccattaaaggaactgattatctattccttgttatcccagaagagcgtatagagactgcagcgattcttgtaaatgagcttcctctattgattcgatctatgcgcttccctaaaaaaatgacctgggataatggaggggtagaatatgctcgtcctattcgctggttagttgctctgtatggagatcaggtgcttcctatatctctaggattcgtttcatcagggaatatttcttggggacatcgacaattggacaaccgtcagttgaccatcccatccagcaaagaatacattgatattttgcgagatgcctgtgtcattgtttcccaaaaagaacgccgatcgatcattgaacaaggactgcaaaatctaacaggagatcaaactgttgctatagctccggaacatcttatagaagaaaccgtcttcttaacagaacatccgtttgtaatctgtgcccagtttaatcctgatttttgctctctacccaaagagctcttaatagcagaaatgattaatcaccaacgctatttcccaacacagaacttgcaaggagagatcaccaaccgatttttaatcgtttgcgataactctcctactgataccattattgaagggaatgaaaaagccttggctccacgtcttaccgacgggaacttcttgtttaaacaagaccttcttacttctttagactctttcgtagaaaaattgaaatctgtaacgtactttgatgctttaggtagtttagctgataaaaccgcacgattgaaattacacttagaagagacctatccccttcttcctttatgtcctaaagaagacattgacaccgctgttcattactgcaaagcagacctcgtatctgctgtagtcaatgaattccctgaattacaaggaatcatgggtagatattatttgcagaacgctgctttatctaaagctgctgcgattgctgttggagaacacctccaacacattaccctaggatcaagtgtctctacaacaggcgctttattaagcatcctcgatcgagtagacaatcttctctcttgcttcatcctaggactactccccacatcctcccatgacccttacgctttgcgacgacaatcactagagcttctcaccctgctctatacaacacagagctctgtagacatagaagatctattttctcgtcttgttcgacatttccctactactattccgaatacggtatggtctcctgaggatgttttaaacaaactctgttcttttgtttggggacgattaaaaacaattttatcatctctaggatttgctaaagaggttattgctgcagttctcactgaaaattgtccaaaaaatcctttaactatcatcaatagcgctcggtctatccaagaactgcaaaacacacagacattggaaactattgcatcgacacacaatcgattaaagaaaattctagcttctctatctttctctgttacagaacaaatattctctctcataacttcagaggacatgttgttcaagcaagctttggagcgatttaaagaagcgacaacttctcttccaattagctctcgagaatatctactccagttagaagatttatctcaaagcaccgcgctctttttagactctgtacgcattgctgatgacgatgaaaacatccgcaaccaacgcattgcgttgttagtagcaactcaaaaatgttttggattctatgcttgggatgctctgtaa

SEQ ID NO: 18912 - DNA, 609 bp, Chlamydia trachomatis
atgagcgtgagtttaccgaactacctgacattttttcgtctattcatcacaccaatttttatgattttgtatttgaagggaaaatggtttgggttatctgctacagttttgccgtatgttttactatttttgcttatcatagctgagattacagatgctgtggatgggtatattgcgagaaaattctctcaagtcacagacctagggaagcttctagatcctatggcagatagtgtataccgcatttcattgtatctaacgtttacgcaacccccagtaaatctccctctcatacttgttttcatttttttagctagagattctgtgacgagtacattgcgtatgttatgtgctagtagggggcaggtgttagctgctaggacaagcgggaagttaaaggcaattcttcaagctatcagtttctttttaattatttttgctatgttcttttgcgcaaaaggaatcatctccacggatgatttggagttttttgccacgatcacagtttctttggtagctttttactctgtctgctctggagttgagtatatttgggtaaataagagccatttattgcagaagaatgactcgccagatggcgagtcatag

SEQ ID NO: 18913 - DNA, 558 bp, Chlamydia trachomatis
atggaactcgtagttcaaagtcgtgagactgataagaagtctgttattaaaaaaattcgtcagcagggtggaattccagctgttctttattccgggggaaagagcctagctaatgttgttattgatgcccgtgttttcaacaagtttctttctactttggaaagtggtgctttagcttctacagttttcactctttcttatgaaggccgagagatcaaggctttagtaaaggatattcagtatcatgtaacgacttatgatgtcatccatcttgattttgaagagttagttgaagatcgagaagttcgtttgaatattcctattcgctgcatcaacactgtagactgtgttggggttaagttagggggatctttaagacaagtaattcgctatatgcgtgttgtatgtaagccaaaagatattgttccatttttggaattagatgttcagtctttagggctttctcagactttaaaattatcggatatccgtattcctgagggaattaaacctgttactccgcttaaagaagttgctgtaacagtggctcgacgataa

SEQ ID NO: 18914 - DNA, 339 bp, Chlamydia trachomatis
atgaaaaaaaaaacaggccaactttatgagggagcctatgtttttagcgtgacattaagtgaagacgctagacgtaaggctttagaaaaagttacttctggaatcaccaactatggtggcgaagttctgaaaattcatgatcaggggcgcaaaaagttagcttacacaattcggggagccagagaaggttattattactttatctactttacagtagccccagaagctatttcagagttgtggagagagtatcatttaaatgaagatcttcttcgattcatgactcttaaagcaagcgctgtgaaagaagttttagaattcgctacattgccagaataa

SEQ ID NO: 18915 - DNA, 246 bp, Chlamydia trachomatis
atgaatagacctgttcataatgaacacagaaggaagcgtttcgcgaagaaatgtccttttgtttccgcgggttggaagaccatcgattacaaggacgttgtcactctaaaaaggtttattacggaaagaggaaagatccttccaagaagaattactggagtttcttctcgcttccaagcactacttgctcaggctgttaagagagctcggcatgttgggcttttgcctttcgtaggagaagattaa

SEQ ID NO: 18916 - DNA, 504 bp, Chlamydia trachomatis
atgaaaccacaattacttttgttagaggatgtcgatggcttaggacgttctggcgatcttgttgtcgctaaaccaggatacgttagaaactacctacttcctaaggggaaagctgtagtagctagcgctggaactctccgtttgcaagcaaaattgcaagagcaacgtttgttgcaggctgccgctgataaagaagagtctcttcgtttggctgagacacttagaagcctcgttttggatttccaagttcgtgtagattctgagaacaatatgtacggttcagtaaccgtgaatgatatcattagcgttgctgatcaaaaaggtgttgttcttacacgtaaaaatttcccacgcgctcatagcggagttaaaactttagggaaacatgtaattggattgaaattaaaagaaggcgtgactgcggatcttcacttagaagttcgtgctgatcacgaaatcgctgaacaaaaagaactccaaagcatggaagaacaagaagattag

SEQ ID NO: 18917 - DNA, 2820 bp, Chlamydia trachomatis
atgaagcgttctcttctcctattatttttctgcagttcttcttttctcacctcttgttcaaaatcttttcaaacgattcaagatgaaaatcctttaacaattttaacccctgcattagcagaccaaaaaatagcgaaaattatctgccctaatgggcttcccctcatgattgtttcctcccccaaagcttctgaatcgggggcagctttagttgttaaaactgggaataacgctgatcccttagagttccccggattagctcattttacagaacactgtgtgttccttggcaatgaaaagtaccctcaaccctcaggattcccagcattcctgagtactcatggagggatttacaatgcgtttacttacccggataaaacatgctttttgttctctgtaaataatagtgacttagacactgctctggatcagtttgttcatctctttattcatcctttgttccgccaagaagatttaaacaaagaagtccatgctgttgagcaagaattcgcaatgcatccaaccaaagattctcgtcgcatgcatcgcattcagcaaataatagctcctaaagagcacccattaaagcgtttcggttgtgggaatctctcgaccttggatactgtaacctctcaagacatgcaaacatggttttctacccattactctccggaaaacatggctgcaatcgtctacactacagctccattagatgtagctgttccttatatagcaaaaatcttctctcaaattcctaaatcctcgaaatataccccacaaactcctttcacaaaaacgcaggatacttcctcccttaacaaactgttcattaacaaagctgtggaaccttctccacaactagctatctactggcatttatacgacgcaccagcttctctgcaaggatgggcgcagtcactggtttctgtgctatccagtgaaaaagaacatagccttattgctttgcttaaaaaagaacatcttatcacccacatggaggctgggacttataacacctctctcaacactcaagattttgaaatcatttataaactcacgaccaagggagaacgtgaatatcaaaaagtccttcaacttacttttgcttttcttgattatgttcgcgatgaacaacttcccgcctatattctcccagaactacatagaatcaattctttagaatacacctatagtacacaaacagaattgttcttaactttaacacaaatgatcccagattttgcttctgaacccctagcaacttacccctatcaatctactatctatccaaaatattctcatgaggacgaacaaacctttgctgcattattagcggatccacaacaagctcgctatatcttatcagcgactctaccaagctccttagaagatgcggacgagttttatgaccctatttttgataccattttctatgagaaacctttaaactttgagcctataaaggactattcctctctcgggtttacttttccacagcccaataaatttattcctcaaaaagtccaattattatctcaaaagaaacaacacgagggatttgctttttctccaaaactcacttataaccaagacgctattactctatacacctgcgaagattccttctacaccgtcccaaaaatggctatggaactccgtatccgatctcctcaaattcaacgagcagatgttcgttctttagtcttgcgtgatctatacagccttctagcaaacgaaacattagtaaaacattatgacgaggccttaagagccggaatggatttttcagtatctcccggagctacaggtgtagacctgtctctttttggctatacggagacctctccagttcttattgactctctattatcttctctacgcgatcttcccttagataagagtctttttctgtactacaaagaccagctctccgagcaataccaaaaaggtcttatttcctgccctatgcgagctggtctcaataaactctctggggaactcctagaaggcttcttttctctagaagaaaagcaaaatgctttagatatcatctcctatgaagaatttgaggattttgctcacaaaatgctcactgaactatctatagaggctttcacgctaggaacactttcttcacaagatctttctaacgtattagcatctctttctcatttttcagaggcttctttaccatatgatcctcctagttactatcctaagagaaagcctctcttcacaacagacttctctttccaatatcctctttctgggaatggtatgctcctgcttgaacaaaacgagcatcccaatcagtatgaagattctgtagctacgagcatgttattatcttggatccacaacttgtattataatgatttgcgtaccaaccaacagcttggatacatggtaggtgctaaataccaagaatttgcagaaactccttgtggactattttatattcgctcgaacaaatcttctccagaagagcttgtgaataaaacacaactcttcctacaaaagattgctactgatccggaagcctcaggattgtctgaggaaatttttgaacaacttcgagaaacctatattcaatccgttttacttccaagtgcaacgccttcagcaatggcaagaaaattattttctatagcctttgaaacagaaaaacatgatttctcccgccctgataaaaaaattgctgcagcccgttctatgaactactcctatttcaaagagtattgcaaagaattttttaatcaaaagtttgggccagaaatccagcttcttatttacggatctgactcacaacaaaacgaataa

SEQ ID NO: 18918 - DNA, 1380 bp, Chlamydia trachomatis
atgacatgtgatgtaagcccgttatttggaactgatggcataaggggaagagcgaactttgagcctatgacagtagaaacttcagttcttcttggtaaagctgttgcaggggttttattggaaagacattctggtaaacatcgtgtagttgtaggtaaagatacccgtctttctggatatatgtttgaaaatgctcttatagcaggacttacttccatggggatagagactctcatgttaggccccattcctactccgggtgttgcttttattacccgagcctatcgtgcggatgctgggatcatgatttctgcatcccataatccttatcgagataatgggattaagattttctcttccgatggattcaaaattggacaggctgtagaagagcgtatagaggctatgatagcctcaaaatcttttgggggccttcctgaagatcatgcggttggtaaaaataaacgtgttaaagatgctatgggaaggtacatcgaatatgcaaaagccaccttccctaagggacgaactttaaagggattacgcatcgttttagactgtgctcacggggcagcttatagagtagctccttctgtttttgaagaattagatgcagaagtgatttgttatggttgtgagccatctggatgtaatatcaacgaaggatgtggtgctttgtggccttcgattattcagaaagctgttatcgagcatgaagctgatgtagggattgctttggatggggacggtgatcgtttaattatggttgatgaaaaggggcatatagtggatggagatatgcttctgagcatttgcgcaagtgatttaaagagaagacaggctttgcctgagaatcgcgttgtggcaaccgtaatgaccaattttggagtgttgcgttatttagaaagcctgggaatacaagtaacgatctctcctgtaggagatcgacatgtgttacaacatatgttggaaacgaaagctattttaggtggcgaacaaagtgggcatatgatttttctggattacaatacaactggagacggaatcgtttctgctctccaggtattgcgtattatgattgaaagcgagtcaacgctatcagatcttactgcttgtattgtaaaaagccctcaatcactaattaatgttcctgtggctaaaaaagtgccgctagattctttaagtaatgtgcaagtggttctccaagaggtaaaagagattctgggtgattctgggcgtattctgttaagatattctgggacagaaaatatttgtagagttatggtcgaagggacaaagaagcatcaggtagactctcttgctaaaacaattgtggatgttgtagaagcagaaattggaggagcagagatttctgaatag

SEQ ID NO: 18919 - DNA, 1821 bp, Chlamydia trachomatis
atgtgtggaatatttggatatttaggacaaagaaatgctgtgccactagttttggaagggttatctaaactagagtatcgtgggtacgattctgcaggaatagcagctctcactaaagaccatttgtttgtagaaaaatccgtagggcctgtaagtcagctatgctcgaaggtttcttctgatatgcattctcaggtagcgataggtcacactcggtgggctacacatggggagccttcaaggttcaatgcacatccccatgtggatatgtatgagagttgtgctcttgttcataatggaattatagagaactttcaaacgcttagagaagatttgagtagtaagggcgttgagttttcatcggatacggacacagaggttattgtacaactttttgcgagtcgatatagagaaacaggagatttagttcagagtttttcatggactctgaaacagttacagggaagtttcgcttgtgctttagtgcaccaggatcaccctgaaattttactatgcgctacctatgaaagcccgcttattttaggattaggagaagaagaggtattcatttcttctgatgtccatgcttttttgaagtattcgtgccaaatacaaaccttagcttctggagagctggcagttttacgtataggacggcctgttgagatttacaactttgagttgtctcgtattcaaaaagaagtgcgctgtatagaccatgcagaaggttctttagataaacaaggttttgattattacatgctcaaagagatttatgagcagccagaggtgtttgaacgtattttgcattttgtgtgtgaagagaatggatttgcagaatcttttttaaaagaattttcttttgaaggtatcgagagtttgcatatcgtggcttgtgggtcttcttatcatgccggttgtttagccaagtatgtcatcgagtcaatggtctcgattcccgtgtatgtggagaccgcttctgagtttcgttatcgtcaaccatacatagcaaaacgttctttagctattttgattagccaatcgggagagactgctgataccttggctgctctaaacgagttccgtaaactagatgaagtgcgtgtgttgggtatttgtaatgtacgagggtctgtgctcgcttcccgagtagaccattgcgtatttatcgaagccggtttggaagtgggggtagcttcaacaaaggcatttacagcgcagttattagtattgattcttctaggtctgaaattagcaagtcagcgtcaagagatttctaaacaagatttgatgcaagcggtacagggattaagagagctgcctcggttgacaagacttttcttggatagttctattcatgattggcgatgtcgacaaagtaaagaaacgagctttattttcttagggcgccgttttatgtacccgatttgtatggaagcggctttgaaattaaaagaaatcgcttatgtggaagctaatgcttatcccgcgggagagatgaaacacgggccaattgctcttattcaggaagggactcctgttattgtatattgcggggatccctttgtatataccaaaactattggggcaattatggaggtaaaggctagaaaagcctatgttattgctcttgctcgagaatcgaaccaagatattgcagcggtttctgacgaacaaatttatattcccgatagtcatgatcttgcagcccctattttatttgctatagcgggacagatcatggcgtatacgatggccttgcaaaaaggcactgaggtggatagaccaaggaatttagctaaatctgtgactgtagagtga

SEQ ID NO: 18920 - DNA, 855 bp, Chlamydia trachomatis
gtgttcaagtttttcgggaacaaacttcgctctctttttaaaaagactcttccttcggacttattggaatatgctgaagctcttttatatgagggggattttggtcctaaactaactgaagccttttgtaacgaattacgtcggcataaacatcctgatgagcgcttgattaaagagcttatccgctcttttctatctgatattatagctaagttacctcagaaaaagagctcttctgctcacccccatgtgactcttattttaggaacaaatggctcagggaaaacgactacagtagctaaactcgcccactattgtctttctcagaaccaaacggttttaatcgtagcaacagacaccttccgctctgcaggaatggaacaaatgcgttgttgggcagactctttaggttgtggatttatttctggtaagccaggaggggatgctgccgctatagcttttgacggcatctctgctgcagttgctagaaactatgaccaagtaatcatagatacctctggacgactacatactcacacgaaccttctcaaagaacttcaaaaaattgccactgtttgcaataaggcttttcctggagcgcctcatgaaactctcatgaccgttgatgcaaccttgggaagcaatacgttaagtcaggtaaaattattccatgaggcggtgcctatcgatggattaatttttacaaaaatagaaggctccgctaaggggggctccctctttcgaattgctgacgagctaaaaattcctacacgatttgtaggatacggagaaacagtttacgatttcgaaccattttctatagatcgctttctcgataaactgctggatgtttaa

SEQ ID NO: 18921 - DNA, 876 bp, Chlamydia trachomatis
gtgttagaattattaaacaaagatctgccgattatcacgcagggtattacggggaaagcaggatcttttcataccactcaatgtgtcgcctatggatctaactttgtgggtggcgttactccgggtaaaggagggactcagtttttagatttgcctatttttgactctgttttagaggcaaagcaagcaacgggatgccgtgcttcaatgatttttgttcctcctccgttcgctgcagaggctatttttgaagctgaagatgcggggattgagttgatcgtatgtataacagaaggaatccctgtacaagatatgttggcagtgaattctcttatggagaagagttcttgccgtttagttggccctaattgtcccggagtgattaagcccggggcttgtaaaattggcattatgccagggtatattcacttaccaggaaatgttggagtcatttctagatctgggacattaacttacgaagcggtttggcagttaacacagagaaagattggacaaagtgtatgtattggcattgggggagatcccctaaatgggacttctttcattgatgttctccaggagcttgaaaaggatgaacagactgaggctattcttatgattggagaaataggaggtagtgccgaagaagatgctgctgattggataagccagcactgtagtaagcctgtgattgcatttattgctggagctacggctccgaaagggaaacgtatggggcatgcgggtgcaattatttcagggaatagtggggatgctttcagtaaacaacgtgctttaagagaggctggagttgtcgttgtggaatctcctgcacttataggagaggctgttgcgtctgttctgaattcccattag

SEQ ID NO: 18922 - DNA, 1494 bp, Chlamydia trachomatis
atgatgaaaagattattatgtgtgttgctatcgacatcagttttctcttcgcccatgttgggctatagtgcgccaaagaaagattccagtactggcatttgtcttgcagcatctcaaagtgatcgggaactttcccaagaagatttgctaaaagaagtgtctagaggattttccaaagtcgctgctcaggcaactccaggagttgtgtatatagaaaattttcctaaaactgggagtcaagctattgcttctcctgggaataaaaggggttttcaagagaatccctttgattatttcaatgatgagtttttcaatcgattttttggtttaccctcgcatagagagcagcctcgtccccaacagcgtgatgctgtaagaggaacaggttttattgtgtcagaagatgggtacgttgtgaccaaccatcacgtagtggaagatgcggggaaaattcatgttactttacacgatggacaaaaatacaccgcaaaaatcataggattagatcctaaaacggatctcgctgtgattaagatccaagcaaaaaatctcccttttttaacttttggaaactctgatcagcttcagataggggattggtcaatagccattggaaatcctttcggattacaagccacagtaaccgttggcgtgattagtgctaagggaagaaaccaattacatattgttgattttgaagattttattcagacggatgcagcaattaatcccgggaattcaggtggtccattattgaacattgatggacaggttattggagtgaatacagcaatcgttagcggtagcgggggatacattggaataggatttgccattcctagcttaatggctaaacgagttattgaccaactcattagcgatggacaggtgacgagaggatttttaggagtaaccttacagcctattgattcggagcttgccgcttgttacaaattagaaaaggtgtacggagccttgattacggatgttgttaagggatctcctgcagaaaaagcaggtttgcgccaggaagatgtcattgttgcttacaatgggaaagaagtggagtctttgagtgctttacgtaatgcgatttctttgatgatgccagggactcgtgttgtcttaaaagttgtgcgtgaagggaaattcattgaaatacctgtcactgttacacaaattcctgcggaggatggggtatctgctcttcaaaaaatgggagttcgggtacagaatcttactccagagatatgcaagaaactaggattagcgtctgatactcgagggatttttgtagtgtccgtagaagctggttctcctgcagcttctgcaggagtggttccaggacaacttattctggctgtaaacagacagagagtttcttctgttgaagaattgaatcaggtcttgaagaatgcaaaaggagagaatgttctccttatggtttctcaaggagaagtcattcgattcgttgttttaaagtctgatgaatag

SEQ ID NO: 18923 - DNA, 3144 bp, Chlamydia trachomatis
atggtcgatctacaagaaaagcaatgcacgattgttaagcgcaatggaatgtttgttcctttcgatcggaaccgtatttttcaggctttagaggctgcttttcgagatactcgcagaattgatgatcatatgcctttgcctgaagatttagaaaattctatacgctctattacgcaccaggtggttaaggaagtcgtgcagaaaattacagacggacaagttgtcactgtagagcgtatccaagatatggttgaaagtcagttatatattaacggattacaggatgttgctcgcgattacgttgtgtatcgcgatgaccgtaaagcgcatcgggaaaaatcttggcaaagcctttctgttattcgccgttgtggaacgactgttcattttaatcctatgaaaatttctgcagctttagaaaaagcttttcgtgcgaccgatcgaattgaaggaatgactcctgattttgtgcgtgaagaggtgaatgcattaacgcaaaagattgttgcagagatcgaagaacgttgctctcaacaagacagccgcatagatattgagcaaattcaggatatcgttgaacaacagctaatggttgttggtcactatgctactgccaagaactatattctttatcgagaagctagagctcgtgtccgtgataatcgagtagaagatcagatcgtagaggaggctccttcagaggaaacttttgaagttttaagcaaagacggttcgacatacatgattacgcactcgcagctactagctcgtctagctcgcgcttgcagccgtttccctgagacaacagatgcagctcttctcactgatatggctttttcgaacttctattccggcattaaggagtcggaagtggtgttagcttgtattatggctgctcgagctaatatcgaaaaagagcctgattatgcgtttgttgctgcagagcttctactcgatgttgtgtataaagaagctttagatagatccagaggtgatgaagacttagaacaagtttatcgcgatcattttaaacgttacatcatggaaggcgattcctatcgtctgaatccagaattgaaaaatctttttgatttggatgctttagccaatgctatggatctgtctcgagatttacagttttcatacatgggaatccaaaacctgtacgaccgttattttaaccatgatgatggtcgtcgtttagaaactccccaaattttttggatgcgagtggcgatgggattggcattaaaagagcaagataagacttattgggcaattactttctataacctgctttctacattccggtacacgcctgctaccccgacattatttaattcgggcatgcgacactctcagttaagctcctgctatctttctactgtacaggacgatttagtgaatatttataaggtgatttctgataacgcaatgctttctaaatgggcaggcggtatcggaaatgattggacggcaattcgtgcgacaggagctttaattaaaggtacaaatggaaaaagccaaggggttattccgtttattaaggtgactaacgatactgcggttgcagttaaccaaggtggtaagcgtaaaggtgctgtatgcgtgtacttagaagtctggcatcttgattacgaagattttcttgaattgagaaaaaatacgggggatgaccgccgacgtgctcatgatgtaaatacagccagctggattccagatcttttctttaaacgcttgcaacaaaaagggtcgtggactttgttcagccccgatgatgttccaggactacatgatgcctatggagaagagtttgagcgtttatatgaagaatatgaaagaaaagtagattctggagaaattcggctatataagaaagtggaagccgaagatctatggagaaagatgctcagtatgctttttgaaacagggcatccatggatgacttttaaagatccatccaatattcgttcagcacaggatcatacgggagttgtccgttgctccaatctatgtacggaaatcttattaaattgctctgagacagaaactgctgtatgcaatttagggtccgttaatttagttcagcacattttagacgatggattggatgaggagaaactctctgagacaatttctatcgcagttcgtatgttggataacgtgatagatattaacttttatccaacgaaagaagctaaagaagcaaactttgctcatagagcaattggtctgggtgttatgggattccaagacgccttatataaactggatattagttatgcttcccaagaagctgtggagtttgctgactacagctcagaattgatttcttactatgctattcaagcttcttgtttgttagctaaggagcgaggaacctatagctcttataagggatcgaaatgggatagaggattgctccctattgatactattcagttgcttgcgaattatcgtggcaaagacaatcttcaaatggatacttcggtaagaaaggattgggagcctatccgtagtttaattcgagagcatggtatgcggaattgtcagttgatggcgatagctccgacagctactatctcaaacattataggcgttactcaatcaatcgagcctacgtataaacatttgtttgtgaaatccaatttgtccggagagttcactattccaaatgtgtacttaatagagaaattgaagaaacttggcatttgggatgccgatatgttggatgatctcaagtattttgatggatcgttattagaaatagagcgtgtcccggatcatataaaacatattttcttaacagcctttgaaattgagccggaatggattcttgagtgtgcgtctcgaagacaaaaatggattgacatggggcaatctctcaacctttatcttgcacagcctgacgggaaaaaattatccaacatgtatctcacagcctggaaaaaaggtttgaaaacgacatattatctccgatcttcgtcagcaacgactgttgagaaatcttttgtagatattaataaaaggggaattcagcctcgttggatgaaaaataaatctgcttcggcaggaattgttgttgaaagagcaagtaaaacacccgtctgttcgttagaagaagggtgtgaggtatgtcaataa

SEQ ID NO: 18924 - DNA, 1041 bp, Chlamydia trachomatis
atgcaagcagatattttagatggaaaacagaagcgagttaatctaaatagcaagcgcctagtgaactgcaatcaagtcgatgtaaaccaacttgtgccaattaagtacaaatgggcttgggaacattatttaaatggctgtgcaaataactggctccctacggaaatttctatggggaaagatattgaattatggaaatccaatgttctttcagaagatgagcgacgagtgattcttttgaatttgggtttttttagtactgcagagagcttggttgggaacaatattgtcctagctatctttaagcatgttactaatcctgaggctagacaatatcttttgagacaagcatttgaagaagctgtccacacacatacatttttgtatatttgtgaatcccttggattggatgaaaaagagattttcaatgcctataacgagcgtgcttcgattaaggctaaagatgatttccagatggagatcactggtaaagttttggatcctaatttccgtacagactctgtagagggattgcaagagtttattaaaaacttagtgggttattacatcattatggaaggaattttcttctatagtggatttgttatgatcctttccttccatagacaaaataaaatggttggtattggggaacaatatcaatacatcctgagggatgagaccattcatttaaattttggtgttgatttgattaatgggattaaagaagaaaatcccgagatttggactacggaattgcaacaagaaatcattgaaatgattcagcgtgctgtggacttagagatcgactatgctcgagattgtctccctagaggtatcttaggtctaagagcatcgatgtttattgattatgtacaacatattgcagatcgtcgtttagagagaataggcttaaaaccaatctatcatacaaaaaaccctttcccttggatgagtgaaactattgaccttaacaaagaaaagaatttctttgaaacaagggttactgagtatcagcatgcagcaagcttaacttggtaa

SEQ ID NO: 18925 - DNA, 891 bp, Chlamydia trachomatis
atgactaacgcatttcccttctccgtccaagaatctgttccgttaaaccgcttctctacttttcgcattggagggcctgcgcgatactttaaagagttagtttctgttgatgaagctctgaaagttttttcattcttacacacctctcctattccttatattattatagggaagggatccaattgcttgtttcatgaccaaggattcaatggtcttgttctatacaataatatccaaggccaaacattcctttctgatacacaaattaaagtgctttctggagtttctttttctcttttagggaggcagctttcttctaaaggattttcagggctagaatttgctgtaggaattccaggaactgttggaggtgccgtatttatgaatgctggaaccgcattagctaatacggcctcatctcttgtcagcgtagagattatcgatcatgcggggaatttactttcactatctagagaagagctgcttttttcttatcgaacatcgccttttcaaaaaaaaactgcattcattgtttctgcaacattccagttaactcgagattctcaagcagctcaacgagcaaaagctttaattgaagaacgcatccttaaacaaccgtacgaatacccttctgtgggatgtatcttccgcaatccagaaggcgtgtctgcaggagcacttattgatcaagcaggattaaaaggactaaccatagggggaggacagatatcccaaaaacatggcaatttcatcattaacactggaaatgccagtgctgctgatgttctagaacttattgaaaccattcaaaaaactcttaaacaacagggaattgctttggaaaaagaggtgcgcattattccctttcaacctaatcttggcgtttcctaa

SEQ ID NO: 18926 - DNA, 495 bp, Chlamydia trachomatis
gtgatcatgtcagtaatggcttctgacagtgctcgtgctgtggtgtgtactagccggcctttcccaaagcaaaaattgcgtgaacttgttttacaggcattgtacgccctggaaatggcccctaagggagaggactctcttgttagtctgctgatgacagaagcctctgtttcaaaaaaaaatgtactatacgccttaatgttttgcaaagcaattcgggccaaccagtcagagctggatgctctgcttaatgcgacaattcgcacaaccactcttgctaatctgacaattatcgagcgcaatattttacgcatgatgctttttgaacatcagcagaatcaagaaagctcccctatcccaacagcagttcttatagcggaaacaactcgcctcattaaaaaatttagttatgtggaaggaagttcgctaatccttgccgttttaggttccatttttgaccaggtagctcaagagcccgcttctatgtgtggttaa

SEQ ID NO: 18927 - DNA, 561 bp, Chlamydia trachomatis
gtggctttaaacctaaaaataaataggcagatacgagctcccagggtgcgtgtaataggttcttctggagagcagctaggcatattgagtataaaagaggccctagatttagccagggaagctgatttagaccttgttgaggttgcttcaaactcagagcctcccgtatgtaagatcatggactacgggaagtatcgttatgacgtaactaaaaaagaaaaggatagtaagaaggctcagcaccaagtgcgtgtcaaagaggttaagttaaagcctaatattgatgacaatgactttcttacgaaagtaaagcaagctagagcctttattgaaaaaggaaataaagtaaaagtttcttgtatgtttcgggggcgagagttggcttatcccgaacacgggcataaagttgttcaaaggatgtgccagggcttggaagatgttggttttgttgagtctgaacctaaactaaatggccgttctttgatctgtgttattgctccgggaacactaaaaactaagaaaaaacaggaaaaagtccatgcccaagatgaaaagcaataa

SEQ ID NO: 18928 - DNA, 195 bp, Chlamydia trachomatis
atgcccaagatgaaaagcaataagtccgttgcggcgcgtttcaaattgactggttctggtcaattaaaaagaactcgtccggggaaaagacacaaattatcaaaaagatcttcgcaacagaaacgcaacctgtctaagcagcctttagtggatcaaggtcaggtgggcatgtataagcgaatgatgcttgtttaa

SEQ ID NO: 18929 - DNA, 372 bp, Chlamydia trachomatis
atggtaagagcaactggttcagtagcttctagagcgcgtcgtaagcgcattttgaaacaagcaaaaggattctggggggacagaaaggggcatttccgtcagagccggtcttccgttatgcgggctatggcttttaactacatgcaccgaaaagatcgtaagggcgattttagaagcctttggatctctcgtttgaatgtggcttctcgaattcatggtttgtcctatagtcgcttgattaacggacttaagcaagctggaattaatttgaatagaaagatgttgtctgagatggctatccatgatcctcagggatttgctttagtagctgctcaagctaaactcgctttggaagcttctattcagggataa

SEQ ID NO: 18930 - DNA, 1026 bp, Chlamydia trachomatis
atgacaattcaagaggaacttgaggctgttaagcagcaatttagttgtgatttaagccttgtgcattcttctaaagatctttttgatttgaaagtaaagtaccttggtaagaagggaatctttcgagggtttgcggatcagttgagggagtgtcctgtagagcaaaaagcgactattggagcttccatcaatgcttgtaagcagtacattgaggaagttttacttgaaaaaagtcaggtcattttggccaaagaagaggcagaagagttccttaaagagaaagttgatgttagtttgcccggagaggatgctcctcttgggggcaagcatattatcaagaaagttctcgatgatgttgtagacatttttgttcgttttgggttttgtgtccgggaagctcctaatattgaaagtgaaaagaataacttttctctgcttaattttgaggaagatcatcccgctagacagatgcaggatactttttatctcgatccggttactgtcttgcgtacacatacttcgaacgtgcagtctcgggagttagcgagaaataaacctcctgttagagtcgtcgctccaggagagtgtttccgtaacgaagacatctctgcacgttctcatgtgacctttcatcaagtagaggcttttcatgtagacagagatgtttctttttcggacttgacatcgatgttgtcggggttttaccatatcttctttggtcgtaaggtagagttgcggtatagacacagctacttcccttttgtggagccagggattgaggtagatatttcttgcgagtgccgtggggctgggtgttctttatgtaaacactcgggttggttagaggttgctggtgctgggatgattcatccgaacgtcttgcgtcaagcaaatattgatccggaagaatattctggatatgctttgggaatgggtatagagcgtcttgcgatgcttaagtacggaatttccgatattcgattgtttagcgagaacgatttgcggtttttgcgacaattttcttaa

SEQ ID NO: 18931 - DNA, 966 bp, Chlamydia trachomatis
atggtaatccgtttattcgagaatgataagcaattagaagtttttttttcttctttagacaagaaaaaaaaatacttgctggcgttatccggcgggagtgattccttattattaatgtatttgctgaggtctcgaggcatttctttcacggctgtacatgtggattatggctggagggagacttcatatcaggaagcttgtgatttggcttccttatgcgagcgggaacaaattccttttattttagatcgccaggaagtcgcaaatcctatggattttagtgacatcgagaatattgctcggcaataccgttacgagttattttatcgattgtgtaaagaacgacttttcgcaggtgtgtttctagggcatcatgcagatgatcaagcagaaaccattttgaaacgggtatttgaaggagctcatcttggaaatctcaagggaatggcacggtatggaacatataagggcataacattactgcgaccgcttctacatattactaagaggcaaattgttgaagctcttgataattatcgaattgagtatgttcaggatgccacaaatgctgatgaacgctttttacgtgcaagaatgagggaacaattattcccttatctacaagagattttcgggaaaaatatcagacagcctttgctttttcttgcggaagattctgcagagctcagagagtacttagatcagcaagcagcaccttttttatcgcaggttattgataatgagataggacaatttctacctgtgggacaagagttattacaaacggcctttttgacaaagtgggtatgtaagcagtttttcttcaagcaggggcttgtcgcttcaaagggttttttgcaaacggtttatgatcatctcgtgcgaagatctgaggcaagattacgacttcgtaatcgaaccgtattggtaaaagctaggggagtaatcatagaaagtatatattga

SEQ ID NO: 18932 - DNA, 2763 bp, Chlamydia trachomatis
ttgattagcattgtagtgagttttatggctaaagataaaaaaacaaatccagaatctaaaaaaagttttcctactgcttttttctttcttttgttcggagtaatttttggcgtagttacagtccaaaactttttctctgctaaaaaagcttcggtgggcttcagccatcaactcgaacatctcgtgaatctcaagttactgattccagaagagagccgtaagatcgctttgaatgataatttagtgtcattcagtggacgtttccgagaatctgttccagctgaaggtcaggttcggtaccagtatcttaatcttattgatcgtaaacatcagatagattttgagttggaagaaacaacgacatccttgtcggttttatcaaaagaagttcgtaatgcggtcacttggttttcagctatttctggaatgccaatccctgaatccggttatactatttctcctcgaacggatgtaggactttcggttttagagcctttagttattcatggtcctgtaagtgttcagattgtgaatctggctactttggaagaccgggtacgttctttacctagatctgcagaaagtcttagagtttttggttccgatttgtatgcgttgattgggaaatatctttcgccagctttgggaataggctctgaatccttgaaaaaagaaattaaggatttgtatcagcaggtagaaagttctctaactcaagttgttgaaggggagcaggctatcaccttgtacaaaacagtattagagactttacataggatttctttatcgcttgtttctccagaggatggagctcgtttcaatcaattgcgttccgtacgtctgtatcgtgaagatttcaacagatgtatgaaattattaggggaaagtgatgaaattcaagctcagctcgacaaaattcggggtgaattagtccaggctgtttggtatttcaataaccaagagctttcttctcgagctttagagaaacaagatcctgaagttttcagccgatggtttgaaggtgctaaacaagagtgggccgcgttctctggaaacaaatctttgtcatttagagctccagaccagccacgaaatttagttttagaaaaaacatttagaagtgaagagccaactccccactattctagttatcttttcacttttatgccgattattttggtcctgctatttatctactttatcttttctcgtcaggtaaaggggatgaatggttccgccatgtcatttgggaaatctcccgcgagattgttaacaaagggacagaataaagtaacgtttgctgatgtagcagggatagaggaagctaaggaagagcttgttgagatcgtagatttcttgaaaaatccaactaagtttacgagcttagggggacgtattcctaaggggattcttcttataggggctccaggaacaggaaaaactttaattgctaaagctgttgctggtgaggcagaccgtcccttcttctccatagcaggctctgatttcgttgaaatgtttgtaggggtcggtgccagcagaattcgagatatgtttgagcaagctaaacgaaatgctccctgcattatttttattgatgaaattgatgctgttggtcgtcatcgtggtgctggtattggagggggccatgatgaaagagagcagactttaaaccagctattagtggaaatggatggcttcgggacaaacgaaggggttatcctcatggctgcaacaaaccgtccagatgttttagacaaggctttgttacgtccaggacgatttgatcgccgtgttgttgtgaatctccctgatataaaaggccgtttcgaaattctttcggttcatgctaaacgcatcaaattggatcctactgtggatctcatggcagttgctcgtagtactcctggagcttcaggagccgatttagaaaatcttctgaatgaagcggcattgttggctgctagaaaagaccgtactgctgttactgcggttgaggttgcagaggctagagataaggttctttatggtaaagaacggcgtagtttagaaatggatgttcaagagaaaaagacaacagcatatcacgaatcaggacatgctattgttgggctttgtgttgagcattcggatcctgtggataaggtaaccattattcctaggggattgtctttaggggctacacacttcctcccagaaaaaaataaattaagctactggaaaaaagagctttatgatcagttggctgttcttatggggggacgagctgccgagcaaattttcctaggggacgtttctagtggagcacaacaagatattgcgcaagcgacaaagatcgtacgtagtatgatttgtgaatgggggatgagcgatcagttgggaaccgtagcctatgatgagcgttcggatgcagctcctactggatatggatcttatcatgaaaaaaattattcagaagagacggctaaatccattgataatgagctcaagactctattagatgctgcatatcaaagagctttggatattattaacagtcataaggaagaattagagcttatgactcagatgttaatagaatttgaaactttggattctaaggatgttaaagaaattatggaccattcttgggatgcagagaagaagcgtgctcgtatgaaggaagaaggtatgttgtataagaaagtatcagaagatcttcctcctccccctccccaagaagatgtgcaggatggaacgttgaagtttaatatcggcacgtaa

SEQ ID NO: 18933 - DNA, 2082 bp, Chlamydia trachomatis
atggcttttgagactttttctgttgcgttagacaaagataagacactgattttcgagacagggaaaatagctcgccaagccaatggagctgttcttgtcaaaatgaatgaaacttgggttttttcatcagcgtgcgcggcctctttatcagaggccgtagattttctgcctttcagagtagactatcaagaaaagttttcctccgcggggaaaacctctggaggatttctgaaacgcgaaggtcgtccctccgagaaagaaattcttatttctcgactgatagatcgctctttgcgtccatcattccctaatagacttatgcaagacattcaagtcttgtcctacgtttggtcttatgacgggaaaactttaccagaccccttagctatttgtggagcttctgcagctttagctatctcagaggtccctcagaattgtattgttgcaggtgtacgcgtcggtctcgtcgaaggaaaatgggtagttaacccaactaaagatgagttagacgcatccaagcttgatctcgttatggcaggaacagcttctgcggtattaatgatcgaaggtcattgcgactttttgactgaagagcaagttttagaagctattgcttttggacaaaaatacatagctaaaatatgtgacgctattgaagcttggcagaaagcgattggtaaggaaaaacagctctcggctgtccttgatctgccggaagatgtgcaaaatgttgtttcgaattttattagagaaaaattcgaaaaagcactgtcttttagagatagagacgctttagaacaagtctcaaaagagttagaagaatctgttgtcgccaacttagttcaagaagaaagtgatttttctttattgaacgtgaaagctgcatttaagaatgcaaaatccaatcaaatgcgagctttaattagagatctcggcattcgcgtagacggacgaagtacaacagaaattcgccctatttccatagaagtctctttccttccacgaacacatggaagctgcctatttacccgtggagaaacacaaagtgtagctgtatgcacacttgggggtgaaagtatggcacaacgatttgaagacctaaatggggatggagcagcgcgcttttatttgcagtattttttccctcctttctctgtaggagaagttggtagaatcggatctccagggagacgcgaaataggtcacggaaaattagctgaaaaagctttaagtcatgtccttcctgaagcatctcgattcccttacactgttcgagtggagtctaatattacagaatccaatgggtcttcttctatggcttctgtatgtgggggctgtctttctctgatggatgcaggagtgcctatcaaagctcctgtagccggcattgctatgggtctaatcctagatcaagataaggctattgtcctttctgatatttcagggatagaagatcatctcggcgatatggattttaaagtcgcgggaactgaagaaggaatcacagcattccaaatggacattaaagtagaaggaattacccatgagatcatggagcaggcgttggcccaagctaagcaaggtcgaagccatatcctaaatcttatgacacaggtaatgtcttctcctaatgattctgtttccagatatgctcctcgtattgaaactatgcaaatcaatacttcaaaaatcgcgacagtaataggtcctggagggaaacagatccgtcaaattattgagcgatcaggagctcaagttgacattaacgataacgggctcattaacatatcagctaacacccaagaatctatcgataaagctaaggagcttattgagggattaacgggagaagttgaggttggcaagatctataacggccgagtcacttccgttgtggcctttggagcatttgtagaagtccttcctggtaaagagggtctttgtcatatttcagaattgtctaaacaaaaagtagacaatgtagctgatttcgtaaaagaaggtgatcgcctagcggttaagttgctcagcatcaatgagaaggggcaactaaaacttagccataaagcaactttagaatag

SEQ ID NO: 18934 - DNA, 270 bp, Chlamydia trachomatis
atgtctttggataagggcactaaagaagaaattactaaaaaatttcaacttcacgaaaaagacacaggttcagcggatgtgcagattgctattctgactgagcacataacggaactcaaggagcaccttaaaagatctcctaaagatcaaaattctcgcttggctttgctaaaattagtagggcagagaagaaagctcttagagtacttaaattctactgatactgaaagatataaaaatttaatcgctcgccttaacttgagaaaataa

SEQ ID NO: 18935 - DNA, 615 bp, Chlamydia trachomatis
atgctacattcactgtttcgccttaccttacttttttatgctctttttaactccctgggatctttaccagtctttgttgcgttattgaagaagttctctttccgaaagcagcagcgcattattttgcgggagtgtatctttgctctgctcaccttgattttgtttataacatttggtcaaggattcttccgtttactagaagtctctttaccagcatttcaattaacaggagggattcttcttggatcccttgccattaatatgatgaaagcgcttccttcccaagaagaaacctttgaccaatacgaggatgagccaatattctatcctttagcgtttcctgttatcacaggtcccgctacgatcacatctaccttaggacatatggaagaaggcatctttccaaaagagcttgttttaggagctattatgctcgcttgggctttctccttgattacgctctttttttccagctccattaaccgattgttcggccaaatggggttgctggctttagagagattgtttggcattagcttagccttaatggctggaaatcttatgttaaaagctatttccacagctttcaatatagggtattatgttatggcctag

SEQ ID NO: 18936 - DNA, 1818 bp, Chlamydia trachomatis
gtgataaaaaatagaaagattgtcctacggaaaagttccttacctctcttctcgttggataaattcctttctactataagaaaagaaccatctttttcgaacacagaagaggtcctggtgaaagtttcactatcctttaaacaccttgtccctaaactagttacctgcttaaaagaagggtattctttcaacacattaaaaaaagattttattgcggggctgactgcaggaattctagcctttcctttagctattgccatcgcgatagggattggagtttctcccttacaggggttattagcgtctatcattggaggatttcttgcctctgctttgggaggcagtcgtgtattgatatctggccccaccagctccttcatttctattctttactgtattggtgtcaaatacggagaagatggactgtttaccatcacattaatggccggaattttcctaattattttcggtctcgcagggttaggaacttttattaaatacatgccctatcctgtggttactggtctgacaactggtatcgcagtgattattttttcttctcaaatccgagattttcttggattacaaatgggagatggcgttcctctagattttattggcaaatgggtagcttattgggattatctatggacctgggatagcaaaacctttgcggttggcttatttactctacttttaatgatctattttcgaaattataaaccccgctaccctggagtaatgatttccattatcattgcatcaaccttagtatggattctcaaaatagacatccctactataggtagccgatatggaactcttcccagttctttacctggacctgttttcccgcatatcagcattacaaaaatgctacaacttatgccagatgcattgactattgcagtactttctggaatcgagaccttgctagctgctgtggttgccgatggaatgactgggtggagacatcaatccaattgtcagctaattggacaaggaattgctaatattggaacttctttgtttgcaggcatgcctgtcacggggtctctttccagaaccacggcaagtattaaatgcggcgctagcacacctattgcagggataattcatgcaatctgtctcacctttattctactacttttagctcccttaacgattaaaatacctttaacatgtctggctgcagtcttgattttaattgcttggaatatgagtgaaattcaccacttcatccatctattcactgctcctaaggaagatatcttagtcttactaacagtgttcatccttacggtaatgactacaatcacttctgccgtacaagtaggaatgatgctcgcagcttttttattcatgaaacgaatgagcgatctttccgatgtcatttccactgcacagtattttgatgagtcagaacaacctcagaatgatctactatttagcaaaaatgaagtgcctccttttacagaaatttatgaaattaatggcccttttttctttggaattgctgatcgattaaaaaatttattaaatgaaattgaaaagcctccaagaattttcatcctttgcatgaccagagtacctacgatcgatgcatcggcaatgcatgccctagaagaatttttcttggaatgcgatagacaaggaactttactgctcttagcaggcgtaaagaaaactcctctcaatgacttaagaagatatcacgtggatgagttgatcggagtagatcacatattttcaaatatcaaaggagctttattatttgctaaagctcttattaagctagagagcaaatcttctcaatag

SEQ ID NO: 18937 - DNA, 906 bp, Chlamydia trachomatis
atgtccatgcttttcccccttcatcaacagttgatagaacagtttacaatctttctttctgtcgaccgcggtatcgcccctctttctgttcaagcttattgccaagatatccttctttttttgcaacgcgtacccattgaaactacagacatgatcaaccaagagagtgtttttctttttgtagaaaaatgtcatcaagcaaaagaatcagaaacgactttagcaaggcgattgattgccctaaaagtgttcttccatttcctaaaagacgctaagcttatccatcagcagcctttcatagaacatcctaaagtctggaaaaggcttccttctattctttcaacagaagaagtcaactccctactgaatcagccgcttaatactctgaatttagatgcttatatagcaaacagagatacggctatcctttatacattttatgctacaggaattcgtgtatccgaactctgtgatctttgtattggagatatcagtgatgattttattcgtgtgactggaaagggcaggaaaactcgtctcgttcctattagtatcaaagcacgacagactattgattcgtacttgaccatgtttagagaaagatttcaaaagaaaaatccctctgaagaacatgtatttttgtccatcagagggaaaaaattagaacgctcttgtgtatggaagcgcattactttctatgcaaaactcgtcacaacaaaacacatctcaccacactctttgcggcacgcatttgccacacacctactcaacaaccaagcagatctccgaattattcaagaaatgctaggacatgcacgcatctcttccacggaaatctacacgcatgtagcttctgagagcattattgaaaaatttcacacccatcatccgaggagtagttcctag

SEQ ID NO: 18938 - DNA, 303 bp, Chlamydia trachomatis
atgacacagtcatatgtaaataaagaagaaattatttctttagcgaagaatgctgcattggaattggaagaggctcacgtagaagaattcgtcacatctatgaacaatgttatagctttaatgcaggaggtagtcgctatagatatctcggatatcattcttgaagctacggtgcatcatttcgttggcccagaggatcttagggaagacatggtaacttcagattttacccgagaagaatttttagctaatgttcctgtgtctttaggaggattagtcaaagtccctacagttatcaaataa

SEQ ID NO: 18939 - DNA, 1476 bp, Chlamydia trachomatis
atgtatcgtaagagtgctttagagttaagagatgctgtagtgaatagagaaatttcagttacagcaataacagagtatttttatcatcgtatagaaagttatgatgaacaaataggatcttttctttctctctgtaaagaaagggcgttacttagagcttcacgtatagatgataaactcgcaaagggagatccaataggtatattagccgggatccctattggagttaaagataatattcatatcacaggagtgaaaactacctgcgcatcgaaaatgttggaaaactttgtagctccttttgatgctactgtggttagacgtattgagatggaagatgggattttgctgggtaagttgaacatggatgagttcgccatgggatctacaactcggtattcggctttccaacatactaataatccttgggacctggagcgtgtccctgggggatcatcagggggatcagcagctgcagtttctgcaaggttttgtcctattgctctaggatctgatacaggtggatctattcgtcagccagcggctttttgtggagttgttgggttcaaaccttcttatggagccgtttctcgctatggactggtagcttttggatcttccttggatcaaattggtccgttgacaactgttgttgaagatgttgctttggccatggatgcttttgctggtcgcgacattaaagacgcaacaacaagagattttttcagagggacgttttctcaagcattatctctggaagttcctaagttaattggagtccctagggggtttttagatggtcttcaggaagactgtaaagaaaactttttcgaagctcttgctgttatggagcggcaaggtagtcgtatcattgatatagatcttagcgttttgaagcatgcagttcctgtgtattatattgttgcttcagcggaagctgctacaaatttagctcgatttgatggagttcgctatggtcaccgttgtgcacaggcggacaatatgcaagaaatgtatgcgcgttctcgcaaagaaggattcggaaaagaagtcactcgaagaatccttttagggaattatgttctttctgcagaaagacaaaatattttttacaaaaaaggaacagcagtccgagctactttaatagaagcttttcaatctgcttttgaatgttgcgatgtgattgcaatgcctgtatgtgcttcccccgctattagagatacggatgttcttgatcctgtttctctatatctacaagatatttacaccgtagcggtaaacctcgcttatctgccagcaatttcagttccttcagggctttctaaggaaggacttcctttgggagtgcaatttatcgggaaaagaggagcggatcagcaaatttgccaggtagggtatagtttccaagaacattcgcaaatcaaacaattatatcctaaagcagtgaatggactttttgacggaggaatggagtaa

SEQ ID NO: 18940 - DNA, 1467 bp, Chlamydia trachomatis
atgggtatagcacatactgaatgggagtctgtgatcggtctggaagtgcacgttgagttgaatactgcatcaaaattgtttagtcccgcgcgcaatcattttggtgatgagcctaatacgaatatttcccctgtatgcacggggatgccgggagctttaccagtcttgaataaggatgcggtgcgtaaggccgttttatttggatgtgctgtcgaaggggatgttgctttgttcagccgttttgatagaaagtcgtatttttacccagacagcccaagaaattttcaaattacccagtacgagcatcctattgtgagaggcgggtgtgtgcgtgctatagtagagggagaggaaaaaacctttgagcttgcgcagacgcacttagaagatgatgctgggatgttaaaacatttcggggattttgctggggtggattataacagagcaggagtccctttaattgagatcgtttctaaaccttgtatgtttagtgctgaagatgccgtggcttatgctaatgctttagtatctattctgagctatatcggtatttccgactgtaatatggaggaaggatcggttcgtttcgatgtgaacatttctgttcgcccaaaaggaagtaaggaacttagaaataaggtagagattaaaaacatgaactcctttactttcatggcgcaagctttagaggctgaaaaacatcgacagattgaggagtatcttagtcatccaaatgaggatcctaaaaaggttgttccagcagccacctatcgttgggatccagagaagaaaaagacagtgctgatgcgtcttaaggagcgcgctgaagattatatgtattttgttgagccggatcttcctgttttacaaattacggaatcttacattgatgaagttcgtcaaacattgccagagctgcctcatagtaagtatatgcgttatattacagatttcgatcttgccgaagatcttgccatgattcttgtgagtgatcgacatacagctcatttttttgaaacagcgactatgtcttgtaagaattatcgcgccctttctaactggattacagttgaatttgcaggccgttgtaaagcgacagggaaaacgctcccatttacaggaattcttcctgaatgggtggcgcaactagtcaatttcatagatcgtggtgtgataacaggaaaaattgctaaagaaattgctgataagatggtttcttctttcggagaaagtccagaagacatcctgagaagacatccttcattattacctatgactgatgatcacgctttgcgcgctattgtaaaagaggtcgtggctcaaaatgcagcatctgtagaggattacaaaaatggaaaagcgaaagctttgggctttttagttgggcagattatgaagcgcacagaagggaaagctcctcctaagagagtgaatgaattgttgttagcagctatgcgtgatgcataa

SEQ ID NO: 18941 - DNA, 456 bp, Chlamydia trachomatis
atgggtgctaacaagaggaattatatgagcgaacatgtccataaagagttattgcatttgggaggagttttccgttcgcaaagagaagaaaaagctatttctctaaaagatgttgaagctgcaacatctattcgcctgtctgcattggaagcgatagaagctggacatttaggaaaattaatttctcctgtgtatgcccaaggatttatgaaaaaatacgcagattttttagggttagatggggataaattacttaaagagcatccctatgtactgaaaatctttcaggaattttctgatcagaatgtagacatgttgcttgatttagaatccatggaggggagaaactctccggaaaaagctattcggagttggttaaacttgggttgggcaggcgcgtttgttttaggagtagcttgtatctggtggttggggactttgctacattttttctaa

SEQ ID NO: 18942 - DNA, 1341 bp, Chlamydia trachomatis
gtgcgaacgttgtctatttctatgctcattcttgccctttcttgtggggaaaacacctgcttatgtgctgcggattcccccaaagcgaaagttgatgcttccatcggtaatggggcaagtttttctccatttacaggagaaatcaaaggaaatcgtgtgcgtctacgtctggctccacacacggatagttctatcatcaaagaattatctaaaggtgactgcctggctgttttaggagaaagcaaggactattatgtagtggctgctcctgaaggggttaggggttatgtgttccgcactttcgttttagataatgttattgaaggggagaaggttaacgttcgtttggaaccttcgacttccgcacctattttagcaagattatccaaaggaactgttgtgaaaaccttgggtgctgcgcaggggaaatgggtggaaattgctcttcctaagcagtgtgtcttctatgttgctaagaatttcgtcaaaaatgtgggtgctttagagctatacaatcagaaagaagggcagaagaaaatcgctttagacttgttaaattctgctatgagtttcgctgatgctgagttgcagaaaaaggtagaagacattgatctagatgccatttataagaaaatgaatctagctcaggcagaagagtttaaagatgttcccgggttacaacctttagtacagaaggctttggaaagagttcaggaagcttttcttgcaaagtccttggaaaagggctcacacaaaactgtagaatcctacaaacctgtggaaactcaagctcaattacagccacagcgtcaggttatagaagaaaagaatgtgtcggtggttccagaggcgccggttttgtcgcaagtagaagagccgaagagtgtcctaacttcctctagtgaagtagaacctttgcaggacgttggtcctataaaaggttcgctgttatctcattatattcgtaaaaagggatttgttaagacttctcctgtggtagaagggagagagagctttgaacgatctttgtttgaggtttgggtaaatcttcaacctgaagagattcgaaatggactgactatggagtctttctatagagatgagcagaagaaaaaacgggtgctgaccggggaacttgaggtatatcctcatatcgttaaaaataatccaggtgattatcttttgaaaaatggagaagatgtagtggcatttgtttacgccacgagtattgatttaagtaaatggctagggaaacgtgtggttttagaatgcgtttctaggccgaataatcactttgcctttcctgcctatattgttttgtcgataaaagagggcgcttga

SEQ ID NO: 18943 - DNA, 3111 bp, Chlamydia trachomatis
atggataacgaagataaggtgagttttcccgccaaagaggaaaaggttctaactttttggaaagaacaaaacatttttcaaaaaactttagaaaatcgagatgggagccccactttttctttttatgatgggcctccatttgcgacgggattaccccattatggccatttattagctggcacaattaaagatgttgtatgtcgttatgctacgatggatgggcattatgtgcctcgacgctttggttgggattgccatggggttcccgttgagtatgaagtggagaaatcattaggtttaacggaacctggagctattgatcggtttggtatagctaactttaatgaagagtgccgtaagattgtttttcgatacgtcgatgaatggaaatattttgtagatagaattggacgatgggttgatttttcagcaacgtggaagactatggacctatctttcatggaaagtgtttggtgggtattccattctctttataaacaggggcttgtgtatgaagggacgaaggttgttcccttttctaccaaactagggactccgctgtctaatttcgaagctggtcaaaattataaagaggtggatgatccatctgttgttgcgaagtttgccttgcaagatgatcagggcattcttttagcatggacaacaactccttggacgcttgtttcgaatatggctttggctgtgcatccaggacttacctatgtccgtattcaagacaaggaatcaggagaagagtacattcttggtcaagaaagtctggctcgttggttccctgatcgggaatcctataaatggataggacaattgtctggggaaagccttgttggtcgaagatactgtcctttgttcccttatttccaggatcaacaggatcggggagcttttcgtgttattcctgcagactttatcgaagaaagtgaagggactggtgttgttcacatggctccagctttcggagaagcagacttttttgcttgccaggaacataatgtgcctttggtatgtcctgttgataaccaagggtgttttacttctgaagtgactgattttgtcggagaatacattaagtttgcagataagggaattgctcgtcggttgaagaatgaaaataaattgttctatcaaggcactattcgtcaccgttatccattttgttggagaacagattctccattaatctacaaagcagttaattcttggtttgtctctgtagaaaaagtaaaacacaaaatgctgaaagccaatgaatcgattcattggactccgggacatatcaagcacgggcgttttggtaaatggcttgagggggctcgtgattgggccattagcagaaatcgttactggggaacgcctatacctatctggcgtagtgaagatggggagcttcttgtcataaggtctatccaggagctagaagaattatctgggcagaagattgttgatttacatcgtcattttattgatgagattgtcattcataaaaatggaaaaagtttccatagaattccttatgtttttgattgttggtttgattctggggcaatgccttatgcccaaaaccattatccttttgaacgtgccgaagaaactgaagcgcgtttcccagcagatttcattgctgaagggcttgatcagactcggggctggttttatactttaactgtaattgctgcagctttgtttgatcaaccagcttttaagaacgtaattgtgaatggaattgttcttgctgaagacggaaataaaatgtctaagcgactgaataattatccaagtcctaaaaaaattatggatacgtatggtgcggatgctttgcgcctgtatttgttgaatagtgtcgttgtcaaagccgaagatttaaggttctctgacaaaggggtggaggctgtactcaagcaagtgcttttacctttgtctaatgctttggctttttacaagacttatgcagagttgtatggtttttctccaaatgaaacaacagacttagagcttgctgagatagatcgctggattctttcttctttgtatagcttagtagggaaaactagggaaaacatggcgcagtatgatttacatgccgcagtaagtccctttatagatttcattgaggatctaacaaattggtacattcgtcgatcacgtcggcgcttctgggaatcagaggattctccagaccgtcgagctgcttttgctaccctttatgaagtactgatggttttttctaagattatagctccgttcattccttttactgctgaggatatgtatcagcaattgcgggttgaaacggatcctgaatctgtgcatttgtgtgatttccctcacgttgttttggaaaaaatccttcctgatttagaaaagaagatgcaagacattcgggagatcgttgctttaggacattctctacgtaaagaacataagcttaaagttcgacagccacttcaacatatgtatattgtcggtgctaaagaacgaatggctgcgttggctcaagttgactcattgattggagaggagttgaatgttaaggaagtgcatttttgctcagagactccagaatatgtgactactcttgttaagcccaatttccgttctctaggaaaaagggttgggaatcgtctccccgaaattcaaaaggctttggcaggactttctcaagagcaaattcaagcgtttatgcataatggctttatggttctttctttaggagaagaaacgatttctctaaatgaagaggatattaccgtgtcctgggaagccgctccggggtttgtagcaagaagctcagcctcttttgtagcgattttagattgtcaactaacttctcctctgattatggaagggatagccagagaaattgtaaataagatcaatactatgcgaagaaatgggaaattacacgtttcggatcgtattgctatacgtttgcatgctcctaaaattgttcaggaagctttttctcaatatgaagaatatatttgcgaagagacattaacaacttcggtttcctttatagatgacaaggagggagaggagtgggatgttaacggtcacgcggtctcactgtccctagaggtgattggtcattga

SEQ ID NO: 18944 - DNA, 1884 bp, Chlamydia trachomatis
atgacgagcaattacatgagtcgcttatattccttgaataagagtcgtcgcattcttcattcctcctataaattgctgaaaaataagaaaatgctctcttatcctgatactcagaaggaattacttgaaatcttaaaacagcttgaagaagccattttggatcaaaatagagaagacgcctctcttttcgctaaacaagctcaagctattcaaaaacgattccctcggtcaaaaatacaggcaacttttgatctcatctatgctttagcatttgctgcagttcttgcttttttaattcgtcaattctggtttgaactatatgaagttcctacaggatcaatgcgacctacaatccttgaacaagatcggattctggtctctaaaactacatttggacttcgcctgccttttagtaatgaaagtattggctatacaccggagactattacccgaggagaacttgttgtctttaccgttggagaccttcccatcccgaacgctgacaccaaatatttcggaattatacctgggaaaaaacgttatataaagcggtgcatgggcaaacctggagacactttatacttttatggggggaaaatttatggaatagatcgtaatggcgtccctatcaccacaaaaaatacagaaaacctttatcacatcccctatatctcttttgatggcgttacagaaatcgttaatcattcagatgatcaaactgatgtgatctttaaccaattccatactccctgtgggaaaatttccttcccccactattctcatgggcaatttttctacaaagatgcttggcacaaagacaccccctatgctttaaaagaccttcataccgagcctttaagctatgcagacctatttggcataaaaaattttgcaatggtgcgtattcttacaaaaaaacaagctgcgcttactcacgtactttcttctcctttagcagatgcctacttagaaattgcacatactcctaatgtctcttatcctcatccgcatttgcgtccgttagaaacgcaacttatccccactattgagcctatgaaaactctccttcctctaaggaaggagcacatgcatttgatccgtaataaccttacaacatctcgtttcacagttattgatggatatgcctacaaatatcaacccactccaattaatacttctggcatagcaaaaatatttgctcttccaatgccaaacattccggatggctgttatgagttttctaaaggggatgtgtttaaaattagtataggaggtttccgcactaaactgaaacaaccccatcctttgacgcaattgagccattctcagattattgatttattcaactgcggcattagttttcatacagtctatatccccaaaaatcctcaatacgccccttttcctaatcgttatgcttttttcaatcagggaaacctatttgttatggattccccagttttcattgacagtgatccttcattacaaaaatttatcttggcggaaaaagaaaaggagcttcagtcctctgaagaaaaaccctacattgccttcattgatcgaggacctccccctgaatctgcagaagaatttacttcttttattacaaattttggacttaaaataccggaagggcatgtgctcgttttaggagataattgtcctatgagtgcagacagccgtgattttgggttcgttcccgtagaaaaccttttaggatccccggtagctattttttggcctattaaccgtataggatcattatcttctagtatcaccccgttgagcttacctggttatcttgttaatggattagccttaggagctcttatttactttgtgggtgcgtggtattatcgaaagaatcacaggttattcccctaa

SEQ ID NO: 18945 - DNA, 327 bp, Chlamydia trachomatis
atgaaaaaaaacactcatcctgagtatagacaagttctgtttgtagattcttctaccggttataagtttgtttgtggatctacgtaccaaacagataaaacagaggtttttgaaggacaagagtaccctgtatgttacgtcagcgtttcctcatcttcgcatccgttctttacgggaagtaagaaacttgtggacgcagagggtcgcgttgataagttcttgaaacgatacagtggcgttaagcagatggctcctaagcctgaaacttctgtagaagaagttcttccaaaaggtaagaaaaaagctcctgctaaaaagaaaaagtag

SEQ ID NO: 18946 - DNA, 1080 bp, Chlamydia trachomatis
atggaagtaaaagttttagagtgtttgagacgccttgaagaagtcgaaaagctaatatctgatccaaatatttttagtaatcccaaggaatatagttctttaagtaaggagcatgctcgtctttcggagattaaaaatgctcacgaatcgattcttgcggcaaaaaaaattcttcatgatgacaagttagccttgtcaacagagaaggatccggagatgattgctatgttggaagagggtattcaaggaggagaggagtccttagaacgtctgtctaagcaattggaaaaccttctcatcccacctgatccggatgatgatttaagtgtcattatggagttgcgagcagggacaggaggagatgaagcggctcttttcgtaggcgattgtgtgcgaatgtatcatctttatgcatccatcaaagggtggcagtgtgaagtgctttctgcctcggagtccgatcttggtggatacaaagaatatatcatgggagtttcagggacctctgtgaaacgattcttacaatatgaggcagggacgcatcgtgtccaaagagttccggagacggaaactcagggaagagtgcatacttcggccgtgactattgctgtccttcctgaacctgcagaagatgacgaggaagtttttattgatgagaaggatctacgtatagataccttccgttcttcaggagctggagggcagcacgtaaacgttacagattctgccgtacgtattacgcatattcctactggcgtggtggtttcctgtcaagatgagcgtagtcaacataaaaataaggcgaaagctatgcgagtgttgaaggcgcgtattcgagatgcggaagtgcagaagcgagaacaggaggcttctgctatgcgttcagcgcaagtagggagtggggatcgctcagaaagaattaggacttataattttcctcaaaatcgtgtgactgatcatcgaatcggtctgactttatataacttggatcgtgtaatgcagggagagttggatatgattacaacagctcttgtttcccatgcacatcgccaactgttcggtcatgaagagactaattaa

SEQ ID NO: 18947 - DNA, 1347 bp, Chlamydia trachomatis
atgattaattctttatcgcaaaaattatctagtattttctcctcactttttactgcaaagagagtaacagaggagagtatttctgattccattagagaaattcgcctagctcttctagatgctgatgtgaattatcaggcggtgaaagattttatatccaaggtaaagcagaaagtcattggggaagaggtctggaaacacgtatccccaggacaacagtttgtgaaatgtttgcatgaagagcttgcggctttgctttcttcacaacaggctagtttattgttgcaggggcgtcctgcggttgttttattttgtggattgcagggagcgggtaagacgactacatgtgccaagcttgccgactacgttcttcgagagaagaaagcaaaaaaagtgttagtggcttcttgtgatttaaagcgtttttcagcagtggaccagctggagggcttaataaagcaaactggggcagattttttccgaaaaaaaggagaaaatcctgtgagtatggcatcagaggcggttcgctacgcaaaggatcaaggttatgatttattaatcgttgatactgctggtcgacttcatgtggatgatgcattgatggatgagctggtggccattgctcgtgtaacgaatccgtccgaaatcttattcgttatgaatttagcgatgggccaggatgcagtaactactgcgaaggcttttgatgagcgcttagggttaactggtatcgtcgtgtccatggcagatggcgatgctcgggctggagcagtcttatcagtgaagtctttgcttggcagacctattaaatttgaagggtgtggggaaaaaataaaagatctacgtccttttaacgcacagtctatggctgaacgtatcctaggaatgggagatacaataagtttagttgataagatgcgtgagtgtgtctctgaagaagagaacaaagagttagaagaaaaattaacgaaagcgacgtttacttatgaggatttttataagcaaatgcgagctttccgtcgtttagggcctttgcgcaaaatcatgaatatgatgccaagcttcggtggcatgaggcctagtgataaggatttggaagaatccgagaagcaaatgaaaagaaatgaggcgattattctttctatgactccagaggaaaggaaggagttggtcgaactgaatatgagccggatgaaaagaatcgctgcgggctgtggcctgactttaggtgatgtaaatcagttccgtaagcaaatgatgcaatctaagaaattttttaaagggatgacccgagaaaaaatggaacagatgggtaaaaaaatgtctggagggaatctgtggcgttaa

SEQ ID NO: 18948 - DNA, 351 bp, Chlamydia trachomatis
gtggcgttaaaaattcgtttaagacaacaaggacgcaagaaccatgttgtatatagattagtactagctgatgtagaatctcctagagatggtaaatatatcgagttgttagggtggtatgatcctcatagtgaacaaaattatcagctaaaaagcgaacggattttttattggctgaatcaaggagccgagcttactgaaaaagctggggcgttggtcaaacaaggagctcctggagtttatgctgagttaatggctaaaaaaaatgctcgtagagcagtcgttagacaaaagagacgagcttatcgtcagcgacttgctgcgagaagggcagaagcagctgctaagtaa

SEQ ID NO: 18949 - DNA, 1059 bp, Chlamydia trachomatis
atggagatagatattctttctttattcccggactattttactagtccactacaagcaaccattttgggccgagctatcaagcagggagctttatctattcgttcccgcgatattcgagagtttggtttagggaaatggaagcaagtagacgatgccccttatagtggggagggaatgcttttgatggctgagccggttgtgcaggctattagaagcgtaaaaagagagaaatctaaagttgtatacctatccccgcaggggcagcttctttctgctaaaaagagtcgagagctctcgttgtgtccgcatttaattttgttatgtggacattatgaagggattgatgaaagagctttagcttctgaagtggatgaagagataagtattggtgattacgttcttaccaatgggtgtgcggcagcgttggttcttgtagacgctcttgctcgctttattccaggcgttttgggaaaccaagaaagtgcggaatgcgattctcttgaaaatgggttgttagaggggcctcattacacccgtccacgagtttttgaaggcgtacaagttccagagatacttttttgtggagatcaccaaagaatcgcaaattggcgaaagaaggttagtttagagagaacaagagaacgccgaccggacctgtatctgcagtatttttatggtgatagagctttttggggtgcccaggaggatcctcttaaaatgagagaaacttctccccaagctttttctgtagttttagaagttaaagatcttcgaaaagctaaaaaattttattccagaatgttcggaaaagaacactgggatggggataaattactccttggggagaagacgagtctgtatctgcaacagacaaatgaaagaaggggtgcaaccaaggtatttgtagagttagaaactgaggatggttttgtccgctttttaagaaggtgggaaatgcttggtggacagctcggagaggttggaatgggaaatctacctctaaggcaggtttttgatttggatggccatatttgggttgtctcttgtgtacagaaatag

SEQ ID NO: 18950 - DNA, 366 bp, Chlamydia trachomatis
atggggaacttaattaaggaattgcaagacgagcagtgcagaactgatctcgttgatttctgtgttggtgacacgattcgtgtggctacaaatatttcagaaggaggcaaagagcgggttcaggtattccaaggaacagtaatggcccgtaaaggcggcggagcaggagaaacagtttctcttcatagggttgcttacggcgaaggaatggaaaaaagtttcctactcaatagtcctaaagtagtaagtattgaagttgtcaaacgcgggaaggtatcgcgtgcacgtctcttctatttgagaggaaaaacaggtaaagctgctaaagttaaagagcttattggtcctcgggctgctaagaaatag

SEQ ID NO: 18951 - DNA, 654 bp, Chlamydia trachomatis
atgaaatcaatcgttgagcaggagctgctttttagagagaagagtgtttttgaggatcaagctatcaaacaaggatactcacgaattgctggtgtagatgaggctgggagggggcctcttgcgggtcctgtcgttgctggggcttgcattctgcctggagggaagctttttttaggtattgatgacagtaagaagttatcccctaagcagagacggtatttgtatgaacttttgcttgaagatcccgaagtcacttgtggggtcggagttgtctctgttgagcgaatagatgagatcaatattttagaggctaccaaagaagctatggttcaggccatagcttctttgcggagcactcctgattttttattggttgacgggttgtttttgccgcatgagatcccctgtcttaaaattataaaaggagattctcgttccgtgtcaatagctgccgcatccataatagccaaagaatatcgtgatgaattgatgcggaagcttcattctgaatatcctgagtatgggtttgacaaacataaggggtatggaacggttgcgcatttgcaagctttaaaacagtttggcccttgcgtatatcacagaaagagtttctctcctgtaaaagagagtatccgagagggaatatgtcagtaa

SEQ ID NO: 18952 - DNA, 1653 bp, Chlamydia trachomatis
gtggcatcttctcgcattcttataacttctgctttgccttatgcaaatggacctcttcatttcggacacattacgggtgcttatttacctgcagatgtttatgcgcgttttcaaagattgctaggaaaagaagtattatacatttgtggttctgatgagtacggaatagcgattaccctaaatgcagaattagcaggtatggggtatcaagaatatgttgatatgtatcataagcttcataaagatacccttaagaagctcgggatttctgtagatttcttttccagaaccacaaaccctcatcatcccgctattgttcaggatttctatagaaatttgcaggacaaagggttgatggaaaaccttgtaacggatcagctttattctgaggaagaagaaaagtttttagctgaccgttatgttgtggggacctgtcctaagtgtgggtttgatcgggctaggggagacgaatgtcagcagtgtggagccgattacgaagccagagatttaaaagatcctcgttctaaattaactgggaaagctttgtctttgcgcgaaacagaacatgcttattttcatttagaacgcatgaaggaagaactgcttacctttgtagagggcatttatttacgtccccacatgcgtaactttgtaatagattacattaaaaatttgcgtcctcgagcagttactagagatttgtcttggggggtacccgttccaggtttagagaacaaagtattctatgtatggtttgatgctccaatcggatacattagtggaactatggattgggcagcgtctatcggagatccagacgcttggaagaaattttggttagatgacaaagtaacgtatactcagttcgttggtaaagataatacatctttccattcggttatttttcctgctatggaaatgggacagtcgcttccctataagaaagtcgatgctttagtgacatccgaatttttacttttggaaggattccaatttagtaaatcggaagggaatatcatagatatggatgcgtttttagaaacgtattccttggataaattacgctatgtgttagcggctattgctccagaaacttcggatagcgagtttgcattccaggagtttaaaactcgatgcaattctgatcttgtaggtaaattcggaaattttgtgaatcgagttgttgcttttgctgctaagaatggatgcaccgaactttctcatcctcaattagaacaacaagatttagagttcatagctgaagctcaaaaacttgctaaagaagctgctgatcattatcagcaatatagtttgcgtaaagcttgctcaacaattatggaattagctgccttggggaatggttatttcaacgatcaagctccatggaaactagctaaagaagatctttggaatcgagtgcgatccattctattttgtgcttgctattgccaaaaattgttagctcttatctcctatccaattatgcctgaaacagcgtggacaatttggggaatgattgctccaggttctttagatttgcgttctcaagatccggaragattgcagtcaatttggacagaagcctttttcgattactcagaagagagcttctcgttgaaagaacctgaattattgttcactgtagttgagtga

SEQ ID NO: 18953 - DNA, 2235 bp, Chlamydia trachomatis
atgggttgcgaagagaaactttccggtactttggaacttattcttccagaagattccctatccaatcaaatgggatatgctttcctacgagtcccttacaaaaattcattagtgaccatttgtggaaattcctctctttctctctttaaaattggagcttctgttgatttaacaggttattggagtgtggacgctagcggagctttagtttttcgctttactacagccaaaacgtacagtccttctttgggaatcatagcctaccttacttcccaaatcaaaggcgtgggtcccaaacttgctcagaaaattatagcaacctttggagaagaaactctttctgtgcttgattcatgtccctccaaacttgtagaagtagatggaatctctcttgcccgctgtgaggatttttctaggcaactccacgagcaaaaagacctacgtaatgccctactatttctgcaacgacatggaattgctattcactatggcttacgtctatataaaaaataccaaaaccaaactattgataaagtctgtcaagatccttttcttcttgcaaaggaaatgtatggtgtagggtttaaaactgcagatctcattgcctcatgtcttggagtcccactgaattctcctaatcgtatcgttgcaggaattcaatactctttagatgaactgcaagaagaaggccatacgtgctatccccttaatgatttcattgttctcgttgaaaaactactgaacgaagatactcctgaaaaaattgtacgtaaggaagaaatccttactcaagtgcattttctgtctcgacaaaaagctgtttatatcaaagaactagaacaggactcttatatctggtctagacagctttttcttgccgaacaacaaatcgctatagacatccgaagacttttattttcttcgaaacgcatccagcctatcaatacccaagaggcaattcttgaagtagaaaatcttctggatttaaagctggaagacaagcaaaaagaagctctctatgctagttcttcccaaaaaatccacatcatatctgggggaccaggaactgggaaaagtacaattacacgggctattctctcaatctttgaaaaaatctcgtctccccaaaaaatcatccttgcagctcccactggaaaagctgcaaaacgcatgacggaaatcacagggaaacgtacccaaacaatccattccttacttcaatatgattttaagactttgtcatttcgtaaaaatcatgaagatcctattgattgcgatctcgttattattgatgaatcaggaatgatcgatacgattctccttcaaagattccttgctgcattacctgatcatgctattcttatcctaattggagatgtgcaccagctacctagcgtaggcccaggcaatgtccttaaagacctcattctttcaaaccatattgaggtaacctacttaaccaagatcttccgtcagttacaaaattccaatatcattactaatgctcacaaagtaaaccagggggaattccccgtccttaacagctcttctggaaaaaaagactttttattctttcaaaaagaagatccagaagaggctataaagcatattatccatcttgtttctgatttcgttccgaaaaaattcggcatctttatgaaagacattcaagtccttgctcctatgaaaaaaggagtactagggattttcaatctgaataaagaattgaaagctgctctcaaccccaataaaccatttatccaagggaagtttcactccttctctacgggagatcgcgttatgcaaacgcgaaataactataataaagaagttttcaatggagatattgggtacatcgcctctatagattttgctaaaaaaagtttagtagcttgtgttgatggccgatatatttgttattcacaaacggaactaaacgacttaacaccagcttatgctacttccatacataagtatcagggaagtgaggcctcatgcgtgattctacctatccatacctctcattatgttatgctgtatagaaacctcctctatacagcaatcacgagagggaaaaaactggttattctagtaggaactaaaaaagctattgctatcgctgtacgcaatgataaagtacaacatcgatgcactggactacaacaatctgtacaaactctccttaataagcctattccgcttttctctcccacatacacgatttgcaaaccttag

SEQ ID NO: 18954 - DNA, 2001 bp, Chlamydia trachomatis
atgggatctttgtctattcacctcaccaccccgcttcccttaggagctcaaaaactctcttcggatcgttatcggttctcgctggttgctccccgtgcgcaacaagtcattttagtactactagatcctttttctgagattcatgaaatccctctttcttctacagatcatagaacaggagctatctggcatatagaaatttcaggaatttcaaacgaatggtcttacgcttataaacttagacaatcggattccgcttttcctaatttctctacaaatgcttatatcgctgatccgtactctaaaaacattttctctcctcagctattcggatcatctaaacaaccaaacgactacacttttagttacttaaaacaagaagattttgactgggaaggggatactcccttaaggcttcctaaagaaaactatttcatctatgaaatgcatgttcgttcgttcacgcaggacccttcttcccaagttacgcatccaggaaccttccttggcatcatagaaaaaattgatcatcttaaaaaactgggtgttaatgctgtcgaattgcttcctatttttgagtttgatgaaactattcacccatttaaaaataaagatttcccccacttatgtaattactgggggtactcttcgattaattttttctgtccttctcgccgttatacctatggaacagatccttgcgctcctgcacgcgaatttaaaactttagtaaaaacattacaccgcgcagggatagaagttatattagacgtagttttcaatcacacgggatttgaaggaacaagctgccctctcccttggatagatctcgagtcgtattatatggtcaatgacaatggagatcttcttaatttttccggatgtggaaatacagtaaatacaaatacacctatagccattaaatggattcttgatgctttgcgttactgggttcaagaaatgcatgtagatggatttcgttttgacttagctgcagtattttcaagagatttgcaaggagttccccgctctttgactcctattctgcaagcaatatcgtctgattccattctatcggaaaccaaacttattgcagagccttgggatgcagggggactctatcaactcgggcacttcccttctatatcaactaggtggagcgaatggaatgggtgctatcgcgaccacgtaaaagccttccttaatggggatcctcatcaggttagttctttcgcgtctcgaatatccggatctcgtgatatctatcctgcaggaaattctacgaattctattaattatatttgttctcatgacgggttcactctctatgatagcgttgcctataatcacaaacataatgaagagaacggagagaacaaccgtgacggaacttcggcaaattacagctataattttggatgtgagggagaaactactgacccaaacatttgccagttacgtgaacgacaaatgaaaaatttctttctcgccctctttttatcccagggaatccctatgataaaatctggcgatgaatatggtcatactgcttatggaaacaacaaccattggtgcttggatactaaaattaatcacttcctttgggatcgattagctgaaagaaaagaatttttttctttcctgtgtcaaatcattactttgcgtacaacgcatgctgaactattcaacacaaatttcttatcagaggagacaataacctggctaaattctcaagggttgcctagagaatggactccagaccactatctagcatttgaattaaaacatcccaattacagtctatttatagctttctacagtggaaatgagcgtattgagatcgctttacctaaactaagacaagaacatctagcctatgagaaaattgtggatagtacaactggcttcttttctcaaatcttatctcctaaactctcattagaaccatatagctctttggtggcaattagtagaaaaaagaaacctattgaacccaaataa

SEQ ID NO: 18955 - DNA, 483 bp, Chlamydia trachomatis
gtggtttttatgttgttcggatatttggtaggatttctagctgccgatcctgaagaaagaatgacgtcagggggtaaacgggttgttgttttacgtttaggcgttaaatcccgcgtggggtctaaagacgaaacagtatggtgccgatgcaatatctggaataatcgttatgataaaatgatcccttatctgaaaaaaggatcttcagtgattgttgcgggagagctttctgtagagagctatatggggagagacggttctcctcaagcttctatctctgtaagtgtagacacactgaagtttaattcagggtcttctcgtcctgaaagtcggggttcggatgaggggcgtcagcgatctaatgataatgtctctcttggatttgaaggagagagtttggatacagaaatcgcccttgataaggaagtatatgctggatttggagaggatcagcaatacgctagcgaggatgttcctttctaa

SEQ ID NO: 18956 - DNA, 1500 bp, Chlamydia trachomatis
gtggtgttgctctattctcaagcgagttgggataaacgatcgaaagcagatgcgcttgttcttcctttttggatgaagaacgttaaagctcaagaggctgcagttgttgatgaggactacaagcttgtctatcaaaacgcattacaaaatttttctggaaagaagggggaagctgtttttctttttggaaatgataaaaccaaagagcaaaaaatagttcttctagggttaggaaagagcgaggaggtttccgggactgcaattttggatgcctatgctcatgttactacagttttacgaaaagctaagtgtaagactgtaaatattttgttacctactatttcgcagttgcgtttctctgtagaagaatttttgacgaatctagctgcaggagttctttctcttaactataactatccgacttatcataaagtcgatgcctccttgcctttattagaaaaagtcactgtattggggattgttcctaaagtaggagacaagatttttagaaaagaagagagcttatttgaaggagtatatttaacacgagatttagtaaatacgaatgctgatgaggtaactccagaaaaacttgctgctgttgctaagggactagctggagaatttgctagtttggacgtcaagatccttgataggaaagccatattaaaagagaagatgggactattggccgcagtcgctaaggggtcggctgttgaacctcggtttattgttctggattatcaaggaaaacctaagtcaaaagatagaacggtgctcattggtaagggggtgacgtttgactccggtggattagatttgaagcctggtaaggcgatgatcactatgaaagaagatatggctggagcagctacagttttgggcattttttctgcattggcttctttagaactccctatcaatgtgacaggaatcattcctgctacggagaacgctataggatctgcagcttataagatgggagatgtctatgtgggcatgtctgggctgtctgtagaaattggaagcacagatgctgagggaagacttattttagcggatgcgattacctatgctttgaagtattgcgcccctacgcgaattattgattttgccactttgacaggagccatggtggtttctttaggagaagctgtagctggattttttgctaacaatgacgttttggctagggatttggcagaggctgcatcagagactggggaggccctttggagaatgcctttagtcgaaaaatatgaccgtgctcttcattcagatattgcagacatgaaaaatatcggaagcaaccgagcagggtccattactgcggctctgtttctacaacgttttcttgaagacaatccagtagcgtgggcacatttggatattgctggtaccgcttaccatgaaaaagaagagcttccttatcctaaatatgcaacaggatttggtgttcgttgtttaatttattatatgaacaagtttttatctaaatag

SEQ ID NO: 18957 - DNA, 714 bp, Chlamydia trachomatis
atgacgctatatcttcttcccaatactttaggtaacaaaagagtggaggaccttccttctattgtaggagagattgtccggaataaaattcagggattaatagtagaaagtgatcgtggcggtcgtttgttcctaagtttatggaaggttaaagatccgcataagttccctcttgctgtaatgagtaagaatgatacttctgttaaggcttgtgacttctatttagaacctattattaaaaagggagagtcttggggggttatttctgatgcaggattgccatgcattgctgatccaggggtaaggctcgttcaaagagctcggtcattaggagtgcctgttcaggctgtagctggtccttgttccattacgcaagcattaatgctttctggtctacctggtcagaatttcacatttcatggctatcttcctcaaaatcctaaagaaagagctcgttatgtacggggatgctcggggaaagcgcatacgcatatttgcatagagactccttatcgtaatcaatacacattcgaagctttgttagatcagcttccagctcatggagagctttgtgttgccattgatttgatgggggatcaggaatatgtctcgacacgtagcgttgctgtttggaatcaatcttctgatctagaagaggttcgcgaacgtttgaaaaaagtccccgctatttttctgttcgttaattctttttag

SEQ ID NO: 18958 - DNA, 2718 bp, Chlamydia trachomatis
atggattcagattttgccaaacatgtacattcattggatatcgattggatagagtctttgttagagcgatttgagaatcatgaatccttagacgcttcttggaagtatttctttgaaggctatcaagttgggaaaatagatggttgtccaaaagctgatgctggggatcaggctttcgaggcgttgcaagagaagaaagcgcaaagcctcttgatggtataccgttattacggttacttacaggggcaaatttctccaatagcttctgtggaagaatcctctttagttgcagaaaaagttcaggggtttgatttgcaggagatgattccttctttaggattactcccccaatctcatgttcgtgtcacagattttattcaggtattaaaggataaatattgtcgcagtatcgcggttgagacattgacatgctctcctgagatccaagagtacatttggcaacttatggaaggggagaagcctatcttaactaaagaagagttgctttctaggtatcaagcagtcaaaaaagctgtagcttttgaagagtttttgcaggttaaatttactggacagaagcgcttttccttagaaggaggggagagtttgatccccatgttggaacatcttattgcttttggagcaaagcaagggaccaatcgttatgtgatggggatgccgcatcgtggtcgattaaatgttttaggaaatatttttggtaaaccttatcgacagattttcatggaatttgaagacactcctcagataagaggtcttcaatcagtgggggatgtcaagtatcacaaggggtatgttgccgataggccaaaagagaatgtcatcatggccctattaccgaatcctagccacttagaagcagtagatcctgttgtagaaggagctgtagcagcaattcaacaccagggagaagcgggaaaagagcaatcttgtttagctgttttaatgcatggggatgctgctttatctggtcaggggattgtgtacgaaaccttccaattgagtgggattccgggatactccacggaagggaccttacatattgtagtgaacaaccagatagggtttaccgcacatccacgagaatctcgttctactccttactgcacagatatcgctaagatgatgggaatccctgtatttagggttaatggtgacgatgttttagcctgcctacaggttattgagtatgctatgcgtgttcgcaatcgctttcattgtgacgtgattattgatttatgttgttatcgcaaatatggtcacaatgaaagtgatgatccttctgttacagctccgttcctttacgaagaaattaagaagaaacagcccgtttcattgttatttaaagaaagattgattagttgccctgattggcaaatcagtccccaagagttggacaaaattgatgaagagatagagcatgttttaaaccaagaatttgcttctttgaaagattctggtgttgagcagttggataaaaaagaatgtatgcattgctctcgcatggcagtaggagagctgctggttgataatatagatacttctttggataaagattcgctatttgacgtaagtgcaaagctttgtgatattccggatcattttactcctcacactaagattcgctccttgctaaataagcgaatgagtatggccaatggggatattggttatgattggggaatggcagaagaaatcgcttttgcctctttgttacaagaaggtttttctttacgtttatctggacaggattctattcgaggaacctttagtcagaggcaacttgtttggactgacgttcggacaggcgatacattctcaccattatatcatctctcttcgagtcagggaagcgtggagttatataattccccattgtctgaatatgctgtattagggtttgaatatggctatgcgcaacaagcagaaaaaacgctggttatttgggaagctcagtttggagacttttctaatggagcgcagattatttttgaccagtatatttcttcaggaattcagaaatgggatttgcattccgatgtagtagtcttgttgcctcatggctatgagggacagggaccggaacattcttccgctcgtatagagcgttatcttcagcttgctgctgattggaattttcaagtagtgcttccatctactccagtgcaatatttccgtattcttcgggagcatacaaaacgggacttatctctgccgcttattgttttttctcctaaaatgttactcagacatccgcagtgtgtgagttccattgaagaatttgggatcaaagggggatttaaacccttcttggaagatgcgaaccctaattattatgcaaaagttctcgttttatgtagcggtaaaatttattacgactatcgtgcagcattgccaaaagattatgaatgcaattttgcttgcatacgagtagagagtctgtatccattgtatttagaagatttattggctctaataggcaagtatcctcaagttgaacattacgtatggttgcaagaagaaccccaaaatatgggagtattcagttattttgcgttagcaacggacgagattttccctagtaaattgcaatgtgtttgtcgtcctagaagtagttcgactgcaacaggatctgcaaatttgagccaaaaagaattatccacattaatggaaacattgttttctataggtagagagtag

SEQ ID NO: 18959 - DNA, 1806 bp, Chlamydia trachomatis
atggcagaatcctatctacaaaatggttttcgacgtaaaactctctcagtaaaagttgggaatctttttgttggtagcgaacactctatcaaaatacaatccatgacaacaaccgccacaacggatgtggagggaacagttcgacagatttacgctctacaggaatgtggatgcgaaatcgtccgtgttacagttcaaggattgaaagaagttggtgcgtgtgaacagataaaagaccgtctggttcaacaaaacgtaacaatccctcttgtagcagatattcatttctttccccaagcagctatacatgtcgcagatttcgtcgataaagtacgcattaaccctgggaattatgtagataaacgtaatatgttttctgggaagatctactctgatgagcaatacactcgtagcttagaacgcttattcgaaaagttctctccgctcgttgcaaaatgtaaacgcttaggaagagctatgcgcataggagtcaatcatggctccttatccgagcgcatcatgcaacgttatggagatacgattgagggtatggtcttctccgctttggaatacgctgaagtctgcgtcaatatggattatcataatattgtcttctcaatgaaatccagcaaccctaggaccatggtggcagcttatcgagctttggctcgcgagttagaccaaagaaagtggttatatcctttacacctaggagttacagaagctggatctggcatggatggaatgataaaatcctctgtaggaataggaaccttactctccgaaggacttggagacacgattcgttgttctctaaccggctccccaacccttgaaattccggtttgcttagatcttcttaaggaaacagcgaaatactccaaatctacaaagaaatacaatccttttgaaatctaccattcaaaacaacttactactcaaacaactccaaaacatttccccgtagagaatgtttatgggtttttggtcggattaaccaaggatcatttactaactatagaacctaatacgcttctccagtgcttgggagtcgatatcacaactggtaaaaaagatcttacatcacctgacggcgtggtcattccaaaatccatgcgttcttctgctatcgtttccgaaatagagaaacaccttcgtatcttttataaggaggatgctcctattcttaatgaaatgaatgaggaactttggctatccgacaaaacccttgccactccatttgtgtattttgaagtagaaagtatctatcaagcccgtcgcttttttgctttgcgacaaaactactctcaacctgtttgtttgagcttttctctaaaggctaatctttctaagaactctgcagcaatagatttgtcgattcgtttaggagccctacttctagatggtttaggatcctgcgtactattcaatttttctgatttaaaactcgctagaactttaggattttcgattttacaaagcgcaaacattcgatcgacaacggtagaatacatctcctgtcctggatgtggtcggacactctttgaccttcctgaggtttcccaacgtattaaagaaagaaccaagcatcttcctggaggattaaaaattgctgtcatgggttgtatcgttaatggaccgggagaaatggctgacgcagattttggctatgtaggctctaaacctggaatgatcgatctatacgtcaaacataaatgcgtcaaatcctatgttcctatggaaaatgctgaagaagaattaatccaattgctaaaagaacatggtgtatggaaagaacctgaatag

SEQ ID NO: 18960 - DNA, 1239 bp, Chlamydia trachomatis
atgcaacaattaatcgatagccttcagaaacggggtattctagataattcttccgcaggattagaaagtttaacagctcctgtttctgcctatttggggttcgatccaactgctccttccttgcatatagggcattggattggaatttgttttctgcgtcgattatcggcatatggaatcactcctattgctcttgttggaggagcaacagggatgataggggatccttctggtaaaagtgtggagcgctcgctattagatcaagagcaagtacttgataatagcaaaaagattgaggtggctcttgctaattatcttcccgacattcgcattgtgaacaatgccgattggttgggatcattgagtatggtggattttctaagagatattgggaagtatttccgcttaggctcgatgttagctaaggacgtagtgaaacagcgagtttattctgaagaaggaatcagttatacagagtttagttatttgttgctgcaatcctatgattttgctcatctttttaagcaccatggtgttgtattgcagtgtggaggaagtgaccagtggggaaacattacctctggaattgattatattcgtcggaaggggttaggacaagcttttggactcacctatcctttgttgactgatagcaaagggaaaaaaattgggaaaacggagtcgggaactgtttggttagatcctgaattaacgtctccttatgaattatttcagtatttcttacgtttatcggatcaagaaatccctaaaatagcgaggatgctcactttacttgatgatgatgaggttcttgctcttgataagcggttggagaatgatccgcaagcagtaaaaaggtatgtggcagaagtcattgttaaggatgtgcatggtgctgagggattagcacaggcactggctactacagagagcttttttgctaataaaggaaaaaatattaccgaatcggaactcgcggcgttagttcagtctggtgttggtatcaatgtagctcgagcagatgttatagggaaacgctggttagatgtcgttgtgcaattgggattttgttcttcaaaaggggaagctagaagactcattcagcagcgaggtttatatgtgaatcaggaacctttaatagatgaacagagtgtcctagatgggacatatctctgttttgatcggtatattcttctctctcaagggaaaaagaaaaaacaagttatagatcttaattag

SEQ ID NO: 18961 - DNA, 1440 bp, Chlamydia trachomatis
gtggctccagcagatattgggttgattggtttggccgtaatgggcaaaaaccttgtgttgaatatgattgatcacggttttgctgtctctgtctataaccgcagtccagagaaaacggaagagttcttgaaggagcatggagagaatatatctcttcaagggtttactgccatcgaagagttcgttcaatctttgaaacgtcctcggaagattatgattatgattaaggcgggagctcctgttgatgaaatgatttcctcgctacttccctttttagaagagggggatattctcattgatggggggaatagctattatctggattctgagcgtcgctacattgatctcaaaaagaaagggattttatttgtcggcatgggggtctctggaggagaagaaggggctcgtaaaggaccttctattatgcccggagggaatattgaagcttggcctgttatcgctcctatttttcaatcaatagctgctcaggttgatggacagccttgttgctcttggattggtacaggaggagcgggtcattttgttaaagccgttcataatggtatagaatatggggatattcagttaatctgtgaaacctatgagattcttaaatctcggcttgatttgtctcttgaacagataggaaacatcttctttgagtggaatcaaacggatttaaatagctatcttatgggagcttcagcagctgttttaacagcaaaagatgagaatggagttgctgtggcttcgactattttggatgtagctgggcagaaaggtactgggcgttgggttgcggaagatgcgattaaggcaggtgttcctatgtcgcttatcatagagtctgttttagctcgttatctctcggcttggaaggaggtgcgtagacaagctgctcgagaattccctgtagcttctcttctttatcaaccttcgcaagaggcctcggtcttgatcgaagatgcaagagaagctctttacgcagcaaagattattagttatgcccaaggcttcatgctattaaagcagatctctgaagaaaggaattgggatcttaatttaggagagcttgctttgatatggcgcggcggatgtattatccaaagtgctttcttggataaaattcaccaagggtttgagagttgcccggatgcacactctttgatgttacaagattatttcaaaaacgttttgttgaactcagaaactggttttcgccgagctattttacatgctgttggagctggtgtagcaattccttgtttagcttctgccttagctttttacgatgggtatcggacggaaaactctccattattcttagttcaaggattaagagattattttggggctcatggttatgagcggcaagatcgtcctcgcggggagttttatcatacggattggttaggaagcaaaaacgcttcccggatgtaa

SEQ ID NO: 18962 - DNA, 1590 bp, Chlamydia trachomatis
atgactcaaaccgcggaaaaaccttttggaaaattgcgctctttcctttggccgatacacatgcatgagctaaagaaagttctgccaatgttcctaatgttcttctgtatttcattcaattacacgattttgagagatacaaaagacactcttatcgtcacagcaccaggctctggagcagaagccattccctttattaagttgtggctggttgttccttctgctgttgtgttcatgcttatctacgcaaagttaagcaatattttgagcaaacaggctcttttctatgcagtgctctctccattcgttgtgttttttgcactgttccctttggtgatttacccatatcgtcatatacttcacccaacagacttcgctgatacactacaggccattctcccttctgggttcttaggcttcattgcgatgctacgcaactggacttttgcagcgttttatgttctttccgaactttggggaagtgtaatgctttcgctaatgttctggggatttgcaaatgaaatcactaaaattagcgaagctaaacgtttctacgctcttttcggagttggagctaacgtagctctcttaatttccggtccagctattgtttggtcttctaaattacgcgcaagcttaggtgaaggcgtagacccatggggagttactctttacttcttaatggctatgttcctgtgttcttgtgccattatcgctgcctgctactggtggatgaatcgttacgttcttactgatcctagattctataacccagcagagctaaaagctaaaaaatctaaacctaagatgagcatgggcgagagcttctcttatctgttaagatccccttacatgcttcttctagccttgctagttatttgctacggagtttgcatcaaccttgttgaagtaacttggaagagccagctcaaaatgcaattccctaatccaaatgaatacagcgcattcatgggaacattctctttctggacaggggttgtatccgtattcgttatgctgttcattggtggtaatgttatccgtcgttttggctggttaacaggcgccttagttacacctgtcatggtcctcgtaacaggagcgatcttctttgctctcgttatcttcagagatcatgcaacaggattggttgcagctttgggaacaactcctttaatgctagcggttgttgttggagccgtccaaaatattctttccaaatcgactaaatatgctctctttgatgcaactaaagagatggcttacatcccattggatcaagagcaaaaagttaaaggaaaagccgctattgacgttgttgctgctagatttggtaaatctgggggatctttgatccaacaaggactcctagttgtttgcggaagcatcagtgcgatgactccattcctagcggtagctctctttgcaattattatggtttggttaacatctgcaaccaaacttaataaattgttcttagctgcttcagctgctaaagaacaagagctggcagaggccacagcagcagctgagaaggaagcttctcctgcagcgaaagaagtctctcctgctatagagggtgtttcctaa

SEQ ID NO: 18963 - DNA, 780 bp, Chlamydia trachomatis
ttgaatagggataatacgattgcttgggctgtagatgatctgtgtgttaactatgatcactcagacgttttatgccatattgccttttctttgccttctggggcgatggcggctataattggccctaacggggcagggaagagtactctacttaaggcctccttaggcctgattcgtgcctcttcaggccaaagcttgttctttggccaaaaatttgctaaagtgcatcaaagaatagcatatatgcctcaaagagctagtgtggattgggattttccaatgactgttcttgacctcgtattaatggggtgttacggctacaaaggtatgtggaatcgtatttctacaggtgatcgtcgcgaggctatgaatattttagaacgagttgggttggcagattttgcaaataggcagattgggaagctttctggtggacagcaacaaagagcttttttagcgcgctcattaatgcaaaaagctgatttataccttatggacgagcttttctcagctatcgatatggcttcctatcgtatggtagtagatgttttacaggatctaaaaaaagaaggtaaaactatcgtagtcattcatcatgacttgagtaatgttcggcagctatttgatcatgttattttattaaataaacatcttgtgtgctctggcagtgtagaaaaatgcctgacaaaagaagctatttttcaggcttatgggtgtgaacttgagcttttagattacacacttaagttgtctaggggaaagtatcaaggatcatgttag

SEQ ID NO: 18964 - DNA, 1101 bp, Chlamydia trachomatis
atgaaattcgttatctcccgaaatgagttaggaaatctgattaaaaaggttcaaaacgttgttccgcaaagcacaccaattcccgtgctaacccatgtactcatagagagttgcaacgatgaattagtgttcactgctacagatttaacagtcagtactcgttgtgttgttaaagcgaaagtatatgaatctgggtctgtaactataccttctcgacgttttttccaactcattcgagagttaacagaagctaacattgaagtggcggctaattctggagagatggcaacgattacctctggatcttcgtgttttagactgctaagtatggggaaggaagatttccccatgcttcctgacatgcaaaacgctcttcgtttcacccttgattctgagcaattaaaggatatgttccaaagaacatcttttgcagtatctcgagaagagagtcgctacgtacttaccggggttttgctttccatctctaacggcaccatgactgttgtcggaaccgatggtaagcgtttagcaaaaatcgacactaatatttctttggatccaagcttttcaggagactatattattcctatcaaggcggttgaagagatcattcgcatggcttcggaagatgtccaatcaacgatctttttagatcaaactaaaattgctgtagaatgtggaaacactctgttagtgactaaactcctttctggagaattcccagacttttcccctgtgatttctacacagagtagcgttcaattaaaccttcatcgtgaagagcttatttcccttcttaagcaagtagctcttttcacaaacgagtcctcccattctgtaaaatttagcttttctccaggagaacttactcttacagcaaactgtacaaaagtcggagaagggaaggtgagtatggccgtgaattacacgggtgaaactctagaaatagccttcaatcctttcttctttttagacatactgaaacacagccgtgatgaacttgttcaattaggaatctccgattcctataatcctgggattattacagattccacacgcagtttgtttgtcattatgcctatgagattacatgacgattaa

SEQ ID NO: 18965 - DNA, 456 bp, Chlamydia trachomatis
atgagcgttaaggaaattgtttcgaatcgcaaagcctttcacaactatgaagtgttagagacgtttgacgctgggatcgttttaactggaacagaaatcaaatctttacgagatcatggtggaaatttaggggatgcttacgtaacgatctcaaaaggagaagcttggctactacagtcaagtatagcgccttatcgctttgggaatattaacaaccatgaagagcgtcgtaagcgcaagcttcttttacataagtatgaacttcaaaagttggattcacgagtttctcaaaaagggttaacgatcatacctcttagcttcttcttctctaaaggttttgttaaagtgcgtattggctgttgtcgagggaaaaaatcccacgataagcgtcaggcactcattgaacgagaaaagaatcgtgaattagctgccgctatgaagcgttcttatcggtaa

SEQ ID NO: 18966 - DNA, 270 bp, Chlamydia trachomatis
atgtcgaagaaatgtgctcttacaggaagaaagcctcgtcgcggatatagctacgctatccgagggatttctaaaaagaaaaaaggaatcggtttgaaagttacaggaagaacaaaacgtcgcttcctccctaatatgatgactaaaagactttggtctacagaagaaaatcgcttccttaaactcaaaatttccgcagcagctttacgtctggttgataaattgggcttggataaggttgttgcccgagctaaaagcaaaggtttttag

SEQ ID NO: 18967 - DNA, 1083 bp, Chlamydia trachomatis
atgggcgaaaaaacagaaaaggcgacccccaagcgtcttcgagatgctagaaaaaaggggcaggtagccaaatctcaagattttccttctgcgattacgttcatagtgtccatgttcatgacgttttctctgtcttcattttttgctgaacatttaggagggttcttagtatccattttccgaacggctccccaacaacatgatcctcgccttgccgtttattatttgaaaaactgcttaatgctaattcttacagtctcacttcctctactaggagcagtaggctttgtaggattattaataggatttttagttgttggtcctactttctccacagaagttttcaaaccagatttaaaaaaattcaatccgattgaaaaccttaaacaaaaattcaaattaaaaacgtttattgaattacttaaatctatttttaaaatctctggagcagcattaattctctatattgttctaaaaaatcgtgtagaacttgttattgaaacagctggtgttccccctttagttacagcgcaaatattcaaagagattttatacaaggctgttacttccattggcatgtttttccttgttgttgcggtaatagaccttgtgtatcaacgacacagttttgctaaagaactgaagatggaaaagttcgaagttaaacaggaattcaaagatacagaagggaacccagaaattaaggggcgccgtcgtcaaattgcgcaagaaattgcctatgaagacacttcctctcaaattaaacatgcgagcgctgtcgtatctaaccctaaggatatagccgttgccatcggttatatgcctgaaaaatacaaagctccatggattatagccatgggagtaaacttaagagcacgaagaattattgcggaagctgagaagtatggagttcccataatgcggaacgtccccttagcacaccagcttttagatgaaggaaaagagttgaagtttattcctgagaccacatatgaagcggttggggaaatccttctttacattacttctcttaatgcgcaaaacattgagaataaaaacattaaccaattcgataatctgtaa

SEQ ID NO: 18968 - DNA, 1095 bp, Chlamydia trachomatis
atgggacaaacagagtgcggaatagtagggcttcctaatgtaggaaaatcggggttatttaacgcgttaacaggtgcgcaggttgcttcttgtaattatcctttttgcacgattgatcctaatgttggtatcgttccagttgttgattctaggttagagattttggctcgtattagtcagagtcacaagattatctatgcagatatgaaatttgtggacattgcaggactagtaaaaggtgctgcaagtggcgctgggttagggaaccgctttttatcgcatattcgagaaactcatgcaattgctcatgttgtgcgctgttttgataatgatgatgtgacgcacgtatctggaaagatcgatccagaggaagatattgctgttatcaacctggaactgatactagcagatttttcttctgctactagtgttcgtgataaacttagcaaacaggctaaagggaagaaagatataggacaattaatccctattttagatcgagtaattgaacatttagaatcgggaaaccctgttcgaacgctttctctttcttctgaagaaggaagtttattgaaaccctatccgttccttacaggaaagcctatgctttatattgctaacattgacgaagattccttaacagatttagacaatccctatgtccagaaagtacggaggattgcccaacaagaaggggctaacgtcgtgcctatttgtgtaaaattagaagaagagattctgtctcttcctccggaagagcggcaagactttttacatagtttgggcttacaagaatctgggctaaatcgtttagtagcttctgcatatcagaccttagggctaatttcttatttcactacaggtccacaagagacgagagcttggacaatttctaagggagcaactgctgcagaagctgcaggagaaattcattcagatattcaaaaaggatttattcgtgctgaggtggtgactttagaagatatcgttacctataatggaagggctggagctcgagaagcaggtaaattacgagcagagggtcgggactatattgttcaggacggagatatcatgctgtttctgcataactaa

SEQ ID NO: 18969 - DNA, 888 bp, Chlamydia trachomatis
atggacttatcctacagcctactcccgtcctctgatcctatagaatctattacgataggcttttttgatggatgtcatttaggacatcaagcattgctttcttccttgaaacaatttccaggaaaatctggtgtcattacatttagcgagcatcctaaacacactttatcgaactctcctccagaaactattacttctcttgaagagcgcattcagttgctaacgaattgtcacattgattatctagcaattcttccttttaaccaagagatagccaatgaagaggctgaaatgtttattctatctctttatgagtcgctacatccatcaagaattatctttgggtatgattctcgattaggaaggggtggtcttggaaatgcacaaacattaaagccttttgcttcttctttagggatatcattagaagaaatccctcccttaagcatcaacggaaccattgtatccagtagaaaaattcgtcaatttcttcgagaaggggaccttctttccgcagaaaaatttctaggccgacctttttcttataccggaacagtcactcgaggccaaggaataggttcttctttaggatacgctactattaatcttaatcttactcgttcccttttacctttaggagtctacagctgctccataaaaattgggcgtgaaagctatttaggagtaatgaatctaggtatggcacctaccgtacagagaaaccaactttgtctagaagcgcacattctcgacctttcagctgatctttacgaacagcgagttactgtcatccctaagcagttccttagagaagaaaaaactttttcttctcaaaaggaacttgctcttgctattcaagaggatatacgcaaagctcgtttaagttaa

SEQ ID NO: 18970 - DNA, 726 bp, Chlamydia trachomatis
atggaacttgcgacagaacctattgaaggcgttttgctggtagataaaccacaagggaggacttcgtttagtcttattcgttctcttgttaggttaataggcgtgaagaaaattggccatgccggaactcttgatccttttgctacaggcgttatggttatgctaatagggcggaaattcacccgactgtctgatattatgctatttgaagacaaagaatattctgccgtagcacatttaggtactactacagacacttatgattgcgatgggaaaattgtaggtcgctctaaaaaagttccaactatggaagaagtgttggagtgcacaagctatttccaaggagaaattcagcaagtccctcctatgttctctgctaaaaaggtacaagggaagaaattgtacgaatatgctagacaaggattgtctatagagcgtagctttgcaacagtaagagtggatctccgtttaattaagtacgagtatcctcgcctacatttcgtagtgaaatgcagcaagggaacctatatccggagcattgctcatgaactcggcaacatgttaggttgtggagcttatttggaagagcttcgccgattacgcagcggaaatttttctattgatcagtgtatcgatggaaatcatctggatgaacctgggtttgatgtgtttcctcacttacgtgatgcaaatggacttatcctacagcctactcccgtcctctga

SEQ ID NO: 18971 - DNA, 2691 bp, Chlamydia trachomatis
atggagcatgcaaagttgacgaaaaacctaaagttgaagattaagaacgcacagttaacgaaggctgctggcttagataagctgaaacagaaactagctcaagccggatcttctgacaccaaaaattctccagtaagtaaagctcaaaccaaagaaaagagctccaaaaagactgctggcacaacagcttctgcgcctgaaatagaatcgggcgcaacggaatctactgcgcgaagaattcgtgcgaaggatcgctcttcctttgctgcagaagagccttctacaacagtagctttgcccggcgatgcatcacatttgactttagatgcgctcccttcagcagactctacagaacccctttctaactcttcacaagaaaaaattgtagaggatgcggtagaaacacctaactctccacaagaagatgggaaggaacttcaagaagaagtagccaatgagcagcctgcgcgcaatgaggaaactcccattattagaacaagaacggagcccaagagcgttgtttctattaaacccaaatttggtcctacagggaagcatatcaatcatttgctagccaaaactttcaaagctccggctaaagagacaaaggctgctgctccagcagaagaaactactcaacagactcggccttcagtcgaaacagcttctaccaagcagcagcagccttctggaacaaatactcgtccagctcagtccgctcctgcgtatcgtagggaatccactaacaacaataataactcaaagcgagggcccgatcgcgatcgcactaagagatctgatgaaaacgtcaaagcattcacaggtcgcgaccgttatggattaaacgagggatcttcagaagaagataagtggcgcaaaaaacgtgttcataaaacgaaaaagcaatccgaggaacacgttgtacaatgtccttcgcatattaagatcgcacttcctattacggttaaagatctggctgcggagatgaagttaaaagcttcggagcttatccaaaaacttttcatccatggtatgacctacgtagtaaacgatgttttggacagccagactgtcgtgcaatacattgggttagagtttggatgtactattgaaatagattcttcagagaaagagaagctttgtttagtagagaacactgttcgagatgaaattaacgaaacaaatccacagaagcttgttatccgctcccctatcgtagcttttatgggacacgtggaccacgggaaaacaactctaatcgatgctttgcgacaaagtaacatggctgcttcagaagcaggcgcaattacgcaacatatgggagcctttaaatgctctactccagttggagaaattactgttcttgatactcctggtcacgaggctttctctgctatgcgagctcgaggcgcagaggtttgcgacattgtagtgttggtggtcgccggagatgaagggattaaagaacaaactgtcgaagccattgagcatgcaaaagctgcaaatattaccatcgttgtcgcaattaacaagtgtgataaaccaaacttcaatgaggaaactgtttatcgtcaactagctgaactcaatcttcttcctgaagcttggggaggatccattgcgactattaatacctctgctaaaacaggcgaaggattacaagaccttcttgaaatgttagcattacaagcagaagttttggaactgaaggccgacccatctgccagagcacgaggacttgttatcgagtccgagctgcacaaaggattgggagctgttgctaccgtacttgttcaaaacggaactcttcatctaggagaagctctggtatttaacgattgttacggtaagataaagactatgcataatgagcataatcaactcttacaatcagcctcaccttctaccccagttcttattacagggttatcagcgattcctaaagctggcgatcctttcatagttgtgaaaaatgaaaaagtcgcaaaagaaattattagtgcccgtcttgcaggtcaacaaaggtccgcagctttacagaagaaacgacctaatttcgatgctgtattgcagaataagaagactttgaaattaatcatcaaggctgatgttcaaggttctatagaggccctggcgcattcaatacttaacatccgttcggaaaaagtggatgttgaaattttatccagtggagttggagatatttcagaatccgatatccgtttggcatccgcctctaaagcaaccgttattggtttccacacgagcgtagagagtcatgccgagtctctgattaagagcttgaatgttaaggtctgtctatttgatatcatttaccatgctgtggatgctatcaaagaaattatgacaggtcttctggatcctatagcagaagagaaaaacttgggtgcagcggaaattaaagcgacctttaaatcttcccagttgggcacaatttacggctgcctagttacagaaggaaccatggtacgcaatcagaaagttcgtattattagagacaaagaggttctttggaaatgctctctctcctccttaaaacgccttaaagaagacgttaaggaagtgaagaagggaatggaatgtggtattctattagataactaccaacaagcacaaattggcgatacattgcagtgctacgaggtcatttatcacccacaaaaattgtag

SEQ ID NO: 18972 - DNA, 1305 bp, Chlamydia trachomatis
atgaacaaggatcttgtggctatttttgactacatggaaagagagaaaggtattcaacgctctacaatagtaggagctattgaatccgctctgaaaattgctgcgaaaaagactcttagagatgacgcgaatgtgtccgtgagtatcaatcctcgcaccggagacatagaagttttttgtgaaaaacagatcgttgaaaaatgccaaaatccaagtaaggaaattcccttagataaagcccgtgaatatgatccagattgtcaaatcgggcaatatatggatgttccttttgtctctgatcaatttggaagaattgcagctcatgcagctcgccaaattatcggtcagaaacttcgtcatgccgaacgcgatgtaatttatgaagagtatcgccatcgaaaaaatgaaatcatttcgggggtgattaaaagtttctctcgcggatcaaacttagtggttgatttggggaaagtagaggggttacttcccgctcgcttttatcctaaaacggaaaaacataaagtaggcgataagatttatgcgcttctttacgaagtacaggaatctgaaaatggcggagctgaagttattctcagtagaagtcacccagaatttgtaaaacaattattcatgcaagaagtcccagaattagaagaagggtctgttgagattgtgaaaattgcaagagaagctggctatcgaacaaaaatggcagtgcgctcttcttcccctcaaacagatgctgtaggggcttttgtaggtatgcgtggctctcgcatcaaaaacatcattcgagaattaaatgacgaaaaaatagacgttgtaaattattcccctgtatcgacagaattgttacaaaatttgctctatcctgtagagattcaaaagatcgctattttagaagacgataaagttatcgctattatcgtccaagattcggactatgcaactgttattggtaaacggggtatcaatgctcgtctaatcagtcaaattttgggctatgaacttgaagtccaaagaatgagtgaatacaacaagctattagaaattcaacgcttacagctagctgaattcgaagatcctcgattggatcagcctttagaagtggaaggaattaatacgttaatagtgcagaacttagagcacgcaggatacgacacgattaggaaaatattgctggctagtgctagcgaattggcttctgttccaggaattagtttagagttagcttacaaaatcctcgaacaggtcagcaaatatggagcatgcaaagttgacgaaaaacctaaagttgaagattaa

SEQ ID NO: 18973 - DNA, 1611 bp, Chlamydia trachomatis
atgcatggcttcaccgcgacagaagaagaacccactagcgaagtacagcctggtgcgatcctaaaaggtacagttgtcgacataagcaaagattttgtcgtggttgacgttggattaaaatctgaaggagtcatcccgatgtcggagtttattgactcttcagaaggtttgtccgtcggagctgaggttgaagtttatttggaccaaactgaagacgaagaaggaaaggtcgtcctgtccagagaaaaggcaacaagacaacgtcaatgggaatacattcttgctcattgtgaagaaggctcgattgttaaaggacaaatcactcgaaaagtcaaaggtggcttaattgttgatattggtatggaagctttccttccagggtctcaaatcgacaataaaaaaattaaaaacttggatgactacgtagggaaagtttgtgaattcaagattctcaaaattaacgtagatcgcagaaatgttgttgtgtctagaagagaacttctggaagctgaacgcatttctaagaaagctgagttgattgagcaaatcacaatcggagaacgtcgtaaaggtatcgtcaaaaacattactgactttggagttttcttagatctcgatggtatcgatgggctgcttcatatcacagatatgacatggaaacgtatccgtcacccttctgaaatggttgaactcaaccaagaattggaagtaatcatcctcagcgtggataaagagaaaggtcgtgtagctcttggtctgaagcaaaaagaacacaatccttgggaagatatcgagaagaaataccctccaggaaaacgtgttcgtggaaaaattgttaaacttctcccttatggagcatttattgaaattgaggaaggtattgaaggcctcattcacgtttcagagatgtcttgggttaaaaacatcgttgatcctaacgaagttgtaaataaaggtgatgaggtcgaagtagtcgttctctctattcaaaaagatgaagggaaaatttctctcggcttgaaacaaacagaacataatccttgggataatattgaagaaaaatatcctattggattgcgtgtgacagcagaaattaaaaatctaacaaattatggagctttcgttgaattagagcccggaatcgaaggattaattcacatttctgatatgagttggattaaaaaggtttctcatccttccgaacttttcaaaaaaggaaatactgtcgaggctgttattttgtccgtagacaaggaaagtaaaaaaatcactttaggcgtaaaacaattgactcctaatccatgggatgagattgaagctatgttccctgtcggaagcgatatctccggtatagtaactaaaattacagctttcggagctttcgttgaattgcaaaatggtatcgaaggactgattcacgtatccaaactttctgataaaccttttgctaaaattgaagatattctctctatcggagacaaggtttctgctaaggttatcaagctagatcctgatcacaagaaagtttctctttccattaaagagttccttgctcatggaggacatgctggtcaagatgcagaagaagaaacatcttctaacagagactag
